United States Patent Application Publication US 2014/0004565 A1 - sequence listing, part 110

SEQ ID NO: 2748282 - RNA, 19 nt, Artificial Sequence
  Description of Artificial Sequence: Synthetic oligonucleotide
guuuauacagaauggcucc

SEQ ID NO: 2748283 - RNA, 19 nt, Artificial Sequence
  Description of Artificial Sequence: Synthetic oligonucleotide
ugccuugagaucauggucc

SEQ ID NO: 2748284 - RNA, 19 nt, Artificial Sequence
  Description of Artificial Sequence: Synthetic oligonucleotide
ucgcagaagguacaggacg

SEQ ID NO: 2748285 - RNA, 19 nt, Artificial Sequence
  Description of Artificial Sequence: Synthetic oligonucleotide
auuuugguugccuugagau

SEQ ID NO: 2748286 - RNA, 19 nt, Artificial Sequence
  Description of Artificial Sequence: Synthetic oligonucleotide
ucggguuuauacagaaugg

SEQ ID NO: 2748287 - RNA, 19 nt, Artificial Sequence
  Description of Artificial Sequence: Synthetic oligonucleotide
aucaugguccacugaaccc

SEQ ID NO: 2748288 - RNA, 19 nt, Artificial Sequence
  Description of Artificial Sequence: Synthetic oligonucleotide
uuuguaucagucuauccaa

SEQ ID NO: 2748289 - RNA, 19 nt, Artificial Sequence
  Description of Artificial Sequence: Synthetic oligonucleotide
auccaaguuagcuuucaac

SEQ ID NO: 2748290 - RNA, 19 nt, Artificial Sequence
  Description of Artificial Sequence: Synthetic oligonucleotide
agagcagcaauccuaaggu

SEQ ID NO: 2748291 - RNA, 19 nt, Artificial Sequence
  Description of Artificial Sequence: Synthetic oligonucleotide
ucgauccacagcaaggucc

SEQ ID NO: 2748292 - RNA, 19 nt, Artificial Sequence
  Description of Artificial Sequence: Synthetic oligonucleotide
agaucuugggucccuauuc

SEQ ID NO: 2748293 - RNA, 19 nt, Artificial Sequence
  Description of Artificial Sequence: Synthetic oligonucleotide
acuugcuucagcaagagca

SEQ ID NO: 2748294 - RNA, 19 nt, Artificial Sequence
  Description of Artificial Sequence: Synthetic oligonucleotide
aggaaucggguuuauacag

SEQ ID NO: 2748295 - RNA, 19 nt, Artificial Sequence
  Description of Artificial Sequence: Synthetic oligonucleotide
uggaucuccacauaagggu

SEQ ID NO: 2748296 - RNA, 19 nt, Artificial Sequence
  Description of Artificial Sequence: Synthetic oligonucleotide
cuugggucccuauucaagg

SEQ ID NO: 2748297 - RNA, 19 nt, Artificial Sequence
  Description of Artificial Sequence: Synthetic oligonucleotide
uaaugucaaggaagcaagg

SEQ ID NO: 2748298 - RNA, 19 nt, Artificial Sequence
  Description of Artificial Sequence: Synthetic oligonucleotide
ucaaccgugauuccagcug

SEQ ID NO: 2748299 - RNA, 19 nt, Artificial Sequence
  Description of Artificial Sequence: Synthetic oligonucleotide
guaaugucaaggaagcaag

SEQ ID NO: 2748300 - RNA, 19 nt, Artificial Sequence
  Description of Artificial Sequence: Synthetic oligonucleotide
caauacaaacacuugcuuc

SEQ ID NO: 2748301 - RNA, 19 nt, Artificial Sequence
  Description of Artificial Sequence: Synthetic oligonucleotide
auucgcagaagguacagga

SEQ ID NO: 2748302 - RNA, 19 nt, Artificial Sequence
  Description of Artificial Sequence: Synthetic oligonucleotide
uauucaaggcuguggaucu

SEQ ID NO: 2748303 - RNA, 19 nt, Artificial Sequence
  Description of Artificial Sequence: Synthetic oligonucleotide
aaggcuguggaucuccaca

SEQ ID NO: 2748304 - RNA, 19 nt, Artificial Sequence
  Description of Artificial Sequence: Synthetic oligonucleotide
cuuucaaccgugauuccag

SEQ ID NO: 2748305 - RNA, 19 nt, Artificial Sequence
  Description of Artificial Sequence: Synthetic oligonucleotide
uaucagucuauccaaguua

SEQ ID NO: 2748306 - RNA, 19 nt, Artificial Sequence
  Description of Artificial Sequence: Synthetic oligonucleotide
agaaagcaggggcaacugc

SEQ ID NO: 2748307 - RNA, 19 nt, Artificial Sequence
  Description of Artificial Sequence: Synthetic oligonucleotide
ucggcggugaauucugugg

SEQ ID NO: 2748308 - RNA, 19 nt, Artificial Sequence
  Description of Artificial Sequence: Synthetic oligonucleotide
uagcuuucaaccgugauuc

SEQ ID NO: 2748309 - RNA, 19 nt, Artificial Sequence
  Description of Artificial Sequence: Synthetic oligonucleotide
aaugucaaggaagcaagga

SEQ ID NO: 2748310 - RNA, 19 nt, Artificial Sequence
  Description of Artificial Sequence: Synthetic oligonucleotide
agcugcccaauacaaacac

SEQ ID NO: 2748311 - RNA, 19 nt, Artificial Sequence
  Description of Artificial Sequence: Synthetic oligonucleotide
aacugcacuugcuggaaug

SEQ ID NO: 2748312 - RNA, 19 nt, Artificial Sequence
  Description of Artificial Sequence: Synthetic oligonucleotide
gaauucuguggauucgcag

SEQ ID NO: 2748313 - RNA, 19 nt, Artificial Sequence
  Description of Artificial Sequence: Synthetic oligonucleotide
uuagcuuucaaccgugauu

SEQ ID NO: 2748314 - RNA, 19 nt, Artificial Sequence
  Description of Artificial Sequence: Synthetic oligonucleotide
cuugcuggaaugucucugg

SEQ ID NO: 2748315 - RNA, 19 nt, Artificial Sequence
  Description of Artificial Sequence: Synthetic oligonucleotide
cuaagguccagcaguuucc

SEQ ID NO: 2748316 - RNA, 19 nt, Artificial Sequence
  Description of Artificial Sequence: Synthetic oligonucleotide
aguaaugucaaggaagcaa

SEQ ID NO: 2748317 - RNA, 19 nt, Artificial Sequence
  Description of Artificial Sequence: Synthetic oligonucleotide
ugaaccccagagaucuugg

SEQ ID NO: 2748318 - RNA, 19 nt, Artificial Sequence
  Description of Artificial Sequence: Synthetic oligonucleotide
guuacagagaaagcagggg

SEQ ID NO: 2748319 - RNA, 19 nt, Artificial Sequence
  Description of Artificial Sequence: Synthetic oligonucleotide
uuguucgauccacagcaag

SEQ ID NO: 2748320 - RNA, 19 nt, Artificial Sequence
  Description of Artificial Sequence: Synthetic oligonucleotide
uuguaucagucuauccaag

SEQ ID NO: 2748321 - RNA, 19 nt, Artificial Sequence
  Description of Artificial Sequence: Synthetic oligonucleotide
gguccaauggagcugaggc

SEQ ID NO: 2748322 - RNA, 19 nt, Artificial Sequence
  Description of Artificial Sequence: Synthetic oligonucleotide
cuugcuucagcaagagcag

SEQ ID NO: 2748323 - RNA, 19 nt, Artificial Sequence
  Description of Artificial Sequence: Synthetic oligonucleotide
ugcacuugcuggaaugucu

SEQ ID NO: 2748324 - RNA, 19 nt, Artificial Sequence
  Description of Artificial Sequence: Synthetic oligonucleotide
gauuccagcugcccaauac

SEQ ID NO: 2748325 - RNA, 19 nt, Artificial Sequence
  Description of Artificial Sequence: Synthetic oligonucleotide
gacaccucccugccgaagg

SEQ ID NO: 2748326 - RNA, 19 nt, Artificial Sequence
  Description of Artificial Sequence: Synthetic oligonucleotide
auuggcaccacuuguucga

SEQ ID NO: 2748327 - RNA, 19 nt, Artificial Sequence
  Description of Artificial Sequence: Synthetic oligonucleotide
aaggagagacggaaccagc

SEQ ID NO: 2748328 - RNA, 19 nt, Artificial Sequence
  Description of Artificial Sequence: Synthetic oligonucleotide
aaagcaggggcaacugcac

SEQ ID NO: 2748329 - RNA, 19 nt, Artificial Sequence
  Description of Artificial Sequence: Synthetic oligonucleotide
aaccccagagaucuugggu

SEQ ID NO: 2748330 - RNA, 19 nt, Artificial Sequence
  Description of Artificial Sequence: Synthetic oligonucleotide
gagaucaugguccacugaa

SEQ ID NO: 2748331 - RNA, 19 nt, Artificial Sequence
  Description of Artificial Sequence: Synthetic oligonucleotide
ugaauucuguggauucgca

SEQ ID NO: 2748332 - RNA, 19 nt, Artificial Sequence
  Description of Artificial Sequence: Synthetic oligonucleotide
aucagucuauccaaguuag

SEQ ID NO: 2748333 - RNA, 19 nt, Artificial Sequence
  Description of Artificial Sequence: Synthetic oligonucleotide
cauuggcaccacuuguucg

SEQ ID NO: 2748334 - RNA, 19 nt, Artificial Sequence
  Description of Artificial Sequence: Synthetic oligonucleotide
agcaagguccaauggagcu

SEQ ID NO: 2748335 - RNA, 19 nt, Artificial Sequence
  Description of Artificial Sequence: Synthetic oligonucleotide
cuauucaaggcuguggauc

SEQ ID NO: 2748336 - RNA, 19 nt, Artificial Sequence
  Description of Artificial Sequence: Synthetic oligonucleotide
guaucucuguuacagagaa

SEQ ID NO: 2748337 - RNA, 19 nt, Artificial Sequence
  Description of Artificial Sequence: Synthetic oligonucleotide
cucuggauuuguaucaguc

SEQ ID NO: 2748338 - RNA, 19 nt, Artificial Sequence
  Description of Artificial Sequence: Synthetic oligonucleotide
uugccuugagaucaugguc

SEQ ID NO: 2748339 - RNA, 19 nt, Artificial Sequence
  Description of Artificial Sequence: Synthetic oligonucleotide
guggaucuccacauaaggg

SEQ ID NO: 2748340 - RNA, 19 nt, Artificial Sequence
  Description of Artificial Sequence: Synthetic oligonucleotide
uuuauacagaauggcuccc

SEQ ID NO: 2748341 - RNA, 19 nt, Artificial Sequence
  Description of Artificial Sequence: Synthetic oligonucleotide
gcugccaugggcuugccgg

SEQ ID NO: 2748342 - RNA, 19 nt, Artificial Sequence
  Description of Artificial Sequence: Synthetic oligonucleotide
gcaggaaucggguuuauac

SEQ ID NO: 2748343 - RNA, 19 nt, Artificial Sequence
  Description of Artificial Sequence: Synthetic oligonucleotide
ggaagcugcaucauuuugg

SEQ ID NO: 2748344 - RNA, 19 nt, Artificial Sequence
  Description of Artificial Sequence: Synthetic oligonucleotide
agguccagcaguuucccug

SEQ ID NO: 2748345 - RNA, 19 nt, Artificial Sequence
  Description of Artificial Sequence: Synthetic oligonucleotide
uccaauggagcugaggcuc

SEQ ID NO: 2748346 - RNA, 19 nt, Artificial Sequence
  Description of Artificial Sequence: Synthetic oligonucleotide
ccaaguuagcuuucaaccg

SEQ ID NO: 2748347 - RNA, 19 nt, Artificial Sequence
  Description of Artificial Sequence: Synthetic oligonucleotide
uagacaaaggagagacgga

SEQ ID NO: 2748348 - RNA, 19 nt, Artificial Sequence
  Description of Artificial Sequence: Synthetic oligonucleotide
ucauuuugguugccuugag

SEQ ID NO: 2748349 - RNA, 19 nt, Artificial Sequence
  Description of Artificial Sequence: Synthetic oligonucleotide
uguggauucgcagaaggua

SEQ ID NO: 2748350 - RNA, 19 nt, Artificial Sequence
  Description of Artificial Sequence: Synthetic oligonucleotide
cugaggcucgaguuugucg

SEQ ID NO: 2748351 - RNA, 19 nt, Artificial Sequence
  Description of Artificial Sequence: Synthetic oligonucleotide
cucuguuacagagaaagca

SEQ ID NO: 2748352 - RNA, 19 nt, Artificial Sequence
  Description of Artificial Sequence: Synthetic oligonucleotide
ucccuauucaaggcugugg

SEQ ID NO: 2748353 - RNA, 19 nt, Artificial Sequence
  Description of Artificial Sequence: Synthetic oligonucleotide
ugcccaauacaaacacuug

SEQ ID NO: 2748354 - RNA, 19 nt, Artificial Sequence
  Description of Artificial Sequence: Synthetic oligonucleotide
ucauuggcaccacuuguuc

SEQ ID NO: 2748355 - RNA, 19 nt, Artificial Sequence
  Description of Artificial Sequence: Synthetic oligonucleotide
gacggaaccagcugccaug

SEQ ID NO: 2748356 - RNA, 19 nt, Artificial Sequence
  Description of Artificial Sequence: Synthetic oligonucleotide
gaaucggguuuauacagaa

SEQ ID NO: 2748357 - RNA, 19 nt, Artificial Sequence
  Description of Artificial Sequence: Synthetic oligonucleotide
agucuauccaaguuagcuu

SEQ ID NO: 2748358 - RNA, 19 nt, Artificial Sequence
  Description of Artificial Sequence: Synthetic oligonucleotide
gucaaggaagcaaggaagc

SEQ ID NO: 2748359 - RNA, 19 nt, Artificial Sequence
  Description of Artificial Sequence: Synthetic oligonucleotide
uggauuuguaucagucuau

SEQ ID NO: 2748360 - RNA, 19 nt, Artificial Sequence
  Description of Artificial Sequence: Synthetic oligonucleotide
cacggcuccaccugcaccc

SEQ ID NO: 2748361 - RNA, 19 nt, Artificial Sequence
  Description of Artificial Sequence: Synthetic oligonucleotide
caaccgugauuccagcugc

SEQ ID NO: 2748362 - RNA, 19 nt, Artificial Sequence
  Description of Artificial Sequence: Synthetic oligonucleotide
gguuuauacagaauggcuc

SEQ ID NO: 2748363 - RNA, 19 nt, Artificial Sequence
  Description of Artificial Sequence: Synthetic oligonucleotide
uuuugguugccuugagauc

SEQ ID NO: 2748364 - RNA, 19 nt, Artificial Sequence
  Description of Artificial Sequence: Synthetic oligonucleotide
uucgcagaagguacaggac

SEQ ID NO: 2748365 - RNA, 19 nt, Artificial Sequence
  Description of Artificial Sequence: Synthetic oligonucleotide
caaggaagcaaggaagcug

SEQ ID NO: 2748366 - RNA, 19 nt, Artificial Sequence
  Description of Artificial Sequence: Synthetic oligonucleotide
accaccaggguacaagcga

SEQ ID NO: 2748367 - RNA, 19 nt, Artificial Sequence
  Description of Artificial Sequence: Synthetic oligonucleotide
agagacggaaccagcugcc

SEQ ID NO: 2748368 - RNA, 19 nt, Artificial Sequence
  Description of Artificial Sequence: Synthetic oligonucleotide
uuugucggcggugaauucu

SEQ ID NO: 2748369 - RNA, 19 nt, Artificial Sequence
  Description of Artificial Sequence: Synthetic oligonucleotide
aaguuagcuuucaaccgug

SEQ ID NO: 2748370 - RNA, 19 nt, Artificial Sequence
  Description of Artificial Sequence: Synthetic oligonucleotide
uuucaaccgugauuccagc

SEQ ID NO: 2748371 - RNA, 19 nt, Artificial Sequence
  Description of Artificial Sequence: Synthetic oligonucleotide
ggcaccacuuguucgaucc

SEQ ID NO: 2748372 - RNA, 19 nt, Artificial Sequence
  Description of Artificial Sequence: Synthetic oligonucleotide
uggauucgcagaagguaca

SEQ ID NO: 2748373 - RNA, 19 nt, Artificial Sequence
  Description of Artificial Sequence: Synthetic oligonucleotide
uugucggcggugaauucug

SEQ ID NO: 2748374 - RNA, 19 nt, Artificial Sequence
  Description of Artificial Sequence: Synthetic oligonucleotide
gaucuugggucccuauuca

SEQ ID NO: 2748375 - RNA, 19 nt, Artificial Sequence
  Description of Artificial Sequence: Synthetic oligonucleotide
gauucgcagaagguacagg

SEQ ID NO: 2748376 - RNA, 19 nt, Artificial Sequence
  Description of Artificial Sequence: Synthetic oligonucleotide
uugggucccuauucaaggc

SEQ ID NO: 2748377 - RNA, 19 nt, Artificial Sequence
  Description of Artificial Sequence: Synthetic oligonucleotide
ucagucuauccaaguuagc

SEQ ID NO: 2748378 - RNA, 19 nt, Artificial Sequence
  Description of Artificial Sequence: Synthetic oligonucleotide
caauccuaagguccagcag

SEQ ID NO: 2748379 - RNA, 19 nt, Artificial Sequence
  Description of Artificial Sequence: Synthetic oligonucleotide
agcuuucaaccgugauucc

SEQ ID NO: 2748380 - RNA, 19 nt, Artificial Sequence
  Description of Artificial Sequence: Synthetic oligonucleotide
ugagaucaugguccacuga

SEQ ID NO: 2748381 - RNA, 19 nt, Artificial Sequence
  Description of Artificial Sequence: Synthetic oligonucleotide
uucaaccgugauuccagcu

SEQ ID NO: 2748382 - RNA, 19 nt, Artificial Sequence
  Description of Artificial Sequence: Synthetic oligonucleotide
uggaaugucucuggauuug

SEQ ID NO: 2748383 - RNA, 19 nt, Artificial Sequence
  Description of Artificial Sequence: Synthetic oligonucleotide
agacaaaggagagacggaa

SEQ ID NO: 2748384 - RNA, 19 nt, Artificial Sequence
  Description of Artificial Sequence: Synthetic oligonucleotide
gcccaauacaaacacuugc

SEQ ID NO: 2748385 - RNA, 19 nt, Artificial Sequence
  Description of Artificial Sequence: Synthetic oligonucleotide
cuguggaucuccacauaag

SEQ ID NO: 2748386 - RNA, 19 nt, Artificial Sequence
  Description of Artificial Sequence: Synthetic oligonucleotide
agaucaugguccacugaac

SEQ ID NO: 2748387 - RNA, 19 nt, Artificial Sequence
  Description of Artificial Sequence: Synthetic oligonucleotide
gaaggucccugagaggcag

SEQ ID NO: 2748388 - RNA, 19 nt, Artificial Sequence
  Description of Artificial Sequence: Synthetic oligonucleotide
ggaaccagcugccaugggc

SEQ ID NO: 2748389 - RNA, 19 nt, Artificial Sequence
  Description of Artificial Sequence: Synthetic oligonucleotide
agagaaagcaggggcaacu

SEQ ID NO: 2748390 - RNA, 19 nt, Artificial Sequence
  Description of Artificial Sequence: Synthetic oligonucleotide
agaggcaggaaucggguuu

SEQ ID NO: 2748391 - RNA, 19 nt, Artificial Sequence
  Description of Artificial Sequence: Synthetic oligonucleotide
guggauucgcagaagguac

SEQ ID NO: 2748392 - RNA, 19 nt, Artificial Sequence
  Description of Artificial Sequence: Synthetic oligonucleotide
cacuuguucgauccacagc

SEQ ID NO: 2748393 - RNA, 19 nt, Artificial Sequence
  Description of Artificial Sequence: Synthetic oligonucleotide
uauccaaguuagcuuucaa

SEQ ID NO: 2748394 - RNA, 19 nt, Artificial Sequence
  Description of Artificial Sequence: Synthetic oligonucleotide
gaagcugcaucauuuuggu

SEQ ID NO: 2748395 - RNA, 19 nt, Artificial Sequence
  Description of Artificial Sequence: Synthetic oligonucleotide
aaaagagauagugguugua

SEQ ID NO: 2748396 - RNA, 19 nt, Artificial Sequence
  Description of Artificial Sequence: Synthetic oligonucleotide
auacaaacacuugcuucag

SEQ ID NO: 2748397 - RNA, 19 nt, Artificial Sequence
  Description of Artificial Sequence: Synthetic oligonucleotide
aaguaaugucaaggaagca

SEQ ID NO: 2748398 - RNA, 19 nt, Artificial Sequence
  Description of Artificial Sequence: Synthetic oligonucleotide
agcaccaccaggguacaag

SEQ ID NO: 2748399 - RNA, 19 nt, Artificial Sequence
  Description of Artificial Sequence: Synthetic oligonucleotide
cuggauuuguaucagucua

SEQ ID NO: 2748400 - RNA, 19 nt, Artificial Sequence
  Description of Artificial Sequence: Synthetic oligonucleotide
aaccgugauuccagcugcc

SEQ ID NO: 2748401 - RNA, 19 nt, Artificial Sequence
  Description of Artificial Sequence: Synthetic oligonucleotide
caggaaucggguuuauaca

SEQ ID NO: 2748402 - RNA, 19 nt, Artificial Sequence
  Description of Artificial Sequence: Synthetic oligonucleotide
acuugcuggaaugucucug

SEQ ID NO: 2748403 - RNA, 19 nt, Artificial Sequence
  Description of Artificial Sequence: Synthetic oligonucleotide
agcaguuucccugucugcu

SEQ ID NO: 2748404 - RNA, 19 nt, Artificial Sequence
  Description of Artificial Sequence: Synthetic oligonucleotide
ugcaucauuuugguugccu

SEQ ID NO: 2748405 - RNA, 19 nt, Artificial Sequence
  Description of Artificial Sequence: Synthetic oligonucleotide
accucccugccgaaggucc

SEQ ID NO: 2748406 - RNA, 19 nt, Artificial Sequence
  Description of Artificial Sequence: Synthetic oligonucleotide
uaaggguaucucuguuaca

SEQ ID NO: 2748407 - RNA, 19 nt, Artificial Sequence
  Description of Artificial Sequence: Synthetic oligonucleotide
ucacggcuccaccugcacc

SEQ ID NO: 2748408 - RNA, 19 nt, Artificial Sequence
  Description of Artificial Sequence: Synthetic oligonucleotide
uucgauccacagcaagguc

SEQ ID NO: 2748409 - RNA, 19 nt, Artificial Sequence
  Description of Artificial Sequence: Synthetic oligonucleotide
gguccacugaaccccagag

SEQ ID NO: 2748410 - RNA, 19 nt, Artificial Sequence
  Description of Artificial Sequence: Synthetic oligonucleotide
ucgaguuugucggcgguga

SEQ ID NO: 2748411 - RNA, 19 nt, Artificial Sequence
  Description of Artificial Sequence: Synthetic oligonucleotide
accgugauuccagcugccc

SEQ ID NO: 2748412 - RNA, 19 nt, Artificial Sequence
  Description of Artificial Sequence: Synthetic oligonucleotide
aauggagcugaggcucgag

SEQ ID NO: 2748413 - RNA, 19 nt, Artificial Sequence
  Description of Artificial Sequence: Synthetic oligonucleotide
gcugcaucauuuugguugc

SEQ ID NO: 2748414 - RNA, 19 nt, Artificial Sequence
  Description of Artificial Sequence: Synthetic oligonucleotide
aguuugucggcggugaauu

SEQ ID NO: 2748415 - RNA, 19 nt, Artificial Sequence
  Description of Artificial Sequence: Synthetic oligonucleotide
ucucuggauuuguaucagu

SEQ ID NO: 2748416 - RNA, 19 nt, Artificial Sequence
  Description of Artificial Sequence: Synthetic oligonucleotide
uugcuggaaugucucugga

SEQ ID NO: 2748417 - RNA, 19 nt, Artificial Sequence
  Description of Artificial Sequence: Synthetic oligonucleotide
acauaaggguaucucuguu

SEQ ID NO: 2748418 - RNA, 19 nt, Artificial Sequence
  Description of Artificial Sequence: Synthetic oligonucleotide
uccagcugcccaauacaaa

SEQ ID NO: 2748419 - RNA, 19 nt, Artificial Sequence
  Description of Artificial Sequence: Synthetic oligonucleotide
acggaaccagcugccaugg

SEQ ID NO: 2748420 - RNA, 19 nt, Artificial Sequence
  Description of Artificial Sequence: Synthetic oligonucleotide
ccacauaaggguaucucug

SEQ ID NO: 2748421 - RNA, 19 nt, Artificial Sequence
  Description of Artificial Sequence: Synthetic oligonucleotide
caccaccaggguacaagcg

SEQ ID NO: 2748422 - RNA, 19 nt, Artificial Sequence
  Description of Artificial Sequence: Synthetic oligonucleotide
cauaaggguaucucuguua

SEQ ID NO: 2748423 - RNA, 19 nt, Artificial Sequence
  Description of Artificial Sequence: Synthetic oligonucleotide
agcaagagcagcaauccua

SEQ ID NO: 2748424 - RNA, 19 nt, Artificial Sequence
  Description of Artificial Sequence: Synthetic oligonucleotide
gguugccuugagaucaugg

SEQ ID NO: 2748425 - RNA, 19 nt, Artificial Sequence
  Description of Artificial Sequence: Synthetic oligonucleotide
aucuccacauaaggguauc

SEQ ID NO: 2748426 - RNA, 19 nt, Artificial Sequence
  Description of Artificial Sequence: Synthetic oligonucleotide
ugguccacugaaccccaga

SEQ ID NO: 2748427 - RNA, 19 nt, Artificial Sequence
  Description of Artificial Sequence: Synthetic oligonucleotide
cugaaccccagagaucuug

SEQ ID NO: 2748428 - RNA, 19 nt, Artificial Sequence
  Description of Artificial Sequence: Synthetic oligonucleotide
gggcaacugcacuugcugg

SEQ ID NO: 2748429 - RNA, 19 nt, Artificial Sequence
  Description of Artificial Sequence: Synthetic oligonucleotide
guuguagacaaaggagaga

SEQ ID NO: 2748430 - RNA, 19 nt, Artificial Sequence
  Description of Artificial Sequence: Synthetic oligonucleotide
gucuauccaaguuagcuuu

SEQ ID NO: 2748431 - RNA, 19 nt, Artificial Sequence
  Description of Artificial Sequence: Synthetic oligonucleotide
aagguccagcaguuucccu

SEQ ID NO: 2748432 - RNA, 19 nt, Artificial Sequence
  Description of Artificial Sequence: Synthetic oligonucleotide
ccgaaggucccugagaggc

SEQ ID NO: 2748433 - RNA, 19 nt, Artificial Sequence
  Description of Artificial Sequence: Synthetic oligonucleotide
caaguuagcuuucaaccgu

SEQ ID NO: 2748434 - RNA, 19 nt, Artificial Sequence
  Description of Artificial Sequence: Synthetic oligonucleotide
cauuuugguugccuugaga

SEQ ID NO: 2748435 - RNA, 19 nt, Artificial Sequence
  Description of Artificial Sequence: Synthetic oligonucleotide
aggcuguggaucuccacau

SEQ ID NO: 2748436 - RNA, 19 nt, Artificial Sequence
  Description of Artificial Sequence: Synthetic oligonucleotide
uucuguggauucgcagaag

SEQ ID NO: 2748437 - RNA, 19 nt, Artificial Sequence
  Description of Artificial Sequence: Synthetic oligonucleotide
uaucucuguuacagagaaa

SEQ ID NO: 2748438 - RNA, 19 nt, Artificial Sequence
  Description of Artificial Sequence: Synthetic oligonucleotide
ggagagacggaaccagcug

SEQ ID NO: 2748439 - RNA, 19 nt, Artificial Sequence
  Description of Artificial Sequence: Synthetic oligonucleotide
acugcacuugcuggaaugu

SEQ ID NO: 2748440 - RNA, 19 nt, Artificial Sequence
  Description of Artificial Sequence: Synthetic oligonucleotide
gucucuggauuuguaucag

SEQ ID NO: 2748441 - RNA, 19 nt, Artificial Sequence
  Description of Artificial Sequence: Synthetic oligonucleotide
ggggcaacugcacuugcug

SEQ ID NO: 2748442 - RNA, 19 nt, Artificial Sequence
  Description of Artificial Sequence: Synthetic oligonucleotide
caaacacuugcuucagcaa

SEQ ID NO: 2748443 - RNA, 19 nt, Artificial Sequence
  Description of Artificial Sequence: Synthetic oligonucleotide
ccuaagguccagcaguuuc

SEQ ID NO: 2748444 - RNA, 19 nt, Artificial Sequence
  Description of Artificial Sequence: Synthetic oligonucleotide
cuccacauaaggguaucuc

SEQ ID NO: 2748445 - RNA, 19 nt, Artificial Sequence
  Description of Artificial Sequence: Synthetic oligonucleotide
aggagagacggaaccagcu

SEQ ID NO: 2748446 - RNA, 19 nt, Artificial Sequence
  Description of Artificial Sequence: Synthetic oligonucleotide
cacugaaccccagagaucu

SEQ ID NO: 2748447 - RNA, 19 nt, Artificial Sequence
  Description of Artificial Sequence: Synthetic oligonucleotide
agguccaauggagcugagg

SEQ ID NO: 2748448 - RNA, 19 nt, Artificial Sequence
  Description of Artificial Sequence: Synthetic oligonucleotide
caagagcagcaauccuaag

SEQ ID NO: 2748449 - RNA, 19 nt, Artificial Sequence
  Description of Artificial Sequence: Synthetic oligonucleotide
ucuccacauaaggguaucu

SEQ ID NO: 2748450 - RNA, 19 nt, Artificial Sequence
  Description of Artificial Sequence: Synthetic oligonucleotide
cuugagaucaugguccacu

SEQ ID NO: 2748451 - RNA, 19 nt, Artificial Sequence
  Description of Artificial Sequence: Synthetic oligonucleotide
cuugccggacaccucccug

SEQ ID NO: 2748452 - RNA, 19 nt, Artificial Sequence
  Description of Artificial Sequence: Synthetic oligonucleotide
agacggaaccagcugccau

SEQ ID NO: 2748453 - RNA, 19 nt, Artificial Sequence
  Description of Artificial Sequence: Synthetic oligonucleotide
agagaucuugggucccuau

SEQ ID NO: 2748454 - RNA, 19 nt, Artificial Sequence
  Description of Artificial Sequence: Synthetic oligonucleotide
gaaccagcugccaugggcu

SEQ ID NO: 2748455 - RNA, 19 nt, Artificial Sequence
  Description of Artificial Sequence: Synthetic oligonucleotide
caagguccaauggagcuga

SEQ ID NO: 2748456 - RNA, 19 nt, Artificial Sequence
  Description of Artificial Sequence: Synthetic oligonucleotide
cagucuauccaaguuagcu

SEQ ID NO: 2748457 - RNA, 19 nt, Artificial Sequence
  Description of Artificial Sequence: Synthetic oligonucleotide
aaucggguuuauacagaau

SEQ ID NO: 2748458 - RNA, 19 nt, Artificial Sequence
  Description of Artificial Sequence: Synthetic oligonucleotide
aucauuggcaccacuuguu

SEQ ID NO: 2748459 - RNA, 19 nt, Artificial Sequence
  Description of Artificial Sequence: Synthetic oligonucleotide
gucggcggugaauucugug

SEQ ID NO: 2748460 - RNA, 19 nt, Artificial Sequence
  Description of Artificial Sequence: Synthetic oligonucleotide
guaucagucuauccaaguu

SEQ ID NO: 2748461 - RNA, 19 nt, Artificial Sequence
  Description of Artificial Sequence: Synthetic oligonucleotide
aggcucgaguuugucggcg

SEQ ID NO: 2748462 - RNA, 19 nt, Artificial Sequence
  Description of Artificial Sequence: Synthetic oligonucleotide
aagcugcaucauuuugguu

SEQ ID NO: 2748463 - RNA, 19 nt, Artificial Sequence
  Description of Artificial Sequence: Synthetic oligonucleotide
aggcucacggcuccaccug

SEQ ID NO: 2748464 - RNA, 19 nt, Artificial Sequence
  Description of Artificial Sequence: Synthetic oligonucleotide
agcugccaugggcuugccg

SEQ ID NO: 2748465 - RNA, 19 nt, Artificial Sequence
  Description of Artificial Sequence: Synthetic oligonucleotide
cugcccaauacaaacacuu

SEQ ID NO: 2748466 - RNA, 19 nt, Artificial Sequence
  Description of Artificial Sequence: Synthetic oligonucleotide
ggauuuguaucagucuauc

SEQ ID NO: 2748467 - RNA, 19 nt, Artificial Sequence
  Description of Artificial Sequence: Synthetic oligonucleotide
ccaucauuggcaccacuug

SEQ ID NO: 2748468 - RNA, 19 nt, Artificial Sequence
  Description of Artificial Sequence: Synthetic oligonucleotide
gcaccaccaggguacaagc

SEQ ID NO: 2748469 - RNA, 19 nt, Artificial Sequence
  Description of Artificial Sequence: Synthetic oligonucleotide
cacauaaggguaucucugu

SEQ ID NO: 2748470 - RNA, 19 nt, Artificial Sequence
  Description of Artificial Sequence: Synthetic oligonucleotide
caccacuuguucgauccac

SEQ ID NO: 2748471 - RNA, 19 nt, Artificial Sequence
  Description of Artificial Sequence: Synthetic oligonucleotide
gggcuugccggacaccucc

SEQ ID NO: 2748472 - RNA, 19 nt, Artificial Sequence
  Description of Artificial Sequence: Synthetic oligonucleotide
guccacugaaccccagaga

SEQ ID NO: 2748473 - RNA, 19 nt, Artificial Sequence
  Description of Artificial Sequence: Synthetic oligonucleotide
ggcaacugcacuugcugga

SEQ ID NO: 2748474 - RNA, 19 nt, Artificial Sequence
  Description of Artificial Sequence: Synthetic oligonucleotide
uugguugccuugagaucau

SEQ ID NO: 2748475 - RNA, 19 nt, Artificial Sequence
  Description of Artificial Sequence: Synthetic oligonucleotide
ggauucgcagaagguacag

SEQ ID NO: 2748476 - RNA, 19 nt, Artificial Sequence
  Description of Artificial Sequence: Synthetic oligonucleotide
gcuguggaucuccacauaa

SEQ ID NO: 2748477 - RNA, 19 nt, Artificial Sequence
  Description of Artificial Sequence: Synthetic oligonucleotide
ccacuuguucgauccacag

SEQ ID NO: 2748478 - RNA, 19 nt, Artificial Sequence
  Description of Artificial Sequence: Synthetic oligonucleotide
aguuucccugucugcucca

SEQ ID NO: 2748479 - RNA, 19 nt, Artificial Sequence
  Description of Artificial Sequence: Synthetic oligonucleotide
caucauuggcaccacuugu

SEQ ID NO: 2748480 - RNA, 19 nt, Artificial Sequence
  Description of Artificial Sequence: Synthetic oligonucleotide
cuauccaaguuagcuuuca

SEQ ID NO: 2748481 - RNA, 19 nt, Artificial Sequence
  Description of Artificial Sequence: Synthetic oligonucleotide
accaggguacaagcgaaaa

SEQ ID NO: 2748482 - RNA, 19 nt, Artificial Sequence
  Description of Artificial Sequence: Synthetic oligonucleotide
ugauuccagcugcccaaua

SEQ ID NO: 2748483 - RNA, 19 nt, Artificial Sequence
  Description of Artificial Sequence: Synthetic oligonucleotide
aaccagcugccaugggcuu

SEQ ID NO: 2748484 - RNA, 19 nt, Artificial Sequence
  Description of Artificial Sequence: Synthetic oligonucleotide
guucgauccacagcaaggu

SEQ ID NO: 2748485 - RNA, 19 nt, Artificial Sequence
  Description of Artificial Sequence: Synthetic oligonucleotide
ugucggcggugaauucugu

SEQ ID NO: 2748486 - RNA, 19 nt, Artificial Sequence
  Description of Artificial Sequence: Synthetic oligonucleotide
ggcucgaguuugucggcgg

SEQ ID NO: 2748487 - RNA, 19 nt, Artificial Sequence
  Description of Artificial Sequence: Synthetic oligonucleotide
cagcugcccaauacaaaca

SEQ ID NO: 2748488 - RNA, 19 nt, Artificial Sequence
  Description of Artificial Sequence: Synthetic oligonucleotide
guuugucggcggugaauuc

SEQ ID NO: 2748489 - RNA, 19 nt, Artificial Sequence
  Description of Artificial Sequence: Synthetic oligonucleotide
aguuagcuuucaaccguga

SEQ ID NO: 2748490 - RNA, 19 nt, Artificial Sequence
  Description of Artificial Sequence: Synthetic oligonucleotide
caugguccacugaacccca

SEQ ID NO: 2748491 - RNA, 19 nt, Artificial Sequence
  Description of Artificial Sequence: Synthetic oligonucleotide
acaccucccugccgaaggu

SEQ ID NO: 2748492 - RNA, 19 nt, Artificial Sequence
  Description of Artificial Sequence: Synthetic oligonucleotide
accacuuguucgauccaca

SEQ ID NO: 2748493 - RNA, 19 nt, Artificial Sequence
  Description of Artificial Sequence: Synthetic oligonucleotide
gguaucucuguuacagaga

SEQ ID NO: 2748494 - RNA, 19 nt, Artificial Sequence
  Description of Artificial Sequence: Synthetic oligonucleotide
guuagcuuucaaccgugau

SEQ ID NO: 2748495 - RNA, 19 nt, Artificial Sequence
  Description of Artificial Sequence: Synthetic oligonucleotide
cucgaguuugucggcggug

SEQ ID NO: 2748496 - RNA, 19 nt, Artificial Sequence
  Description of Artificial Sequence: Synthetic oligonucleotide
gucccugagaggcaggaau

SEQ ID NO: 2748497 - RNA, 19 nt, Artificial Sequence
  Description of Artificial Sequence: Synthetic oligonucleotide
cggguuuauacagaauggc

SEQ ID NO: 2748498 - RNA, 19 nt, Artificial Sequence
  Description of Artificial Sequence: Synthetic oligonucleotide
cccuauucaaggcugugga

SEQ ID NO: 2748499 - RNA, 19 nt, Artificial Sequence
  Description of Artificial Sequence: Synthetic oligonucleotide
cucacggcuccaccugcac

SEQ ID NO: 2748500 - RNA, 19 nt, Artificial Sequence
  Description of Artificial Sequence: Synthetic oligonucleotide
guacaggacgauggccagc

SEQ ID NO: 2748501 - RNA, 19 nt, Artificial Sequence
  Description of Artificial Sequence: Synthetic oligonucleotide
cuuguucgauccacagcaa

SEQ ID NO: 2748502 - RNA, 19 nt, Artificial Sequence
  Description of Artificial Sequence: Synthetic oligonucleotide
agcaaggaagcugcaucau

SEQ ID NO: 2748503 - RNA, 19 nt, Artificial Sequence
  Description of Artificial Sequence: Synthetic oligonucleotide
ggguuuauacagaauggcu

SEQ ID NO: 2748504 - RNA, 19 nt, Artificial Sequence
  Description of Artificial Sequence: Synthetic oligonucleotide
caggggcaacugcacuugc

SEQ ID NO: 2748505 - RNA, 19 nt, Artificial Sequence
  Description of Artificial Sequence: Synthetic oligonucleotide
cccaauacaaacacuugcu

SEQ ID NO: 2748506 - RNA, 19 nt, Artificial Sequence
  Description of Artificial Sequence: Synthetic oligonucleotide
gggucccuauucaaggcug

SEQ ID NO: 2748507 - RNA, 19 nt, Artificial Sequence
  Description of Artificial Sequence: Synthetic oligonucleotide
gagaucuugggucccuauu

SEQ ID NO: 2748508 - RNA, 19 nt, Artificial Sequence
  Description of Artificial Sequence: Synthetic oligonucleotide
ggaaucggguuuauacaga

SEQ ID NO: 2748509 - RNA, 19 nt, Artificial Sequence
  Description of Artificial Sequence: Synthetic oligonucleotide
gcaagagcagcaauccuaa

SEQ ID NO: 2748510 - RNA, 19 nt, Artificial Sequence
  Description of Artificial Sequence: Synthetic oligonucleotide
gcagcaauccuaaggucca

SEQ ID NO: 2748511 - RNA, 19 nt, Artificial Sequence
  Description of Artificial Sequence: Synthetic oligonucleotide
gaggcaggaaucggguuua

SEQ ID NO: 2748512 - RNA, 19 nt, Artificial Sequence
  Description of Artificial Sequence: Synthetic oligonucleotide
cugcacuugcuggaauguc

SEQ ID NO: 2748513 - RNA, 19 nt, Artificial Sequence
  Description of Artificial Sequence: Synthetic oligonucleotide
gagacggaaccagcugcca

SEQ ID NO: 2748514 - RNA, 19 nt, Artificial Sequence
  Description of Artificial Sequence: Synthetic oligonucleotide
auccuaagguccagcaguu

SEQ ID NO: 2748515 - RNA, 19 nt, Artificial Sequence
  Description of Artificial Sequence: Synthetic oligonucleotide
ugguugccuugagaucaug

SEQ ID NO: 2748516 - RNA, 19 nt, Artificial Sequence
  Description of Artificial Sequence: Synthetic oligonucleotide
uggcaccacuuguucgauc

SEQ ID NO: 2748517 - RNA, 19 nt, Artificial Sequence
  Description of Artificial Sequence: Synthetic oligonucleotide
cccugagaggcaggaaucg

SEQ ID NO: 2748518 - RNA, 19 nt, Artificial Sequence
  Description of Artificial Sequence: Synthetic oligonucleotide
uuggcaccacuuguucgau

SEQ ID NO: 2748519 - RNA, 19 nt, Artificial Sequence
  Description of Artificial Sequence: Synthetic oligonucleotide
gaucuccacauaaggguau

SEQ ID NO: 2748520 - RNA, 19 nt, Artificial Sequence
  Description of Artificial Sequence: Synthetic oligonucleotide
cugccgaaggucccugaga

SEQ ID NO: 2748521 - RNA, 19 nt, Artificial Sequence
  Description of Artificial Sequence: Synthetic oligonucleotide
cuguggauucgcagaaggu

SEQ ID NO: 2748522 - RNA, 19 nt, Artificial Sequence
  Description of Artificial Sequence: Synthetic oligonucleotide
aagguccaauggagcugag

SEQ ID NO: 2748523 - RNA, 19 nt, Artificial Sequence
  Description of Artificial Sequence: Synthetic oligonucleotide
uccaggcucacggcuccac

SEQ ID NO: 2748524 - RNA, 19 nt, Artificial Sequence
  Description of Artificial Sequence: Synthetic oligonucleotide
cggugaauucuguggauuc

SEQ ID NO: 2748525 - RNA, 19 nt, Artificial Sequence
  Description of Artificial Sequence: Synthetic oligonucleotide
aggggcaacugcacuugcu

SEQ ID NO: 2748526 - RNA, 19 nt, Artificial Sequence
  Description of Artificial Sequence: Synthetic oligonucleotide
ugccaugggcuugccggac

SEQ ID NO: 2748527 - RNA, 19 nt, Artificial Sequence
  Description of Artificial Sequence: Synthetic oligonucleotide
cugccaugggcuugccgga

SEQ ID NO: 2748528 - RNA, 19 nt, Artificial Sequence
  Description of Artificial Sequence: Synthetic oligonucleotide
gccuugagaucauggucca

SEQ ID NO: 2748529 - RNA, 19 nt, Artificial Sequence
  Description of Artificial Sequence: Synthetic oligonucleotide
ccugccgaaggucccugag

SEQ ID NO: 2748530 - RNA, 19 nt, Artificial Sequence
  Description of Artificial Sequence: Synthetic oligonucleotide
uccuaagguccagcaguuu

SEQ ID NO: 2748531 - RNA, 19 nt, Artificial Sequence
  Description of Artificial Sequence: Synthetic oligonucleotide
cugcaucauuuugguugcc

SEQ ID NO: 2748532 - RNA, 19 nt, Artificial Sequence
  Description of Artificial Sequence: Synthetic oligonucleotide
ucccugccgaaggucccug

SEQ ID NO: 2748533 - RNA, 19 nt, Artificial Sequence
  Description of Artificial Sequence: Synthetic oligonucleotide
gaguuugucggcggugaau

SEQ ID NO: 2748534 - RNA, 19 nt, Artificial Sequence
  Description of Artificial Sequence: Synthetic oligonucleotide
ccacugaaccccagagauc

SEQ ID NO: 2748535 - RNA, 19 nt, Artificial Sequence
  Description of Artificial Sequence: Synthetic oligonucleotide
gguccagcaguuucccugu

SEQ ID NO: 2748536 - RNA, 19 nt, Artificial Sequence
  Description of Artificial Sequence: Synthetic oligonucleotide
ccagcugccaugggcuugc

SEQ ID NO: 2748537 - RNA, 19 nt, Artificial Sequence
  Description of Artificial Sequence: Synthetic oligonucleotide
caggcucacggcuccaccu

SEQ ID NO: 2748538 - RNA, 19 nt, Artificial Sequence
  Description of Artificial Sequence: Synthetic oligonucleotide
cuucagcaagagcagcaau

SEQ ID NO: 2748539 - RNA, 19 nt, Artificial Sequence
  Description of Artificial Sequence: Synthetic oligonucleotide
cgcagaagguacaggacga

SEQ ID NO: 2748540 - RNA, 19 nt, Artificial Sequence
  Description of Artificial Sequence: Synthetic oligonucleotide
caccaggguacaagcgaaa

SEQ ID NO: 2748541 - RNA, 19 nt, Artificial Sequence
  Description of Artificial Sequence: Synthetic oligonucleotide
cugucugcuccaggcucac

SEQ ID NO: 2748542 - RNA, 19 nt, Artificial Sequence
  Description of Artificial Sequence: Synthetic oligonucleotide
cgauccacagcaaggucca

SEQ ID NO: 2748543 - RNA, 19 nt, Artificial Sequence
  Description of Artificial Sequence: Synthetic oligonucleotide
ccaggcucacggcuccacc

SEQ ID NO: 2748544 - RNA, 19 nt, Artificial Sequence
  Description of Artificial Sequence: Synthetic oligonucleotide
ccaugggcuugccggacac

SEQ ID NO: 2748545 - RNA, 19 nt, Artificial Sequence
  Description of Artificial Sequence: Synthetic oligonucleotide
gcaucauuuugguugccuu

SEQ ID NO: 2748546 - RNA, 19 nt, Artificial Sequence
  Description of Artificial Sequence: Synthetic oligonucleotide
cgugauuccagcugcccaa

SEQ ID NO: 2748547 - RNA, 19 nt, Artificial Sequence
  Description of Artificial Sequence: Synthetic oligonucleotide
ccaccaggguacaagcgaa

SEQ ID NO: 2748548 - RNA, 19 nt, Artificial Sequence
  Description of Artificial Sequence: Synthetic oligonucleotide
caccucccugccgaagguc

SEQ ID NO: 2748549 - RNA, 19 nt, Artificial Sequence
  Description of Artificial Sequence: Synthetic oligonucleotide
gccggacaccucccugccg

SEQ ID NO: 2748550 - RNA, 19 nt, Artificial Sequence
  Description of Artificial Sequence: Synthetic oligonucleotide
agcugaggcucgaguuugu

SEQ ID NO: 2748551 - RNA, 19 nt, Artificial Sequence
  Description of Artificial Sequence: Synthetic oligonucleotide
ggagcugaggcucgaguuu

SEQ ID NO: 2748552 - RNA, 19 nt, Artificial Sequence
  Description of Artificial Sequence: Synthetic oligonucleotide
gcaacugcacuugcuggaa

SEQ ID NO: 2748553 - RNA, 19 nt, Artificial Sequence
  Description of Artificial Sequence: Synthetic oligonucleotide
ggacaccucccugccgaag

SEQ ID NO: 2748554 - RNA, 19 nt, Artificial Sequence
  Description of Artificial Sequence: Synthetic oligonucleotide
ccgugauuccagcugccca

SEQ ID NO: 2748555 - RNA, 19 nt, Artificial Sequence
  Description of Artificial Sequence: Synthetic oligonucleotide
ccaauacaaacacuugcuu

SEQ ID NO: 2748556 - RNA, 19 nt, Artificial Sequence
  Description of Artificial Sequence: Synthetic oligonucleotide
caauggagcugaggcucga

SEQ ID NO: 2748557 - RNA, 19 nt, Artificial Sequence
  Description of Artificial Sequence: Synthetic oligonucleotide
ggaagcaaggaagcugcau

SEQ ID NO: 2748558 - RNA, 19 nt, Artificial Sequence
  Description of Artificial Sequence: Synthetic oligonucleotide
gcaccacuuguucgaucca

SEQ ID NO: 2748559 - RNA, 19 nt, Artificial Sequence
  Description of Artificial Sequence: Synthetic oligonucleotide
gcugaggcucgaguuuguc

SEQ ID NO: 2748560 - RNA, 19 nt, Artificial Sequence
  Description of Artificial Sequence: Synthetic oligonucleotide
ggacgauggccagcagcac

SEQ ID NO: 2748561 - RNA, 19 nt, Artificial Sequence
  Description of Artificial Sequence: Synthetic oligonucleotide
cccaucauuggcaccacuu

SEQ ID NO: 2748562 - RNA, 19 nt, Artificial Sequence
  Description of Artificial Sequence: Synthetic oligonucleotide
ggcuugccggacaccuccc

SEQ ID NO: 2748563 - RNA, 19 nt, Artificial Sequence
  Description of Artificial Sequence: Synthetic oligonucleotide
ggcuguggaucuccacaua

SEQ ID NO: 2748564 - RNA, 19 nt, Artificial Sequence
  Description of Artificial Sequence: Synthetic oligonucleotide
cagagaucuugggucccua

SEQ ID NO: 2748565 - RNA, 19 nt, Artificial Sequence
  Description of Artificial Sequence: Synthetic oligonucleotide
ccuugagaucaugguccac

SEQ ID NO: 2748566 - RNA, 19 nt, Artificial Sequence
  Description of Artificial Sequence: Synthetic oligonucleotide
gugauuccagcugcccaau

SEQ ID NO: 2748567 - RNA, 19 nt, Artificial Sequence
  Description of Artificial Sequence: Synthetic oligonucleotide
ggcggugaauucuguggau

SEQ ID NO: 2748568 - RNA, 19 nt, Artificial Sequence
  Description of Artificial Sequence: Synthetic oligonucleotide
cggcggugaauucugugga

SEQ ID NO: 2748569 - RNA, 19 nt, Artificial Sequence
  Description of Artificial Sequence: Synthetic oligonucleotide
aggcaggaaucggguuuau

SEQ ID NO: 2748570 - RNA, 19 nt, Artificial Sequence
  Description of Artificial Sequence: Synthetic oligonucleotide
ccuauucaaggcuguggau

SEQ ID NO: 2748571 - RNA, 19 nt, Artificial Sequence
  Description of Artificial Sequence: Synthetic oligonucleotide
ggucccuauucaaggcugu

SEQ ID NO: 2748572 - RNA, 19 nt, Artificial Sequence
  Description of Artificial Sequence: Synthetic oligonucleotide
gcucgaguuugucggcggu

SEQ ID NO: 2748573 - RNA, 19 nt, Artificial Sequence
  Description of Artificial Sequence: Synthetic oligonucleotide
gcucacggcuccaccugca

SEQ ID NO: 2748574 - RNA, 19 nt, Artificial Sequence
  Description of Artificial Sequence: Synthetic oligonucleotide
ggcaggaaucggguuuaua

SEQ ID NO: 2748575 - RNA, 19 nt, Artificial Sequence
  Description of Artificial Sequence: Synthetic oligonucleotide
gcggugaauucuguggauu

SEQ ID NO: 2748576 - RNA, 19 nt, Artificial Sequence
  Description of Artificial Sequence: Synthetic oligonucleotide
cgaaggucccugagaggca

SEQ ID NO: 2748577 - RNA, 19 nt, Artificial Sequence
  Description of Artificial Sequence: Synthetic oligonucleotide
gcuugccggacaccucccu

SEQ ID NO: 2748578 - RNA, 19 nt, Artificial Sequence
  Description of Artificial Sequence: Synthetic oligonucleotide
cucccugccgaaggucccu

SEQ ID NO: 2748579 - RNA, 19 nt, Artificial Sequence
  Description of Artificial Sequence: Synthetic oligonucleotide
cccugccgaaggucccuga

SEQ ID NO: 2748580 - RNA, 19 nt, Artificial Sequence
  Description of Artificial Sequence: Synthetic oligonucleotide
cgaguuugucggcggugaa

SEQ ID NO: 2748581 - RNA, 19 nt, Artificial Sequence
  Description of Artificial Sequence: Synthetic oligonucleotide
ccccaucauuggcaccacu

SEQ ID NO: 2748582 - RNA, 19 nt, Artificial Sequence
  Description of Artificial Sequence: Synthetic oligonucleotide
cggacaccucccugccgaa

SEQ ID NO: 2748583 - RNA, 19 nt, Artificial Sequence
  Description of Artificial Sequence: Synthetic oligonucleotide
aaucuaugaauucaaggcc

SEQ ID NO: 2748584 - RNA, 19 nt, Artificial Sequence
  Description of Artificial Sequence: Synthetic oligonucleotide
ugcauuaaugaaaauaugg

SEQ ID NO: 2748585 - RNA, 19 nt, Artificial Sequence
  Description of Artificial Sequence: Synthetic oligonucleotide
aaauauggcauuguaaagc

SEQ ID NO: 2748586 - RNA, 19 nt, Artificial Sequence
  Description of Artificial Sequence: Synthetic oligonucleotide
auaauggccaucuaaaacg

SEQ ID NO: 2748587 - RNA, 19 nt, Artificial Sequence
  Description of Artificial Sequence: Synthetic oligonucleotide
gaaucuaugaauucaaggc

SEQ ID NO: 2748588 - RNA, 19 nt, Artificial Sequence
  Description of Artificial Sequence: Synthetic oligonucleotide
ugaaucuaugaauucaagg

SEQ ID NO: 2748589 - RNA, 19 nt, Artificial Sequence
  Description of Artificial Sequence: Synthetic oligonucleotide
aaaauauggcauuguaaag

SEQ ID NO: 2748590 - RNA, 19 nt, Artificial Sequence
  Description of Artificial Sequence: Synthetic oligonucleotide
gaaaauauggcauuguaaa

SEQ ID NO: 2748591 - RNA, 19 nt, Artificial Sequence
  Description of Artificial Sequence: Synthetic oligonucleotide
gaugcuguuccuuucaucc

SEQ ID NO: 2748592 - RNA, 19 nt, Artificial Sequence
  Description of Artificial Sequence: Synthetic oligonucleotide
aauuggagugcauuaauga

SEQ ID NO: 2748593 - RNA, 19 nt, Artificial Sequence
  Description of Artificial Sequence: Synthetic oligonucleotide
aauauggcauuguaaagcu

SEQ ID NO: 2748594 - RNA, 19 nt, Artificial Sequence
  Description of Artificial Sequence: Synthetic oligonucleotide
uaaaacguggccagaauag

SEQ ID NO: 2748595 - RNA, 19 nt, Artificial Sequence
  Description of Artificial Sequence: Synthetic oligonucleotide
auuagcucuccccagcucc

SEQ ID NO: 2748596 - RNA, 19 nt, Artificial Sequence
  Description of Artificial Sequence: Synthetic oligonucleotide
uacaagaaaaucugccucg

SEQ ID NO: 2748597 - RNA, 19 nt, Artificial Sequence
  Description of Artificial Sequence: Synthetic oligonucleotide
uauaauggccaucuaaaac

SEQ ID NO: 2748598 - RNA, 19 nt, Artificial Sequence
  Description of Artificial Sequence: Synthetic oligonucleotide
cuagagaugaugcuguucc

SEQ ID NO: 2748599 - RNA, 19 nt, Artificial Sequence
  Description of Artificial Sequence: Synthetic oligonucleotide
aaucccaucuccuaaggga

SEQ ID NO: 2748600 - RNA, 19 nt, Artificial Sequence
  Description of Artificial Sequence: Synthetic oligonucleotide
ucuuauaauggccaucuaa

SEQ ID NO: 2748601 - RNA, 19 nt, Artificial Sequence
  Description of Artificial Sequence: Synthetic oligonucleotide
aagaaaaucugccucgaaa

SEQ ID NO: 2748602 - RNA, 19 nt, Artificial Sequence
  Description of Artificial Sequence: Synthetic oligonucleotide
ugggcuacaagaaaaucug

SEQ ID NO: 2748603 - RNA, 19 nt, Artificial Sequence
  Description of Artificial Sequence: Synthetic oligonucleotide
aguuucaagacaccccugg

SEQ ID NO: 2748604 - RNA, 19 nt, Artificial Sequence
  Description of Artificial Sequence: Synthetic oligonucleotide
agaaacaggcuucuacugg

SEQ ID NO: 2748605 - RNA, 19 nt, Artificial Sequence
  Description of Artificial Sequence: Synthetic oligonucleotide
aaucucagugguugggagg

SEQ ID NO: 2748606 - RNA, 19 nt, Artificial Sequence
  Description of Artificial Sequence: Synthetic oligonucleotide
auuaaugaaaauauggcau

SEQ ID NO: 2748607 - RNA, 19 nt, Artificial Sequence
  Description of Artificial Sequence: Synthetic oligonucleotide
acacuuguccauuuccagc

SEQ ID NO: 2748608 - RNA, 19 nt, Artificial Sequence
  Description of Artificial Sequence: Synthetic oligonucleotide
acccacaucuuauaauggc

SEQ ID NO: 2748609 - RNA, 19 nt, Artificial Sequence
  Description of Artificial Sequence: Synthetic oligonucleotide
cauuaaugaaaauauggca

SEQ ID NO: 2748610 - RNA, 19 nt, Artificial Sequence
  Description of Artificial Sequence: Synthetic oligonucleotide
aaagcugggcccuggggac

SEQ ID NO: 2748611 - RNA, 19 nt, Artificial Sequence
  Description of Artificial Sequence: Synthetic oligonucleotide
uccauuuccagcucggggc

SEQ ID NO: 2748612 - RNA, 19 nt, Artificial Sequence
  Description of Artificial Sequence: Synthetic oligonucleotide
agaaaaucugccucgaaaa

SEQ ID NO: 2748613 - RNA, 19 nt, Artificial Sequence
  Description of Artificial Sequence: Synthetic oligonucleotide
aaaauuggagugcauuaau

SEQ ID NO: 2748614 - RNA, 19 nt, Artificial Sequence
  Description of Artificial Sequence: Synthetic oligonucleotide
uucaagacaccccugggcu

SEQ ID NO: 2748615 - RNA, 19 nt, Artificial Sequence
  Description of Artificial Sequence: Synthetic oligonucleotide
aggccuuuaaucucagugg

SEQ ID NO: 2748616 - RNA, 19 nt, Artificial Sequence
  Description of Artificial Sequence: Synthetic oligonucleotide
uuucaagacaccccugggc

SEQ ID NO: 2748617 - RNA, 19 nt, Artificial Sequence
  Description of Artificial Sequence: Synthetic oligonucleotide
uuuaaucucagugguuggg

SEQ ID NO: 2748618 - RNA, 19 nt, Artificial Sequence
  Description of Artificial Sequence: Synthetic oligonucleotide
ucuccuaagggaaggcagg

SEQ ID NO: 2748619 - RNA, 19 nt, Artificial Sequence
  Description of Artificial Sequence: Synthetic oligonucleotide
agugcauuaaugaaaauau

SEQ ID NO: 2748620 - RNA, 19 nt, Artificial Sequence
  Description of Artificial Sequence: Synthetic oligonucleotide
ucuaugaauucaaggccag

SEQ ID NO: 2748621 - RNA, 19 nt, Artificial Sequence
  Description of Artificial Sequence: Synthetic oligonucleotide
uuaaugaaaauauggcauu

SEQ ID NO: 2748622 - RNA, 19 nt, Artificial Sequence
  Description of Artificial Sequence: Synthetic oligonucleotide
aaaacguggccagaauagg

SEQ ID NO: 2748623 - RNA, 19 nt, Artificial Sequence
  Description of Artificial Sequence: Synthetic oligonucleotide
uaaagcugggcccugggga

SEQ ID NO: 2748624 - RNA, 19 nt, Artificial Sequence
  Description of Artificial Sequence: Synthetic oligonucleotide
gugguugggagguagaggc

SEQ ID NO: 2748625 - RNA, 19 nt, Artificial Sequence
  Description of Artificial Sequence: Synthetic oligonucleotide
uggagugcauuaaugaaaa

SEQ ID NO: 2748626 - RNA, 19 nt, Artificial Sequence
  Description of Artificial Sequence: Synthetic oligonucleotide
cuuauaauggccaucuaaa

SEQ ID NO: 2748627 - RNA, 19 nt, Artificial Sequence
  Description of Artificial Sequence: Synthetic oligonucleotide
aacaggcuucuacuggagg

SEQ ID NO: 2748628 - RNA, 19 nt, Artificial Sequence
  Description of Artificial Sequence: Synthetic oligonucleotide
aaauuggagugcauuaaug

SEQ ID NO: 2748629 - RNA, 19 nt, Artificial Sequence
  Description of Artificial Sequence: Synthetic oligonucleotide
aaugaaaauauggcauugu

SEQ ID NO: 2748630 - RNA, 19 nt, Artificial Sequence
  Description of Artificial Sequence: Synthetic oligonucleotide
uggggacuagagaugaugc

SEQ ID NO: 2748631 - RNA, 19 nt, Artificial Sequence
  Description of Artificial Sequence: Synthetic oligonucleotide
uaaugaaaauauggcauug

SEQ ID NO: 2748632 - RNA, 19 nt, Artificial Sequence
  Description of Artificial Sequence: Synthetic oligonucleotide
caagcgguuacacuccugg

SEQ ID NO: 2748633 - RNA, 19 nt, Artificial Sequence
  Description of Artificial Sequence: Synthetic oligonucleotide
uggaggaccaccaugccaa

SEQ ID NO: 2748634 - RNA, 19 nt, Artificial Sequence
  Description of Artificial Sequence: Synthetic oligonucleotide
uuauaauggccaucuaaaa

SEQ ID NO: 2748635 - RNA, 19 nt, Artificial Sequence
  Description of Artificial Sequence: Synthetic oligonucleotide
cuacaagaaaaucugccuc

SEQ ID NO: 2748636 - RNA, 19 nt, Artificial Sequence
  Description of Artificial Sequence: Synthetic oligonucleotide
uagaaacaggcuucuacug

SEQ ID NO: 2748637 - RNA, 19 nt, Artificial Sequence
  Description of Artificial Sequence: Synthetic oligonucleotide
ugcuguuccuuucaucccc

SEQ ID NO: 2748638 - RNA, 19 nt, Artificial Sequence
  Description of Artificial Sequence: Synthetic oligonucleotide
uccugauuagcucucccca

SEQ ID NO: 2748639 - RNA, 19 nt, Artificial Sequence
  Description of Artificial Sequence: Synthetic oligonucleotide
cuuuaaucucagugguugg

SEQ ID NO: 2748640 - RNA, 19 nt, Artificial Sequence
  Description of Artificial Sequence: Synthetic oligonucleotide
ggcauuguaaagcugggcc

SEQ ID NO: 2748641 - RNA, 19 nt, Artificial Sequence
  Description of Artificial Sequence: Synthetic oligonucleotide
uaaucucagugguugggag

SEQ ID NO: 2748642 - RNA, 19 nt, Artificial Sequence
  Description of Artificial Sequence: Synthetic oligonucleotide
cuggcaagcgguuacacuc

SEQ ID NO: 2748643 - RNA, 19 nt, Artificial Sequence
  Description of Artificial Sequence: Synthetic oligonucleotide
uaauggccaucuaaaacgu

SEQ ID NO: 2748644 - RNA, 19 nt, Artificial Sequence
  Description of Artificial Sequence: Synthetic oligonucleotide
caggccuuuaaucucagug

SEQ ID NO: 2748645 - RNA, 19 nt, Artificial Sequence
  Description of Artificial Sequence: Synthetic oligonucleotide
auuggagugcauuaaugaa

SEQ ID NO: 2748646 - RNA, 19 nt, Artificial Sequence
  Description of Artificial Sequence: Synthetic oligonucleotide
gaaacaggcuucuacugga

SEQ ID NO: 2748647 - RNA, 19 nt, Artificial Sequence
  Description of Artificial Sequence: Synthetic oligonucleotide
uguaaagcugggcccuggg

SEQ ID NO: 2748648 - RNA, 19 nt, Artificial Sequence
  Description of Artificial Sequence: Synthetic oligonucleotide
gcauuaaugaaaauauggc

SEQ ID NO: 2748649 - RNA, 19 nt, Artificial Sequence
  Description of Artificial Sequence: Synthetic oligonucleotide
uuguccauuuccagcucgg

SEQ ID NO: 2748650 - RNA, 19 nt, Artificial Sequence
  Description of Artificial Sequence: Synthetic oligonucleotide
uggcacaggccuuuaaucu

SEQ ID NO: 2748651 - RNA, 19 nt, Artificial Sequence
  Description of Artificial Sequence: Synthetic oligonucleotide
uucuacuggaggaccacca

SEQ ID NO: 2748652 - RNA, 19 nt, Artificial Sequence
  Description of Artificial Sequence: Synthetic oligonucleotide
augcuguuccuuucauccc

SEQ ID NO: 2748653 - RNA, 19 nt, Artificial Sequence
  Description of Artificial Sequence: Synthetic oligonucleotide
ggacccacaucuuauaaug

SEQ ID NO: 2748654 - RNA, 19 nt, Artificial Sequence
  Description of Artificial Sequence: Synthetic oligonucleotide
acguggccagaauaggugg

SEQ ID NO: 2748655 - RNA, 19 nt, Artificial Sequence
  Description of Artificial Sequence: Synthetic oligonucleotide
acaggcuucuacuggagga

SEQ ID NO: 2748656 - RNA, 19 nt, Artificial Sequence
  Description of Artificial Sequence: Synthetic oligonucleotide
guuucaagacaccccuggg

SEQ ID NO: 2748657 - RNA, 19 nt, Artificial Sequence
  Description of Artificial Sequence: Synthetic oligonucleotide
augaaaauauggcauugua

SEQ ID NO: 2748658 - RNA, 19 nt, Artificial Sequence
  Description of Artificial Sequence: Synthetic oligonucleotide
uuaaucucagugguuggga

SEQ ID NO: 2748659 - RNA, 19 nt, Artificial Sequence
  Description of Artificial Sequence: Synthetic oligonucleotide
cacacacuuguccauuucc

SEQ ID NO: 2748660 - RNA, 19 nt, Artificial Sequence
  Description of Artificial Sequence: Synthetic oligonucleotide
agaugaugcuguuccuuuc

SEQ ID NO: 2748661 - RNA, 19 nt, Artificial Sequence
  Description of Artificial Sequence: Synthetic oligonucleotide
aagcgguuacacuccuggg

SEQ ID NO: 2748662 - RNA, 19 nt, Artificial Sequence
  Description of Artificial Sequence: Synthetic oligonucleotide
aucuaugaauucaaggcca

SEQ ID NO: 2748663 - RNA, 19 nt, Artificial Sequence
  Description of Artificial Sequence: Synthetic oligonucleotide
aacguggccagaauaggug

SEQ ID NO: 2748664 - RNA, 19 nt, Artificial Sequence
  Description of Artificial Sequence: Synthetic oligonucleotide
gaugaugcuguuccuuuca

SEQ ID NO: 2748665 - RNA, 19 nt, Artificial Sequence
  Description of Artificial Sequence: Synthetic oligonucleotide
ugauuagcucuccccagcu

SEQ ID NO: 2748666 - RNA, 19 nt, Artificial Sequence
  Description of Artificial Sequence: Synthetic oligonucleotide
gagugcauuaaugaaaaua

SEQ ID NO: 2748667 - RNA, 19 nt, Artificial Sequence
  Description of Artificial Sequence: Synthetic oligonucleotide
uggccaucuaaaacguggc

SEQ ID NO: 2748668 - RNA, 19 nt, Artificial Sequence
  Description of Artificial Sequence: Synthetic oligonucleotide
gaaggcuccagcacucagg

SEQ ID NO: 2748669 - RNA, 19 nt, Artificial Sequence
  Description of Artificial Sequence: Synthetic oligonucleotide
ucuaaaacguggccagaau

SEQ ID NO: 2748670 - RNA, 19 nt, Artificial Sequence
  Description of Artificial Sequence: Synthetic oligonucleotide
acaccaggucugcuguugc

SEQ ID NO: 2748671 - RNA, 19 nt, Artificial Sequence
  Description of Artificial Sequence: Synthetic oligonucleotide
ugaagcuccugauuagcuc

SEQ ID NO: 2748672 - RNA, 19 nt, Artificial Sequence
  Description of Artificial Sequence: Synthetic oligonucleotide
guccauuuccagcucgggg

SEQ ID NO: 2748673 - RNA, 19 nt, Artificial Sequence
  Description of Artificial Sequence: Synthetic oligonucleotide
cucaggaggcccaggaccc

SEQ ID NO: 2748674 - RNA, 19 nt, Artificial Sequence
  Description of Artificial Sequence: Synthetic oligonucleotide
cacacuuguccauuuccag

SEQ ID NO: 2748675 - RNA, 19 nt, Artificial Sequence
  Description of Artificial Sequence: Synthetic oligonucleotide
acaucuuauaauggccauc

SEQ ID NO: 2748676 - RNA, 19 nt, Artificial Sequence
  Description of Artificial Sequence: Synthetic oligonucleotide
agcgguuacacuccugggu

SEQ ID NO: 2748677 - RNA, 19 nt, Artificial Sequence
  Description of Artificial Sequence: Synthetic oligonucleotide
acuagagaugaugcuguuc

SEQ ID NO: 2748678 - RNA, 19 nt, Artificial Sequence
  Description of Artificial Sequence: Synthetic oligonucleotide
ugaaggcuccagcacucag

SEQ ID NO: 2748679 - RNA, 19 nt, Artificial Sequence
  Description of Artificial Sequence: Synthetic oligonucleotide
guaaagcugggcccugggg

SEQ ID NO: 2748680 - RNA, 19 nt, Artificial Sequence
  Description of Artificial Sequence: Synthetic oligonucleotide
aggugaaucuaugaauuca

SEQ ID NO: 2748681 - RNA, 19 nt, Artificial Sequence
  Description of Artificial Sequence: Synthetic oligonucleotide
aaacguggccagaauaggu

SEQ ID NO: 2748682 - RNA, 19 nt, Artificial Sequence
  Description of Artificial Sequence: Synthetic oligonucleotide
cuccugauuagcucucccc

SEQ ID NO: 2748683 - RNA, 19 nt, Artificial Sequence
  Description of Artificial Sequence: Synthetic oligonucleotide
acacuccuggguucugccc

SEQ ID NO: 2748684 - RNA, 19 nt, Artificial Sequence
  Description of Artificial Sequence: Synthetic oligonucleotide
cugauuagcucuccccagc

SEQ ID NO: 2748685 - RNA, 19 nt, Artificial Sequence
  Description of Artificial Sequence: Synthetic oligonucleotide
gacccacaucuuauaaugg

SEQ ID NO: 2748686 - RNA, 19 nt, Artificial Sequence
  Description of Artificial Sequence: Synthetic oligonucleotide
gaagcuccugauuagcucu

SEQ ID NO: 2748687 - RNA, 19 nt, Artificial Sequence
  Description of Artificial Sequence: Synthetic oligonucleotide
caaucccaucuccuaaggg

SEQ ID NO: 2748688 - RNA, 19 nt, Artificial Sequence
  Description of Artificial Sequence: Synthetic oligonucleotide
agugguugggagguagagg

SEQ ID NO: 2748689 - RNA, 19 nt, Artificial Sequence
  Description of Artificial Sequence: Synthetic oligonucleotide
uuagcucuccccagcuccc

SEQ ID NO: 2748690 - RNA, 19 nt, Artificial Sequence
  Description of Artificial Sequence: Synthetic oligonucleotide
caugaagcuccugauuagc

SEQ ID NO: 2748691 - RNA, 19 nt, Artificial Sequence
  Description of Artificial Sequence: Synthetic oligonucleotide
agggcucuccuccacuggg

SEQ ID NO: 2748692 - RNA, 19 nt, Artificial Sequence
  Description of Artificial Sequence: Synthetic oligonucleotide
ugggacaccaggucugcug

SEQ ID NO: 2748693 - RNA, 19 nt, Artificial Sequence
  Description of Artificial Sequence: Synthetic oligonucleotide
aucuccuaagggaaggcag

SEQ ID NO: 2748694 - RNA, 19 nt, Artificial Sequence
  Description of Artificial Sequence: Synthetic oligonucleotide
acaccccugggcuacaaga

SEQ ID NO: 2748695 - RNA, 19 nt, Artificial Sequence
  Description of Artificial Sequence: Synthetic oligonucleotide
uggcaagcgguuacacucc

SEQ ID NO: 2748696 - RNA, 19 nt, Artificial Sequence
  Description of Artificial Sequence: Synthetic oligonucleotide
cuagaaacaggcuucuacu

SEQ ID NO: 2748697 - RNA, 19 nt, Artificial Sequence
  Description of Artificial Sequence: Synthetic oligonucleotide
gcauuguaaagcugggccc

SEQ ID NO: 2748698 - RNA, 19 nt, Artificial Sequence
  Description of Artificial Sequence: Synthetic oligonucleotide
ggcuacaagaaaaucugcc

SEQ ID NO: 2748699 - RNA, 19 nt, Artificial Sequence
  Description of Artificial Sequence: Synthetic oligonucleotide
uacacuccuggguucugcc

SEQ ID NO: 2748700 - RNA, 19 nt, Artificial Sequence
  Description of Artificial Sequence: Synthetic oligonucleotide
ccuagaaacaggcuucuac

SEQ ID NO: 2748701 - RNA, 19 nt, Artificial Sequence
  Description of Artificial Sequence: Synthetic oligonucleotide
ccaucuaaaacguggccag

SEQ ID NO: 2748702 - RNA, 19 nt, Artificial Sequence
  Description of Artificial Sequence: Synthetic oligonucleotide
ccuaagggaaggcagggcc

SEQ ID NO: 2748703 - RNA, 19 nt, Artificial Sequence
  Description of Artificial Sequence: Synthetic oligonucleotide
gugaaucuaugaauucaag

SEQ ID NO: 2748704 - RNA, 19 nt, Artificial Sequence
  Description of Artificial Sequence: Synthetic oligonucleotide
aggcagggccagcugaagg

SEQ ID NO: 2748705 - RNA, 19 nt, Artificial Sequence
  Description of Artificial Sequence: Synthetic oligonucleotide
cuaaaacguggccagaaua

SEQ ID NO: 2748706 - RNA, 19 nt, Artificial Sequence
  Description of Artificial Sequence: Synthetic oligonucleotide
ugccaaucccaucuccuaa

SEQ ID NO: 2748707 - RNA, 19 nt, Artificial Sequence
  Description of Artificial Sequence: Synthetic oligonucleotide
ccuuuaaucucagugguug

SEQ ID NO: 2748708 - RNA, 19 nt, Artificial Sequence
  Description of Artificial Sequence: Synthetic oligonucleotide
acuuguccauuuccagcuc

SEQ ID NO: 2748709 - RNA, 19 nt, Artificial Sequence
  Description of Artificial Sequence: Synthetic oligonucleotide
aucucagugguugggaggu

SEQ ID NO: 2748710 - RNA, 19 nt, Artificial Sequence
  Description of Artificial Sequence: Synthetic oligonucleotide
uccagcucggggcugccug

SEQ ID NO: 2748711 - RNA, 19 nt, Artificial Sequence
  Description of Artificial Sequence: Synthetic oligonucleotide
aaacaggcuucuacuggag

SEQ ID NO: 2748712 - RNA, 19 nt, Artificial Sequence
  Description of Artificial Sequence: Synthetic oligonucleotide
ucuacuggaggaccaccau

SEQ ID NO: 2748713 - RNA, 19 nt, Artificial Sequence
  Description of Artificial Sequence: Synthetic oligonucleotide
ucccaucuccuaagggaag

SEQ ID NO: 2748714 - RNA, 19 nt, Artificial Sequence
  Description of Artificial Sequence: Synthetic oligonucleotide
uccuggguucugcccaggg

SEQ ID NO: 2748715 - RNA, 19 nt, Artificial Sequence
  Description of Artificial Sequence: Synthetic oligonucleotide
cuacuggaggaccaccaug

SEQ ID NO: 2748716 - RNA, 19 nt, Artificial Sequence
  Description of Artificial Sequence: Synthetic oligonucleotide
uuuugggcagugguggcac

SEQ ID NO: 2748717 - RNA, 19 nt, Artificial Sequence
  Description of Artificial Sequence: Synthetic oligonucleotide
uguccauuuccagcucggg

SEQ ID NO: 2748718 - RNA, 19 nt, Artificial Sequence
  Description of Artificial Sequence: Synthetic oligonucleotide
cugggcuacaagaaaaucu

SEQ ID NO: 2748719 - RNA, 19 nt, Artificial Sequence
  Description of Artificial Sequence: Synthetic oligonucleotide
cccacaucuuauaauggcc

SEQ ID NO: 2748720 - RNA, 19 nt, Artificial Sequence
  Description of Artificial Sequence: Synthetic oligonucleotide
ucagugguugggagguaga

SEQ ID NO: 2748721 - RNA, 19 nt, Artificial Sequence
  Description of Artificial Sequence: Synthetic oligonucleotide
guggcacaggccuuuaauc

SEQ ID NO: 2748722 - RNA, 19 nt, Artificial Sequence
  Description of Artificial Sequence: Synthetic oligonucleotide
gugcauuaaugaaaauaug

SEQ ID NO: 2748723 - RNA, 19 nt, Artificial Sequence
  Description of Artificial Sequence: Synthetic oligonucleotide
caggugaaucuaugaauuc

SEQ ID NO: 2748724 - RNA, 19 nt, Artificial Sequence
  Description of Artificial Sequence: Synthetic oligonucleotide
ugaugcuguuccuuucauc

SEQ ID NO: 2748725 - RNA, 19 nt, Artificial Sequence
  Description of Artificial Sequence: Synthetic oligonucleotide
uuguaaagcugggcccugg

SEQ ID NO: 2748726 - RNA, 19 nt, Artificial Sequence
  Description of Artificial Sequence: Synthetic oligonucleotide
accaugccaaucccaucuc

SEQ ID NO: 2748727 - RNA, 19 nt, Artificial Sequence
  Description of Artificial Sequence: Synthetic oligonucleotide
acugggacaccaggucugc

SEQ ID NO: 2748728 - RNA, 19 nt, Artificial Sequence
  Description of Artificial Sequence: Synthetic oligonucleotide
aggacccacaucuuauaau

SEQ ID NO: 2748729 - RNA, 19 nt, Artificial Sequence
  Description of Artificial Sequence: Synthetic oligonucleotide
gggacuagagaugaugcug

SEQ ID NO: 2748730 - RNA, 19 nt, Artificial Sequence
  Description of Artificial Sequence: Synthetic oligonucleotide
acaagaaaaucugccucga

SEQ ID NO: 2748731 - RNA, 19 nt, Artificial Sequence
  Description of Artificial Sequence: Synthetic oligonucleotide
cugcccagggcucuccucc

SEQ ID NO: 2748732 - RNA, 19 nt, Artificial Sequence
  Description of Artificial Sequence: Synthetic oligonucleotide
cuggggacuagagaugaug

SEQ ID NO: 2748733 - RNA, 19 nt, Artificial Sequence
  Description of Artificial Sequence: Synthetic oligonucleotide
acaggcuggcaugaagcuc

SEQ ID NO: 2748734 - RNA, 19 nt, Artificial Sequence
  Description of Artificial Sequence: Synthetic oligonucleotide
uagagaugaugcuguuccu

SEQ ID NO: 2748735 - RNA, 19 nt, Artificial Sequence
  Description of Artificial Sequence: Synthetic oligonucleotide
uuacacuccuggguucugc

SEQ ID NO: 2748736 - RNA, 19 nt, Artificial Sequence
  Description of Artificial Sequence: Synthetic oligonucleotide
aucuaaaacguggccagaa

SEQ ID NO: 2748737 - RNA, 19 nt, Artificial Sequence
  Description of Artificial Sequence: Synthetic oligonucleotide
ggcaugaagcuccugauua

SEQ ID NO: 2748738 - RNA, 19 nt, Artificial Sequence
  Description of Artificial Sequence: Synthetic oligonucleotide
cuccuaagggaaggcaggg

SEQ ID NO: 2748739 - RNA, 19 nt, Artificial Sequence
  Description of Artificial Sequence: Synthetic oligonucleotide
gacaccaggucugcuguug

SEQ ID NO: 2748740 - RNA, 19 nt, Artificial Sequence
  Description of Artificial Sequence: Synthetic oligonucleotide
cacugggacaccaggucug

SEQ ID NO: 2748741 - RNA, 19 nt, Artificial Sequence
  Description of Artificial Sequence: Synthetic oligonucleotide
cuguugcuggacccugugg

SEQ ID NO: 2748742 - RNA, 19 nt, Artificial Sequence
  Description of Artificial Sequence: Synthetic oligonucleotide
aagggaaggcagggccagc

SEQ ID NO: 2748743 - RNA, 19 nt, Artificial Sequence
  Description of Artificial Sequence: Synthetic oligonucleotide
caucuuauaauggccaucu

SEQ ID NO: 2748744 - RNA, 19 nt, Artificial Sequence
  Description of Artificial Sequence: Synthetic oligonucleotide
cuaagggaaggcagggcca

SEQ ID NO: 2748745 - RNA, 19 nt, Artificial Sequence
  Description of Artificial Sequence: Synthetic oligonucleotide
gauuagcucuccccagcuc

SEQ ID NO: 2748746 - RNA, 19 nt, Artificial Sequence
  Description of Artificial Sequence: Synthetic oligonucleotide
cucagugguugggagguag

SEQ ID NO: 2748747 - RNA, 19 nt, Artificial Sequence
  Description of Artificial Sequence: Synthetic oligonucleotide
uccuccacugggacaccag

SEQ ID NO: 2748748 - RNA, 19 nt, Artificial Sequence
  Description of Artificial Sequence: Synthetic oligonucleotide
gucugcuguugcuggaccc

SEQ ID NO: 2748749 - RNA, 19 nt, Artificial Sequence
  Description of Artificial Sequence: Synthetic oligonucleotide
ucugcuguugcuggacccu

SEQ ID NO: 2748750 - RNA, 19 nt, Artificial Sequence
  Description of Artificial Sequence: Synthetic oligonucleotide
aagcuccugauuagcucuc

SEQ ID NO: 2748751 - RNA, 19 nt, Artificial Sequence
  Description of Artificial Sequence: Synthetic oligonucleotide
cuucuacuggaggaccacc

SEQ ID NO: 2748752 - RNA, 19 nt, Artificial Sequence
  Description of Artificial Sequence: Synthetic oligonucleotide
guggccagaauaggugggg

SEQ ID NO: 2748753 - RNA, 19 nt, Artificial Sequence
  Description of Artificial Sequence: Synthetic oligonucleotide
acacacuuguccauuucca

SEQ ID NO: 2748754 - RNA, 19 nt, Artificial Sequence
  Description of Artificial Sequence: Synthetic oligonucleotide
caagacaccccugggcuac

SEQ ID NO: 2748755 - RNA, 19 nt, Artificial Sequence
  Description of Artificial Sequence: Synthetic oligonucleotide
augaagcuccugauuagcu

SEQ ID NO: 2748756 - RNA, 19 nt, Artificial Sequence
  Description of Artificial Sequence: Synthetic oligonucleotide
agggccagcugaaggcucc

SEQ ID NO: 2748757 - RNA, 19 nt, Artificial Sequence
  Description of Artificial Sequence: Synthetic oligonucleotide
agcuccugauuagcucucc

SEQ ID NO: 2748758 - RNA, 19 nt, Artificial Sequence
  Description of Artificial Sequence: Synthetic oligonucleotide
ggacaggcuggcaugaagc

SEQ ID NO: 2748759 - RNA, 19 nt, Artificial Sequence
  Description of Artificial Sequence: Synthetic oligonucleotide
gcaugaagcuccugauuag

SEQ ID NO: 2748760 - RNA, 19 nt, Artificial Sequence
  Description of Artificial Sequence: Synthetic oligonucleotide
ggcagggccagcugaaggc

SEQ ID NO: 2748761 - RNA, 19 nt, Artificial Sequence
  Description of Artificial Sequence: Synthetic oligonucleotide
gcuacaagaaaaucugccu

SEQ ID NO: 2748762 - RNA, 19 nt, Artificial Sequence
  Description of Artificial Sequence: Synthetic oligonucleotide
gcuggcaugaagcuccuga

SEQ ID NO: 2748763 - RNA, 19 nt, Artificial Sequence
  Description of Artificial Sequence: Synthetic oligonucleotide
uccuaagggaaggcagggc

SEQ ID NO: 2748764 - RNA, 19 nt, Artificial Sequence
  Description of Artificial Sequence: Synthetic oligonucleotide
uggcaugaagcuccugauu

SEQ ID NO: 2748765 - RNA, 19 nt, Artificial Sequence
  Description of Artificial Sequence: Synthetic oligonucleotide
ucaagacaccccugggcua

SEQ ID NO: 2748766 - RNA, 19 nt, Artificial Sequence
  Description of Artificial Sequence: Synthetic oligonucleotide
agagaugaugcuguuccuu

SEQ ID NO: 2748767 - RNA, 19 nt, Artificial Sequence
  Description of Artificial Sequence: Synthetic oligonucleotide
gccaaucccaucuccuaag

SEQ ID NO: 2748768 - RNA, 19 nt, Artificial Sequence
  Description of Artificial Sequence: Synthetic oligonucleotide
augaugcuguuccuuucau

SEQ ID NO: 2748769 - RNA, 19 nt, Artificial Sequence
  Description of Artificial Sequence: Synthetic oligonucleotide
aaggcagggccagcugaag

SEQ ID NO: 2748770 - RNA, 19 nt, Artificial Sequence
  Description of Artificial Sequence: Synthetic oligonucleotide
accaggucugcuguugcug

SEQ ID NO: 2748771 - RNA, 19 nt, Artificial Sequence
  Description of Artificial Sequence: Synthetic oligonucleotide
ggugaaucuaugaauucaa

SEQ ID NO: 2748772 - RNA, 19 nt, Artificial Sequence
  Description of Artificial Sequence: Synthetic oligonucleotide
auauggcauuguaaagcug

SEQ ID NO: 2748773 - RNA, 19 nt, Artificial Sequence
  Description of Artificial Sequence: Synthetic oligonucleotide
gacaccccugggcuacaag

SEQ ID NO: 2748774 - RNA, 19 nt, Artificial Sequence
  Description of Artificial Sequence: Synthetic oligonucleotide
aucccaucuccuaagggaa

SEQ ID NO: 2748775 - RNA, 19 nt, Artificial Sequence
  Description of Artificial Sequence: Synthetic oligonucleotide
auuguaaagcugggcccug

SEQ ID NO: 2748776 - RNA, 19 nt, Artificial Sequence
  Description of Artificial Sequence: Synthetic oligonucleotide
caggcuucuacuggaggac

SEQ ID NO: 2748777 - RNA, 19 nt, Artificial Sequence
  Description of Artificial Sequence: Synthetic oligonucleotide
gagaugaugcuguuccuuu

SEQ ID NO: 2748778 - RNA, 19 nt, Artificial Sequence
  Description of Artificial Sequence: Synthetic oligonucleotide
caguuucaagacaccccug

SEQ ID NO: 2748779 - RNA, 19 nt, Artificial Sequence
  Description of Artificial Sequence: Synthetic oligonucleotide
uggguucugcccagggcuc

SEQ ID NO: 2748780 - RNA, 19 nt, Artificial Sequence
  Description of Artificial Sequence: Synthetic oligonucleotide
gccaucuaaaacguggcca

SEQ ID NO: 2748781 - RNA, 19 nt, Artificial Sequence
  Description of Artificial Sequence: Synthetic oligonucleotide
ccaggucugcuguugcugg

SEQ ID NO: 2748782 - RNA, 19 nt, Artificial Sequence
  Description of Artificial Sequence: Synthetic oligonucleotide
cagugguugggagguagag

SEQ ID NO: 2748783 - RNA, 19 nt, Artificial Sequence
  Description of Artificial Sequence: Synthetic oligonucleotide
gcuccccacacacuugucc

SEQ ID NO: 2748784 - RNA, 19 nt, Artificial Sequence
  Description of Artificial Sequence: Synthetic oligonucleotide
augccaaucccaucuccua

SEQ ID NO: 2748785 - RNA, 19 nt, Artificial Sequence
  Description of Artificial Sequence: Synthetic oligonucleotide
ccugauuagcucuccccag

SEQ ID NO: 2748786 - RNA, 19 nt, Artificial Sequence
  Description of Artificial Sequence: Synthetic oligonucleotide
caccaugccaaucccaucu

SEQ ID NO: 2748787 - RNA, 19 nt, Artificial Sequence
  Description of Artificial Sequence: Synthetic oligonucleotide
ugcuguugcuggacccugu

SEQ ID NO: 2748788 - RNA, 19 nt, Artificial Sequence
  Description of Artificial Sequence: Synthetic oligonucleotide
ccacaucuuauaauggcca

SEQ ID NO: 2748789 - RNA, 19 nt, Artificial Sequence
  Description of Artificial Sequence: Synthetic oligonucleotide
ggcacaggccuuuaaucuc

SEQ ID NO: 2748790 - RNA, 19 nt, Artificial Sequence
  Description of Artificial Sequence: Synthetic oligonucleotide
cuggaggaccaccaugcca

SEQ ID NO: 2748791 - RNA, 19 nt, Artificial Sequence
  Description of Artificial Sequence: Synthetic oligonucleotide
ccaaucccaucuccuaagg

SEQ ID NO: 2748792 - RNA, 19 nt, Artificial Sequence
  Description of Artificial Sequence: Synthetic oligonucleotide
cacaggccuuuaaucucag

SEQ ID NO: 2748793 - RNA, 19 nt, Artificial Sequence
  Description of Artificial Sequence: Synthetic oligonucleotide
gacaggcuggcaugaagcu

SEQ ID NO: 2748794 - RNA, 19 nt, Artificial Sequence
  Description of Artificial Sequence: Synthetic oligonucleotide
cacuccuggguucugccca

SEQ ID NO: 2748795 - RNA, 19 nt, Artificial Sequence
  Description of Artificial Sequence: Synthetic oligonucleotide
accaccaugccaaucccau

SEQ ID NO: 2748796 - RNA, 19 nt, Artificial Sequence
  Description of Artificial Sequence: Synthetic oligonucleotide
cugccuggcaagcgguuac

SEQ ID NO: 2748797 - RNA, 19 nt, Artificial Sequence
  Description of Artificial Sequence: Synthetic oligonucleotide
gggacaggcuggcaugaag

SEQ ID NO: 2748798 - RNA, 19 nt, Artificial Sequence
  Description of Artificial Sequence: Synthetic oligonucleotide
cucggggcugccuggcaag

SEQ ID NO: 2748799 - RNA, 19 nt, Artificial Sequence
  Description of Artificial Sequence: Synthetic oligonucleotide
cuggguucugcccagggcu

SEQ ID NO: 2748800 - RNA, 19 nt, Artificial Sequence
  Description of Artificial Sequence: Synthetic oligonucleotide
gccaguuucaagacacccc

SEQ ID NO: 2748801 - RNA, 19 nt, Artificial Sequence
  Description of Artificial Sequence: Synthetic oligonucleotide
ucuccccagcuccccacac

SEQ ID NO: 2748802 - RNA, 19 nt, Artificial Sequence
  Description of Artificial Sequence: Synthetic oligonucleotide
uuugggcagugguggcaca

SEQ ID NO: 2748803 - RNA, 19 nt, Artificial Sequence
  Description of Artificial Sequence: Synthetic oligonucleotide
cagggcucuccuccacugg

SEQ ID NO: 2748804 - RNA, 19 nt, Artificial Sequence
  Description of Artificial Sequence: Synthetic oligonucleotide
caugccaaucccaucuccu

SEQ ID NO: 2748805 - RNA, 19 nt, Artificial Sequence
  Description of Artificial Sequence: Synthetic oligonucleotide
gagccaguuucaagacacc

SEQ ID NO: 2748806 - RNA, 19 nt, Artificial Sequence
  Description of Artificial Sequence: Synthetic oligonucleotide
agggaaggcagggccagcu

SEQ ID NO: 2748807 - RNA, 19 nt, Artificial Sequence
  Description of Artificial Sequence: Synthetic oligonucleotide
accccugggcuacaagaaa

SEQ ID NO: 2748808 - RNA, 19 nt, Artificial Sequence
  Description of Artificial Sequence: Synthetic oligonucleotide
uucugcccagggcucuccu

SEQ ID NO: 2748809 - RNA, 19 nt, Artificial Sequence
  Description of Artificial Sequence: Synthetic oligonucleotide
aucuuauaauggccaucua

SEQ ID NO: 2748810 - RNA, 19 nt, Artificial Sequence
  Description of Artificial Sequence: Synthetic oligonucleotide
cauuguaaagcugggcccu

SEQ ID NO: 2748811 - RNA, 19 nt, Artificial Sequence
  Description of Artificial Sequence: Synthetic oligonucleotide
ggcaggugaaucuaugaau

SEQ ID NO: 2748812 - RNA, 19 nt, Artificial Sequence
  Description of Artificial Sequence: Synthetic oligonucleotide
acaggccuuuaaucucagu

SEQ ID NO: 2748813 - RNA, 19 nt, Artificial Sequence
  Description of Artificial Sequence: Synthetic oligonucleotide
uccccacacacuuguccau

SEQ ID NO: 2748814 - RNA, 19 nt, Artificial Sequence
  Description of Artificial Sequence: Synthetic oligonucleotide
caucuccuaagggaaggca

SEQ ID NO: 2748815 - RNA, 19 nt, Artificial Sequence
  Description of Artificial Sequence: Synthetic oligonucleotide
ggccuuuaaucucaguggu

SEQ ID NO: 2748816 - RNA, 19 nt, Artificial Sequence
  Description of Artificial Sequence: Synthetic oligonucleotide
caagaaaaucugccucgaa

SEQ ID NO: 2748817 - RNA, 19 nt, Artificial Sequence
  Description of Artificial Sequence: Synthetic oligonucleotide
caggacccacaucuuauaa

SEQ ID NO: 2748818 - RNA, 19 nt, Artificial Sequence
  Description of Artificial Sequence: Synthetic oligonucleotide
ccuccacugggacaccagg

SEQ ID NO: 2748819 - RNA, 19 nt, Artificial Sequence
  Description of Artificial Sequence: Synthetic oligonucleotide
ggaccaccaugccaauccc

SEQ ID NO: 2748820 - RNA, 19 nt, Artificial Sequence
  Description of Artificial Sequence: Synthetic oligonucleotide
cccaucuccuaagggaagg

SEQ ID NO: 2748821 - RNA, 19 nt, Artificial Sequence
  Description of Artificial Sequence: Synthetic oligonucleotide
gaaggcagggccagcugaa

SEQ ID NO: 2748822 - RNA, 19 nt, Artificial Sequence
  Description of Artificial Sequence: Synthetic oligonucleotide
ccaugccaaucccaucucc

SEQ ID NO: 2748823 - RNA, 19 nt, Artificial Sequence
  Description of Artificial Sequence: Synthetic oligonucleotide
gggcuacaagaaaaucugc

SEQ ID NO: 2748824 - RNA, 19 nt, Artificial Sequence
  Description of Artificial Sequence: Synthetic oligonucleotide
gaccaccaugccaauccca

SEQ ID NO: 2748825 - RNA, 19 nt, Artificial Sequence
  Description of Artificial Sequence: Synthetic oligonucleotide
gcuguugcuggacccugug

SEQ ID NO: 2748826 - RNA, 19 nt, Artificial Sequence
  Description of Artificial Sequence: Synthetic oligonucleotide
gcuccugauuagcucuccc

SEQ ID NO: 2748827 - RNA, 19 nt, Artificial Sequence
  Description of Artificial Sequence: Synthetic oligonucleotide
agcucuccccagcucccca

SEQ ID NO: 2748828 - RNA, 19 nt, Artificial Sequence
  Description of Artificial Sequence: Synthetic oligonucleotide
guuacacuccuggguucug

SEQ ID NO: 2748829 - RNA, 19 nt, Artificial Sequence
  Description of Artificial Sequence: Synthetic oligonucleotide
aagcugggcccuggggacu

SEQ ID NO: 2748830 - RNA, 19 nt, Artificial Sequence
  Description of Artificial Sequence: Synthetic oligonucleotide
cagggccagcugaaggcuc

SEQ ID NO: 2748831 - RNA, 19 nt, Artificial Sequence
  Description of Artificial Sequence: Synthetic oligonucleotide
ggcccuggggacuagagau

SEQ ID NO: 2748832 - RNA, 19 nt, Artificial Sequence
  Description of Artificial Sequence: Synthetic oligonucleotide
caccccugggcuacaagaa

SEQ ID NO: 2748833 - RNA, 19 nt, Artificial Sequence
  Description of Artificial Sequence: Synthetic oligonucleotide
ugccuggcaagcgguuaca

SEQ ID NO: 2748834 - RNA, 19 nt, Artificial Sequence
  Description of Artificial Sequence: Synthetic oligonucleotide
ggacuagagaugaugcugu

SEQ ID NO: 2748835 - RNA, 19 nt, Artificial Sequence
  Description of Artificial Sequence: Synthetic oligonucleotide
ccaguuucaagacaccccu

SEQ ID NO: 2748836 - RNA, 19 nt, Artificial Sequence
  Description of Artificial Sequence: Synthetic oligonucleotide
cguggccagaauagguggg

SEQ ID NO: 2748837 - RNA, 19 nt, Artificial Sequence
  Description of Artificial Sequence: Synthetic oligonucleotide
ggcucuccuccacugggac

SEQ ID NO: 2748838 - RNA, 19 nt, Artificial Sequence
  Description of Artificial Sequence: Synthetic oligonucleotide
cugcuguugcuggacccug

SEQ ID NO: 2748839 - RNA, 19 nt, Artificial Sequence
  Description of Artificial Sequence: Synthetic oligonucleotide
uuuccagcucggggcugcc

SEQ ID NO: 2748840 - RNA, 19 nt, Artificial Sequence
  Description of Artificial Sequence: Synthetic oligonucleotide
ucggggcugccuggcaagc

SEQ ID NO: 2748841 - RNA, 19 nt, Artificial Sequence
  Description of Artificial Sequence: Synthetic oligonucleotide
cauuuccagcucggggcug

SEQ ID NO: 2748842 - RNA, 19 nt, Artificial Sequence
  Description of Artificial Sequence: Synthetic oligonucleotide
gcacaggccuuuaaucuca

SEQ ID NO: 2748843 - RNA, 19 nt, Artificial Sequence
  Description of Artificial Sequence: Synthetic oligonucleotide
gcaggugaaucuaugaauu

SEQ ID NO: 2748844 - RNA, 19 nt, Artificial Sequence
  Description of Artificial Sequence: Synthetic oligonucleotide
aagacaccccugggcuaca

SEQ ID NO: 2748845 - RNA, 19 nt, Artificial Sequence
  Description of Artificial Sequence: Synthetic oligonucleotide
gaggcccaggacccacauc

SEQ ID NO: 2748846 - RNA, 19 nt, Artificial Sequence
  Description of Artificial Sequence: Synthetic oligonucleotide
cuggcaugaagcuccugau

SEQ ID NO: 2748847 - RNA, 19 nt, Artificial Sequence
  Description of Artificial Sequence: Synthetic oligonucleotide
gcugaaggcuccagcacuc

SEQ ID NO: 2748848 - RNA, 19 nt, Artificial Sequence
  Description of Artificial Sequence: Synthetic oligonucleotide
gggaaggcagggccagcug

SEQ ID NO: 2748849 - RNA, 19 nt, Artificial Sequence
  Description of Artificial Sequence: Synthetic oligonucleotide
gacuagagaugaugcuguu

SEQ ID NO: 2748850 - RNA, 19 nt, Artificial Sequence
  Description of Artificial Sequence: Synthetic oligonucleotide
ccaucuccuaagggaaggc

SEQ ID NO: 2748851 - RNA, 19 nt, Artificial Sequence
  Description of Artificial Sequence: Synthetic oligonucleotide
caggucugcuguugcugga

SEQ ID NO: 2748852 - RNA, 19 nt, Artificial Sequence
  Description of Artificial Sequence: Synthetic oligonucleotide
gcuucuacuggaggaccac

SEQ ID NO: 2748853 - RNA, 19 nt, Artificial Sequence
  Description of Artificial Sequence: Synthetic oligonucleotide
ccugggcuacaagaaaauc

SEQ ID NO: 2748854 - RNA, 19 nt, Artificial Sequence
  Description of Artificial Sequence: Synthetic oligonucleotide
gggacaccaggucugcugu

SEQ ID NO: 2748855 - RNA, 19 nt, Artificial Sequence
  Description of Artificial Sequence: Synthetic oligonucleotide
agcuccccacacacuuguc

SEQ ID NO: 2748856 - RNA, 19 nt, Artificial Sequence
  Description of Artificial Sequence: Synthetic oligonucleotide
ccagcucggggcugccugg

SEQ ID NO: 2748857 - RNA, 19 nt, Artificial Sequence
  Description of Artificial Sequence: Synthetic oligonucleotide
ggggacuagagaugaugcu

SEQ ID NO: 2748858 - RNA, 19 nt, Artificial Sequence
  Description of Artificial Sequence: Synthetic oligonucleotide
ggcuucuacuggaggacca

SEQ ID NO: 2748859 - RNA, 19 nt, Artificial Sequence
  Description of Artificial Sequence: Synthetic oligonucleotide
cugaaggcuccagcacuca

SEQ ID NO: 2748860 - RNA, 19 nt, Artificial Sequence
  Description of Artificial Sequence: Synthetic oligonucleotide
ccagcuccccacacacuug

SEQ ID NO: 2748861 - RNA, 19 nt, Artificial Sequence
  Description of Artificial Sequence: Synthetic oligonucleotide
cuccccagcuccccacaca

SEQ ID NO: 2748862 - RNA, 19 nt, Artificial Sequence
  Description of Artificial Sequence: Synthetic oligonucleotide
gcgguuacacuccuggguu

SEQ ID NO: 2748863 - RNA, 19 nt, Artificial Sequence
  Description of Artificial Sequence: Synthetic oligonucleotide
gguuacacuccuggguucu

SEQ ID NO: 2748864 - RNA, 19 nt, Artificial Sequence
  Description of Artificial Sequence: Synthetic oligonucleotide
ccacacacuuguccauuuc

SEQ ID NO: 2748865 - RNA, 19 nt, Artificial Sequence
  Description of Artificial Sequence: Synthetic oligonucleotide
cagcuccccacacacuugu

SEQ ID NO: 2748866 - RNA, 19 nt, Artificial Sequence
  Description of Artificial Sequence: Synthetic oligonucleotide
ccccugggcuacaagaaaa

SEQ ID NO: 2748867 - RNA, 19 nt, Artificial Sequence
  Description of Artificial Sequence: Synthetic oligonucleotide
uuccagcucggggcugccu

SEQ ID NO: 2748868 - RNA, 19 nt, Artificial Sequence
  Description of Artificial Sequence: Synthetic oligonucleotide
ucucagugguugggaggua

SEQ ID NO: 2748869 - RNA, 19 nt, Artificial Sequence
  Description of Artificial Sequence: Synthetic oligonucleotide
gcucuccuccacugggaca

SEQ ID NO: 2748870 - RNA, 19 nt, Artificial Sequence
  Description of Artificial Sequence: Synthetic oligonucleotide
cagcucggggcugccuggc

SEQ ID NO: 2748871 - RNA, 19 nt, Artificial Sequence
  Description of Artificial Sequence: Synthetic oligonucleotide
aggaggcccaggacccaca

SEQ ID NO: 2748872 - RNA, 19 nt, Artificial Sequence
  Description of Artificial Sequence: Synthetic oligonucleotide
cuccuccacugggacacca

SEQ ID NO: 2748873 - RNA, 19 nt, Artificial Sequence
  Description of Artificial Sequence: Synthetic oligonucleotide
gcaagcgguuacacuccug

SEQ ID NO: 2748874 - RNA, 19 nt, Artificial Sequence
  Description of Artificial Sequence: Synthetic oligonucleotide
gcccuggggacuagagaug

SEQ ID NO: 2748875 - RNA, 19 nt, Artificial Sequence
  Description of Artificial Sequence: Synthetic oligonucleotide
caccaggucugcuguugcu

SEQ ID NO: 2748876 - RNA, 19 nt, Artificial Sequence
  Description of Artificial Sequence: Synthetic oligonucleotide
agacaccccugggcuacaa

SEQ ID NO: 2748877 - RNA, 19 nt, Artificial Sequence
  Description of Artificial Sequence: Synthetic oligonucleotide
cgguuacacuccuggguuc

SEQ ID NO: 2748878 - RNA, 19 nt, Artificial Sequence
  Description of Artificial Sequence: Synthetic oligonucleotide
ggagugcauuaaugaaaau

SEQ ID NO: 2748879 - RNA, 19 nt, Artificial Sequence
  Description of Artificial Sequence: Synthetic oligonucleotide
gcccaggacccacaucuua

SEQ ID NO: 2748880 - RNA, 19 nt, Artificial Sequence
  Description of Artificial Sequence: Synthetic oligonucleotide
gccuggcaagcgguuacac

SEQ ID NO: 2748881 - RNA, 19 nt, Artificial Sequence
  Description of Artificial Sequence: Synthetic oligonucleotide
ggcaagcgguuacacuccu

SEQ ID NO: 2748882 - RNA, 19 nt, Artificial Sequence
  Description of Artificial Sequence: Synthetic oligonucleotide
agcugggcccuggggacua

SEQ ID NO: 2748883 - RNA, 19 nt, Artificial Sequence
  Description of Artificial Sequence: Synthetic oligonucleotide
gcucggggcugccuggcaa

SEQ ID NO: 2748884 - RNA, 19 nt, Artificial Sequence
  Description of Artificial Sequence: Synthetic oligonucleotide
ccaggacccacaucuuaua

SEQ ID NO: 2748885 - RNA, 19 nt, Artificial Sequence
  Description of Artificial Sequence: Synthetic oligonucleotide
ggccagcugaaggcuccag

SEQ ID NO: 2748886 - RNA, 19 nt, Artificial Sequence
  Description of Artificial Sequence: Synthetic oligonucleotide
ccacugggacaccaggucu

SEQ ID NO: 2748887 - RNA, 19 nt, Artificial Sequence
  Description of Artificial Sequence: Synthetic oligonucleotide
ccuggcaagcgguuacacu

SEQ ID NO: 2748888 - RNA, 19 nt, Artificial Sequence
  Description of Artificial Sequence: Synthetic oligonucleotide
ccauuuccagcucggggcu

SEQ ID NO: 2748889 - RNA, 19 nt, Artificial Sequence
  Description of Artificial Sequence: Synthetic oligonucleotide
cccaggacccacaucuuau

SEQ ID NO: 2748890 - RNA, 19 nt, Artificial Sequence
  Description of Artificial Sequence: Synthetic oligonucleotide
gggcucuccuccacuggga

SEQ ID NO: 2748891 - RNA, 19 nt, Artificial Sequence
  Description of Artificial Sequence: Synthetic oligonucleotide
gcugccuggcaagcgguua

SEQ ID NO: 2748892 - RNA, 19 nt, Artificial Sequence
  Description of Artificial Sequence: Synthetic oligonucleotide
gcagggccagcugaaggcu

SEQ ID NO: 2748893 - RNA, 19 nt, Artificial Sequence
  Description of Artificial Sequence: Synthetic oligonucleotide
cccagcuccccacacacuu

SEQ ID NO: 2748894 - RNA, 19 nt, Artificial Sequence
  Description of Artificial Sequence: Synthetic oligonucleotide
ggaggcccaggacccacau

SEQ ID NO: 2748895 - RNA, 19 nt, Artificial Sequence
  Description of Artificial Sequence: Synthetic oligonucleotide
cugggcccuggggacuaga

SEQ ID NO: 2748896 - RNA, 19 nt, Artificial Sequence
  Description of Artificial Sequence: Synthetic oligonucleotide
cccugggcuacaagaaaau

SEQ ID NO: 2748897 - RNA, 19 nt, Artificial Sequence
  Description of Artificial Sequence: Synthetic oligonucleotide
gccuuuaaucucagugguu

SEQ ID NO: 2748898 - RNA, 19 nt, Artificial Sequence
  Description of Artificial Sequence: Synthetic oligonucleotide
ggaggaccaccaugccaau

SEQ ID NO: 2748899 - RNA, 19 nt, Artificial Sequence
  Description of Artificial Sequence: Synthetic oligonucleotide
cggggcugccuggcaagcg

SEQ ID NO: 2748900 - RNA, 19 nt, Artificial Sequence
  Description of Artificial Sequence: Synthetic oligonucleotide
cugggacaccaggucugcu

SEQ ID NO: 2748901 - RNA, 19 nt, Artificial Sequence
  Description of Artificial Sequence: Synthetic oligonucleotide
ggguucugcccagggcucu

SEQ ID NO: 2748902 - RNA, 19 nt, Artificial Sequence
  Description of Artificial Sequence: Synthetic oligonucleotide
gggccagcugaaggcucca

SEQ ID NO: 2748903 - RNA, 19 nt, Artificial Sequence
  Description of Artificial Sequence: Synthetic oligonucleotide
ggggacaggcuggcaugaa

SEQ ID NO: 2748904 - RNA, 19 nt, Artificial Sequence
  Description of Artificial Sequence: Synthetic oligonucleotide
gcugggcccuggggacuag

SEQ ID NO: 2748905 - RNA, 19 nt, Artificial Sequence
  Description of Artificial Sequence: Synthetic oligonucleotide
ggacaccaggucugcuguu

SEQ ID NO: 2748906 - RNA, 19 nt, Artificial Sequence
  Description of Artificial Sequence: Synthetic oligonucleotide
cccacacacuuguccauuu

SEQ ID NO: 2748907 - RNA, 19 nt, Artificial Sequence
  Description of Artificial Sequence: Synthetic oligonucleotide
gggcugccuggcaagcggu

SEQ ID NO: 2748908 - RNA, 19 nt, Artificial Sequence
  Description of Artificial Sequence: Synthetic oligonucleotide
ccccuagaaacaggcuucu

SEQ ID NO: 2748909 - RNA, 19 nt, Artificial Sequence
  Description of Artificial Sequence: Synthetic oligonucleotide
cccagggcucuccuccacu

SEQ ID NO: 2748910 - RNA, 19 nt, Artificial Sequence
  Description of Artificial Sequence: Synthetic oligonucleotide
cccuagaaacaggcuucua

SEQ ID NO: 2748911 - RNA, 19 nt, Artificial Sequence
  Description of Artificial Sequence: Synthetic oligonucleotide
ccuggggacuagagaugau

SEQ ID NO: 2748912 - RNA, 19 nt, Artificial Sequence
  Description of Artificial Sequence: Synthetic oligonucleotide
ggcugccuggcaagcgguu

SEQ ID NO: 2748913 - RNA, 19 nt, Artificial Sequence
  Description of Artificial Sequence: Synthetic oligonucleotide
ccccacacacuuguccauu

SEQ ID NO: 2748914 - RNA, 19 nt, Artificial Sequence
  Description of Artificial Sequence: Synthetic oligonucleotide
ggcccaggacccacaucuu

SEQ ID NO: 2748915 - RNA, 19 nt, Artificial Sequence
  Description of Artificial Sequence: Synthetic oligonucleotide
aacaccuccaauuaacagc

SEQ ID NO: 2748916 - RNA, 19 nt, Artificial Sequence
  Description of Artificial Sequence: Synthetic oligonucleotide
uauacuuuucagcugaugg

SEQ ID NO: 2748917 - RNA, 19 nt, Artificial Sequence
  Description of Artificial Sequence: Synthetic oligonucleotide
auuguuuuauguuugagug

SEQ ID NO: 2748918 - RNA, 19 nt, Artificial Sequence
  Description of Artificial Sequence: Synthetic oligonucleotide
aauaugaaaccagugcacc

SEQ ID NO: 2748919 - RNA, 19 nt, Artificial Sequence
  Description of Artificial Sequence: Synthetic oligonucleotide
uuuuagucaauucugcaag

SEQ ID NO: 2748920 - RNA, 19 nt, Artificial Sequence
  Description of Artificial Sequence: Synthetic oligonucleotide
uuugauguacccaguaugg

SEQ ID NO: 2748921 - RNA, 19 nt, Artificial Sequence
  Description of Artificial Sequence: Synthetic oligonucleotide
auucuuacaaaucuucaac

SEQ ID NO: 2748922 - RNA, 19 nt, Artificial Sequence
  Description of Artificial Sequence: Synthetic oligonucleotide
agucaauucugcaagaucc

SEQ ID NO: 2748923 - RNA, 19 nt, Artificial Sequence
  Description of Artificial Sequence: Synthetic oligonucleotide
ucaacuuugauguacccag

SEQ ID NO: 2748924 - RNA, 19 nt, Artificial Sequence
  Description of Artificial Sequence: Synthetic oligonucleotide
aauuguuuuauguuugagu

SEQ ID NO: 2748925 - RNA, 19 nt, Artificial Sequence
  Description of Artificial Sequence: Synthetic oligonucleotide
uucagauuugccauaacag

SEQ ID NO: 2748926 - RNA, 19 nt, Artificial Sequence
  Description of Artificial Sequence: Synthetic oligonucleotide
aaugaaguaaaguugugau

SEQ ID NO: 2748927 - RNA, 19 nt, Artificial Sequence
  Description of Artificial Sequence: Synthetic oligonucleotide
ucuucuuuacaaaugacac

SEQ ID NO: 2748928 - RNA, 19 nt, Artificial Sequence
  Description of Artificial Sequence: Synthetic oligonucleotide
caauuuuccaacuuucugg

SEQ ID NO: 2748929 - RNA, 19 nt, Artificial Sequence
  Description of Artificial Sequence: Synthetic oligonucleotide
uauguuugaguguugaagc

SEQ ID NO: 2748930 - RNA, 19 nt, Artificial Sequence
  Description of Artificial Sequence: Synthetic oligonucleotide
aaugacacaaccuccucag

SEQ ID NO: 2748931 - RNA, 19 nt, Artificial Sequence
  Description of Artificial Sequence: Synthetic oligonucleotide
ucagauuugccauaacagg

SEQ ID NO: 2748932 - RNA, 19 nt, Artificial Sequence
  Description of Artificial Sequence: Synthetic oligonucleotide
aaaagaaacaaugaaguaa

SEQ ID NO: 2748933 - RNA, 19 nt, Artificial Sequence
  Description of Artificial Sequence: Synthetic oligonucleotide
uacacuauacuuuucagcu

SEQ ID NO: 2748934 - RNA, 19 nt, Artificial Sequence
  Description of Artificial Sequence: Synthetic oligonucleotide
ugaguguugaagcugcugg

SEQ ID NO: 2748935 - RNA, 19 nt, Artificial Sequence
  Description of Artificial Sequence: Synthetic oligonucleotide
uggaauaugaaaccagugc

SEQ ID NO: 2748936 - RNA, 19 nt, Artificial Sequence
  Description of Artificial Sequence: Synthetic oligonucleotide
uuuacaaaugacacaaccu

SEQ ID NO: 2748937 - RNA, 19 nt, Artificial Sequence
  Description of Artificial Sequence: Synthetic oligonucleotide
uauuuggucauucuuacaa

SEQ ID NO: 2748938 - RNA, 19 nt, Artificial Sequence
  Description of Artificial Sequence: Synthetic oligonucleotide
uuacaaaugacacaaccuc

SEQ ID NO: 2748939 - RNA, 19 nt, Artificial Sequence
  Description of Artificial Sequence: Synthetic oligonucleotide
auacuuuucagcugauggc

SEQ ID NO: 2748940 - RNA, 19 nt, Artificial Sequence
  Description of Artificial Sequence: Synthetic oligonucleotide
cuuuacaaaugacacaacc

SEQ ID NO: 2748941 - RNA, 19 nt, Artificial Sequence
  Description of Artificial Sequence: Synthetic oligonucleotide
guagaaagaauccaccucc

SEQ ID NO: 2748942 - RNA, 19 nt, Artificial Sequence
  Description of Artificial Sequence: Synthetic oligonucleotide
uucugcaagauccagugcc

SEQ ID NO: 2748943 - RNA, 19 nt, Artificial Sequence
  Description of Artificial Sequence: Synthetic oligonucleotide
acuuucuggaauaugaaac

SEQ ID NO: 2748944 - RNA, 19 nt, Artificial Sequence
  Description of Artificial Sequence: Synthetic oligonucleotide
aaagaauccaccuccuaca

SEQ ID NO: 2748945 - RNA, 19 nt, Artificial Sequence
  Description of Artificial Sequence: Synthetic oligonucleotide
ucagcuuugcucuugaccu

SEQ ID NO: 2748946 - RNA, 19 nt, Artificial Sequence
  Description of Artificial Sequence: Synthetic oligonucleotide
uucuucuuuacaaaugaca

SEQ ID NO: 2748947 - RNA, 19 nt, Artificial Sequence
  Description of Artificial Sequence: Synthetic oligonucleotide
uuauguuugaguguugaag

SEQ ID NO: 2748948 - RNA, 19 nt, Artificial Sequence
  Description of Artificial Sequence: Synthetic oligonucleotide
ugaaguagaaagaauccac

SEQ ID NO: 2748949 - RNA, 19 nt, Artificial Sequence
  Description of Artificial Sequence: Synthetic oligonucleotide
uuacaaaucuucaacugcu

SEQ ID NO: 2748950 - RNA, 19 nt, Artificial Sequence
  Description of Artificial Sequence: Synthetic oligonucleotide
aaacaaugaaguaaaguug

SEQ ID NO: 2748951 - RNA, 19 nt, Artificial Sequence
  Description of Artificial Sequence: Synthetic oligonucleotide
cagauuugccauaacaggg

SEQ ID NO: 2748952 - RNA, 19 nt, Artificial Sequence
  Description of Artificial Sequence: Synthetic oligonucleotide
cuuacaaaucuucaacugc

SEQ ID NO: 2748953 - RNA, 19 nt, Artificial Sequence
  Description of Artificial Sequence: Synthetic oligonucleotide
aaagaaacaaugaaguaaa

SEQ ID NO: 2748954 - RNA, 19 nt, Artificial Sequence
  Description of Artificial Sequence: Synthetic oligonucleotide
aacaaugaaguaaaguugu

SEQ ID NO: 2748955 - RNA, 19 nt, Artificial Sequence
  Description of Artificial Sequence: Synthetic oligonucleotide
aauuuuccaucaaaguuuc

SEQ ID NO: 2748956 - RNA, 19 nt, Artificial Sequence
  Description of Artificial Sequence: Synthetic oligonucleotide
uggucauucuuacaaaucu

SEQ ID NO: 2748957 - RNA, 19 nt, Artificial Sequence
  Description of Artificial Sequence: Synthetic oligonucleotide
ugccagucaacuuugaugu

SEQ ID NO: 2748958 - RNA, 19 nt, Artificial Sequence
  Description of Artificial Sequence: Synthetic oligonucleotide
gaaacaaugaaguaaaguu

SEQ ID NO: 2748959 - RNA, 19 nt, Artificial Sequence
  Description of Artificial Sequence: Synthetic oligonucleotide
ugaaguaaaguugugauuu

SEQ ID NO: 2748960 - RNA, 19 nt, Artificial Sequence
  Description of Artificial Sequence: Synthetic oligonucleotide
cuuucuggaauaugaaacc

SEQ ID NO: 2748961 - RNA, 19 nt, Artificial Sequence
  Description of Artificial Sequence: Synthetic oligonucleotide
agaacauucuucuuuacaa

SEQ ID NO: 2748962 - RNA, 19 nt, Artificial Sequence
  Description of Artificial Sequence: Synthetic oligonucleotide
aagccauucagauuugcca

SEQ ID NO: 2748963 - RNA, 19 nt, Artificial Sequence
  Description of Artificial Sequence: Synthetic oligonucleotide
auaacagggaagaaggcac

SEQ ID NO: 2748964 - RNA, 19 nt, Artificial Sequence
  Description of Artificial Sequence: Synthetic oligonucleotide
uuugccauaacagggaaga

SEQ ID NO: 2748965 - RNA, 19 nt, Artificial Sequence
  Description of Artificial Sequence: Synthetic oligonucleotide
gaaagaauccaccuccuac

SEQ ID NO: 2748966 - RNA, 19 nt, Artificial Sequence
  Description of Artificial Sequence: Synthetic oligonucleotide
aacaacuuacgccaccaug

SEQ ID NO: 2748967 - RNA, 19 nt, Artificial Sequence
  Description of Artificial Sequence: Synthetic oligonucleotide
agugucaauuguuuuaugu

SEQ ID NO: 2748968 - RNA, 19 nt, Artificial Sequence
  Description of Artificial Sequence: Synthetic oligonucleotide
aaaugacacaaccuccuca

SEQ ID NO: 2748969 - RNA, 19 nt, Artificial Sequence
  Description of Artificial Sequence: Synthetic oligonucleotide
aguaacaccuccaauuaac

SEQ ID NO: 2748970 - RNA, 19 nt, Artificial Sequence
  Description of Artificial Sequence: Synthetic oligonucleotide
uucuuacaaaucuucaacu

SEQ ID NO: 2748971 - RNA, 19 nt, Artificial Sequence
  Description of Artificial Sequence: Synthetic oligonucleotide
auucagauuugccauaaca

SEQ ID NO: 2748972 - RNA, 19 nt, Artificial Sequence
  Description of Artificial Sequence: Synthetic oligonucleotide
acaacuuacgccaccaugg

SEQ ID NO: 2748973 - RNA, 19 nt, Artificial Sequence
  Description of Artificial Sequence: Synthetic oligonucleotide
ucuggaauaugaaaccagu

SEQ ID NO: 2748974 - RNA, 19 nt, Artificial Sequence
  Description of Artificial Sequence: Synthetic oligonucleotide
agcugaaguagaaagaauc

SEQ ID NO: 2748975 - RNA, 19 nt, Artificial Sequence
  Description of Artificial Sequence: Synthetic oligonucleotide
uuuuccaucaaaguuuccu

SEQ ID NO: 2748976 - RNA, 19 nt, Artificial Sequence
  Description of Artificial Sequence: Synthetic oligonucleotide
ucauucuuacaaaucuuca

SEQ ID NO: 2748977 - RNA, 19 nt, Artificial Sequence
  Description of Artificial Sequence: Synthetic oligonucleotide
cuacacuauacuuuucagc

SEQ ID NO: 2748978 - RNA, 19 nt, Artificial Sequence
  Description of Artificial Sequence: Synthetic oligonucleotide
ucaugucuuucucuacucg

SEQ ID NO: 2748979 - RNA, 19 nt, Artificial Sequence
  Description of Artificial Sequence: Synthetic oligonucleotide
ugcuacacuauacuuuuca

SEQ ID NO: 2748980 - RNA, 19 nt, Artificial Sequence
  Description of Artificial Sequence: Synthetic oligonucleotide
cuuugauguacccaguaug

SEQ ID NO: 2748981 - RNA, 19 nt, Artificial Sequence
  Description of Artificial Sequence: Synthetic oligonucleotide
ugcccaaacaacuuacgcc

SEQ ID NO: 2748982 - RNA, 19 nt, Artificial Sequence
  Description of Artificial Sequence: Synthetic oligonucleotide
uagaacauucuucuuuaca

SEQ ID NO: 2748983 - RNA, 19 nt, Artificial Sequence
  Description of Artificial Sequence: Synthetic oligonucleotide
aagaauccaccuccuacag

SEQ ID NO: 2748984 - RNA, 19 nt, Artificial Sequence
  Description of Artificial Sequence: Synthetic oligonucleotide
ugccagcugaaguagaaag

SEQ ID NO: 2748985 - RNA, 19 nt, Artificial Sequence
  Description of Artificial Sequence: Synthetic oligonucleotide
uugccagucaacuuugaug

SEQ ID NO: 2748986 - RNA, 19 nt, Artificial Sequence
  Description of Artificial Sequence: Synthetic oligonucleotide
gaaguagaaagaauccacc

SEQ ID NO: 2748987 - RNA, 19 nt, Artificial Sequence
  Description of Artificial Sequence: Synthetic oligonucleotide
aacuuucuggaauaugaaa

SEQ ID NO: 2748988 - RNA, 19 nt, Artificial Sequence
  Description of Artificial Sequence: Synthetic oligonucleotide
uacuuuucagcugauggcc

SEQ ID NO: 2748989 - RNA, 19 nt, Artificial Sequence
  Description of Artificial Sequence: Synthetic oligonucleotide
aaccuccucagcuuugcuc

SEQ ID NO: 2748990 - RNA, 19 nt, Artificial Sequence
  Description of Artificial Sequence: Synthetic oligonucleotide
accuccaauuaacagcugg

SEQ ID NO: 2748991 - RNA, 19 nt, Artificial Sequence
  Description of Artificial Sequence: Synthetic oligonucleotide
uuuaggaugccaugccaag

SEQ ID NO: 2748992 - RNA, 19 nt, Artificial Sequence
  Description of Artificial Sequence: Synthetic oligonucleotide
uuaacagcuggguugcuac

SEQ ID NO: 2748993 - RNA, 19 nt, Artificial Sequence
  Description of Artificial Sequence: Synthetic oligonucleotide
ugucaauuguuuuauguuu

SEQ ID NO: 2748994 - RNA, 19 nt, Artificial Sequence
  Description of Artificial Sequence: Synthetic oligonucleotide
ugacacaaccuccucagcu

SEQ ID NO: 2748995 - RNA, 19 nt, Artificial Sequence
  Description of Artificial Sequence: Synthetic oligonucleotide
uuuuauguuugaguguuga

SEQ ID NO: 2748996 - RNA, 19 nt, Artificial Sequence
  Description of Artificial Sequence: Synthetic oligonucleotide
uccuccagucacuagaaca

SEQ ID NO: 2748997 - RNA, 19 nt, Artificial Sequence
  Description of Artificial Sequence: Synthetic oligonucleotide
uuuuaggaugccaugccaa

SEQ ID NO: 2748998 - RNA, 19 nt, Artificial Sequence
  Description of Artificial Sequence: Synthetic oligonucleotide
uaacaccuccaauuaacag

SEQ ID NO: 2748999 - RNA, 19 nt, Artificial Sequence
  Description of Artificial Sequence: Synthetic oligonucleotide
agaaacaaugaaguaaagu

SEQ ID NO: 2749000 - RNA, 19 nt, Artificial Sequence
  Description of Artificial Sequence: Synthetic oligonucleotide
uguuuuauguuugaguguu

SEQ ID NO: 2749001 - RNA, 19 nt, Artificial Sequence
  Description of Artificial Sequence: Synthetic oligonucleotide
ugcaccauccaguaacacc

SEQ ID NO: 2749002 - RNA, 19 nt, Artificial Sequence
  Description of Artificial Sequence: Synthetic oligonucleotide
aguaugguuugccagcuga

SEQ ID NO: 2749003 - RNA, 19 nt, Artificial Sequence
  Description of Artificial Sequence: Synthetic oligonucleotide
ucuuucucuacucguugcc

SEQ ID NO: 2749004 - RNA, 19 nt, Artificial Sequence
  Description of Artificial Sequence: Synthetic oligonucleotide
uuucucuacucguugccag

SEQ ID NO: 2749005 - RNA, 19 nt, Artificial Sequence
  Description of Artificial Sequence: Synthetic oligonucleotide
ggaauaugaaaccagugca

SEQ ID NO: 2749006 - RNA, 19 nt, Artificial Sequence
  Description of Artificial Sequence: Synthetic oligonucleotide
ugguauuuggucauucuua

SEQ ID NO: 2749007 - RNA, 19 nt, Artificial Sequence
  Description of Artificial Sequence: Synthetic oligonucleotide
agucaacuuugauguaccc

SEQ ID NO: 2749008 - RNA, 19 nt, Artificial Sequence
  Description of Artificial Sequence: Synthetic oligonucleotide
gaauccaccuccuacagcu

SEQ ID NO: 2749009 - RNA, 19 nt, Artificial Sequence
  Description of Artificial Sequence: Synthetic oligonucleotide
ugucuuucucuacucguug

SEQ ID NO: 2749010 - RNA, 19 nt, Artificial Sequence
  Description of Artificial Sequence: Synthetic oligonucleotide
acuuacgccaccaugguug

SEQ ID NO: 2749011 - RNA, 19 nt, Artificial Sequence
  Description of Artificial Sequence: Synthetic oligonucleotide
aaaauccuccagucacuag

SEQ ID NO: 2749012 - RNA, 19 nt, Artificial Sequence
  Description of Artificial Sequence: Synthetic oligonucleotide
ucaauuguuuuauguuuga

SEQ ID NO: 2749013 - RNA, 19 nt, Artificial Sequence
  Description of Artificial Sequence: Synthetic oligonucleotide
gaauaugaaaccagugcac

SEQ ID NO: 2749014 - RNA, 19 nt, Artificial Sequence
  Description of Artificial Sequence: Synthetic oligonucleotide
ugccauaacagggaagaag

SEQ ID NO: 2749015 - RNA, 19 nt, Artificial Sequence
  Description of Artificial Sequence: Synthetic oligonucleotide
ugaaaccagugcaccaucc

SEQ ID NO: 2749016 - RNA, 19 nt, Artificial Sequence
  Description of Artificial Sequence: Synthetic oligonucleotide
acaaaucuucaacugcucu

SEQ ID NO: 2749017 - RNA, 19 nt, Artificial Sequence
  Description of Artificial Sequence: Synthetic oligonucleotide
agaauccaccuccuacagc

SEQ ID NO: 2749018 - RNA, 19 nt, Artificial Sequence
  Description of Artificial Sequence: Synthetic oligonucleotide
agucacuagaacauucuuc

SEQ ID NO: 2749019 - RNA, 19 nt, Artificial Sequence
  Description of Artificial Sequence: Synthetic oligonucleotide
cauucuucuuuacaaauga

SEQ ID NO: 2749020 - RNA, 19 nt, Artificial Sequence
  Description of Artificial Sequence: Synthetic oligonucleotide
aucuucaacugcucuuugg

SEQ ID NO: 2749021 - RNA, 19 nt, Artificial Sequence
  Description of Artificial Sequence: Synthetic oligonucleotide
uugcucuugaccucaguug

SEQ ID NO: 2749022 - RNA, 19 nt, Artificial Sequence
  Description of Artificial Sequence: Synthetic oligonucleotide
cucagcuuugcucuugacc

SEQ ID NO: 2749023 - RNA, 19 nt, Artificial Sequence
  Description of Artificial Sequence: Synthetic oligonucleotide
uuugcucuugaccucaguu

SEQ ID NO: 2749024 - RNA, 19 nt, Artificial Sequence
  Description of Artificial Sequence: Synthetic oligonucleotide
agugccucaaauuuuccau

SEQ ID NO: 2749025 - RNA, 19 nt, Artificial Sequence
  Description of Artificial Sequence: Synthetic oligonucleotide
acuagaacauucuucuuua

SEQ ID NO: 2749026 - RNA, 19 nt, Artificial Sequence
  Description of Artificial Sequence: Synthetic oligonucleotide
gccauaacagggaagaagg

SEQ ID NO: 2749027 - RNA, 19 nt, Artificial Sequence
  Description of Artificial Sequence: Synthetic oligonucleotide
ccaauuaacagcuggguug

SEQ ID NO: 2749028 - RNA, 19 nt, Artificial Sequence
  Description of Artificial Sequence: Synthetic oligonucleotide
aagaaggcacaggagaaga

SEQ ID NO: 2749029 - RNA, 19 nt, Artificial Sequence
  Description of Artificial Sequence: Synthetic oligonucleotide
uguugaagcugcuggcaag

SEQ ID NO: 2749030 - RNA, 19 nt, Artificial Sequence
  Description of Artificial Sequence: Synthetic oligonucleotide
auucugcaagauccagugc

SEQ ID NO: 2749031 - RNA, 19 nt, Artificial Sequence
  Description of Artificial Sequence: Synthetic oligonucleotide
accauccaguaacaccucc

SEQ ID NO: 2749032 - RNA, 19 nt, Artificial Sequence
  Description of Artificial Sequence: Synthetic oligonucleotide
cagugcaccauccaguaac

SEQ ID NO: 2749033 - RNA, 19 nt, Artificial Sequence
  Description of Artificial Sequence: Synthetic oligonucleotide
uguuugaguguugaagcug

SEQ ID NO: 2749034 - RNA, 19 nt, Artificial Sequence
  Description of Artificial Sequence: Synthetic oligonucleotide
uuguuuuauguuugagugu

SEQ ID NO: 2749035 - RNA, 19 nt, Artificial Sequence
  Description of Artificial Sequence: Synthetic oligonucleotide
uggguugcuacacuauacu

SEQ ID NO: 2749036 - RNA, 19 nt, Artificial Sequence
  Description of Artificial Sequence: Synthetic oligonucleotide
caauuaacagcuggguugc

SEQ ID NO: 2749037 - RNA, 19 nt, Artificial Sequence
  Description of Artificial Sequence: Synthetic oligonucleotide
auaugaaaccagugcacca

SEQ ID NO: 2749038 - RNA, 19 nt, Artificial Sequence
  Description of Artificial Sequence: Synthetic oligonucleotide
uuggucauucuuacaaauc

SEQ ID NO: 2749039 - RNA, 19 nt, Artificial Sequence
  Description of Artificial Sequence: Synthetic oligonucleotide
uccagugccucaaauuuuc

SEQ ID NO: 2749040 - RNA, 19 nt, Artificial Sequence
  Description of Artificial Sequence: Synthetic oligonucleotide
guuugaguguugaagcugc

SEQ ID NO: 2749041 - RNA, 19 nt, Artificial Sequence
  Description of Artificial Sequence: Synthetic oligonucleotide
ucaauucugcaagauccag

SEQ ID NO: 2749042 - RNA, 19 nt, Artificial Sequence
  Description of Artificial Sequence: Synthetic oligonucleotide
gucacuagaacauucuucu

SEQ ID NO: 2749043 - RNA, 19 nt, Artificial Sequence
  Description of Artificial Sequence: Synthetic oligonucleotide
gucaauuguuuuauguuug

SEQ ID NO: 2749044 - RNA, 19 nt, Artificial Sequence
  Description of Artificial Sequence: Synthetic oligonucleotide
aaucuucaacugcucuuug

SEQ ID NO: 2749045 - RNA, 19 nt, Artificial Sequence
  Description of Artificial Sequence: Synthetic oligonucleotide
uguugcagccaauuuucca

SEQ ID NO: 2749046 - RNA, 19 nt, Artificial Sequence
  Description of Artificial Sequence: Synthetic oligonucleotide
cuggaauaugaaaccagug

SEQ ID NO: 2749047 - RNA, 19 nt, Artificial Sequence
  Description of Artificial Sequence: Synthetic oligonucleotide
cucaguugguauuugguca

SEQ ID NO: 2749048 - RNA, 19 nt, Artificial Sequence
  Description of Artificial Sequence: Synthetic oligonucleotide
aacuuugauguacccagua

SEQ ID NO: 2749049 - RNA, 19 nt, Artificial Sequence
  Description of Artificial Sequence: Synthetic oligonucleotide
uccaauuaacagcuggguu

SEQ ID NO: 2749050 - RNA, 19 nt, Artificial Sequence
  Description of Artificial Sequence: Synthetic oligonucleotide
augguuugccagcugaagu

SEQ ID NO: 2749051 - RNA, 19 nt, Artificial Sequence
  Description of Artificial Sequence: Synthetic oligonucleotide
cagucaacuuugauguacc

SEQ ID NO: 2749052 - RNA, 19 nt, Artificial Sequence
  Description of Artificial Sequence: Synthetic oligonucleotide
uugguauuuggucauucuu

SEQ ID NO: 2749053 - RNA, 19 nt, Artificial Sequence
  Description of Artificial Sequence: Synthetic oligonucleotide
ugauguacccaguaugguu

SEQ ID NO: 2749054 - RNA, 19 nt, Artificial Sequence
  Description of Artificial Sequence: Synthetic oligonucleotide
augaaaccagugcaccauc

SEQ ID NO: 2749055 - RNA, 19 nt, Artificial Sequence
  Description of Artificial Sequence: Synthetic oligonucleotide
uccagucacuagaacauuc

SEQ ID NO: 2749056 - RNA, 19 nt, Artificial Sequence
  Description of Artificial Sequence: Synthetic oligonucleotide
uuugccagcugaaguagaa

SEQ ID NO: 2749057 - RNA, 19 nt, Artificial Sequence
  Description of Artificial Sequence: Synthetic oligonucleotide
uaugguuugccagcugaag

SEQ ID NO: 2749058 - RNA, 19 nt, Artificial Sequence
  Description of Artificial Sequence: Synthetic oligonucleotide
uccuacagcuguugcagcc

SEQ ID NO: 2749059 - RNA, 19 nt, Artificial Sequence
  Description of Artificial Sequence: Synthetic oligonucleotide
uuuauguuugaguguugaa

SEQ ID NO: 2749060 - RNA, 19 nt, Artificial Sequence
  Description of Artificial Sequence: Synthetic oligonucleotide
cacuauacuuuucagcuga

SEQ ID NO: 2749061 - RNA, 19 nt, Artificial Sequence
  Description of Artificial Sequence: Synthetic oligonucleotide
acuuuucagcugauggccc

SEQ ID NO: 2749062 - RNA, 19 nt, Artificial Sequence
  Description of Artificial Sequence: Synthetic oligonucleotide
gguauuuggucauucuuac

SEQ ID NO: 2749063 - RNA, 19 nt, Artificial Sequence
  Description of Artificial Sequence: Synthetic oligonucleotide
guugcagccaauuuuccaa

SEQ ID NO: 2749064 - RNA, 19 nt, Artificial Sequence
  Description of Artificial Sequence: Synthetic oligonucleotide
auucuucuuuacaaaugac

SEQ ID NO: 2749065 - RNA, 19 nt, Artificial Sequence
  Description of Artificial Sequence: Synthetic oligonucleotide
ucugcaagauccagugccu

SEQ ID NO: 2749066 - RNA, 19 nt, Artificial Sequence
  Description of Artificial Sequence: Synthetic oligonucleotide
ugauggcccagauuccugc

SEQ ID NO: 2749067 - RNA, 19 nt, Artificial Sequence
  Description of Artificial Sequence: Synthetic oligonucleotide
gaccucaguugguauuugg

SEQ ID NO: 2749068 - RNA, 19 nt, Artificial Sequence
  Description of Artificial Sequence: Synthetic oligonucleotide
uagaaagaauccaccuccu

SEQ ID NO: 2749069 - RNA, 19 nt, Artificial Sequence
  Description of Artificial Sequence: Synthetic oligonucleotide
gaagccauucagauuugcc

SEQ ID NO: 2749070 - RNA, 19 nt, Artificial Sequence
  Description of Artificial Sequence: Synthetic oligonucleotide
aagaaacaaugaaguaaag

SEQ ID NO: 2749071 - RNA, 19 nt, Artificial Sequence
  Description of Artificial Sequence: Synthetic oligonucleotide
auguuugaguguugaagcu

SEQ ID NO: 2749072 - RNA, 19 nt, Artificial Sequence
  Description of Artificial Sequence: Synthetic oligonucleotide
aaggcacaggagaagagga

SEQ ID NO: 2749073 - RNA, 19 nt, Artificial Sequence
  Description of Artificial Sequence: Synthetic oligonucleotide
uaacagggaagaaggcaca

SEQ ID NO: 2749074 - RNA, 19 nt, Artificial Sequence
  Description of Artificial Sequence: Synthetic oligonucleotide
gaguguugaagcugcuggc

SEQ ID NO: 2749075 - RNA, 19 nt, Artificial Sequence
  Description of Artificial Sequence: Synthetic oligonucleotide
uaugaaaccagugcaccau

SEQ ID NO: 2749076 - RNA, 19 nt, Artificial Sequence
  Description of Artificial Sequence: Synthetic oligonucleotide
uacaaaucuucaacugcuc

SEQ ID NO: 2749077 - RNA, 19 nt, Artificial Sequence
  Description of Artificial Sequence: Synthetic oligonucleotide
auggcccagauuccugccc

SEQ ID NO: 2749078 - RNA, 19 nt, Artificial Sequence
  Description of Artificial Sequence: Synthetic oligonucleotide
augacacaaccuccucagc

SEQ ID NO: 2749079 - RNA, 19 nt, Artificial Sequence
  Description of Artificial Sequence: Synthetic oligonucleotide
gaacauucuucuuuacaaa

SEQ ID NO: 2749080 - RNA, 19 nt, Artificial Sequence
  Description of Artificial Sequence: Synthetic oligonucleotide
ucaguugguauuuggucau

SEQ ID NO: 2749081 - RNA, 19 nt, Artificial Sequence
  Description of Artificial Sequence: Synthetic oligonucleotide
acaaaugacacaaccuccu

SEQ ID NO: 2749082 - RNA, 19 nt, Artificial Sequence
  Description of Artificial Sequence: Synthetic oligonucleotide
aacagggaagaaggcacag

SEQ ID NO: 2749083 - RNA, 19 nt, Artificial Sequence
  Description of Artificial Sequence: Synthetic oligonucleotide
aggccuauggaagccauuc

SEQ ID NO: 2749084 - RNA, 19 nt, Artificial Sequence
  Description of Artificial Sequence: Synthetic oligonucleotide
uucaugucuuucucuacuc

SEQ ID NO: 2749085 - RNA, 19 nt, Artificial Sequence
  Description of Artificial Sequence: Synthetic oligonucleotide
aagauccagugccucaaau

SEQ ID NO: 2749086 - RNA, 19 nt, Artificial Sequence
  Description of Artificial Sequence: Synthetic oligonucleotide
ucuuuacaaaugacacaac

SEQ ID NO: 2749087 - RNA, 19 nt, Artificial Sequence
  Description of Artificial Sequence: Synthetic oligonucleotide
acaccuccaauuaacagcu

SEQ ID NO: 2749088 - RNA, 19 nt, Artificial Sequence
  Description of Artificial Sequence: Synthetic oligonucleotide
cugcccaaacaacuuacgc

SEQ ID NO: 2749089 - RNA, 19 nt, Artificial Sequence
  Description of Artificial Sequence: Synthetic oligonucleotide
acaggagaagaggaggaag

SEQ ID NO: 2749090 - RNA, 19 nt, Artificial Sequence
  Description of Artificial Sequence: Synthetic oligonucleotide
aguugguauuuggucauuc

SEQ ID NO: 2749091 - RNA, 19 nt, Artificial Sequence
  Description of Artificial Sequence: Synthetic oligonucleotide
acacuauacuuuucagcug

SEQ ID NO: 2749092 - RNA, 19 nt, Artificial Sequence
  Description of Artificial Sequence: Synthetic oligonucleotide
caaauuuuccaucaaaguu

SEQ ID NO: 2749093 - RNA, 19 nt, Artificial Sequence
  Description of Artificial Sequence: Synthetic oligonucleotide
acaaccuccucagcuuugc

SEQ ID NO: 2749094 - RNA, 19 nt, Artificial Sequence
  Description of Artificial Sequence: Synthetic oligonucleotide
gucauucuuacaaaucuuc

SEQ ID NO: 2749095 - RNA, 19 nt, Artificial Sequence
  Description of Artificial Sequence: Synthetic oligonucleotide
acuuugauguacccaguau

SEQ ID NO: 2749096 - RNA, 19 nt, Artificial Sequence
  Description of Artificial Sequence: Synthetic oligonucleotide
agccaauuuuccaacuuuc

SEQ ID NO: 2749097 - RNA, 19 nt, Artificial Sequence
  Description of Artificial Sequence: Synthetic oligonucleotide
acccaguaugguuugccag

SEQ ID NO: 2749098 - RNA, 19 nt, Artificial Sequence
  Description of Artificial Sequence: Synthetic oligonucleotide
uccugcccaaacaacuuac

SEQ ID NO: 2749099 - RNA, 19 nt, Artificial Sequence
  Description of Artificial Sequence: Synthetic oligonucleotide
ugguuugccagcugaagua

SEQ ID NO: 2749100 - RNA, 19 nt, Artificial Sequence
  Description of Artificial Sequence: Synthetic oligonucleotide
auuuggucauucuuacaaa

SEQ ID NO: 2749101 - RNA, 19 nt, Artificial Sequence
  Description of Artificial Sequence: Synthetic oligonucleotide
aggagugucaauuguuuua

SEQ ID NO: 2749102 - RNA, 19 nt, Artificial Sequence
  Description of Artificial Sequence: Synthetic oligonucleotide
ucuacucguugccagucaa

SEQ ID NO: 2749103 - RNA, 19 nt, Artificial Sequence
  Description of Artificial Sequence: Synthetic oligonucleotide
cauucuuacaaaucuucaa

SEQ ID NO: 2749104 - RNA, 19 nt, Artificial Sequence
  Description of Artificial Sequence: Synthetic oligonucleotide
cuggguugcuacacuauac

SEQ ID NO: 2749105 - RNA, 19 nt, Artificial Sequence
  Description of Artificial Sequence: Synthetic oligonucleotide
ugcaagauccagugccuca

SEQ ID NO: 2749106 - RNA, 19 nt, Artificial Sequence
  Description of Artificial Sequence: Synthetic oligonucleotide
caauuguuuuauguuugag

SEQ ID NO: 2749107 - RNA, 19 nt, Artificial Sequence
  Description of Artificial Sequence: Synthetic oligonucleotide
ucguugccagucaacuuug

SEQ ID NO: 2749108 - RNA, 19 nt, Artificial Sequence
  Description of Artificial Sequence: Synthetic oligonucleotide
cauaacagggaagaaggca

SEQ ID NO: 2749109 - RNA, 19 nt, Artificial Sequence
  Description of Artificial Sequence: Synthetic oligonucleotide
agcuguugcagccaauuuu

SEQ ID NO: 2749110 - RNA, 19 nt, Artificial Sequence
  Description of Artificial Sequence: Synthetic oligonucleotide
gucuuucucuacucguugc

SEQ ID NO: 2749111 - RNA, 19 nt, Artificial Sequence
  Description of Artificial Sequence: Synthetic oligonucleotide
uuagucaauucugcaagau

SEQ ID NO: 2749112 - RNA, 19 nt, Artificial Sequence
  Description of Artificial Sequence: Synthetic oligonucleotide
ugaagcugcuggcaagaaa

SEQ ID NO: 2749113 - RNA, 19 nt, Artificial Sequence
  Description of Artificial Sequence: Synthetic oligonucleotide
gggaagaaggcacaggaga

SEQ ID NO: 2749114 - RNA, 19 nt, Artificial Sequence
  Description of Artificial Sequence: Synthetic oligonucleotide
ccaacuuucuggaauauga

SEQ ID NO: 2749115 - RNA, 19 nt, Artificial Sequence
  Description of Artificial Sequence: Synthetic oligonucleotide
agauuugccauaacaggga

SEQ ID NO: 2749116 - RNA, 19 nt, Artificial Sequence
  Description of Artificial Sequence: Synthetic oligonucleotide
gauccagugccucaaauuu

SEQ ID NO: 2749117 - RNA, 19 nt, Artificial Sequence
  Description of Artificial Sequence: Synthetic oligonucleotide
agauuccugcccaaacaac

SEQ ID NO: 2749118 - RNA, 19 nt, Artificial Sequence
  Description of Artificial Sequence: Synthetic oligonucleotide
uauggaagccauucagauu

SEQ ID NO: 2749119 - RNA, 19 nt, Artificial Sequence
  Description of Artificial Sequence: Synthetic oligonucleotide
gaaaccagugcaccaucca

SEQ ID NO: 2749120 - RNA, 19 nt, Artificial Sequence
  Description of Artificial Sequence: Synthetic oligonucleotide
agauccagugccucaaauu

SEQ ID NO: 2749121 - RNA, 19 nt, Artificial Sequence
  Description of Artificial Sequence: Synthetic oligonucleotide
gauuugccauaacagggaa

SEQ ID NO: 2749122 - RNA, 19 nt, Artificial Sequence
  Description of Artificial Sequence: Synthetic oligonucleotide
cuuacgccaccaugguugc

SEQ ID NO: 2749123 - RNA, 19 nt, Artificial Sequence
  Description of Artificial Sequence: Synthetic oligonucleotide
caaugaaguaaaguuguga

SEQ ID NO: 2749124 - RNA, 19 nt, Artificial Sequence
  Description of Artificial Sequence: Synthetic oligonucleotide
cuagaacauucuucuuuac

SEQ ID NO: 2749125 - RNA, 19 nt, Artificial Sequence
  Description of Artificial Sequence: Synthetic oligonucleotide
gcuacacuauacuuuucag

SEQ ID NO: 2749126 - RNA, 19 nt, Artificial Sequence
  Description of Artificial Sequence: Synthetic oligonucleotide
aaacaacuuacgccaccau

SEQ ID NO: 2749127 - RNA, 19 nt, Artificial Sequence
  Description of Artificial Sequence: Synthetic oligonucleotide
gcccaaacaacuuacgcca

SEQ ID NO: 2749128 - RNA, 19 nt, Artificial Sequence
  Description of Artificial Sequence: Synthetic oligonucleotide
uacccaguaugguuugcca

SEQ ID NO: 2749129 - RNA, 19 nt, Artificial Sequence
  Description of Artificial Sequence: Synthetic oligonucleotide
ggaagaggagugucaauug

SEQ ID NO: 2749130 - RNA, 19 nt, Artificial Sequence
  Description of Artificial Sequence: Synthetic oligonucleotide
uugcagccaauuuuccaac

SEQ ID NO: 2749131 - RNA, 19 nt, Artificial Sequence
  Description of Artificial Sequence: Synthetic oligonucleotide
ucaacugcucuuuggcuuu

SEQ ID NO: 2749132 - RNA, 19 nt, Artificial Sequence
  Description of Artificial Sequence: Synthetic oligonucleotide
cugaaguagaaagaaucca

SEQ ID NO: 2749133 - RNA, 19 nt, Artificial Sequence
  Description of Artificial Sequence: Synthetic oligonucleotide
uugaguguugaagcugcug

SEQ ID NO: 2749134 - RNA, 19 nt, Artificial Sequence
  Description of Artificial Sequence: Synthetic oligonucleotide
gaugccaugccaaguaaaa

SEQ ID NO: 2749135 - RNA, 19 nt, Artificial Sequence
  Description of Artificial Sequence: Synthetic oligonucleotide
uuaggaugccaugccaagu

SEQ ID NO: 2749136 - RNA, 19 nt, Artificial Sequence
  Description of Artificial Sequence: Synthetic oligonucleotide
gccuauggaagccauucag

SEQ ID NO: 2749137 - RNA, 19 nt, Artificial Sequence
  Description of Artificial Sequence: Synthetic oligonucleotide
gauggcccagauuccugcc

SEQ ID NO: 2749138 - RNA, 19 nt, Artificial Sequence
  Description of Artificial Sequence: Synthetic oligonucleotide
uuugaguguugaagcugcu

SEQ ID NO: 2749139 - RNA, 19 nt, Artificial Sequence
  Description of Artificial Sequence: Synthetic oligonucleotide
gauuccugcccaaacaacu

SEQ ID NO: 2749140 - RNA, 19 nt, Artificial Sequence
  Description of Artificial Sequence: Synthetic oligonucleotide
ccuccaauuaacagcuggg

SEQ ID NO: 2749141 - RNA, 19 nt, Artificial Sequence
  Description of Artificial Sequence: Synthetic oligonucleotide
aguguugaagcugcuggca

SEQ ID NO: 2749142 - RNA, 19 nt, Artificial Sequence
  Description of Artificial Sequence: Synthetic oligonucleotide
gaagaggagugucaauugu

SEQ ID NO: 2749143 - RNA, 19 nt, Artificial Sequence
  Description of Artificial Sequence: Synthetic oligonucleotide
uugauguacccaguauggu

SEQ ID NO: 2749144 - RNA, 19 nt, Artificial Sequence
  Description of Artificial Sequence: Synthetic oligonucleotide
aagaggagugucaauuguu

SEQ ID NO: 2749145 - RNA, 19 nt, Artificial Sequence
  Description of Artificial Sequence: Synthetic oligonucleotide
ccaauuuuccaacuuucug

SEQ ID NO: 2749146 - RNA, 19 nt, Artificial Sequence
  Description of Artificial Sequence: Synthetic oligonucleotide
uucucuacucguugccagu

SEQ ID NO: 2749147 - RNA, 19 nt, Artificial Sequence
  Description of Artificial Sequence: Synthetic oligonucleotide
aacuuacgccaccaugguu

SEQ ID NO: 2749148 - RNA, 19 nt, Artificial Sequence
  Description of Artificial Sequence: Synthetic oligonucleotide
guugcuacacuauacuuuu

SEQ ID NO: 2749149 - RNA, 19 nt, Artificial Sequence
  Description of Artificial Sequence: Synthetic oligonucleotide
uggcccagauuccugccca

SEQ ID NO: 2749150 - RNA, 19 nt, Artificial Sequence
  Description of Artificial Sequence: Synthetic oligonucleotide
auccuccagucacuagaac

SEQ ID NO: 2749151 - RNA, 19 nt, Artificial Sequence
  Description of Artificial Sequence: Synthetic oligonucleotide
gagugucaauuguuuuaug

SEQ ID NO: 2749152 - RNA, 19 nt, Artificial Sequence
  Description of Artificial Sequence: Synthetic oligonucleotide
cuguugcagccaauuuucc

SEQ ID NO: 2749153 - RNA, 19 nt, Artificial Sequence
  Description of Artificial Sequence: Synthetic oligonucleotide
ugcagccaauuuuccaacu

SEQ ID NO: 2749154 - RNA, 19 nt, Artificial Sequence
  Description of Artificial Sequence: Synthetic oligonucleotide
caaaugacacaaccuccuc

SEQ ID NO: 2749155 - RNA, 19 nt, Artificial Sequence
  Description of Artificial Sequence: Synthetic oligonucleotide
guaacaccuccaauuaaca

SEQ ID NO: 2749156 - RNA, 19 nt, Artificial Sequence
  Description of Artificial Sequence: Synthetic oligonucleotide
auuuuccaucaaaguuucc

SEQ ID NO: 2749157 - RNA, 19 nt, Artificial Sequence
  Description of Artificial Sequence: Synthetic oligonucleotide
accuccuacagcuguugca

SEQ ID NO: 2749158 - RNA, 19 nt, Artificial Sequence
  Description of Artificial Sequence: Synthetic oligonucleotide
acaaugaaguaaaguugug

SEQ ID NO: 2749159 - RNA, 19 nt, Artificial Sequence
  Description of Artificial Sequence: Synthetic oligonucleotide
auuugccauaacagggaag

SEQ ID NO: 2749160 - RNA, 19 nt, Artificial Sequence
  Description of Artificial Sequence: Synthetic oligonucleotide
auguacccaguaugguuug

SEQ ID NO: 2749161 - RNA, 19 nt, Artificial Sequence
  Description of Artificial Sequence: Synthetic oligonucleotide
uccucagcuuugcucuuga

SEQ ID NO: 2749162 - RNA, 19 nt, Artificial Sequence
  Description of Artificial Sequence: Synthetic oligonucleotide
ucuugaccucaguugguau

SEQ ID NO: 2749163 - RNA, 19 nt, Artificial Sequence
  Description of Artificial Sequence: Synthetic oligonucleotide
uuccugcccaaacaacuua

SEQ ID NO: 2749164 - RNA, 19 nt, Artificial Sequence
  Description of Artificial Sequence: Synthetic oligonucleotide
auccaccuccuacagcugu

SEQ ID NO: 2749165 - RNA, 19 nt, Artificial Sequence
  Description of Artificial Sequence: Synthetic oligonucleotide
cuauacuuuucagcugaug

SEQ ID NO: 2749166 - RNA, 19 nt, Artificial Sequence
  Description of Artificial Sequence: Synthetic oligonucleotide
gucaacuuugauguaccca

SEQ ID NO: 2749167 - RNA, 19 nt, Artificial Sequence
  Description of Artificial Sequence: Synthetic oligonucleotide
caaacaacuuacgccacca

SEQ ID NO: 2749168 - RNA, 19 nt, Artificial Sequence
  Description of Artificial Sequence: Synthetic oligonucleotide
agaaagaauccaccuccua

SEQ ID NO: 2749169 - RNA, 19 nt, Artificial Sequence
  Description of Artificial Sequence: Synthetic oligonucleotide
uugaccucaguugguauuu

SEQ ID NO: 2749170 - RNA, 19 nt, Artificial Sequence
  Description of Artificial Sequence: Synthetic oligonucleotide
guauuuggucauucuuaca

SEQ ID NO: 2749171 - RNA, 19 nt, Artificial Sequence
  Description of Artificial Sequence: Synthetic oligonucleotide
uaacagcuggguugcuaca

SEQ ID NO: 2749172 - RNA, 19 nt, Artificial Sequence
  Description of Artificial Sequence: Synthetic oligonucleotide
cuauggaagccauucagau

SEQ ID NO: 2749173 - RNA, 19 nt, Artificial Sequence
  Description of Artificial Sequence: Synthetic oligonucleotide
ucagcugauggcccagauu

SEQ ID NO: 2749174 - RNA, 19 nt, Artificial Sequence
  Description of Artificial Sequence: Synthetic oligonucleotide
acagcuggguugcuacacu

SEQ ID NO: 2749175 - RNA, 19 nt, Artificial Sequence
  Description of Artificial Sequence: Synthetic oligonucleotide
uggaagccauucagauuug

SEQ ID NO: 2749176 - RNA, 19 nt, Artificial Sequence
  Description of Artificial Sequence: Synthetic oligonucleotide
agaaggcacaggagaagag

SEQ ID NO: 2749177 - RNA, 19 nt, Artificial Sequence
  Description of Artificial Sequence: Synthetic oligonucleotide
cccaguaugguuugccagc

SEQ ID NO: 2749178 - RNA, 19 nt, Artificial Sequence
  Description of Artificial Sequence: Synthetic oligonucleotide
agcugauggcccagauucc

SEQ ID NO: 2749179 - RNA, 19 nt, Artificial Sequence
  Description of Artificial Sequence: Synthetic oligonucleotide
guacccaguaugguuugcc

SEQ ID NO: 2749180 - RNA, 19 nt, Artificial Sequence
  Description of Artificial Sequence: Synthetic oligonucleotide
cuacucguugccagucaac

SEQ ID NO: 2749181 - RNA, 19 nt, Artificial Sequence
  Description of Artificial Sequence: Synthetic oligonucleotide
cagauuccugcccaaacaa

SEQ ID NO: 2749182 - RNA, 19 nt, Artificial Sequence
  Description of Artificial Sequence: Synthetic oligonucleotide
caacuuucuggaauaugaa

SEQ ID NO: 2749183 - RNA, 19 nt, Artificial Sequence
  Description of Artificial Sequence: Synthetic oligonucleotide
ucucuacucguugccaguc

SEQ ID NO: 2749184 - RNA, 19 nt, Artificial Sequence
  Description of Artificial Sequence: Synthetic oligonucleotide
agaggagugucaauuguuu

SEQ ID NO: 2749185 - RNA, 19 nt, Artificial Sequence
  Description of Artificial Sequence: Synthetic oligonucleotide
uucagcugauggcccagau

SEQ ID NO: 2749186 - RNA, 19 nt, Artificial Sequence
  Description of Artificial Sequence: Synthetic oligonucleotide
gguuugccagcugaaguag

SEQ ID NO: 2749187 - RNA, 19 nt, Artificial Sequence
  Description of Artificial Sequence: Synthetic oligonucleotide
gaggaggaagaggaguguc

SEQ ID NO: 2749188 - RNA, 19 nt, Artificial Sequence
  Description of Artificial Sequence: Synthetic oligonucleotide
cugauggcccagauuccug

SEQ ID NO: 2749189 - RNA, 19 nt, Artificial Sequence
  Description of Artificial Sequence: Synthetic oligonucleotide
gcuguugcagccaauuuuc

SEQ ID NO: 2749190 - RNA, 19 nt, Artificial Sequence
  Description of Artificial Sequence: Synthetic oligonucleotide
agcuuugcucuugaccuca

SEQ ID NO: 2749191 - RNA, 19 nt, Artificial Sequence
  Description of Artificial Sequence: Synthetic oligonucleotide
guuuuauguuugaguguug

SEQ ID NO: 2749192 - RNA, 19 nt, Artificial Sequence
  Description of Artificial Sequence: Synthetic oligonucleotide
gugucaauuguuuuauguu

SEQ ID NO: 2749193 - RNA, 19 nt, Artificial Sequence
  Description of Artificial Sequence: Synthetic oligonucleotide
cuucaugucuuucucuacu

SEQ ID NO: 2749194 - RNA, 19 nt, Artificial Sequence
  Description of Artificial Sequence: Synthetic oligonucleotide
cagugccucaaauuuucca

SEQ ID NO: 2749195 - RNA, 19 nt, Artificial Sequence
  Description of Artificial Sequence: Synthetic oligonucleotide
ccucaguugguauuugguc

SEQ ID NO: 2749196 - RNA, 19 nt, Artificial Sequence
  Description of Artificial Sequence: Synthetic oligonucleotide
cuccuacagcuguugcagc

SEQ ID NO: 2749197 - RNA, 19 nt, Artificial Sequence
  Description of Artificial Sequence: Synthetic oligonucleotide
accucaguugguauuuggu

SEQ ID NO: 2749198 - RNA, 19 nt, Artificial Sequence
  Description of Artificial Sequence: Synthetic oligonucleotide
caugucuuucucuacucgu

SEQ ID NO: 2749199 - RNA, 19 nt, Artificial Sequence
  Description of Artificial Sequence: Synthetic oligonucleotide
auuaacagcuggguugcua

SEQ ID NO: 2749200 - RNA, 19 nt, Artificial Sequence
  Description of Artificial Sequence: Synthetic oligonucleotide
guugguauuuggucauucu

SEQ ID NO: 2749201 - RNA, 19 nt, Artificial Sequence
  Description of Artificial Sequence: Synthetic oligonucleotide
acacaaccuccucagcuuu

SEQ ID NO: 2749202 - RNA, 19 nt, Artificial Sequence
  Description of Artificial Sequence: Synthetic oligonucleotide
ucacuagaacauucuucuu

SEQ ID NO: 2749203 - RNA, 19 nt, Artificial Sequence
  Description of Artificial Sequence: Synthetic oligonucleotide
uacgccaccaugguugcuu

SEQ ID NO: 2749204 - RNA, 19 nt, Artificial Sequence
  Description of Artificial Sequence: Synthetic oligonucleotide
auccaguaacaccuccaau

SEQ ID NO: 2749205 - RNA, 19 nt, Artificial Sequence
  Description of Artificial Sequence: Synthetic oligonucleotide
cauucagauuugccauaac

SEQ ID NO: 2749206 - RNA, 19 nt, Artificial Sequence
  Description of Artificial Sequence: Synthetic oligonucleotide
uguacccaguaugguuugc

SEQ ID NO: 2749207 - RNA, 19 nt, Artificial Sequence
  Description of Artificial Sequence: Synthetic oligonucleotide
gucaauucugcaagaucca

SEQ ID NO: 2749208 - RNA, 19 nt, Artificial Sequence
  Description of Artificial Sequence: Synthetic oligonucleotide
ccagucaacuuugauguac

SEQ ID NO: 2749209 - RNA, 19 nt, Artificial Sequence
  Description of Artificial Sequence: Synthetic oligonucleotide
acagcuguugcagccaauu

SEQ ID NO: 2749210 - RNA, 19 nt, Artificial Sequence
  Description of Artificial Sequence: Synthetic oligonucleotide
agaaggccuauggaagcca

SEQ ID NO: 2749211 - RNA, 19 nt, Artificial Sequence
  Description of Artificial Sequence: Synthetic oligonucleotide
uugcuacacuauacuuuuc

SEQ ID NO: 2749212 - RNA, 19 nt, Artificial Sequence
  Description of Artificial Sequence: Synthetic oligonucleotide
cauccaguaacaccuccaa

SEQ ID NO: 2749213 - RNA, 19 nt, Artificial Sequence
  Description of Artificial Sequence: Synthetic oligonucleotide
aauuaacagcuggguugcu

SEQ ID NO: 2749214 - RNA, 19 nt, Artificial Sequence
  Description of Artificial Sequence: Synthetic oligonucleotide
aggaggaagaggaguguca

SEQ ID NO: 2749215 - RNA, 19 nt, Artificial Sequence
  Description of Artificial Sequence: Synthetic oligonucleotide
ccauaacagggaagaaggc

SEQ ID NO: 2749216 - RNA, 19 nt, Artificial Sequence
  Description of Artificial Sequence: Synthetic oligonucleotide
guguugaagcugcuggcaa

SEQ ID NO: 2749217 - RNA, 19 nt, Artificial Sequence
  Description of Artificial Sequence: Synthetic oligonucleotide
aauccaccuccuacagcug

SEQ ID NO: 2749218 - RNA, 19 nt, Artificial Sequence
  Description of Artificial Sequence: Synthetic oligonucleotide
cuuucucuacucguugcca

SEQ ID NO: 2749219 - RNA, 19 nt, Artificial Sequence
  Description of Artificial Sequence: Synthetic oligonucleotide
ccaaacaacuuacgccacc

SEQ ID NO: 2749220 - RNA, 19 nt, Artificial Sequence
  Description of Artificial Sequence: Synthetic oligonucleotide
cacuagaacauucuucuuu

SEQ ID NO: 2749221 - RNA, 19 nt, Artificial Sequence
  Description of Artificial Sequence: Synthetic oligonucleotide
cacaaccuccucagcuuug

SEQ ID NO: 2749222 - RNA, 19 nt, Artificial Sequence
  Description of Artificial Sequence: Synthetic oligonucleotide
ccuccuacagcuguugcag

SEQ ID NO: 2749223 - RNA, 19 nt, Artificial Sequence
  Description of Artificial Sequence: Synthetic oligonucleotide
caaaucuucaacugcucuu

SEQ ID NO: 2749224 - RNA, 19 nt, Artificial Sequence
  Description of Artificial Sequence: Synthetic oligonucleotide
gaaguaaaguugugauuuu

SEQ ID NO: 2749225 - RNA, 19 nt, Artificial Sequence
  Description of Artificial Sequence: Synthetic oligonucleotide
ccugcccaaacaacuuacg

SEQ ID NO: 2749226 - RNA, 19 nt, Artificial Sequence
  Description of Artificial Sequence: Synthetic oligonucleotide
agugcaccauccaguaaca

SEQ ID NO: 2749227 - RNA, 19 nt, Artificial Sequence
  Description of Artificial Sequence: Synthetic oligonucleotide
ugaccucaguugguauuug

SEQ ID NO: 2749228 - RNA, 19 nt, Artificial Sequence
  Description of Artificial Sequence: Synthetic oligonucleotide
acucguugccagucaacuu

SEQ ID NO: 2749229 - RNA, 19 nt, Artificial Sequence
  Description of Artificial Sequence: Synthetic oligonucleotide
caccuccuacagcuguugc

SEQ ID NO: 2749230 - RNA, 19 nt, Artificial Sequence
  Description of Artificial Sequence: Synthetic oligonucleotide
uuucagcugauggcccaga

SEQ ID NO: 2749231 - RNA, 19 nt, Artificial Sequence
  Description of Artificial Sequence: Synthetic oligonucleotide
uugccagcugaaguagaaa

SEQ ID NO: 2749232 - RNA, 19 nt, Artificial Sequence
  Description of Artificial Sequence: Synthetic oligonucleotide
ccuauggaagccauucaga

SEQ ID NO: 2749233 - RNA, 19 nt, Artificial Sequence
  Description of Artificial Sequence: Synthetic oligonucleotide
gcaccauccaguaacaccu

SEQ ID NO: 2749234 - RNA, 19 nt, Artificial Sequence
  Description of Artificial Sequence: Synthetic oligonucleotide
uccaccuccuacagcuguu

SEQ ID NO: 2749235 - RNA, 19 nt, Artificial Sequence
  Description of Artificial Sequence: Synthetic oligonucleotide
augucuuucucuacucguu

SEQ ID NO: 2749236 - RNA, 19 nt, Artificial Sequence
  Description of Artificial Sequence: Synthetic oligonucleotide
cucguugccagucaacuuu

SEQ ID NO: 2749237 - RNA, 19 nt, Artificial Sequence
  Description of Artificial Sequence: Synthetic oligonucleotide
auuccugcccaaacaacuu

SEQ ID NO: 2749238 - RNA, 19 nt, Artificial Sequence
  Description of Artificial Sequence: Synthetic oligonucleotide
uugaagcugcuggcaagaa

SEQ ID NO: 2749239 - RNA, 19 nt, Artificial Sequence
  Description of Artificial Sequence: Synthetic oligonucleotide
gaggagugucaauuguuuu

SEQ ID NO: 2749240 - RNA, 19 nt, Artificial Sequence
  Description of Artificial Sequence: Synthetic oligonucleotide
cagcuuugcucuugaccuc

SEQ ID NO: 2749241 - RNA, 19 nt, Artificial Sequence
  Description of Artificial Sequence: Synthetic oligonucleotide
caguaacaccuccaauuaa

SEQ ID NO: 2749242 - RNA, 19 nt, Artificial Sequence
  Description of Artificial Sequence: Synthetic oligonucleotide
uugccauaacagggaagaa

SEQ ID NO: 2749243 - RNA, 19 nt, Artificial Sequence
  Description of Artificial Sequence: Synthetic oligonucleotide
ggaagccauucagauuugc

SEQ ID NO: 2749244 - RNA, 19 nt, Artificial Sequence
  Description of Artificial Sequence: Synthetic oligonucleotide
guuugccagcugaaguaga

SEQ ID NO: 2749245 - RNA, 19 nt, Artificial Sequence
  Description of Artificial Sequence: Synthetic oligonucleotide
caguaugguuugccagcug

SEQ ID NO: 2749246 - RNA, 19 nt, Artificial Sequence
  Description of Artificial Sequence: Synthetic oligonucleotide
ccucaaauuuuccaucaaa

SEQ ID NO: 2749247 - RNA, 19 nt, Artificial Sequence
  Description of Artificial Sequence: Synthetic oligonucleotide
ccagauuccugcccaaaca

SEQ ID NO: 2749248 - RNA, 19 nt, Artificial Sequence
  Description of Artificial Sequence: Synthetic oligonucleotide
cucuacucguugccaguca

SEQ ID NO: 2749249 - RNA, 19 nt, Artificial Sequence
  Description of Artificial Sequence: Synthetic oligonucleotide
cugcaagauccagugccuc

SEQ ID NO: 2749250 - RNA, 19 nt, Artificial Sequence
  Description of Artificial Sequence: Synthetic oligonucleotide
guaugguuugccagcugaa

SEQ ID NO: 2749251 - RNA, 19 nt, Artificial Sequence
  Description of Artificial Sequence: Synthetic oligonucleotide
caccauccaguaacaccuc

SEQ ID NO: 2749252 - RNA, 19 nt, Artificial Sequence
  Description of Artificial Sequence: Synthetic oligonucleotide
ccagcugaaguagaaagaa

SEQ ID NO: 2749253 - RNA, 19 nt, Artificial Sequence
  Description of Artificial Sequence: Synthetic oligonucleotide
cuugaccucaguugguauu

SEQ ID NO: 2749254 - RNA, 19 nt, Artificial Sequence
  Description of Artificial Sequence: Synthetic oligonucleotide
acuauacuuuucagcugau

SEQ ID NO: 2749255 - RNA, 19 nt, Artificial Sequence
  Description of Artificial Sequence: Synthetic oligonucleotide
ggaggaagaggagugucaa

SEQ ID NO: 2749256 - RNA, 19 nt, Artificial Sequence
  Description of Artificial Sequence: Synthetic oligonucleotide
guugccagucaacuuugau

SEQ ID NO: 2749257 - RNA, 19 nt, Artificial Sequence
  Description of Artificial Sequence: Synthetic oligonucleotide
cccagauuccugcccaaac

SEQ ID NO: 2749258 - RNA, 19 nt, Artificial Sequence
  Description of Artificial Sequence: Synthetic oligonucleotide
ccagugccucaaauuuucc

SEQ ID NO: 2749259 - RNA, 19 nt, Artificial Sequence
  Description of Artificial Sequence: Synthetic oligonucleotide
ccaguaacaccuccaauua

SEQ ID NO: 2749260 - RNA, 19 nt, Artificial Sequence
  Description of Artificial Sequence: Synthetic oligonucleotide
auccagugccucaaauuuu

SEQ ID NO: 2749261 - RNA, 19 nt, Artificial Sequence
  Description of Artificial Sequence: Synthetic oligonucleotide
cuccaauuaacagcugggu

SEQ ID NO: 2749262 - RNA, 19 nt, Artificial Sequence
  Description of Artificial Sequence: Synthetic oligonucleotide
cuacagcuguugcagccaa

SEQ ID NO: 2749263 - RNA, 19 nt, Artificial Sequence
  Description of Artificial Sequence: Synthetic oligonucleotide
gguugcuacacuauacuuu

SEQ ID NO: 2749264 - RNA, 19 nt, Artificial Sequence
  Description of Artificial Sequence: Synthetic oligonucleotide
cuccucagcuuugcucuug

SEQ ID NO: 2749265 - RNA, 19 nt, Artificial Sequence
  Description of Artificial Sequence: Synthetic oligonucleotide
ggagugucaauuguuuuau

SEQ ID NO: 2749266 - RNA, 19 nt, Artificial Sequence
  Description of Artificial Sequence: Synthetic oligonucleotide
cucuugaccucaguuggua

SEQ ID NO: 2749267 - RNA, 19 nt, Artificial Sequence
  Description of Artificial Sequence: Synthetic oligonucleotide
gccagcugaaguagaaaga

SEQ ID NO: 2749268 - RNA, 19 nt, Artificial Sequence
  Description of Artificial Sequence: Synthetic oligonucleotide
gcacaggagaagaggagga

SEQ ID NO: 2749269 - RNA, 19 nt, Artificial Sequence
  Description of Artificial Sequence: Synthetic oligonucleotide
cccaaacaacuuacgccac

SEQ ID NO: 2749270 - RNA, 19 nt, Artificial Sequence
  Description of Artificial Sequence: Synthetic oligonucleotide
caccuccaauuaacagcug

SEQ ID NO: 2749271 - RNA, 19 nt, Artificial Sequence
  Description of Artificial Sequence: Synthetic oligonucleotide
ccauccaguaacaccucca

SEQ ID NO: 2749272 - RNA, 19 nt, Artificial Sequence
  Description of Artificial Sequence: Synthetic oligonucleotide
aaggccuauggaagccauu

SEQ ID NO: 2749273 - RNA, 19 nt, Artificial Sequence
  Description of Artificial Sequence: Synthetic oligonucleotide
agcuggguugcuacacuau

SEQ ID NO: 2749274 - RNA, 19 nt, Artificial Sequence
  Description of Artificial Sequence: Synthetic oligonucleotide
caacuuacgccaccauggu

SEQ ID NO: 2749275 - RNA, 19 nt, Artificial Sequence
  Description of Artificial Sequence: Synthetic oligonucleotide
gaggaagaggagugucaau

SEQ ID NO: 2749276 - RNA, 19 nt, Artificial Sequence
  Description of Artificial Sequence: Synthetic oligonucleotide
gcuggguugcuacacuaua

SEQ ID NO: 2749277 - RNA, 19 nt, Artificial Sequence
  Description of Artificial Sequence: Synthetic oligonucleotide
caacuuugauguacccagu

SEQ ID NO: 2749278 - RNA, 19 nt, Artificial Sequence
  Description of Artificial Sequence: Synthetic oligonucleotide
ggccuauggaagccauuca

SEQ ID NO: 2749279 - RNA, 19 nt, Artificial Sequence
  Description of Artificial Sequence: Synthetic oligonucleotide
cagccaauuuuccaacuuu

SEQ ID NO: 2749280 - RNA, 19 nt, Artificial Sequence
  Description of Artificial Sequence: Synthetic oligonucleotide
cagcuggguugcuacacua

SEQ ID NO: 2749281 - RNA, 19 nt, Artificial Sequence
  Description of Artificial Sequence: Synthetic oligonucleotide
cacaggagaagaggaggaa

SEQ ID NO: 2749282 - RNA, 19 nt, Artificial Sequence
  Description of Artificial Sequence: Synthetic oligonucleotide
gugcaccauccaguaacac

SEQ ID NO: 2749283 - RNA, 19 nt, Artificial Sequence
  Description of Artificial Sequence: Synthetic oligonucleotide
gcaagauccagugccucaa

SEQ ID NO: 2749284 - RNA, 19 nt, Artificial Sequence
  Description of Artificial Sequence: Synthetic oligonucleotide
cagcugaaguagaaagaau

SEQ ID NO: 2749285 - RNA, 19 nt, Artificial Sequence
  Description of Artificial Sequence: Synthetic oligonucleotide
ggaugccaugccaaguaaa

SEQ ID NO: 2749286 - RNA, 19 nt, Artificial Sequence
  Description of Artificial Sequence: Synthetic oligonucleotide
gaaggccuauggaagccau

SEQ ID NO: 2749287 - RNA, 19 nt, Artificial Sequence
  Description of Artificial Sequence: Synthetic oligonucleotide
gccauucagauuugccaua

SEQ ID NO: 2749288 - RNA, 19 nt, Artificial Sequence
  Description of Artificial Sequence: Synthetic oligonucleotide
ccagucacuagaacauucu

SEQ ID NO: 2749289 - RNA, 19 nt, Artificial Sequence
  Description of Artificial Sequence: Synthetic oligonucleotide
gccaauuuuccaacuuucu

SEQ ID NO: 2749290 - RNA, 19 nt, Artificial Sequence
  Description of Artificial Sequence: Synthetic oligonucleotide
gccucaaauuuuccaucaa

SEQ ID NO: 2749291 - RNA, 19 nt, Artificial Sequence
  Description of Artificial Sequence: Synthetic oligonucleotide
cagucacuagaacauucuu

SEQ ID NO: 2749292 - RNA, 19 nt, Artificial Sequence
  Description of Artificial Sequence: Synthetic oligonucleotide
ggguugcuacacuauacuu

SEQ ID NO: 2749293 - RNA, 19 nt, Artificial Sequence
  Description of Artificial Sequence: Synthetic oligonucleotide
ggucauucuuacaaaucuu

SEQ ID NO: 2749294 - RNA, 19 nt, Artificial Sequence
  Description of Artificial Sequence: Synthetic oligonucleotide
ccauucagauuugccauaa

SEQ ID NO: 2749295 - RNA, 19 nt, Artificial Sequence
  Description of Artificial Sequence: Synthetic oligonucleotide
cuuugcucuugaccucagu

SEQ ID NO: 2749296 - RNA, 19 nt, Artificial Sequence
  Description of Artificial Sequence: Synthetic oligonucleotide
gcugauggcccagauuccu

SEQ ID NO: 2749297 - RNA, 19 nt, Artificial Sequence
  Description of Artificial Sequence: Synthetic oligonucleotide
ccucagcuuugcucuugac

SEQ ID NO: 2749298 - RNA, 19 nt, Artificial Sequence
  Description of Artificial Sequence: Synthetic oligonucleotide
ccaccuccuacagcuguug

SEQ ID NO: 2749299 - RNA, 19 nt, Artificial Sequence
  Description of Artificial Sequence: Synthetic oligonucleotide
caaccuccucagcuuugcu

SEQ ID NO: 2749300 - RNA, 19 nt, Artificial Sequence
  Description of Artificial Sequence: Synthetic oligonucleotide
cagcuguugcagccaauuu

SEQ ID NO: 2749301 - RNA, 19 nt, Artificial Sequence
  Description of Artificial Sequence: Synthetic oligonucleotide
gccagucaacuuugaugua

SEQ ID NO: 2749302 - RNA, 19 nt, Artificial Sequence
  Description of Artificial Sequence: Synthetic oligonucleotide
ccaguaugguuugccagcu

SEQ ID NO: 2749303 - RNA, 19 nt, Artificial Sequence
  Description of Artificial Sequence: Synthetic oligonucleotide
ggcccagauuccugcccaa

SEQ ID NO: 2749304 - RNA, 19 nt, Artificial Sequence
  Description of Artificial Sequence: Synthetic oligonucleotide
cuccagucacuagaacauu

SEQ ID NO: 2749305 - RNA, 19 nt, Artificial Sequence
  Description of Artificial Sequence: Synthetic oligonucleotide
gcucuugaccucaguuggu

SEQ ID NO: 2749306 - RNA, 19 nt, Artificial Sequence
  Description of Artificial Sequence: Synthetic oligonucleotide
cguugccagucaacuuuga

SEQ ID NO: 2749307 - RNA, 19 nt, Artificial Sequence
  Description of Artificial Sequence: Synthetic oligonucleotide
gcccagauuccugcccaaa

SEQ ID NO: 2749308 - RNA, 19 nt, Artificial Sequence
  Description of Artificial Sequence: Synthetic oligonucleotide
ccuccucagcuuugcucuu

SEQ ID NO: 2749309 - RNA, 19 nt, Artificial Sequence
  Description of Artificial Sequence: Synthetic oligonucleotide
gaaacuucaucucugagag

SEQ ID NO: 2749310 - RNA, 19 nt, Artificial Sequence
  Description of Artificial Sequence: Synthetic oligonucleotide
aacauugugaacugcuccc

SEQ ID NO: 2749311 - RNA, 19 nt, Artificial Sequence
  Description of Artificial Sequence: Synthetic oligonucleotide
aaccauaugccccuucucc

SEQ ID NO: 2749312 - RNA, 19 nt, Artificial Sequence
  Description of Artificial Sequence: Synthetic oligonucleotide
cuccuaguaagaaagaucg

SEQ ID NO: 2749313 - RNA, 19 nt, Artificial Sequence
  Description of Artificial Sequence: Synthetic oligonucleotide
uuuguugcagaccuggucc

SEQ ID NO: 2749314 - RNA, 19 nt, Artificial Sequence
  Description of Artificial Sequence: Synthetic oligonucleotide
agaaagaucgccgagcccc

SEQ ID NO: 2749315 - RNA, 19 nt, Artificial Sequence
  Description of Artificial Sequence: Synthetic oligonucleotide
uagcacauguaccagagag

SEQ ID NO: 2749316 - RNA, 19 nt, Artificial Sequence
  Description of Artificial Sequence: Synthetic oligonucleotide
uucuggacuucucugaccg

SEQ ID NO: 2749317 - RNA, 19 nt, Artificial Sequence
  Description of Artificial Sequence: Synthetic oligonucleotide
ucgacaugccauuauauag

SEQ ID NO: 2749318 - RNA, 19 nt, Artificial Sequence
  Description of Artificial Sequence: Synthetic oligonucleotide
aacuucaucucugagagca

SEQ ID NO: 2749319 - RNA, 19 nt, Artificial Sequence
  Description of Artificial Sequence: Synthetic oligonucleotide
uaagaucauuuucauaacc

SEQ ID NO: 2749320 - RNA, 19 nt, Artificial Sequence
  Description of Artificial Sequence: Synthetic oligonucleotide
aucaucugcacacugguag

SEQ ID NO: 2749321 - RNA, 19 nt, Artificial Sequence
  Description of Artificial Sequence: Synthetic oligonucleotide
uaagaaagaucgccgagcc

SEQ ID NO: 2749322 - RNA, 19 nt, Artificial Sequence
  Description of Artificial Sequence: Synthetic oligonucleotide
uguucuugaccuaaugucu

SEQ ID NO: 2749323 - RNA, 19 nt, Artificial Sequence
  Description of Artificial Sequence: Synthetic oligonucleotide
uaacaagugggacaggaac

SEQ ID NO: 2749324 - RNA, 19 nt, Artificial Sequence
  Description of Artificial Sequence: Synthetic oligonucleotide
ucgaagcucaugcuggugg

SEQ ID NO: 2749325 - RNA, 19 nt, Artificial Sequence
  Description of Artificial Sequence: Synthetic oligonucleotide
uugugggucgucuugaccc

SEQ ID NO: 2749326 - RNA, 19 nt, Artificial Sequence
  Description of Artificial Sequence: Synthetic oligonucleotide
ucuugaaacuucaucucug

SEQ ID NO: 2749327 - RNA, 19 nt, Artificial Sequence
  Description of Artificial Sequence: Synthetic oligonucleotide
aaacgugcccacgugaggg

SEQ ID NO: 2749328 - RNA, 19 nt, Artificial Sequence
  Description of Artificial Sequence: Synthetic oligonucleotide
gcuaagaucauuuucauaa

SEQ ID NO: 2749329 - RNA, 19 nt, Artificial Sequence
  Description of Artificial Sequence: Synthetic oligonucleotide
gaacauugugaacugcucc

SEQ ID NO: 2749330 - RNA, 19 nt, Artificial Sequence
  Description of Artificial Sequence: Synthetic oligonucleotide
uuuaacaagugggacagga

SEQ ID NO: 2749331 - RNA, 19 nt, Artificial Sequence
  Description of Artificial Sequence: Synthetic oligonucleotide
cuccccuuuaacaaguggg

SEQ ID NO: 2749332 - RNA, 19 nt, Artificial Sequence
  Description of Artificial Sequence: Synthetic oligonucleotide
aagaaagaucgccgagccc

SEQ ID NO: 2749333 - RNA, 19 nt, Artificial Sequence
  Description of Artificial Sequence: Synthetic oligonucleotide
gaugaccacacugagaaac

SEQ ID NO: 2749334 - RNA, 19 nt, Artificial Sequence
  Description of Artificial Sequence: Synthetic oligonucleotide
uucucugaccgucacagga

SEQ ID NO: 2749335 - RNA, 19 nt, Artificial Sequence
  Description of Artificial Sequence: Synthetic oligonucleotide
uccaacauggauugggcug

SEQ ID NO: 2749336 - RNA, 19 nt, Artificial Sequence
  Description of Artificial Sequence: Synthetic oligonucleotide
uggguuagcacauguacca

SEQ ID NO: 2749337 - RNA, 19 nt, Artificial Sequence
  Description of Artificial Sequence: Synthetic oligonucleotide
aaugucuccuaguaagaaa

SEQ ID NO: 2749338 - RNA, 19 nt, Artificial Sequence
  Description of Artificial Sequence: Synthetic oligonucleotide
uugaccuaaugucuccuag

SEQ ID NO: 2749339 - RNA, 19 nt, Artificial Sequence
  Description of Artificial Sequence: Synthetic oligonucleotide
uucauaaccauaugccccu

SEQ ID NO: 2749340 - RNA, 19 nt, Artificial Sequence
  Description of Artificial Sequence: Synthetic oligonucleotide
ucuccuaguaagaaagauc

SEQ ID NO: 2749341 - RNA, 19 nt, Artificial Sequence
  Description of Artificial Sequence: Synthetic oligonucleotide
aaacuucaucucugagagc

SEQ ID NO: 2749342 - RNA, 19 nt, Artificial Sequence
  Description of Artificial Sequence: Synthetic oligonucleotide
uguggcuaagaucauuuuc

SEQ ID NO: 2749343 - RNA, 19 nt, Artificial Sequence
  Description of Artificial Sequence: Synthetic oligonucleotide
gaaacauuccuguagcucu

SEQ ID NO: 2749344 - RNA, 19 nt, Artificial Sequence
  Description of Artificial Sequence: Synthetic oligonucleotide
acauguaccagagaggcca

SEQ ID NO: 2749345 - RNA, 19 nt, Artificial Sequence
  Description of Artificial Sequence: Synthetic oligonucleotide
uggaguuccucccagccca

SEQ ID NO: 2749346 - RNA, 19 nt, Artificial Sequence
  Description of Artificial Sequence: Synthetic oligonucleotide
ucaucaucugcacacuggu

SEQ ID NO: 2749347 - RNA, 19 nt, Artificial Sequence
  Description of Artificial Sequence: Synthetic oligonucleotide
cucucaugugccuuguggg

SEQ ID NO: 2749348 - RNA, 19 nt, Artificial Sequence
  Description of Artificial Sequence: Synthetic oligonucleotide
ucaucugcacacugguagg

SEQ ID NO: 2749349 - RNA, 19 nt, Artificial Sequence
  Description of Artificial Sequence: Synthetic oligonucleotide
acuucuggacuucucugac

SEQ ID NO: 2749350 - RNA, 19 nt, Artificial Sequence
  Description of Artificial Sequence: Synthetic oligonucleotide
auugugaacugcucccggg

SEQ ID NO: 2749351 - RNA, 19 nt, Artificial Sequence
  Description of Artificial Sequence: Synthetic oligonucleotide
aagugggacaggaacauug

SEQ ID NO: 2749352 - RNA, 19 nt, Artificial Sequence
  Description of Artificial Sequence: Synthetic oligonucleotide
gacacuuguggccaucuug

SEQ ID NO: 2749353 - RNA, 19 nt, Artificial Sequence
  Description of Artificial Sequence: Synthetic oligonucleotide
gaagcuccccuuuaacaag

SEQ ID NO: 2749354 - RNA, 19 nt, Artificial Sequence
  Description of Artificial Sequence: Synthetic oligonucleotide
ucaugugccuugugggucg

SEQ ID NO: 2749355 - RNA, 19 nt, Artificial Sequence
  Description of Artificial Sequence: Synthetic oligonucleotide
uaguaagaaagaucgccga

SEQ ID NO: 2749356 - RNA, 19 nt, Artificial Sequence
  Description of Artificial Sequence: Synthetic oligonucleotide
ucuccaacauggauugggc

SEQ ID NO: 2749357 - RNA, 19 nt, Artificial Sequence
  Description of Artificial Sequence: Synthetic oligonucleotide
ccacugaucuccaacaugg

SEQ ID NO: 2749358 - RNA, 19 nt, Artificial Sequence
  Description of Artificial Sequence: Synthetic oligonucleotide
auaaccauaugccccuucu

SEQ ID NO: 2749359 - RNA, 19 nt, Artificial Sequence
  Description of Artificial Sequence: Synthetic oligonucleotide
ucucugaccgucacaggag

SEQ ID NO: 2749360 - RNA, 19 nt, Artificial Sequence
  Description of Artificial Sequence: Synthetic oligonucleotide
ucgaagcuccccuuuaaca

SEQ ID NO: 2749361 - RNA, 19 nt, Artificial Sequence
  Description of Artificial Sequence: Synthetic oligonucleotide
aaucaugguuuuguugcag

SEQ ID NO: 2749362 - RNA, 19 nt, Artificial Sequence
  Description of Artificial Sequence: Synthetic oligonucleotide
guaagaaagaucgccgagc

SEQ ID NO: 2749363 - RNA, 19 nt, Artificial Sequence
  Description of Artificial Sequence: Synthetic oligonucleotide
uccccuuuaacaaguggga

SEQ ID NO: 2749364 - RNA, 19 nt, Artificial Sequence
  Description of Artificial Sequence: Synthetic oligonucleotide
guuagcacauguaccagag

SEQ ID NO: 2749365 - RNA, 19 nt, Artificial Sequence
  Description of Artificial Sequence: Synthetic oligonucleotide
ugagaaacgugcccacgug

SEQ ID NO: 2749366 - RNA, 19 nt, Artificial Sequence
  Description of Artificial Sequence: Synthetic oligonucleotide
ugcgggauccgagucaagg

SEQ ID NO: 2749367 - RNA, 19 nt, Artificial Sequence
  Description of Artificial Sequence: Synthetic oligonucleotide
ucugugaacuucuggacuu

SEQ ID NO: 2749368 - RNA, 19 nt, Artificial Sequence
  Description of Artificial Sequence: Synthetic oligonucleotide
gacaugccauuauauaguc

SEQ ID NO: 2749369 - RNA, 19 nt, Artificial Sequence
  Description of Artificial Sequence: Synthetic oligonucleotide
uuaacaagugggacaggaa

SEQ ID NO: 2749370 - RNA, 19 nt, Artificial Sequence
  Description of Artificial Sequence: Synthetic oligonucleotide
accccguccacugaucucc

SEQ ID NO: 2749371 - RNA, 19 nt, Artificial Sequence
  Description of Artificial Sequence: Synthetic oligonucleotide
aggggcauggaacacccag

SEQ ID NO: 2749372 - RNA, 19 nt, Artificial Sequence
  Description of Artificial Sequence: Synthetic oligonucleotide
gaaacgugcccacgugagg

SEQ ID NO: 2749373 - RNA, 19 nt, Artificial Sequence
  Description of Artificial Sequence: Synthetic oligonucleotide
uucuugaccuaaugucucc

SEQ ID NO: 2749374 - RNA, 19 nt, Artificial Sequence
  Description of Artificial Sequence: Synthetic oligonucleotide
accaguuccucugugaacu

SEQ ID NO: 2749375 - RNA, 19 nt, Artificial Sequence
  Description of Artificial Sequence: Synthetic oligonucleotide
gguuuuguugcagaccugg

SEQ ID NO: 2749376 - RNA, 19 nt, Artificial Sequence
  Description of Artificial Sequence: Synthetic oligonucleotide
ccuaguaagaaagaucgcc

SEQ ID NO: 2749377 - RNA, 19 nt, Artificial Sequence
  Description of Artificial Sequence: Synthetic oligonucleotide
cacacugagaaacgugccc

SEQ ID NO: 2749378 - RNA, 19 nt, Artificial Sequence
  Description of Artificial Sequence: Synthetic oligonucleotide
agaucgccgagccccacac

SEQ ID NO: 2749379 - RNA, 19 nt, Artificial Sequence
  Description of Artificial Sequence: Synthetic oligonucleotide
ucaugguuuuguugcagac

SEQ ID NO: 2749380 - RNA, 19 nt, Artificial Sequence
  Description of Artificial Sequence: Synthetic oligonucleotide
aaacauuccuguagcucuc

SEQ ID NO: 2749381 - RNA, 19 nt, Artificial Sequence
  Description of Artificial Sequence: Synthetic oligonucleotide
acugguaggggacucccug

SEQ ID NO: 2749382 - RNA, 19 nt, Artificial Sequence
  Description of Artificial Sequence: Synthetic oligonucleotide
uugugaacugcucccggga

SEQ ID NO: 2749383 - RNA, 19 nt, Artificial Sequence
  Description of Artificial Sequence: Synthetic oligonucleotide
gucuugacccucgacaugc

SEQ ID NO: 2749384 - RNA, 19 nt, Artificial Sequence
  Description of Artificial Sequence: Synthetic oligonucleotide
ucugcacacugguagggga

SEQ ID NO: 2749385 - RNA, 19 nt, Artificial Sequence
  Description of Artificial Sequence: Synthetic oligonucleotide
cauaugccccuucuccucg

SEQ ID NO: 2749386 - RNA, 19 nt, Artificial Sequence
  Description of Artificial Sequence: Synthetic oligonucleotide
ugaccuaaugucuccuagu

SEQ ID NO: 2749387 - RNA, 19 nt, Artificial Sequence
  Description of Artificial Sequence: Synthetic oligonucleotide
gucgucuugacccucgaca

SEQ ID NO: 2749388 - RNA, 19 nt, Artificial Sequence
  Description of Artificial Sequence: Synthetic oligonucleotide
gucaucaucugcacacugg

SEQ ID NO: 2749389 - RNA, 19 nt, Artificial Sequence
  Description of Artificial Sequence: Synthetic oligonucleotide
uccuaguaagaaagaucgc

SEQ ID NO: 2749390 - RNA, 19 nt, Artificial Sequence
  Description of Artificial Sequence: Synthetic oligonucleotide
aucaugguuuuguugcaga

SEQ ID NO: 2749391 - RNA, 19 nt, Artificial Sequence
  Description of Artificial Sequence: Synthetic oligonucleotide
gguggguuagcacauguac

SEQ ID NO: 2749392 - RNA, 19 nt, Artificial Sequence
  Description of Artificial Sequence: Synthetic oligonucleotide
ucucaugugccuugugggu

SEQ ID NO: 2749393 - RNA, 19 nt, Artificial Sequence
  Description of Artificial Sequence: Synthetic oligonucleotide
caugguuuuguugcagacc

SEQ ID NO: 2749394 - RNA, 19 nt, Artificial Sequence
  Description of Artificial Sequence: Synthetic oligonucleotide
cacgugaggggcauggaac

SEQ ID NO: 2749395 - RNA, 19 nt, Artificial Sequence
  Description of Artificial Sequence: Synthetic oligonucleotide
cauugugaacugcucccgg

SEQ ID NO: 2749396 - RNA, 19 nt, Artificial Sequence
  Description of Artificial Sequence: Synthetic oligonucleotide
acauugugaacugcucccg

SEQ ID NO: 2749397 - RNA, 19 nt, Artificial Sequence
  Description of Artificial Sequence: Synthetic oligonucleotide
ugucuccuaguaagaaaga

SEQ ID NO: 2749398 - RNA, 19 nt, Artificial Sequence
  Description of Artificial Sequence: Synthetic oligonucleotide
ugaggccccagacacuugu

SEQ ID NO: 2749399 - RNA, 19 nt, Artificial Sequence
  Description of Artificial Sequence: Synthetic oligonucleotide
accauaugccccuucuccu

SEQ ID NO: 2749400 - RNA, 19 nt, Artificial Sequence
  Description of Artificial Sequence: Synthetic oligonucleotide
uaaugucuccuaguaagaa

SEQ ID NO: 2749401 - RNA, 19 nt, Artificial Sequence
  Description of Artificial Sequence: Synthetic oligonucleotide
cuugaaacuucaucucuga

SEQ ID NO: 2749402 - RNA, 19 nt, Artificial Sequence
  Description of Artificial Sequence: Synthetic oligonucleotide
uguaccagagaggccacca

SEQ ID NO: 2749403 - RNA, 19 nt, Artificial Sequence
  Description of Artificial Sequence: Synthetic oligonucleotide
uugacccucgacaugccau

SEQ ID NO: 2749404 - RNA, 19 nt, Artificial Sequence
  Description of Artificial Sequence: Synthetic oligonucleotide
auccgagucaaggaugcuc

SEQ ID NO: 2749405 - RNA, 19 nt, Artificial Sequence
  Description of Artificial Sequence: Synthetic oligonucleotide
ugaacugcucccgggaaac

SEQ ID NO: 2749406 - RNA, 19 nt, Artificial Sequence
  Description of Artificial Sequence: Synthetic oligonucleotide
ucgucuugacccucgacau

SEQ ID NO: 2749407 - RNA, 19 nt, Artificial Sequence
  Description of Artificial Sequence: Synthetic oligonucleotide
agaaacgugcccacgugag

SEQ ID NO: 2749408 - RNA, 19 nt, Artificial Sequence
  Description of Artificial Sequence: Synthetic oligonucleotide
ucugaccgucacaggagcc

SEQ ID NO: 2749409 - RNA, 19 nt, Artificial Sequence
  Description of Artificial Sequence: Synthetic oligonucleotide
cacuuccaggccccgaugg

SEQ ID NO: 2749410 - RNA, 19 nt, Artificial Sequence
  Description of Artificial Sequence: Synthetic oligonucleotide
accugguccaggcacugag

SEQ ID NO: 2749411 - RNA, 19 nt, Artificial Sequence
  Description of Artificial Sequence: Synthetic oligonucleotide
uuagcacauguaccagaga

SEQ ID NO: 2749412 - RNA, 19 nt, Artificial Sequence
  Description of Artificial Sequence: Synthetic oligonucleotide
gccucuguggcuaagauca

SEQ ID NO: 2749413 - RNA, 19 nt, Artificial Sequence
  Description of Artificial Sequence: Synthetic oligonucleotide
ugugaacugcucccgggaa

SEQ ID NO: 2749414 - RNA, 19 nt, Artificial Sequence
  Description of Artificial Sequence: Synthetic oligonucleotide
cuucuggacuucucugacc

SEQ ID NO: 2749415 - RNA, 19 nt, Artificial Sequence
  Description of Artificial Sequence: Synthetic oligonucleotide
aggccccagacacuugugg

SEQ ID NO: 2749416 - RNA, 19 nt, Artificial Sequence
  Description of Artificial Sequence: Synthetic oligonucleotide
ugggucgucuugacccucg

SEQ ID NO: 2749417 - RNA, 19 nt, Artificial Sequence
  Description of Artificial Sequence: Synthetic oligonucleotide
gagaaacgugcccacguga

SEQ ID NO: 2749418 - RNA, 19 nt, Artificial Sequence
  Description of Artificial Sequence: Synthetic oligonucleotide
agccucgaagcucaugcug

SEQ ID NO: 2749419 - RNA, 19 nt, Artificial Sequence
  Description of Artificial Sequence: Synthetic oligonucleotide
augaccacacugagaaacg

SEQ ID NO: 2749420 - RNA, 19 nt, Artificial Sequence
  Description of Artificial Sequence: Synthetic oligonucleotide
acacugguaggggacuccc

SEQ ID NO: 2749421 - RNA, 19 nt, Artificial Sequence
  Description of Artificial Sequence: Synthetic oligonucleotide
guagcucucaugugccuug

SEQ ID NO: 2749422 - RNA, 19 nt, Artificial Sequence
  Description of Artificial Sequence: Synthetic oligonucleotide
aggaacauugugaacugcu

SEQ ID NO: 2749423 - RNA, 19 nt, Artificial Sequence
  Description of Artificial Sequence: Synthetic oligonucleotide
cauuccuguagcucucaug

SEQ ID NO: 2749424 - RNA, 19 nt, Artificial Sequence
  Description of Artificial Sequence: Synthetic oligonucleotide
ugccauuauauagucuggu

SEQ ID NO: 2749425 - RNA, 19 nt, Artificial Sequence
  Description of Artificial Sequence: Synthetic oligonucleotide
gaucauuuucauaaccaua

SEQ ID NO: 2749426 - RNA, 19 nt, Artificial Sequence
  Description of Artificial Sequence: Synthetic oligonucleotide
uuccaggccccgauggaug

SEQ ID NO: 2749427 - RNA, 19 nt, Artificial Sequence
  Description of Artificial Sequence: Synthetic oligonucleotide
caugcugguggguuagcac

SEQ ID NO: 2749428 - RNA, 19 nt, Artificial Sequence
  Description of Artificial Sequence: Synthetic oligonucleotide
cuugugggucgucuugacc

SEQ ID NO: 2749429 - RNA, 19 nt, Artificial Sequence
  Description of Artificial Sequence: Synthetic oligonucleotide
gaccuaaugucuccuagua

SEQ ID NO: 2749430 - RNA, 19 nt, Artificial Sequence
  Description of Artificial Sequence: Synthetic oligonucleotide
uaaccauaugccccuucuc

SEQ ID NO: 2749431 - RNA, 19 nt, Artificial Sequence
  Description of Artificial Sequence: Synthetic oligonucleotide
acugagaaacgugcccacg

SEQ ID NO: 2749432 - RNA, 19 nt, Artificial Sequence
  Description of Artificial Sequence: Synthetic oligonucleotide
cucugaccgucacaggagc

SEQ ID NO: 2749433 - RNA, 19 nt, Artificial Sequence
  Description of Artificial Sequence: Synthetic oligonucleotide
ugccuugugggucgucuug

SEQ ID NO: 2749434 - RNA, 19 nt, Artificial Sequence
  Description of Artificial Sequence: Synthetic oligonucleotide
acgugaggggcauggaaca

SEQ ID NO: 2749435 - RNA, 19 nt, Artificial Sequence
  Description of Artificial Sequence: Synthetic oligonucleotide
ucccagcccagccucgaag

SEQ ID NO: 2749436 - RNA, 19 nt, Artificial Sequence
  Description of Artificial Sequence: Synthetic oligonucleotide
gagucaaggaugcucuucu

SEQ ID NO: 2749437 - RNA, 19 nt, Artificial Sequence
  Description of Artificial Sequence: Synthetic oligonucleotide
aagaucgccgagccccaca

SEQ ID NO: 2749438 - RNA, 19 nt, Artificial Sequence
  Description of Artificial Sequence: Synthetic oligonucleotide
cacccaguccucaaucaug

SEQ ID NO: 2749439 - RNA, 19 nt, Artificial Sequence
  Description of Artificial Sequence: Synthetic oligonucleotide
ugguaggggacucccugga

SEQ ID NO: 2749440 - RNA, 19 nt, Artificial Sequence
  Description of Artificial Sequence: Synthetic oligonucleotide
uugggcugcgggauccgag

SEQ ID NO: 2749441 - RNA, 19 nt, Artificial Sequence
  Description of Artificial Sequence: Synthetic oligonucleotide
gugacgaccccguccacug

SEQ ID NO: 2749442 - RNA, 19 nt, Artificial Sequence
  Description of Artificial Sequence: Synthetic oligonucleotide
agcagcugggcagucauca

SEQ ID NO: 2749443 - RNA, 19 nt, Artificial Sequence
  Description of Artificial Sequence: Synthetic oligonucleotide
ucuugaccuaaugucuccu

SEQ ID NO: 2749444 - RNA, 19 nt, Artificial Sequence
  Description of Artificial Sequence: Synthetic oligonucleotide
uggcuaagaucauuuucau

SEQ ID NO: 2749445 - RNA, 19 nt, Artificial Sequence
  Description of Artificial Sequence: Synthetic oligonucleotide
agagcagcugggcagucau

SEQ ID NO: 2749446 - RNA, 19 nt, Artificial Sequence
  Description of Artificial Sequence: Synthetic oligonucleotide
gguccaggcacugaggccc

SEQ ID NO: 2749447 - RNA, 19 nt, Artificial Sequence
  Description of Artificial Sequence: Synthetic oligonucleotide
gaccacacugagaaacgug

SEQ ID NO: 2749448 - RNA, 19 nt, Artificial Sequence
  Description of Artificial Sequence: Synthetic oligonucleotide
aaagaucgccgagccccac

SEQ ID NO: 2749449 - RNA, 19 nt, Artificial Sequence
  Description of Artificial Sequence: Synthetic oligonucleotide
ugugccuugugggucgucu

SEQ ID NO: 2749450 - RNA, 19 nt, Artificial Sequence
  Description of Artificial Sequence: Synthetic oligonucleotide
accuaaugucuccuaguaa

SEQ ID NO: 2749451 - RNA, 19 nt, Artificial Sequence
  Description of Artificial Sequence: Synthetic oligonucleotide
cacauguaccagagaggcc

SEQ ID NO: 2749452 - RNA, 19 nt, Artificial Sequence
  Description of Artificial Sequence: Synthetic oligonucleotide
cauggaacacccaguccuc

SEQ ID NO: 2749453 - RNA, 19 nt, Artificial Sequence
  Description of Artificial Sequence: Synthetic oligonucleotide
aacauggauugggcugcgg

SEQ ID NO: 2749454 - RNA, 19 nt, Artificial Sequence
  Description of Artificial Sequence: Synthetic oligonucleotide
aagcuccccuuuaacaagu

SEQ ID NO: 2749455 - RNA, 19 nt, Artificial Sequence
  Description of Artificial Sequence: Synthetic oligonucleotide
ucaugcugguggguuagca

SEQ ID NO: 2749456 - RNA, 19 nt, Artificial Sequence
  Description of Artificial Sequence: Synthetic oligonucleotide
cauggauugggcugcggga

SEQ ID NO: 2749457 - RNA, 19 nt, Artificial Sequence
  Description of Artificial Sequence: Synthetic oligonucleotide
ucccuggaguuccucccag

SEQ ID NO: 2749458 - RNA, 19 nt, Artificial Sequence
  Description of Artificial Sequence: Synthetic oligonucleotide
ugugggucgucuugacccu

SEQ ID NO: 2749459 - RNA, 19 nt, Artificial Sequence
  Description of Artificial Sequence: Synthetic oligonucleotide
cucgaagcuccccuuuaac

SEQ ID NO: 2749460 - RNA, 19 nt, Artificial Sequence
  Description of Artificial Sequence: Synthetic oligonucleotide
aacauuccuguagcucuca

SEQ ID NO: 2749461 - RNA, 19 nt, Artificial Sequence
  Description of Artificial Sequence: Synthetic oligonucleotide
ucuugacccucgacaugcc

SEQ ID NO: 2749462 - RNA, 19 nt, Artificial Sequence
  Description of Artificial Sequence: Synthetic oligonucleotide
ugguccaggcacugaggcc

SEQ ID NO: 2749463 - RNA, 19 nt, Artificial Sequence
  Description of Artificial Sequence: Synthetic oligonucleotide
ccuguagcucucaugugcc

SEQ ID NO: 2749464 - RNA, 19 nt, Artificial Sequence
  Description of Artificial Sequence: Synthetic oligonucleotide
guaccagagaggccaccag

SEQ ID NO: 2749465 - RNA, 19 nt, Artificial Sequence
  Description of Artificial Sequence: Synthetic oligonucleotide
cugcacacugguaggggac

SEQ ID NO: 2749466 - RNA, 19 nt, Artificial Sequence
  Description of Artificial Sequence: Synthetic oligonucleotide
ugugacgaccccguccacu

SEQ ID NO: 2749467 - RNA, 19 nt, Artificial Sequence
  Description of Artificial Sequence: Synthetic oligonucleotide
aucgccgagccccacacuu

SEQ ID NO: 2749468 - RNA, 19 nt, Artificial Sequence
  Description of Artificial Sequence: Synthetic oligonucleotide
aacugcucccgggaaacau

SEQ ID NO: 2749469 - RNA, 19 nt, Artificial Sequence
  Description of Artificial Sequence: Synthetic oligonucleotide
ggaaacauuccuguagcuc

SEQ ID NO: 2749470 - RNA, 19 nt, Artificial Sequence
  Description of Artificial Sequence: Synthetic oligonucleotide
cugaucuccaacauggauu

SEQ ID NO: 2749471 - RNA, 19 nt, Artificial Sequence
  Description of Artificial Sequence: Synthetic oligonucleotide
gugggacaggaacauugug

SEQ ID NO: 2749472 - RNA, 19 nt, Artificial Sequence
  Description of Artificial Sequence: Synthetic oligonucleotide
cucgacaugccauuauaua

SEQ ID NO: 2749473 - RNA, 19 nt, Artificial Sequence
  Description of Artificial Sequence: Synthetic oligonucleotide
cuggacuucucugaccguc

SEQ ID NO: 2749474 - RNA, 19 nt, Artificial Sequence
  Description of Artificial Sequence: Synthetic oligonucleotide
cugcucccgggaaacauuc

SEQ ID NO: 2749475 - RNA, 19 nt, Artificial Sequence
  Description of Artificial Sequence: Synthetic oligonucleotide
gcauggaacacccaguccu

SEQ ID NO: 2749476 - RNA, 19 nt, Artificial Sequence
  Description of Artificial Sequence: Synthetic oligonucleotide
cucaugugccuuguggguc

SEQ ID NO: 2749477 - RNA, 19 nt, Artificial Sequence
  Description of Artificial Sequence: Synthetic oligonucleotide
caaucaugguuuuguugca

SEQ ID NO: 2749478 - RNA, 19 nt, Artificial Sequence
  Description of Artificial Sequence: Synthetic oligonucleotide
cauaaccauaugccccuuc

SEQ ID NO: 2749479 - RNA, 19 nt, Artificial Sequence
  Description of Artificial Sequence: Synthetic oligonucleotide
auguaccagagaggccacc

SEQ ID NO: 2749480 - RNA, 19 nt, Artificial Sequence
  Description of Artificial Sequence: Synthetic oligonucleotide
uguagcucucaugugccuu

SEQ ID NO: 2749481 - RNA, 19 nt, Artificial Sequence
  Description of Artificial Sequence: Synthetic oligonucleotide
ccgggaaacauuccuguag

SEQ ID NO: 2749482 - RNA, 19 nt, Artificial Sequence
  Description of Artificial Sequence: Synthetic oligonucleotide
acacccaguccucaaucau

SEQ ID NO: 2749483 - RNA, 19 nt, Artificial Sequence
  Description of Artificial Sequence: Synthetic oligonucleotide
ugggcugcgggauccgagu

SEQ ID NO: 2749484 - RNA, 19 nt, Artificial Sequence
  Description of Artificial Sequence: Synthetic oligonucleotide
ugcagaccugguccaggca

SEQ ID NO: 2749485 - RNA, 19 nt, Artificial Sequence
  Description of Artificial Sequence: Synthetic oligonucleotide
gguuagcacauguaccaga

SEQ ID NO: 2749486 - RNA, 19 nt, Artificial Sequence
  Description of Artificial Sequence: Synthetic oligonucleotide
guggccaucuugaaacuuc

SEQ ID NO: 2749487 - RNA, 19 nt, Artificial Sequence
  Description of Artificial Sequence: Synthetic oligonucleotide
aagcucaugcugguggguu

SEQ ID NO: 2749488 - RNA, 19 nt, Artificial Sequence
  Description of Artificial Sequence: Synthetic oligonucleotide
cuuuaacaagugggacagg

SEQ ID NO: 2749489 - RNA, 19 nt, Artificial Sequence
  Description of Artificial Sequence: Synthetic oligonucleotide
ugguggguuagcacaugua

SEQ ID NO: 2749490 - RNA, 19 nt, Artificial Sequence
  Description of Artificial Sequence: Synthetic oligonucleotide
acgugcccacgugaggggc

SEQ ID NO: 2749491 - RNA, 19 nt, Artificial Sequence
  Description of Artificial Sequence: Synthetic oligonucleotide
caccaguuccucugugaac

SEQ ID NO: 2749492 - RNA, 19 nt, Artificial Sequence
  Description of Artificial Sequence: Synthetic oligonucleotide
ccaacauggauugggcugc

SEQ ID NO: 2749493 - RNA, 19 nt, Artificial Sequence
  Description of Artificial Sequence: Synthetic oligonucleotide
ugcucccgggaaacauucc

SEQ ID NO: 2749494 - RNA, 19 nt, Artificial Sequence
  Description of Artificial Sequence: Synthetic oligonucleotide
ugcacacugguaggggacu

SEQ ID NO: 2749495 - RNA, 19 nt, Artificial Sequence
  Description of Artificial Sequence: Synthetic oligonucleotide
gcuccccuuuaacaagugg

SEQ ID NO: 2749496 - RNA, 19 nt, Artificial Sequence
  Description of Artificial Sequence: Synthetic oligonucleotide
ugacccucgacaugccauu

SEQ ID NO: 2749497 - RNA, 19 nt, Artificial Sequence
  Description of Artificial Sequence: Synthetic oligonucleotide
auggauugggcugcgggau

SEQ ID NO: 2749498 - RNA, 19 nt, Artificial Sequence
  Description of Artificial Sequence: Synthetic oligonucleotide
uggauugggcugcgggauc

SEQ ID NO: 2749499 - RNA, 19 nt, Artificial Sequence
  Description of Artificial Sequence: Synthetic oligonucleotide
caggaacauugugaacugc

SEQ ID NO: 2749500 - RNA, 19 nt, Artificial Sequence
  Description of Artificial Sequence: Synthetic oligonucleotide
gacuucucugaccgucaca

SEQ ID NO: 2749501 - RNA, 19 nt, Artificial Sequence
  Description of Artificial Sequence: Synthetic oligonucleotide
ccgauggaugaccacacug

SEQ ID NO: 2749502 - RNA, 19 nt, Artificial Sequence
  Description of Artificial Sequence: Synthetic oligonucleotide
acacuuccaggccccgaug

SEQ ID NO: 2749503 - RNA, 19 nt, Artificial Sequence
  Description of Artificial Sequence: Synthetic oligonucleotide
gauugggcugcgggauccg

SEQ ID NO: 2749504 - RNA, 19 nt, Artificial Sequence
  Description of Artificial Sequence: Synthetic oligonucleotide
ucuggacuucucugaccgu

SEQ ID NO: 2749505 - RNA, 19 nt, Artificial Sequence
  Description of Artificial Sequence: Synthetic oligonucleotide
ggccccagacacuuguggc

SEQ ID NO: 2749506 - RNA, 19 nt, Artificial Sequence
  Description of Artificial Sequence: Synthetic oligonucleotide
cccuuuaacaagugggaca

SEQ ID NO: 2749507 - RNA, 19 nt, Artificial Sequence
  Description of Artificial Sequence: Synthetic oligonucleotide
cucugugaacuucuggacu

SEQ ID NO: 2749508 - RNA, 19 nt, Artificial Sequence
  Description of Artificial Sequence: Synthetic oligonucleotide
cgggaaacauuccuguagc

SEQ ID NO: 2749509 - RNA, 19 nt, Artificial Sequence
  Description of Artificial Sequence: Synthetic oligonucleotide
guaggggacucccuggagu

SEQ ID NO: 2749510 - RNA, 19 nt, Artificial Sequence
  Description of Artificial Sequence: Synthetic oligonucleotide
acaugccauuauauagucu

SEQ ID NO: 2749511 - RNA, 19 nt, Artificial Sequence
  Description of Artificial Sequence: Synthetic oligonucleotide
uguggccaucuugaaacuu

SEQ ID NO: 2749512 - RNA, 19 nt, Artificial Sequence
  Description of Artificial Sequence: Synthetic oligonucleotide
gaaagaucgccgagcccca

SEQ ID NO: 2749513 - RNA, 19 nt, Artificial Sequence
  Description of Artificial Sequence: Synthetic oligonucleotide
uaugccccuucuccucgaa

SEQ ID NO: 2749514 - RNA, 19 nt, Artificial Sequence
  Description of Artificial Sequence: Synthetic oligonucleotide
ccacacugagaaacgugcc

SEQ ID NO: 2749515 - RNA, 19 nt, Artificial Sequence
  Description of Artificial Sequence: Synthetic oligonucleotide
cacacugguaggggacucc

SEQ ID NO: 2749516 - RNA, 19 nt, Artificial Sequence
  Description of Artificial Sequence: Synthetic oligonucleotide
acauuccuguagcucucau

SEQ ID NO: 2749517 - RNA, 19 nt, Artificial Sequence
  Description of Artificial Sequence: Synthetic oligonucleotide
gggcauggaacacccaguc

SEQ ID NO: 2749518 - RNA, 19 nt, Artificial Sequence
  Description of Artificial Sequence: Synthetic oligonucleotide
cugagaaacgugcccacgu

SEQ ID NO: 2749519 - RNA, 19 nt, Artificial Sequence
  Description of Artificial Sequence: Synthetic oligonucleotide
gguaggggacucccuggag

SEQ ID NO: 2749520 - RNA, 19 nt, Artificial Sequence
  Description of Artificial Sequence: Synthetic oligonucleotide
ugacgaccccguccacuga

SEQ ID NO: 2749521 - RNA, 19 nt, Artificial Sequence
  Description of Artificial Sequence: Synthetic oligonucleotide
gugaacugcucccgggaaa

SEQ ID NO: 2749522 - RNA, 19 nt, Artificial Sequence
  Description of Artificial Sequence: Synthetic oligonucleotide
auggaacacccaguccuca

SEQ ID NO: 2749523 - RNA, 19 nt, Artificial Sequence
  Description of Artificial Sequence: Synthetic oligonucleotide
cuugacccucgacaugcca

SEQ ID NO: 2749524 - RNA, 19 nt, Artificial Sequence
  Description of Artificial Sequence: Synthetic oligonucleotide
caggccccgauggaugacc

SEQ ID NO: 2749525 - RNA, 19 nt, Artificial Sequence
  Description of Artificial Sequence: Synthetic oligonucleotide
cuugaccuaaugucuccua

SEQ ID NO: 2749526 - RNA, 19 nt, Artificial Sequence
  Description of Artificial Sequence: Synthetic oligonucleotide
agcucaugcugguggguua

SEQ ID NO: 2749527 - RNA, 19 nt, Artificial Sequence
  Description of Artificial Sequence: Synthetic oligonucleotide
ggauugggcugcgggaucc

SEQ ID NO: 2749528 - RNA, 19 nt, Artificial Sequence
  Description of Artificial Sequence: Synthetic oligonucleotide
agcucucaugugccuugug

SEQ ID NO: 2749529 - RNA, 19 nt, Artificial Sequence
  Description of Artificial Sequence: Synthetic oligonucleotide
caacauggauugggcugcg

SEQ ID NO: 2749530 - RNA, 19 nt, Artificial Sequence
  Description of Artificial Sequence: Synthetic oligonucleotide
cuucuccucgaagcucccc

SEQ ID NO: 2749531 - RNA, 19 nt, Artificial Sequence
  Description of Artificial Sequence: Synthetic oligonucleotide
cgaagcucaugcugguggg

SEQ ID NO: 2749532 - RNA, 19 nt, Artificial Sequence
  Description of Artificial Sequence: Synthetic oligonucleotide
cucgaagcucaugcuggug

SEQ ID NO: 2749533 - RNA, 19 nt, Artificial Sequence
  Description of Artificial Sequence: Synthetic oligonucleotide
acccucgacaugccauuau

SEQ ID NO: 2749534 - RNA, 19 nt, Artificial Sequence
  Description of Artificial Sequence: Synthetic oligonucleotide
ggguuagcacauguaccag

SEQ ID NO: 2749535 - RNA, 19 nt, Artificial Sequence
  Description of Artificial Sequence: Synthetic oligonucleotide
accgucacaggagccucug

SEQ ID NO: 2749536 - RNA, 19 nt, Artificial Sequence
  Description of Artificial Sequence: Synthetic oligonucleotide
cgauggaugaccacacuga

SEQ ID NO: 2749537 - RNA, 19 nt, Artificial Sequence
  Description of Artificial Sequence: Synthetic oligonucleotide
ccauaugccccuucuccuc

SEQ ID NO: 2749538 - RNA, 19 nt, Artificial Sequence
  Description of Artificial Sequence: Synthetic oligonucleotide
uagcucucaugugccuugu

SEQ ID NO: 2749539 - RNA, 19 nt, Artificial Sequence
  Description of Artificial Sequence: Synthetic oligonucleotide
gcucaugcugguggguuag

SEQ ID NO: 2749540 - RNA, 19 nt, Artificial Sequence
  Description of Artificial Sequence: Synthetic oligonucleotide
caucaucugcacacuggua

SEQ ID NO: 2749541 - RNA, 19 nt, Artificial Sequence
  Description of Artificial Sequence: Synthetic oligonucleotide
cuccaacauggauugggcu

SEQ ID NO: 2749542 - RNA, 19 nt, Artificial Sequence
  Description of Artificial Sequence: Synthetic oligonucleotide
cgaagcuccccuuuaacaa

SEQ ID NO: 2749543 - RNA, 19 nt, Artificial Sequence
  Description of Artificial Sequence: Synthetic oligonucleotide
ggacuucucugaccgucac

SEQ ID NO: 2749544 - RNA, 19 nt, Artificial Sequence
  Description of Artificial Sequence: Synthetic oligonucleotide
ccguccacugaucuccaac

SEQ ID NO: 2749545 - RNA, 19 nt, Artificial Sequence
  Description of Artificial Sequence: Synthetic oligonucleotide
cucaugcugguggguuagc

SEQ ID NO: 2749546 - RNA, 19 nt, Artificial Sequence
  Description of Artificial Sequence: Synthetic oligonucleotide
ucauaaccauaugccccuu

SEQ ID NO: 2749547 - RNA, 19 nt, Artificial Sequence
  Description of Artificial Sequence: Synthetic oligonucleotide
auugggcugcgggauccga

SEQ ID NO: 2749548 - RNA, 19 nt, Artificial Sequence
  Description of Artificial Sequence: Synthetic oligonucleotide
gcgggauccgagucaagga

SEQ ID NO: 2749549 - RNA, 19 nt, Artificial Sequence
  Description of Artificial Sequence: Synthetic oligonucleotide
gcccacgugaggggcaugg

SEQ ID NO: 2749550 - RNA, 19 nt, Artificial Sequence
  Description of Artificial Sequence: Synthetic oligonucleotide
acugcucccgggaaacauu

SEQ ID NO: 2749551 - RNA, 19 nt, Artificial Sequence
  Description of Artificial Sequence: Synthetic oligonucleotide
acgaccccguccacugauc

SEQ ID NO: 2749552 - RNA, 19 nt, Artificial Sequence
  Description of Artificial Sequence: Synthetic oligonucleotide
gacgaccccguccacugau

SEQ ID NO: 2749553 - RNA, 19 nt, Artificial Sequence
  Description of Artificial Sequence: Synthetic oligonucleotide
agcuccccuuuaacaagug

SEQ ID NO: 2749554 - RNA, 19 nt, Artificial Sequence
  Description of Artificial Sequence: Synthetic oligonucleotide
gaacugcucccgggaaaca

SEQ ID NO: 2749555 - RNA, 19 nt, Artificial Sequence
  Description of Artificial Sequence: Synthetic oligonucleotide
ccccuuuaacaagugggac

SEQ ID NO: 2749556 - RNA, 19 nt, Artificial Sequence
  Description of Artificial Sequence: Synthetic oligonucleotide
gggcagucaucaucugcac

SEQ ID NO: 2749557 - RNA, 19 nt, Artificial Sequence
  Description of Artificial Sequence: Synthetic oligonucleotide
cucccuggaguuccuccca

SEQ ID NO: 2749558 - RNA, 19 nt, Artificial Sequence
  Description of Artificial Sequence: Synthetic oligonucleotide
cugguggguuagcacaugu

SEQ ID NO: 2749559 - RNA, 19 nt, Artificial Sequence
  Description of Artificial Sequence: Synthetic oligonucleotide
cguccacugaucuccaaca

SEQ ID NO: 2749560 - RNA, 19 nt, Artificial Sequence
  Description of Artificial Sequence: Synthetic oligonucleotide
ggucgucuugacccucgac

SEQ ID NO: 2749561 - RNA, 19 nt, Artificial Sequence
  Description of Artificial Sequence: Synthetic oligonucleotide
guuuuguugcagaccuggu

SEQ ID NO: 2749562 - RNA, 19 nt, Artificial Sequence
  Description of Artificial Sequence: Synthetic oligonucleotide
ccgagccccacacuuccag

SEQ ID NO: 2749563 - RNA, 19 nt, Artificial Sequence
  Description of Artificial Sequence: Synthetic oligonucleotide
gaagcucaugcuggugggu

SEQ ID NO: 2749564 - RNA, 19 nt, Artificial Sequence
  Description of Artificial Sequence: Synthetic oligonucleotide
gagaggccaccaguuccuc

SEQ ID NO: 2749565 - RNA, 19 nt, Artificial Sequence
  Description of Artificial Sequence: Synthetic oligonucleotide
gggaaacauuccuguagcu

SEQ ID NO: 2749566 - RNA, 19 nt, Artificial Sequence
  Description of Artificial Sequence: Synthetic oligonucleotide
ccuugugggucgucuugac

SEQ ID NO: 2749567 - RNA, 19 nt, Artificial Sequence
  Description of Artificial Sequence: Synthetic oligonucleotide
guccacugaucuccaacau

SEQ ID NO: 2749568 - RNA, 19 nt, Artificial Sequence
  Description of Artificial Sequence: Synthetic oligonucleotide
gccccgauggaugaccaca

SEQ ID NO: 2749569 - RNA, 19 nt, Artificial Sequence
  Description of Artificial Sequence: Synthetic oligonucleotide
ggcugcgggauccgaguca

SEQ ID NO: 2749570 - RNA, 19 nt, Artificial Sequence
  Description of Artificial Sequence: Synthetic oligonucleotide
cugaccgucacaggagccu

SEQ ID NO: 2749571 - RNA, 19 nt, Artificial Sequence
  Description of Artificial Sequence: Synthetic oligonucleotide
cacacuuccaggccccgau

SEQ ID NO: 2749572 - RNA, 19 nt, Artificial Sequence
  Description of Artificial Sequence: Synthetic oligonucleotide
cgacaugccauuauauagu

SEQ ID NO: 2749573 - RNA, 19 nt, Artificial Sequence
  Description of Artificial Sequence: Synthetic oligonucleotide
gcucccgggaaacauuccu

SEQ ID NO: 2749574 - RNA, 19 nt, Artificial Sequence
  Description of Artificial Sequence: Synthetic oligonucleotide
cgagccccacacuuccagg

SEQ ID NO: 2749575 - RNA, 19 nt, Artificial Sequence
  Description of Artificial Sequence: Synthetic oligonucleotide
cagaccugguccaggcacu

SEQ ID NO: 2749576 - RNA, 19 nt, Artificial Sequence
  Description of Artificial Sequence: Synthetic oligonucleotide
augugccuugugggucguc

SEQ ID NO: 2749577 - RNA, 19 nt, Artificial Sequence
  Description of Artificial Sequence: Synthetic oligonucleotide
cugcgggauccgagucaag

SEQ ID NO: 2749578 - RNA, 19 nt, Artificial Sequence
  Description of Artificial Sequence: Synthetic oligonucleotide
ccaccaguuccucugugaa

SEQ ID NO: 2749579 - RNA, 19 nt, Artificial Sequence
  Description of Artificial Sequence: Synthetic oligonucleotide
cccuggaguuccucccagc

SEQ ID NO: 2749580 - RNA, 19 nt, Artificial Sequence
  Description of Artificial Sequence: Synthetic oligonucleotide
cugugacgaccccguccac

SEQ ID NO: 2749581 - RNA, 19 nt, Artificial Sequence
  Description of Artificial Sequence: Synthetic oligonucleotide
aggccccgauggaugacca

SEQ ID NO: 2749582 - RNA, 19 nt, Artificial Sequence
  Description of Artificial Sequence: Synthetic oligonucleotide
ggaguuccucccagcccag

SEQ ID NO: 2749583 - RNA, 19 nt, Artificial Sequence
  Description of Artificial Sequence: Synthetic oligonucleotide
gacccucgacaugccauua

SEQ ID NO: 2749584 - RNA, 19 nt, Artificial Sequence
  Description of Artificial Sequence: Synthetic oligonucleotide
cgagucaaggaugcucuuc

SEQ ID NO: 2749585 - RNA, 19 nt, Artificial Sequence
  Description of Artificial Sequence: Synthetic oligonucleotide
gcugcgggauccgagucaa

SEQ ID NO: 2749586 - RNA, 19 nt, Artificial Sequence
  Description of Artificial Sequence: Synthetic oligonucleotide
gccuugugggucgucuuga

SEQ ID NO: 2749587 - RNA, 19 nt, Artificial Sequence
  Description of Artificial Sequence: Synthetic oligonucleotide
cuguggcuaagaucauuuu

SEQ ID NO: 2749588 - RNA, 19 nt, Artificial Sequence
  Description of Artificial Sequence: Synthetic oligonucleotide
gaucgccgagccccacacu

SEQ ID NO: 2749589 - RNA, 19 nt, Artificial Sequence
  Description of Artificial Sequence: Synthetic oligonucleotide
gcugguggguuagcacaug

SEQ ID NO: 2749590 - RNA, 19 nt, Artificial Sequence
  Description of Artificial Sequence: Synthetic oligonucleotide
gugggucgucuugacccuc

SEQ ID NO: 2749591 - RNA, 19 nt, Artificial Sequence
  Description of Artificial Sequence: Synthetic oligonucleotide
gggcugcgggauccgaguc

SEQ ID NO: 2749592 - RNA, 19 nt, Artificial Sequence
  Description of Artificial Sequence: Synthetic oligonucleotide
gaggggcauggaacaccca

SEQ ID NO: 2749593 - RNA, 19 nt, Artificial Sequence
  Description of Artificial Sequence: Synthetic oligonucleotide
ccaguccucaaucaugguu

SEQ ID NO: 2749594 - RNA, 19 nt, Artificial Sequence
  Description of Artificial Sequence: Synthetic oligonucleotide
cgucuugacccucgacaug

SEQ ID NO: 2749595 - RNA, 19 nt, Artificial Sequence
  Description of Artificial Sequence: Synthetic oligonucleotide
ccacgugaggggcauggaa

SEQ ID NO: 2749596 - RNA, 19 nt, Artificial Sequence
  Description of Artificial Sequence: Synthetic oligonucleotide
ccucgacaugccauuauau

SEQ ID NO: 2749597 - RNA, 19 nt, Artificial Sequence
  Description of Artificial Sequence: Synthetic oligonucleotide
ugcccacgugaggggcaug

SEQ ID NO: 2749598 - RNA, 19 nt, Artificial Sequence
  Description of Artificial Sequence: Synthetic oligonucleotide
cacugguaggggacucccu

SEQ ID NO: 2749599 - RNA, 19 nt, Artificial Sequence
  Description of Artificial Sequence: Synthetic oligonucleotide
cccucgacaugccauuaua

SEQ ID NO: 2749600 - RNA, 19 nt, Artificial Sequence
  Description of Artificial Sequence: Synthetic oligonucleotide
ggccccgauggaugaccac

SEQ ID NO: 2749601 - RNA, 19 nt, Artificial Sequence
  Description of Artificial Sequence: Synthetic oligonucleotide
gcacacugguaggggacuc

SEQ ID NO: 2749602 - RNA, 19 nt, Artificial Sequence
  Description of Artificial Sequence: Synthetic oligonucleotide
ggggcauggaacacccagu

SEQ ID NO: 2749603 - RNA, 19 nt, Artificial Sequence
  Description of Artificial Sequence: Synthetic oligonucleotide
gggucgucuugacccucga

SEQ ID NO: 2749604 - RNA, 19 nt, Artificial Sequence
  Description of Artificial Sequence: Synthetic oligonucleotide
cucuguggcuaagaucauu

SEQ ID NO: 2749605 - RNA, 19 nt, Artificial Sequence
  Description of Artificial Sequence: Synthetic oligonucleotide
caggagccucuguggcuaa

SEQ ID NO: 2749606 - RNA, 19 nt, Artificial Sequence
  Description of Artificial Sequence: Synthetic oligonucleotide
cgugaggggcauggaacac

SEQ ID NO: 2749607 - RNA, 19 nt, Artificial Sequence
  Description of Artificial Sequence: Synthetic oligonucleotide
ggaugcucuucuuguucuu

SEQ ID NO: 2749608 - RNA, 19 nt, Artificial Sequence
  Description of Artificial Sequence: Synthetic oligonucleotide
cucccagcccagccucgaa

SEQ ID NO: 2749609 - RNA, 19 nt, Artificial Sequence
  Description of Artificial Sequence: Synthetic oligonucleotide
cccgggaaacauuccugua

SEQ ID NO: 2749610 - RNA, 19 nt, Artificial Sequence
  Description of Artificial Sequence: Synthetic oligonucleotide
cgggauccgagucaaggau

SEQ ID NO: 2749611 - RNA, 19 nt, Artificial Sequence
  Description of Artificial Sequence: Synthetic oligonucleotide
caugugccuugugggucgu

SEQ ID NO: 2749612 - RNA, 19 nt, Artificial Sequence
  Description of Artificial Sequence: Synthetic oligonucleotide
ccaggccccgauggaugac

SEQ ID NO: 2749613 - RNA, 19 nt, Artificial Sequence
  Description of Artificial Sequence: Synthetic oligonucleotide
gugcccacgugaggggcau

SEQ ID NO: 2749614 - RNA, 19 nt, Artificial Sequence
  Description of Artificial Sequence: Synthetic oligonucleotide
ggccaucuugaaacuucau

SEQ ID NO: 2749615 - RNA, 19 nt, Artificial Sequence
  Description of Artificial Sequence: Synthetic oligonucleotide
ccccguccacugaucucca

SEQ ID NO: 2749616 - RNA, 19 nt, Artificial Sequence
  Description of Artificial Sequence: Synthetic oligonucleotide
gccgagccccacacuucca

SEQ ID NO: 2749617 - RNA, 19 nt, Artificial Sequence
  Description of Artificial Sequence: Synthetic oligonucleotide
cccacgugaggggcaugga

SEQ ID NO: 2749618 - RNA, 19 nt, Artificial Sequence
  Description of Artificial Sequence: Synthetic oligonucleotide
cccguccacugaucuccaa

SEQ ID NO: 2749619 - RNA, 19 nt, Artificial Sequence
  Description of Artificial Sequence: Synthetic oligonucleotide
ccucuguggcuaagaucau

SEQ ID NO: 2749620 - RNA, 19 nt, Artificial Sequence
  Description of Artificial Sequence: Synthetic oligonucleotide
ccgagucaaggaugcucuu

SEQ ID NO: 2749621 - RNA, 19 nt, Artificial Sequence
  Description of Artificial Sequence: Synthetic oligonucleotide
ccgucacaggagccucugu

SEQ ID NO: 2749622 - RNA, 19 nt, Artificial Sequence
  Description of Artificial Sequence: Synthetic oligonucleotide
ugucguuucauucaggagg

SEQ ID NO: 2749623 - RNA, 19 nt, Artificial Sequence
  Description of Artificial Sequence: Synthetic oligonucleotide
auacacagcaaacacgucc

SEQ ID NO: 2749624 - RNA, 19 nt, Artificial Sequence
  Description of Artificial Sequence: Synthetic oligonucleotide
gauugaguggcuuauaaac

SEQ ID NO: 2749625 - RNA, 19 nt, Artificial Sequence
  Description of Artificial Sequence: Synthetic oligonucleotide
uugacuggaucccaaagcg

SEQ ID NO: 2749626 - RNA, 19 nt, Artificial Sequence
  Description of Artificial Sequence: Synthetic oligonucleotide
agcacauauagucagcaac

SEQ ID NO: 2749627 - RNA, 19 nt, Artificial Sequence
  Description of Artificial Sequence: Synthetic oligonucleotide
augucguuggaguagagac

SEQ ID NO: 2749628 - RNA, 19 nt, Artificial Sequence
  Description of Artificial Sequence: Synthetic oligonucleotide
uauaaacacccucaaagca

SEQ ID NO: 2749629 - RNA, 19 nt, Artificial Sequence
  Description of Artificial Sequence: Synthetic oligonucleotide
uuauaaacacccucaaagc

SEQ ID NO: 2749630 - RNA, 19 nt, Artificial Sequence
  Description of Artificial Sequence: Synthetic oligonucleotide
uucucaauaacccgcagug

SEQ ID NO: 2749631 - RNA, 19 nt, Artificial Sequence
  Description of Artificial Sequence: Synthetic oligonucleotide
aaacacguccuuaaucucc

SEQ ID NO: 2749632 - RNA, 19 nt, Artificial Sequence
  Description of Artificial Sequence: Synthetic oligonucleotide
uguuugagaaacuggaaac

SEQ ID NO: 2749633 - RNA, 19 nt, Artificial Sequence
  Description of Artificial Sequence: Synthetic oligonucleotide
ucauucuuacuguuugucg

SEQ ID NO: 2749634 - RNA, 19 nt, Artificial Sequence
  Description of Artificial Sequence: Synthetic oligonucleotide
acuguuugucguuucauuc

SEQ ID NO: 2749635 - RNA, 19 nt, Artificial Sequence
  Description of Artificial Sequence: Synthetic oligonucleotide
aaugccauacacagcaaac

SEQ ID NO: 2749636 - RNA, 19 nt, Artificial Sequence
  Description of Artificial Sequence: Synthetic oligonucleotide
ucaaaugucaucugcugca

SEQ ID NO: 2749637 - RNA, 19 nt, Artificial Sequence
  Description of Artificial Sequence: Synthetic oligonucleotide
aauaacccgcagugcagcc

SEQ ID NO: 2749638 - RNA, 19 nt, Artificial Sequence
  Description of Artificial Sequence: Synthetic oligonucleotide
uugguuguauagacaaugg

SEQ ID NO: 2749639 - RNA, 19 nt, Artificial Sequence
  Description of Artificial Sequence: Synthetic oligonucleotide
uucucauucuuacuguuug

SEQ ID NO: 2749640 - RNA, 19 nt, Artificial Sequence
  Description of Artificial Sequence: Synthetic oligonucleotide
ugggaucccaucauagugg

SEQ ID NO: 2749641 - RNA, 19 nt, Artificial Sequence
  Description of Artificial Sequence: Synthetic oligonucleotide
acuucuaacagcugcuauc

SEQ ID NO: 2749642 - RNA, 19 nt, Artificial Sequence
  Description of Artificial Sequence: Synthetic oligonucleotide
uguauagacaauggcauug

SEQ ID NO: 2749643 - RNA, 19 nt, Artificial Sequence
  Description of Artificial Sequence: Synthetic oligonucleotide
gaguacuuaaacaucucgg

SEQ ID NO: 2749644 - RNA, 19 nt, Artificial Sequence
  Description of Artificial Sequence: Synthetic oligonucleotide
ucagcaaccagagagagau

SEQ ID NO: 2749645 - RNA, 19 nt, Artificial Sequence
  Description of Artificial Sequence: Synthetic oligonucleotide
ugucaucugcugcaaaggg

SEQ ID NO: 2749646 - RNA, 19 nt, Artificial Sequence
  Description of Artificial Sequence: Synthetic oligonucleotide
acugguuucaaaugucauc

SEQ ID NO: 2749647 - RNA, 19 nt, Artificial Sequence
  Description of Artificial Sequence: Synthetic oligonucleotide
agcucaaacaggccugucc

SEQ ID NO: 2749648 - RNA, 19 nt, Artificial Sequence
  Description of Artificial Sequence: Synthetic oligonucleotide
ugcuugagcucaaacaggc

SEQ ID NO: 2749649 - RNA, 19 nt, Artificial Sequence
  Description of Artificial Sequence: Synthetic oligonucleotide
aucucgggcagguugauuc

SEQ ID NO: 2749650 - RNA, 19 nt, Artificial Sequence
  Description of Artificial Sequence: Synthetic oligonucleotide
ugagaaacuggaaacuggu

SEQ ID NO: 2749651 - RNA, 19 nt, Artificial Sequence
  Description of Artificial Sequence: Synthetic oligonucleotide
ugaaggugacuucaguuca

SEQ ID NO: 2749652 - RNA, 19 nt, Artificial Sequence
  Description of Artificial Sequence: Synthetic oligonucleotide
cuaacagcugcuaucuuag

SEQ ID NO: 2749653 - RNA, 19 nt, Artificial Sequence
  Description of Artificial Sequence: Synthetic oligonucleotide
uuucaaaugucaucugcug

SEQ ID NO: 2749654 - RNA, 19 nt, Artificial Sequence
  Description of Artificial Sequence: Synthetic oligonucleotide
agcaaacacguccuuaauc

SEQ ID NO: 2749655 - RNA, 19 nt, Artificial Sequence
  Description of Artificial Sequence: Synthetic oligonucleotide
guagagacggcgcaggucc

SEQ ID NO: 2749656 - RNA, 19 nt, Artificial Sequence
  Description of Artificial Sequence: Synthetic oligonucleotide
cauauagucagcaaccaga

SEQ ID NO: 2749657 - RNA, 19 nt, Artificial Sequence
  Description of Artificial Sequence: Synthetic oligonucleotide
ucggaguacuuaaacaucu

SEQ ID NO: 2749658 - RNA, 19 nt, Artificial Sequence
  Description of Artificial Sequence: Synthetic oligonucleotide
ucaugggaucccaucauag

SEQ ID NO: 2749659 - RNA, 19 nt, Artificial Sequence
  Description of Artificial Sequence: Synthetic oligonucleotide
uuaaucuccuucucaauaa

SEQ ID NO: 2749660 - RNA, 19 nt, Artificial Sequence
  Description of Artificial Sequence: Synthetic oligonucleotide
aucaacugcaaugccauac

SEQ ID NO: 2749661 - RNA, 19 nt, Artificial Sequence
  Description of Artificial Sequence: Synthetic oligonucleotide
agcaaccagagagagaugg

SEQ ID NO: 2749662 - RNA, 19 nt, Artificial Sequence
  Description of Artificial Sequence: Synthetic oligonucleotide
uugaguggcuuauaaacac

SEQ ID NO: 2749663 - RNA, 19 nt, Artificial Sequence
  Description of Artificial Sequence: Synthetic oligonucleotide
uuugagaaacuggaaacug

SEQ ID NO: 2749664 - RNA, 19 nt, Artificial Sequence
  Description of Artificial Sequence: Synthetic oligonucleotide
auagacaauggcauugugg

SEQ ID NO: 2749665 - RNA, 19 nt, Artificial Sequence
  Description of Artificial Sequence: Synthetic oligonucleotide
ugucguuggaguagagacg

SEQ ID NO: 2749666 - RNA, 19 nt, Artificial Sequence
  Description of Artificial Sequence: Synthetic oligonucleotide
uggcuuauaaacacccuca

SEQ ID NO: 2749667 - RNA, 19 nt, Artificial Sequence
  Description of Artificial Sequence: Synthetic oligonucleotide
ucaauaacccgcagugcag

SEQ ID NO: 2749668 - RNA, 19 nt, Artificial Sequence
  Description of Artificial Sequence: Synthetic oligonucleotide
aucccaaagcgauugagug

SEQ ID NO: 2749669 - RNA, 19 nt, Artificial Sequence
  Description of Artificial Sequence: Synthetic oligonucleotide
agaaacuggaaacugguuu

SEQ ID NO: 2749670 - RNA, 19 nt, Artificial Sequence
  Description of Artificial Sequence: Synthetic oligonucleotide
cuugacuggaucccaaagc

SEQ ID NO: 2749671 - RNA, 19 nt, Artificial Sequence
  Description of Artificial Sequence: Synthetic oligonucleotide
gauggcgaggaucaacugc

SEQ ID NO: 2749672 - RNA, 19 nt, Artificial Sequence
  Description of Artificial Sequence: Synthetic oligonucleotide
ugguuguauagacaauggc

SEQ ID NO: 2749673 - RNA, 19 nt, Artificial Sequence
  Description of Artificial Sequence: Synthetic oligonucleotide
aaagcacauauagucagca

SEQ ID NO: 2749674 - RNA, 19 nt, Artificial Sequence
  Description of Artificial Sequence: Synthetic oligonucleotide
cuugguuguauagacaaug

SEQ ID NO: 2749675 - RNA, 19 nt, Artificial Sequence
  Description of Artificial Sequence: Synthetic oligonucleotide
gaugccguaaguguuggcc

SEQ ID NO: 2749676 - RNA, 19 nt, Artificial Sequence
  Description of Artificial Sequence: Synthetic oligonucleotide
uggaaacugguuucaaaug

SEQ ID NO: 2749677 - RNA, 19 nt, Artificial Sequence
  Description of Artificial Sequence: Synthetic oligonucleotide
gacgacuuuccccaccacg

SEQ ID NO: 2749678 - RNA, 19 nt, Artificial Sequence
  Description of Artificial Sequence: Synthetic oligonucleotide
ucuaacagcugcuaucuua

SEQ ID NO: 2749679 - RNA, 19 nt, Artificial Sequence
  Description of Artificial Sequence: Synthetic oligonucleotide
gugacuucaguucaucaug

SEQ ID NO: 2749680 - RNA, 19 nt, Artificial Sequence
  Description of Artificial Sequence: Synthetic oligonucleotide
ucaacugcaaugccauaca

SEQ ID NO: 2749681 - RNA, 19 nt, Artificial Sequence
  Description of Artificial Sequence: Synthetic oligonucleotide
gucguuggaguagagacgg

SEQ ID NO: 2749682 - RNA, 19 nt, Artificial Sequence
  Description of Artificial Sequence: Synthetic oligonucleotide
ugccauacacagcaaacac

SEQ ID NO: 2749683 - RNA, 19 nt, Artificial Sequence
  Description of Artificial Sequence: Synthetic oligonucleotide
ggaguacuuaaacaucucg

SEQ ID NO: 2749684 - RNA, 19 nt, Artificial Sequence
  Description of Artificial Sequence: Synthetic oligonucleotide
ugaguggcuuauaaacacc

SEQ ID NO: 2749685 - RNA, 19 nt, Artificial Sequence
  Description of Artificial Sequence: Synthetic oligonucleotide
auaguggccuguuugagaa

SEQ ID NO: 2749686 - RNA, 19 nt, Artificial Sequence
  Description of Artificial Sequence: Synthetic oligonucleotide
ucccaaagcgauugagugg

SEQ ID NO: 2749687 - RNA, 19 nt, Artificial Sequence
  Description of Artificial Sequence: Synthetic oligonucleotide
acuuuccccaccacgaggc

SEQ ID NO: 2749688 - RNA, 19 nt, Artificial Sequence
  Description of Artificial Sequence: Synthetic oligonucleotide
acauauagucagcaaccag

SEQ ID NO: 2749689 - RNA, 19 nt, Artificial Sequence
  Description of Artificial Sequence: Synthetic oligonucleotide
agacaauggcauugugggc

SEQ ID NO: 2749690 - RNA, 19 nt, Artificial Sequence
  Description of Artificial Sequence: Synthetic oligonucleotide
aggaacuugacuggauccc

SEQ ID NO: 2749691 - RNA, 19 nt, Artificial Sequence
  Description of Artificial Sequence: Synthetic oligonucleotide
uugagcucaaacaggccug

SEQ ID NO: 2749692 - RNA, 19 nt, Artificial Sequence
  Description of Artificial Sequence: Synthetic oligonucleotide
aguggccuguuugagaaac

SEQ ID NO: 2749693 - RNA, 19 nt, Artificial Sequence
  Description of Artificial Sequence: Synthetic oligonucleotide
uccuuaaucuccuucucaa

SEQ ID NO: 2749694 - RNA, 19 nt, Artificial Sequence
  Description of Artificial Sequence: Synthetic oligonucleotide
gaugcccuugguuguauag

SEQ ID NO: 2749695 - RNA, 19 nt, Artificial Sequence
  Description of Artificial Sequence: Synthetic oligonucleotide
cugaaggugacuucaguuc

SEQ ID NO: 2749696 - RNA, 19 nt, Artificial Sequence
  Description of Artificial Sequence: Synthetic oligonucleotide
guaaguguuggccauggca

SEQ ID NO: 2749697 - RNA, 19 nt, Artificial Sequence
  Description of Artificial Sequence: Synthetic oligonucleotide
caucauaguggccuguuug

SEQ ID NO: 2749698 - RNA, 19 nt, Artificial Sequence
  Description of Artificial Sequence: Synthetic oligonucleotide
cuaucuuaggggcugcuug

SEQ ID NO: 2749699 - RNA, 19 nt, Artificial Sequence
  Description of Artificial Sequence: Synthetic oligonucleotide
auauagucagcaaccagag

SEQ ID NO: 2749700 - RNA, 19 nt, Artificial Sequence
  Description of Artificial Sequence: Synthetic oligonucleotide
ccucaaagcacauauaguc

SEQ ID NO: 2749701 - RNA, 19 nt, Artificial Sequence
  Description of Artificial Sequence: Synthetic oligonucleotide
acuugacuggaucccaaag

SEQ ID NO: 2749702 - RNA, 19 nt, Artificial Sequence
  Description of Artificial Sequence: Synthetic oligonucleotide
uauagacaauggcauugug

SEQ ID NO: 2749703 - RNA, 19 nt, Artificial Sequence
  Description of Artificial Sequence: Synthetic oligonucleotide
aaagcgauugaguggcuua

SEQ ID NO: 2749704 - RNA, 19 nt, Artificial Sequence
  Description of Artificial Sequence: Synthetic oligonucleotide
aaacugguuucaaauguca

SEQ ID NO: 2749705 - RNA, 19 nt, Artificial Sequence
  Description of Artificial Sequence: Synthetic oligonucleotide
uuugacgacuuuccccacc

SEQ ID NO: 2749706 - RNA, 19 nt, Artificial Sequence
  Description of Artificial Sequence: Synthetic oligonucleotide
acacccucaaagcacauau

SEQ ID NO: 2749707 - RNA, 19 nt, Artificial Sequence
  Description of Artificial Sequence: Synthetic oligonucleotide
uaaucuccuucucaauaac

SEQ ID NO: 2749708 - RNA, 19 nt, Artificial Sequence
  Description of Artificial Sequence: Synthetic oligonucleotide
gacuuuccccaccacgagg

SEQ ID NO: 2749709 - RNA, 19 nt, Artificial Sequence
  Description of Artificial Sequence: Synthetic oligonucleotide
uugacgacuuuccccacca

SEQ ID NO: 2749710 - RNA, 19 nt, Artificial Sequence
  Description of Artificial Sequence: Synthetic oligonucleotide
gaguggcuuauaaacaccc

SEQ ID NO: 2749711 - RNA, 19 nt, Artificial Sequence
  Description of Artificial Sequence: Synthetic oligonucleotide
gguuucaaaugucaucugc

SEQ ID NO: 2749712 - RNA, 19 nt, Artificial Sequence
  Description of Artificial Sequence: Synthetic oligonucleotide
aucauaguggccuguuuga

SEQ ID NO: 2749713 - RNA, 19 nt, Artificial Sequence
  Description of Artificial Sequence: Synthetic oligonucleotide
cucaauaacccgcagugca

SEQ ID NO: 2749714 - RNA, 19 nt, Artificial Sequence
  Description of Artificial Sequence: Synthetic oligonucleotide
uaucuuaggggcugcuuga

SEQ ID NO: 2749715 - RNA, 19 nt, Artificial Sequence
  Description of Artificial Sequence: Synthetic oligonucleotide
caaagcacauauagucagc

SEQ ID NO: 2749716 - RNA, 19 nt, Artificial Sequence
  Description of Artificial Sequence: Synthetic oligonucleotide
uuggaguagagacggcgca

SEQ ID NO: 2749717 - RNA, 19 nt, Artificial Sequence
  Description of Artificial Sequence: Synthetic oligonucleotide
uucaguucaucaugggauc

SEQ ID NO: 2749718 - RNA, 19 nt, Artificial Sequence
  Description of Artificial Sequence: Synthetic oligonucleotide
uugucguuucauucaggag

SEQ ID NO: 2749719 - RNA, 19 nt, Artificial Sequence
  Description of Artificial Sequence: Synthetic oligonucleotide
gguuguauagacaauggca

SEQ ID NO: 2749720 - RNA, 19 nt, Artificial Sequence
  Description of Artificial Sequence: Synthetic oligonucleotide
aaguguuggccauggcaug

SEQ ID NO: 2749721 - RNA, 19 nt, Artificial Sequence
  Description of Artificial Sequence: Synthetic oligonucleotide
aggggaggaacuugacugg

SEQ ID NO: 2749722 - RNA, 19 nt, Artificial Sequence
  Description of Artificial Sequence: Synthetic oligonucleotide
cauggcauggaugucguug

SEQ ID NO: 2749723 - RNA, 19 nt, Artificial Sequence
  Description of Artificial Sequence: Synthetic oligonucleotide
agagauggcgaggaucaac

SEQ ID NO: 2749724 - RNA, 19 nt, Artificial Sequence
  Description of Artificial Sequence: Synthetic oligonucleotide
auugaguggcuuauaaaca

SEQ ID NO: 2749725 - RNA, 19 nt, Artificial Sequence
  Description of Artificial Sequence: Synthetic oligonucleotide
aaggugacuucaguucauc

SEQ ID NO: 2749726 - RNA, 19 nt, Artificial Sequence
  Description of Artificial Sequence: Synthetic oligonucleotide
cugcuugagcucaaacagg

SEQ ID NO: 2749727 - RNA, 19 nt, Artificial Sequence
  Description of Artificial Sequence: Synthetic oligonucleotide
augucaucugcugcaaagg

SEQ ID NO: 2749728 - RNA, 19 nt, Artificial Sequence
  Description of Artificial Sequence: Synthetic oligonucleotide
acguccuuaaucuccuucu

SEQ ID NO: 2749729 - RNA, 19 nt, Artificial Sequence
  Description of Artificial Sequence: Synthetic oligonucleotide
ucaaacaggccugucccgc

SEQ ID NO: 2749730 - RNA, 19 nt, Artificial Sequence
  Description of Artificial Sequence: Synthetic oligonucleotide
ugcccuugguuguauagac

SEQ ID NO: 2749731 - RNA, 19 nt, Artificial Sequence
  Description of Artificial Sequence: Synthetic oligonucleotide
gaaacugguuucaaauguc

SEQ ID NO: 2749732 - RNA, 19 nt, Artificial Sequence
  Description of Artificial Sequence: Synthetic oligonucleotide
accucggaguacuuaaaca

SEQ ID NO: 2749733 - RNA, 19 nt, Artificial Sequence
  Description of Artificial Sequence: Synthetic oligonucleotide
uauagucagcaaccagaga

SEQ ID NO: 2749734 - RNA, 19 nt, Artificial Sequence
  Description of Artificial Sequence: Synthetic oligonucleotide
cauugugggccaaggacac

SEQ ID NO: 2749735 - RNA, 19 nt, Artificial Sequence
  Description of Artificial Sequence: Synthetic oligonucleotide
auucccucugugcucagca

SEQ ID NO: 2749736 - RNA, 19 nt, Artificial Sequence
  Description of Artificial Sequence: Synthetic oligonucleotide
guggcuuauaaacacccuc

SEQ ID NO: 2749737 - RNA, 19 nt, Artificial Sequence
  Description of Artificial Sequence: Synthetic oligonucleotide
ugacuggaucccaaagcga

SEQ ID NO: 2749738 - RNA, 19 nt, Artificial Sequence
  Description of Artificial Sequence: Synthetic oligonucleotide
cuuaaucuccuucucaaua

SEQ ID NO: 2749739 - RNA, 19 nt, Artificial Sequence
  Description of Artificial Sequence: Synthetic oligonucleotide
ucuuaggggcugcuugagc

SEQ ID NO: 2749740 - RNA, 19 nt, Artificial Sequence
  Description of Artificial Sequence: Synthetic oligonucleotide
ucauaguggccuguuugag

SEQ ID NO: 2749741 - RNA, 19 nt, Artificial Sequence
  Description of Artificial Sequence: Synthetic oligonucleotide
uugauucccucugugcuca

SEQ ID NO: 2749742 - RNA, 19 nt, Artificial Sequence
  Description of Artificial Sequence: Synthetic oligonucleotide
gucguuucauucaggaggc

SEQ ID NO: 2749743 - RNA, 19 nt, Artificial Sequence
  Description of Artificial Sequence: Synthetic oligonucleotide
ucaguucaucaugggaucc

SEQ ID NO: 2749744 - RNA, 19 nt, Artificial Sequence
  Description of Artificial Sequence: Synthetic oligonucleotide
cucggaguacuuaaacauc

SEQ ID NO: 2749745 - RNA, 19 nt, Artificial Sequence
  Description of Artificial Sequence: Synthetic oligonucleotide
cucugugcucagcacaagc

SEQ ID NO: 2749746 - RNA, 19 nt, Artificial Sequence
  Description of Artificial Sequence: Synthetic oligonucleotide
gaucccaucauaguggccu

SEQ ID NO: 2749747 - RNA, 19 nt, Artificial Sequence
  Description of Artificial Sequence: Synthetic oligonucleotide
agcacaagcuccuucucau

SEQ ID NO: 2749748 - RNA, 19 nt, Artificial Sequence
  Description of Artificial Sequence: Synthetic oligonucleotide
ucucauucuuacuguuugu

SEQ ID NO: 2749749 - RNA, 19 nt, Artificial Sequence
  Description of Artificial Sequence: Synthetic oligonucleotide
uacuucuaacagcugcuau

SEQ ID NO: 2749750 - RNA, 19 nt, Artificial Sequence
  Description of Artificial Sequence: Synthetic oligonucleotide
cagcugcuaucuuaggggc

SEQ ID NO: 2749751 - RNA, 19 nt, Artificial Sequence
  Description of Artificial Sequence: Synthetic oligonucleotide
acaagcuccuucucauucu

SEQ ID NO: 2749752 - RNA, 19 nt, Artificial Sequence
  Description of Artificial Sequence: Synthetic oligonucleotide
gcgaggaucaacugcaaug

SEQ ID NO: 2749753 - RNA, 19 nt, Artificial Sequence
  Description of Artificial Sequence: Synthetic oligonucleotide
cucaaacaggccugucccg

SEQ ID NO: 2749754 - RNA, 19 nt, Artificial Sequence
  Description of Artificial Sequence: Synthetic oligonucleotide
cacaagcuccuucucauuc

SEQ ID NO: 2749755 - RNA, 19 nt, Artificial Sequence
  Description of Artificial Sequence: Synthetic oligonucleotide
aacuugacuggaucccaaa

SEQ ID NO: 2749756 - RNA, 19 nt, Artificial Sequence
  Description of Artificial Sequence: Synthetic oligonucleotide
auggaugucguuggaguag

SEQ ID NO: 2749757 - RNA, 19 nt, Artificial Sequence
  Description of Artificial Sequence: Synthetic oligonucleotide
aauggcauugugggccaag

SEQ ID NO: 2749758 - RNA, 19 nt, Artificial Sequence
  Description of Artificial Sequence: Synthetic oligonucleotide
aagcacauauagucagcaa

SEQ ID NO: 2749759 - RNA, 19 nt, Artificial Sequence
  Description of Artificial Sequence: Synthetic oligonucleotide
gcucaaacaggccuguccc

SEQ ID NO: 2749760 - RNA, 19 nt, Artificial Sequence
  Description of Artificial Sequence: Synthetic oligonucleotide
ucucaauaacccgcagugc

SEQ ID NO: 2749761 - RNA, 19 nt, Artificial Sequence
  Description of Artificial Sequence: Synthetic oligonucleotide
gaggaucaacugcaaugcc

SEQ ID NO: 2749762 - RNA, 19 nt, Artificial Sequence
  Description of Artificial Sequence: Synthetic oligonucleotide
cucgaugccguaaguguug

SEQ ID NO: 2749763 - RNA, 19 nt, Artificial Sequence
  Description of Artificial Sequence: Synthetic oligonucleotide
acuggaaacugguuucaaa

SEQ ID NO: 2749764 - RNA, 19 nt, Artificial Sequence
  Description of Artificial Sequence: Synthetic oligonucleotide
ggcauugugggccaaggac

SEQ ID NO: 2749765 - RNA, 19 nt, Artificial Sequence
  Description of Artificial Sequence: Synthetic oligonucleotide
guuguauagacaauggcau

SEQ ID NO: 2749766 - RNA, 19 nt, Artificial Sequence
  Description of Artificial Sequence: Synthetic oligonucleotide
aaccagagagagauggcga

SEQ ID NO: 2749767 - RNA, 19 nt, Artificial Sequence
  Description of Artificial Sequence: Synthetic oligonucleotide
gcacauauagucagcaacc

SEQ ID NO: 2749768 - RNA, 19 nt, Artificial Sequence
  Description of Artificial Sequence: Synthetic oligonucleotide
caauaacccgcagugcagc

SEQ ID NO: 2749769 - RNA, 19 nt, Artificial Sequence
  Description of Artificial Sequence: Synthetic oligonucleotide
cuggaucccaaagcgauug

SEQ ID NO: 2749770 - RNA, 19 nt, Artificial Sequence
  Description of Artificial Sequence: Synthetic oligonucleotide
agcaccucggaguacuuaa

SEQ ID NO: 2749771 - RNA, 19 nt, Artificial Sequence
  Description of Artificial Sequence: Synthetic oligonucleotide
augccguaaguguuggcca

SEQ ID NO: 2749772 - RNA, 19 nt, Artificial Sequence
  Description of Artificial Sequence: Synthetic oligonucleotide
aaacaggccugucccgccu

SEQ ID NO: 2749773 - RNA, 19 nt, Artificial Sequence
  Description of Artificial Sequence: Synthetic oligonucleotide
uucaggaggcaccgaguga

SEQ ID NO: 2749774 - RNA, 19 nt, Artificial Sequence
  Description of Artificial Sequence: Synthetic oligonucleotide
guugauucccucugugcuc

SEQ ID NO: 2749775 - RNA, 19 nt, Artificial Sequence
  Description of Artificial Sequence: Synthetic oligonucleotide
uuguauagacaauggcauu

SEQ ID NO: 2749776 - RNA, 19 nt, Artificial Sequence
  Description of Artificial Sequence: Synthetic oligonucleotide
gcaaacacguccuuaaucu

SEQ ID NO: 2749777 - RNA, 19 nt, Artificial Sequence
  Description of Artificial Sequence: Synthetic oligonucleotide
aggaucaacugcaaugcca

SEQ ID NO: 2749778 - RNA, 19 nt, Artificial Sequence
  Description of Artificial Sequence: Synthetic oligonucleotide
auucuuacuguuugucguu

SEQ ID NO: 2749779 - RNA, 19 nt, Artificial Sequence
  Description of Artificial Sequence: Synthetic oligonucleotide
uggccuguuugagaaacug

SEQ ID NO: 2749780 - RNA, 19 nt, Artificial Sequence
  Description of Artificial Sequence: Synthetic oligonucleotide
uaacccgcagugcagccuc

SEQ ID NO: 2749781 - RNA, 19 nt, Artificial Sequence
  Description of Artificial Sequence: Synthetic oligonucleotide
guuggaguagagacggcgc

SEQ ID NO: 2749782 - RNA, 19 nt, Artificial Sequence
  Description of Artificial Sequence: Synthetic oligonucleotide
cauucuuacuguuugucgu

SEQ ID NO: 2749783 - RNA, 19 nt, Artificial Sequence
  Description of Artificial Sequence: Synthetic oligonucleotide
uacuguuugucguuucauu

SEQ ID NO: 2749784 - RNA, 19 nt, Artificial Sequence
  Description of Artificial Sequence: Synthetic oligonucleotide
ugguuucaaaugucaucug

SEQ ID NO: 2749785 - RNA, 19 nt, Artificial Sequence
  Description of Artificial Sequence: Synthetic oligonucleotide
auggcgaggaucaacugca

SEQ ID NO: 2749786 - RNA, 19 nt, Artificial Sequence
  Description of Artificial Sequence: Synthetic oligonucleotide
gagagagauggcgaggauc

SEQ ID NO: 2749787 - RNA, 19 nt, Artificial Sequence
  Description of Artificial Sequence: Synthetic oligonucleotide
ucgaugccguaaguguugg

SEQ ID NO: 2749788 - RNA, 19 nt, Artificial Sequence
  Description of Artificial Sequence: Synthetic oligonucleotide
caaacacguccuuaaucuc

SEQ ID NO: 2749789 - RNA, 19 nt, Artificial Sequence
  Description of Artificial Sequence: Synthetic oligonucleotide
augccauacacagcaaaca

SEQ ID NO: 2749790 - RNA, 19 nt, Artificial Sequence
  Description of Artificial Sequence: Synthetic oligonucleotide
ugcugcaaaggggaggaac

SEQ ID NO: 2749791 - RNA, 19 nt, Artificial Sequence
  Description of Artificial Sequence: Synthetic oligonucleotide
ucuuacuguuugucguuuc

SEQ ID NO: 2749792 - RNA, 19 nt, Artificial Sequence
  Description of Artificial Sequence: Synthetic oligonucleotide
gaggcaccgagugaugccc

SEQ ID NO: 2749793 - RNA, 19 nt, Artificial Sequence
  Description of Artificial Sequence: Synthetic oligonucleotide
uggaguagagacggcgcag

SEQ ID NO: 2749794 - RNA, 19 nt, Artificial Sequence
  Description of Artificial Sequence: Synthetic oligonucleotide
ggaaacugguuucaaaugu

SEQ ID NO: 2749795 - RNA, 19 nt, Artificial Sequence
  Description of Artificial Sequence: Synthetic oligonucleotide
aacugguuucaaaugucau

SEQ ID NO: 2749796 - RNA, 19 nt, Artificial Sequence
  Description of Artificial Sequence: Synthetic oligonucleotide
gaugucguuggaguagaga

SEQ ID NO: 2749797 - RNA, 19 nt, Artificial Sequence
  Description of Artificial Sequence: Synthetic oligonucleotide
ucucgggcagguugauucc

SEQ ID NO: 2749798 - RNA, 19 nt, Artificial Sequence
  Description of Artificial Sequence: Synthetic oligonucleotide
caacugcaaugccauacac

SEQ ID NO: 2749799 - RNA, 19 nt, Artificial Sequence
  Description of Artificial Sequence: Synthetic oligonucleotide
cccaaagcgauugaguggc

SEQ ID NO: 2749800 - RNA, 19 nt, Artificial Sequence
  Description of Artificial Sequence: Synthetic oligonucleotide
cugugcucagcacaagcuc

SEQ ID NO: 2749801 - RNA, 19 nt, Artificial Sequence
  Description of Artificial Sequence: Synthetic oligonucleotide
cuuaggggcugcuugagcu

SEQ ID NO: 2749802 - RNA, 19 nt, Artificial Sequence
  Description of Artificial Sequence: Synthetic oligonucleotide
uggaugucguuggaguaga

SEQ ID NO: 2749803 - RNA, 19 nt, Artificial Sequence
  Description of Artificial Sequence: Synthetic oligonucleotide
cauaguggccuguuugaga

SEQ ID NO: 2749804 - RNA, 19 nt, Artificial Sequence
  Description of Artificial Sequence: Synthetic oligonucleotide
acgacuuuccccaccacga

SEQ ID NO: 2749805 - RNA, 19 nt, Artificial Sequence
  Description of Artificial Sequence: Synthetic oligonucleotide
caaacaggccugucccgcc

SEQ ID NO: 2749806 - RNA, 19 nt, Artificial Sequence
  Description of Artificial Sequence: Synthetic oligonucleotide
guccuuaaucuccuucuca

SEQ ID NO: 2749807 - RNA, 19 nt, Artificial Sequence
  Description of Artificial Sequence: Synthetic oligonucleotide
uggcauugugggccaagga

SEQ ID NO: 2749808 - RNA, 19 nt, Artificial Sequence
  Description of Artificial Sequence: Synthetic oligonucleotide
caccucggaguacuuaaac

SEQ ID NO: 2749809 - RNA, 19 nt, Artificial Sequence
  Description of Artificial Sequence: Synthetic oligonucleotide
gccuuugacgacuuucccc

SEQ ID NO: 2749810 - RNA, 19 nt, Artificial Sequence
  Description of Artificial Sequence: Synthetic oligonucleotide
cgagugaugcccuugguug

SEQ ID NO: 2749811 - RNA, 19 nt, Artificial Sequence
  Description of Artificial Sequence: Synthetic oligonucleotide
caccgagugaugcccuugg

SEQ ID NO: 2749812 - RNA, 19 nt, Artificial Sequence
  Description of Artificial Sequence: Synthetic oligonucleotide
agauggcgaggaucaacug

SEQ ID NO: 2749813 - RNA, 19 nt, Artificial Sequence
  Description of Artificial Sequence: Synthetic oligonucleotide
ggcugcuugagcucaaaca

SEQ ID NO: 2749814 - RNA, 19 nt, Artificial Sequence
  Description of Artificial Sequence: Synthetic oligonucleotide
aguucaucaugggauccca

SEQ ID NO: 2749815 - RNA, 19 nt, Artificial Sequence
  Description of Artificial Sequence: Synthetic oligonucleotide
cacguccuuaaucuccuuc

SEQ ID NO: 2749816 - RNA, 19 nt, Artificial Sequence
  Description of Artificial Sequence: Synthetic oligonucleotide
ccuuugacgacuuucccca

SEQ ID NO: 2749817 - RNA, 19 nt, Artificial Sequence
  Description of Artificial Sequence: Synthetic oligonucleotide
cugcaaugccauacacagc

SEQ ID NO: 2749818 - RNA, 19 nt, Artificial Sequence
  Description of Artificial Sequence: Synthetic oligonucleotide
aagcgauugaguggcuuau

SEQ ID NO: 2749819 - RNA, 19 nt, Artificial Sequence
  Description of Artificial Sequence: Synthetic oligonucleotide
aucaugggaucccaucaua

SEQ ID NO: 2749820 - RNA, 19 nt, Artificial Sequence
  Description of Artificial Sequence: Synthetic oligonucleotide
uuacuucuaacagcugcua

SEQ ID NO: 2749821 - RNA, 19 nt, Artificial Sequence
  Description of Artificial Sequence: Synthetic oligonucleotide
ccacgaggcaggcugaagg

SEQ ID NO: 2749822 - RNA, 19 nt, Artificial Sequence
  Description of Artificial Sequence: Synthetic oligonucleotide
ggaggaacuugacuggauc

SEQ ID NO: 2749823 - RNA, 19 nt, Artificial Sequence
  Description of Artificial Sequence: Synthetic oligonucleotide
guuugagaaacuggaaacu

SEQ ID NO: 2749824 - RNA, 19 nt, Artificial Sequence
  Description of Artificial Sequence: Synthetic oligonucleotide
ggccauggcauggaugucg

SEQ ID NO: 2749825 - RNA, 19 nt, Artificial Sequence
  Description of Artificial Sequence: Synthetic oligonucleotide
gagauggcgaggaucaacu

SEQ ID NO: 2749826 - RNA, 19 nt, Artificial Sequence
  Description of Artificial Sequence: Synthetic oligonucleotide
uggaucccaaagcgauuga

SEQ ID NO: 2749827 - RNA, 19 nt, Artificial Sequence
  Description of Artificial Sequence: Synthetic oligonucleotide
ugagcucaaacaggccugu

SEQ ID NO: 2749828 - RNA, 19 nt, Artificial Sequence
  Description of Artificial Sequence: Synthetic oligonucleotide
gggaucccaucauaguggc

SEQ ID NO: 2749829 - RNA, 19 nt, Artificial Sequence
  Description of Artificial Sequence: Synthetic oligonucleotide
ugucccgccuuugacgacu

SEQ ID NO: 2749830 - RNA, 19 nt, Artificial Sequence
  Description of Artificial Sequence: Synthetic oligonucleotide
ggaguagagacggcgcagg

SEQ ID NO: 2749831 - RNA, 19 nt, Artificial Sequence
  Description of Artificial Sequence: Synthetic oligonucleotide
ggcagguugauucccucug

SEQ ID NO: 2749832 - RNA, 19 nt, Artificial Sequence
  Description of Artificial Sequence: Synthetic oligonucleotide
cauacacagcaaacacguc

SEQ ID NO: 2749833 - RNA, 19 nt, Artificial Sequence
  Description of Artificial Sequence: Synthetic oligonucleotide
gguugauucccucugugcu

SEQ ID NO: 2749834 - RNA, 19 nt, Artificial Sequence
  Description of Artificial Sequence: Synthetic oligonucleotide
cuucuaacagcugcuaucu

SEQ ID NO: 2749835 - RNA, 19 nt, Artificial Sequence
  Description of Artificial Sequence: Synthetic oligonucleotide
aacuggaaacugguuucaa

SEQ ID NO: 2749836 - RNA, 19 nt, Artificial Sequence
  Description of Artificial Sequence: Synthetic oligonucleotide
aucuuaggggcugcuugag

SEQ ID NO: 2749837 - RNA, 19 nt, Artificial Sequence
  Description of Artificial Sequence: Synthetic oligonucleotide
ucgggcagguugauucccu

SEQ ID NO: 2749838 - RNA, 19 nt, Artificial Sequence
  Description of Artificial Sequence: Synthetic oligonucleotide
uucuuacuguuugucguuu

SEQ ID NO: 2749839 - RNA, 19 nt, Artificial Sequence
  Description of Artificial Sequence: Synthetic oligonucleotide
agccucgaugccguaagug

SEQ ID NO: 2749840 - RNA, 19 nt, Artificial Sequence
  Description of Artificial Sequence: Synthetic oligonucleotide
cccaccacgaggcaggcug

SEQ ID NO: 2749841 - RNA, 19 nt, Artificial Sequence
  Description of Artificial Sequence: Synthetic oligonucleotide
ccauacacagcaaacacgu

SEQ ID NO: 2749842 - RNA, 19 nt, Artificial Sequence
  Description of Artificial Sequence: Synthetic oligonucleotide
ggccuguuugagaaacugg

SEQ ID NO: 2749843 - RNA, 19 nt, Artificial Sequence
  Description of Artificial Sequence: Synthetic oligonucleotide
cgaggaucaacugcaaugc

SEQ ID NO: 2749844 - RNA, 19 nt, Artificial Sequence
  Description of Artificial Sequence: Synthetic oligonucleotide
ggaucccaaagcgauugag

SEQ ID NO: 2749845 - RNA, 19 nt, Artificial Sequence
  Description of Artificial Sequence: Synthetic oligonucleotide
gugggccaaggacacaauc

SEQ ID NO: 2749846 - RNA, 19 nt, Artificial Sequence
  Description of Artificial Sequence: Synthetic oligonucleotide
cuuugacgacuuuccccac

SEQ ID NO: 2749847 - RNA, 19 nt, Artificial Sequence
  Description of Artificial Sequence: Synthetic oligonucleotide
aacacccucaaagcacaua

SEQ ID NO: 2749848 - RNA, 19 nt, Artificial Sequence
  Description of Artificial Sequence: Synthetic oligonucleotide
aguggcuuauaaacacccu

SEQ ID NO: 2749849 - RNA, 19 nt, Artificial Sequence
  Description of Artificial Sequence: Synthetic oligonucleotide
augcccuugguuguauaga

SEQ ID NO: 2749850 - RNA, 19 nt, Artificial Sequence
  Description of Artificial Sequence: Synthetic oligonucleotide
gcagccucgaugccguaag

SEQ ID NO: 2749851 - RNA, 19 nt, Artificial Sequence
  Description of Artificial Sequence: Synthetic oligonucleotide
cauggaugucguuggagua

SEQ ID NO: 2749852 - RNA, 19 nt, Artificial Sequence
  Description of Artificial Sequence: Synthetic oligonucleotide
gcauugugggccaaggaca

SEQ ID NO: 2749853 - RNA, 19 nt, Artificial Sequence
  Description of Artificial Sequence: Synthetic oligonucleotide
gcugcuaucuuaggggcug

SEQ ID NO: 2749854 - RNA, 19 nt, Artificial Sequence
  Description of Artificial Sequence: Synthetic oligonucleotide
ucguuggaguagagacggc

SEQ ID NO: 2749855 - RNA, 19 nt, Artificial Sequence
  Description of Artificial Sequence: Synthetic oligonucleotide
uucccucugugcucagcac

SEQ ID NO: 2749856 - RNA, 19 nt, Artificial Sequence
  Description of Artificial Sequence: Synthetic oligonucleotide
caggcugaaggugacuuca

SEQ ID NO: 2749857 - RNA, 19 nt, Artificial Sequence
  Description of Artificial Sequence: Synthetic oligonucleotide
cuucucaauaacccgcagu

SEQ ID NO: 2749858 - RNA, 19 nt, Artificial Sequence
  Description of Artificial Sequence: Synthetic oligonucleotide
uggcauggaugucguugga

SEQ ID NO: 2749859 - RNA, 19 nt, Artificial Sequence
  Description of Artificial Sequence: Synthetic oligonucleotide
gauucccucugugcucagc

SEQ ID NO: 2749860 - RNA, 19 nt, Artificial Sequence
  Description of Artificial Sequence: Synthetic oligonucleotide
auaacccgcagugcagccu

SEQ ID NO: 2749861 - RNA, 19 nt, Artificial Sequence
  Description of Artificial Sequence: Synthetic oligonucleotide
uucuaacagcugcuaucuu

SEQ ID NO: 2749862 - RNA, 19 nt, Artificial Sequence
  Description of Artificial Sequence: Synthetic oligonucleotide
uagagacggcgcaggucca

SEQ ID NO: 2749863 - RNA, 19 nt, Artificial Sequence
  Description of Artificial Sequence: Synthetic oligonucleotide
ccgccuuugacgacuuucc

SEQ ID NO: 2749864 - RNA, 19 nt, Artificial Sequence
  Description of Artificial Sequence: Synthetic oligonucleotide
gacggcgcagguccagcac

SEQ ID NO: 2749865 - RNA, 19 nt, Artificial Sequence
  Description of Artificial Sequence: Synthetic oligonucleotide
gagugaugcccuugguugu

SEQ ID NO: 2749866 - RNA, 19 nt, Artificial Sequence
  Description of Artificial Sequence: Synthetic oligonucleotide
acgaggcaggcugaaggug

SEQ ID NO: 2749867 - RNA, 19 nt, Artificial Sequence
  Description of Artificial Sequence: Synthetic oligonucleotide
ggaggcaccgagugaugcc

SEQ ID NO: 2749868 - RNA, 19 nt, Artificial Sequence
  Description of Artificial Sequence: Synthetic oligonucleotide
cccuugguuguauagacaa

SEQ ID NO: 2749869 - RNA, 19 nt, Artificial Sequence
  Description of Artificial Sequence: Synthetic oligonucleotide
gcuuauaaacacccucaaa

SEQ ID NO: 2749870 - RNA, 19 nt, Artificial Sequence
  Description of Artificial Sequence: Synthetic oligonucleotide
ggcauggaugucguuggag

SEQ ID NO: 2749871 - RNA, 19 nt, Artificial Sequence
  Description of Artificial Sequence: Synthetic oligonucleotide
guauagacaauggcauugu

SEQ ID NO: 2749872 - RNA, 19 nt, Artificial Sequence
  Description of Artificial Sequence: Synthetic oligonucleotide
uucauucaggaggcaccga

SEQ ID NO: 2749873 - RNA, 19 nt, Artificial Sequence
  Description of Artificial Sequence: Synthetic oligonucleotide
agacggcgcagguccagca

SEQ ID NO: 2749874 - RNA, 19 nt, Artificial Sequence
  Description of Artificial Sequence: Synthetic oligonucleotide
cucgggcagguugauuccc

SEQ ID NO: 2749875 - RNA, 19 nt, Artificial Sequence
  Description of Artificial Sequence: Synthetic oligonucleotide
cguuggaguagagacggcg

SEQ ID NO: 2749876 - RNA, 19 nt, Artificial Sequence
  Description of Artificial Sequence: Synthetic oligonucleotide
ggcuuauaaacacccucaa

SEQ ID NO: 2749877 - RNA, 19 nt, Artificial Sequence
  Description of Artificial Sequence: Synthetic oligonucleotide
ggugacuucaguucaucau

SEQ ID NO: 2749878 - RNA, 19 nt, Artificial Sequence
  Description of Artificial Sequence: Synthetic oligonucleotide
gaacuugacuggaucccaa

SEQ ID NO: 2749879 - RNA, 19 nt, Artificial Sequence
  Description of Artificial Sequence: Synthetic oligonucleotide
ugauucccucugugcucag

SEQ ID NO: 2749880 - RNA, 19 nt, Artificial Sequence
  Description of Artificial Sequence: Synthetic oligonucleotide
gcgauugaguggcuuauaa

SEQ ID NO: 2749881 - RNA, 19 nt, Artificial Sequence
  Description of Artificial Sequence: Synthetic oligonucleotide
caugggaucccaucauagu

SEQ ID NO: 2749882 - RNA, 19 nt, Artificial Sequence
  Description of Artificial Sequence: Synthetic oligonucleotide
cagguccagcaccucggag

SEQ ID NO: 2749883 - RNA, 19 nt, Artificial Sequence
  Description of Artificial Sequence: Synthetic oligonucleotide
agagacggcgcagguccag

SEQ ID NO: 2749884 - RNA, 19 nt, Artificial Sequence
  Description of Artificial Sequence: Synthetic oligonucleotide
gcauggaugucguuggagu

SEQ ID NO: 2749885 - RNA, 19 nt, Artificial Sequence
  Description of Artificial Sequence: Synthetic oligonucleotide
gagacggcgcagguccagc

SEQ ID NO: 2749886 - RNA, 19 nt, Artificial Sequence
  Description of Artificial Sequence: Synthetic oligonucleotide
gaucaacugcaaugccaua

SEQ ID NO: 2749887 - RNA, 19 nt, Artificial Sequence
  Description of Artificial Sequence: Synthetic oligonucleotide
ugcuaucuuaggggcugcu

SEQ ID NO: 2749888 - RNA, 19 nt, Artificial Sequence
  Description of Artificial Sequence: Synthetic oligonucleotide
aggccugucccgccuuuga

SEQ ID NO: 2749889 - RNA, 19 nt, Artificial Sequence
  Description of Artificial Sequence: Synthetic oligonucleotide
ggaacuugacuggauccca

SEQ ID NO: 2749890 - RNA, 19 nt, Artificial Sequence
  Description of Artificial Sequence: Synthetic oligonucleotide
uggcgaggaucaacugcaa

SEQ ID NO: 2749891 - RNA, 19 nt, Artificial Sequence
  Description of Artificial Sequence: Synthetic oligonucleotide
gcgcagguccagcaccucg

SEQ ID NO: 2749892 - RNA, 19 nt, Artificial Sequence
  Description of Artificial Sequence: Synthetic oligonucleotide
ugcagccucgaugccguaa

SEQ ID NO: 2749893 - RNA, 19 nt, Artificial Sequence
  Description of Artificial Sequence: Synthetic oligonucleotide
aaacacccucaaagcacau

SEQ ID NO: 2749894 - RNA, 19 nt, Artificial Sequence
  Description of Artificial Sequence: Synthetic oligonucleotide
aacccgcagugcagccucg

SEQ ID NO: 2749895 - RNA, 19 nt, Artificial Sequence
  Description of Artificial Sequence: Synthetic oligonucleotide
uaguggccuguuugagaaa

SEQ ID NO: 2749896 - RNA, 19 nt, Artificial Sequence
  Description of Artificial Sequence: Synthetic oligonucleotide
aggcugaaggugacuucag

SEQ ID NO: 2749897 - RNA, 19 nt, Artificial Sequence
  Description of Artificial Sequence: Synthetic oligonucleotide
accacgaggcaggcugaag

SEQ ID NO: 2749898 - RNA, 19 nt, Artificial Sequence
  Description of Artificial Sequence: Synthetic oligonucleotide
agcugcuaucuuaggggcu

SEQ ID NO: 2749899 - RNA, 19 nt, Artificial Sequence
  Description of Artificial Sequence: Synthetic oligonucleotide
caggaggcaccgagugaug

SEQ ID NO: 2749900 - RNA, 19 nt, Artificial Sequence
  Description of Artificial Sequence: Synthetic oligonucleotide
cauucaggaggcaccgagu

SEQ ID NO: 2749901 - RNA, 19 nt, Artificial Sequence
  Description of Artificial Sequence: Synthetic oligonucleotide
ggaucaacugcaaugccau

SEQ ID NO: 2749902 - RNA, 19 nt, Artificial Sequence
  Description of Artificial Sequence: Synthetic oligonucleotide
agugaugcccuugguugua

SEQ ID NO: 2749903 - RNA, 19 nt, Artificial Sequence
  Description of Artificial Sequence: Synthetic oligonucleotide
ccguaaguguuggccaugg

SEQ ID NO: 2749904 - RNA, 19 nt, Artificial Sequence
  Description of Artificial Sequence: Synthetic oligonucleotide
gcugaaggugacuucaguu

SEQ ID NO: 2749905 - RNA, 19 nt, Artificial Sequence
  Description of Artificial Sequence: Synthetic oligonucleotide
ccugucccgccuuugacga

SEQ ID NO: 2749906 - RNA, 19 nt, Artificial Sequence
  Description of Artificial Sequence: Synthetic oligonucleotide
cguuucauucaggaggcac

SEQ ID NO: 2749907 - RNA, 19 nt, Artificial Sequence
  Description of Artificial Sequence: Synthetic oligonucleotide
gaguagagacggcgcaggu

SEQ ID NO: 2749908 - RNA, 19 nt, Artificial Sequence
  Description of Artificial Sequence: Synthetic oligonucleotide
gcaaccagagagagauggc

SEQ ID NO: 2749909 - RNA, 19 nt, Artificial Sequence
  Description of Artificial Sequence: Synthetic oligonucleotide
cugcuaucuuaggggcugc

SEQ ID NO: 2749910 - RNA, 19 nt, Artificial Sequence
  Description of Artificial Sequence: Synthetic oligonucleotide
ccucggaguacuuaaacau

SEQ ID NO: 2749911 - RNA, 19 nt, Artificial Sequence
  Description of Artificial Sequence: Synthetic oligonucleotide
cagcaaccagagagagaug

SEQ ID NO: 2749912 - RNA, 19 nt, Artificial Sequence
  Description of Artificial Sequence: Synthetic oligonucleotide
gucagcaaccagagagaga

SEQ ID NO: 2749913 - RNA, 19 nt, Artificial Sequence
  Description of Artificial Sequence: Synthetic oligonucleotide
ccuguuugagaaacuggaa

SEQ ID NO: 2749914 - RNA, 19 nt, Artificial Sequence
  Description of Artificial Sequence: Synthetic oligonucleotide
gccucgaugccguaagugu

SEQ ID NO: 2749915 - RNA, 19 nt, Artificial Sequence
  Description of Artificial Sequence: Synthetic oligonucleotide
ccuucucaauaacccgcag

SEQ ID NO: 2749916 - RNA, 19 nt, Artificial Sequence
  Description of Artificial Sequence: Synthetic oligonucleotide
gcuugagcucaaacaggcc

SEQ ID NO: 2749917 - RNA, 19 nt, Artificial Sequence
  Description of Artificial Sequence: Synthetic oligonucleotide
cacgaggcaggcugaaggu

SEQ ID NO: 2749918 - RNA, 19 nt, Artificial Sequence
  Description of Artificial Sequence: Synthetic oligonucleotide
acuggaucccaaagcgauu

SEQ ID NO: 2749919 - RNA, 19 nt, Artificial Sequence
  Description of Artificial Sequence: Synthetic oligonucleotide
gagaaacuggaaacugguu

SEQ ID NO: 2749920 - RNA, 19 nt, Artificial Sequence
  Description of Artificial Sequence: Synthetic oligonucleotide
gaaggugacuucaguucau

SEQ ID NO: 2749921 - RNA, 19 nt, Artificial Sequence
  Description of Artificial Sequence: Synthetic oligonucleotide
ccgcagugcagccucgaug

SEQ ID NO: 2749922 - RNA, 19 nt, Artificial Sequence
  Description of Artificial Sequence: Synthetic oligonucleotide
agcgauugaguggcuuaua

SEQ ID NO: 2749923 - RNA, 19 nt, Artificial Sequence
  Description of Artificial Sequence: Synthetic oligonucleotide
cugucccgccuuugacgac

SEQ ID NO: 2749924 - RNA, 19 nt, Artificial Sequence
  Description of Artificial Sequence: Synthetic oligonucleotide
uccccaccacgaggcaggc

SEQ ID NO: 2749925 - RNA, 19 nt, Artificial Sequence
  Description of Artificial Sequence: Synthetic oligonucleotide
acaggccugucccgccuuu

SEQ ID NO: 2749926 - RNA, 19 nt, Artificial Sequence
  Description of Artificial Sequence: Synthetic oligonucleotide
gagcucaaacaggccuguc

SEQ ID NO: 2749927 - RNA, 19 nt, Artificial Sequence
  Description of Artificial Sequence: Synthetic oligonucleotide
cacccucaaagcacauaua

SEQ ID NO: 2749928 - RNA, 19 nt, Artificial Sequence
  Description of Artificial Sequence: Synthetic oligonucleotide
ggccugucccgccuuugac

SEQ ID NO: 2749929 - RNA, 19 nt, Artificial Sequence
  Description of Artificial Sequence: Synthetic oligonucleotide
ggaugucguuggaguagag

SEQ ID NO: 2749930 - RNA, 19 nt, Artificial Sequence
  Description of Artificial Sequence: Synthetic oligonucleotide
acacguccuuaaucuccuu

SEQ ID NO: 2749931 - RNA, 19 nt, Artificial Sequence
  Description of Artificial Sequence: Synthetic oligonucleotide
cccgccuuugacgacuuuc

SEQ ID NO: 2749932 - RNA, 19 nt, Artificial Sequence
  Description of Artificial Sequence: Synthetic oligonucleotide
ggggaggaacuugacugga

SEQ ID NO: 2749933 - RNA, 19 nt, Artificial Sequence
  Description of Artificial Sequence: Synthetic oligonucleotide
ggaucccaucauaguggcc

SEQ ID NO: 2749934 - RNA, 19 nt, Artificial Sequence
  Description of Artificial Sequence: Synthetic oligonucleotide
gagagauggcgaggaucaa

SEQ ID NO: 2749935 - RNA, 19 nt, Artificial Sequence
  Description of Artificial Sequence: Synthetic oligonucleotide
cggaguacuuaaacaucuc

SEQ ID NO: 2749936 - RNA, 19 nt, Artificial Sequence
  Description of Artificial Sequence: Synthetic oligonucleotide
caagcuccuucucauucuu

SEQ ID NO: 2749937 - RNA, 19 nt, Artificial Sequence
  Description of Artificial Sequence: Synthetic oligonucleotide
cgauugaguggcuuauaaa

SEQ ID NO: 2749938 - RNA, 19 nt, Artificial Sequence
  Description of Artificial Sequence: Synthetic oligonucleotide
cgacuuuccccaccacgag

SEQ ID NO: 2749939 - RNA, 19 nt, Artificial Sequence
  Description of Artificial Sequence: Synthetic oligonucleotide
cguccuuaaucuccuucuc

SEQ ID NO: 2749940 - RNA, 19 nt, Artificial Sequence
  Description of Artificial Sequence: Synthetic oligonucleotide
aggcaccgagugaugcccu

SEQ ID NO: 2749941 - RNA, 19 nt, Artificial Sequence
  Description of Artificial Sequence: Synthetic oligonucleotide
cgccuuugacgacuuuccc

SEQ ID NO: 2749942 - RNA, 19 nt, Artificial Sequence
  Description of Artificial Sequence: Synthetic oligonucleotide
caggccugucccgccuuug

SEQ ID NO: 2749943 - RNA, 19 nt, Artificial Sequence
  Description of Artificial Sequence: Synthetic oligonucleotide
cguaaguguuggccauggc

SEQ ID NO: 2749944 - RNA, 19 nt, Artificial Sequence
  Description of Artificial Sequence: Synthetic oligonucleotide
gcaccgagugaugcccuug

SEQ ID NO: 2749945 - RNA, 19 nt, Artificial Sequence
  Description of Artificial Sequence: Synthetic oligonucleotide
gcagguugauucccucugu

SEQ ID NO: 2749946 - RNA, 19 nt, Artificial Sequence
  Description of Artificial Sequence: Synthetic oligonucleotide
caaagcgauugaguggcuu

SEQ ID NO: 2749947 - RNA, 19 nt, Artificial Sequence
  Description of Artificial Sequence: Synthetic oligonucleotide
gggcagguugauucccucu

SEQ ID NO: 2749948 - RNA, 19 nt, Artificial Sequence
  Description of Artificial Sequence: Synthetic oligonucleotide
cagcaaacacguccuuaau

SEQ ID NO: 2749949 - RNA, 19 nt, Artificial Sequence
  Description of Artificial Sequence: Synthetic oligonucleotide
gcccuugguuguauagaca

SEQ ID NO: 2749950 - RNA, 19 nt, Artificial Sequence
  Description of Artificial Sequence: Synthetic oligonucleotide
guucaucaugggaucccau

SEQ ID NO: 2749951 - RNA, 19 nt, Artificial Sequence
  Description of Artificial Sequence: Synthetic oligonucleotide
ggcgaggaucaacugcaau

SEQ ID NO: 2749952 - RNA, 19 nt, Artificial Sequence
  Description of Artificial Sequence: Synthetic oligonucleotide
ccuuaaucuccuucucaau

SEQ ID NO: 2749953 - RNA, 19 nt, Artificial Sequence
  Description of Artificial Sequence: Synthetic oligonucleotide
ucccgccuuugacgacuuu

SEQ ID NO: 2749954 - RNA, 19 nt, Artificial Sequence
  Description of Artificial Sequence: Synthetic oligonucleotide
guggccuguuugagaaacu

SEQ ID NO: 2749955 - RNA, 19 nt, Artificial Sequence
  Description of Artificial Sequence: Synthetic oligonucleotide
ccucugugcucagcacaag

SEQ ID NO: 2749956 - RNA, 19 nt, Artificial Sequence
  Description of Artificial Sequence: Synthetic oligonucleotide
cgaugccguaaguguuggc

SEQ ID NO: 2749957 - RNA, 19 nt, Artificial Sequence
  Description of Artificial Sequence: Synthetic oligonucleotide
ccuucucauucuuacuguu

SEQ ID NO: 2749958 - RNA, 19 nt, Artificial Sequence
  Description of Artificial Sequence: Synthetic oligonucleotide
cagcaccucggaguacuua

SEQ ID NO: 2749959 - RNA, 19 nt, Artificial Sequence
  Description of Artificial Sequence: Synthetic oligonucleotide
ccucgaugccguaaguguu

SEQ ID NO: 2749960 - RNA, 19 nt, Artificial Sequence
  Description of Artificial Sequence: Synthetic oligonucleotide
gugaugcccuugguuguau

SEQ ID NO: 2749961 - RNA, 19 nt, Artificial Sequence
  Description of Artificial Sequence: Synthetic oligonucleotide
gcaccucggaguacuuaaa

SEQ ID NO: 2749962 - RNA, 19 nt, Artificial Sequence
  Description of Artificial Sequence: Synthetic oligonucleotide
gccauggcauggaugucgu

SEQ ID NO: 2749963 - RNA, 19 nt, Artificial Sequence
  Description of Artificial Sequence: Synthetic oligonucleotide
ccuugguuguauagacaau

SEQ ID NO: 2749964 - RNA, 19 nt, Artificial Sequence
  Description of Artificial Sequence: Synthetic oligonucleotide
ccaccacgaggcaggcuga

SEQ ID NO: 2749965 - RNA, 19 nt, Artificial Sequence
  Description of Artificial Sequence: Synthetic oligonucleotide
caccacgaggcaggcugaa

SEQ ID NO: 2749966 - RNA, 19 nt, Artificial Sequence
  Description of Artificial Sequence: Synthetic oligonucleotide
gcuaucuuaggggcugcuu

SEQ ID NO: 2749967 - RNA, 19 nt, Artificial Sequence
  Description of Artificial Sequence: Synthetic oligonucleotide
aggggcugcuugagcucaa

SEQ ID NO: 2749968 - RNA, 19 nt, Artificial Sequence
  Description of Artificial Sequence: Synthetic oligonucleotide
cagccucgaugccguaagu

SEQ ID NO: 2749969 - RNA, 19 nt, Artificial Sequence
  Description of Artificial Sequence: Synthetic oligonucleotide
gggaggaacuugacuggau

SEQ ID NO: 2749970 - RNA, 19 nt, Artificial Sequence
  Description of Artificial Sequence: Synthetic oligonucleotide
gcacaagcuccuucucauu

SEQ ID NO: 2749971 - RNA, 19 nt, Artificial Sequence
  Description of Artificial Sequence: Synthetic oligonucleotide
ggggcugcuugagcucaaa

SEQ ID NO: 2749972 - RNA, 19 nt, Artificial Sequence
  Description of Artificial Sequence: Synthetic oligonucleotide
ggcgcagguccagcaccuc

SEQ ID NO: 2749973 - RNA, 19 nt, Artificial Sequence
  Description of Artificial Sequence: Synthetic oligonucleotide
gugcagccucgaugccgua

SEQ ID NO: 2749974 - RNA, 19 nt, Artificial Sequence
  Description of Artificial Sequence: Synthetic oligonucleotide
caucucgggcagguugauu

SEQ ID NO: 2749975 - RNA, 19 nt, Artificial Sequence
  Description of Artificial Sequence: Synthetic oligonucleotide
ggcaccgagugaugcccuu

SEQ ID NO: 2749976 - RNA, 19 nt, Artificial Sequence
  Description of Artificial Sequence: Synthetic oligonucleotide
ccaaagcgauugaguggcu

SEQ ID NO: 2749977 - RNA, 19 nt, Artificial Sequence
  Description of Artificial Sequence: Synthetic oligonucleotide
gucccgccuuugacgacuu

SEQ ID NO: 2749978 - RNA, 19 nt, Artificial Sequence
  Description of Artificial Sequence: Synthetic oligonucleotide
cccaucauaguggccuguu

SEQ ID NO: 2749979 - RNA, 19 nt, Artificial Sequence
  Description of Artificial Sequence: Synthetic oligonucleotide
cggcgcagguccagcaccu

SEQ ID NO: 2749980 - RNA, 19 nt, Artificial Sequence
  Description of Artificial Sequence: Synthetic oligonucleotide
ccauggcauggaugucguu

SEQ ID NO: 2749981 - RNA, 19 nt, Artificial Sequence
  Description of Artificial Sequence: Synthetic oligonucleotide
aagcauuguaaccacaucc

SEQ ID NO: 2749982 - RNA, 19 nt, Artificial Sequence
  Description of Artificial Sequence: Synthetic oligonucleotide
gacuauaagcuucagaugg

SEQ ID NO: 2749983 - RNA, 19 nt, Artificial Sequence
  Description of Artificial Sequence: Synthetic oligonucleotide
aauuucauuaaucuguucu

SEQ ID NO: 2749984 - RNA, 19 nt, Artificial Sequence
  Description of Artificial Sequence: Synthetic oligonucleotide
aagacuauaagcuucagau

SEQ ID NO: 2749985 - RNA, 19 nt, Artificial Sequence
  Description of Artificial Sequence: Synthetic oligonucleotide
uguaaauuugcgaacaccc

SEQ ID NO: 2749986 - RNA, 19 nt, Artificial Sequence
  Description of Artificial Sequence: Synthetic oligonucleotide
  modified_base (6)..(6): a, c, u, g, unknown or other
uuuuangauccucaguucg

SEQ ID NO: 2749987 - RNA, 19 nt, Artificial Sequence
  Description of Artificial Sequence: Synthetic oligonucleotide
ugucaaagcauucugcucg

SEQ ID NO: 2749988 - RNA, 19 nt, Artificial Sequence
  Description of Artificial Sequence: Synthetic oligonucleotide
uuuuccaacguccacaucc

SEQ ID NO: 2749989 - RNA, 19 nt, Artificial Sequence
  Description of Artificial Sequence: Synthetic oligonucleotide
uuugcgaacacccucaagc

SEQ ID NO: 2749990 - RNA, 19 nt, Artificial Sequence
  Description of Artificial Sequence: Synthetic oligonucleotide
cauccuaugaaguacauag

SEQ ID NO: 2749991 - RNA, 19 nt, Artificial Sequence
  Description of Artificial Sequence: Synthetic oligonucleotide
auaagcuucagauggauuc

SEQ ID NO: 2749992 - RNA, 19 nt, Artificial Sequence
  Description of Artificial Sequence: Synthetic oligonucleotide
uaauuaaaggcacacauuc

SEQ ID NO: 2749993 - RNA, 19 nt, Artificial Sequence
  Description of Artificial Sequence: Synthetic oligonucleotide
ugcaccuuuaauuaaaggc

SEQ ID NO: 2749994 - RNA, 19 nt, Artificial Sequence
  Description of Artificial Sequence: Synthetic oligonucleotide
cuaugaaguacauagcucc

SEQ ID NO: 2749995 - RNA, 19 nt, Artificial Sequence
  Description of Artificial Sequence: Synthetic oligonucleotide
agucagcauacucagagcc

SEQ ID NO: 2749996 - RNA, 19 nt, Artificial Sequence
  Description of Artificial Sequence: Synthetic oligonucleotide
  modified_base (14)..(14): a, c, u, g, unknown or other
aacuccuguuuuangaucc

SEQ ID NO: 2749997 - RNA, 19 nt, Artificial Sequence
  Description of Artificial Sequence: Synthetic oligonucleotide
  modified_base (8)..(8): a, c, u, g, unknown or other
uguuuuangauccucaguu

SEQ ID NO: 2749998 - RNA, 19 nt, Artificial Sequence
  Description of Artificial Sequence: Synthetic oligonucleotide
ugauguaucugaauuuccg

SEQ ID NO: 2749999 - RNA, 19 nt, Artificial Sequence
  Description of Artificial Sequence: Synthetic oligonucleotide
gaagucagcauacucagag

SEQ ID NO: 2750000 - RNA, 19 nt, Artificial Sequence
  Description of Artificial Sequence: Synthetic oligonucleotide
uuggucaagacuauaagcu

SEQ ID NO: 2750001 - RNA, 19 nt, Artificial Sequence
  Description of Artificial Sequence: Synthetic oligonucleotide
aaguacauagcuccaguuc

SEQ ID NO: 2750002 - RNA, 19 nt, Artificial Sequence
  Description of Artificial Sequence: Synthetic oligonucleotide
uauuucucuguccuuaugc

SEQ ID NO: 2750003 - RNA, 19 nt, Artificial Sequence
  Description of Artificial Sequence: Synthetic oligonucleotide
uucgauaugccaauaaccu

SEQ ID NO: 2750004 - RNA, 19 nt, Artificial Sequence
  Description of Artificial Sequence: Synthetic oligonucleotide
cacacauucaucacaaggg

SEQ ID NO: 2750005 - RNA, 19 nt, Artificial Sequence
  Description of Artificial Sequence: Synthetic oligonucleotide
uucagauggauucaacugc

SEQ ID NO: 2750006 - RNA, 19 nt, Artificial Sequence
  Description of Artificial Sequence: Synthetic oligonucleotide
uuuggucaagacuauaagc

SEQ ID NO: 2750007 - RNA, 19 nt, Artificial Sequence
  Description of Artificial Sequence: Synthetic oligonucleotide
uauaucuugacaccuaaau

SEQ ID NO: 2750008 - RNA, 19 nt, Artificial Sequence
  Description of Artificial Sequence: Synthetic oligonucleotide
uaaaugucaaagcauucug

SEQ ID NO: 2750009 - RNA, 19 nt, Artificial Sequence
  Description of Artificial Sequence: Synthetic oligonucleotide
acacauucaucacaagggc

SEQ ID NO: 2750010 - RNA, 19 nt, Artificial Sequence
  Description of Artificial Sequence: Synthetic oligonucleotide
aacuucauguaagagaugu

SEQ ID NO: 2750011 - RNA, 19 nt, Artificial Sequence
  Description of Artificial Sequence: Synthetic oligonucleotide
aguucgauaugccaauaac

SEQ ID NO: 2750012 - RNA, 19 nt, Artificial Sequence
  Description of Artificial Sequence: Synthetic oligonucleotide
ugaauuuccguauuucucu

SEQ ID NO: 2750013 - RNA, 19 nt, Artificial Sequence
  Description of Artificial Sequence: Synthetic oligonucleotide
ucaacugccauguaaauuu

SEQ ID NO: 2750014 - RNA, 19 nt, Artificial Sequence
  Description of Artificial Sequence: Synthetic oligonucleotide
ucugcuuuaugccugcacc

SEQ ID NO: 2750015 - RNA, 19 nt, Artificial Sequence
  Description of Artificial Sequence: Synthetic oligonucleotide
uccuaugaaguacauagcu

SEQ ID NO: 2750016 - RNA, 19 nt, Artificial Sequence
  Description of Artificial Sequence: Synthetic oligonucleotide
uucauuaaucuguucuggg

SEQ ID NO: 2750017 - RNA, 19 nt, Artificial Sequence
  Description of Artificial Sequence: Synthetic oligonucleotide
  modified_base (2)..(2): a, c, u, g, unknown or other
angauccucaguucgauau

SEQ ID NO: 2750018 - RNA, 19 nt, Artificial Sequence
  Description of Artificial Sequence: Synthetic oligonucleotide
acgggaaaagcauuguaac

SEQ ID NO: 2750019 - RNA, 19 nt, Artificial Sequence
  Description of Artificial Sequence: Synthetic oligonucleotide
cuguggcaaacuuugaugg

SEQ ID NO: 2750020 - RNA, 19 nt, Artificial Sequence
  Description of Artificial Sequence: Synthetic oligonucleotide
auuguaaccacauccuaug

SEQ ID NO: 2750021 - RNA, 19 nt, Artificial Sequence
  Description of Artificial Sequence: Synthetic oligonucleotide
uggcuuuauaucuugacac

SEQ ID NO: 2750022 - RNA, 19 nt, Artificial Sequence
  Description of Artificial Sequence: Synthetic oligonucleotide
aauaaccuggccugaacca

SEQ ID NO: 2750023 - RNA, 19 nt, Artificial Sequence
  Description of Artificial Sequence: Synthetic oligonucleotide
aagucagcauacucagagc

SEQ ID NO: 2750024 - RNA, 19 nt, Artificial Sequence
  Description of Artificial Sequence: Synthetic oligonucleotide
cauagaucugcuuuaugcc

SEQ ID NO: 2750025 - RNA, 19 nt, Artificial Sequence
  Description of Artificial Sequence: Synthetic oligonucleotide
uuucauuaaucuguucugg

SEQ ID NO: 2750026 - RNA, 19 nt, Artificial Sequence
  Description of Artificial Sequence: Synthetic oligonucleotide
uucucuguccuuaugcuug

SEQ ID NO: 2750027 - RNA, 19 nt, Artificial Sequence
  Description of Artificial Sequence: Synthetic oligonucleotide
ucuagauuucccuucugcc

SEQ ID NO: 2750028 - RNA, 19 nt, Artificial Sequence
  Description of Artificial Sequence: Synthetic oligonucleotide
auaucuugacaccuaaaug

SEQ ID NO: 2750029 - RNA, 19 nt, Artificial Sequence
  Description of Artificial Sequence: Synthetic oligonucleotide
uaaauuugcgaacacccuc

SEQ ID NO: 2750030 - RNA, 19 nt, Artificial Sequence
  Description of Artificial Sequence: Synthetic oligonucleotide
ucauguaagagaugucugc

SEQ ID NO: 2750031 - RNA, 19 nt, Artificial Sequence
  Description of Artificial Sequence: Synthetic oligonucleotide
acaccuaaaugucaaagca

SEQ ID NO: 2750032 - RNA, 19 nt, Artificial Sequence
  Description of Artificial Sequence: Synthetic oligonucleotide
uucuagauuucccuucugc

SEQ ID NO: 2750033 - RNA, 19 nt, Artificial Sequence
  Description of Artificial Sequence: Synthetic oligonucleotide
  modified_base (5)..(5): a, c, u, g, unknown or other
uuuangauccucaguucga

SEQ ID NO: 2750034 - RNA, 19 nt, Artificial Sequence
  Description of Artificial Sequence: Synthetic oligonucleotide
gacaccuaaaugucaaagc

SEQ ID NO: 2750035 - RNA, 19 nt, Artificial Sequence
  Description of Artificial Sequence: Synthetic oligonucleotide
uuuauaucuugacaccuaa

SEQ ID NO: 2750036 - RNA, 19 nt, Artificial Sequence
  Description of Artificial Sequence: Synthetic oligonucleotide
cuagauuucccuucugccc

SEQ ID NO: 2750037 - RNA, 19 nt, Artificial Sequence
  Description of Artificial Sequence: Synthetic oligonucleotide
ucagauggauucaacugcc

SEQ ID NO: 2750038 - RNA, 19 nt, Artificial Sequence
  Description of Artificial Sequence: Synthetic oligonucleotide
uggaugauguaucugaauu

SEQ ID NO: 2750039 - RNA, 19 nt, Artificial Sequence
  Description of Artificial Sequence: Synthetic oligonucleotide
ucaugcugcguucuucugg

SEQ ID NO: 2750040 - RNA, 19 nt, Artificial Sequence
  Description of Artificial Sequence: Synthetic oligonucleotide
auguaaauuugcgaacacc

SEQ ID NO: 2750041 - RNA, 19 nt, Artificial Sequence
  Description of Artificial Sequence: Synthetic oligonucleotide
cauacucagagccaacggg

SEQ ID NO: 2750042 - RNA, 19 nt, Artificial Sequence
  Description of Artificial Sequence: Synthetic oligonucleotide
gauggauucaacugccaug

SEQ ID NO: 2750043 - RNA, 19 nt, Artificial Sequence
  Description of Artificial Sequence: Synthetic oligonucleotide
guugcuacaguagaauccg

SEQ ID NO: 2750044 - RNA, 19 nt, Artificial Sequence
  Description of Artificial Sequence: Synthetic oligonucleotide
uagauuucccuucugccca

SEQ ID NO: 2750045 - RNA, 19 nt, Artificial Sequence
  Description of Artificial Sequence: Synthetic oligonucleotide
auuaaucuguucuggguug

SEQ ID NO: 2750046 - RNA, 19 nt, Artificial Sequence
  Description of Artificial Sequence: Synthetic oligonucleotide
aaucaugcugcguucuucu

SEQ ID NO: 2750047 - RNA, 19 nt, Artificial Sequence
  Description of Artificial Sequence: Synthetic oligonucleotide
cucauuuuggucaagacua

SEQ ID NO: 2750048 - RNA, 19 nt, Artificial Sequence
  Description of Artificial Sequence: Synthetic oligonucleotide
  modified_base (11)..(11): a, c, u, g, unknown or other
uccuguuuuangauccuca

SEQ ID NO: 2750049 - RNA, 19 nt, Artificial Sequence
  Description of Artificial Sequence: Synthetic oligonucleotide
uaugccugcaccuuuaauu

SEQ ID NO: 2750050 - RNA, 19 nt, Artificial Sequence
  Description of Artificial Sequence: Synthetic oligonucleotide
ugccauguaaauuugcgaa

SEQ ID NO: 2750051 - RNA, 19 nt, Artificial Sequence
  Description of Artificial Sequence: Synthetic oligonucleotide
auuuccguauuucucuguc

SEQ ID NO: 2750052 - RNA, 19 nt, Artificial Sequence
  Description of Artificial Sequence: Synthetic oligonucleotide
aaagcauucugcucggcau

SEQ ID NO: 2750053 - RNA, 19 nt, Artificial Sequence
  Description of Artificial Sequence: Synthetic oligonucleotide
aucuguucuggguugcuac

SEQ ID NO: 2750054 - RNA, 19 nt, Artificial Sequence
  Description of Artificial Sequence: Synthetic oligonucleotide
ucauuaaucuguucugggu

SEQ ID NO: 2750055 - RNA, 19 nt, Artificial Sequence
  Description of Artificial Sequence: Synthetic oligonucleotide
uuaauuaaaggcacacauu

SEQ ID NO: 2750056 - RNA, 19 nt, Artificial Sequence
  Description of Artificial Sequence: Synthetic oligonucleotide
aaggcacacauucaucaca

SEQ ID NO: 2750057 - RNA, 19 nt, Artificial Sequence
  Description of Artificial Sequence: Synthetic oligonucleotide
auagaucugcuuuaugccu

SEQ ID NO: 2750058 - RNA, 19 nt, Artificial Sequence
  Description of Artificial Sequence: Synthetic oligonucleotide
uccccaaacuucauguaag

SEQ ID NO: 2750059 - RNA, 19 nt, Artificial Sequence
  Description of Artificial Sequence: Synthetic oligonucleotide
aaaucaugcugcguucuuc

SEQ ID NO: 2750060 - RNA, 19 nt, Artificial Sequence
  Description of Artificial Sequence: Synthetic oligonucleotide
uguaucugaauuuccguau

SEQ ID NO: 2750061 - RNA, 19 nt, Artificial Sequence
  Description of Artificial Sequence: Synthetic oligonucleotide
caauaaccuggccugaacc

SEQ ID NO: 2750062 - RNA, 19 nt, Artificial Sequence
  Description of Artificial Sequence: Synthetic oligonucleotide
gaugauguaucugaauuuc

SEQ ID NO: 2750063 - RNA, 19 nt, Artificial Sequence
  Description of Artificial Sequence: Synthetic oligonucleotide
guucgauaugccaauaacc

SEQ ID NO: 2750064 - RNA, 19 nt, Artificial Sequence
  Description of Artificial Sequence: Synthetic oligonucleotide
ugacaccuaaaugucaaag

SEQ ID NO: 2750065 - RNA, 19 nt, Artificial Sequence
  Description of Artificial Sequence: Synthetic oligonucleotide
ugaaguacauagcuccagu

SEQ ID NO: 2750066 - RNA, 19 nt, Artificial Sequence
  Description of Artificial Sequence: Synthetic oligonucleotide
aaauuugcgaacacccuca

SEQ ID NO: 2750067 - RNA, 19 nt, Artificial Sequence
  Description of Artificial Sequence: Synthetic oligonucleotide
uuccguauuucucuguccu

SEQ ID NO: 2750068 - RNA, 19 nt, Artificial Sequence
  Description of Artificial Sequence: Synthetic oligonucleotide
agcuucuagauuucccuuc

SEQ ID NO: 2750069 - RNA, 19 nt, Artificial Sequence
  Description of Artificial Sequence: Synthetic oligonucleotide
uguaaccacauccuaugaa

SEQ ID NO: 2750070 - RNA, 19 nt, Artificial Sequence
  Description of Artificial Sequence: Synthetic oligonucleotide
agaucugcuuuaugccugc

SEQ ID NO: 2750071 - RNA, 19 nt, Artificial Sequence
  Description of Artificial Sequence: Synthetic oligonucleotide
ucuugacaccuaaauguca

SEQ ID NO: 2750072 - RNA, 19 nt, Artificial Sequence
  Description of Artificial Sequence: Synthetic oligonucleotide
uccuuucaggcucauuuug

SEQ ID NO: 2750073 - RNA, 19 nt, Artificial Sequence
  Description of Artificial Sequence: Synthetic oligonucleotide
uuuccaacguccacauccc

SEQ ID NO: 2750074 - RNA, 19 nt, Artificial Sequence
  Description of Artificial Sequence: Synthetic oligonucleotide
cugaauuuccguauuucuc

SEQ ID NO: 2750075 - RNA, 19 nt, Artificial Sequence
  Description of Artificial Sequence: Synthetic oligonucleotide
uaaccacauccuaugaagu

SEQ ID NO: 2750076 - RNA, 19 nt, Artificial Sequence
  Description of Artificial Sequence: Synthetic oligonucleotide
acugccauguaaauuugcg

SEQ ID NO: 2750077 - RNA, 19 nt, Artificial Sequence
  Description of Artificial Sequence: Synthetic oligonucleotide
ucgauaugccaauaaccug

SEQ ID NO: 2750078 - RNA, 19 nt, Artificial Sequence
  Description of Artificial Sequence: Synthetic oligonucleotide
aauuaaaggcacacauuca

SEQ ID NO: 2750079 - RNA, 19 nt, Artificial Sequence
  Description of Artificial Sequence: Synthetic oligonucleotide
agacuauaagcuucagaug

SEQ ID NO: 2750080 - RNA, 19 nt, Artificial Sequence
  Description of Artificial Sequence: Synthetic oligonucleotide
caccuuuaauuaaaggcac

SEQ ID NO: 2750081 - RNA, 19 nt, Artificial Sequence
  Description of Artificial Sequence: Synthetic oligonucleotide
ucuguccuuaugcuuguca

SEQ ID NO: 2750082 - RNA, 19 nt, Artificial Sequence
  Description of Artificial Sequence: Synthetic oligonucleotide
uucugcucggcauggauga

SEQ ID NO: 2750083 - RNA, 19 nt, Artificial Sequence
  Description of Artificial Sequence: Synthetic oligonucleotide
gcacacauucaucacaagg

SEQ ID NO: 2750084 - RNA, 19 nt, Artificial Sequence
  Description of Artificial Sequence: Synthetic oligonucleotide
aacugccauguaaauuugc

SEQ ID NO: 2750085 - RNA, 19 nt, Artificial Sequence
  Description of Artificial Sequence: Synthetic oligonucleotide
aauuuccguauuucucugu

SEQ ID NO: 2750086 - RNA, 19 nt, Artificial Sequence
  Description of Artificial Sequence: Synthetic oligonucleotide
ggugaauuucauuaaucug

SEQ ID NO: 2750087 - RNA, 19 nt, Artificial Sequence
  Description of Artificial Sequence: Synthetic oligonucleotide
uucuggguugcuacaguag

SEQ ID NO: 2750088 - RNA, 19 nt, Artificial Sequence
  Description of Artificial Sequence: Synthetic oligonucleotide
guccuuaugcuugucaucc

SEQ ID NO: 2750089 - RNA, 19 nt, Artificial Sequence
  Description of Artificial Sequence: Synthetic oligonucleotide
augauguaucugaauuucc

SEQ ID NO: 2750090 - RNA, 19 nt, Artificial Sequence
  Description of Artificial Sequence: Synthetic oligonucleotide
caugcugcguucuucuggc

SEQ ID NO: 2750091 - RNA, 19 nt, Artificial Sequence
  Description of Artificial Sequence: Synthetic oligonucleotide
auggauucaacugccaugu

SEQ ID NO: 2750092 - RNA, 19 nt, Artificial Sequence
  Description of Artificial Sequence: Synthetic oligonucleotide
gugaauuucauuaaucugu

SEQ ID NO: 2750093 - RNA, 19 nt, Artificial Sequence
  Description of Artificial Sequence: Synthetic oligonucleotide
  modified_base (7)..(7): a, c, u, g, unknown or other
guuuuangauccucaguuc

SEQ ID NO: 2750094 - RNA, 19 nt, Artificial Sequence
  Description of Artificial Sequence: Synthetic oligonucleotide
cgauaugccaauaaccugg

SEQ ID NO: 2750095 - RNA, 19 nt, Artificial Sequence
  Description of Artificial Sequence: Synthetic oligonucleotide
aagcauucugcucggcaug

SEQ ID NO: 2750096 - RNA, 19 nt, Artificial Sequence
  Description of Artificial Sequence: Synthetic oligonucleotide
gauucaacugccauguaaa

SEQ ID NO: 2750097 - RNA, 19 nt, Artificial Sequence
  Description of Artificial Sequence: Synthetic oligonucleotide
aucugaauuuccguauuuc

SEQ ID NO: 2750098 - RNA, 19 nt, Artificial Sequence
  Description of Artificial Sequence: Synthetic oligonucleotide
aacacccucaagcucccca

SEQ ID NO: 2750099 - RNA, 19 nt, Artificial Sequence
  Description of Artificial Sequence: Synthetic oligonucleotide
agcauacucagagccaacg

SEQ ID NO: 2750100 - RNA, 19 nt, Artificial Sequence
  Description of Artificial Sequence: Synthetic oligonucleotide
acuuugauggugaauuuca

SEQ ID NO: 2750101 - RNA, 19 nt, Artificial Sequence
  Description of Artificial Sequence: Synthetic oligonucleotide
uccaacguccacaucccca

SEQ ID NO: 2750102 - RNA, 19 nt, Artificial Sequence
  Description of Artificial Sequence: Synthetic oligonucleotide
agcuccccaaacuucaugu

SEQ ID NO: 2750103 - RNA, 19 nt, Artificial Sequence
  Description of Artificial Sequence: Synthetic oligonucleotide
uuuccguauuucucugucc

SEQ ID NO: 2750104 - RNA, 19 nt, Artificial Sequence
  Description of Artificial Sequence: Synthetic oligonucleotide
auagcuccaguuccaucac

SEQ ID NO: 2750105 - RNA, 19 nt, Artificial Sequence
  Description of Artificial Sequence: Synthetic oligonucleotide
aucuugacaccuaaauguc

SEQ ID NO: 2750106 - RNA, 19 nt, Artificial Sequence
  Description of Artificial Sequence: Synthetic oligonucleotide
ugaaccaugcagugccuug

SEQ ID NO: 2750107 - RNA, 19 nt, Artificial Sequence
  Description of Artificial Sequence: Synthetic oligonucleotide
ugauggugaauuucauuaa

SEQ ID NO: 2750108 - RNA, 19 nt, Artificial Sequence
  Description of Artificial Sequence: Synthetic oligonucleotide
uccucaguucgauaugcca

SEQ ID NO: 2750109 - RNA, 19 nt, Artificial Sequence
  Description of Artificial Sequence: Synthetic oligonucleotide
aaccacauccuaugaagua

SEQ ID NO: 2750110 - RNA, 19 nt, Artificial Sequence
  Description of Artificial Sequence: Synthetic oligonucleotide
ugcuacaguagaauccgaa

SEQ ID NO: 2750111 - RNA, 19 nt, Artificial Sequence
  Description of Artificial Sequence: Synthetic oligonucleotide
uuguaaccacauccuauga

SEQ ID NO: 2750112 - RNA, 19 nt, Artificial Sequence
  Description of Artificial Sequence: Synthetic oligonucleotide
uuauaucuugacaccuaaa

SEQ ID NO: 2750113 - RNA, 19 nt, Artificial Sequence
  Description of Artificial Sequence: Synthetic oligonucleotide
uuccaucacagcuucuaga

SEQ ID NO: 2750114 - RNA, 19 nt, Artificial Sequence
  Description of Artificial Sequence: Synthetic oligonucleotide
uaagagaugucugcuuucu

SEQ ID NO: 2750115 - RNA, 19 nt, Artificial Sequence
  Description of Artificial Sequence: Synthetic oligonucleotide
auguaucugaauuuccgua

SEQ ID NO: 2750116 - RNA, 19 nt, Artificial Sequence
  Description of Artificial Sequence: Synthetic oligonucleotide
agagccaacgggaaaagca

SEQ ID NO: 2750117 - RNA, 19 nt, Artificial Sequence
  Description of Artificial Sequence: Synthetic oligonucleotide
aaacuuugauggugaauuu

SEQ ID NO: 2750118 - RNA, 19 nt, Artificial Sequence
  Description of Artificial Sequence: Synthetic oligonucleotide
ugcucggcauggaugaugu

SEQ ID NO: 2750119 - RNA, 19 nt, Artificial Sequence
  Description of Artificial Sequence: Synthetic oligonucleotide
agugccuugcaacuuccug

SEQ ID NO: 2750120 - RNA, 19 nt, Artificial Sequence
  Description of Artificial Sequence: Synthetic oligonucleotide
ucggcauggaugauguauc

SEQ ID NO: 2750121 - RNA, 19 nt, Artificial Sequence
  Description of Artificial Sequence: Synthetic oligonucleotide
cugcccaaaugacagcucc

SEQ ID NO: 2750122 - RNA, 19 nt, Artificial Sequence
  Description of Artificial Sequence: Synthetic oligonucleotide
cugcaccuuuaauuaaagg

SEQ ID NO: 2750123 - RNA, 19 nt, Artificial Sequence
  Description of Artificial Sequence: Synthetic oligonucleotide
auccuaugaaguacauagc

SEQ ID NO: 2750124 - RNA, 19 nt, Artificial Sequence
  Description of Artificial Sequence: Synthetic oligonucleotide
ugccuugcaacuuccugug

SEQ ID NO: 2750125 - RNA, 19 nt, Artificial Sequence
  Description of Artificial Sequence: Synthetic oligonucleotide
uugcgaacacccucaagcu

SEQ ID NO: 2750126 - RNA, 19 nt, Artificial Sequence
  Description of Artificial Sequence: Synthetic oligonucleotide
auuuuggucaagacuauaa

SEQ ID NO: 2750127 - RNA, 19 nt, Artificial Sequence
  Description of Artificial Sequence: Synthetic oligonucleotide
aaaaucaugcugcguucuu

SEQ ID NO: 2750128 - RNA, 19 nt, Artificial Sequence
  Description of Artificial Sequence: Synthetic oligonucleotide
uuaaucuguucuggguugc

SEQ ID NO: 2750129 - RNA, 19 nt, Artificial Sequence
  Description of Artificial Sequence: Synthetic oligonucleotide
cauguaaauuugcgaacac

SEQ ID NO: 2750130 - RNA, 19 nt, Artificial Sequence
  Description of Artificial Sequence: Synthetic oligonucleotide
cuugacaccuaaaugucaa

SEQ ID NO: 2750131 - RNA, 19 nt, Artificial Sequence
  Description of Artificial Sequence: Synthetic oligonucleotide
uucugcccaaaugacagcu

SEQ ID NO: 2750132 - RNA, 19 nt, Artificial Sequence
  Description of Artificial Sequence: Synthetic oligonucleotide
gauaugccaauaaccuggc

SEQ ID NO: 2750133 - RNA, 19 nt, Artificial Sequence
  Description of Artificial Sequence: Synthetic oligonucleotide
agauggauucaacugccau

SEQ ID NO: 2750134 - RNA, 19 nt, Artificial Sequence
  Description of Artificial Sequence: Synthetic oligonucleotide
  modified_base (4)..(4): a, c, u, g, unknown or other
uuangauccucaguucgau

SEQ ID NO: 2750135 - RNA, 19 nt, Artificial Sequence
  Description of Artificial Sequence: Synthetic oligonucleotide
  modified_base (10)..(10): a, c, u, g, unknown or other
ccuguuuuangauccucag

SEQ ID NO: 2750136 - RNA, 19 nt, Artificial Sequence
  Description of Artificial Sequence: Synthetic oligonucleotide
gauguaucugaauuuccgu

SEQ ID NO: 2750137 - RNA, 19 nt, Artificial Sequence
  Description of Artificial Sequence: Synthetic oligonucleotide
acccucaagcuccccaaac

SEQ ID NO: 2750138 - RNA, 19 nt, Artificial Sequence
  Description of Artificial Sequence: Synthetic oligonucleotide
uccuguggcaaacuuugau

SEQ ID NO: 2750139 - RNA, 19 nt, Artificial Sequence
  Description of Artificial Sequence: Synthetic oligonucleotide
gggaaaagcauuguaacca

SEQ ID NO: 2750140 - RNA, 19 nt, Artificial Sequence
  Description of Artificial Sequence: Synthetic oligonucleotide
ucuucuggcuuuauaucuu

SEQ ID NO: 2750141 - RNA, 19 nt, Artificial Sequence
  Description of Artificial Sequence: Synthetic oligonucleotide
ucuguucuggguugcuaca

SEQ ID NO: 2750142 - RNA, 19 nt, Artificial Sequence
  Description of Artificial Sequence: Synthetic oligonucleotide
agcauuguaaccacauccu

SEQ ID NO: 2750143 - RNA, 19 nt, Artificial Sequence
  Description of Artificial Sequence: Synthetic oligonucleotide
gguugcuacaguagaaucc

SEQ ID NO: 2750144 - RNA, 19 nt, Artificial Sequence
  Description of Artificial Sequence: Synthetic oligonucleotide
acauagcuccaguuccauc

SEQ ID NO: 2750145 - RNA, 19 nt, Artificial Sequence
  Description of Artificial Sequence: Synthetic oligonucleotide
uguggcaaacuuugauggu

SEQ ID NO: 2750146 - RNA, 19 nt, Artificial Sequence
  Description of Artificial Sequence: Synthetic oligonucleotide
augccugcaccuuuaauua

SEQ ID NO: 2750147 - RNA, 19 nt, Artificial Sequence
  Description of Artificial Sequence: Synthetic oligonucleotide
guggcaaacuuugauggug

SEQ ID NO: 2750148 - RNA, 19 nt, Artificial Sequence
  Description of Artificial Sequence: Synthetic oligonucleotide
gaauuucauuaaucuguuc

SEQ ID NO: 2750149 - RNA, 19 nt, Artificial Sequence
  Description of Artificial Sequence: Synthetic oligonucleotide
ggcuuuauaucuugacacc

SEQ ID NO: 2750150 - RNA, 19 nt, Artificial Sequence
  Description of Artificial Sequence: Synthetic oligonucleotide
uguucuggguugcuacagu

SEQ ID NO: 2750151 - RNA, 19 nt, Artificial Sequence
  Description of Artificial Sequence: Synthetic oligonucleotide
cuggcuuuauaucuugaca

SEQ ID NO: 2750152 - RNA, 19 nt, Artificial Sequence
  Description of Artificial Sequence: Synthetic oligonucleotide
ugcagugccuugcaacuuc

SEQ ID NO: 2750153 - RNA, 19 nt, Artificial Sequence
  Description of Artificial Sequence: Synthetic oligonucleotide
uggucaagacuauaagcuu

SEQ ID NO: 2750154 - RNA, 19 nt, Artificial Sequence
  Description of Artificial Sequence: Synthetic oligonucleotide
ucauuuuggucaagacuau

SEQ ID NO: 2750155 - RNA, 19 nt, Artificial Sequence
  Description of Artificial Sequence: Synthetic oligonucleotide
aauuugcgaacacccucaa

SEQ ID NO: 2750156 - RNA, 19 nt, Artificial Sequence
  Description of Artificial Sequence: Synthetic oligonucleotide
gcauggaugauguaucuga

SEQ ID NO: 2750157 - RNA, 19 nt, Artificial Sequence
  Description of Artificial Sequence: Synthetic oligonucleotide
gccugaaccaugcagugcc

SEQ ID NO: 2750158 - RNA, 19 nt, Artificial Sequence
  Description of Artificial Sequence: Synthetic oligonucleotide
ccaaacuucauguaagaga

SEQ ID NO: 2750159 - RNA, 19 nt, Artificial Sequence
  Description of Artificial Sequence: Synthetic oligonucleotide
cucaagcuccccaaacuuc

SEQ ID NO: 2750160 - RNA, 19 nt, Artificial Sequence
  Description of Artificial Sequence: Synthetic oligonucleotide
ggaaaagcauuguaaccac

SEQ ID NO: 2750161 - RNA, 19 nt, Artificial Sequence
  Description of Artificial Sequence: Synthetic oligonucleotide
auacucagagccaacggga

SEQ ID NO: 2750162 - RNA, 19 nt, Artificial Sequence
  Description of Artificial Sequence: Synthetic oligonucleotide
gcaccuuuaauuaaaggca

SEQ ID NO: 2750163 - RNA, 19 nt, Artificial Sequence
  Description of Artificial Sequence: Synthetic oligonucleotide
uucuggcuuuauaucuuga

SEQ ID NO: 2750164 - RNA, 19 nt, Artificial Sequence
  Description of Artificial Sequence: Synthetic oligonucleotide
accuaaaugucaaagcauu

SEQ ID NO: 2750165 - RNA, 19 nt, Artificial Sequence
  Description of Artificial Sequence: Synthetic oligonucleotide
gaaccaugcagugccuugc

SEQ ID NO: 2750166 - RNA, 19 nt, Artificial Sequence
  Description of Artificial Sequence: Synthetic oligonucleotide
uguccuuaugcuugucauc

SEQ ID NO: 2750167 - RNA, 19 nt, Artificial Sequence
  Description of Artificial Sequence: Synthetic oligonucleotide
uuuaugccugcaccuuuaa

SEQ ID NO: 2750168 - RNA, 19 nt, Artificial Sequence
  Description of Artificial Sequence: Synthetic oligonucleotide
aaccaugcagugccuugca

SEQ ID NO: 2750169 - RNA, 19 nt, Artificial Sequence
  Description of Artificial Sequence: Synthetic oligonucleotide
uucaacugccauguaaauu

SEQ ID NO: 2750170 - RNA, 19 nt, Artificial Sequence
  Description of Artificial Sequence: Synthetic oligonucleotide
  modified_base (15)..(15): a, c, u, g, unknown or other
caacuccuguuuuangauc

SEQ ID NO: 2750171 - RNA, 19 nt, Artificial Sequence
  Description of Artificial Sequence: Synthetic oligonucleotide
guaagagaugucugcuuuc

SEQ ID NO: 2750172 - RNA, 19 nt, Artificial Sequence
  Description of Artificial Sequence: Synthetic oligonucleotide
agcauagaucugcuuuaug

SEQ ID NO: 2750173 - RNA, 19 nt, Artificial Sequence
  Description of Artificial Sequence: Synthetic oligonucleotide
agcauucugcucggcaugg

SEQ ID NO: 2750174 - RNA, 19 nt, Artificial Sequence
  Description of Artificial Sequence: Synthetic oligonucleotide
auucaacugccauguaaau

SEQ ID NO: 2750175 - RNA, 19 nt, Artificial Sequence
  Description of Artificial Sequence: Synthetic oligonucleotide
caaacuuugauggugaauu

SEQ ID NO: 2750176 - RNA, 19 nt, Artificial Sequence
  Description of Artificial Sequence: Synthetic oligonucleotide
cuucauguaagagaugucu

SEQ ID NO: 2750177 - RNA, 19 nt, Artificial Sequence
  Description of Artificial Sequence: Synthetic oligonucleotide
ugcgaacacccucaagcuc

SEQ ID NO: 2750178 - RNA, 19 nt, Artificial Sequence
  Description of Artificial Sequence: Synthetic oligonucleotide
gcauacucagagccaacgg

SEQ ID NO: 2750179 - RNA, 19 nt, Artificial Sequence
  Description of Artificial Sequence: Synthetic oligonucleotide
auggaugauguaucugaau

SEQ ID NO: 2750180 - RNA, 19 nt, Artificial Sequence
  Description of Artificial Sequence: Synthetic oligonucleotide
uggccugaaccaugcagug

SEQ ID NO: 2750181 - RNA, 19 nt, Artificial Sequence
  Description of Artificial Sequence: Synthetic oligonucleotide
caagacuauaagcuucaga

SEQ ID NO: 2750182 - RNA, 19 nt, Artificial Sequence
  Description of Artificial Sequence: Synthetic oligonucleotide
cuugcaacuuccuguggca

SEQ ID NO: 2750183 - RNA, 19 nt, Artificial Sequence
  Description of Artificial Sequence: Synthetic oligonucleotide
caucacagcuucuagauuu

SEQ ID NO: 2750184 - RNA, 19 nt, Artificial Sequence
  Description of Artificial Sequence: Synthetic oligonucleotide
ccuguggcaaacuuugaug

SEQ ID NO: 2750185 - RNA, 19 nt, Artificial Sequence
  Description of Artificial Sequence: Synthetic oligonucleotide
ugcccaaaugacagcucca

SEQ ID NO: 2750186 - RNA, 19 nt, Artificial Sequence
  Description of Artificial Sequence: Synthetic oligonucleotide
ucaagacuauaagcuucag

SEQ ID NO: 2750187 - RNA, 19 nt, Artificial Sequence
  Description of Artificial Sequence: Synthetic oligonucleotide
ucaggcucauuuuggucaa

SEQ ID NO: 2750188 - RNA, 19 nt, Artificial Sequence
  Description of Artificial Sequence: Synthetic oligonucleotide
uuaugccugcaccuuuaau

SEQ ID NO: 2750189 - RNA, 19 nt, Artificial Sequence
  Description of Artificial Sequence: Synthetic oligonucleotide
ccuaugaaguacauagcuc

SEQ ID NO: 2750190 - RNA, 19 nt, Artificial Sequence
  Description of Artificial Sequence: Synthetic oligonucleotide
ugcaacuuccuguggcaaa

SEQ ID NO: 2750191 - RNA, 19 nt, Artificial Sequence
  Description of Artificial Sequence: Synthetic oligonucleotide
cuaaaugucaaagcauucu

SEQ ID NO: 2750192 - RNA, 19 nt, Artificial Sequence
  Description of Artificial Sequence: Synthetic oligonucleotide
acuucauguaagagauguc

SEQ ID NO: 2750193 - RNA, 19 nt, Artificial Sequence
  Description of Artificial Sequence: Synthetic oligonucleotide
auguaagagaugucugcuu

SEQ ID NO: 2750194 - RNA, 19 nt, Artificial Sequence
  Description of Artificial Sequence: Synthetic oligonucleotide
ugacagcuccaacuccugu

SEQ ID NO: 2750195 - RNA, 19 nt, Artificial Sequence
  Description of Artificial Sequence: Synthetic oligonucleotide
cuuuauaucuugacaccua

SEQ ID NO: 2750196 - RNA, 19 nt, Artificial Sequence
  Description of Artificial Sequence: Synthetic oligonucleotide
ccuuuaauuaaaggcacac

SEQ ID NO: 2750197 - RNA, 19 nt, Artificial Sequence
  Description of Artificial Sequence: Synthetic oligonucleotide
aagggcauuuugucacaaa

SEQ ID NO: 2750198 - RNA, 19 nt, Artificial Sequence
  Description of Artificial Sequence: Synthetic oligonucleotide
caaagcauucugcucggca

SEQ ID NO: 2750199 - RNA, 19 nt, Artificial Sequence
  Description of Artificial Sequence: Synthetic oligonucleotide
uggguugcuacaguagaau

SEQ ID NO: 2750200 - RNA, 19 nt, Artificial Sequence
  Description of Artificial Sequence: Synthetic oligonucleotide
  modified_base (3)..(3): a, c, u, g, unknown or other
uangauccucaguucgaua

SEQ ID NO: 2750201 - RNA, 19 nt, Artificial Sequence
  Description of Artificial Sequence: Synthetic oligonucleotide
auccucaguucgauaugcc

SEQ ID NO: 2750202 - RNA, 19 nt, Artificial Sequence
  Description of Artificial Sequence: Synthetic oligonucleotide
gucaagacuauaagcuuca

SEQ ID NO: 2750203 - RNA, 19 nt, Artificial Sequence
  Description of Artificial Sequence: Synthetic oligonucleotide
caacugccauguaaauuug

SEQ ID NO: 2750204 - RNA, 19 nt, Artificial Sequence
  Description of Artificial Sequence: Synthetic oligonucleotide
acaagggcauuuugucaca

SEQ ID NO: 2750205 - RNA, 19 nt, Artificial Sequence
  Description of Artificial Sequence: Synthetic oligonucleotide
gcgaacacccucaagcucc

SEQ ID NO: 2750206 - RNA, 19 nt, Artificial Sequence
  Description of Artificial Sequence: Synthetic oligonucleotide
ggauucaacugccauguaa

SEQ ID NO: 2750207 - RNA, 19 nt, Artificial Sequence
  Description of Artificial Sequence: Synthetic oligonucleotide
acuauaagcuucagaugga

SEQ ID NO: 2750208 - RNA, 19 nt, Artificial Sequence
  Description of Artificial Sequence: Synthetic oligonucleotide
uugacaccuaaaugucaaa

SEQ ID NO: 2750209 - RNA, 19 nt, Artificial Sequence
  Description of Artificial Sequence: Synthetic oligonucleotide
cugccauguaaauuugcga

SEQ ID NO: 2750210 - RNA, 19 nt, Artificial Sequence
  Description of Artificial Sequence: Synthetic oligonucleotide
uuccaacguccacaucccc

SEQ ID NO: 2750211 - RNA, 19 nt, Artificial Sequence
  Description of Artificial Sequence: Synthetic oligonucleotide
aucacagcuucuagauuuc

SEQ ID NO: 2750212 - RNA, 19 nt, Artificial Sequence
  Description of Artificial Sequence: Synthetic oligonucleotide
ucucuguccuuaugcuugu

SEQ ID NO: 2750213 - RNA, 19 nt, Artificial Sequence
  Description of Artificial Sequence: Synthetic oligonucleotide
aguuccaucacagcuucua

SEQ ID NO: 2750214 - RNA, 19 nt, Artificial Sequence
  Description of Artificial Sequence: Synthetic oligonucleotide
  modified_base (18)..(18): a, c, u, g, unknown or other
cuccaacuccuguuuuang

SEQ ID NO: 2750215 - RNA, 19 nt, Artificial Sequence
  Description of Artificial Sequence: Synthetic oligonucleotide
ggucaagacuauaagcuuc

SEQ ID NO: 2750216 - RNA, 19 nt, Artificial Sequence
  Description of Artificial Sequence: Synthetic oligonucleotide
agcuucagauggauucaac

SEQ ID NO: 2750217 - RNA, 19 nt, Artificial Sequence
  Description of Artificial Sequence: Synthetic oligonucleotide
ucugcccaaaugacagcuc

SEQ ID NO: 2750218 - RNA, 19 nt, Artificial Sequence
  Description of Artificial Sequence: Synthetic oligonucleotide
uugcuacaguagaauccga

SEQ ID NO: 2750219 - RNA, 19 nt, Artificial Sequence
  Description of Artificial Sequence: Synthetic oligonucleotide
cauuguaaccacauccuau

SEQ ID NO: 2750220 - RNA, 19 nt, Artificial Sequence
  Description of Artificial Sequence: Synthetic oligonucleotide
uccuuaugcuugucaucca

SEQ ID NO: 2750221 - RNA, 19 nt, Artificial Sequence
  Description of Artificial Sequence: Synthetic oligonucleotide
ugcugcguucuucuggcuu

SEQ ID NO: 2750222 - RNA, 19 nt, Artificial Sequence
  Description of Artificial Sequence: Synthetic oligonucleotide
gccauguaaauuugcgaac

SEQ ID NO: 2750223 - RNA, 19 nt, Artificial Sequence
  Description of Artificial Sequence: Synthetic oligonucleotide
auaaccuggccugaaccau

SEQ ID NO: 2750224 - RNA, 19 nt, Artificial Sequence
  Description of Artificial Sequence: Synthetic oligonucleotide
aucaugcugcguucuucug

SEQ ID NO: 2750225 - RNA, 19 nt, Artificial Sequence
  Description of Artificial Sequence: Synthetic oligonucleotide
cauggaugauguaucugaa

SEQ ID NO: 2750226 - RNA, 19 nt, Artificial Sequence
  Description of Artificial Sequence: Synthetic oligonucleotide
ccaacguccacauccccag

SEQ ID NO: 2750227 - RNA, 19 nt, Artificial Sequence
  Description of Artificial Sequence: Synthetic oligonucleotide
cauuaaucuguucuggguu

SEQ ID NO: 2750228 - RNA, 19 nt, Artificial Sequence
  Description of Artificial Sequence: Synthetic oligonucleotide
ccuaaaugucaaagcauuc

SEQ ID NO: 2750229 - RNA, 19 nt, Artificial Sequence
  Description of Artificial Sequence: Synthetic oligonucleotide
aagcuucagauggauucaa

SEQ ID NO: 2750230 - RNA, 19 nt, Artificial Sequence
  Description of Artificial Sequence: Synthetic oligonucleotide
uccccagcauagaucugcu

SEQ ID NO: 2750231 - RNA, 19 nt, Artificial Sequence
  Description of Artificial Sequence: Synthetic oligonucleotide
gaaguacauagcuccaguu

SEQ ID NO: 2750232 - RNA, 19 nt, Artificial Sequence
  Description of Artificial Sequence: Synthetic oligonucleotide
ggggaagucagcauacuca

SEQ ID NO: 2750233 - RNA, 19 nt, Artificial Sequence
  Description of Artificial Sequence: Synthetic oligonucleotide
caugcagugccuugcaacu

SEQ ID NO: 2750234 - RNA, 19 nt, Artificial Sequence
  Description of Artificial Sequence: Synthetic oligonucleotide
cuucuagauuucccuucug

SEQ ID NO: 2750235 - RNA, 19 nt, Artificial Sequence
  Description of Artificial Sequence: Synthetic oligonucleotide
ccugcaccuuuaauuaaag

SEQ ID NO: 2750236 - RNA, 19 nt, Artificial Sequence
  Description of Artificial Sequence: Synthetic oligonucleotide
gugccuugcaacuuccugu

SEQ ID NO: 2750237 - RNA, 19 nt, Artificial Sequence
  Description of Artificial Sequence: Synthetic oligonucleotide
ugccugcaccuuuaauuaa

SEQ ID NO: 2750238 - RNA, 19 nt, Artificial Sequence
  Description of Artificial Sequence: Synthetic oligonucleotide
guucuggguugcuacagua

SEQ ID NO: 2750239 - RNA, 19 nt, Artificial Sequence
  Description of Artificial Sequence: Synthetic oligonucleotide
cuuuaugccugcaccuuua

SEQ ID NO: 2750240 - RNA, 19 nt, Artificial Sequence
  Description of Artificial Sequence: Synthetic oligonucleotide
cgggaaaagcauuguaacc

SEQ ID NO: 2750241 - RNA, 19 nt, Artificial Sequence
  Description of Artificial Sequence: Synthetic oligonucleotide
aggcacacauucaucacaa

SEQ ID NO: 2750242 - RNA, 19 nt, Artificial Sequence
  Description of Artificial Sequence: Synthetic oligonucleotide
ccaaaugacagcuccaacu

SEQ ID NO: 2750243 - RNA, 19 nt, Artificial Sequence
  Description of Artificial Sequence: Synthetic oligonucleotide
guaaauuugcgaacacccu

SEQ ID NO: 2750244 - RNA, 19 nt, Artificial Sequence
  Description of Artificial Sequence: Synthetic oligonucleotide
ggguugcuacaguagaauc

SEQ ID NO: 2750245 - RNA, 19 nt, Artificial Sequence
  Description of Artificial Sequence: Synthetic oligonucleotide
cuuucaggcucauuuuggu

SEQ ID NO: 2750246 - RNA, 19 nt, Artificial Sequence
  Description of Artificial Sequence: Synthetic oligonucleotide
gcucauuuuggucaagacu

SEQ ID NO: 2750247 - RNA, 19 nt, Artificial Sequence
  Description of Artificial Sequence: Synthetic oligonucleotide
ggcucauuuuggucaagac

SEQ ID NO: 2750248 - RNA, 19 nt, Artificial Sequence
  Description of Artificial Sequence: Synthetic oligonucleotide
gcuucagauggauucaacu

SEQ ID NO: 2750249 - RNA, 19 nt, Artificial Sequence
  Description of Artificial Sequence: Synthetic oligonucleotide
aggcucauuuuggucaaga

SEQ ID NO: 2750250 - RNA, 19 nt, Artificial Sequence
  Description of Artificial Sequence: Synthetic oligonucleotide
ugcuuuaugccugcaccuu

SEQ ID NO: 2750251 - RNA, 19 nt, Artificial Sequence
  Description of Artificial Sequence: Synthetic oligonucleotide
uugcaacuuccuguggcaa

SEQ ID NO: 2750252 - RNA, 19 nt, Artificial Sequence
  Description of Artificial Sequence: Synthetic oligonucleotide
cauguaagagaugucugcu

SEQ ID NO: 2750253 - RNA, 19 nt, Artificial Sequence
  Description of Artificial Sequence: Synthetic oligonucleotide
guacauagcuccaguucca

SEQ ID NO: 2750254 - RNA, 19 nt, Artificial Sequence
  Description of Artificial Sequence: Synthetic oligonucleotide
uccguauuucucuguccuu

SEQ ID NO: 2750255 - RNA, 19 nt, Artificial Sequence
  Description of Artificial Sequence: Synthetic oligonucleotide
gucagcauacucagagcca

SEQ ID NO: 2750256 - RNA, 19 nt, Artificial Sequence
  Description of Artificial Sequence: Synthetic oligonucleotide
gccaacgggaaaagcauug

SEQ ID NO: 2750257 - RNA, 19 nt, Artificial Sequence
  Description of Artificial Sequence: Synthetic oligonucleotide
ucaguucgauaugccaaua

SEQ ID NO: 2750258 - RNA, 19 nt, Artificial Sequence
  Description of Artificial Sequence: Synthetic oligonucleotide
agauuucccuucugcccaa

SEQ ID NO: 2750259 - RNA, 19 nt, Artificial Sequence
  Description of Artificial Sequence: Synthetic oligonucleotide
ugccaauaaccuggccuga

SEQ ID NO: 2750260 - RNA, 19 nt, Artificial Sequence
  Description of Artificial Sequence: Synthetic oligonucleotide
caccuaaaugucaaagcau

SEQ ID NO: 2750261 - RNA, 19 nt, Artificial Sequence
  Description of Artificial Sequence: Synthetic oligonucleotide
cuggguugcuacaguagaa

SEQ ID NO: 2750262 - RNA, 19 nt, Artificial Sequence
  Description of Artificial Sequence: Synthetic oligonucleotide
caguucgauaugccaauaa

SEQ ID NO: 2750263 - RNA, 19 nt, Artificial Sequence
  Description of Artificial Sequence: Synthetic oligonucleotide
acguccacauccccagcau

SEQ ID NO: 2750264 - RNA, 19 nt, Artificial Sequence
  Description of Artificial Sequence: Synthetic oligonucleotide
ccauguaaauuugcgaaca

SEQ ID NO: 2750265 - RNA, 19 nt, Artificial Sequence
  Description of Artificial Sequence: Synthetic oligonucleotide
  modified_base (12)..(12): a, c, u, g, unknown or other
cuccuguuuuangauccuc

SEQ ID NO: 2750266 - RNA, 19 nt, Artificial Sequence
  Description of Artificial Sequence: Synthetic oligonucleotide
acauccuaugaaguacaua

SEQ ID NO: 2750267 - RNA, 19 nt, Artificial Sequence
  Description of Artificial Sequence: Synthetic oligonucleotide
gcaacuuccuguggcaaac

SEQ ID NO: 2750268 - RNA, 19 nt, Artificial Sequence
  Description of Artificial Sequence: Synthetic oligonucleotide
gcuugucauccaugugggg

SEQ ID NO: 2750269 - RNA, 19 nt, Artificial Sequence
  Description of Artificial Sequence: Synthetic oligonucleotide
cagauggauucaacugcca

SEQ ID NO: 2750270 - RNA, 19 nt, Artificial Sequence
  Description of Artificial Sequence: Synthetic oligonucleotide
  modified_base (9)..(9): a, c, u, g, unknown or other
cuguuuuangauccucagu

SEQ ID NO: 2750271 - RNA, 19 nt, Artificial Sequence
  Description of Artificial Sequence: Synthetic oligonucleotide
cugcucggcauggaugaug

SEQ ID NO: 2750272 - RNA, 19 nt, Artificial Sequence
  Description of Artificial Sequence: Synthetic oligonucleotide
cagcauacucagagccaac

SEQ ID NO: 2750273 - RNA, 19 nt, Artificial Sequence
  Description of Artificial Sequence: Synthetic oligonucleotide
accaugcagugccuugcaa

SEQ ID NO: 2750274 - RNA, 19 nt, Artificial Sequence
  Description of Artificial Sequence: Synthetic oligonucleotide
ccucaguucgauaugccaa

SEQ ID NO: 2750275 - RNA, 19 nt, Artificial Sequence
  Description of Artificial Sequence: Synthetic oligonucleotide
  modified_base (13)..(13): a, c, u, g, unknown or other
acuccuguuuuangauccu

SEQ ID NO: 2750276 - RNA, 19 nt, Artificial Sequence
  Description of Artificial Sequence: Synthetic oligonucleotide
caacgggaaaagcauugua

SEQ ID NO: 2750277 - RNA, 19 nt, Artificial Sequence
  Description of Artificial Sequence: Synthetic oligonucleotide
gcuuuauaucuugacaccu

SEQ ID NO: 2750278 - RNA, 19 nt, Artificial Sequence
  Description of Artificial Sequence: Synthetic oligonucleotide
cugcuuuaugccugcaccu

SEQ ID NO: 2750279 - RNA, 19 nt, Artificial Sequence
  Description of Artificial Sequence: Synthetic oligonucleotide
cucaguucgauaugccaau

SEQ ID NO: 2750280 - RNA, 19 nt, Artificial Sequence
  Description of Artificial Sequence: Synthetic oligonucleotide
caacguccacauccccagc

SEQ ID NO: 2750281 - RNA, 19 nt, Artificial Sequence
  Description of Artificial Sequence: Synthetic oligonucleotide
gagccaacgggaaaagcau

SEQ ID NO: 2750282 - RNA, 19 nt, Artificial Sequence
  Description of Artificial Sequence: Synthetic oligonucleotide
ggcacacauucaucacaag

SEQ ID NO: 2750283 - RNA, 19 nt, Artificial Sequence
  Description of Artificial Sequence: Synthetic oligonucleotide
cucggcauggaugauguau

SEQ ID NO: 2750284 - RNA, 19 nt, Artificial Sequence
  Description of Artificial Sequence: Synthetic oligonucleotide
ccacauccuaugaaguaca

SEQ ID NO: 2750285 - RNA, 19 nt, Artificial Sequence
  Description of Artificial Sequence: Synthetic oligonucleotide
gcauuguaaccacauccua

SEQ ID NO: 2750286 - RNA, 19 nt, Artificial Sequence
  Description of Artificial Sequence: Synthetic oligonucleotide
cauuuuggucaagacuaua

SEQ ID NO: 2750287 - RNA, 19 nt, Artificial Sequence
  Description of Artificial Sequence: Synthetic oligonucleotide
gcuucuagauuucccuucu

SEQ ID NO: 2750288 - RNA, 19 nt, Artificial Sequence
  Description of Artificial Sequence: Synthetic oligonucleotide
gccuugcaacuuccugugg

SEQ ID NO: 2750289 - RNA, 19 nt, Artificial Sequence
  Description of Artificial Sequence: Synthetic oligonucleotide
cccaaaugacagcuccaac

SEQ ID NO: 2750290 - RNA, 19 nt, Artificial Sequence
  Description of Artificial Sequence: Synthetic oligonucleotide
ccagcauagaucugcuuua

SEQ ID NO: 2750291 - RNA, 19 nt, Artificial Sequence
  Description of Artificial Sequence: Synthetic oligonucleotide
  modified_base (16)..(16): a, c, u, g, unknown or other
ccaacuccuguuuuangau

SEQ ID NO: 2750292 - RNA, 19 nt, Artificial Sequence
  Description of Artificial Sequence: Synthetic oligonucleotide
augcugcguucuucuggcu

SEQ ID NO: 2750293 - RNA, 19 nt, Artificial Sequence
  Description of Artificial Sequence: Synthetic oligonucleotide
gaucugcuuuaugccugca

SEQ ID NO: 2750294 - RNA, 19 nt, Artificial Sequence
  Description of Artificial Sequence: Synthetic oligonucleotide
cguucuucuggcuuuauau

SEQ ID NO: 2750295 - RNA, 19 nt, Artificial Sequence
  Description of Artificial Sequence: Synthetic oligonucleotide
cauucugcucggcauggau

SEQ ID NO: 2750296 - RNA, 19 nt, Artificial Sequence
  Description of Artificial Sequence: Synthetic oligonucleotide
agccaacgggaaaagcauu

SEQ ID NO: 2750297 - RNA, 19 nt, Artificial Sequence
  Description of Artificial Sequence: Synthetic oligonucleotide
gcagugccuugcaacuucc

SEQ ID NO: 2750298 - RNA, 19 nt, Artificial Sequence
  Description of Artificial Sequence: Synthetic oligonucleotide
gaacacccucaagcucccc

SEQ ID NO: 2750299 - RNA, 19 nt, Artificial Sequence
  Description of Artificial Sequence: Synthetic oligonucleotide
ggcaaacuuugauggugaa

SEQ ID NO: 2750300 - RNA, 19 nt, Artificial Sequence
  Description of Artificial Sequence: Synthetic oligonucleotide
ggccugaaccaugcagugc

SEQ ID NO: 2750301 - RNA, 19 nt, Artificial Sequence
  Description of Artificial Sequence: Synthetic oligonucleotide
cccuucugcccaaaugaca

SEQ ID NO: 2750302 - RNA, 19 nt, Artificial Sequence
  Description of Artificial Sequence: Synthetic oligonucleotide
ccccaaacuucauguaaga

SEQ ID NO: 2750303 - RNA, 19 nt, Artificial Sequence
  Description of Artificial Sequence: Synthetic oligonucleotide
caagggcauuuugucacaa

SEQ ID NO: 2750304 - RNA, 19 nt, Artificial Sequence
  Description of Artificial Sequence: Synthetic oligonucleotide
  modified_base (19)..(19): a, c, u, g, unknown or other
gcuccaacuccuguuuuan

SEQ ID NO: 2750305 - RNA, 19 nt, Artificial Sequence
  Description of Artificial Sequence: Synthetic oligonucleotide
ucugcucggcauggaugau

SEQ ID NO: 2750306 - RNA, 19 nt, Artificial Sequence
  Description of Artificial Sequence: Synthetic oligonucleotide
gccugcaccuuuaauuaaa

SEQ ID NO: 2750307 - RNA, 19 nt, Artificial Sequence
  Description of Artificial Sequence: Synthetic oligonucleotide
ggaagucagcauacucaga

SEQ ID NO: 2750308 - RNA, 19 nt, Artificial Sequence
  Description of Artificial Sequence: Synthetic oligonucleotide
caggcucauuuuggucaag

SEQ ID NO: 2750309 - RNA, 19 nt, Artificial Sequence
  Description of Artificial Sequence: Synthetic oligonucleotide
gauuucccuucugcccaaa

SEQ ID NO: 2750310 - RNA, 19 nt, Artificial Sequence
  Description of Artificial Sequence: Synthetic oligonucleotide
cacauccuaugaaguacau

SEQ ID NO: 2750311 - RNA, 19 nt, Artificial Sequence
  Description of Artificial Sequence: Synthetic oligonucleotide
ugcguucuucuggcuuuau

SEQ ID NO: 2750312 - RNA, 19 nt, Artificial Sequence
  Description of Artificial Sequence: Synthetic oligonucleotide
gcccaaaugacagcuccaa

SEQ ID NO: 2750313 - RNA, 19 nt, Artificial Sequence
  Description of Artificial Sequence: Synthetic oligonucleotide
cgaacacccucaagcuccc

SEQ ID NO: 2750314 - RNA, 19 nt, Artificial Sequence
  Description of Artificial Sequence: Synthetic oligonucleotide
cagcuucuagauuucccuu

SEQ ID NO: 2750315 - RNA, 19 nt, Artificial Sequence
  Description of Artificial Sequence: Synthetic oligonucleotide
gcuuuaugccugcaccuuu

SEQ ID NO: 2750316 - RNA, 19 nt, Artificial Sequence
  Description of Artificial Sequence: Synthetic oligonucleotide
gcugcguucuucuggcuuu

SEQ ID NO: 2750317 - RNA, 19 nt, Artificial Sequence
  Description of Artificial Sequence: Synthetic oligonucleotide
ccguauuucucuguccuua

SEQ ID NO: 2750318 - RNA, 19 nt, Artificial Sequence
  Description of Artificial Sequence: Synthetic oligonucleotide
gcguucuucuggcuuuaua

SEQ ID NO: 2750319 - RNA, 19 nt, Artificial Sequence
  Description of Artificial Sequence: Synthetic oligonucleotide
ccuuaugcuugucauccau

SEQ ID NO: 2750320 - RNA, 19 nt, Artificial Sequence
  Description of Artificial Sequence: Synthetic oligonucleotide
cauucaucacaagggcauu

SEQ ID NO: 2750321 - RNA, 19 nt, Artificial Sequence
  Description of Artificial Sequence: Synthetic oligonucleotide
cagugccuugcaacuuccu

SEQ ID NO: 2750322 - RNA, 19 nt, Artificial Sequence
  Description of Artificial Sequence: Synthetic oligonucleotide
ccucaagcuccccaaacuu

SEQ ID NO: 2750323 - RNA, 19 nt, Artificial Sequence
  Description of Artificial Sequence: Synthetic oligonucleotide
caguuccaucacagcuucu

SEQ ID NO: 2750324 - RNA, 19 nt, Artificial Sequence
  Description of Artificial Sequence: Synthetic oligonucleotide
cugcguucuucuggcuuua

SEQ ID NO: 2750325 - RNA, 19 nt, Artificial Sequence
  Description of Artificial Sequence: Synthetic oligonucleotide
ccaacgggaaaagcauugu

SEQ ID NO: 2750326 - RNA, 19 nt, Artificial Sequence
  Description of Artificial Sequence: Synthetic oligonucleotide
ccacauccccagcauagau

SEQ ID NO: 2750327 - RNA, 19 nt, Artificial Sequence
  Description of Artificial Sequence: Synthetic oligonucleotide
cguauuucucuguccuuau

SEQ ID NO: 2750328 - RNA, 19 nt, Artificial Sequence
  Description of Artificial Sequence: Synthetic oligonucleotide
ccaucacagcuucuagauu

SEQ ID NO: 2750329 - RNA, 19 nt, Artificial Sequence
  Description of Artificial Sequence: Synthetic oligonucleotide
cggcauggaugauguaucu

SEQ ID NO: 2750330 - RNA, 19 nt, Artificial Sequence
  Description of Artificial Sequence: Synthetic oligonucleotide
  modified_base (1)..(1): a, c, u, g, unknown or other
ngauccucaguucgauaug

SEQ ID NO: 2750331 - RNA, 19 nt, Artificial Sequence
  Description of Artificial Sequence: Synthetic oligonucleotide
uaucuuaccauauaaaacc

SEQ ID NO: 2750332 - RNA, 19 nt, Artificial Sequence
  Description of Artificial Sequence: Synthetic oligonucleotide
auaauguuuuaccaaaacc

SEQ ID NO: 2750333 - RNA, 19 nt, Artificial Sequence
  Description of Artificial Sequence: Synthetic oligonucleotide
auuuuaaucaggcauaaag

SEQ ID NO: 2750334 - RNA, 19 nt, Artificial Sequence
  Description of Artificial Sequence: Synthetic oligonucleotide
gaggauacaauacagaaac

SEQ ID NO: 2750335 - RNA, 19 nt, Artificial Sequence
  Description of Artificial Sequence: Synthetic oligonucleotide
uaacaugggaagaugaggg

SEQ ID NO: 2750336 - RNA, 19 nt, Artificial Sequence
  Description of Artificial Sequence: Synthetic oligonucleotide
aaauccaccucuuuucaac

SEQ ID NO: 2750337 - RNA, 19 nt, Artificial Sequence
  Description of Artificial Sequence: Synthetic oligonucleotide
uuuuaaucaggcauaaaga

SEQ ID NO: 2750338 - RNA, 19 nt, Artificial Sequence
  Description of Artificial Sequence: Synthetic oligonucleotide
uauuugauaauguuuuacc

SEQ ID NO: 2750339 - RNA, 19 nt, Artificial Sequence
  Description of Artificial Sequence: Synthetic oligonucleotide
aaaccuuagguaucuuacc

SEQ ID NO: 2750340 - RNA, 19 nt, Artificial Sequence
  Description of Artificial Sequence: Synthetic oligonucleotide
aaaaccuuagguaucuuac

SEQ ID NO: 2750341 - RNA, 19 nt, Artificial Sequence
  Description of Artificial Sequence: Synthetic oligonucleotide
ucaugguucaccucaaggg

SEQ ID NO: 2750342 - RNA, 19 nt, Artificial Sequence
  Description of Artificial Sequence: Synthetic oligonucleotide
uaaucaggcauaaagauuu

SEQ ID NO: 2750343 - RNA, 19 nt, Artificial Sequence
  Description of Artificial Sequence: Synthetic oligonucleotide
uaggugguggguaugaagg

SEQ ID NO: 2750344 - RNA, 19 nt, Artificial Sequence
  Description of Artificial Sequence: Synthetic oligonucleotide
uuuaccaaaaccuuaggua

SEQ ID NO: 2750345 - RNA, 19 nt, Artificial Sequence
  Description of Artificial Sequence: Synthetic oligonucleotide
uuuaaucaggcauaaagau

SEQ ID NO: 2750346 - RNA, 19 nt, Artificial Sequence
  Description of Artificial Sequence: Synthetic oligonucleotide
uucagcaccauaaaggaaa

SEQ ID NO: 2750347 - RNA, 19 nt, Artificial Sequence
  Description of Artificial Sequence: Synthetic oligonucleotide
uuuuaccaaaaccuuaggu

SEQ ID NO: 2750348 - RNA, 19 nt, Artificial Sequence
  Description of Artificial Sequence: Synthetic oligonucleotide
acagaaacagaacagucug

SEQ ID NO: 2750349 - RNA, 19 nt, Artificial Sequence
  Description of Artificial Sequence: Synthetic oligonucleotide
uuugauaauguuuuaccaa

SEQ ID NO: 2750350 - RNA, 19 nt, Artificial Sequence
  Description of Artificial Sequence: Synthetic oligonucleotide
auuugauaauguuuuacca

SEQ ID NO: 2750351 - RNA, 19 nt, Artificial Sequence
  Description of Artificial Sequence: Synthetic oligonucleotide
auauuugauaauguuuuac

SEQ ID NO: 2750352 - RNA, 19 nt, Artificial Sequence
  Description of Artificial Sequence: Synthetic oligonucleotide
acauuuucauuuuaaucag

SEQ ID NO: 2750353 - RNA, 19 nt, Artificial Sequence
  Description of Artificial Sequence: Synthetic oligonucleotide
uuaccaaaaccuuagguau

SEQ ID NO: 2750354 - RNA, 19 nt, Artificial Sequence
  Description of Artificial Sequence: Synthetic oligonucleotide
aaccauugcagcucacugg

SEQ ID NO: 2750355 - RNA, 19 nt, Artificial Sequence
  Description of Artificial Sequence: Synthetic oligonucleotide
agcaccauaaaggaaaauc

SEQ ID NO: 2750356 - RNA, 19 nt, Artificial Sequence
  Description of Artificial Sequence: Synthetic oligonucleotide
gauaauguuuuaccaaaac

SEQ ID NO: 2750357 - RNA, 19 nt, Artificial Sequence
  Description of Artificial Sequence: Synthetic oligonucleotide
aaaccauugcagcucacug

SEQ ID NO: 2750358 - RNA, 19 nt, Artificial Sequence
  Description of Artificial Sequence: Synthetic oligonucleotide
cuggauauauauuugauaa

SEQ ID NO: 2750359 - RNA, 19 nt, Artificial Sequence
  Description of Artificial Sequence: Synthetic oligonucleotide
uuaguaguaaguguccugc

SEQ ID NO: 2750360 - RNA, 19 nt, Artificial Sequence
  Description of Artificial Sequence: Synthetic oligonucleotide
uacagaaacagaacagucu

SEQ ID NO: 2750361 - RNA, 19 nt, Artificial Sequence
  Description of Artificial Sequence: Synthetic oligonucleotide
aagauuuguuuucuucuug

SEQ ID NO: 2750362 - RNA, 19 nt, Artificial Sequence
  Description of Artificial Sequence: Synthetic oligonucleotide
uggaggacaggucaccugg

SEQ ID NO: 2750363 - RNA, 19 nt, Artificial Sequence
  Description of Artificial Sequence: Synthetic oligonucleotide
aacaugggaagaugagggg

SEQ ID NO: 2750364 - RNA, 19 nt, Artificial Sequence
  Description of Artificial Sequence: Synthetic oligonucleotide
ugugacucuggguaguuag

SEQ ID NO: 2750365 - RNA, 19 nt, Artificial Sequence
  Description of Artificial Sequence: Synthetic oligonucleotide
accauugcagcucacuggg

SEQ ID NO: 2750366 - RNA, 19 nt, Artificial Sequence
  Description of Artificial Sequence: Synthetic oligonucleotide
acaguuuuauuucucguca

SEQ ID NO: 2750367 - RNA, 19 nt, Artificial Sequence
  Description of Artificial Sequence: Synthetic oligonucleotide
uacuacaugguguccgugg

SEQ ID NO: 2750368 - RNA, 19 nt, Artificial Sequence
  Description of Artificial Sequence: Synthetic oligonucleotide
aagggagucguguacaaaa

SEQ ID NO: 2750369 - RNA, 19 nt, Artificial Sequence
  Description of Artificial Sequence: Synthetic oligonucleotide
ucuuaccauauaaaacccc

SEQ ID NO: 2750370 - RNA, 19 nt, Artificial Sequence
  Description of Artificial Sequence: Synthetic oligonucleotide
acuacaugguguccguggc

SEQ ID NO: 2750371 - RNA, 19 nt, Artificial Sequence
  Description of Artificial Sequence: Synthetic oligonucleotide
caugguucaccucaagggg

SEQ ID NO: 2750372 - RNA, 19 nt, Artificial Sequence
  Description of Artificial Sequence: Synthetic oligonucleotide
auauauuugauaauguuuu

SEQ ID NO: 2750373 - RNA, 19 nt, Artificial Sequence
  Description of Artificial Sequence: Synthetic oligonucleotide
uggcgcuucucauaggugg

SEQ ID NO: 2750374 - RNA, 19 nt, Artificial Sequence
  Description of Artificial Sequence: Synthetic oligonucleotide
ggauauauauuugauaaug

SEQ ID NO: 2750375 - RNA, 19 nt, Artificial Sequence
  Description of Artificial Sequence: Synthetic oligonucleotide
uuauuucucgucauucuuc

SEQ ID NO: 2750376 - RNA, 19 nt, Artificial Sequence
  Description of Artificial Sequence: Synthetic oligonucleotide
uagguaucuuaccauauaa

SEQ ID NO: 2750377 - RNA, 19 nt, Artificial Sequence
  Description of Artificial Sequence: Synthetic oligonucleotide
cagacagcuauuaggaaag

SEQ ID NO: 2750378 - RNA, 19 nt, Artificial Sequence
  Description of Artificial Sequence: Synthetic oligonucleotide
ucguguacaaaaccauugc

SEQ ID NO: 2750379 - RNA, 19 nt, Artificial Sequence
  Description of Artificial Sequence: Synthetic oligonucleotide
aaagauuuguuuucuucuu

SEQ ID NO: 2750380 - RNA, 19 nt, Artificial Sequence
  Description of Artificial Sequence: Synthetic oligonucleotide
uuaaucaggcauaaagauu

SEQ ID NO: 2750381 - RNA, 19 nt, Artificial Sequence
  Description of Artificial Sequence: Synthetic oligonucleotide
gaaggaggcuaccagccgg

SEQ ID NO: 2750382 - RNA, 19 nt, Artificial Sequence
  Description of Artificial Sequence: Synthetic oligonucleotide
aucuuaccauauaaaaccc

SEQ ID NO: 2750383 - RNA, 19 nt, Artificial Sequence
  Description of Artificial Sequence: Synthetic oligonucleotide
cagcuauuaggaaagggag

SEQ ID NO: 2750384 - RNA, 19 nt, Artificial Sequence
  Description of Artificial Sequence: Synthetic oligonucleotide
guaacaugggaagaugagg

SEQ ID NO: 2750385 - RNA, 19 nt, Artificial Sequence
  Description of Artificial Sequence: Synthetic oligonucleotide
uaaugucccaugaggauac

SEQ ID NO: 2750386 - RNA, 19 nt, Artificial Sequence
  Description of Artificial Sequence: Synthetic oligonucleotide
uaccauauaaaaccccuaa

SEQ ID NO: 2750387 - RNA, 19 nt, Artificial Sequence
  Description of Artificial Sequence: Synthetic oligonucleotide
ggauacaauacagaaacag

SEQ ID NO: 2750388 - RNA, 19 nt, Artificial Sequence
  Description of Artificial Sequence: Synthetic oligonucleotide
auugcagcucacugggcgc

SEQ ID NO: 2750389 - RNA, 19 nt, Artificial Sequence
  Description of Artificial Sequence: Synthetic oligonucleotide
cuugggaagaaucgucugg

SEQ ID NO: 2750390 - RNA, 19 nt, Artificial Sequence
  Description of Artificial Sequence: Synthetic oligonucleotide
ucuggauauauauuugaua

SEQ ID NO: 2750391 - RNA, 19 nt, Artificial Sequence
  Description of Artificial Sequence: Synthetic oligonucleotide
gauacaauacagaaacaga

SEQ ID NO: 2750392 - RNA, 19 nt, Artificial Sequence
  Description of Artificial Sequence: Synthetic oligonucleotide
uuuauuucucgucauucuu

SEQ ID NO: 2750393 - RNA, 19 nt, Artificial Sequence
  Description of Artificial Sequence: Synthetic oligonucleotide
aucgucuggauauauauuu

SEQ ID NO: 2750394 - RNA, 19 nt, Artificial Sequence
  Description of Artificial Sequence: Synthetic oligonucleotide
cauugcagcucacugggcg

SEQ ID NO: 2750395 - RNA, 19 nt, Artificial Sequence
  Description of Artificial Sequence: Synthetic oligonucleotide
auacaauacagaaacagaa

SEQ ID NO: 2750396 - RNA, 19 nt, Artificial Sequence
  Description of Artificial Sequence: Synthetic oligonucleotide
aauccaccucuuuucaaca

SEQ ID NO: 2750397 - RNA, 19 nt, Artificial Sequence
  Description of Artificial Sequence: Synthetic oligonucleotide
aggaaagggagucguguac

SEQ ID NO: 2750398 - RNA, 19 nt, Artificial Sequence
  Description of Artificial Sequence: Synthetic oligonucleotide
guaucuuaccauauaaaac

SEQ ID NO: 2750399 - RNA, 19 nt, Artificial Sequence
  Description of Artificial Sequence: Synthetic oligonucleotide
aagaugaggggccccagga

SEQ ID NO: 2750400 - RNA, 19 nt, Artificial Sequence
  Description of Artificial Sequence: Synthetic oligonucleotide
uguccugcagacauucaug

SEQ ID NO: 2750401 - RNA, 19 nt, Artificial Sequence
  Description of Artificial Sequence: Synthetic oligonucleotide
uggguaguuaguaguaagu

SEQ ID NO: 2750402 - RNA, 19 nt, Artificial Sequence
  Description of Artificial Sequence: Synthetic oligonucleotide
guccugcagacauucaugg

SEQ ID NO: 2750403 - RNA, 19 nt, Artificial Sequence
  Description of Artificial Sequence: Synthetic oligonucleotide
ugaaggaggcuaccagccg

SEQ ID NO: 2750404 - RNA, 19 nt, Artificial Sequence
  Description of Artificial Sequence: Synthetic oligonucleotide
ugauaauguuuuaccaaaa

SEQ ID NO: 2750405 - RNA, 19 nt, Artificial Sequence
  Description of Artificial Sequence: Synthetic oligonucleotide
ucaggcauaaagauuuguu

SEQ ID NO: 2750406 - RNA, 19 nt, Artificial Sequence
  Description of Artificial Sequence: Synthetic oligonucleotide
gaaaauccaccucuuuuca

SEQ ID NO: 2750407 - RNA, 19 nt, Artificial Sequence
  Description of Artificial Sequence: Synthetic oligonucleotide
ucccaugaggauacaauac

SEQ ID NO: 2750408 - RNA, 19 nt, Artificial Sequence
  Description of Artificial Sequence: Synthetic oligonucleotide
auaggugguggguaugaag

SEQ ID NO: 2750409 - RNA, 19 nt, Artificial Sequence
  Description of Artificial Sequence: Synthetic oligonucleotide
aaaaccauugcagcucacu

SEQ ID NO: 2750410 - RNA, 19 nt, Artificial Sequence
  Description of Artificial Sequence: Synthetic oligonucleotide
uauuaggaaagggagucgu

SEQ ID NO: 2750411 - RNA, 19 nt, Artificial Sequence
  Description of Artificial Sequence: Synthetic oligonucleotide
guaugaaggaggcuaccag

SEQ ID NO: 2750412 - RNA, 19 nt, Artificial Sequence
  Description of Artificial Sequence: Synthetic oligonucleotide
acagcuauuaggaaaggga

SEQ ID NO: 2750413 - RNA, 19 nt, Artificial Sequence
  Description of Artificial Sequence: Synthetic oligonucleotide
uuaggaaagggagucgugu

SEQ ID NO: 2750414 - RNA, 19 nt, Artificial Sequence
  Description of Artificial Sequence: Synthetic oligonucleotide
caagaugugacucugggua

SEQ ID NO: 2750415 - RNA, 19 nt, Artificial Sequence
  Description of Artificial Sequence: Synthetic oligonucleotide
gacagcuauuaggaaaggg

SEQ ID NO: 2750416 - RNA, 19 nt, Artificial Sequence
  Description of Artificial Sequence: Synthetic oligonucleotide
uaguaaguguccugcagac

SEQ ID NO: 2750417 - RNA, 19 nt, Artificial Sequence
  Description of Artificial Sequence: Synthetic oligonucleotide
gguaucuuaccauauaaaa

SEQ ID NO: 2750418 - RNA, 19 nt, Artificial Sequence
  Description of Artificial Sequence: Synthetic oligonucleotide
ccauauaaaaccccuaaug

SEQ ID NO: 2750419 - RNA, 19 nt, Artificial Sequence
  Description of Artificial Sequence: Synthetic oligonucleotide
cuuccuuucagcaccauaa

SEQ ID NO: 2750420 - RNA, 19 nt, Artificial Sequence
  Description of Artificial Sequence: Synthetic oligonucleotide
ucgucuggauauauauuug

SEQ ID NO: 2750421 - RNA, 19 nt, Artificial Sequence
  Description of Artificial Sequence: Synthetic oligonucleotide
agaacagucugcaggcagc

SEQ ID NO: 2750422 - RNA, 19 nt, Artificial Sequence
  Description of Artificial Sequence: Synthetic oligonucleotide
cacaguuuuauuucucguc

SEQ ID NO: 2750423 - RNA, 19 nt, Artificial Sequence
  Description of Artificial Sequence: Synthetic oligonucleotide
ccauaaaggaaaauccacc

SEQ ID NO: 2750424 - RNA, 19 nt, Artificial Sequence
  Description of Artificial Sequence: Synthetic oligonucleotide
guuaguaguaaguguccug

SEQ ID NO: 2750425 - RNA, 19 nt, Artificial Sequence
  Description of Artificial Sequence: Synthetic oligonucleotide
uacaaaaccauugcagcuc

SEQ ID NO: 2750426 - RNA, 19 nt, Artificial Sequence
  Description of Artificial Sequence: Synthetic oligonucleotide
uacaugguguccguggcag

SEQ ID NO: 2750427 - RNA, 19 nt, Artificial Sequence
  Description of Artificial Sequence: Synthetic oligonucleotide
aaaauccaccucuuuucaa

SEQ ID NO: 2750428 - RNA, 19 nt, Artificial Sequence
  Description of Artificial Sequence: Synthetic oligonucleotide
uuagguaucuuaccauaua

SEQ ID NO: 2750429 - RNA, 19 nt, Artificial Sequence
  Description of Artificial Sequence: Synthetic oligonucleotide
uauauuugauaauguuuua

SEQ ID NO: 2750430 - RNA, 19 nt, Artificial Sequence
  Description of Artificial Sequence: Synthetic oligonucleotide
augguucaccucaaggggc

SEQ ID NO: 2750431 - RNA, 19 nt, Artificial Sequence
  Description of Artificial Sequence: Synthetic oligonucleotide
guuuuauuucucgucauuc

SEQ ID NO: 2750432 - RNA, 19 nt, Artificial Sequence
  Description of Artificial Sequence: Synthetic oligonucleotide
ugucccaugaggauacaau

SEQ ID NO: 2750433 - RNA, 19 nt, Artificial Sequence
  Description of Artificial Sequence: Synthetic oligonucleotide
aggaaaauccaccucuuuu

SEQ ID NO: 2750434 - RNA, 19 nt, Artificial Sequence
  Description of Artificial Sequence: Synthetic oligonucleotide
ucgucauucuucauccuuc

SEQ ID NO: 2750435 - RNA, 19 nt, Artificial Sequence
  Description of Artificial Sequence: Synthetic oligonucleotide
acucuggguaguuaguagu

SEQ ID NO: 2750436 - RNA, 19 nt, Artificial Sequence
  Description of Artificial Sequence: Synthetic oligonucleotide
cuggguaguuaguaguaag

SEQ ID NO: 2750437 - RNA, 19 nt, Artificial Sequence
  Description of Artificial Sequence: Synthetic oligonucleotide
ggaaaauccaccucuuuuc

SEQ ID NO: 2750438 - RNA, 19 nt, Artificial Sequence
  Description of Artificial Sequence: Synthetic oligonucleotide
aguaacaugggaagaugag

SEQ ID NO: 2750439 - RNA, 19 nt, Artificial Sequence
  Description of Artificial Sequence: Synthetic oligonucleotide
ucuugggaagaaucgucug

SEQ ID NO: 2750440 - RNA, 19 nt, Artificial Sequence
  Description of Artificial Sequence: Synthetic oligonucleotide
ugguucaccucaaggggcc

SEQ ID NO: 2750441 - RNA, 19 nt, Artificial Sequence
  Description of Artificial Sequence: Synthetic oligonucleotide
gaaucgucuggauauauau

SEQ ID NO: 2750442 - RNA, 19 nt, Artificial Sequence
  Description of Artificial Sequence: Synthetic oligonucleotide
cagccaguaacaugggaag

SEQ ID NO: 2750443 - RNA, 19 nt, Artificial Sequence
  Description of Artificial Sequence: Synthetic oligonucleotide
uggauauauauuugauaau

SEQ ID NO: 2750444 - RNA, 19 nt, Artificial Sequence
  Description of Artificial Sequence: Synthetic oligonucleotide
aaccccuaaugucccauga

SEQ ID NO: 2750445 - RNA, 19 nt, Artificial Sequence
  Description of Artificial Sequence: Synthetic oligonucleotide
accucaaggggccaugcug

SEQ ID NO: 2750446 - RNA, 19 nt, Artificial Sequence
  Description of Artificial Sequence: Synthetic oligonucleotide
ucauccuuccuuucagcac

SEQ ID NO: 2750447 - RNA, 19 nt, Artificial Sequence
  Description of Artificial Sequence: Synthetic oligonucleotide
agaugaggggccccaggac

SEQ ID NO: 2750448 - RNA, 19 nt, Artificial Sequence
  Description of Artificial Sequence: Synthetic oligonucleotide
ucuucuugggaagaaucgu

SEQ ID NO: 2750449 - RNA, 19 nt, Artificial Sequence
  Description of Artificial Sequence: Synthetic oligonucleotide
cagucugcaggcagcaagg

SEQ ID NO: 2750450 - RNA, 19 nt, Artificial Sequence
  Description of Artificial Sequence: Synthetic oligonucleotide
gucguguacaaaaccauug

SEQ ID NO: 2750451 - RNA, 19 nt, Artificial Sequence
  Description of Artificial Sequence: Synthetic oligonucleotide
ucauuuuaaucaggcauaa

SEQ ID NO: 2750452 - RNA, 19 nt, Artificial Sequence
  Description of Artificial Sequence: Synthetic oligonucleotide
ugguggguaugaaggaggc

SEQ ID NO: 2750453 - RNA, 19 nt, Artificial Sequence
  Description of Artificial Sequence: Synthetic oligonucleotide
cuuaccauauaaaaccccu

SEQ ID NO: 2750454 - RNA, 19 nt, Artificial Sequence
  Description of Artificial Sequence: Synthetic oligonucleotide
ggcaagaugugacucuggg

SEQ ID NO: 2750455 - RNA, 19 nt, Artificial Sequence
  Description of Artificial Sequence: Synthetic oligonucleotide
aaaccccuaaugucccaug

SEQ ID NO: 2750456 - RNA, 19 nt, Artificial Sequence
  Description of Artificial Sequence: Synthetic oligonucleotide
gucaucugcccucuggcgc

SEQ ID NO: 2750457 - RNA, 19 nt, Artificial Sequence
  Description of Artificial Sequence: Synthetic oligonucleotide
uuucagcaccauaaaggaa

SEQ ID NO: 2750458 - RNA, 19 nt, Artificial Sequence
  Description of Artificial Sequence: Synthetic oligonucleotide
caugaggauacaauacaga

SEQ ID NO: 2750459 - RNA, 19 nt, Artificial Sequence
  Description of Artificial Sequence: Synthetic oligonucleotide
accauauaaaaccccuaau

SEQ ID NO: 2750460 - RNA, 19 nt, Artificial Sequence
  Description of Artificial Sequence: Synthetic oligonucleotide
uuaccauauaaaaccccua

SEQ ID NO: 2750461 - RNA, 19 nt, Artificial Sequence
  Description of Artificial Sequence: Synthetic oligonucleotide
cuauuaggaaagggagucg

SEQ ID NO: 2750462 - RNA, 19 nt, Artificial Sequence
  Description of Artificial Sequence: Synthetic oligonucleotide
ggcauaaagauuuguuuuc

SEQ ID NO: 2750463 - RNA, 19 nt, Artificial Sequence
  Description of Artificial Sequence: Synthetic oligonucleotide
aaggaaaauccaccucuuu

SEQ ID NO: 2750464 - RNA, 19 nt, Artificial Sequence
  Description of Artificial Sequence: Synthetic oligonucleotide
uggguaugaaggaggcuac

SEQ ID NO: 2750465 - RNA, 19 nt, Artificial Sequence
  Description of Artificial Sequence: Synthetic oligonucleotide
ucagcaccauaaaggaaaa

SEQ ID NO: 2750466 - RNA, 19 nt, Artificial Sequence
  Description of Artificial Sequence: Synthetic oligonucleotide
gugguggguaugaaggagg

SEQ ID NO: 2750467 - RNA, 19 nt, Artificial Sequence
  Description of Artificial Sequence: Synthetic oligonucleotide
agccggcccuacuacaugg

SEQ ID NO: 2750468 - RNA, 19 nt, Artificial Sequence
  Description of Artificial Sequence: Synthetic oligonucleotide
aguuaguaguaaguguccu

SEQ ID NO: 2750469 - RNA, 19 nt, Artificial Sequence
  Description of Artificial Sequence: Synthetic oligonucleotide
agggcggacagacagcuau

SEQ ID NO: 2750470 - RNA, 19 nt, Artificial Sequence
  Description of Artificial Sequence: Synthetic oligonucleotide
ggggugggcaagcugaggg

SEQ ID NO: 2750471 - RNA, 19 nt, Artificial Sequence
  Description of Artificial Sequence: Synthetic oligonucleotide
ggaagaaucgucuggauau

SEQ ID NO: 2750472 - RNA, 19 nt, Artificial Sequence
  Description of Artificial Sequence: Synthetic oligonucleotide
ucauaggugguggguauga

SEQ ID NO: 2750473 - RNA, 19 nt, Artificial Sequence
  Description of Artificial Sequence: Synthetic oligonucleotide
uaguaguaaguguccugca

SEQ ID NO: 2750474 - RNA, 19 nt, Artificial Sequence
  Description of Artificial Sequence: Synthetic oligonucleotide
gcuauuaggaaagggaguc

SEQ ID NO: 2750475 - RNA, 19 nt, Artificial Sequence
  Description of Artificial Sequence: Synthetic oligonucleotide
caguaacaugggaagauga

SEQ ID NO: 2750476 - RNA, 19 nt, Artificial Sequence
  Description of Artificial Sequence: Synthetic oligonucleotide
auucaugguucaccucaag

SEQ ID NO: 2750477 - RNA, 19 nt, Artificial Sequence
  Description of Artificial Sequence: Synthetic oligonucleotide
aaaaccccuaaugucccau

SEQ ID NO: 2750478 - RNA, 19 nt, Artificial Sequence
  Description of Artificial Sequence: Synthetic oligonucleotide
ggacaggucaccuggcaag

SEQ ID NO: 2750479 - RNA, 19 nt, Artificial Sequence
  Description of Artificial Sequence: Synthetic oligonucleotide
aagaaucgucuggauauau

SEQ ID NO: 2750480 - RNA, 19 nt, Artificial Sequence
  Description of Artificial Sequence: Synthetic oligonucleotide
ucucauaggugguggguau

SEQ ID NO: 2750481 - RNA, 19 nt, Artificial Sequence
  Description of Artificial Sequence: Synthetic oligonucleotide
ccaggacacagcauggagg

SEQ ID NO: 2750482 - RNA, 19 nt, Artificial Sequence
  Description of Artificial Sequence: Synthetic oligonucleotide
guacaaaaccauugcagcu

SEQ ID NO: 2750483 - RNA, 19 nt, Artificial Sequence
  Description of Artificial Sequence: Synthetic oligonucleotide
accccuaaugucccaugag

SEQ ID NO: 2750484 - RNA, 19 nt, Artificial Sequence
  Description of Artificial Sequence: Synthetic oligonucleotide
agggagucguguacaaaac

SEQ ID NO: 2750485 - RNA, 19 nt, Artificial Sequence
  Description of Artificial Sequence: Synthetic oligonucleotide
uaaaaccccuaauguccca

SEQ ID NO: 2750486 - RNA, 19 nt, Artificial Sequence
  Description of Artificial Sequence: Synthetic oligonucleotide
uaggaaagggagucgugua

SEQ ID NO: 2750487 - RNA, 19 nt, Artificial Sequence
  Description of Artificial Sequence: Synthetic oligonucleotide
uguccguggcagcugcagc

SEQ ID NO: 2750488 - RNA, 19 nt, Artificial Sequence
  Description of Artificial Sequence: Synthetic oligonucleotide
accuggcaagaugugacuc

SEQ ID NO: 2750489 - RNA, 19 nt, Artificial Sequence
  Description of Artificial Sequence: Synthetic oligonucleotide
aaucaggcauaaagauuug

SEQ ID NO: 2750490 - RNA, 19 nt, Artificial Sequence
  Description of Artificial Sequence: Synthetic oligonucleotide
gacacagcauggagggcgg

SEQ ID NO: 2750491 - RNA, 19 nt, Artificial Sequence
  Description of Artificial Sequence: Synthetic oligonucleotide
ccucaaggggccaugcugg

SEQ ID NO: 2750492 - RNA, 19 nt, Artificial Sequence
  Description of Artificial Sequence: Synthetic oligonucleotide
uccaccucuuuucaacauu

SEQ ID NO: 2750493 - RNA, 19 nt, Artificial Sequence
  Description of Artificial Sequence: Synthetic oligonucleotide
ggguaguuaguaguaagug

SEQ ID NO: 2750494 - RNA, 19 nt, Artificial Sequence
  Description of Artificial Sequence: Synthetic oligonucleotide
agcaagggucaucugcccu

SEQ ID NO: 2750495 - RNA, 19 nt, Artificial Sequence
  Description of Artificial Sequence: Synthetic oligonucleotide
agguggaggacaggucacc

SEQ ID NO: 2750496 - RNA, 19 nt, Artificial Sequence
  Description of Artificial Sequence: Synthetic oligonucleotide
aaucgucuggauauauauu

SEQ ID NO: 2750497 - RNA, 19 nt, Artificial Sequence
  Description of Artificial Sequence: Synthetic oligonucleotide
ucuggguaguuaguaguaa

SEQ ID NO: 2750498 - RNA, 19 nt, Artificial Sequence
  Description of Artificial Sequence: Synthetic oligonucleotide
uucucauagguggugggua

SEQ ID NO: 2750499 - RNA, 19 nt, Artificial Sequence
  Description of Artificial Sequence: Synthetic oligonucleotide
caaaaccuuagguaucuua

SEQ ID NO: 2750500 - RNA, 19 nt, Artificial Sequence
  Description of Artificial Sequence: Synthetic oligonucleotide
agcuauuaggaaagggagu

SEQ ID NO: 2750501 - RNA, 19 nt, Artificial Sequence
  Description of Artificial Sequence: Synthetic oligonucleotide
guggguaugaaggaggcua

SEQ ID NO: 2750502 - RNA, 19 nt, Artificial Sequence
  Description of Artificial Sequence: Synthetic oligonucleotide
gaaagggagucguguacaa

SEQ ID NO: 2750503 - RNA, 19 nt, Artificial Sequence
  Description of Artificial Sequence: Synthetic oligonucleotide
ccccuaaugucccaugagg

SEQ ID NO: 2750504 - RNA, 19 nt, Artificial Sequence
  Description of Artificial Sequence: Synthetic oligonucleotide
gggagucguguacaaaacc

SEQ ID NO: 2750505 - RNA, 19 nt, Artificial Sequence
  Description of Artificial Sequence: Synthetic oligonucleotide
gguaguuaguaguaagugu

SEQ ID NO: 2750506 - RNA, 19 nt, Artificial Sequence
  Description of Artificial Sequence: Synthetic oligonucleotide
cucacugggcgccgcagcc

SEQ ID NO: 2750507 - RNA, 19 nt, Artificial Sequence
  Description of Artificial Sequence: Synthetic oligonucleotide
ggagucguguacaaaacca

SEQ ID NO: 2750508 - RNA, 19 nt, Artificial Sequence
  Description of Artificial Sequence: Synthetic oligonucleotide
gucccaugaggauacaaua

SEQ ID NO: 2750509 - RNA, 19 nt, Artificial Sequence
  Description of Artificial Sequence: Synthetic oligonucleotide
auuaggaaagggagucgug

SEQ ID NO: 2750510 - RNA, 19 nt, Artificial Sequence
  Description of Artificial Sequence: Synthetic oligonucleotide
gacauucaugguucaccuc

SEQ ID NO: 2750511 - RNA, 19 nt, Artificial Sequence
  Description of Artificial Sequence: Synthetic oligonucleotide
cucaaggggccaugcuggg

SEQ ID NO: 2750512 - RNA, 19 nt, Artificial Sequence
  Description of Artificial Sequence: Synthetic oligonucleotide
gcagcacuuucccaggcag

SEQ ID NO: 2750513 - RNA, 19 nt, Artificial Sequence
  Description of Artificial Sequence: Synthetic oligonucleotide
caggucaccuggcaagaug

SEQ ID NO: 2750514 - RNA, 19 nt, Artificial Sequence
  Description of Artificial Sequence: Synthetic oligonucleotide
cuaaugucccaugaggaua

SEQ ID NO: 2750515 - RNA, 19 nt, Artificial Sequence
  Description of Artificial Sequence: Synthetic oligonucleotide
uggagggcggacagacagc

SEQ ID NO: 2750516 - RNA, 19 nt, Artificial Sequence
  Description of Artificial Sequence: Synthetic oligonucleotide
aaagggagucguguacaaa

SEQ ID NO: 2750517 - RNA, 19 nt, Artificial Sequence
  Description of Artificial Sequence: Synthetic oligonucleotide
aggacaggucaccuggcaa

SEQ ID NO: 2750518 - RNA, 19 nt, Artificial Sequence
  Description of Artificial Sequence: Synthetic oligonucleotide
agacagcuauuaggaaagg

SEQ ID NO: 2750519 - RNA, 19 nt, Artificial Sequence
  Description of Artificial Sequence: Synthetic oligonucleotide
agguaucuuaccauauaaa

SEQ ID NO: 2750520 - RNA, 19 nt, Artificial Sequence
  Description of Artificial Sequence: Synthetic oligonucleotide
uccugcagacauucauggu

SEQ ID NO: 2750521 - RNA, 19 nt, Artificial Sequence
  Description of Artificial Sequence: Synthetic oligonucleotide
cuggcaagaugugacucug

SEQ ID NO: 2750522 - RNA, 19 nt, Artificial Sequence
  Description of Artificial Sequence: Synthetic oligonucleotide
agucugcaggcagcaaggg

SEQ ID NO: 2750523 - RNA, 19 nt, Artificial Sequence
  Description of Artificial Sequence: Synthetic oligonucleotide
cagccgguccaccagccag

SEQ ID NO: 2750524 - RNA, 19 nt, Artificial Sequence
  Description of Artificial Sequence: Synthetic oligonucleotide
gcuucucauaggugguggg

SEQ ID NO: 2750525 - RNA, 19 nt, Artificial Sequence
  Description of Artificial Sequence: Synthetic oligonucleotide
gaggacaggucaccuggca

SEQ ID NO: 2750526 - RNA, 19 nt, Artificial Sequence
  Description of Artificial Sequence: Synthetic oligonucleotide
cuaccagccgguccaccag

SEQ ID NO: 2750527 - RNA, 19 nt, Artificial Sequence
  Description of Artificial Sequence: Synthetic oligonucleotide
ugagggcagguggaggaca

SEQ ID NO: 2750528 - RNA, 19 nt, Artificial Sequence
  Description of Artificial Sequence: Synthetic oligonucleotide
gcagcaagggucaucugcc

SEQ ID NO: 2750529 - RNA, 19 nt, Artificial Sequence
  Description of Artificial Sequence: Synthetic oligonucleotide
uucaccucaaggggccaug

SEQ ID NO: 2750530 - RNA, 19 nt, Artificial Sequence
  Description of Artificial Sequence: Synthetic oligonucleotide
agaugugacucuggguagu

SEQ ID NO: 2750531 - RNA, 19 nt, Artificial Sequence
  Description of Artificial Sequence: Synthetic oligonucleotide
ugggaagaaucgucuggau

SEQ ID NO: 2750532 - RNA, 19 nt, Artificial Sequence
  Description of Artificial Sequence: Synthetic oligonucleotide
cagcaagggucaucugccc

SEQ ID NO: 2750533 - RNA, 19 nt, Artificial Sequence
  Description of Artificial Sequence: Synthetic oligonucleotide
aaggaggcuaccagccggu

SEQ ID NO: 2750534 - RNA, 19 nt, Artificial Sequence
  Description of Artificial Sequence: Synthetic oligonucleotide
guggaggacaggucaccug

SEQ ID NO: 2750535 - RNA, 19 nt, Artificial Sequence
  Description of Artificial Sequence: Synthetic oligonucleotide
gaacagucugcaggcagca

SEQ ID NO: 2750536 - RNA, 19 nt, Artificial Sequence
  Description of Artificial Sequence: Synthetic oligonucleotide
cagcauggagggcggacag

SEQ ID NO: 2750537 - RNA, 19 nt, Artificial Sequence
  Description of Artificial Sequence: Synthetic oligonucleotide
auccaccucuuuucaacau

SEQ ID NO: 2750538 - RNA, 19 nt, Artificial Sequence
  Description of Artificial Sequence: Synthetic oligonucleotide
ucacugggcgccgcagccg

SEQ ID NO: 2750539 - RNA, 19 nt, Artificial Sequence
  Description of Artificial Sequence: Synthetic oligonucleotide
ucaccucaaggggccaugc

SEQ ID NO: 2750540 - RNA, 19 nt, Artificial Sequence
  Description of Artificial Sequence: Synthetic oligonucleotide
aggacacagcauggagggc

SEQ ID NO: 2750541 - RNA, 19 nt, Artificial Sequence
  Description of Artificial Sequence: Synthetic oligonucleotide
cuuagguaucuuaccauau

SEQ ID NO: 2750542 - RNA, 19 nt, Artificial Sequence
  Description of Artificial Sequence: Synthetic oligonucleotide
gggucaucugcccucuggc

SEQ ID NO: 2750543 - RNA, 19 nt, Artificial Sequence
  Description of Artificial Sequence: Synthetic oligonucleotide
guccguggcagcugcagca

SEQ ID NO: 2750544 - RNA, 19 nt, Artificial Sequence
  Description of Artificial Sequence: Synthetic oligonucleotide
cacugggcgccgcagccgg

SEQ ID NO: 2750545 - RNA, 19 nt, Artificial Sequence
  Description of Artificial Sequence: Synthetic oligonucleotide
aggggccaugcugggauac

SEQ ID NO: 2750546 - RNA, 19 nt, Artificial Sequence
  Description of Artificial Sequence: Synthetic oligonucleotide
caggcauaaagauuuguuu

SEQ ID NO: 2750547 - RNA, 19 nt, Artificial Sequence
  Description of Artificial Sequence: Synthetic oligonucleotide
gguaugaaggaggcuacca

SEQ ID NO: 2750548 - RNA, 19 nt, Artificial Sequence
  Description of Artificial Sequence: Synthetic oligonucleotide
aggauacaauacagaaaca

SEQ ID NO: 2750549 - RNA, 19 nt, Artificial Sequence
  Description of Artificial Sequence: Synthetic oligonucleotide
cuggcgcuucucauaggug

SEQ ID NO: 2750550 - RNA, 19 nt, Artificial Sequence
  Description of Artificial Sequence: Synthetic oligonucleotide
cccuacuacaugguguccg

SEQ ID NO: 2750551 - RNA, 19 nt, Artificial Sequence
  Description of Artificial Sequence: Synthetic oligonucleotide
agucguguacaaaaccauu

SEQ ID NO: 2750552 - RNA, 19 nt, Artificial Sequence
  Description of Artificial Sequence: Synthetic oligonucleotide
ggcccuacuacaugguguc

SEQ ID NO: 2750553 - RNA, 19 nt, Artificial Sequence
  Description of Artificial Sequence: Synthetic oligonucleotide
caaaaccauugcagcucac

SEQ ID NO: 2750554 - RNA, 19 nt, Artificial Sequence
  Description of Artificial Sequence: Synthetic oligonucleotide
ccucuggcgcuucucauag

SEQ ID NO: 2750555 - RNA, 19 nt, Artificial Sequence
  Description of Artificial Sequence: Synthetic oligonucleotide
cucuggguaguuaguagua

SEQ ID NO: 2750556 - RNA, 19 nt, Artificial Sequence
  Description of Artificial Sequence: Synthetic oligonucleotide
ggaaagggagucguguaca

SEQ ID NO: 2750557 - RNA, 19 nt, Artificial Sequence
  Description of Artificial Sequence: Synthetic oligonucleotide
agccaguaacaugggaaga

SEQ ID NO: 2750558 - RNA, 19 nt, Artificial Sequence
  Description of Artificial Sequence: Synthetic oligonucleotide
caccagccaguaacauggg

SEQ ID NO: 2750559 - RNA, 19 nt, Artificial Sequence
  Description of Artificial Sequence: Synthetic oligonucleotide
ccagccaguaacaugggaa

SEQ ID NO: 2750560 - RNA, 19 nt, Artificial Sequence
  Description of Artificial Sequence: Synthetic oligonucleotide
agaaucgucuggauauaua

SEQ ID NO: 2750561 - RNA, 19 nt, Artificial Sequence
  Description of Artificial Sequence: Synthetic oligonucleotide
cccuaaugucccaugagga

SEQ ID NO: 2750562 - RNA, 19 nt, Artificial Sequence
  Description of Artificial Sequence: Synthetic oligonucleotide
cauucaugguucaccucaa

SEQ ID NO: 2750563 - RNA, 19 nt, Artificial Sequence
  Description of Artificial Sequence: Synthetic oligonucleotide
gggaagaaucgucuggaua

SEQ ID NO: 2750564 - RNA, 19 nt, Artificial Sequence
  Description of Artificial Sequence: Synthetic oligonucleotide
aaugucccaugaggauaca

SEQ ID NO: 2750565 - RNA, 19 nt, Artificial Sequence
  Description of Artificial Sequence: Synthetic oligonucleotide
gaagaaucgucuggauaua

SEQ ID NO: 2750566 - RNA, 19 nt, Artificial Sequence
  Description of Artificial Sequence: Synthetic oligonucleotide
guguccguggcagcugcag

SEQ ID NO: 2750567 - RNA, 19 nt, Artificial Sequence
  Description of Artificial Sequence: Synthetic oligonucleotide
cuacuacaugguguccgug

SEQ ID NO: 2750568 - RNA, 19 nt, Artificial Sequence
  Description of Artificial Sequence: Synthetic oligonucleotide
cuacaugguguccguggca

SEQ ID NO: 2750569 - RNA, 19 nt, Artificial Sequence
  Description of Artificial Sequence: Synthetic oligonucleotide
gcggacagacagcuauuag

SEQ ID NO: 2750570 - RNA, 19 nt, Artificial Sequence
  Description of Artificial Sequence: Synthetic oligonucleotide
cucuggcgcuucucauagg

SEQ ID NO: 2750571 - RNA, 19 nt, Artificial Sequence
  Description of Artificial Sequence: Synthetic oligonucleotide
gagucguguacaaaaccau

SEQ ID NO: 2750572 - RNA, 19 nt, Artificial Sequence
  Description of Artificial Sequence: Synthetic oligonucleotide
cgucauucuucauccuucc

SEQ ID NO: 2750573 - RNA, 19 nt, Artificial Sequence
  Description of Artificial Sequence: Synthetic oligonucleotide
ccaguaacaugggaagaug

SEQ ID NO: 2750574 - RNA, 19 nt, Artificial Sequence
  Description of Artificial Sequence: Synthetic oligonucleotide
cacuuucccaggcaggggu

SEQ ID NO: 2750575 - RNA, 19 nt, Artificial Sequence
  Description of Artificial Sequence: Synthetic oligonucleotide
aaggggccaugcugggaua

SEQ ID NO: 2750576 - RNA, 19 nt, Artificial Sequence
  Description of Artificial Sequence: Synthetic oligonucleotide
gugggcaagcugagggcag

SEQ ID NO: 2750577 - RNA, 19 nt, Artificial Sequence
  Description of Artificial Sequence: Synthetic oligonucleotide
gcuaccagccgguccacca

SEQ ID NO: 2750578 - RNA, 19 nt, Artificial Sequence
  Description of Artificial Sequence: Synthetic oligonucleotide
ccuuagguaucuuaccaua

SEQ ID NO: 2750579 - RNA, 19 nt, Artificial Sequence
  Description of Artificial Sequence: Synthetic oligonucleotide
ccucacaguuuuauuucuc

SEQ ID NO: 2750580 - RNA, 19 nt, Artificial Sequence
  Description of Artificial Sequence: Synthetic oligonucleotide
gucuggauauauauuugau

SEQ ID NO: 2750581 - RNA, 19 nt, Artificial Sequence
  Description of Artificial Sequence: Synthetic oligonucleotide
uucccaggcaggggugggc

SEQ ID NO: 2750582 - RNA, 19 nt, Artificial Sequence
  Description of Artificial Sequence: Synthetic oligonucleotide
ggugggcaagcugagggca

SEQ ID NO: 2750583 - RNA, 19 nt, Artificial Sequence
  Description of Artificial Sequence: Synthetic oligonucleotide
cgucuggauauauauuuga

SEQ ID NO: 2750584 - RNA, 19 nt, Artificial Sequence
  Description of Artificial Sequence: Synthetic oligonucleotide
gcauaaagauuuguuuucu

SEQ ID NO: 2750585 - RNA, 19 nt, Artificial Sequence
  Description of Artificial Sequence: Synthetic oligonucleotide
aggaggcuaccagccgguc

SEQ ID NO: 2750586 - RNA, 19 nt, Artificial Sequence
  Description of Artificial Sequence: Synthetic oligonucleotide
cugagggcagguggaggac

SEQ ID NO: 2750587 - RNA, 19 nt, Artificial Sequence
  Description of Artificial Sequence: Synthetic oligonucleotide
cagccggcccuacuacaug

SEQ ID NO: 2750588 - RNA, 19 nt, Artificial Sequence
  Description of Artificial Sequence: Synthetic oligonucleotide
aguguccugcagacauuca

SEQ ID NO: 2750589 - RNA, 19 nt, Artificial Sequence
  Description of Artificial Sequence: Synthetic oligonucleotide
cucgucauucuucauccuu

SEQ ID NO: 2750590 - RNA, 19 nt, Artificial Sequence
  Description of Artificial Sequence: Synthetic oligonucleotide
gucugcaggcagcaagggu

SEQ ID NO: 2750591 - RNA, 19 nt, Artificial Sequence
  Description of Artificial Sequence: Synthetic oligonucleotide
ugggcgccgcagccggccc

SEQ ID NO: 2750592 - RNA, 19 nt, Artificial Sequence
  Description of Artificial Sequence: Synthetic oligonucleotide
gcaagaugugacucugggu

SEQ ID NO: 2750593 - RNA, 19 nt, Artificial Sequence
  Description of Artificial Sequence: Synthetic oligonucleotide
cuucucauagguggugggu

SEQ ID NO: 2750594 - RNA, 19 nt, Artificial Sequence
  Description of Artificial Sequence: Synthetic oligonucleotide
gcucacugggcgccgcagc

SEQ ID NO: 2750595 - RNA, 19 nt, Artificial Sequence
  Description of Artificial Sequence: Synthetic oligonucleotide
aggcuaccagccgguccac

SEQ ID NO: 2750596 - RNA, 19 nt, Artificial Sequence
  Description of Artificial Sequence: Synthetic oligonucleotide
ggaggacaggucaccuggc

SEQ ID NO: 2750597 - RNA, 19 nt, Artificial Sequence
  Description of Artificial Sequence: Synthetic oligonucleotide
cgcuucucauagguggugg

SEQ ID NO: 2750598 - RNA, 19 nt, Artificial Sequence
  Description of Artificial Sequence: Synthetic oligonucleotide
augugacucuggguaguua

SEQ ID NO: 2750599 - RNA, 19 nt, Artificial Sequence
  Description of Artificial Sequence: Synthetic oligonucleotide
gguccaccagccaguaaca

SEQ ID NO: 2750600 - RNA, 19 nt, Artificial Sequence
  Description of Artificial Sequence: Synthetic oligonucleotide
agccgguccaccagccagu

SEQ ID NO: 2750601 - RNA, 19 nt, Artificial Sequence
  Description of Artificial Sequence: Synthetic oligonucleotide
cauaggugguggguaugaa

SEQ ID NO: 2750602 - RNA, 19 nt, Artificial Sequence
  Description of Artificial Sequence: Synthetic oligonucleotide
gaugugacucuggguaguu

SEQ ID NO: 2750603 - RNA, 19 nt, Artificial Sequence
  Description of Artificial Sequence: Synthetic oligonucleotide
acugggcgccgcagccggc

SEQ ID NO: 2750604 - RNA, 19 nt, Artificial Sequence
  Description of Artificial Sequence: Synthetic oligonucleotide
ggucaccuggcaagaugug

SEQ ID NO: 2750605 - RNA, 19 nt, Artificial Sequence
  Description of Artificial Sequence: Synthetic oligonucleotide
caccuggcaagaugugacu

SEQ ID NO: 2750606 - RNA, 19 nt, Artificial Sequence
  Description of Artificial Sequence: Synthetic oligonucleotide
ccuaaugucccaugaggau

SEQ ID NO: 2750607 - RNA, 19 nt, Artificial Sequence
  Description of Artificial Sequence: Synthetic oligonucleotide
ggagggcggacagacagcu

SEQ ID NO: 2750608 - RNA, 19 nt, Artificial Sequence
  Description of Artificial Sequence: Synthetic oligonucleotide
gccaguaacaugggaagau

SEQ ID NO: 2750609 - RNA, 19 nt, Artificial Sequence
  Description of Artificial Sequence: Synthetic oligonucleotide
ccggcccuacuacauggug

SEQ ID NO: 2750610 - RNA, 19 nt, Artificial Sequence
  Description of Artificial Sequence: Synthetic oligonucleotide
ccuggcaagaugugacucu

SEQ ID NO: 2750611 - RNA, 19 nt, Artificial Sequence
  Description of Artificial Sequence: Synthetic oligonucleotide
gcgcuucucauagguggug

SEQ ID NO: 2750612 - RNA, 19 nt, Artificial Sequence
  Description of Artificial Sequence: Synthetic oligonucleotide
ggcggacagacagcuauua

SEQ ID NO: 2750613 - RNA, 19 nt, Artificial Sequence
  Description of Artificial Sequence: Synthetic oligonucleotide
ggggccaugcugggauacc

SEQ ID NO: 2750614 - RNA, 19 nt, Artificial Sequence
  Description of Artificial Sequence: Synthetic oligonucleotide
caagggucaucugcccucu

SEQ ID NO: 2750615 - RNA, 19 nt, Artificial Sequence
  Description of Artificial Sequence: Synthetic oligonucleotide
gguggaggacaggucaccu

SEQ ID NO: 2750616 - RNA, 19 nt, Artificial Sequence
  Description of Artificial Sequence: Synthetic oligonucleotide
ccaccucuuuucaacauuu

SEQ ID NO: 2750617 - RNA, 19 nt, Artificial Sequence
  Description of Artificial Sequence: Synthetic oligonucleotide
gccgcagccggcccuacua

SEQ ID NO: 2750618 - RNA, 19 nt, Artificial Sequence
  Description of Artificial Sequence: Synthetic oligonucleotide
gggcagguggaggacaggu

SEQ ID NO: 2750619 - RNA, 19 nt, Artificial Sequence
  Description of Artificial Sequence: Synthetic oligonucleotide
caccucuuuucaacauuuu

SEQ ID NO: 2750620 - RNA, 19 nt, Artificial Sequence
  Description of Artificial Sequence: Synthetic oligonucleotide
gcccuacuacauggugucc

SEQ ID NO: 2750621 - RNA, 19 nt, Artificial Sequence
  Description of Artificial Sequence: Synthetic oligonucleotide
cugcccucuggcgcuucuc

SEQ ID NO: 2750622 - RNA, 19 nt, Artificial Sequence
  Description of Artificial Sequence: Synthetic oligonucleotide
gguucaccucaaggggcca

SEQ ID NO: 2750623 - RNA, 19 nt, Artificial Sequence
  Description of Artificial Sequence: Synthetic oligonucleotide
cagcucacugggcgccgca

SEQ ID NO: 2750624 - RNA, 19 nt, Artificial Sequence
  Description of Artificial Sequence: Synthetic oligonucleotide
guucaccucaaggggccau

SEQ ID NO: 2750625 - RNA, 19 nt, Artificial Sequence
  Description of Artificial Sequence: Synthetic oligonucleotide
ccgcagccggcccuacuac

SEQ ID NO: 2750626 - RNA, 19 nt, Artificial Sequence
  Description of Artificial Sequence: Synthetic oligonucleotide
ggcgcuucucauagguggu

SEQ ID NO: 2750627 - RNA, 19 nt, Artificial Sequence
  Description of Artificial Sequence: Synthetic oligonucleotide
gcagcucacugggcgccgc

SEQ ID NO: 2750628 - RNA, 19 nt, Artificial Sequence
  Description of Artificial Sequence: Synthetic oligonucleotide
gguggguaugaaggaggcu

SEQ ID NO: 2750629 - RNA, 19 nt, Artificial Sequence
  Description of Artificial Sequence: Synthetic oligonucleotide
guccaccagccaguaacau

SEQ ID NO: 2750630 - RNA, 19 nt, Artificial Sequence
  Description of Artificial Sequence: Synthetic oligonucleotide
cccucuggcgcuucucaua

SEQ ID NO: 2750631 - RNA, 19 nt, Artificial Sequence
  Description of Artificial Sequence: Synthetic oligonucleotide
gagggcggacagacagcua

SEQ ID NO: 2750632 - RNA, 19 nt, Artificial Sequence
  Description of Artificial Sequence: Synthetic oligonucleotide
gguguccguggcagcugca

SEQ ID NO: 2750633 - RNA, 19 nt, Artificial Sequence
  Description of Artificial Sequence: Synthetic oligonucleotide
cggcccuacuacauggugu

SEQ ID NO: 2750634 - RNA, 19 nt, Artificial Sequence
  Description of Artificial Sequence: Synthetic oligonucleotide
gcagccggcccuacuacau

SEQ ID NO: 2750635 - RNA, 19 nt, Artificial Sequence
  Description of Artificial Sequence: Synthetic oligonucleotide
gcccucuggcgcuucucau

SEQ ID NO: 2750636 - RNA, 19 nt, Artificial Sequence
  Description of Artificial Sequence: Synthetic oligonucleotide
gccgguccaccagccagua

SEQ ID NO: 2750637 - RNA, 19 nt, Artificial Sequence
  Description of Artificial Sequence: Synthetic oligonucleotide
gccggcccuacuacauggu

SEQ ID NO: 2750638 - RNA, 19 nt, Artificial Sequence
  Description of Artificial Sequence: Synthetic oligonucleotide
gggcggacagacagcuauu

SEQ ID NO: 2750639 - RNA, 19 nt, Artificial Sequence
  Description of Artificial Sequence: Synthetic oligonucleotide
ggcgccgcagccggcccua

SEQ ID NO: 2750640 - RNA, 19 nt, Artificial Sequence
  Description of Artificial Sequence: Synthetic oligonucleotide
caucugcccucuggcgcuu

SEQ ID NO: 2750641 - RNA, 19 nt, Artificial Sequence
  Description of Artificial Sequence: Synthetic oligonucleotide
ccaaaaccuuagguaucuu

SEQ ID NO: 2750642 - RNA, 19 nt, Artificial Sequence
  Description of Artificial Sequence: Synthetic oligonucleotide
gggcgccgcagccggcccu

SEQ ID NO: 2750643 - RNA, 19 nt, Artificial Sequence
  Description of Artificial Sequence: Synthetic oligonucleotide
ccgguccaccagccaguaa

SEQ ID NO: 2750644 - RNA, 19 nt, Artificial Sequence
  Description of Artificial Sequence: Synthetic oligonucleotide
gcgccgcagccggcccuac

SEQ ID NO: 2750645 - RNA, 19 nt, Artificial Sequence
  Description of Artificial Sequence: Synthetic oligonucleotide
cgccgcagccggcccuacu

SEQ ID NO: 2750646 - RNA, 19 nt, Artificial Sequence
  Description of Artificial Sequence: Synthetic oligonucleotide
uauagggugauguacauag

SEQ ID NO: 2750647 - RNA, 19 nt, Artificial Sequence
  Description of Artificial Sequence: Synthetic oligonucleotide
acagacacgauguaguccc

SEQ ID NO: 2750648 - RNA, 19 nt, Artificial Sequence
  Description of Artificial Sequence: Synthetic oligonucleotide
agcagacucagccugaccc

SEQ ID NO: 2750649 - RNA, 19 nt, Artificial Sequence
  Description of Artificial Sequence: Synthetic oligonucleotide
aaagccaccccucuccucg

SEQ ID NO: 2750650 - RNA, 19 nt, Artificial Sequence
  Description of Artificial Sequence: Synthetic oligonucleotide
agugaaaccaaagccaccc

SEQ ID NO: 2750651 - RNA, 19 nt, Artificial Sequence
  Description of Artificial Sequence: Synthetic oligonucleotide
auggacacgaccugcaggc

SEQ ID NO: 2750652 - RNA, 19 nt, Artificial Sequence
  Description of Artificial Sequence: Synthetic oligonucleotide
gauguacauaggaagaggg

SEQ ID NO: 2750653 - RNA, 19 nt, Artificial Sequence
  Description of Artificial Sequence: Synthetic oligonucleotide
guuggagcugguuauaggg

SEQ ID NO: 2750654 - RNA, 19 nt, Artificial Sequence
  Description of Artificial Sequence: Synthetic oligonucleotide
gacagaaugcacuaggcac

SEQ ID NO: 2750655 - RNA, 19 nt, Artificial Sequence
  Description of Artificial Sequence: Synthetic oligonucleotide
uguacauaggaagagggcc

SEQ ID NO: 2750656 - RNA, 19 nt, Artificial Sequence
  Description of Artificial Sequence: Synthetic oligonucleotide
aaaccacacucuuucuggc

SEQ ID NO: 2750657 - RNA, 19 nt, Artificial Sequence
  Description of Artificial Sequence: Synthetic oligonucleotide
uccaccacuugcaaggccg

SEQ ID NO: 2750658 - RNA, 19 nt, Artificial Sequence
  Description of Artificial Sequence: Synthetic oligonucleotide
cuaacgauccccagaauag

SEQ ID NO: 2750659 - RNA, 19 nt, Artificial Sequence
  Description of Artificial Sequence: Synthetic oligonucleotide
aacagcagcgaugaaggac

SEQ ID NO: 2750660 - RNA, 19 nt, Artificial Sequence
  Description of Artificial Sequence: Synthetic oligonucleotide
uucacagacacgauguagu

SEQ ID NO: 2750661 - RNA, 19 nt, Artificial Sequence
  Description of Artificial Sequence: Synthetic oligonucleotide
acuuccacgugcuuccacc

SEQ ID NO: 2750662 - RNA, 19 nt, Artificial Sequence
  Description of Artificial Sequence: Synthetic oligonucleotide
ugugccaccacuuccacgu

SEQ ID NO: 2750663 - RNA, 19 nt, Artificial Sequence
  Description of Artificial Sequence: Synthetic oligonucleotide
aauagaggacagaaugcac

SEQ ID NO: 2750664 - RNA, 19 nt, Artificial Sequence
  Description of Artificial Sequence: Synthetic oligonucleotide
cucagagugaaaccaaagc

SEQ ID NO: 2750665 - RNA, 19 nt, Artificial Sequence
  Description of Artificial Sequence: Synthetic oligonucleotide
ugauguacauaggaagagg

SEQ ID NO: 2750666 - RNA, 19 nt, Artificial Sequence
  Description of Artificial Sequence: Synthetic oligonucleotide
acgaccugcaggcucacgc

SEQ ID NO: 2750667 - RNA, 19 nt, Artificial Sequence
  Description of Artificial Sequence: Synthetic oligonucleotide
ugcuacguggcucagggcu

SEQ ID NO: 2750668 - RNA, 19 nt, Artificial Sequence
  Description of Artificial Sequence: Synthetic oligonucleotide
agagugaaaccaaagccac

SEQ ID NO: 2750669 - RNA, 19 nt, Artificial Sequence
  Description of Artificial Sequence: Synthetic oligonucleotide
uuuguuuggucuugcggcc

SEQ ID NO: 2750670 - RNA, 19 nt, Artificial Sequence
  Description of Artificial Sequence: Synthetic oligonucleotide
acgugcuuccaccacuugc

SEQ ID NO: 2750671 - RNA, 19 nt, Artificial Sequence
  Description of Artificial Sequence: Synthetic oligonucleotide
ugaaaccaaagccaccccu

SEQ ID NO: 2750672 - RNA, 19 nt, Artificial Sequence
  Description of Artificial Sequence: Synthetic oligonucleotide
cucuccucgagucaugugc

SEQ ID NO: 2750673 - RNA, 19 nt, Artificial Sequence
  Description of Artificial Sequence: Synthetic oligonucleotide
acagcagugcugcucgucg

SEQ ID NO: 2750674 - RNA, 19 nt, Artificial Sequence
  Description of Artificial Sequence: Synthetic oligonucleotide
gaauagaggacagaaugca

SEQ ID NO: 2750675 - RNA, 19 nt, Artificial Sequence
  Description of Artificial Sequence: Synthetic oligonucleotide
cucuaagcaaggcagggac

SEQ ID NO: 2750676 - RNA, 19 nt, Artificial Sequence
  Description of Artificial Sequence: Synthetic oligonucleotide
cagagugaaaccaaagcca

SEQ ID NO: 2750677 - RNA, 19 nt, Artificial Sequence
  Description of Artificial Sequence: Synthetic oligonucleotide
aaaccaaagccaccccucu

SEQ ID NO: 2750678 - RNA, 19 nt, Artificial Sequence
  Description of Artificial Sequence: Synthetic oligonucleotide
accacacucuuucuggcuc

SEQ ID NO: 2750679 - RNA, 19 nt, Artificial Sequence
  Description of Artificial Sequence: Synthetic oligonucleotide
agggacagccuaacgaucc

SEQ ID NO: 2750680 - RNA, 19 nt, Artificial Sequence
  Description of Artificial Sequence: Synthetic oligonucleotide
aguuggagcugguuauagg

SEQ ID NO: 2750681 - RNA, 19 nt, Artificial Sequence
  Description of Artificial Sequence: Synthetic oligonucleotide
auguacauaggaagagggc

SEQ ID NO: 2750682 - RNA, 19 nt, Artificial Sequence
  Description of Artificial Sequence: Synthetic oligonucleotide
cuaagcaaggcagggacag

SEQ ID NO: 2750683 - RNA, 19 nt, Artificial Sequence
  Description of Artificial Sequence: Synthetic oligonucleotide
aaggacaggcgagucuccc

SEQ ID NO: 2750684 - RNA, 19 nt, Artificial Sequence
  Description of Artificial Sequence: Synthetic oligonucleotide
aacgauccccagaauagag

SEQ ID NO: 2750685 - RNA, 19 nt, Artificial Sequence
  Description of Artificial Sequence: Synthetic oligonucleotide
gggugauguacauaggaag

SEQ ID NO: 2750686 - RNA, 19 nt, Artificial Sequence
  Description of Artificial Sequence: Synthetic oligonucleotide
aucgcugucucaaaaccac

SEQ ID NO: 2750687 - RNA, 19 nt, Artificial Sequence
  Description of Artificial Sequence: Synthetic oligonucleotide
aggccgcccauucacagac

SEQ ID NO: 2750688 - RNA, 19 nt, Artificial Sequence
  Description of Artificial Sequence: Synthetic oligonucleotide
caaggaugggccaggggcg

SEQ ID NO: 2750689 - RNA, 19 nt, Artificial Sequence
  Description of Artificial Sequence: Synthetic oligonucleotide
ugcaaggccgcccauucac

SEQ ID NO: 2750690 - RNA, 19 nt, Artificial Sequence
  Description of Artificial Sequence: Synthetic oligonucleotide
ugcuguuugugcaggaguc

SEQ ID NO: 2750691 - RNA, 19 nt, Artificial Sequence
  Description of Artificial Sequence: Synthetic oligonucleotide
aaccaaagccaccccucuc

SEQ ID NO: 2750692 - RNA, 19 nt, Artificial Sequence
  Description of Artificial Sequence: Synthetic oligonucleotide
ucaggggcaggugacacag

SEQ ID NO: 2750693 - RNA, 19 nt, Artificial Sequence
  Description of Artificial Sequence: Synthetic oligonucleotide
auagaggacagaaugcacu

SEQ ID NO: 2750694 - RNA, 19 nt, Artificial Sequence
  Description of Artificial Sequence: Synthetic oligonucleotide
ucuaagcaaggcagggaca

SEQ ID NO: 2750695 - RNA, 19 nt, Artificial Sequence
  Description of Artificial Sequence: Synthetic oligonucleotide
cauggacacgaccugcagg

SEQ ID NO: 2750696 - RNA, 19 nt, Artificial Sequence
  Description of Artificial Sequence: Synthetic oligonucleotide
ugguuauagggugauguac

SEQ ID NO: 2750697 - RNA, 19 nt, Artificial Sequence
  Description of Artificial Sequence: Synthetic oligonucleotide
uugcuguuugugcaggagu

SEQ ID NO: 2750698 - RNA, 19 nt, Artificial Sequence
  Description of Artificial Sequence: Synthetic oligonucleotide
uggucuugcggccccagcc

SEQ ID NO: 2750699 - RNA, 19 nt, Artificial Sequence
  Description of Artificial Sequence: Synthetic oligonucleotide
ucuccucgagucaugugca

SEQ ID NO: 2750700 - RNA, 19 nt, Artificial Sequence
  Description of Artificial Sequence: Synthetic oligonucleotide
gugauguacauaggaagag

SEQ ID NO: 2750701 - RNA, 19 nt, Artificial Sequence
  Description of Artificial Sequence: Synthetic oligonucleotide
cacgauguaguccccuucc

SEQ ID NO: 2750702 - RNA, 19 nt, Artificial Sequence
  Description of Artificial Sequence: Synthetic oligonucleotide
ugcuuuguuuggucuugcg

SEQ ID NO: 2750703 - RNA, 19 nt, Artificial Sequence
  Description of Artificial Sequence: Synthetic oligonucleotide
ugcacuaggcacuccuggc

SEQ ID NO: 2750704 - RNA, 19 nt, Artificial Sequence
  Description of Artificial Sequence: Synthetic oligonucleotide
gcuuuguuuggucuugcgg

SEQ ID NO: 2750705 - RNA, 19 nt, Artificial Sequence
  Description of Artificial Sequence: Synthetic oligonucleotide
acagcagcgaugaaggaca

SEQ ID NO: 2750706 - RNA, 19 nt, Artificial Sequence
  Description of Artificial Sequence: Synthetic oligonucleotide
aaccacacucuuucuggcu

SEQ ID NO: 2750707 - RNA, 19 nt, Artificial Sequence
  Description of Artificial Sequence: Synthetic oligonucleotide
ucuccccucagagugaaac

SEQ ID NO: 2750708 - RNA, 19 nt, Artificial Sequence
  Description of Artificial Sequence: Synthetic oligonucleotide
cuuucuggcuccacagcag

SEQ ID NO: 2750709 - RNA, 19 nt, Artificial Sequence
  Description of Artificial Sequence: Synthetic oligonucleotide
aggacaggcgagucucccc

SEQ ID NO: 2750710 - RNA, 19 nt, Artificial Sequence
  Description of Artificial Sequence: Synthetic oligonucleotide
ccaaggaugggccaggggc

SEQ ID NO: 2750711 - RNA, 19 nt, Artificial Sequence
  Description of Artificial Sequence: Synthetic oligonucleotide
uguaguccccuuccuucag

SEQ ID NO: 2750712 - RNA, 19 nt, Artificial Sequence
  Description of Artificial Sequence: Synthetic oligonucleotide
ggcacuccuggcuaguugg

SEQ ID NO: 2750713 - RNA, 19 nt, Artificial Sequence
  Description of Artificial Sequence: Synthetic oligonucleotide
uagaggacagaaugcacua

SEQ ID NO: 2750714 - RNA, 19 nt, Artificial Sequence
  Description of Artificial Sequence: Synthetic oligonucleotide
accacuugcaaggccgccc

SEQ ID NO: 2750715 - RNA, 19 nt, Artificial Sequence
  Description of Artificial Sequence: Synthetic oligonucleotide
agccuaacgauccccagaa

SEQ ID NO: 2750716 - RNA, 19 nt, Artificial Sequence
  Description of Artificial Sequence: Synthetic oligonucleotide
uguuuggucuugcggcccc

SEQ ID NO: 2750717 - RNA, 19 nt, Artificial Sequence
  Description of Artificial Sequence: Synthetic oligonucleotide
acacgauguaguccccuuc

SEQ ID NO: 2750718 - RNA, 19 nt, Artificial Sequence
  Description of Artificial Sequence: Synthetic oligonucleotide
agugcugcucgucgggguc

SEQ ID NO: 2750719 - RNA, 19 nt, Artificial Sequence
  Description of Artificial Sequence: Synthetic oligonucleotide
uccccagaauagaggacag

SEQ ID NO: 2750720 - RNA, 19 nt, Artificial Sequence
  Description of Artificial Sequence: Synthetic oligonucleotide
cccaggaacaacagcagcg

SEQ ID NO: 2750721 - RNA, 19 nt, Artificial Sequence
  Description of Artificial Sequence: Synthetic oligonucleotide
ucucaaaaccacacucuuu

SEQ ID NO: 2750722 - RNA, 19 nt, Artificial Sequence
  Description of Artificial Sequence: Synthetic oligonucleotide
uccacgugcuuccaccacu

SEQ ID NO: 2750723 - RNA, 19 nt, Artificial Sequence
  Description of Artificial Sequence: Synthetic oligonucleotide
uaguuggagcugguuauag

SEQ ID NO: 2750724 - RNA, 19 nt, Artificial Sequence
  Description of Artificial Sequence: Synthetic oligonucleotide
gggcaggugacacaguugc

SEQ ID NO: 2750725 - RNA, 19 nt, Artificial Sequence
  Description of Artificial Sequence: Synthetic oligonucleotide
gaaaccaaagccaccccuc

SEQ ID NO: 2750726 - RNA, 19 nt, Artificial Sequence
  Description of Artificial Sequence: Synthetic oligonucleotide
uaguccccuuccuucaggc

SEQ ID NO: 2750727 - RNA, 19 nt, Artificial Sequence
  Description of Artificial Sequence: Synthetic oligonucleotide
uccccucagagugaaacca

SEQ ID NO: 2750728 - RNA, 19 nt, Artificial Sequence
  Description of Artificial Sequence: Synthetic oligonucleotide
cuugcaaggccgcccauuc

SEQ ID NO: 2750729 - RNA, 19 nt, Artificial Sequence
  Description of Artificial Sequence: Synthetic oligonucleotide
uaacgauccccagaauaga

SEQ ID NO: 2750730 - RNA, 19 nt, Artificial Sequence
  Description of Artificial Sequence: Synthetic oligonucleotide
aggaacaacagcagcgaug

SEQ ID NO: 2750731 - RNA, 19 nt, Artificial Sequence
  Description of Artificial Sequence: Synthetic oligonucleotide
uccccuuccuucaggccag

SEQ ID NO: 2750732 - RNA, 19 nt, Artificial Sequence
  Description of Artificial Sequence: Synthetic oligonucleotide
guaguccccuuccuucagg

SEQ ID NO: 2750733 - RNA, 19 nt, Artificial Sequence
  Description of Artificial Sequence: Synthetic oligonucleotide
uuccuucaggccagcagac

SEQ ID NO: 2750734 - RNA, 19 nt, Artificial Sequence
  Description of Artificial Sequence: Synthetic oligonucleotide
cacagacacgauguagucc

SEQ ID NO: 2750735 - RNA, 19 nt, Artificial Sequence
  Description of Artificial Sequence: Synthetic oligonucleotide
acauaggaagagggccucc

SEQ ID NO: 2750736 - RNA, 19 nt, Artificial Sequence
  Description of Artificial Sequence: Synthetic oligonucleotide
gcaucgcugucucaaaacc

SEQ ID NO: 2750737 - RNA, 19 nt, Artificial Sequence
  Description of Artificial Sequence: Synthetic oligonucleotide
gaaugcacuaggcacuccu

SEQ ID NO: 2750738 - RNA, 19 nt, Artificial Sequence
  Description of Artificial Sequence: Synthetic oligonucleotide
acgauccccagaauagagg

SEQ ID NO: 2750739 - RNA, 19 nt, Artificial Sequence
  Description of Artificial Sequence: Synthetic oligonucleotide
ucaggguggcacccggucu

SEQ ID NO: 2750740 - RNA, 19 nt, Artificial Sequence
  Description of Artificial Sequence: Synthetic oligonucleotide
ugccaccacuuccacgugc

SEQ ID NO: 2750741 - RNA, 19 nt, Artificial Sequence
  Description of Artificial Sequence: Synthetic oligonucleotide
aggagucaggguggcaccc

SEQ ID NO: 2750742 - RNA, 19 nt, Artificial Sequence
  Description of Artificial Sequence: Synthetic oligonucleotide
acagccuaacgauccccag

SEQ ID NO: 2750743 - RNA, 19 nt, Artificial Sequence
  Description of Artificial Sequence: Synthetic oligonucleotide
caaggccgcccauucacag

SEQ ID NO: 2750744 - RNA, 19 nt, Artificial Sequence
  Description of Artificial Sequence: Synthetic oligonucleotide
ggugauguacauaggaaga

SEQ ID NO: 2750745 - RNA, 19 nt, Artificial Sequence
  Description of Artificial Sequence: Synthetic oligonucleotide
uucuggcuccacagcagug

SEQ ID NO: 2750746 - RNA, 19 nt, Artificial Sequence
  Description of Artificial Sequence: Synthetic oligonucleotide
gguuauagggugauguaca

SEQ ID NO: 2750747 - RNA, 19 nt, Artificial Sequence
  Description of Artificial Sequence: Synthetic oligonucleotide
aggcucacgccucccucgc

SEQ ID NO: 2750748 - RNA, 19 nt, Artificial Sequence
  Description of Artificial Sequence: Synthetic oligonucleotide
cuccccucagagugaaacc

SEQ ID NO: 2750749 - RNA, 19 nt, Artificial Sequence
  Description of Artificial Sequence: Synthetic oligonucleotide
aaggccgcccauucacaga

SEQ ID NO: 2750750 - RNA, 19 nt, Artificial Sequence
  Description of Artificial Sequence: Synthetic oligonucleotide
ucgcugucucaaaaccaca

SEQ ID NO: 2750751 - RNA, 19 nt, Artificial Sequence
  Description of Artificial Sequence: Synthetic oligonucleotide
cagcgaugaaggacaggcg

SEQ ID NO: 2750752 - RNA, 19 nt, Artificial Sequence
  Description of Artificial Sequence: Synthetic oligonucleotide
caggcucacgccucccucg

SEQ ID NO: 2750753 - RNA, 19 nt, Artificial Sequence
  Description of Artificial Sequence: Synthetic oligonucleotide
gugacacaguugcuguuug

SEQ ID NO: 2750754 - RNA, 19 nt, Artificial Sequence
  Description of Artificial Sequence: Synthetic oligonucleotide
gagugaaaccaaagccacc

SEQ ID NO: 2750755 - RNA, 19 nt, Artificial Sequence
  Description of Artificial Sequence: Synthetic oligonucleotide
agaggacagaaugcacuag

SEQ ID NO: 2750756 - RNA, 19 nt, Artificial Sequence
  Description of Artificial Sequence: Synthetic oligonucleotide
caucgcugucucaaaacca

SEQ ID NO: 2750757 - RNA, 19 nt, Artificial Sequence
  Description of Artificial Sequence: Synthetic oligonucleotide
gugaaaccaaagccacccc

SEQ ID NO: 2750758 - RNA, 19 nt, Artificial Sequence
  Description of Artificial Sequence: Synthetic oligonucleotide
cacacagggguaccgggug

SEQ ID NO: 2750759 - RNA, 19 nt, Artificial Sequence
  Description of Artificial Sequence: Synthetic oligonucleotide
agaaugcacuaggcacucc

SEQ ID NO: 2750760 - RNA, 19 nt, Artificial Sequence
  Description of Artificial Sequence: Synthetic oligonucleotide
uuguuuggucuugcggccc

SEQ ID NO: 2750761 - RNA, 19 nt, Artificial Sequence
  Description of Artificial Sequence: Synthetic oligonucleotide
auagggugauguacauagg

SEQ ID NO: 2750762 - RNA, 19 nt, Artificial Sequence
  Description of Artificial Sequence: Synthetic oligonucleotide
cuugcggccccagccaagg

SEQ ID NO: 2750763 - RNA, 19 nt, Artificial Sequence
  Description of Artificial Sequence: Synthetic oligonucleotide
ucccgugcuacguggcuca

SEQ ID NO: 2750764 - RNA, 19 nt, Artificial Sequence
  Description of Artificial Sequence: Synthetic oligonucleotide
ugacacaguugcuguuugu

SEQ ID NO: 2750765 - RNA, 19 nt, Artificial Sequence
  Description of Artificial Sequence: Synthetic oligonucleotide
ucuugcggccccagccaag

SEQ ID NO: 2750766 - RNA, 19 nt, Artificial Sequence
  Description of Artificial Sequence: Synthetic oligonucleotide
uacauaggaagagggccuc

SEQ ID NO: 2750767 - RNA, 19 nt, Artificial Sequence
  Description of Artificial Sequence: Synthetic oligonucleotide
agggguaccggguguccag

SEQ ID NO: 2750768 - RNA, 19 nt, Artificial Sequence
  Description of Artificial Sequence: Synthetic oligonucleotide
ggcgagucuccccucagag

SEQ ID NO: 2750769 - RNA, 19 nt, Artificial Sequence
  Description of Artificial Sequence: Synthetic oligonucleotide
ggcagggacagccuaacga

SEQ ID NO: 2750770 - RNA, 19 nt, Artificial Sequence
  Description of Artificial Sequence: Synthetic oligonucleotide
aguugcuguuugugcagga

SEQ ID NO: 2750771 - RNA, 19 nt, Artificial Sequence
  Description of Artificial Sequence: Synthetic oligonucleotide
uuauagggugauguacaua

SEQ ID NO: 2750772 - RNA, 19 nt, Artificial Sequence
  Description of Artificial Sequence: Synthetic oligonucleotide
guaccggguguccagcuca

SEQ ID NO: 2750773 - RNA, 19 nt, Artificial Sequence
  Description of Artificial Sequence: Synthetic oligonucleotide
ugggcacacagggguaccg

SEQ ID NO: 2750774 - RNA, 19 nt, Artificial Sequence
  Description of Artificial Sequence: Synthetic oligonucleotide
acagccacccugggcacac

SEQ ID NO: 2750775 - RNA, 19 nt, Artificial Sequence
  Description of Artificial Sequence: Synthetic oligonucleotide
acagggguaccgggugucc

SEQ ID NO: 2750776 - RNA, 19 nt, Artificial Sequence
  Description of Artificial Sequence: Synthetic oligonucleotide
uuggucuugcggccccagc

SEQ ID NO: 2750777 - RNA, 19 nt, Artificial Sequence
  Description of Artificial Sequence: Synthetic oligonucleotide
gacacgaccugcaggcuca

SEQ ID NO: 2750778 - RNA, 19 nt, Artificial Sequence
  Description of Artificial Sequence: Synthetic oligonucleotide
cgugcuacguggcucaggg

SEQ ID NO: 2750779 - RNA, 19 nt, Artificial Sequence
  Description of Artificial Sequence: Synthetic oligonucleotide
agggugauguacauaggaa

SEQ ID NO: 2750780 - RNA, 19 nt, Artificial Sequence
  Description of Artificial Sequence: Synthetic oligonucleotide
cgagucuccccucagagug

SEQ ID NO: 2750781 - RNA, 19 nt, Artificial Sequence
  Description of Artificial Sequence: Synthetic oligonucleotide
uuccacgugcuuccaccac

SEQ ID NO: 2750782 - RNA, 19 nt, Artificial Sequence
  Description of Artificial Sequence: Synthetic oligonucleotide
aggcagggacagccuaacg

SEQ ID NO: 2750783 - RNA, 19 nt, Artificial Sequence
  Description of Artificial Sequence: Synthetic oligonucleotide
uugcaaggccgcccauuca

SEQ ID NO: 2750784 - RNA, 19 nt, Artificial Sequence
  Description of Artificial Sequence: Synthetic oligonucleotide
gacagccuaacgaucccca

SEQ ID NO: 2750785 - RNA, 19 nt, Artificial Sequence
  Description of Artificial Sequence: Synthetic oligonucleotide
cagcagugcugcucgucgg

SEQ ID NO: 2750786 - RNA, 19 nt, Artificial Sequence
  Description of Artificial Sequence: Synthetic oligonucleotide
uugcuuuguuuggucuugc

SEQ ID NO: 2750787 - RNA, 19 nt, Artificial Sequence
  Description of Artificial Sequence: Synthetic oligonucleotide
uaccggguguccagcucag

SEQ ID NO: 2750788 - RNA, 19 nt, Artificial Sequence
  Description of Artificial Sequence: Synthetic oligonucleotide
ggcaucgcugucucaaaac

SEQ ID NO: 2750789 - RNA, 19 nt, Artificial Sequence
  Description of Artificial Sequence: Synthetic oligonucleotide
ccucagagugaaaccaaag

SEQ ID NO: 2750790 - RNA, 19 nt, Artificial Sequence
  Description of Artificial Sequence: Synthetic oligonucleotide
gauccccagaauagaggac

SEQ ID NO: 2750791 - RNA, 19 nt, Artificial Sequence
  Description of Artificial Sequence: Synthetic oligonucleotide
aagagggccuccacagcca

SEQ ID NO: 2750792 - RNA, 19 nt, Artificial Sequence
  Description of Artificial Sequence: Synthetic oligonucleotide
acaggcgagucuccccuca

SEQ ID NO: 2750793 - RNA, 19 nt, Artificial Sequence
  Description of Artificial Sequence: Synthetic oligonucleotide
agccacccugggcacacag

SEQ ID NO: 2750794 - RNA, 19 nt, Artificial Sequence
  Description of Artificial Sequence: Synthetic oligonucleotide
cagggacagccuaacgauc

SEQ ID NO: 2750795 - RNA, 19 nt, Artificial Sequence
  Description of Artificial Sequence: Synthetic oligonucleotide
acgccucccucgcccacgc

SEQ ID NO: 2750796 - RNA, 19 nt, Artificial Sequence
  Description of Artificial Sequence: Synthetic oligonucleotide
cuuccaccacuugcaaggc

SEQ ID NO: 2750797 - RNA, 19 nt, Artificial Sequence
  Description of Artificial Sequence: Synthetic oligonucleotide
cacucuuucuggcuccaca

SEQ ID NO: 2750798 - RNA, 19 nt, Artificial Sequence
  Description of Artificial Sequence: Synthetic oligonucleotide
guuauagggugauguacau

SEQ ID NO: 2750799 - RNA, 19 nt, Artificial Sequence
  Description of Artificial Sequence: Synthetic oligonucleotide
cuacguggcucagggcugg

SEQ ID NO: 2750800 - RNA, 19 nt, Artificial Sequence
  Description of Artificial Sequence: Synthetic oligonucleotide
acgugcaggcaucgcuguc

SEQ ID NO: 2750801 - RNA, 19 nt, Artificial Sequence
  Description of Artificial Sequence: Synthetic oligonucleotide
cagaaugcacuaggcacuc

SEQ ID NO: 2750802 - RNA, 19 nt, Artificial Sequence
  Description of Artificial Sequence: Synthetic oligonucleotide
acacagggguaccgggugu

SEQ ID NO: 2750803 - RNA, 19 nt, Artificial Sequence
  Description of Artificial Sequence: Synthetic oligonucleotide
cagccugaccccaggaaca

SEQ ID NO: 2750804 - RNA, 19 nt, Artificial Sequence
  Description of Artificial Sequence: Synthetic oligonucleotide
caccacuuccacgugcuuc

SEQ ID NO: 2750805 - RNA, 19 nt, Artificial Sequence
  Description of Artificial Sequence: Synthetic oligonucleotide
gcagacucagccugacccc

SEQ ID NO: 2750806 - RNA, 19 nt, Artificial Sequence
  Description of Artificial Sequence: Synthetic oligonucleotide
aggcaucgcugucucaaaa

SEQ ID NO: 2750807 - RNA, 19 nt, Artificial Sequence
  Description of Artificial Sequence: Synthetic oligonucleotide
cuuccacgugcuuccacca

SEQ ID NO: 2750808 - RNA, 19 nt, Artificial Sequence
  Description of Artificial Sequence: Synthetic oligonucleotide
guacauaggaagagggccu

SEQ ID NO: 2750809 - RNA, 19 nt, Artificial Sequence
  Description of Artificial Sequence: Synthetic oligonucleotide
ugcucgucggggucccgug

SEQ ID NO: 2750810 - RNA, 19 nt, Artificial Sequence
  Description of Artificial Sequence: Synthetic oligonucleotide
gucggggucccgugcuacg

SEQ ID NO: 2750811 - RNA, 19 nt, Artificial Sequence
  Description of Artificial Sequence: Synthetic oligonucleotide
gucaggguggcacccgguc

SEQ ID NO: 2750812 - RNA, 19 nt, Artificial Sequence
  Description of Artificial Sequence: Synthetic oligonucleotide
agcauggacacgaccugca

SEQ ID NO: 2750813 - RNA, 19 nt, Artificial Sequence
  Description of Artificial Sequence: Synthetic oligonucleotide
cccggucuugcuuuguuug

SEQ ID NO: 2750814 - RNA, 19 nt, Artificial Sequence
  Description of Artificial Sequence: Synthetic oligonucleotide
cagacacgauguagucccc

SEQ ID NO: 2750815 - RNA, 19 nt, Artificial Sequence
  Description of Artificial Sequence: Synthetic oligonucleotide
uguccagcucaggggcagg

SEQ ID NO: 2750816 - RNA, 19 nt, Artificial Sequence
  Description of Artificial Sequence: Synthetic oligonucleotide
cugguuauagggugaugua

SEQ ID NO: 2750817 - RNA, 19 nt, Artificial Sequence
  Description of Artificial Sequence: Synthetic oligonucleotide
cagcucaggggcaggugac

SEQ ID NO: 2750818 - RNA, 19 nt, Artificial Sequence
  Description of Artificial Sequence: Synthetic oligonucleotide
agacacgauguaguccccu

SEQ ID NO: 2750819 - RNA, 19 nt, Artificial Sequence
  Description of Artificial Sequence: Synthetic oligonucleotide
cauaggaagagggccucca

SEQ ID NO: 2750820 - RNA, 19 nt, Artificial Sequence
  Description of Artificial Sequence: Synthetic oligonucleotide
ggcuaguuggagcugguua

SEQ ID NO: 2750821 - RNA, 19 nt, Artificial Sequence
  Description of Artificial Sequence: Synthetic oligonucleotide
ccuaacgauccccagaaua

SEQ ID NO: 2750822 - RNA, 19 nt, Artificial Sequence
  Description of Artificial Sequence: Synthetic oligonucleotide
gcugguuauagggugaugu

SEQ ID NO: 2750823 - RNA, 19 nt, Artificial Sequence
  Description of Artificial Sequence: Synthetic oligonucleotide
aagccaccccucuccucga

SEQ ID NO: 2750824 - RNA, 19 nt, Artificial Sequence
  Description of Artificial Sequence: Synthetic oligonucleotide
cacuccuggcuaguuggag

SEQ ID NO: 2750825 - RNA, 19 nt, Artificial Sequence
  Description of Artificial Sequence: Synthetic oligonucleotide
gcgaugaaggacaggcgag

SEQ ID NO: 2750826 - RNA, 19 nt, Artificial Sequence
  Description of Artificial Sequence: Synthetic oligonucleotide
ggucuugcuuuguuugguc

SEQ ID NO: 2750827 - RNA, 19 nt, Artificial Sequence
  Description of Artificial Sequence: Synthetic oligonucleotide
uggcacccggucuugcuuu

SEQ ID NO: 2750828 - RNA, 19 nt, Artificial Sequence
  Description of Artificial Sequence: Synthetic oligonucleotide
cagccuaacgauccccaga

SEQ ID NO: 2750829 - RNA, 19 nt, Artificial Sequence
  Description of Artificial Sequence: Synthetic oligonucleotide
uggcucagggcugggcagc

SEQ ID NO: 2750830 - RNA, 19 nt, Artificial Sequence
  Description of Artificial Sequence: Synthetic oligonucleotide
ccugaccccaggaacaaca

SEQ ID NO: 2750831 - RNA, 19 nt, Artificial Sequence
  Description of Artificial Sequence: Synthetic oligonucleotide
caaagccaccccucuccuc

SEQ ID NO: 2750832 - RNA, 19 nt, Artificial Sequence
  Description of Artificial Sequence: Synthetic oligonucleotide
acacucuuucuggcuccac

SEQ ID NO: 2750833 - RNA, 19 nt, Artificial Sequence
  Description of Artificial Sequence: Synthetic oligonucleotide
cuccucgagucaugugcac

SEQ ID NO: 2750834 - RNA, 19 nt, Artificial Sequence
  Description of Artificial Sequence: Synthetic oligonucleotide
uccuucaggccagcagacu

SEQ ID NO: 2750835 - RNA, 19 nt, Artificial Sequence
  Description of Artificial Sequence: Synthetic oligonucleotide
ccuggcuaguuggagcugg

SEQ ID NO: 2750836 - RNA, 19 nt, Artificial Sequence
  Description of Artificial Sequence: Synthetic oligonucleotide
ccggucuugcuuuguuugg

SEQ ID NO: 2750837 - RNA, 19 nt, Artificial Sequence
  Description of Artificial Sequence: Synthetic oligonucleotide
gcauggacacgaccugcag

SEQ ID NO: 2750838 - RNA, 19 nt, Artificial Sequence
  Description of Artificial Sequence: Synthetic oligonucleotide
caggugacacaguugcugu

SEQ ID NO: 2750839 - RNA, 19 nt, Artificial Sequence
  Description of Artificial Sequence: Synthetic oligonucleotide
gcucacgccucccucgccc

SEQ ID NO: 2750840 - RNA, 19 nt, Artificial Sequence
  Description of Artificial Sequence: Synthetic oligonucleotide
gcuaguuggagcugguuau

SEQ ID NO: 2750841 - RNA, 19 nt, Artificial Sequence
  Description of Artificial Sequence: Synthetic oligonucleotide
aggcgagucuccccucaga

SEQ ID NO: 2750842 - RNA, 19 nt, Artificial Sequence
  Description of Artificial Sequence: Synthetic oligonucleotide
cuccuggcuaguuggagcu

SEQ ID NO: 2750843 - RNA, 19 nt, Artificial Sequence
  Description of Artificial Sequence: Synthetic oligonucleotide
ccacacucuuucuggcucc

SEQ ID NO: 2750844 - RNA, 19 nt, Artificial Sequence
  Description of Artificial Sequence: Synthetic oligonucleotide
cacuuccacgugcuuccac

SEQ ID NO: 2750845 - RNA, 19 nt, Artificial Sequence
  Description of Artificial Sequence: Synthetic oligonucleotide
ggacacgaccugcaggcuc

SEQ ID NO: 2750846 - RNA, 19 nt, Artificial Sequence
  Description of Artificial Sequence: Synthetic oligonucleotide
cagccaaggaugggccagg

SEQ ID NO: 2750847 - RNA, 19 nt, Artificial Sequence
  Description of Artificial Sequence: Synthetic oligonucleotide
aggugacacaguugcuguu

SEQ ID NO: 2750848 - RNA, 19 nt, Artificial Sequence
  Description of Artificial Sequence: Synthetic oligonucleotide
ugcaggcaucgcugucuca

SEQ ID NO: 2750849 - RNA, 19 nt, Artificial Sequence
  Description of Artificial Sequence: Synthetic oligonucleotide
gggacagccuaacgauccc

SEQ ID NO: 2750850 - RNA, 19 nt, Artificial Sequence
  Description of Artificial Sequence: Synthetic oligonucleotide
acccggucuugcuuuguuu

SEQ ID NO: 2750851 - RNA, 19 nt, Artificial Sequence
  Description of Artificial Sequence: Synthetic oligonucleotide
acgccccucagcugugcca

SEQ ID NO: 2750852 - RNA, 19 nt, Artificial Sequence
  Description of Artificial Sequence: Synthetic oligonucleotide
ggggcgggcacgugcaggc

SEQ ID NO: 2750853 - RNA, 19 nt, Artificial Sequence
  Description of Artificial Sequence: Synthetic oligonucleotide
gacaggcgagucuccccuc

SEQ ID NO: 2750854 - RNA, 19 nt, Artificial Sequence
  Description of Artificial Sequence: Synthetic oligonucleotide
gugcaggcaucgcugucuc

SEQ ID NO: 2750855 - RNA, 19 nt, Artificial Sequence
  Description of Artificial Sequence: Synthetic oligonucleotide
ggacagccuaacgaucccc

SEQ ID NO: 2750856 - RNA, 19 nt, Artificial Sequence
  Description of Artificial Sequence: Synthetic oligonucleotide
cucagccugaccccaggaa

SEQ ID NO: 2750857 - RNA, 19 nt, Artificial Sequence
  Description of Artificial Sequence: Synthetic oligonucleotide
cacuaggcacuccuggcua

SEQ ID NO: 2750858 - RNA, 19 nt, Artificial Sequence
  Description of Artificial Sequence: Synthetic oligonucleotide
ucggggucccgugcuacgu

SEQ ID NO: 2750859 - RNA, 19 nt, Artificial Sequence
  Description of Artificial Sequence: Synthetic oligonucleotide
caggcgagucuccccucag

SEQ ID NO: 2750860 - RNA, 19 nt, Artificial Sequence
  Description of Artificial Sequence: Synthetic oligonucleotide
gccgcccauucacagacac

SEQ ID NO: 2750861 - RNA, 19 nt, Artificial Sequence
  Description of Artificial Sequence: Synthetic oligonucleotide
ggucuugcggccccagcca

SEQ ID NO: 2750862 - RNA, 19 nt, Artificial Sequence
  Description of Artificial Sequence: Synthetic oligonucleotide
agucuccccucagagugaa

SEQ ID NO: 2750863 - RNA, 19 nt, Artificial Sequence
  Description of Artificial Sequence: Synthetic oligonucleotide
uccuggcuaguuggagcug

SEQ ID NO: 2750864 - RNA, 19 nt, Artificial Sequence
  Description of Artificial Sequence: Synthetic oligonucleotide
acuugcaaggccgcccauu

SEQ ID NO: 2750865 - RNA, 19 nt, Artificial Sequence
  Description of Artificial Sequence: Synthetic oligonucleotide
cgugcuuccaccacuugca

SEQ ID NO: 2750866 - RNA, 19 nt, Artificial Sequence
  Description of Artificial Sequence: Synthetic oligonucleotide
ggagucaggguggcacccg

SEQ ID NO: 2750867 - RNA, 19 nt, Artificial Sequence
  Description of Artificial Sequence: Synthetic oligonucleotide
gaccugcaggcucacgccu

SEQ ID NO: 2750868 - RNA, 19 nt, Artificial Sequence
  Description of Artificial Sequence: Synthetic oligonucleotide
cacgccccucagcugugcc

SEQ ID NO: 2750869 - RNA, 19 nt, Artificial Sequence
  Description of Artificial Sequence: Synthetic oligonucleotide
gacacgauguaguccccuu

SEQ ID NO: 2750870 - RNA, 19 nt, Artificial Sequence
  Description of Artificial Sequence: Synthetic oligonucleotide
cugggcacacagggguacc

SEQ ID NO: 2750871 - RNA, 19 nt, Artificial Sequence
  Description of Artificial Sequence: Synthetic oligonucleotide
agcugguuauagggugaug

SEQ ID NO: 2750872 - RNA, 19 nt, Artificial Sequence
  Description of Artificial Sequence: Synthetic oligonucleotide
uggacacgaccugcaggcu

SEQ ID NO: 2750873 - RNA, 19 nt, Artificial Sequence
  Description of Artificial Sequence: Synthetic oligonucleotide
gcagggacagccuaacgau

SEQ ID NO: 2750874 - RNA, 19 nt, Artificial Sequence
  Description of Artificial Sequence: Synthetic oligonucleotide
gugcuacguggcucagggc

SEQ ID NO: 2750875 - RNA, 19 nt, Artificial Sequence
  Description of Artificial Sequence: Synthetic oligonucleotide
ugcugcucgucgggguccc

SEQ ID NO: 2750876 - RNA, 19 nt, Artificial Sequence
  Description of Artificial Sequence: Synthetic oligonucleotide
uacguggcucagggcuggg

SEQ ID NO: 2750877 - RNA, 19 nt, Artificial Sequence
  Description of Artificial Sequence: Synthetic oligonucleotide
ggagcugguuauaggguga

SEQ ID NO: 2750878 - RNA, 19 nt, Artificial Sequence
  Description of Artificial Sequence: Synthetic oligonucleotide
cacgccucccucgcccacg

SEQ ID NO: 2750879 - RNA, 19 nt, Artificial Sequence
  Description of Artificial Sequence: Synthetic oligonucleotide
cagacucagccugacccca

SEQ ID NO: 2750880 - RNA, 19 nt, Artificial Sequence
  Description of Artificial Sequence: Synthetic oligonucleotide
gagucuccccucagaguga

SEQ ID NO: 2750881 - RNA, 19 nt, Artificial Sequence
  Description of Artificial Sequence: Synthetic oligonucleotide
cacagggguaccggguguc

SEQ ID NO: 2750882 - RNA, 19 nt, Artificial Sequence
  Description of Artificial Sequence: Synthetic oligonucleotide
uugcggccccagccaagga

SEQ ID NO: 2750883 - RNA, 19 nt, Artificial Sequence
  Description of Artificial Sequence: Synthetic oligonucleotide
caccacuugcaaggccgcc

SEQ ID NO: 2750884 - RNA, 19 nt, Artificial Sequence
  Description of Artificial Sequence: Synthetic oligonucleotide
aggaugggccaggggcggg

SEQ ID NO: 2750885 - RNA, 19 nt, Artificial Sequence
  Description of Artificial Sequence: Synthetic oligonucleotide
agcucaggggcaggugaca

SEQ ID NO: 2750886 - RNA, 19 nt, Artificial Sequence
  Description of Artificial Sequence: Synthetic oligonucleotide
cacgugcuuccaccacuug

SEQ ID NO: 2750887 - RNA, 19 nt, Artificial Sequence
  Description of Artificial Sequence: Synthetic oligonucleotide
ccccagccaaggaugggcc

SEQ ID NO: 2750888 - RNA, 19 nt, Artificial Sequence
  Description of Artificial Sequence: Synthetic oligonucleotide
gcuacguggcucagggcug

SEQ ID NO: 2750889 - RNA, 19 nt, Artificial Sequence
  Description of Artificial Sequence: Synthetic oligonucleotide
gcaggcaucgcugucucaa

SEQ ID NO: 2750890 - RNA, 19 nt, Artificial Sequence
  Description of Artificial Sequence: Synthetic oligonucleotide
gggcacacagggguaccgg

SEQ ID NO: 2750891 - RNA, 19 nt, Artificial Sequence
  Description of Artificial Sequence: Synthetic oligonucleotide
ccagccaaggaugggccag

SEQ ID NO: 2750892 - RNA, 19 nt, Artificial Sequence
  Description of Artificial Sequence: Synthetic oligonucleotide
gguaccggguguccagcuc

SEQ ID NO: 2750893 - RNA, 19 nt, Artificial Sequence
  Description of Artificial Sequence: Synthetic oligonucleotide
gccccagccaaggaugggc

SEQ ID NO: 2750894 - RNA, 19 nt, Artificial Sequence
  Description of Artificial Sequence: Synthetic oligonucleotide
acacgaccugcaggcucac

SEQ ID NO: 2750895 - RNA, 19 nt, Artificial Sequence
  Description of Artificial Sequence: Synthetic oligonucleotide
gucuugcggccccagccaa

SEQ ID NO: 2750896 - RNA, 19 nt, Artificial Sequence
  Description of Artificial Sequence: Synthetic oligonucleotide
gaacaacagcagcgaugaa

SEQ ID NO: 2750897 - RNA, 19 nt, Artificial Sequence
  Description of Artificial Sequence: Synthetic oligonucleotide
gucccgugcuacguggcuc

SEQ ID NO: 2750898 - RNA, 19 nt, Artificial Sequence
  Description of Artificial Sequence: Synthetic oligonucleotide
cuaguuggagcugguuaua

SEQ ID NO: 2750899 - RNA, 19 nt, Artificial Sequence
  Description of Artificial Sequence: Synthetic oligonucleotide
agccugaccccaggaacaa

SEQ ID NO: 2750900 - RNA, 19 nt, Artificial Sequence
  Description of Artificial Sequence: Synthetic oligonucleotide
ccaccacuugcaaggccgc

SEQ ID NO: 2750901 - RNA, 19 nt, Artificial Sequence
  Description of Artificial Sequence: Synthetic oligonucleotide
ccaccccucuccucgaguc

SEQ ID NO: 2750902 - RNA, 19 nt, Artificial Sequence
  Description of Artificial Sequence: Synthetic oligonucleotide
cgcccauucacagacacga

SEQ ID NO: 2750903 - RNA, 19 nt, Artificial Sequence
  Description of Artificial Sequence: Synthetic oligonucleotide
ccugcaggcucacgccucc

SEQ ID NO: 2750904 - RNA, 19 nt, Artificial Sequence
  Description of Artificial Sequence: Synthetic oligonucleotide
ucgucggggucccgugcua

SEQ ID NO: 2750905 - RNA, 19 nt, Artificial Sequence
  Description of Artificial Sequence: Synthetic oligonucleotide
uggcuaguuggagcugguu

SEQ ID NO: 2750906 - RNA, 19 nt, Artificial Sequence
  Description of Artificial Sequence: Synthetic oligonucleotide
accggguguccagcucagg

SEQ ID NO: 2750907 - RNA, 19 nt, Artificial Sequence
  Description of Artificial Sequence: Synthetic oligonucleotide
cucacgccucccucgccca

SEQ ID NO: 2750908 - RNA, 19 nt, Artificial Sequence
  Description of Artificial Sequence: Synthetic oligonucleotide
ccgcccauucacagacacg

SEQ ID NO: 2750909 - RNA, 19 nt, Artificial Sequence
  Description of Artificial Sequence: Synthetic oligonucleotide
gcggccccagccaaggaug

SEQ ID NO: 2750910 - RNA, 19 nt, Artificial Sequence
  Description of Artificial Sequence: Synthetic oligonucleotide
gaugggccaggggcgggca

SEQ ID NO: 2750911 - RNA, 19 nt, Artificial Sequence
  Description of Artificial Sequence: Synthetic oligonucleotide
cacgaccugcaggcucacg

SEQ ID NO: 2750912 - RNA, 19 nt, Artificial Sequence
  Description of Artificial Sequence: Synthetic oligonucleotide
cucagcugugccaccacuu

SEQ ID NO: 2750913 - RNA, 19 nt, Artificial Sequence
  Description of Artificial Sequence: Synthetic oligonucleotide
caggcaucgcugucucaaa

SEQ ID NO: 2750914 - RNA, 19 nt, Artificial Sequence
  Description of Artificial Sequence: Synthetic oligonucleotide
agucaggguggcacccggu

SEQ ID NO: 2750915 - RNA, 19 nt, Artificial Sequence
  Description of Artificial Sequence: Synthetic oligonucleotide
gcaggcucacgccucccuc

SEQ ID NO: 2750916 - RNA, 19 nt, Artificial Sequence
  Description of Artificial Sequence: Synthetic oligonucleotide
ggcacccggucuugcuuug

SEQ ID NO: 2750917 - RNA, 19 nt, Artificial Sequence
  Description of Artificial Sequence: Synthetic oligonucleotide
caccccucuccucgaguca

SEQ ID NO: 2750918 - RNA, 19 nt, Artificial Sequence
  Description of Artificial Sequence: Synthetic oligonucleotide
cacacucuuucuggcucca

SEQ ID NO: 2750919 - RNA, 19 nt, Artificial Sequence
  Description of Artificial Sequence: Synthetic oligonucleotide
gcucgucggggucccgugc

SEQ ID NO: 2750920 - RNA, 19 nt, Artificial Sequence
  Description of Artificial Sequence: Synthetic oligonucleotide
gggguaccggguguccagc

SEQ ID NO: 2750921 - RNA, 19 nt, Artificial Sequence
  Description of Artificial Sequence: Synthetic oligonucleotide
ccugggcacacagggguac

SEQ ID NO: 2750922 - RNA, 19 nt, Artificial Sequence
  Description of Artificial Sequence: Synthetic oligonucleotide
ccacuugcaaggccgccca

SEQ ID NO: 2750923 - RNA, 19 nt, Artificial Sequence
  Description of Artificial Sequence: Synthetic oligonucleotide
cccucagagugaaaccaaa

SEQ ID NO: 2750924 - RNA, 19 nt, Artificial Sequence
  Description of Artificial Sequence: Synthetic oligonucleotide
caggaacaacagcagcgau

SEQ ID NO: 2750925 - RNA, 19 nt, Artificial Sequence
  Description of Artificial Sequence: Synthetic oligonucleotide
cagggguaccgggugucca

SEQ ID NO: 2750926 - RNA, 19 nt, Artificial Sequence
  Description of Artificial Sequence: Synthetic oligonucleotide
cucgucggggucccgugcu

SEQ ID NO: 2750927 - RNA, 19 nt, Artificial Sequence
  Description of Artificial Sequence: Synthetic oligonucleotide
ggcucacgccucccucgcc

SEQ ID NO: 2750928 - RNA, 19 nt, Artificial Sequence
  Description of Artificial Sequence: Synthetic oligonucleotide
guggcacccggucuugcuu

SEQ ID NO: 2750929 - RNA, 19 nt, Artificial Sequence
  Description of Artificial Sequence: Synthetic oligonucleotide
gcaaggccgcccauucaca

SEQ ID NO: 2750930 - RNA, 19 nt, Artificial Sequence
  Description of Artificial Sequence: Synthetic oligonucleotide
gguggcacccggucuugcu

SEQ ID NO: 2750931 - RNA, 19 nt, Artificial Sequence
  Description of Artificial Sequence: Synthetic oligonucleotide
cuggcuaguuggagcuggu

SEQ ID NO: 2750932 - RNA, 19 nt, Artificial Sequence
  Description of Artificial Sequence: Synthetic oligonucleotide
gcccacgccccucagcugu

SEQ ID NO: 2750933 - RNA, 19 nt, Artificial Sequence
  Description of Artificial Sequence: Synthetic oligonucleotide
ccaggggcgggcacgugca

SEQ ID NO: 2750934 - RNA, 19 nt, Artificial Sequence
  Description of Artificial Sequence: Synthetic oligonucleotide
ccccucagagugaaaccaa

SEQ ID NO: 2750935 - RNA, 19 nt, Artificial Sequence
  Description of Artificial Sequence: Synthetic oligonucleotide
cacagccacccugggcaca

SEQ ID NO: 2750936 - RNA, 19 nt, Artificial Sequence
  Description of Artificial Sequence: Synthetic oligonucleotide
cuaggcacuccuggcuagu

SEQ ID NO: 2750937 - RNA, 19 nt, Artificial Sequence
  Description of Artificial Sequence: Synthetic oligonucleotide
ucccucgcccacgccccuc

SEQ ID NO: 2750938 - RNA, 19 nt, Artificial Sequence
  Description of Artificial Sequence: Synthetic oligonucleotide
ccgugcuacguggcucagg

SEQ ID NO: 2750939 - RNA, 19 nt, Artificial Sequence
  Description of Artificial Sequence: Synthetic oligonucleotide
gcacuccuggcuaguugga

SEQ ID NO: 2750940 - RNA, 19 nt, Artificial Sequence
  Description of Artificial Sequence: Synthetic oligonucleotide
ggguggcacccggucuugc

SEQ ID NO: 2750941 - RNA, 19 nt, Artificial Sequence
  Description of Artificial Sequence: Synthetic oligonucleotide
ggguaccggguguccagcu

SEQ ID NO: 2750942 - RNA, 19 nt, Artificial Sequence
  Description of Artificial Sequence: Synthetic oligonucleotide
gcgggcacgugcaggcauc

SEQ ID NO: 2750943 - RNA, 19 nt, Artificial Sequence
  Description of Artificial Sequence: Synthetic oligonucleotide
gggcacgugcaggcaucgc

SEQ ID NO: 2750944 - RNA, 19 nt, Artificial Sequence
  Description of Artificial Sequence: Synthetic oligonucleotide
gccugaccccaggaacaac

SEQ ID NO: 2750945 - RNA, 19 nt, Artificial Sequence
  Description of Artificial Sequence: Synthetic oligonucleotide
cgggcacgugcaggcaucg

SEQ ID NO: 2750946 - RNA, 19 nt, Artificial Sequence
  Description of Artificial Sequence: Synthetic oligonucleotide
cccacgccccucagcugug

SEQ ID NO: 2750947 - RNA, 19 nt, Artificial Sequence
  Description of Artificial Sequence: Synthetic oligonucleotide
ggcgggcacgugcaggcau

SEQ ID NO: 2750948 - RNA, 19 nt, Artificial Sequence
  Description of Artificial Sequence: Synthetic oligonucleotide
cacccggucuugcuuuguu

SEQ ID NO: 2750949 - RNA, 19 nt, Artificial Sequence
  Description of Artificial Sequence: Synthetic oligonucleotide
gcugcucgucggggucccg

SEQ ID NO: 2750950 - RNA, 19 nt, Artificial Sequence
  Description of Artificial Sequence: Synthetic oligonucleotide
cugcucgucggggucccgu

SEQ ID NO: 2750951 - RNA, 19 nt, Artificial Sequence
  Description of Artificial Sequence: Synthetic oligonucleotide
ggcaggugacacaguugcu

SEQ ID NO: 2750952 - RNA, 19 nt, Artificial Sequence
  Description of Artificial Sequence: Synthetic oligonucleotide
cggggucccgugcuacgug

SEQ ID NO: 2750953 - RNA, 19 nt, Artificial Sequence
  Description of Artificial Sequence: Synthetic oligonucleotide
cgucggggucccgugcuac

SEQ ID NO: 2750954 - RNA, 19 nt, Artificial Sequence
  Description of Artificial Sequence: Synthetic oligonucleotide
ccacgccccucagcugugc

SEQ ID NO: 2750955 - RNA, 19 nt, Artificial Sequence
  Description of Artificial Sequence: Synthetic oligonucleotide
gccaccccucuccucgagu

SEQ ID NO: 2750956 - RNA, 19 nt, Artificial Sequence
  Description of Artificial Sequence: Synthetic oligonucleotide
caggggcaggugacacagu

SEQ ID NO: 2750957 - RNA, 19 nt, Artificial Sequence
  Description of Artificial Sequence: Synthetic oligonucleotide
cgugcaggcaucgcugucu

SEQ ID NO: 2750958 - RNA, 19 nt, Artificial Sequence
  Description of Artificial Sequence: Synthetic oligonucleotide
gucuccccucagagugaaa

SEQ ID NO: 2750959 - RNA, 19 nt, Artificial Sequence
  Description of Artificial Sequence: Synthetic oligonucleotide
ccucgcccacgccccucag

SEQ ID NO: 2750960 - RNA, 19 nt, Artificial Sequence
  Description of Artificial Sequence: Synthetic oligonucleotide
ccacgugcuuccaccacuu

SEQ ID NO: 2750961 - RNA, 19 nt, Artificial Sequence
  Description of Artificial Sequence: Synthetic oligonucleotide
gccuaacgauccccagaau

SEQ ID NO: 2750962 - RNA, 19 nt, Artificial Sequence
  Description of Artificial Sequence: Synthetic oligonucleotide
cacuugcaaggccgcccau

SEQ ID NO: 2750963 - RNA, 19 nt, Artificial Sequence
  Description of Artificial Sequence: Synthetic oligonucleotide
cccucgcccacgccccuca

SEQ ID NO: 2750964 - RNA, 19 nt, Artificial Sequence
  Description of Artificial Sequence: Synthetic oligonucleotide
cccgugcuacguggcucag

SEQ ID NO: 2750965 - RNA, 19 nt, Artificial Sequence
  Description of Artificial Sequence: Synthetic oligonucleotide
gggcgggcacgugcaggca

SEQ ID NO: 2750966 - RNA, 19 nt, Artificial Sequence
  Description of Artificial Sequence: Synthetic oligonucleotide
ccacuuccacgugcuucca

SEQ ID NO: 2750967 - RNA, 19 nt, Artificial Sequence
  Description of Artificial Sequence: Synthetic oligonucleotide
cgcccacgccccucagcug

SEQ ID NO: 2750968 - RNA, 19 nt, Artificial Sequence
  Description of Artificial Sequence: Synthetic oligonucleotide
cagccacccugggcacaca

SEQ ID NO: 2750969 - RNA, 19 nt, Artificial Sequence
  Description of Artificial Sequence: Synthetic oligonucleotide
cggucuugcuuuguuuggu

SEQ ID NO: 2750970 - RNA, 19 nt, Artificial Sequence
  Description of Artificial Sequence: Synthetic oligonucleotide
cucccucgcccacgccccu

SEQ ID NO: 2750971 - RNA, 19 nt, Artificial Sequence
  Description of Artificial Sequence: Synthetic oligonucleotide
cccuuccuucaggccagca

SEQ ID NO: 2750972 - RNA, 19 nt, Artificial Sequence
  Description of Artificial Sequence: Synthetic oligonucleotide
ccacagcagugcugcucgu

SEQ ID NO: 2750973 - RNA, 19 nt, Artificial Sequence
  Description of Artificial Sequence: Synthetic oligonucleotide
auucgauuaauccagaggg

SEQ ID NO: 2750974 - RNA, 19 nt, Artificial Sequence
  Description of Artificial Sequence: Synthetic oligonucleotide
uguaauucgauuaauccag

SEQ ID NO: 2750975 - RNA, 19 nt, Artificial Sequence
  Description of Artificial Sequence: Synthetic oligonucleotide
uaaauaaauacaaaucaga

SEQ ID NO: 2750976 - RNA, 19 nt, Artificial Sequence
  Description of Artificial Sequence: Synthetic oligonucleotide
aauucgauuaauccagagg

SEQ ID NO: 2750977 - RNA, 19 nt, Artificial Sequence
  Description of Artificial Sequence: Synthetic oligonucleotide
aagauuuaaaagucuuugg

SEQ ID NO: 2750978 - RNA, 19 nt, Artificial Sequence
  Description of Artificial Sequence: Synthetic oligonucleotide
uggcacuuaauuaaguugg

SEQ ID NO: 2750979 - RNA, 19 nt, Artificial Sequence
  Description of Artificial Sequence: Synthetic oligonucleotide
uuaacgaaggcucugguca

SEQ ID NO: 2750980 - RNA, 19 nt, Artificial Sequence
  Description of Artificial Sequence: Synthetic oligonucleotide
cuuguuuauaacaaucucc

SEQ ID NO: 2750981 - RNA, 19 nt, Artificial Sequence
  Description of Artificial Sequence: Synthetic oligonucleotide
auacaaaucagacuuacug

SEQ ID NO: 2750982 - RNA, 19 nt, Artificial Sequence
  Description of Artificial Sequence: Synthetic oligonucleotide
aaugcuggguacuguaagc

SEQ ID NO: 2750983 - RNA, 19 nt, Artificial Sequence
  Description of Artificial Sequence: Synthetic oligonucleotide
uacaaaucagacuuacugg

SEQ ID NO: 2750984 - RNA, 19 nt, Artificial Sequence
  Description of Artificial Sequence: Synthetic oligonucleotide
agcaaauccuucuugcugc

SEQ ID NO: 2750985 - RNA, 19 nt, Artificial Sequence
  Description of Artificial Sequence: Synthetic oligonucleotide
aaauacaaaucagacuuac

SEQ ID NO: 2750986 - RNA, 19 nt, Artificial Sequence
  Description of Artificial Sequence: Synthetic oligonucleotide
aagucuuugguucauagau

SEQ ID NO: 2750987 - RNA, 19 nt, Artificial Sequence
  Description of Artificial Sequence: Synthetic oligonucleotide
ugcuaaaauauaaauaaau

SEQ ID NO: 2750988 - RNA, 19 nt, Artificial Sequence
  Description of Artificial Sequence: Synthetic oligonucleotide
aaaagucuuugguucauag

SEQ ID NO: 2750989 - RNA, 19 nt, Artificial Sequence
  Description of Artificial Sequence: Synthetic oligonucleotide
auuaaguuggcaaugaaug

SEQ ID NO: 2750990 - RNA, 19 nt, Artificial Sequence
  Description of Artificial Sequence: Synthetic oligonucleotide
uucauagauggccaggucc

SEQ ID NO: 2750991 - RNA, 19 nt, Artificial Sequence
  Description of Artificial Sequence: Synthetic oligonucleotide
agauuuaaaagucuuuggu

SEQ ID NO: 2750992 - RNA, 19 nt, Artificial Sequence
  Description of Artificial Sequence: Synthetic oligonucleotide
gucuuugguucauagaugg

SEQ ID NO: 2750993 - RNA, 19 nt, Artificial Sequence
  Description of Artificial Sequence: Synthetic oligonucleotide
accacucuggaaaagaugc

SEQ ID NO: 2750994 - RNA, 19 nt, Artificial Sequence
  Description of Artificial Sequence: Synthetic oligonucleotide
ugugaugcgguuccgaagc

SEQ ID NO: 2750995 - RNA, 19 nt, Artificial Sequence
  Description of Artificial Sequence: Synthetic oligonucleotide
uguugcuaaaauauaaaua

SEQ ID NO: 2750996 - RNA, 19 nt, Artificial Sequence
  Description of Artificial Sequence: Synthetic oligonucleotide
guuuauaacaaucuccaca

SEQ ID NO: 2750997 - RNA, 19 nt, Artificial Sequence
  Description of Artificial Sequence: Synthetic oligonucleotide
aauccuucugcuccuaucu

SEQ ID NO: 2750998 - RNA, 19 nt, Artificial Sequence
  Description of Artificial Sequence: Synthetic oligonucleotide
acaaaucagacuuacuggu

SEQ ID NO: 2750999 - RNA, 19 nt, Artificial Sequence
  Description of Artificial Sequence: Synthetic oligonucleotide
uuaaguuggcaaugaaugc

SEQ ID NO: 2751000 - RNA, 19 nt, Artificial Sequence
  Description of Artificial Sequence: Synthetic oligonucleotide
agcacugaagccuucagug

SEQ ID NO: 2751001 - RNA, 19 nt, Artificial Sequence
  Description of Artificial Sequence: Synthetic oligonucleotide
uccuaucuuguuuauaaca

SEQ ID NO: 2751002 - RNA, 19 nt, Artificial Sequence
  Description of Artificial Sequence: Synthetic oligonucleotide
aaagaugcccucaggcucc

SEQ ID NO: 2751003 - RNA, 19 nt, Artificial Sequence
  Description of Artificial Sequence: Synthetic oligonucleotide
uccucuuagccaaagcugc

SEQ ID NO: 2751004 - RNA, 19 nt, Artificial Sequence
  Description of Artificial Sequence: Synthetic oligonucleotide
uuugguucauagauggcca

SEQ ID NO: 2751005 - RNA, 19 nt, Artificial Sequence
  Description of Artificial Sequence: Synthetic oligonucleotide
uccugaacccgccaaaagc

SEQ ID NO: 2751006 - RNA, 19 nt, Artificial Sequence
  Description of Artificial Sequence: Synthetic oligonucleotide
ucuuguuuauaacaaucuc

SEQ ID NO: 2751007 - RNA, 19 nt, Artificial Sequence
  Description of Artificial Sequence: Synthetic oligonucleotide
cuuugguucauagauggcc

SEQ ID NO: 2751008 - RNA, 19 nt, Artificial Sequence
  Description of Artificial Sequence: Synthetic oligonucleotide
ucauagauggccaggucca

SEQ ID NO: 2751009 - RNA, 19 nt, Artificial Sequence
  Description of Artificial Sequence: Synthetic oligonucleotide
cuggucaccgcccugacgg

SEQ ID NO: 2751010 - RNA, 19 nt, Artificial Sequence
  Description of Artificial Sequence: Synthetic oligonucleotide
aaagcggucugugaugcgg

SEQ ID NO: 2751011 - RNA, 19 nt, Artificial Sequence
  Description of Artificial Sequence: Synthetic oligonucleotide
uccacaaguaccuuccugu

SEQ ID NO: 2751012 - RNA, 19 nt, Artificial Sequence
  Description of Artificial Sequence: Synthetic oligonucleotide
aaagcugccaaagauuuaa

SEQ ID NO: 2751013 - RNA, 19 nt, Artificial Sequence
  Description of Artificial Sequence: Synthetic oligonucleotide
aauuaaguuggcaaugaau

SEQ ID NO: 2751014 - RNA, 19 nt, Artificial Sequence
  Description of Artificial Sequence: Synthetic oligonucleotide
ugccaaagauuuaaaaguc

SEQ ID NO: 2751015 - RNA, 19 nt, Artificial Sequence
  Description of Artificial Sequence: Synthetic oligonucleotide
aaagucuuugguucauaga

SEQ ID NO: 2751016 - RNA, 19 nt, Artificial Sequence
  Description of Artificial Sequence: Synthetic oligonucleotide
uuagccaaagcugccaaag

SEQ ID NO: 2751017 - RNA, 19 nt, Artificial Sequence
  Description of Artificial Sequence: Synthetic oligonucleotide
cuguaagccauguuccugg

SEQ ID NO: 2751018 - RNA, 19 nt, Artificial Sequence
  Description of Artificial Sequence: Synthetic oligonucleotide
aauccagaggguccucagg

SEQ ID NO: 2751019 - RNA, 19 nt, Artificial Sequence
  Description of Artificial Sequence: Synthetic oligonucleotide
uaauucgauuaauccagag

SEQ ID NO: 2751020 - RNA, 19 nt, Artificial Sequence
  Description of Artificial Sequence: Synthetic oligonucleotide
gaccagacaauccuucugc

SEQ ID NO: 2751021 - RNA, 19 nt, Artificial Sequence
  Description of Artificial Sequence: Synthetic oligonucleotide
gcugccaaagauuuaaaag

SEQ ID NO: 2751022 - RNA, 19 nt, Artificial Sequence
  Description of Artificial Sequence: Synthetic oligonucleotide
ugaaaugccgagcauguuu

SEQ ID NO: 2751023 - RNA, 19 nt, Artificial Sequence
  Description of Artificial Sequence: Synthetic oligonucleotide
uaaguuggcaaugaaugcu

SEQ ID NO: 2751024 - RNA, 19 nt, Artificial Sequence
  Description of Artificial Sequence: Synthetic oligonucleotide
ugguacugcaccacucugg

SEQ ID NO: 2751025 - RNA, 19 nt, Artificial Sequence
  Description of Artificial Sequence: Synthetic oligonucleotide
ugaggaauaccauggugug

SEQ ID NO: 2751026 - RNA, 19 nt, Artificial Sequence
  Description of Artificial Sequence: Synthetic oligonucleotide
gaaugcuggguacuguaag

SEQ ID NO: 2751027 - RNA, 19 nt, Artificial Sequence
  Description of Artificial Sequence: Synthetic oligonucleotide
augccgagcauguuucagc

SEQ ID NO: 2751028 - RNA, 19 nt, Artificial Sequence
  Description of Artificial Sequence: Synthetic oligonucleotide
ggaaaagaugcccucaggc

SEQ ID NO: 2751029 - RNA, 19 nt, Artificial Sequence
  Description of Artificial Sequence: Synthetic oligonucleotide
ugcguacacuuaacgaagg

SEQ ID NO: 2751030 - RNA, 19 nt, Artificial Sequence
  Description of Artificial Sequence: Synthetic oligonucleotide
cuggcacuuaauuaaguug

SEQ ID NO: 2751031 - RNA, 19 nt, Artificial Sequence
  Description of Artificial Sequence: Synthetic oligonucleotide
ucagguuccgcuucuucag

SEQ ID NO: 2751032 - RNA, 19 nt, Artificial Sequence
  Description of Artificial Sequence: Synthetic oligonucleotide
gucgugaggaauaccaugg

SEQ ID NO: 2751033 - RNA, 19 nt, Artificial Sequence
  Description of Artificial Sequence: Synthetic oligonucleotide
acggccagccgauagcagc

SEQ ID NO: 2751034 - RNA, 19 nt, Artificial Sequence
  Description of Artificial Sequence: Synthetic oligonucleotide
ucccuugaaaugccgagca

SEQ ID NO: 2751035 - RNA, 19 nt, Artificial Sequence
  Description of Artificial Sequence: Synthetic oligonucleotide
ucagacuuacuggugacca

SEQ ID NO: 2751036 - RNA, 19 nt, Artificial Sequence
  Description of Artificial Sequence: Synthetic oligonucleotide
cuuacuggugaccagacaa

SEQ ID NO: 2751037 - RNA, 19 nt, Artificial Sequence
  Description of Artificial Sequence: Synthetic oligonucleotide
aggaauaccauggugugcu

SEQ ID NO: 2751038 - RNA, 19 nt, Artificial Sequence
  Description of Artificial Sequence: Synthetic oligonucleotide
uacacuuaacgaaggcucu

SEQ ID NO: 2751039 - RNA, 19 nt, Artificial Sequence
  Description of Artificial Sequence: Synthetic oligonucleotide
uuccuguugagcuccaccu

SEQ ID NO: 2751040 - RNA, 19 nt, Artificial Sequence
  Description of Artificial Sequence: Synthetic oligonucleotide
augcuggguacuguaagcc

SEQ ID NO: 2751041 - RNA, 19 nt, Artificial Sequence
  Description of Artificial Sequence: Synthetic oligonucleotide
uguuucagcaccuccugaa

SEQ ID NO: 2751042 - RNA, 19 nt, Artificial Sequence
  Description of Artificial Sequence: Synthetic oligonucleotide
ucugcuccuaucuuguuua

SEQ ID NO: 2751043 - RNA, 19 nt, Artificial Sequence
  Description of Artificial Sequence: Synthetic oligonucleotide
uaauuaaguuggcaaugaa

SEQ ID NO: 2751044 - RNA, 19 nt, Artificial Sequence
  Description of Artificial Sequence: Synthetic oligonucleotide
cugcguacacuuaacgaag

SEQ ID NO: 2751045 - RNA, 19 nt, Artificial Sequence
  Description of Artificial Sequence: Synthetic oligonucleotide
cacuuaauuaaguuggcaa

SEQ ID NO: 2751046 - RNA, 19 nt, Artificial Sequence
  Description of Artificial Sequence: Synthetic oligonucleotide
aaguuggcaaugaaugcug

SEQ ID NO: 2751047 - RNA, 19 nt, Artificial Sequence
  Description of Artificial Sequence: Synthetic oligonucleotide
agcagcgauucuuccuucc

SEQ ID NO: 2751048 - RNA, 19 nt, Artificial Sequence
  Description of Artificial Sequence: Synthetic oligonucleotide
uucgauuaauccagagggu

SEQ ID NO: 2751049 - RNA, 19 nt, Artificial Sequence
  Description of Artificial Sequence: Synthetic oligonucleotide
acuggugaccagacaaucc

SEQ ID NO: 2751050 - RNA, 19 nt, Artificial Sequence
  Description of Artificial Sequence: Synthetic oligonucleotide
ucgauuaauccagaggguc

SEQ ID NO: 2751051 - RNA, 19 nt, Artificial Sequence
  Description of Artificial Sequence: Synthetic oligonucleotide
guacacuuaacgaaggcuc

SEQ ID NO: 2751052 - RNA, 19 nt, Artificial Sequence
  Description of Artificial Sequence: Synthetic oligonucleotide
aaugccgagcauguuucag

SEQ ID NO: 2751053 - RNA, 19 nt, Artificial Sequence
  Description of Artificial Sequence: Synthetic oligonucleotide
cuccucuuagccaaagcug

SEQ ID NO: 2751054 - RNA, 19 nt, Artificial Sequence
  Description of Artificial Sequence: Synthetic oligonucleotide
aaaagcggucugugaugcg

SEQ ID NO: 2751055 - RNA, 19 nt, Artificial Sequence
  Description of Artificial Sequence: Synthetic oligonucleotide
uguaagccauguuccuggg

SEQ ID NO: 2751056 - RNA, 19 nt, Artificial Sequence
  Description of Artificial Sequence: Synthetic oligonucleotide
caaaucagacuuacuggug

SEQ ID NO: 2751057 - RNA, 19 nt, Artificial Sequence
  Description of Artificial Sequence: Synthetic oligonucleotide
aauacaaaucagacuuacu

SEQ ID NO: 2751058 - RNA, 19 nt, Artificial Sequence
  Description of Artificial Sequence: Synthetic oligonucleotide
caaaagcggucugugaugc

SEQ ID NO: 2751059 - RNA, 19 nt, Artificial Sequence
  Description of Artificial Sequence: Synthetic oligonucleotide
cugccaaagauuuaaaagu

SEQ ID NO: 2751060 - RNA, 19 nt, Artificial Sequence
  Description of Artificial Sequence: Synthetic oligonucleotide
cuucccuugaaaugccgag

SEQ ID NO: 2751061 - RNA, 19 nt, Artificial Sequence
  Description of Artificial Sequence: Synthetic oligonucleotide
aaggcucuggucaccgccc

SEQ ID NO: 2751062 - RNA, 19 nt, Artificial Sequence
  Description of Artificial Sequence: Synthetic oligonucleotide
cuuaacgaaggcucugguc

SEQ ID NO: 2751063 - RNA, 19 nt, Artificial Sequence
  Description of Artificial Sequence: Synthetic oligonucleotide
ccugaacccgccaaaagcg

SEQ ID NO: 2751064 - RNA, 19 nt, Artificial Sequence
  Description of Artificial Sequence: Synthetic oligonucleotide
gaaaugccgagcauguuuc

SEQ ID NO: 2751065 - RNA, 19 nt, Artificial Sequence
  Description of Artificial Sequence: Synthetic oligonucleotide
gaaaagaugcccucaggcu

SEQ ID NO: 2751066 - RNA, 19 nt, Artificial Sequence
  Description of Artificial Sequence: Synthetic oligonucleotide
cuugcugccuccucuuagc

SEQ ID NO: 2751067 - RNA, 19 nt, Artificial Sequence
  Description of Artificial Sequence: Synthetic oligonucleotide
auagcagcgauucuuccuu

SEQ ID NO: 2751068 - RNA, 19 nt, Artificial Sequence
  Description of Artificial Sequence: Synthetic oligonucleotide
agugguacugcaccacucu

SEQ ID NO: 2751069 - RNA, 19 nt, Artificial Sequence
  Description of Artificial Sequence: Synthetic oligonucleotide
aaagcugcagcaaauccuu

SEQ ID NO: 2751070 - RNA, 19 nt, Artificial Sequence
  Description of Artificial Sequence: Synthetic oligonucleotide
aacgaaggcucuggucacc

SEQ ID NO: 2751071 - RNA, 19 nt, Artificial Sequence
  Description of Artificial Sequence: Synthetic oligonucleotide
ucuuugguucauagauggc

SEQ ID NO: 2751072 - RNA, 19 nt, Artificial Sequence
  Description of Artificial Sequence: Synthetic oligonucleotide
ucuggaaaagaugcccuca

SEQ ID NO: 2751073 - RNA, 19 nt, Artificial Sequence
  Description of Artificial Sequence: Synthetic oligonucleotide
aaugaaugcuggguacugu

SEQ ID NO: 2751074 - RNA, 19 nt, Artificial Sequence
  Description of Artificial Sequence: Synthetic oligonucleotide
uucuuccuucccuugaaau

SEQ ID NO: 2751075 - RNA, 19 nt, Artificial Sequence
  Description of Artificial Sequence: Synthetic oligonucleotide
agccauguuccugggaggc

SEQ ID NO: 2751076 - RNA, 19 nt, Artificial Sequence
  Description of Artificial Sequence: Synthetic oligonucleotide
uccaccuggcacuuaauua

SEQ ID NO: 2751077 - RNA, 19 nt, Artificial Sequence
  Description of Artificial Sequence: Synthetic oligonucleotide
gaugcgguuccgaagccag

SEQ ID NO: 2751078 - RNA, 19 nt, Artificial Sequence
  Description of Artificial Sequence: Synthetic oligonucleotide
cuuccuguugagcuccacc

SEQ ID NO: 2751079 - RNA, 19 nt, Artificial Sequence
  Description of Artificial Sequence: Synthetic oligonucleotide
ugccgagcauguuucagca

SEQ ID NO: 2751080 - RNA, 19 nt, Artificial Sequence
  Description of Artificial Sequence: Synthetic oligonucleotide
uccuucccuugaaaugccg

SEQ ID NO: 2751081 - RNA, 19 nt, Artificial Sequence
  Description of Artificial Sequence: Synthetic oligonucleotide
cugaacccgccaaaagcgg

SEQ ID NO: 2751082 - RNA, 19 nt, Artificial Sequence
  Description of Artificial Sequence: Synthetic oligonucleotide
ugguucauagauggccagg

SEQ ID NO: 2751083 - RNA, 19 nt, Artificial Sequence
  Description of Artificial Sequence: Synthetic oligonucleotide
gaauaccauggugugcucc

SEQ ID NO: 2751084 - RNA, 19 nt, Artificial Sequence
  Description of Artificial Sequence: Synthetic oligonucleotide
ucugugaugcgguuccgaa

SEQ ID NO: 2751085 - RNA, 19 nt, Artificial Sequence
  Description of Artificial Sequence: Synthetic oligonucleotide
ugaacccgccaaaagcggu

SEQ ID NO: 2751086 - RNA, 19 nt, Artificial Sequence
  Description of Artificial Sequence: Synthetic oligonucleotide
uggcaaugaaugcugggua

SEQ ID NO: 2751087 - RNA, 19 nt, Artificial Sequence
  Description of Artificial Sequence: Synthetic oligonucleotide
cauguuucagcaccuccug

SEQ ID NO: 2751088 - RNA, 19 nt, Artificial Sequence
  Description of Artificial Sequence: Synthetic oligonucleotide
ucuggucaccgcccugacg

SEQ ID NO: 2751089 - RNA, 19 nt, Artificial Sequence
  Description of Artificial Sequence: Synthetic oligonucleotide
uccgcuucuucagucugcg

SEQ ID NO: 2751090 - RNA, 19 nt, Artificial Sequence
  Description of Artificial Sequence: Synthetic oligonucleotide
uacuguaagccauguuccu

SEQ ID NO: 2751091 - RNA, 19 nt, Artificial Sequence
  Description of Artificial Sequence: Synthetic oligonucleotide
uuaauccagaggguccuca

SEQ ID NO: 2751092 - RNA, 19 nt, Artificial Sequence
  Description of Artificial Sequence: Synthetic oligonucleotide
aaaugccgagcauguuuca

SEQ ID NO: 2751093 - RNA, 19 nt, Artificial Sequence
  Description of Artificial Sequence: Synthetic oligonucleotide
cacuuaacgaaggcucugg

SEQ ID NO: 2751094 - RNA, 19 nt, Artificial Sequence
  Description of Artificial Sequence: Synthetic oligonucleotide
ugcgguuccgaagccagag

SEQ ID NO: 2751095 - RNA, 19 nt, Artificial Sequence
  Description of Artificial Sequence: Synthetic oligonucleotide
ugcuggguacuguaagcca

SEQ ID NO: 2751096 - RNA, 19 nt, Artificial Sequence
  Description of Artificial Sequence: Synthetic oligonucleotide
uuaaaagucuuugguucau

SEQ ID NO: 2751097 - RNA, 19 nt, Artificial Sequence
  Description of Artificial Sequence: Synthetic oligonucleotide
guugagcuccaccuggcac

SEQ ID NO: 2751098 - RNA, 19 nt, Artificial Sequence
  Description of Artificial Sequence: Synthetic oligonucleotide
acuguaagccauguuccug

SEQ ID NO: 2751099 - RNA, 19 nt, Artificial Sequence
  Description of Artificial Sequence: Synthetic oligonucleotide
uucccuugaaaugccgagc

SEQ ID NO: 2751100 - RNA, 19 nt, Artificial Sequence
  Description of Artificial Sequence: Synthetic oligonucleotide
ccuucagugguacugcacc

SEQ ID NO: 2751101 - RNA, 19 nt, Artificial Sequence
  Description of Artificial Sequence: Synthetic oligonucleotide
aggccuguugcuaaaauau

SEQ ID NO: 2751102 - RNA, 19 nt, Artificial Sequence
  Description of Artificial Sequence: Synthetic oligonucleotide
augaaugcuggguacugua

SEQ ID NO: 2751103 - RNA, 19 nt, Artificial Sequence
  Description of Artificial Sequence: Synthetic oligonucleotide
acaaucuccacagcacuga

SEQ ID NO: 2751104 - RNA, 19 nt, Artificial Sequence
  Description of Artificial Sequence: Synthetic oligonucleotide
uaacgaaggcucuggucac

SEQ ID NO: 2751105 - RNA, 19 nt, Artificial Sequence
  Description of Artificial Sequence: Synthetic oligonucleotide
gauagcagcgauucuuccu

SEQ ID NO: 2751106 - RNA, 19 nt, Artificial Sequence
  Description of Artificial Sequence: Synthetic oligonucleotide
acuuaacgaaggcucuggu

SEQ ID NO: 2751107 - RNA, 19 nt, Artificial Sequence
  Description of Artificial Sequence: Synthetic oligonucleotide
cagaggguccucagguucc

SEQ ID NO: 2751108 - RNA, 19 nt, Artificial Sequence
  Description of Artificial Sequence: Synthetic oligonucleotide
cacaaguaccuuccuguug

SEQ ID NO: 2751109 - RNA, 19 nt, Artificial Sequence
  Description of Artificial Sequence: Synthetic oligonucleotide
agacuuacuggugaccaga

SEQ ID NO: 2751110 - RNA, 19 nt, Artificial Sequence
  Description of Artificial Sequence: Synthetic oligonucleotide
cuccuaucuuguuuauaac

SEQ ID NO: 2751111 - RNA, 19 nt, Artificial Sequence
  Description of Artificial Sequence: Synthetic oligonucleotide
cugugaugcgguuccgaag

SEQ ID NO: 2751112 - RNA, 19 nt, Artificial Sequence
  Description of Artificial Sequence: Synthetic oligonucleotide
agucuuugguucauagaug

SEQ ID NO: 2751113 - RNA, 19 nt, Artificial Sequence
  Description of Artificial Sequence: Synthetic oligonucleotide
cuugaaaugccgagcaugu

SEQ ID NO: 2751114 - RNA, 19 nt, Artificial Sequence
  Description of Artificial Sequence: Synthetic oligonucleotide
gcuccuaucuuguuuauaa

SEQ ID NO: 2751115 - RNA, 19 nt, Artificial Sequence
  Description of Artificial Sequence: Synthetic oligonucleotide
uuccgcuucuucagucugc

SEQ ID NO: 2751116 - RNA, 19 nt, Artificial Sequence
  Description of Artificial Sequence: Synthetic oligonucleotide
guuccgaagccagagccgc

SEQ ID NO: 2751117 - RNA, 19 nt, Artificial Sequence
  Description of Artificial Sequence: Synthetic oligonucleotide
gaggaauaccauggugugc

SEQ ID NO: 2751118 - RNA, 19 nt, Artificial Sequence
  Description of Artificial Sequence: Synthetic oligonucleotide
ucgugaggaauaccauggu

SEQ ID NO: 2751119 - RNA, 19 nt, Artificial Sequence
  Description of Artificial Sequence: Synthetic oligonucleotide
ccgagcauguuucagcacc

SEQ ID NO: 2751120 - RNA, 19 nt, Artificial Sequence
  Description of Artificial Sequence: Synthetic oligonucleotide
caccuggcacuuaauuaag

SEQ ID NO: 2751121 - RNA, 19 nt, Artificial Sequence
  Description of Artificial Sequence: Synthetic oligonucleotide
caauccuucugcuccuauc

SEQ ID NO: 2751122 - RNA, 19 nt, Artificial Sequence
  Description of Artificial Sequence: Synthetic oligonucleotide
agacaauccuucugcuccu

SEQ ID NO: 2751123 - RNA, 19 nt, Artificial Sequence
  Description of Artificial Sequence: Synthetic oligonucleotide
ccuguugagcuccaccugg

SEQ ID NO: 2751124 - RNA, 19 nt, Artificial Sequence
  Description of Artificial Sequence: Synthetic oligonucleotide
cuguugagcuccaccuggc

SEQ ID NO: 2751125 - RNA, 19 nt, Artificial Sequence
  Description of Artificial Sequence: Synthetic oligonucleotide
ucaggccuguugcuaaaau

SEQ ID NO: 2751126 - RNA, 19 nt, Artificial Sequence
  Description of Artificial Sequence: Synthetic oligonucleotide
cucuggaaaagaugcccuc

SEQ ID NO: 2751127 - RNA, 19 nt, Artificial Sequence
  Description of Artificial Sequence: Synthetic oligonucleotide
uuccgaagccagagccgcg

SEQ ID NO: 2751128 - RNA, 19 nt, Artificial Sequence
  Description of Artificial Sequence: Synthetic oligonucleotide
caaugaaugcuggguacug

SEQ ID NO: 2751129 - RNA, 19 nt, Artificial Sequence
  Description of Artificial Sequence: Synthetic oligonucleotide
gauuaauccagaggguccu

SEQ ID NO: 2751130 - RNA, 19 nt, Artificial Sequence
  Description of Artificial Sequence: Synthetic oligonucleotide
uacuggugaccagacaauc

SEQ ID NO: 2751131 - RNA, 19 nt, Artificial Sequence
  Description of Artificial Sequence: Synthetic oligonucleotide
acuuacuggugaccagaca

SEQ ID NO: 2751132 - RNA, 19 nt, Artificial Sequence
  Description of Artificial Sequence: Synthetic oligonucleotide
uucagugguacugcaccac

SEQ ID NO: 2751133 - RNA, 19 nt, Artificial Sequence
  Description of Artificial Sequence: Synthetic oligonucleotide
auuaauccagaggguccuc

SEQ ID NO: 2751134 - RNA, 19 nt, Artificial Sequence
  Description of Artificial Sequence: Synthetic oligonucleotide
acgaaggcucuggucaccg

SEQ ID NO: 2751135 - RNA, 19 nt, Artificial Sequence
  Description of Artificial Sequence: Synthetic oligonucleotide
cagacuuacuggugaccag

SEQ ID NO: 2751136 - RNA, 19 nt, Artificial Sequence
  Description of Artificial Sequence: Synthetic oligonucleotide
agcgauucuuccuucccuu

SEQ ID NO: 2751137 - RNA, 19 nt, Artificial Sequence
  Description of Artificial Sequence: Synthetic oligonucleotide
ugacggccagccgauagca

SEQ ID NO: 2751138 - RNA, 19 nt, Artificial Sequence
  Description of Artificial Sequence: Synthetic oligonucleotide
agucugcgggccugcguac

SEQ ID NO: 2751139 - RNA, 19 nt, Artificial Sequence
  Description of Artificial Sequence: Synthetic oligonucleotide
cuggguacuguaagccaug

SEQ ID NO: 2751140 - RNA, 19 nt, Artificial Sequence
  Description of Artificial Sequence: Synthetic oligonucleotide
cagccgauagcagcgauuc

SEQ ID NO: 2751141 - RNA, 19 nt, Artificial Sequence
  Description of Artificial Sequence: Synthetic oligonucleotide
cagguccacaaguaccuuc

SEQ ID NO: 2751142 - RNA, 19 nt, Artificial Sequence
  Description of Artificial Sequence: Synthetic oligonucleotide
ugcccucaggcuccuuucc

SEQ ID NO: 2751143 - RNA, 19 nt, Artificial Sequence
  Description of Artificial Sequence: Synthetic oligonucleotide
cugacggccagccgauagc

SEQ ID NO: 2751144 - RNA, 19 nt, Artificial Sequence
  Description of Artificial Sequence: Synthetic oligonucleotide
cuccugaacccgccaaaag

SEQ ID NO: 2751145 - RNA, 19 nt, Artificial Sequence
  Description of Artificial Sequence: Synthetic oligonucleotide
agcaccuccugaacccgcc

SEQ ID NO: 2751146 - RNA, 19 nt, Artificial Sequence
  Description of Artificial Sequence: Synthetic oligonucleotide
gacuuacuggugaccagac

SEQ ID NO: 2751147 - RNA, 19 nt, Artificial Sequence
  Description of Artificial Sequence: Synthetic oligonucleotide
cgauuaauccagagggucc

SEQ ID NO: 2751148 - RNA, 19 nt, Artificial Sequence
  Description of Artificial Sequence: Synthetic oligonucleotide
accgcccugacggccagcc

SEQ ID NO: 2751149 - RNA, 19 nt, Artificial Sequence
  Description of Artificial Sequence: Synthetic oligonucleotide
gguacugcaccacucugga

SEQ ID NO: 2751150 - RNA, 19 nt, Artificial Sequence
  Description of Artificial Sequence: Synthetic oligonucleotide
ugaugcgguuccgaagcca

SEQ ID NO: 2751151 - RNA, 19 nt, Artificial Sequence
  Description of Artificial Sequence: Synthetic oligonucleotide
agcuccaccuggcacuuaa

SEQ ID NO: 2751152 - RNA, 19 nt, Artificial Sequence
  Description of Artificial Sequence: Synthetic oligonucleotide
cuucagugguacugcacca

SEQ ID NO: 2751153 - RNA, 19 nt, Artificial Sequence
  Description of Artificial Sequence: Synthetic oligonucleotide
ccuugaaaugccgagcaug

SEQ ID NO: 2751154 - RNA, 19 nt, Artificial Sequence
  Description of Artificial Sequence: Synthetic oligonucleotide
ggccugcguacacuuaacg

SEQ ID NO: 2751155 - RNA, 19 nt, Artificial Sequence
  Description of Artificial Sequence: Synthetic oligonucleotide
ucagucugcgggccugcgu

SEQ ID NO: 2751156 - RNA, 19 nt, Artificial Sequence
  Description of Artificial Sequence: Synthetic oligonucleotide
guaccuuccuguugagcuc

SEQ ID NO: 2751157 - RNA, 19 nt, Artificial Sequence
  Description of Artificial Sequence: Synthetic oligonucleotide
guucauagauggccagguc

SEQ ID NO: 2751158 - RNA, 19 nt, Artificial Sequence
  Description of Artificial Sequence: Synthetic oligonucleotide
guaauucgauuaauccaga

SEQ ID NO: 2751159 - RNA, 19 nt, Artificial Sequence
  Description of Artificial Sequence: Synthetic oligonucleotide
uggugaccagacaauccuu

SEQ ID NO: 2751160 - RNA, 19 nt, Artificial Sequence
  Description of Artificial Sequence: Synthetic oligonucleotide
aacccgccaaaagcggucu

SEQ ID NO: 2751161 - RNA, 19 nt, Artificial Sequence
  Description of Artificial Sequence: Synthetic oligonucleotide
ugaagccuucagugguacu

SEQ ID NO: 2751162 - RNA, 19 nt, Artificial Sequence
  Description of Artificial Sequence: Synthetic oligonucleotide
ccaaaagcggucugugaug

SEQ ID NO: 2751163 - RNA, 19 nt, Artificial Sequence
  Description of Artificial Sequence: Synthetic oligonucleotide
ucugcgggccugcguacac

SEQ ID NO: 2751164 - RNA, 19 nt, Artificial Sequence
  Description of Artificial Sequence: Synthetic oligonucleotide
ccugcguacacuuaacgaa

SEQ ID NO: 2751165 - RNA, 19 nt, Artificial Sequence
  Description of Artificial Sequence: Synthetic oligonucleotide
cuggugaccagacaauccu

SEQ ID NO: 2751166 - RNA, 19 nt, Artificial Sequence
  Description of Artificial Sequence: Synthetic oligonucleotide
gguuccgaagccagagccg

SEQ ID NO: 2751167 - RNA, 19 nt, Artificial Sequence
  Description of Artificial Sequence: Synthetic oligonucleotide
uggguacuguaagccaugu

SEQ ID NO: 2751168 - RNA, 19 nt, Artificial Sequence
  Description of Artificial Sequence: Synthetic oligonucleotide
uccgaagccagagccgcgu

SEQ ID NO: 2751169 - RNA, 19 nt, Artificial Sequence
  Description of Artificial Sequence: Synthetic oligonucleotide
cugaagccuucagugguac

SEQ ID NO: 2751170 - RNA, 19 nt, Artificial Sequence
  Description of Artificial Sequence: Synthetic oligonucleotide
agaggguccucagguuccg

SEQ ID NO: 2751171 - RNA, 19 nt, Artificial Sequence
  Description of Artificial Sequence: Synthetic oligonucleotide
gaacccgccaaaagcgguc

SEQ ID NO: 2751172 - RNA, 19 nt, Artificial Sequence
  Description of Artificial Sequence: Synthetic oligonucleotide
aagcggucugugaugcggu

SEQ ID NO: 2751173 - RNA, 19 nt, Artificial Sequence
  Description of Artificial Sequence: Synthetic oligonucleotide
aagccagagccgcgucgug

SEQ ID NO: 2751174 - RNA, 19 nt, Artificial Sequence
  Description of Artificial Sequence: Synthetic oligonucleotide
ggcugcuguaauucgauua

SEQ ID NO: 2751175 - RNA, 19 nt, Artificial Sequence
  Description of Artificial Sequence: Synthetic oligonucleotide
ucucaggccuguugcuaaa

SEQ ID NO: 2751176 - RNA, 19 nt, Artificial Sequence
  Description of Artificial Sequence: Synthetic oligonucleotide
gcaaauccuucuugcugcc

SEQ ID NO: 2751177 - RNA, 19 nt, Artificial Sequence
  Description of Artificial Sequence: Synthetic oligonucleotide
gcagcgauucuuccuuccc

SEQ ID NO: 2751178 - RNA, 19 nt, Artificial Sequence
  Description of Artificial Sequence: Synthetic oligonucleotide
agccuucagugguacugca

SEQ ID NO: 2751179 - RNA, 19 nt, Artificial Sequence
  Description of Artificial Sequence: Synthetic oligonucleotide
ggcacuuaauuaaguuggc

SEQ ID NO: 2751180 - RNA, 19 nt, Artificial Sequence
  Description of Artificial Sequence: Synthetic oligonucleotide
guaagccauguuccuggga

SEQ ID NO: 2751181 - RNA, 19 nt, Artificial Sequence
  Description of Artificial Sequence: Synthetic oligonucleotide
cacugaagccuucaguggu

SEQ ID NO: 2751182 - RNA, 19 nt, Artificial Sequence
  Description of Artificial Sequence: Synthetic oligonucleotide
gcguacacuuaacgaaggc

SEQ ID NO: 2751183 - RNA, 19 nt, Artificial Sequence
  Description of Artificial Sequence: Synthetic oligonucleotide
ccuguugcuaaaauauaaa

SEQ ID NO: 2751184 - RNA, 19 nt, Artificial Sequence
  Description of Artificial Sequence: Synthetic oligonucleotide
ccaccuggcacuuaauuaa

SEQ ID NO: 2751185 - RNA, 19 nt, Artificial Sequence
  Description of Artificial Sequence: Synthetic oligonucleotide
cuuagccaaagcugccaaa

SEQ ID NO: 2751186 - RNA, 19 nt, Artificial Sequence
  Description of Artificial Sequence: Synthetic oligonucleotide
gccugcguacacuuaacga

SEQ ID NO: 2751187 - RNA, 19 nt, Artificial Sequence
  Description of Artificial Sequence: Synthetic oligonucleotide
caggccuguugcuaaaaua

SEQ ID NO: 2751188 - RNA, 19 nt, Artificial Sequence
  Description of Artificial Sequence: Synthetic oligonucleotide
cauagauggccagguccac

SEQ ID NO: 2751189 - RNA, 19 nt, Artificial Sequence
  Description of Artificial Sequence: Synthetic oligonucleotide
uagcagcgauucuuccuuc

SEQ ID NO: 2751190 - RNA, 19 nt, Artificial Sequence
  Description of Artificial Sequence: Synthetic oligonucleotide
aagcugccaaagauuuaaa

SEQ ID NO: 2751191 - RNA, 19 nt, Artificial Sequence
  Description of Artificial Sequence: Synthetic oligonucleotide
gccagagccgcgucgugag

SEQ ID NO: 2751192 - RNA, 19 nt, Artificial Sequence
  Description of Artificial Sequence: Synthetic oligonucleotide
cgguuccgaagccagagcc

SEQ ID NO: 2751193 - RNA, 19 nt, Artificial Sequence
  Description of Artificial Sequence: Synthetic oligonucleotide
ugcgggccugcguacacuu

SEQ ID NO: 2751194 - RNA, 19 nt, Artificial Sequence
  Description of Artificial Sequence: Synthetic oligonucleotide
ccgauagcagcgauucuuc

SEQ ID NO: 2751195 - RNA, 19 nt, Artificial Sequence
  Description of Artificial Sequence: Synthetic oligonucleotide
uggucaccgcccugacggc

SEQ ID NO: 2751196 - RNA, 19 nt, Artificial Sequence
  Description of Artificial Sequence: Synthetic oligonucleotide
ugcuccuaucuuguuuaua

SEQ ID NO: 2751197 - RNA, 19 nt, Artificial Sequence
  Description of Artificial Sequence: Synthetic oligonucleotide
accuggcacuuaauuaagu

SEQ ID NO: 2751198 - RNA, 19 nt, Artificial Sequence
  Description of Artificial Sequence: Synthetic oligonucleotide
uugaaaugccgagcauguu

SEQ ID NO: 2751199 - RNA, 19 nt, Artificial Sequence
  Description of Artificial Sequence: Synthetic oligonucleotide
gugaccagacaauccuucu

SEQ ID NO: 2751200 - RNA, 19 nt, Artificial Sequence
  Description of Artificial Sequence: Synthetic oligonucleotide
cgucgugaggaauaccaug

SEQ ID NO: 2751201 - RNA, 19 nt, Artificial Sequence
  Description of Artificial Sequence: Synthetic oligonucleotide
uccugggaggcugcuguaa

SEQ ID NO: 2751202 - RNA, 19 nt, Artificial Sequence
  Description of Artificial Sequence: Synthetic oligonucleotide
gcacuuaauuaaguuggca

SEQ ID NO: 2751203 - RNA, 19 nt, Artificial Sequence
  Description of Artificial Sequence: Synthetic oligonucleotide
ccugacggccagccgauag

SEQ ID NO: 2751204 - RNA, 19 nt, Artificial Sequence
  Description of Artificial Sequence: Synthetic oligonucleotide
gaagccagagccgcgucgu

SEQ ID NO: 2751205 - RNA, 19 nt, Artificial Sequence
  Description of Artificial Sequence: Synthetic oligonucleotide
agagccgcgucgugaggaa

SEQ ID NO: 2751206 - RNA, 19 nt, Artificial Sequence
  Description of Artificial Sequence: Synthetic oligonucleotide
gccaaaagcggucugugau

SEQ ID NO: 2751207 - RNA, 19 nt, Artificial Sequence
  Description of Artificial Sequence: Synthetic oligonucleotide
gacggccagccgauagcag

SEQ ID NO: 2751208 - RNA, 19 nt, Artificial Sequence
  Description of Artificial Sequence: Synthetic oligonucleotide
ccaaagauuuaaaagucuu

SEQ ID NO: 2751209 - RNA, 19 nt, Artificial Sequence
  Description of Artificial Sequence: Synthetic oligonucleotide
caaucuccacagcacugaa

SEQ ID NO: 2751210 - RNA, 19 nt, Artificial Sequence
  Description of Artificial Sequence: Synthetic oligonucleotide
cagucugcgggccugcgua

SEQ ID NO: 2751211 - RNA, 19 nt, Artificial Sequence
  Description of Artificial Sequence: Synthetic oligonucleotide
acugaagccuucaguggua

SEQ ID NO: 2751212 - RNA, 19 nt, Artificial Sequence
  Description of Artificial Sequence: Synthetic oligonucleotide
auggccagguccacaagua

SEQ ID NO: 2751213 - RNA, 19 nt, Artificial Sequence
  Description of Artificial Sequence: Synthetic oligonucleotide
agccagagccgcgucguga

SEQ ID NO: 2751214 - RNA, 19 nt, Artificial Sequence
  Description of Artificial Sequence: Synthetic oligonucleotide
agccgauagcagcgauucu

SEQ ID NO: 2751215 - RNA, 19 nt, Artificial Sequence
  Description of Artificial Sequence: Synthetic oligonucleotide
aggcucuggucaccgcccu

SEQ ID NO: 2751216 - RNA, 19 nt, Artificial Sequence
  Description of Artificial Sequence: Synthetic oligonucleotide
cggucugugaugcgguucc

SEQ ID NO: 2751217 - RNA, 19 nt, Artificial Sequence
  Description of Artificial Sequence: Synthetic oligonucleotide
gguucauagauggccaggu

SEQ ID NO: 2751218 - RNA, 19 nt, Artificial Sequence
  Description of Artificial Sequence: Synthetic oligonucleotide
cgcgucgugaggaauacca

SEQ ID NO: 2751219 - RNA, 19 nt, Artificial Sequence
  Description of Artificial Sequence: Synthetic oligonucleotide
cagagccgcgucgugagga

SEQ ID NO: 2751220 - RNA, 19 nt, Artificial Sequence
  Description of Artificial Sequence: Synthetic oligonucleotide
gccaaagauuuaaaagucu

SEQ ID NO: 2751221 - RNA, 19 nt, Artificial Sequence
  Description of Artificial Sequence: Synthetic oligonucleotide
cgauagcagcgauucuucc

SEQ ID NO: 2751222 - RNA, 19 nt, Artificial Sequence
  Description of Artificial Sequence: Synthetic oligonucleotide
gaggcugcuguaauucgau

SEQ ID NO: 2751223 - RNA, 19 nt, Artificial Sequence
  Description of Artificial Sequence: Synthetic oligonucleotide
cucuggucaccgcccugac

SEQ ID NO: 2751224 - RNA, 19 nt, Artificial Sequence
  Description of Artificial Sequence: Synthetic oligonucleotide
gucugugaugcgguuccga

SEQ ID NO: 2751225 - RNA, 19 nt, Artificial Sequence
  Description of Artificial Sequence: Synthetic oligonucleotide
gcagcaaauccuucuugcu

SEQ ID NO: 2751226 - RNA, 19 nt, Artificial Sequence
  Description of Artificial Sequence: Synthetic oligonucleotide
acccgccaaaagcggucug

SEQ ID NO: 2751227 - RNA, 19 nt, Artificial Sequence
  Description of Artificial Sequence: Synthetic oligonucleotide
ccuccucuuagccaaagcu

SEQ ID NO: 2751228 - RNA, 19 nt, Artificial Sequence
  Description of Artificial Sequence: Synthetic oligonucleotide
cggccagccgauagcagcg

SEQ ID NO: 2751229 - RNA, 19 nt, Artificial Sequence
  Description of Artificial Sequence: Synthetic oligonucleotide
ggaauaccauggugugcuc

SEQ ID NO: 2751230 - RNA, 19 nt, Artificial Sequence
  Description of Artificial Sequence: Synthetic oligonucleotide
agcggucugugaugcgguu

SEQ ID NO: 2751231 - RNA, 19 nt, Artificial Sequence
  Description of Artificial Sequence: Synthetic oligonucleotide
cgaagccagagccgcgucg

SEQ ID NO: 2751232 - RNA, 19 nt, Artificial Sequence
  Description of Artificial Sequence: Synthetic oligonucleotide
guacugcaccacucuggaa

SEQ ID NO: 2751233 - RNA, 19 nt, Artificial Sequence
  Description of Artificial Sequence: Synthetic oligonucleotide
cccaaagcugcagcaaauc

SEQ ID NO: 2751234 - RNA, 19 nt, Artificial Sequence
  Description of Artificial Sequence: Synthetic oligonucleotide
cagcgauucuuccuucccu

SEQ ID NO: 2751235 - RNA, 19 nt, Artificial Sequence
  Description of Artificial Sequence: Synthetic oligonucleotide
gcgguuccgaagccagagc

SEQ ID NO: 2751236 - RNA, 19 nt, Artificial Sequence
  Description of Artificial Sequence: Synthetic oligonucleotide
gucaccgcccugacggcca

SEQ ID NO: 2751237 - RNA, 19 nt, Artificial Sequence
  Description of Artificial Sequence: Synthetic oligonucleotide
ggucugugaugcgguuccg

SEQ ID NO: 2751238 - RNA, 19 nt, Artificial Sequence
  Description of Artificial Sequence: Synthetic oligonucleotide
gcaaugaaugcuggguacu

SEQ ID NO: 2751239 - RNA, 19 nt, Artificial Sequence
  Description of Artificial Sequence: Synthetic oligonucleotide
ggucaccgcccugacggcc

SEQ ID NO: 2751240 - RNA, 19 nt, Artificial Sequence
  Description of Artificial Sequence: Synthetic oligonucleotide
gacaauccuucugcuccua

SEQ ID NO: 2751241 - RNA, 19 nt, Artificial Sequence
  Description of Artificial Sequence: Synthetic oligonucleotide
ccuucugcuccuaucuugu

SEQ ID NO: 2751242 - RNA, 19 nt, Artificial Sequence
  Description of Artificial Sequence: Synthetic oligonucleotide
agccgcgucgugaggaaua

SEQ ID NO: 2751243 - RNA, 19 nt, Artificial Sequence
  Description of Artificial Sequence: Synthetic oligonucleotide
cuccaccuggcacuuaauu

SEQ ID NO: 2751244 - RNA, 19 nt, Artificial Sequence
  Description of Artificial Sequence: Synthetic oligonucleotide
gccgagcauguuucagcac

SEQ ID NO: 2751245 - RNA, 19 nt, Artificial Sequence
  Description of Artificial Sequence: Synthetic oligonucleotide
ccuggcacuuaauuaaguu

SEQ ID NO: 2751246 - RNA, 19 nt, Artificial Sequence
  Description of Artificial Sequence: Synthetic oligonucleotide
cucaggccuguugcuaaaa

SEQ ID NO: 2751247 - RNA, 19 nt, Artificial Sequence
  Description of Artificial Sequence: Synthetic oligonucleotide
augcgguuccgaagccaga

SEQ ID NO: 2751248 - RNA, 19 nt, Artificial Sequence
  Description of Artificial Sequence: Synthetic oligonucleotide
uccucagguuccgcuucuu

SEQ ID NO: 2751249 - RNA, 19 nt, Artificial Sequence
  Description of Artificial Sequence: Synthetic oligonucleotide
ggccuguugcuaaaauaua

SEQ ID NO: 2751250 - RNA, 19 nt, Artificial Sequence
  Description of Artificial Sequence: Synthetic oligonucleotide
gcuggguacuguaagccau

SEQ ID NO: 2751251 - RNA, 19 nt, Artificial Sequence
  Description of Artificial Sequence: Synthetic oligonucleotide
gccaaagcugccaaagauu

SEQ ID NO: 2751252 - RNA, 19 nt, Artificial Sequence
  Description of Artificial Sequence: Synthetic oligonucleotide
cagguuccgcuucuucagu

SEQ ID NO: 2751253 - RNA, 19 nt, Artificial Sequence
  Description of Artificial Sequence: Synthetic oligonucleotide
gccgauagcagcgauucuu

SEQ ID NO: 2751254 - RNA, 19 nt, Artificial Sequence
  Description of Artificial Sequence: Synthetic oligonucleotide
gucugcgggccugcguaca

SEQ ID NO: 2751255 - RNA, 19 nt, Artificial Sequence
  Description of Artificial Sequence: Synthetic oligonucleotide
ccgccaaaagcggucugug

SEQ ID NO: 2751256 - RNA, 19 nt, Artificial Sequence
  Description of Artificial Sequence: Synthetic oligonucleotide
ccagagccgcgucgugagg

SEQ ID NO: 2751257 - RNA, 19 nt, Artificial Sequence
  Description of Artificial Sequence: Synthetic oligonucleotide
cguacacuuaacgaaggcu

SEQ ID NO: 2751258 - RNA, 19 nt, Artificial Sequence
  Description of Artificial Sequence: Synthetic oligonucleotide
ccgcuucuucagucugcgg

SEQ ID NO: 2751259 - RNA, 19 nt, Artificial Sequence
  Description of Artificial Sequence: Synthetic oligonucleotide
gccgcgucgugaggaauac

SEQ ID NO: 2751260 - RNA, 19 nt, Artificial Sequence
  Description of Artificial Sequence: Synthetic oligonucleotide
gcggucugugaugcgguuc

SEQ ID NO: 2751261 - RNA, 19 nt, Artificial Sequence
  Description of Artificial Sequence: Synthetic oligonucleotide
cugggaggcugcuguaauu

SEQ ID NO: 2751262 - RNA, 19 nt, Artificial Sequence
  Description of Artificial Sequence: Synthetic oligonucleotide
gggccugcguacacuuaac

SEQ ID NO: 2751263 - RNA, 19 nt, Artificial Sequence
  Description of Artificial Sequence: Synthetic oligonucleotide
gcaccuccugaacccgcca

SEQ ID NO: 2751264 - RNA, 19 nt, Artificial Sequence
  Description of Artificial Sequence: Synthetic oligonucleotide
gguccacaaguaccuuccu

SEQ ID NO: 2751265 - RNA, 19 nt, Artificial Sequence
  Description of Artificial Sequence: Synthetic oligonucleotide
cuucugcuccuaucuuguu

SEQ ID NO: 2751266 - RNA, 19 nt, Artificial Sequence
  Description of Artificial Sequence: Synthetic oligonucleotide
cugcuccuaucuuguuuau

SEQ ID NO: 2751267 - RNA, 19 nt, Artificial Sequence
  Description of Artificial Sequence: Synthetic oligonucleotide
cgcccugacggccagccga

SEQ ID NO: 2751268 - RNA, 19 nt, Artificial Sequence
  Description of Artificial Sequence: Synthetic oligonucleotide
cugccuccucuuagccaaa

SEQ ID NO: 2751269 - RNA, 19 nt, Artificial Sequence
  Description of Artificial Sequence: Synthetic oligonucleotide
ccuccugaacccgccaaaa

SEQ ID NO: 2751270 - RNA, 19 nt, Artificial Sequence
  Description of Artificial Sequence: Synthetic oligonucleotide
cgccaaaagcggucuguga

SEQ ID NO: 2751271 - RNA, 19 nt, Artificial Sequence
  Description of Artificial Sequence: Synthetic oligonucleotide
ccgaagccagagccgcguc

SEQ ID NO: 2751272 - RNA, 19 nt, Artificial Sequence
  Description of Artificial Sequence: Synthetic oligonucleotide
cgggccugcguacacuuaa

SEQ ID NO: 2751273 - RNA, 19 nt, Artificial Sequence
  Description of Artificial Sequence: Synthetic oligonucleotide
ggguacuguaagccauguu

SEQ ID NO: 2751274 - RNA, 19 nt, Artificial Sequence
  Description of Artificial Sequence: Synthetic oligonucleotide
ccacaaguaccuuccuguu

SEQ ID NO: 2751275 - RNA, 19 nt, Artificial Sequence
  Description of Artificial Sequence: Synthetic oligonucleotide
gagccgcgucgugaggaau

SEQ ID NO: 2751276 - RNA, 19 nt, Artificial Sequence
  Description of Artificial Sequence: Synthetic oligonucleotide
ccccaaagcugcagcaaau

SEQ ID NO: 2751277 - RNA, 19 nt, Artificial Sequence
  Description of Artificial Sequence: Synthetic oligonucleotide
ccgcgucgugaggaauacc

SEQ ID NO: 2751278 - RNA, 19 nt, Artificial Sequence
  Description of Artificial Sequence: Synthetic oligonucleotide
ccgcccugacggccagccg

SEQ ID NO: 2751279 - RNA, 19 nt, Artificial Sequence
  Description of Artificial Sequence: Synthetic oligonucleotide
ccugggaggcugcuguaau

SEQ ID NO: 2751280 - RNA, 19 nt, Artificial Sequence
  Description of Artificial Sequence: Synthetic oligonucleotide
cuuuucucucaggccuguu

SEQ ID NO: 2751281 - RNA, 19 nt, Artificial Sequence
  Description of Artificial Sequence: Synthetic oligonucleotide
gcgucgugaggaauaccau

SEQ ID NO: 2751282 - RNA, 19 nt, Artificial Sequence
  Description of Artificial Sequence: Synthetic oligonucleotide
gccauguuccugggaggcu

SEQ ID NO: 2751283 - RNA, 19 nt, Artificial Sequence
  Description of Artificial Sequence: Synthetic oligonucleotide
ccagccgauagcagcgauu

SEQ ID NO: 2751284 - RNA, 19 nt, Artificial Sequence
  Description of Artificial Sequence: Synthetic oligonucleotide
cugcgggccugcguacacu

SEQ ID NO: 2751285 - RNA, 19 nt, Artificial Sequence
  Description of Artificial Sequence: Synthetic oligonucleotide
gccagccgauagcagcgau

SEQ ID NO: 2751286 - RNA, 19 nt, Artificial Sequence
  Description of Artificial Sequence: Synthetic oligonucleotide
gagcuccaccuggcacuua

SEQ ID NO: 2751287 - RNA, 19 nt, Artificial Sequence
  Description of Artificial Sequence: Synthetic oligonucleotide
cccgccaaaagcggucugu

SEQ ID NO: 2751288 - RNA, 19 nt, Artificial Sequence
  Description of Artificial Sequence: Synthetic oligonucleotide
cccuugaaaugccgagcau

SEQ ID NO: 2751289 - RNA, 19 nt, Artificial Sequence
  Description of Artificial Sequence: Synthetic oligonucleotide
gcccugacggccagccgau

SEQ ID NO: 2751290 - RNA, 19 nt, Artificial Sequence
  Description of Artificial Sequence: Synthetic oligonucleotide
gcuccaccuggcacuuaau

SEQ ID NO: 2751291 - RNA, 19 nt, Artificial Sequence
  Description of Artificial Sequence: Synthetic oligonucleotide
gcgggccugcguacacuua

SEQ ID NO: 2751292 - RNA, 19 nt, Artificial Sequence
  Description of Artificial Sequence: Synthetic oligonucleotide
cccugacggccagccgaua

SEQ ID NO: 2751293 - RNA, 19 nt, Artificial Sequence
  Description of Artificial Sequence: Synthetic oligonucleotide
uuuuauugcacauuaaggu

SEQ ID NO: 2751294 - RNA, 19 nt, Artificial Sequence
  Description of Artificial Sequence: Synthetic oligonucleotide
auugagaaaaggcuuuacc

SEQ ID NO: 2751295 - RNA, 19 nt, Artificial Sequence
  Description of Artificial Sequence: Synthetic oligonucleotide
uuaagagcaaucaaugacu

SEQ ID NO: 2751296 - RNA, 19 nt, Artificial Sequence
  Description of Artificial Sequence: Synthetic oligonucleotide
caaucaaugacucucuucc

SEQ ID NO: 2751297 - RNA, 19 nt, Artificial Sequence
  Description of Artificial Sequence: Synthetic oligonucleotide
uuuaugucucugaagauga

SEQ ID NO: 2751298 - RNA, 19 nt, Artificial Sequence
  Description of Artificial Sequence: Synthetic oligonucleotide
aagguuacugugcugagca

SEQ ID NO: 2751299 - RNA, 19 nt, Artificial Sequence
  Description of Artificial Sequence: Synthetic oligonucleotide
agguccuuaguucaauucc

SEQ ID NO: 2751300 - RNA, 19 nt, Artificial Sequence
  Description of Artificial Sequence: Synthetic oligonucleotide
aguacugugauugagaaaa

SEQ ID NO: 2751301 - RNA, 19 nt, Artificial Sequence
  Description of Artificial Sequence: Synthetic oligonucleotide
acugugauugagaaaaggc

SEQ ID NO: 2751302 - RNA, 19 nt, Artificial Sequence
  Description of Artificial Sequence: Synthetic oligonucleotide
guuaagagcaaucaaugac

SEQ ID NO: 2751303 - RNA, 19 nt, Artificial Sequence
  Description of Artificial Sequence: Synthetic oligonucleotide
uuuucgaagaguacuguga

SEQ ID NO: 2751304 - RNA, 19 nt, Artificial Sequence
  Description of Artificial Sequence: Synthetic oligonucleotide
aggacaaaggauuucccac

SEQ ID NO: 2751305 - RNA, 19 nt, Artificial Sequence
  Description of Artificial Sequence: Synthetic oligonucleotide
agagcaaucaaugacucuc

SEQ ID NO: 2751306 - RNA, 19 nt, Artificial Sequence
  Description of Artificial Sequence: Synthetic oligonucleotide
ucgaagaguacugugauug

SEQ ID NO: 2751307 - RNA, 19 nt, Artificial Sequence
  Description of Artificial Sequence: Synthetic oligonucleotide
uuuuaugucucugaagaug

SEQ ID NO: 2751308 - RNA, 19 nt, Artificial Sequence
  Description of Artificial Sequence: Synthetic oligonucleotide
cugaagaugacugugcagg

SEQ ID NO: 2751309 - RNA, 19 nt, Artificial Sequence
  Description of Artificial Sequence: Synthetic oligonucleotide
aagaugacugugcaggaca

SEQ ID NO: 2751310 - RNA, 19 nt, Artificial Sequence
  Description of Artificial Sequence: Synthetic oligonucleotide
uuauugcacauuaagguua

SEQ ID NO: 2751311 - RNA, 19 nt, Artificial Sequence
  Description of Artificial Sequence: Synthetic oligonucleotide
cacauuaagguuacugugc

SEQ ID NO: 2751312 - RNA, 19 nt, Artificial Sequence
  Description of Artificial Sequence: Synthetic oligonucleotide
aaugacucucuuccagagg

SEQ ID NO: 2751313 - RNA, 19 nt, Artificial Sequence
  Description of Artificial Sequence: Synthetic oligonucleotide
ugugauugagaaaaggcuu

SEQ ID NO: 2751314 - RNA, 19 nt, Artificial Sequence
  Description of Artificial Sequence: Synthetic oligonucleotide
uuuauugcacauuaagguu

SEQ ID NO: 2751315 - RNA, 19 nt, Artificial Sequence
  Description of Artificial Sequence: Synthetic oligonucleotide
auuaagguuacugugcuga

SEQ ID NO: 2751316 - RNA, 19 nt, Artificial Sequence
  Description of Artificial Sequence: Synthetic oligonucleotide
ugcacauuaagguuacugu

SEQ ID NO: 2751317 - RNA, 19 nt, Artificial Sequence
  Description of Artificial Sequence: Synthetic oligonucleotide
uauguguccauuuuguguu

SEQ ID NO: 2751318 - RNA, 19 nt, Artificial Sequence
  Description of Artificial Sequence: Synthetic oligonucleotide
gugcauguaaaccaggcug

SEQ ID NO: 2751319 - RNA, 19 nt, Artificial Sequence
  Description of Artificial Sequence: Synthetic oligonucleotide
aucaaugacucucuuccag

SEQ ID NO: 2751320 - RNA, 19 nt, Artificial Sequence
  Description of Artificial Sequence: Synthetic oligonucleotide
augacucucuuccagaggu

SEQ ID NO: 2751321 - RNA, 19 nt, Artificial Sequence
  Description of Artificial Sequence: Synthetic oligonucleotide
cuuaguucaauucccagca

SEQ ID NO: 2751322 - RNA, 19 nt, Artificial Sequence
  Description of Artificial Sequence: Synthetic oligonucleotide
ugcauguaaaccaggcuga

SEQ ID NO: 2751323 - RNA, 19 nt, Artificial Sequence
  Description of Artificial Sequence: Synthetic oligonucleotide
ucuggugugcauguaaacc

SEQ ID NO: 2751324 - RNA, 19 nt, Artificial Sequence
  Description of Artificial Sequence: Synthetic oligonucleotide
gaggagauggcucagaggu

SEQ ID NO: 2751325 - RNA, 19 nt, Artificial Sequence
  Description of Artificial Sequence: Synthetic oligonucleotide
ucucugaagaugacugugc

SEQ ID NO: 2751326 - RNA, 19 nt, Artificial Sequence
  Description of Artificial Sequence: Synthetic oligonucleotide
uaagagcaaucaaugacuc

SEQ ID NO: 2751327 - RNA, 19 nt, Artificial Sequence
  Description of Artificial Sequence: Synthetic oligonucleotide
uacugugauugagaaaagg

SEQ ID NO: 2751328 - RNA, 19 nt, Artificial Sequence
  Description of Artificial Sequence: Synthetic oligonucleotide
acauuaagguuacugugcu

SEQ ID NO: 2751329 - RNA, 19 nt, Artificial Sequence
  Description of Artificial Sequence: Synthetic oligonucleotide
uuucgaagaguacugugau

SEQ ID NO: 2751330 - RNA, 19 nt, Artificial Sequence
  Description of Artificial Sequence: Synthetic oligonucleotide
ucaaugacucucuuccaga

SEQ ID NO: 2751331 - RNA, 19 nt, Artificial Sequence
  Description of Artificial Sequence: Synthetic oligonucleotide
uauugcacauuaagguuac

SEQ ID NO: 2751332 - RNA, 19 nt, Artificial Sequence
  Description of Artificial Sequence: Synthetic oligonucleotide
uugcacauuaagguuacug

SEQ ID NO: 2751333 - RNA, 19 nt, Artificial Sequence
  Description of Artificial Sequence: Synthetic oligonucleotide
aaucaaugacucucuucca

SEQ ID NO: 2751334 - RNA, 19 nt, Artificial Sequence
  Description of Artificial Sequence: Synthetic oligonucleotide
ugugcauguaaaccaggcu

SEQ ID NO: 2751335 - RNA, 19 nt, Artificial Sequence
  Description of Artificial Sequence: Synthetic oligonucleotide
agaguacugugauugagaa

SEQ ID NO: 2751336 - RNA, 19 nt, Artificial Sequence
  Description of Artificial Sequence: Synthetic oligonucleotide
gaagaguacugugauugag

SEQ ID NO: 2751337 - RNA, 19 nt, Artificial Sequence
  Description of Artificial Sequence: Synthetic oligonucleotide
uggugugcauguaaaccag

SEQ ID NO: 2751338 - RNA, 19 nt, Artificial Sequence
  Description of Artificial Sequence: Synthetic oligonucleotide
gacugugcaggacaaagga

SEQ ID NO: 2751339 - RNA, 19 nt, Artificial Sequence
  Description of Artificial Sequence: Synthetic oligonucleotide
aguauguguccauuuugug

SEQ ID NO: 2751340 - RNA, 19 nt, Artificial Sequence
  Description of Artificial Sequence: Synthetic oligonucleotide
uuuuguguggcuggaggag

SEQ ID NO: 2751341 - RNA, 19 nt, Artificial Sequence
  Description of Artificial Sequence: Synthetic oligonucleotide
augacugugcaggacaaag

SEQ ID NO: 2751342 - RNA, 19 nt, Artificial Sequence
  Description of Artificial Sequence: Synthetic oligonucleotide
ucagagguuaagagcaauc

SEQ ID NO: 2751343 - RNA, 19 nt, Artificial Sequence
  Description of Artificial Sequence: Synthetic oligonucleotide
uccuuaguucaauucccag

SEQ ID NO: 2751344 - RNA, 19 nt, Artificial Sequence
  Description of Artificial Sequence: Synthetic oligonucleotide
uuaagguuacugugcugag

SEQ ID NO: 2751345 - RNA, 19 nt, Artificial Sequence
  Description of Artificial Sequence: Synthetic oligonucleotide
ucuucuggugugcauguaa

SEQ ID NO: 2751346 - RNA, 19 nt, Artificial Sequence
  Description of Artificial Sequence: Synthetic oligonucleotide
agguuaagagcaaucaaug

SEQ ID NO: 2751347 - RNA, 19 nt, Artificial Sequence
  Description of Artificial Sequence: Synthetic oligonucleotide
aagaguacugugauugaga

SEQ ID NO: 2751348 - RNA, 19 nt, Artificial Sequence
  Description of Artificial Sequence: Synthetic oligonucleotide
caaugacucucuuccagag

SEQ ID NO: 2751349 - RNA, 19 nt, Artificial Sequence
  Description of Artificial Sequence: Synthetic oligonucleotide
gacaaaggauuucccacac

SEQ ID NO: 2751350 - RNA, 19 nt, Artificial Sequence
  Description of Artificial Sequence: Synthetic oligonucleotide
aagagcaaucaaugacucu

SEQ ID NO: 2751351 - RNA, 19 nt, Artificial Sequence
  Description of Artificial Sequence: Synthetic oligonucleotide
augucucugaagaugacug

SEQ ID NO: 2751352 - RNA, 19 nt, Artificial Sequence
  Description of Artificial Sequence: Synthetic oligonucleotide
uaugucucugaagaugacu

SEQ ID NO: 2751353 - RNA, 19 nt, Artificial Sequence
  Description of Artificial Sequence: Synthetic oligonucleotide
ugaagaugacugugcagga

SEQ ID NO: 2751354 - RNA, 19 nt, Artificial Sequence
  Description of Artificial Sequence: Synthetic oligonucleotide
guuacugugcugagcaaag

SEQ ID NO: 2751355 - RNA, 19 nt, Artificial Sequence
  Description of Artificial Sequence: Synthetic oligonucleotide
agagguuaagagcaaucaa

SEQ ID NO: 2751356 - RNA, 19 nt, Artificial Sequence
  Description of Artificial Sequence: Synthetic oligonucleotide
cuggugugcauguaaacca

SEQ ID NO: 2751357 - RNA, 19 nt, Artificial Sequence
  Description of Artificial Sequence: Synthetic oligonucleotide
accacugccuggcaaaggu

SEQ ID NO: 2751358 - RNA, 19 nt, Artificial Sequence
  Description of Artificial Sequence: Synthetic oligonucleotide
gacucucuuccagaggucc

SEQ ID NO: 2751359 - RNA, 19 nt, Artificial Sequence
  Description of Artificial Sequence: Synthetic oligonucleotide
gagguccuuaguucaauuc

SEQ ID NO: 2751360 - RNA, 19 nt, Artificial Sequence
  Description of Artificial Sequence: Synthetic oligonucleotide
gcacauuaagguuacugug

SEQ ID NO: 2751361 - RNA, 19 nt, Artificial Sequence
  Description of Artificial Sequence: Synthetic oligonucleotide
ccuuaguucaauucccagc

SEQ ID NO: 2751362 - RNA, 19 nt, Artificial Sequence
  Description of Artificial Sequence: Synthetic oligonucleotide
uaagguuacugugcugagc

SEQ ID NO: 2751363 - RNA, 19 nt, Artificial Sequence
  Description of Artificial Sequence: Synthetic oligonucleotide
uuacugugcugagcaaagg

SEQ ID NO: 2751364 - RNA, 19 nt, Artificial Sequence
  Description of Artificial Sequence: Synthetic oligonucleotide
guauguguccauuuugugu

SEQ ID NO: 2751365 - RNA, 19 nt, Artificial Sequence
  Description of Artificial Sequence: Synthetic oligonucleotide
uuuguguggcuggaggaga

SEQ ID NO: 2751366 - RNA, 19 nt, Artificial Sequence
  Description of Artificial Sequence: Synthetic oligonucleotide
gauugagaaaaggcuuuac

SEQ ID NO: 2751367 - RNA, 19 nt, Artificial Sequence
  Description of Artificial Sequence: Synthetic oligonucleotide
cugugauugagaaaaggcu

SEQ ID NO: 2751368 - RNA, 19 nt, Artificial Sequence
  Description of Artificial Sequence: Synthetic oligonucleotide
guguggcuggaggagaugg

SEQ ID NO: 2751369 - RNA, 19 nt, Artificial Sequence
  Description of Artificial Sequence: Synthetic oligonucleotide
cugagcaaaggcuuuucca

SEQ ID NO: 2751370 - RNA, 19 nt, Artificial Sequence
  Description of Artificial Sequence: Synthetic oligonucleotide
uucuggugugcauguaaac

SEQ ID NO: 2751371 - RNA, 19 nt, Artificial Sequence
  Description of Artificial Sequence: Synthetic oligonucleotide
uuaugucucugaagaugac

SEQ ID NO: 2751372 - RNA, 19 nt, Artificial Sequence
  Description of Artificial Sequence: Synthetic oligonucleotide
uuaguucaauucccagcaa

SEQ ID NO: 2751373 - RNA, 19 nt, Artificial Sequence
  Description of Artificial Sequence: Synthetic oligonucleotide
gucucugaagaugacugug

SEQ ID NO: 2751374 - RNA, 19 nt, Artificial Sequence
  Description of Artificial Sequence: Synthetic oligonucleotide
gguuaagagcaaucaauga

SEQ ID NO: 2751375 - RNA, 19 nt, Artificial Sequence
  Description of Artificial Sequence: Synthetic oligonucleotide
ugugcugagcaaaggcuuu

SEQ ID NO: 2751376 - RNA, 19 nt, Artificial Sequence
  Description of Artificial Sequence: Synthetic oligonucleotide
cauuaagguuacugugcug

SEQ ID NO: 2751377 - RNA, 19 nt, Artificial Sequence
  Description of Artificial Sequence: Synthetic oligonucleotide
gagguuaagagcaaucaau

SEQ ID NO: 2751378 - RNA, 19 nt, Artificial Sequence
  Description of Artificial Sequence: Synthetic oligonucleotide
gugugcauguaaaccaggc

SEQ ID NO: 2751379 - RNA, 19 nt, Artificial Sequence
  Description of Artificial Sequence: Synthetic oligonucleotide
gaagaugacugugcaggac

SEQ ID NO: 2751380 - RNA, 19 nt, Artificial Sequence
  Description of Artificial Sequence: Synthetic oligonucleotide
caggacaaaggauuuccca

SEQ ID NO: 2751381 - RNA, 19 nt, Artificial Sequence
  Description of Artificial Sequence: Synthetic oligonucleotide
acaaaggauuucccacacu

SEQ ID NO: 2751382 - RNA, 19 nt, Artificial Sequence
  Description of Artificial Sequence: Synthetic oligonucleotide
cagagguuaagagcaauca

SEQ ID NO: 2751383 - RNA, 19 nt, Artificial Sequence
  Description of Artificial Sequence: Synthetic oligonucleotide
gguccuuaguucaauuccc

SEQ ID NO: 2751384 - RNA, 19 nt, Artificial Sequence
  Description of Artificial Sequence: Synthetic oligonucleotide
ugauugagaaaaggcuuua

SEQ ID NO: 2751385 - RNA, 19 nt, Artificial Sequence
  Description of Artificial Sequence: Synthetic oligonucleotide
ggacaaaggauuucccaca

SEQ ID NO: 2751386 - RNA, 19 nt, Artificial Sequence
  Description of Artificial Sequence: Synthetic oligonucleotide
uuguguggcuggaggagau

SEQ ID NO: 2751387 - RNA, 19 nt, Artificial Sequence
  Description of Artificial Sequence: Synthetic oligonucleotide
ucccguauguguccuuuua

SEQ ID NO: 2751388 - RNA, 19 nt, Artificial Sequence
  Description of Artificial Sequence: Synthetic oligonucleotide
accaccacugccuggcaaa

SEQ ID NO: 2751389 - RNA, 19 nt, Artificial Sequence
  Description of Artificial Sequence: Synthetic oligonucleotide
uguguccuuuuaugucucu

SEQ ID NO: 2751390 - RNA, 19 nt, Artificial Sequence
  Description of Artificial Sequence: Synthetic oligonucleotide
uucgaagaguacugugauu

SEQ ID NO: 2751391 - RNA, 19 nt, Artificial Sequence
  Description of Artificial Sequence: Synthetic oligonucleotide
gcaaucaaugacucucuuc

SEQ ID NO: 2751392 - RNA, 19 nt, Artificial Sequence
  Description of Artificial Sequence: Synthetic oligonucleotide
caguauguguccauuuugu

SEQ ID NO: 2751393 - RNA, 19 nt, Artificial Sequence
  Description of Artificial Sequence: Synthetic oligonucleotide
ccaguauguguccauuuug

SEQ ID NO: 2751394 - RNA, 19 nt, Artificial Sequence
  Description of Artificial Sequence: Synthetic oligonucleotide
ugacucucuuccagagguc

SEQ ID NO: 2751395 - RNA, 19 nt, Artificial Sequence
  Description of Artificial Sequence: Synthetic oligonucleotide
gcugagcaaaggcuuuucc

SEQ ID NO: 2751396 - RNA, 19 nt, Artificial Sequence
  Description of Artificial Sequence: Synthetic oligonucleotide
ccguauguguccuuuuaug

SEQ ID NO: 2751397 - RNA, 19 nt, Artificial Sequence
  Description of Artificial Sequence: Synthetic oligonucleotide
gaguacugugauugagaaa

SEQ ID NO: 2751398 - RNA, 19 nt, Artificial Sequence
  Description of Artificial Sequence: Synthetic oligonucleotide
ggugugcauguaaaccagg

SEQ ID NO: 2751399 - RNA, 19 nt, Artificial Sequence
  Description of Artificial Sequence: Synthetic oligonucleotide
guacugugauugagaaaag

SEQ ID NO: 2751400 - RNA, 19 nt, Artificial Sequence
  Description of Artificial Sequence: Synthetic oligonucleotide
agcaaucaaugacucucuu

SEQ ID NO: 2751401 - RNA, 19 nt, Artificial Sequence
  Description of Artificial Sequence: Synthetic oligonucleotide
cugugcaggacaaaggauu

SEQ ID NO: 2751402 - RNA, 19 nt, Artificial Sequence
  Description of Artificial Sequence: Synthetic oligonucleotide
ugccuggcaaagguuuuac

SEQ ID NO: 2751403 - RNA, 19 nt, Artificial Sequence
  Description of Artificial Sequence: Synthetic oligonucleotide
acugugcaggacaaaggau

SEQ ID NO: 2751404 - RNA, 19 nt, Artificial Sequence
  Description of Artificial Sequence: Synthetic oligonucleotide
uguguggcuggaggagaug

SEQ ID NO: 2751405 - RNA, 19 nt, Artificial Sequence
  Description of Artificial Sequence: Synthetic oligonucleotide
uguguccauuuuguguuuu

SEQ ID NO: 2751406 - RNA, 19 nt, Artificial Sequence
  Description of Artificial Sequence: Synthetic oligonucleotide
ugcugagcaaaggcuuuuc

SEQ ID NO: 2751407 - RNA, 19 nt, Artificial Sequence
  Description of Artificial Sequence: Synthetic oligonucleotide
guccuuaguucaauuccca

SEQ ID NO: 2751408 - RNA, 19 nt, Artificial Sequence
  Description of Artificial Sequence: Synthetic oligonucleotide
agaugacugugcaggacaa

SEQ ID NO: 2751409 - RNA, 19 nt, Artificial Sequence
  Description of Artificial Sequence: Synthetic oligonucleotide
gguuacugugcugagcaaa

SEQ ID NO: 2751410 - RNA, 19 nt, Artificial Sequence
  Description of Artificial Sequence: Synthetic oligonucleotide
ggcuggaggagauggcuca

SEQ ID NO: 2751411 - RNA, 19 nt, Artificial Sequence
  Description of Artificial Sequence: Synthetic oligonucleotide
auguguccauuuuguguuu

SEQ ID NO: 2751412 - RNA, 19 nt, Artificial Sequence
  Description of Artificial Sequence: Synthetic oligonucleotide
gagcaaucaaugacucucu

SEQ ID NO: 2751413 - RNA, 19 nt, Artificial Sequence
  Description of Artificial Sequence: Synthetic oligonucleotide
agguuacugugcugagcaa

SEQ ID NO: 2751414 - RNA, 19 nt, Artificial Sequence
  Description of Artificial Sequence: Synthetic oligonucleotide
gcaggacaaaggauuuccc

SEQ ID NO: 2751415 - RNA, 19 nt, Artificial Sequence
  Description of Artificial Sequence: Synthetic oligonucleotide
caccacugccuggcaaagg

SEQ ID NO: 2751416 - RNA, 19 nt, Artificial Sequence
  Description of Artificial Sequence: Synthetic oligonucleotide
acucucuuccagagguccu

SEQ ID NO: 2751417 - RNA, 19 nt, Artificial Sequence
  Description of Artificial Sequence: Synthetic oligonucleotide
gaugacugugcaggacaaa

SEQ ID NO: 2751418 - RNA, 19 nt, Artificial Sequence
  Description of Artificial Sequence: Synthetic oligonucleotide
cugugcugagcaaaggcuu

SEQ ID NO: 2751419 - RNA, 19 nt, Artificial Sequence
  Description of Artificial Sequence: Synthetic oligonucleotide
gccuggcaaagguuuuacc

SEQ ID NO: 2751420 - RNA, 19 nt, Artificial Sequence
  Description of Artificial Sequence: Synthetic oligonucleotide
auugcacauuaagguuacu

SEQ ID NO: 2751421 - RNA, 19 nt, Artificial Sequence
  Description of Artificial Sequence: Synthetic oligonucleotide
cacugccuggcaaagguuu

SEQ ID NO: 2751422 - RNA, 19 nt, Artificial Sequence
  Description of Artificial Sequence: Synthetic oligonucleotide
gcauguaaaccaggcugac

SEQ ID NO: 2751423 - RNA, 19 nt, Artificial Sequence
  Description of Artificial Sequence: Synthetic oligonucleotide
aggcugaccuugaacuuuu

SEQ ID NO: 2751424 - RNA, 19 nt, Artificial Sequence
  Description of Artificial Sequence: Synthetic oligonucleotide
acugccuggcaaagguuuu

SEQ ID NO: 2751425 - RNA, 19 nt, Artificial Sequence
  Description of Artificial Sequence: Synthetic oligonucleotide
gcuggaggagauggcucag

SEQ ID NO: 2751426 - RNA, 19 nt, Artificial Sequence
  Description of Artificial Sequence: Synthetic oligonucleotide
cuggaggagauggcucaga

SEQ ID NO: 2751427 - RNA, 19 nt, Artificial Sequence
  Description of Artificial Sequence: Synthetic oligonucleotide
aggagauggcucagagguu

SEQ ID NO: 2751428 - RNA, 19 nt, Artificial Sequence
  Description of Artificial Sequence: Synthetic oligonucleotide
ccaccacugccuggcaaag

SEQ ID NO: 2751429 - RNA, 19 nt, Artificial Sequence
  Description of Artificial Sequence: Synthetic oligonucleotide
cugccuggcaaagguuuua

SEQ ID NO: 2751430 - RNA, 19 nt, Artificial Sequence
  Description of Artificial Sequence: Synthetic oligonucleotide
ccucuucuggugugcaugu

SEQ ID NO: 2751431 - RNA, 19 nt, Artificial Sequence
  Description of Artificial Sequence: Synthetic oligonucleotide
cucucuuccagagguccuu

SEQ ID NO: 2751432 - RNA, 19 nt, Artificial Sequence
  Description of Artificial Sequence: Synthetic oligonucleotide
cucuucuggugugcaugua

SEQ ID NO: 2751433 - RNA, 19 nt, Artificial Sequence
  Description of Artificial Sequence: Synthetic oligonucleotide
gugcugagcaaaggcuuuu

SEQ ID NO: 2751434 - RNA, 19 nt, Artificial Sequence
  Description of Artificial Sequence: Synthetic oligonucleotide
cucccguauguguccuuuu

SEQ ID NO: 2751435 - RNA, 19 nt, Artificial Sequence
  Description of Artificial Sequence: Synthetic oligonucleotide
cccguauguguccuuuuau

SEQ ID NO: 2751436 - RNA, 19 nt, Artificial Sequence
  Description of Artificial Sequence: Synthetic oligonucleotide
ccacugccuggcaaagguu

SEQ ID NO: 2751437 - RNA, 19 nt, Artificial Sequence
  Description of Artificial Sequence: Synthetic oligonucleotide
agaauuucaauccaguagc

SEQ ID NO: 2751438 - RNA, 19 nt, Artificial Sequence
  Description of Artificial Sequence: Synthetic oligonucleotide
aaacuuuugaaguagcguc

SEQ ID NO: 2751439 - RNA, 19 nt, Artificial Sequence
  Description of Artificial Sequence: Synthetic oligonucleotide
agggaugucauucuuaucc

SEQ ID NO: 2751440 - RNA, 19 nt, Artificial Sequence
  Description of Artificial Sequence: Synthetic oligonucleotide
auuaggaaguccuuggugc

SEQ ID NO: 2751441 - RNA, 19 nt, Artificial Sequence
  Description of Artificial Sequence: Synthetic oligonucleotide
cuucaaaucguuuacaggc

SEQ ID NO: 2751442 - RNA, 19 nt, Artificial Sequence
  Description of Artificial Sequence: Synthetic oligonucleotide
uuuguuaggauucagaauu

SEQ ID NO: 2751443 - RNA, 19 nt, Artificial Sequence
  Description of Artificial Sequence: Synthetic oligonucleotide
aauaaucucugcuauuuug

SEQ ID NO: 2751444 - RNA, 19 nt, Artificial Sequence
  Description of Artificial Sequence: Synthetic oligonucleotide
ucauuuuaccaucaucagg

SEQ ID NO: 2751445 - RNA, 19 nt, Artificial Sequence
  Description of Artificial Sequence: Synthetic oligonucleotide
uucacucuugucuuuaggg

SEQ ID NO: 2751446 - RNA, 19 nt, Artificial Sequence
  Description of Artificial Sequence: Synthetic oligonucleotide
uuuaccaucaucagguuuc

SEQ ID NO: 2751447 - RNA, 19 nt, Artificial Sequence
  Description of Artificial Sequence: Synthetic oligonucleotide
aggaaaaucaaacuuuuga

SEQ ID NO: 2751448 - RNA, 19 nt, Artificial Sequence
  Description of Artificial Sequence: Synthetic oligonucleotide
agagcuaaauaaucucugc

SEQ ID NO: 2751449 - RNA, 19 nt, Artificial Sequence
  Description of Artificial Sequence: Synthetic oligonucleotide
aucagguuucuucacaaac

SEQ ID NO: 2751450 - RNA, 19 nt, Artificial Sequence
  Description of Artificial Sequence: Synthetic oligonucleotide
aucucugcuauuuuguuag

SEQ ID NO: 2751451 - RNA, 19 nt, Artificial Sequence
  Description of Artificial Sequence: Synthetic oligonucleotide
ucaaggguggcuuuccugg

SEQ ID NO: 2751452 - RNA, 19 nt, Artificial Sequence
  Description of Artificial Sequence: Synthetic oligonucleotide
guaacuuugggucucauca

SEQ ID NO: 2751453 - RNA, 19 nt, Artificial Sequence
  Description of Artificial Sequence: Synthetic oligonucleotide
uccuuaauucucagcaucg

SEQ ID NO: 2751454 - RNA, 19 nt, Artificial Sequence
  Description of Artificial Sequence: Synthetic oligonucleotide
auuucaucgaaggaaaauc

SEQ ID NO: 2751455 - RNA, 19 nt, Artificial Sequence
  Description of Artificial Sequence: Synthetic oligonucleotide
ucuucaaaucguuuacagg

SEQ ID NO: 2751456 - RNA, 19 nt, Artificial Sequence
  Description of Artificial Sequence: Synthetic oligonucleotide
aauccagggacuucuuagg

SEQ ID NO: 2751457 - RNA, 19 nt, Artificial Sequence
  Description of Artificial Sequence: Synthetic oligonucleotide
ugugugucaacucaagggu

SEQ ID NO: 2751458 - RNA, 19 nt, Artificial Sequence
  Description of Artificial Sequence: Synthetic oligonucleotide
acaaacuugacucccagcu

SEQ ID NO: 2751459 - RNA, 19 nt, Artificial Sequence
  Description of Artificial Sequence: Synthetic oligonucleotide
uuucaucgaaggaaaauca

SEQ ID NO: 2751460 - RNA, 19 nt, Artificial Sequence
  Description of Artificial Sequence: Synthetic oligonucleotide
aaugccagaccuuucauuu

SEQ ID NO: 2751461 - RNA, 19 nt, Artificial Sequence
  Description of Artificial Sequence: Synthetic oligonucleotide
uuaggauucagaauuucaa

SEQ ID NO: 2751462 - RNA, 19 nt, Artificial Sequence
  Description of Artificial Sequence: Synthetic oligonucleotide
cagaauuucaauccaguag

SEQ ID NO: 2751463 - RNA, 19 nt, Artificial Sequence
  Description of Artificial Sequence: Synthetic oligonucleotide
aauuucaauccaguagccg

SEQ ID NO: 2751464 - RNA, 19 nt, Artificial Sequence
  Description of Artificial Sequence: Synthetic oligonucleotide
auuucaauccaguagccgu

SEQ ID NO: 2751465 - RNA, 19 nt, Artificial Sequence
  Description of Artificial Sequence: Synthetic oligonucleotide
ugcuauuuuguuaggauuc

SEQ ID NO: 2751466 - RNA, 19 nt, Artificial Sequence
  Description of Artificial Sequence: Synthetic oligonucleotide
caucgaaggaaaaucaaac

SEQ ID NO: 2751467 - RNA, 19 nt, Artificial Sequence
  Description of Artificial Sequence: Synthetic oligonucleotide
guugugguaacuuuggguc

SEQ ID NO: 2751468 - RNA, 19 nt, Artificial Sequence
  Description of Artificial Sequence: Synthetic oligonucleotide
ucuucagugccccaguugu

SEQ ID NO: 2751469 - RNA, 19 nt, Artificial Sequence
  Description of Artificial Sequence: Synthetic oligonucleotide
gggaaaauuucaucgaagg

SEQ ID NO: 2751470 - RNA, 19 nt, Artificial Sequence
  Description of Artificial Sequence: Synthetic oligonucleotide
auccuuaauucucagcauc

SEQ ID NO: 2751471 - RNA, 19 nt, Artificial Sequence
  Description of Artificial Sequence: Synthetic oligonucleotide
aaaauuucaucgaaggaaa

SEQ ID NO: 2751472 - RNA, 19 nt, Artificial Sequence
  Description of Artificial Sequence: Synthetic oligonucleotide
ucccaaugugaccaaaucc

SEQ ID NO: 2751473 - RNA, 19 nt, Artificial Sequence
  Description of Artificial Sequence: Synthetic oligonucleotide
ucgaaggaaaaucaaacuu

SEQ ID NO: 2751474 - RNA, 19 nt, Artificial Sequence
  Description of Artificial Sequence: Synthetic oligonucleotide
agggucuugaaugaaugcc

SEQ ID NO: 2751475 - RNA, 19 nt, Artificial Sequence
  Description of Artificial Sequence: Synthetic oligonucleotide
ucacagagcuaaauaaucu

SEQ ID NO: 2751476 - RNA, 19 nt, Artificial Sequence
  Description of Artificial Sequence: Synthetic oligonucleotide
ggucucaucaucuucagug

SEQ ID NO: 2751477 - RNA, 19 nt, Artificial Sequence
  Description of Artificial Sequence: Synthetic oligonucleotide
uuaggauccuuaauucuca

SEQ ID NO: 2751478 - RNA, 19 nt, Artificial Sequence
  Description of Artificial Sequence: Synthetic oligonucleotide
ucagguuucuucacaaacu

SEQ ID NO: 2751479 - RNA, 19 nt, Artificial Sequence
  Description of Artificial Sequence: Synthetic oligonucleotide
uucucacagagcuaaauaa

SEQ ID NO: 2751480 - RNA, 19 nt, Artificial Sequence
  Description of Artificial Sequence: Synthetic oligonucleotide
uaauucucagcaucguuug

SEQ ID NO: 2751481 - RNA, 19 nt, Artificial Sequence
  Description of Artificial Sequence: Synthetic oligonucleotide
uccucguaagccaagaaau

SEQ ID NO: 2751482 - RNA, 19 nt, Artificial Sequence
  Description of Artificial Sequence: Synthetic oligonucleotide
acaucagggacagcaaucc

SEQ ID NO: 2751483 - RNA, 19 nt, Artificial Sequence
  Description of Artificial Sequence: Synthetic oligonucleotide
uugaaguagcgucagucca

SEQ ID NO: 2751484 - RNA, 19 nt, Artificial Sequence
  Description of Artificial Sequence: Synthetic oligonucleotide
uucagaauuucaauccagu

SEQ ID NO: 2751485 - RNA, 19 nt, Artificial Sequence
  Description of Artificial Sequence: Synthetic oligonucleotide
ucguuuacaggcacuguag

SEQ ID NO: 2751486 - RNA, 19 nt, Artificial Sequence
  Description of Artificial Sequence: Synthetic oligonucleotide
aaaucguuuacaggcacug

SEQ ID NO: 2751487 - RNA, 19 nt, Artificial Sequence
  Description of Artificial Sequence: Synthetic oligonucleotide
uaaauaaucucugcuauuu

SEQ ID NO: 2751488 - RNA, 19 nt, Artificial Sequence
  Description of Artificial Sequence: Synthetic oligonucleotide
ucauccgugaggccgcugg

SEQ ID NO: 2751489 - RNA, 19 nt, Artificial Sequence
  Description of Artificial Sequence: Synthetic oligonucleotide
uggagaacguccaugcugu

SEQ ID NO: 2751490 - RNA, 19 nt, Artificial Sequence
  Description of Artificial Sequence: Synthetic oligonucleotide
uuuugaaguagcgucaguc

SEQ ID NO: 2751491 - RNA, 19 nt, Artificial Sequence
  Description of Artificial Sequence: Synthetic oligonucleotide
agaccuuucauuuuaccau

SEQ ID NO: 2751492 - RNA, 19 nt, Artificial Sequence
  Description of Artificial Sequence: Synthetic oligonucleotide
uucaaaucguuuacaggca

SEQ ID NO: 2751493 - RNA, 19 nt, Artificial Sequence
  Description of Artificial Sequence: Synthetic oligonucleotide
aaugugaccaaauccccua

SEQ ID NO: 2751494 - RNA, 19 nt, Artificial Sequence
  Description of Artificial Sequence: Synthetic oligonucleotide
ucuuaggauccuuaauucu

SEQ ID NO: 2751495 - RNA, 19 nt, Artificial Sequence
  Description of Artificial Sequence: Synthetic oligonucleotide
aucgaaggaaaaucaaacu

SEQ ID NO: 2751496 - RNA, 19 nt, Artificial Sequence
  Description of Artificial Sequence: Synthetic oligonucleotide
uucuuaggauccuuaauuc

SEQ ID NO: 2751497 - RNA, 19 nt, Artificial Sequence
  Description of Artificial Sequence: Synthetic oligonucleotide
ucguaagccaagaaauaga

SEQ ID NO: 2751498 - RNA, 19 nt, Artificial Sequence
  Description of Artificial Sequence: Synthetic oligonucleotide
aauuucaucgaaggaaaau

SEQ ID NO: 2751499 - RNA, 19 nt, Artificial Sequence
  Description of Artificial Sequence: Synthetic oligonucleotide
gaaauagagggaaaauuuc

SEQ ID NO: 2751500 - RNA, 19 nt, Artificial Sequence
  Description of Artificial Sequence: Synthetic oligonucleotide
ucaaaucguuuacaggcac

SEQ ID NO: 2751501 - RNA, 19 nt, Artificial Sequence
  Description of Artificial Sequence: Synthetic oligonucleotide
gauucagaauuucaaucca

SEQ ID NO: 2751502 - RNA, 19 nt, Artificial Sequence
  Description of Artificial Sequence: Synthetic oligonucleotide
uagcgucaguccaagaacc

SEQ ID NO: 2751503 - RNA, 19 nt, Artificial Sequence
  Description of Artificial Sequence: Synthetic oligonucleotide
cucacagagcuaaauaauc

SEQ ID NO: 2751504 - RNA, 19 nt, Artificial Sequence
  Description of Artificial Sequence: Synthetic oligonucleotide
guggcuuuccuggagaacg

SEQ ID NO: 2751505 - RNA, 19 nt, Artificial Sequence
  Description of Artificial Sequence: Synthetic oligonucleotide
uuagggaugucauucuuau

SEQ ID NO: 2751506 - RNA, 19 nt, Artificial Sequence
  Description of Artificial Sequence: Synthetic oligonucleotide
uucuuauccucguaagcca

SEQ ID NO: 2751507 - RNA, 19 nt, Artificial Sequence
  Description of Artificial Sequence: Synthetic oligonucleotide
ugugaccaaauccccuagg

SEQ ID NO: 2751508 - RNA, 19 nt, Artificial Sequence
  Description of Artificial Sequence: Synthetic oligonucleotide
cuugaaugaaugccagacc

SEQ ID NO: 2751509 - RNA, 19 nt, Artificial Sequence
  Description of Artificial Sequence: Synthetic oligonucleotide
agaaauagagggaaaauuu

SEQ ID NO: 2751510 - RNA, 19 nt, Artificial Sequence
  Description of Artificial Sequence: Synthetic oligonucleotide
guagacaucagggacagca

SEQ ID NO: 2751511 - RNA, 19 nt, Artificial Sequence
  Description of Artificial Sequence: Synthetic oligonucleotide
ucugcuauuuuguuaggau

SEQ ID NO: 2751512 - RNA, 19 nt, Artificial Sequence
  Description of Artificial Sequence: Synthetic oligonucleotide
aauagagggaaaauuucau

SEQ ID NO: 2751513 - RNA, 19 nt, Artificial Sequence
  Description of Artificial Sequence: Synthetic oligonucleotide
ugcuguugugguaacuuug

SEQ ID NO: 2751514 - RNA, 19 nt, Artificial Sequence
  Description of Artificial Sequence: Synthetic oligonucleotide
aguccaagaacccucguau

SEQ ID NO: 2751515 - RNA, 19 nt, Artificial Sequence
  Description of Artificial Sequence: Synthetic oligonucleotide
aguagcgucaguccaagaa

SEQ ID NO: 2751516 - RNA, 19 nt, Artificial Sequence
  Description of Artificial Sequence: Synthetic oligonucleotide
aacucaaggguggcuuucc

SEQ ID NO: 2751517 - RNA, 19 nt, Artificial Sequence
  Description of Artificial Sequence: Synthetic oligonucleotide
ggauccuuaauucucagca

SEQ ID NO: 2751518 - RNA, 19 nt, Artificial Sequence
  Description of Artificial Sequence: Synthetic oligonucleotide
aucccaaugugaccaaauc

SEQ ID NO: 2751519 - RNA, 19 nt, Artificial Sequence
  Description of Artificial Sequence: Synthetic oligonucleotide
ggcacuguagacaucaggg

SEQ ID NO: 2751520 - RNA, 19 nt, Artificial Sequence
  Description of Artificial Sequence: Synthetic oligonucleotide
uccaagaacccucguauaa

SEQ ID NO: 2751521 - RNA, 19 nt, Artificial Sequence
  Description of Artificial Sequence: Synthetic oligonucleotide
uccuggagaacguccaugc

SEQ ID NO: 2751522 - RNA, 19 nt, Artificial Sequence
  Description of Artificial Sequence: Synthetic oligonucleotide
uugucuuuagggaugucau

SEQ ID NO: 2751523 - RNA, 19 nt, Artificial Sequence
  Description of Artificial Sequence: Synthetic oligonucleotide
agcuaaauaaucucugcua

SEQ ID NO: 2751524 - RNA, 19 nt, Artificial Sequence
  Description of Artificial Sequence: Synthetic oligonucleotide
agggacagcaaucccaaug

SEQ ID NO: 2751525 - RNA, 19 nt, Artificial Sequence
  Description of Artificial Sequence: Synthetic oligonucleotide
cccaaugugaccaaauccc

SEQ ID NO: 2751526 - RNA, 19 nt, Artificial Sequence
  Description of Artificial Sequence: Synthetic oligonucleotide
uucaucgaaggaaaaucaa

SEQ ID NO: 2751527 - RNA, 19 nt, Artificial Sequence
  Description of Artificial Sequence: Synthetic oligonucleotide
cucguaagccaagaaauag

SEQ ID NO: 2751528 - RNA, 19 nt, Artificial Sequence
  Description of Artificial Sequence: Synthetic oligonucleotide
uuuagggaugucauucuua

SEQ ID NO: 2751529 - RNA, 19 nt, Artificial Sequence
  Description of Artificial Sequence: Synthetic oligonucleotide
cucccagcucuucaaaucg

SEQ ID NO: 2751530 - RNA, 19 nt, Artificial Sequence
  Description of Artificial Sequence: Synthetic oligonucleotide
aaauaaucucugcuauuuu

SEQ ID NO: 2751531 - RNA, 19 nt, Artificial Sequence
  Description of Artificial Sequence: Synthetic oligonucleotide
cagagcuaaauaaucucug

SEQ ID NO: 2751532 - RNA, 19 nt, Artificial Sequence
  Description of Artificial Sequence: Synthetic oligonucleotide
aacuuuugaaguagcguca

SEQ ID NO: 2751533 - RNA, 19 nt, Artificial Sequence
  Description of Artificial Sequence: Synthetic oligonucleotide
ggaaaaucaaacuuuugaa

SEQ ID NO: 2751534 - RNA, 19 nt, Artificial Sequence
  Description of Artificial Sequence: Synthetic oligonucleotide
cauuaggaaguccuuggug

SEQ ID NO: 2751535 - RNA, 19 nt, Artificial Sequence
  Description of Artificial Sequence: Synthetic oligonucleotide
caucguuugcugcauuagg

SEQ ID NO: 2751536 - RNA, 19 nt, Artificial Sequence
  Description of Artificial Sequence: Synthetic oligonucleotide
ugaccaaauccccuagggu

SEQ ID NO: 2751537 - RNA, 19 nt, Artificial Sequence
  Description of Artificial Sequence: Synthetic oligonucleotide
uuugggucucaucaucuuc

SEQ ID NO: 2751538 - RNA, 19 nt, Artificial Sequence
  Description of Artificial Sequence: Synthetic oligonucleotide
ucuuuagggaugucauucu

SEQ ID NO: 2751539 - RNA, 19 nt, Artificial Sequence
  Description of Artificial Sequence: Synthetic oligonucleotide
ucaucagguuucuucacaa

SEQ ID NO: 2751540 - RNA, 19 nt, Artificial Sequence
  Description of Artificial Sequence: Synthetic oligonucleotide
uucacaaacuugacuccca

SEQ ID NO: 2751541 - RNA, 19 nt, Artificial Sequence
  Description of Artificial Sequence: Synthetic oligonucleotide
cuggagaacguccaugcug

SEQ ID NO: 2751542 - RNA, 19 nt, Artificial Sequence
  Description of Artificial Sequence: Synthetic oligonucleotide
guagcgucaguccaagaac

SEQ ID NO: 2751543 - RNA, 19 nt, Artificial Sequence
  Description of Artificial Sequence: Synthetic oligonucleotide
auaaucucugcuauuuugu

SEQ ID NO: 2751544 - RNA, 19 nt, Artificial Sequence
  Description of Artificial Sequence: Synthetic oligonucleotide
ugaaguagcgucaguccaa

SEQ ID NO: 2751545 - RNA, 19 nt, Artificial Sequence
  Description of Artificial Sequence: Synthetic oligonucleotide
ugaguugcuguugugguaa

SEQ ID NO: 2751546 - RNA, 19 nt, Artificial Sequence
  Description of Artificial Sequence: Synthetic oligonucleotide
ucuuauccucguaagccaa

SEQ ID NO: 2751547 - RNA, 19 nt, Artificial Sequence
  Description of Artificial Sequence: Synthetic oligonucleotide
guuuacaggcacuguagac

SEQ ID NO: 2751548 - RNA, 19 nt, Artificial Sequence
  Description of Artificial Sequence: Synthetic oligonucleotide
acguccaugcuguucuuuc

SEQ ID NO: 2751549 - RNA, 19 nt, Artificial Sequence
  Description of Artificial Sequence: Synthetic oligonucleotide
aucaucagguuucuucaca

SEQ ID NO: 2751550 - RNA, 19 nt, Artificial Sequence
  Description of Artificial Sequence: Synthetic oligonucleotide
cuucacaaacuugacuccc

SEQ ID NO: 2751551 - RNA, 19 nt, Artificial Sequence
  Description of Artificial Sequence: Synthetic oligonucleotide
acagagcuaaauaaucucu

SEQ ID NO: 2751552 - RNA, 19 nt, Artificial Sequence
  Description of Artificial Sequence: Synthetic oligonucleotide
acaggcacuguagacauca

SEQ ID NO: 2751553 - RNA, 19 nt, Artificial Sequence
  Description of Artificial Sequence: Synthetic oligonucleotide
gucugaguugcuguugugg

SEQ ID NO: 2751554 - RNA, 19 nt, Artificial Sequence
  Description of Artificial Sequence: Synthetic oligonucleotide
cagaccuuucauuuuacca

SEQ ID NO: 2751555 - RNA, 19 nt, Artificial Sequence
  Description of Artificial Sequence: Synthetic oligonucleotide
ucguuugcugcauuaggaa

SEQ ID NO: 2751556 - RNA, 19 nt, Artificial Sequence
  Description of Artificial Sequence: Synthetic oligonucleotide
aucguuuacaggcacugua

SEQ ID NO: 2751557 - RNA, 19 nt, Artificial Sequence
  Description of Artificial Sequence: Synthetic oligonucleotide
acuuuugaaguagcgucag

SEQ ID NO: 2751558 - RNA, 19 nt, Artificial Sequence
  Description of Artificial Sequence: Synthetic oligonucleotide
auccucguaagccaagaaa

SEQ ID NO: 2751559 - RNA, 19 nt, Artificial Sequence
  Description of Artificial Sequence: Synthetic oligonucleotide
gagggaaaauuucaucgaa

SEQ ID NO: 2751560 - RNA, 19 nt, Artificial Sequence
  Description of Artificial Sequence: Synthetic oligonucleotide
uugugguaacuuugggucu

SEQ ID NO: 2751561 - RNA, 19 nt, Artificial Sequence
  Description of Artificial Sequence: Synthetic oligonucleotide
agggaaaauuucaucgaag

SEQ ID NO: 2751562 - RNA, 19 nt, Artificial Sequence
  Description of Artificial Sequence: Synthetic oligonucleotide
gaaguagcgucaguccaag

SEQ ID NO: 2751563 - RNA, 19 nt, Artificial Sequence
  Description of Artificial Sequence: Synthetic oligonucleotide
acuucuuaggauccuuaau

SEQ ID NO: 2751564 - RNA, 19 nt, Artificial Sequence
  Description of Artificial Sequence: Synthetic oligonucleotide
guuaggauucagaauuuca

SEQ ID NO: 2751565 - RNA, 19 nt, Artificial Sequence
  Description of Artificial Sequence: Synthetic oligonucleotide
caauccaguagccgucagg

SEQ ID NO: 2751566 - RNA, 19 nt, Artificial Sequence
  Description of Artificial Sequence: Synthetic oligonucleotide
uccgggucggagcagcagc

SEQ ID NO: 2751567 - RNA, 19 nt, Artificial Sequence
  Description of Artificial Sequence: Synthetic oligonucleotide
aagccaagaaauagaggga

SEQ ID NO: 2751568 - RNA, 19 nt, Artificial Sequence
  Description of Artificial Sequence: Synthetic oligonucleotide
ucaucuucagugccccagu

SEQ ID NO: 2751569 - RNA, 19 nt, Artificial Sequence
  Description of Artificial Sequence: Synthetic oligonucleotide
cagggucuugaaugaaugc

SEQ ID NO: 2751570 - RNA, 19 nt, Artificial Sequence
  Description of Artificial Sequence: Synthetic oligonucleotide
ugccagaccuuucauuuua

SEQ ID NO: 2751571 - RNA, 19 nt, Artificial Sequence
  Description of Artificial Sequence: Synthetic oligonucleotide
cguaagccaagaaauagag

SEQ ID NO: 2751572 - RNA, 19 nt, Artificial Sequence
  Description of Artificial Sequence: Synthetic oligonucleotide
ugcuguucuuucacucuug

SEQ ID NO: 2751573 - RNA, 19 nt, Artificial Sequence
  Description of Artificial Sequence: Synthetic oligonucleotide
ggaaaauuucaucgaagga

SEQ ID NO: 2751574 - RNA, 19 nt, Artificial Sequence
  Description of Artificial Sequence: Synthetic oligonucleotide
ucucugcuauuuuguuagg

SEQ ID NO: 2751575 - RNA, 19 nt, Artificial Sequence
  Description of Artificial Sequence: Synthetic oligonucleotide
uuauccucguaagccaaga

SEQ ID NO: 2751576 - RNA, 19 nt, Artificial Sequence
  Description of Artificial Sequence: Synthetic oligonucleotide
gagcuaaauaaucucugcu

SEQ ID NO: 2751577 - RNA, 19 nt, Artificial Sequence
  Description of Artificial Sequence: Synthetic oligonucleotide
cuuucacucuugucuuuag

SEQ ID NO: 2751578 - RNA, 19 nt, Artificial Sequence
  Description of Artificial Sequence: Synthetic oligonucleotide
augugaccaaauccccuag

SEQ ID NO: 2751579 - RNA, 19 nt, Artificial Sequence
  Description of Artificial Sequence: Synthetic oligonucleotide
augucauucuuauccucgu

SEQ ID NO: 2751580 - RNA, 19 nt, Artificial Sequence
  Description of Artificial Sequence: Synthetic oligonucleotide
cacaaacuugacucccagc

SEQ ID NO: 2751581 - RNA, 19 nt, Artificial Sequence
  Description of Artificial Sequence: Synthetic oligonucleotide
gccgucagggucuugaaug

SEQ ID NO: 2751582 - RNA, 19 nt, Artificial Sequence
  Description of Artificial Sequence: Synthetic oligonucleotide
uccccuagggucugaguug

SEQ ID NO: 2751583 - RNA, 19 nt, Artificial Sequence
  Description of Artificial Sequence: Synthetic oligonucleotide
aucguuugcugcauuagga

SEQ ID NO: 2751584 - RNA, 19 nt, Artificial Sequence
  Description of Artificial Sequence: Synthetic oligonucleotide
uucagugccccaguugugu

SEQ ID NO: 2751585 - RNA, 19 nt, Artificial Sequence
  Description of Artificial Sequence: Synthetic oligonucleotide
uguuaggauucagaauuuc

SEQ ID NO: 2751586 - RNA, 19 nt, Artificial Sequence
  Description of Artificial Sequence: Synthetic oligonucleotide
cuauuuuguuaggauucag

SEQ ID NO: 2751587 - RNA, 19 nt, Artificial Sequence
  Description of Artificial Sequence: Synthetic oligonucleotide
ucaauccaguagccgucag

SEQ ID NO: 2751588 - RNA, 19 nt, Artificial Sequence
  Description of Artificial Sequence: Synthetic oligonucleotide
auccccuagggucugaguu

SEQ ID NO: 2751589 - RNA, 19 nt, Artificial Sequence
  Description of Artificial Sequence: Synthetic oligonucleotide
agccaagaaauagagggaa

SEQ ID NO: 2751590 - RNA, 19 nt, Artificial Sequence
  Description of Artificial Sequence: Synthetic oligonucleotide
uagacaucagggacagcaa

SEQ ID NO: 2751591 - RNA, 19 nt, Artificial Sequence
  Description of Artificial Sequence: Synthetic oligonucleotide
uuguuaggauucagaauuu

SEQ ID NO: 2751592 - RNA, 19 nt, Artificial Sequence
  Description of Artificial Sequence: Synthetic oligonucleotide
cuguagacaucagggacag

SEQ ID NO: 2751593 - RNA, 19 nt, Artificial Sequence
  Description of Artificial Sequence: Synthetic oligonucleotide
uuugcugcauuaggaaguc

SEQ ID NO: 2751594 - RNA, 19 nt, Artificial Sequence
  Description of Artificial Sequence: Synthetic oligonucleotide
uaacuuugggucucaucau

SEQ ID NO: 2751595 - RNA, 19 nt, Artificial Sequence
  Description of Artificial Sequence: Synthetic oligonucleotide
uccaugcuguucuuucacu

SEQ ID NO: 2751596 - RNA, 19 nt, Artificial Sequence
  Description of Artificial Sequence: Synthetic oligonucleotide
aaauccccuagggucugag

SEQ ID NO: 2751597 - RNA, 19 nt, Artificial Sequence
  Description of Artificial Sequence: Synthetic oligonucleotide
agacaucagggacagcaau

SEQ ID NO: 2751598 - RNA, 19 nt, Artificial Sequence
  Description of Artificial Sequence: Synthetic oligonucleotide
aaauuucaucgaaggaaaa

SEQ ID NO: 2751599 - RNA, 19 nt, Artificial Sequence
  Description of Artificial Sequence: Synthetic oligonucleotide
aucagggacagcaauccca

SEQ ID NO: 2751600 - RNA, 19 nt, Artificial Sequence
  Description of Artificial Sequence: Synthetic oligonucleotide
ggugcugggguccgggucg

SEQ ID NO: 2751601 - RNA, 19 nt, Artificial Sequence
  Description of Artificial Sequence: Synthetic oligonucleotide
uugacucccagcucuucaa

SEQ ID NO: 2751602 - RNA, 19 nt, Artificial Sequence
  Description of Artificial Sequence: Synthetic oligonucleotide
uauccucguaagccaagaa

SEQ ID NO: 2751603 - RNA, 19 nt, Artificial Sequence
  Description of Artificial Sequence: Synthetic oligonucleotide
agcgucaguccaagaaccc

SEQ ID NO: 2751604 - RNA, 19 nt, Artificial Sequence
  Description of Artificial Sequence: Synthetic oligonucleotide
gucaguccaagaacccucg

SEQ ID NO: 2751605 - RNA, 19 nt, Artificial Sequence
  Description of Artificial Sequence: Synthetic oligonucleotide
aaucguuuacaggcacugu

SEQ ID NO: 2751606 - RNA, 19 nt, Artificial Sequence
  Description of Artificial Sequence: Synthetic oligonucleotide
gacuucuuaggauccuuaa

SEQ ID NO: 2751607 - RNA, 19 nt, Artificial Sequence
  Description of Artificial Sequence: Synthetic oligonucleotide
caaacuugacucccagcuc

SEQ ID NO: 2751608 - RNA, 19 nt, Artificial Sequence
  Description of Artificial Sequence: Synthetic oligonucleotide
uucaauccaguagccguca

SEQ ID NO: 2751609 - RNA, 19 nt, Artificial Sequence
  Description of Artificial Sequence: Synthetic oligonucleotide
aauccccuagggucugagu

SEQ ID NO: 2751610 - RNA, 19 nt, Artificial Sequence
  Description of Artificial Sequence: Synthetic oligonucleotide
cucaaggguggcuuuccug

SEQ ID NO: 2751611 - RNA, 19 nt, Artificial Sequence
  Description of Artificial Sequence: Synthetic oligonucleotide
caucaucagguuucuucac

SEQ ID NO: 2751612 - RNA, 19 nt, Artificial Sequence
  Description of Artificial Sequence: Synthetic oligonucleotide
caagaacccucguauaaaa

SEQ ID NO: 2751613 - RNA, 19 nt, Artificial Sequence
  Description of Artificial Sequence: Synthetic oligonucleotide
ucagugccccaguugugug

SEQ ID NO: 2751614 - RNA, 19 nt, Artificial Sequence
  Description of Artificial Sequence: Synthetic oligonucleotide
gccauggccguccuggagg

SEQ ID NO: 2751615 - RNA, 19 nt, Artificial Sequence
  Description of Artificial Sequence: Synthetic oligonucleotide
ugucauucuuauccucgua

SEQ ID NO: 2751616 - RNA, 19 nt, Artificial Sequence
  Description of Artificial Sequence: Synthetic oligonucleotide
accaaauccccuagggucu

SEQ ID NO: 2751617 - RNA, 19 nt, Artificial Sequence
  Description of Artificial Sequence: Synthetic oligonucleotide
acuuugggucucaucaucu

SEQ ID NO: 2751618 - RNA, 19 nt, Artificial Sequence
  Description of Artificial Sequence: Synthetic oligonucleotide
auggccguccuggaggauc

SEQ ID NO: 2751619 - RNA, 19 nt, Artificial Sequence
  Description of Artificial Sequence: Synthetic oligonucleotide
gaaguccuuggugcugggg

SEQ ID NO: 2751620 - RNA, 19 nt, Artificial Sequence
  Description of Artificial Sequence: Synthetic oligonucleotide
ugggguccgggucggagca

SEQ ID NO: 2751621 - RNA, 19 nt, Artificial Sequence
  Description of Artificial Sequence: Synthetic oligonucleotide
caucagggacagcaauccc

SEQ ID NO: 2751622 - RNA, 19 nt, Artificial Sequence
  Description of Artificial Sequence: Synthetic oligonucleotide
ugccauggccguccuggag

SEQ ID NO: 2751623 - RNA, 19 nt, Artificial Sequence
  Description of Artificial Sequence: Synthetic oligonucleotide
agcaucguuugcugcauua

SEQ ID NO: 2751624 - RNA, 19 nt, Artificial Sequence
  Description of Artificial Sequence: Synthetic oligonucleotide
ggucuugaaugaaugccag

SEQ ID NO: 2751625 - RNA, 19 nt, Artificial Sequence
  Description of Artificial Sequence: Synthetic oligonucleotide
ucccagcucuucaaaucgu

SEQ ID NO: 2751626 - RNA, 19 nt, Artificial Sequence
  Description of Artificial Sequence: Synthetic oligonucleotide
auuuuaccaucaucagguu

SEQ ID NO: 2751627 - RNA, 19 nt, Artificial Sequence
  Description of Artificial Sequence: Synthetic oligonucleotide
ugacucccagcucuucaaa

SEQ ID NO: 2751628 - RNA, 19 nt, Artificial Sequence
  Description of Artificial Sequence: Synthetic oligonucleotide
guuugcugcauuaggaagu

SEQ ID NO: 2751629 - RNA, 19 nt, Artificial Sequence
  Description of Artificial Sequence: Synthetic oligonucleotide
ucaacucaaggguggcuuu

SEQ ID NO: 2751630 - RNA, 19 nt, Artificial Sequence
  Description of Artificial Sequence: Synthetic oligonucleotide
uugcuguugugguaacuuu

SEQ ID NO: 2751631 - RNA, 19 nt, Artificial Sequence
  Description of Artificial Sequence: Synthetic oligonucleotide
gcuaaauaaucucugcuau

SEQ ID NO: 2751632 - RNA, 19 nt, Artificial Sequence
  Description of Artificial Sequence: Synthetic oligonucleotide
uggcuuuccuggagaacgu

SEQ ID NO: 2751633 - RNA, 19 nt, Artificial Sequence
  Description of Artificial Sequence: Synthetic oligonucleotide
aaguagcgucaguccaaga

SEQ ID NO: 2751634 - RNA, 19 nt, Artificial Sequence
  Description of Artificial Sequence: Synthetic oligonucleotide
caaacuuuugaaguagcgu

SEQ ID NO: 2751635 - RNA, 19 nt, Artificial Sequence
  Description of Artificial Sequence: Synthetic oligonucleotide
cuguucuuucacucuuguc

SEQ ID NO: 2751636 - RNA, 19 nt, Artificial Sequence
  Description of Artificial Sequence: Synthetic oligonucleotide
ucaguccaagaacccucgu

SEQ ID NO: 2751637 - RNA, 19 nt, Artificial Sequence
  Description of Artificial Sequence: Synthetic oligonucleotide
ugauggcggccucauccgu

SEQ ID NO: 2751638 - RNA, 19 nt, Artificial Sequence
  Description of Artificial Sequence: Synthetic oligonucleotide
gauggcggccucauccgug

SEQ ID NO: 2751639 - RNA, 19 nt, Artificial Sequence
  Description of Artificial Sequence: Synthetic oligonucleotide
cugggguccgggucggagc

SEQ ID NO: 2751640 - RNA, 19 nt, Artificial Sequence
  Description of Artificial Sequence: Synthetic oligonucleotide
gauccuuaauucucagcau

SEQ ID NO: 2751641 - RNA, 19 nt, Artificial Sequence
  Description of Artificial Sequence: Synthetic oligonucleotide
guagccgucagggucuuga

SEQ ID NO: 2751642 - RNA, 19 nt, Artificial Sequence
  Description of Artificial Sequence: Synthetic oligonucleotide
ugucaacucaaggguggcu

SEQ ID NO: 2751643 - RNA, 19 nt, Artificial Sequence
  Description of Artificial Sequence: Synthetic oligonucleotide
cuucagugccccaguugug

SEQ ID NO: 2751644 - RNA, 19 nt, Artificial Sequence
  Description of Artificial Sequence: Synthetic oligonucleotide
cguuugcugcauuaggaag

SEQ ID NO: 2751645 - RNA, 19 nt, Artificial Sequence
  Description of Artificial Sequence: Synthetic oligonucleotide
acucaaggguggcuuuccu

SEQ ID NO: 2751646 - RNA, 19 nt, Artificial Sequence
  Description of Artificial Sequence: Synthetic oligonucleotide
uucuuucacucuugucuuu

SEQ ID NO: 2751647 - RNA, 19 nt, Artificial Sequence
  Description of Artificial Sequence: Synthetic oligonucleotide
auggcggccucauccguga

SEQ ID NO: 2751648 - RNA, 19 nt, Artificial Sequence
  Description of Artificial Sequence: Synthetic oligonucleotide
uagggaugucauucuuauc

SEQ ID NO: 2751649 - RNA, 19 nt, Artificial Sequence
  Description of Artificial Sequence: Synthetic oligonucleotide
uagggucugaguugcuguu

SEQ ID NO: 2751650 - RNA, 19 nt, Artificial Sequence
  Description of Artificial Sequence: Synthetic oligonucleotide
cauccgugaggccgcuggg

SEQ ID NO: 2751651 - RNA, 19 nt, Artificial Sequence
  Description of Artificial Sequence: Synthetic oligonucleotide
ggaugucauucuuauccuc

SEQ ID NO: 2751652 - RNA, 19 nt, Artificial Sequence
  Description of Artificial Sequence: Synthetic oligonucleotide
gggucuugaaugaaugcca

SEQ ID NO: 2751653 - RNA, 19 nt, Artificial Sequence
  Description of Artificial Sequence: Synthetic oligonucleotide
uccuuggugcugggguccg

SEQ ID NO: 2751654 - RNA, 19 nt, Artificial Sequence
  Description of Artificial Sequence: Synthetic oligonucleotide
cucugcuauuuuguuagga

SEQ ID NO: 2751655 - RNA, 19 nt, Artificial Sequence
  Description of Artificial Sequence: Synthetic oligonucleotide
accuuucauuuuaccauca

SEQ ID NO: 2751656 - RNA, 19 nt, Artificial Sequence
  Description of Artificial Sequence: Synthetic oligonucleotide
agcagcugauggcggccuc

SEQ ID NO: 2751657 - RNA, 19 nt, Artificial Sequence
  Description of Artificial Sequence: Synthetic oligonucleotide
caugcuguucuuucacucu

SEQ ID NO: 2751658 - RNA, 19 nt, Artificial Sequence
  Description of Artificial Sequence: Synthetic oligonucleotide
ccagaccuuucauuuuacc

SEQ ID NO: 2751659 - RNA, 19 nt, Artificial Sequence
  Description of Artificial Sequence: Synthetic oligonucleotide
gaguugcuguugugguaac

SEQ ID NO: 2751660 - RNA, 19 nt, Artificial Sequence
  Description of Artificial Sequence: Synthetic oligonucleotide
ccaguugugugucaacuca

SEQ ID NO: 2751661 - RNA, 19 nt, Artificial Sequence
  Description of Artificial Sequence: Synthetic oligonucleotide
cuagggucugaguugcugu

SEQ ID NO: 2751662 - RNA, 19 nt, Artificial Sequence
  Description of Artificial Sequence: Synthetic oligonucleotide
cuaaauaaucucugcuauu

SEQ ID NO: 2751663 - RNA, 19 nt, Artificial Sequence
  Description of Artificial Sequence: Synthetic oligonucleotide
auccaguagccgucagggu

SEQ ID NO: 2751664 - RNA, 19 nt, Artificial Sequence
  Description of Artificial Sequence: Synthetic oligonucleotide
gugucaacucaaggguggc

SEQ ID NO: 2751665 - RNA, 19 nt, Artificial Sequence
  Description of Artificial Sequence: Synthetic oligonucleotide
agggucugaguugcuguug

SEQ ID NO: 2751666 - RNA, 19 nt, Artificial Sequence
  Description of Artificial Sequence: Synthetic oligonucleotide
caaaucguuuacaggcacu

SEQ ID NO: 2751667 - RNA, 19 nt, Artificial Sequence
  Description of Artificial Sequence: Synthetic oligonucleotide
caguugugugucaacucaa

SEQ ID NO: 2751668 - RNA, 19 nt, Artificial Sequence
  Description of Artificial Sequence: Synthetic oligonucleotide
aacguccaugcuguucuuu

SEQ ID NO: 2751669 - RNA, 19 nt, Artificial Sequence
  Description of Artificial Sequence: Synthetic oligonucleotide
gcacuguagacaucaggga

SEQ ID NO: 2751670 - RNA, 19 nt, Artificial Sequence
  Description of Artificial Sequence: Synthetic oligonucleotide
gcaucguuugcugcauuag

SEQ ID NO: 2751671 - RNA, 19 nt, Artificial Sequence
  Description of Artificial Sequence: Synthetic oligonucleotide
cugcuauuuuguuaggauu

SEQ ID NO: 2751672 - RNA, 19 nt, Artificial Sequence
  Description of Artificial Sequence: Synthetic oligonucleotide
gcuauuuuguuaggauuca

SEQ ID NO: 2751673 - RNA, 19 nt, Artificial Sequence
  Description of Artificial Sequence: Synthetic oligonucleotide
ggacagcaaucccaaugug

SEQ ID NO: 2751674 - RNA, 19 nt, Artificial Sequence
  Description of Artificial Sequence: Synthetic oligonucleotide
guccuuggugcuggggucc

SEQ ID NO: 2751675 - RNA, 19 nt, Artificial Sequence
  Description of Artificial Sequence: Synthetic oligonucleotide
augccagaccuuucauuuu

SEQ ID NO: 2751676 - RNA, 19 nt, Artificial Sequence
  Description of Artificial Sequence: Synthetic oligonucleotide
caagaaauagagggaaaau

SEQ ID NO: 2751677 - RNA, 19 nt, Artificial Sequence
  Description of Artificial Sequence: Synthetic oligonucleotide
caacucaaggguggcuuuc

SEQ ID NO: 2751678 - RNA, 19 nt, Artificial Sequence
  Description of Artificial Sequence: Synthetic oligonucleotide
uuggugcugggguccgggu

SEQ ID NO: 2751679 - RNA, 19 nt, Artificial Sequence
  Description of Artificial Sequence: Synthetic oligonucleotide
agccgucagggucuugaau

SEQ ID NO: 2751680 - RNA, 19 nt, Artificial Sequence
  Description of Artificial Sequence: Synthetic oligonucleotide
ccaagaaauagagggaaaa

SEQ ID NO: 2751681 - RNA, 19 nt, Artificial Sequence
  Description of Artificial Sequence: Synthetic oligonucleotide
gcggccucauccgugaggc

SEQ ID NO: 2751682 - RNA, 19 nt, Artificial Sequence
  Description of Artificial Sequence: Synthetic oligonucleotide
ggcggccucauccgugagg

SEQ ID NO: 2751683 - RNA, 19 nt, Artificial Sequence
  Description of Artificial Sequence: Synthetic oligonucleotide
guugcuguugugguaacuu

SEQ ID NO: 2751684 - RNA, 19 nt, Artificial Sequence
  Description of Artificial Sequence: Synthetic oligonucleotide
gucggagcagcagcugaug

SEQ ID NO: 2751685 - RNA, 19 nt, Artificial Sequence
  Description of Artificial Sequence: Synthetic oligonucleotide
caguccaagaacccucgua

SEQ ID NO: 2751686 - RNA, 19 nt, Artificial Sequence
  Description of Artificial Sequence: Synthetic oligonucleotide
aacuugacucccagcucuu

SEQ ID NO: 2751687 - RNA, 19 nt, Artificial Sequence
  Description of Artificial Sequence: Synthetic oligonucleotide
guccaagaacccucguaua

SEQ ID NO: 2751688 - RNA, 19 nt, Artificial Sequence
  Description of Artificial Sequence: Synthetic oligonucleotide
uagccgucagggucuugaa

SEQ ID NO: 2751689 - RNA, 19 nt, Artificial Sequence
  Description of Artificial Sequence: Synthetic oligonucleotide
uguagacaucagggacagc

SEQ ID NO: 2751690 - RNA, 19 nt, Artificial Sequence
  Description of Artificial Sequence: Synthetic oligonucleotide
cugaguugcuguuguggua

SEQ ID NO: 2751691 - RNA, 19 nt, Artificial Sequence
  Description of Artificial Sequence: Synthetic oligonucleotide
ggaaguccuuggugcuggg

SEQ ID NO: 2751692 - RNA, 19 nt, Artificial Sequence
  Description of Artificial Sequence: Synthetic oligonucleotide
ggcucugccauggccgucc

SEQ ID NO: 2751693 - RNA, 19 nt, Artificial Sequence
  Description of Artificial Sequence: Synthetic oligonucleotide
cgucaguccaagaacccuc

SEQ ID NO: 2751694 - RNA, 19 nt, Artificial Sequence
  Description of Artificial Sequence: Synthetic oligonucleotide
gggaugucauucuuauccu

SEQ ID NO: 2751695 - RNA, 19 nt, Artificial Sequence
  Description of Artificial Sequence: Synthetic oligonucleotide
ggucugaguugcuguugug

SEQ ID NO: 2751696 - RNA, 19 nt, Artificial Sequence
  Description of Artificial Sequence: Synthetic oligonucleotide
cccaguugugugucaacuc

SEQ ID NO: 2751697 - RNA, 19 nt, Artificial Sequence
  Description of Artificial Sequence: Synthetic oligonucleotide
gucaacucaaggguggcuu

SEQ ID NO: 2751698 - RNA, 19 nt, Artificial Sequence
  Description of Artificial Sequence: Synthetic oligonucleotide
uggcggccucauccgugag

SEQ ID NO: 2751699 - RNA, 19 nt, Artificial Sequence
  Description of Artificial Sequence: Synthetic oligonucleotide
cuuuagggaugucauucuu

SEQ ID NO: 2751700 - RNA, 19 nt, Artificial Sequence
  Description of Artificial Sequence: Synthetic oligonucleotide
ccuagggucugaguugcug

SEQ ID NO: 2751701 - RNA, 19 nt, Artificial Sequence
  Description of Artificial Sequence: Synthetic oligonucleotide
ucuugucuuuagggauguc

SEQ ID NO: 2751702 - RNA, 19 nt, Artificial Sequence
  Description of Artificial Sequence: Synthetic oligonucleotide
gggucggagcagcagcuga

SEQ ID NO: 2751703 - RNA, 19 nt, Artificial Sequence
  Description of Artificial Sequence: Synthetic oligonucleotide
cuuuugaaguagcgucagu

SEQ ID NO: 2751704 - RNA, 19 nt, Artificial Sequence
  Description of Artificial Sequence: Synthetic oligonucleotide
gcauuaggaaguccuuggu

SEQ ID NO: 2751705 - RNA, 19 nt, Artificial Sequence
  Description of Artificial Sequence: Synthetic oligonucleotide
guccgggucggagcagcag

SEQ ID NO: 2751706 - RNA, 19 nt, Artificial Sequence
  Description of Artificial Sequence: Synthetic oligonucleotide
gggucugaguugcuguugu

SEQ ID NO: 2751707 - RNA, 19 nt, Artificial Sequence
  Description of Artificial Sequence: Synthetic oligonucleotide
gguggcuuuccuggagaac

SEQ ID NO: 2751708 - RNA, 19 nt, Artificial Sequence
  Description of Artificial Sequence: Synthetic oligonucleotide
cuuugggucucaucaucuu

SEQ ID NO: 2751709 - RNA, 19 nt, Artificial Sequence
  Description of Artificial Sequence: Synthetic oligonucleotide
gcagcagcugauggcggcc

SEQ ID NO: 2751710 - RNA, 19 nt, Artificial Sequence
  Description of Artificial Sequence: Synthetic oligonucleotide
caaucccaaugugaccaaa

SEQ ID NO: 2751711 - RNA, 19 nt, Artificial Sequence
  Description of Artificial Sequence: Synthetic oligonucleotide
cguuuacaggcacuguaga

SEQ ID NO: 2751712 - RNA, 19 nt, Artificial Sequence
  Description of Artificial Sequence: Synthetic oligonucleotide
ccucguaagccaagaaaua

SEQ ID NO: 2751713 - RNA, 19 nt, Artificial Sequence
  Description of Artificial Sequence: Synthetic oligonucleotide
ccgucagggucuugaauga

SEQ ID NO: 2751714 - RNA, 19 nt, Artificial Sequence
  Description of Artificial Sequence: Synthetic oligonucleotide
ccaagaacccucguauaaa

SEQ ID NO: 2751715 - RNA, 19 nt, Artificial Sequence
  Description of Artificial Sequence: Synthetic oligonucleotide
gccaagaaauagagggaaa

SEQ ID NO: 2751716 - RNA, 19 nt, Artificial Sequence
  Description of Artificial Sequence: Synthetic oligonucleotide
ggacuucuuaggauccuua

SEQ ID NO: 2751717 - RNA, 19 nt, Artificial Sequence
  Description of Artificial Sequence: Synthetic oligonucleotide
gccucauccgugaggccgc

SEQ ID NO: 2751718 - RNA, 19 nt, Artificial Sequence
  Description of Artificial Sequence: Synthetic oligonucleotide
gccagaccuuucauuuuac

SEQ ID NO: 2751719 - RNA, 19 nt, Artificial Sequence
  Description of Artificial Sequence: Synthetic oligonucleotide
ccaguagccgucagggucu

SEQ ID NO: 2751720 - RNA, 19 nt, Artificial Sequence
  Description of Artificial Sequence: Synthetic oligonucleotide
gcugggcgcgggcuguggc

SEQ ID NO: 2751721 - RNA, 19 nt, Artificial Sequence
  Description of Artificial Sequence: Synthetic oligonucleotide
gcaaucccaaugugaccaa

SEQ ID NO: 2751722 - RNA, 19 nt, Artificial Sequence
  Description of Artificial Sequence: Synthetic oligonucleotide
ggguggcuuuccuggagaa

SEQ ID NO: 2751723 - RNA, 19 nt, Artificial Sequence
  Description of Artificial Sequence: Synthetic oligonucleotide
cgugaggccgcugggcgcg

SEQ ID NO: 2751724 - RNA, 19 nt, Artificial Sequence
  Description of Artificial Sequence: Synthetic oligonucleotide
uaccaucaucagguuucuu

SEQ ID NO: 2751725 - RNA, 19 nt, Artificial Sequence
  Description of Artificial Sequence: Synthetic oligonucleotide
cucugccauggccguccug

SEQ ID NO: 2751726 - RNA, 19 nt, Artificial Sequence
  Description of Artificial Sequence: Synthetic oligonucleotide
ggguccgggucggagcagc

SEQ ID NO: 2751727 - RNA, 19 nt, Artificial Sequence
  Description of Artificial Sequence: Synthetic oligonucleotide
ccaaauccccuagggucug

SEQ ID NO: 2751728 - RNA, 19 nt, Artificial Sequence
  Description of Artificial Sequence: Synthetic oligonucleotide
ccgugaggccgcugggcgc

SEQ ID NO: 2751729 - RNA, 19 nt, Artificial Sequence
  Description of Artificial Sequence: Synthetic oligonucleotide
aguagccgucagggucuug

SEQ ID NO: 2751730 - RNA, 19 nt, Artificial Sequence
  Description of Artificial Sequence: Synthetic oligonucleotide
gccccaguugugugucaac

SEQ ID NO: 2751731 - RNA, 19 nt, Artificial Sequence
  Description of Artificial Sequence: Synthetic oligonucleotide
ccauggccguccuggagga

SEQ ID NO: 2751732 - RNA, 19 nt, Artificial Sequence
  Description of Artificial Sequence: Synthetic oligonucleotide
cucauccgugaggccgcug

SEQ ID NO: 2751733 - RNA, 19 nt, Artificial Sequence
  Description of Artificial Sequence: Synthetic oligonucleotide
caaauccccuagggucuga

SEQ ID NO: 2751734 - RNA, 19 nt, Artificial Sequence
  Description of Artificial Sequence: Synthetic oligonucleotide
gugccccaguuguguguca

SEQ ID NO: 2751735 - RNA, 19 nt, Artificial Sequence
  Description of Artificial Sequence: Synthetic oligonucleotide
caucuucagugccccaguu

SEQ ID NO: 2751736 - RNA, 19 nt, Artificial Sequence
  Description of Artificial Sequence: Synthetic oligonucleotide
uggcucugccauggccguc

SEQ ID NO: 2751737 - RNA, 19 nt, Artificial Sequence
  Description of Artificial Sequence: Synthetic oligonucleotide
gcagcugauggcggccuca

SEQ ID NO: 2751738 - RNA, 19 nt, Artificial Sequence
  Description of Artificial Sequence: Synthetic oligonucleotide
gugaggccgcugggcgcgg

SEQ ID NO: 2751739 - RNA, 19 nt, Artificial Sequence
  Description of Artificial Sequence: Synthetic oligonucleotide
cugggcgcgggcuguggcu

SEQ ID NO: 2751740 - RNA, 19 nt, Artificial Sequence
  Description of Artificial Sequence: Synthetic oligonucleotide
gcgucaguccaagaacccu

SEQ ID NO: 2751741 - RNA, 19 nt, Artificial Sequence
  Description of Artificial Sequence: Synthetic oligonucleotide
ccuuaauucucagcaucgu

SEQ ID NO: 2751742 - RNA, 19 nt, Artificial Sequence
  Description of Artificial Sequence: Synthetic oligonucleotide
gcugcauuaggaaguccuu

SEQ ID NO: 2751743 - RNA, 19 nt, Artificial Sequence
  Description of Artificial Sequence: Synthetic oligonucleotide
ccccaguugugugucaacu

SEQ ID NO: 2751744 - RNA, 19 nt, Artificial Sequence
  Description of Artificial Sequence: Synthetic oligonucleotide
ggucggagcagcagcugau

SEQ ID NO: 2751745 - RNA, 19 nt, Artificial Sequence
  Description of Artificial Sequence: Synthetic oligonucleotide
cagcagcugauggcggccu

SEQ ID NO: 2751746 - RNA, 19 nt, Artificial Sequence
  Description of Artificial Sequence: Synthetic oligonucleotide
ccuggagaacguccaugcu

SEQ ID NO: 2751747 - RNA, 19 nt, Artificial Sequence
  Description of Artificial Sequence: Synthetic oligonucleotide
gggguccgggucggagcag

SEQ ID NO: 2751748 - RNA, 19 nt, Artificial Sequence
  Description of Artificial Sequence: Synthetic oligonucleotide
cccagcucuucaaaucguu

SEQ ID NO: 2751749 - RNA, 19 nt, Artificial Sequence
  Description of Artificial Sequence: Synthetic oligonucleotide
gguccgggucggagcagca

SEQ ID NO: 2751750 - RNA, 19 nt, Artificial Sequence
  Description of Artificial Sequence: Synthetic oligonucleotide
ggcgcgggcuguggcucug

SEQ ID NO: 2751751 - RNA, 19 nt, Artificial Sequence
  Description of Artificial Sequence: Synthetic oligonucleotide
cgcgggcuguggcucugcc

SEQ ID NO: 2751752 - RNA, 19 nt, Artificial Sequence
  Description of Artificial Sequence: Synthetic oligonucleotide
cagcugauggcggccucau

SEQ ID NO: 2751753 - RNA, 19 nt, Artificial Sequence
  Description of Artificial Sequence: Synthetic oligonucleotide
cagcaucguuugcugcauu

SEQ ID NO: 2751754 - RNA, 19 nt, Artificial Sequence
  Description of Artificial Sequence: Synthetic oligonucleotide
cggccucauccgugaggcc

SEQ ID NO: 2751755 - RNA, 19 nt, Artificial Sequence
  Description of Artificial Sequence: Synthetic oligonucleotide
cgucagggucuugaaugaa

SEQ ID NO: 2751756 - RNA, 19 nt, Artificial Sequence
  Description of Artificial Sequence: Synthetic oligonucleotide
gcgcgggcuguggcucugc

SEQ ID NO: 2751757 - RNA, 19 nt, Artificial Sequence
  Description of Artificial Sequence: Synthetic oligonucleotide
cgcugggcgcgggcugugg

SEQ ID NO: 2751758 - RNA, 19 nt, Artificial Sequence
  Description of Artificial Sequence: Synthetic oligonucleotide
cauggccguccuggaggau

SEQ ID NO: 2751759 - RNA, 19 nt, Artificial Sequence
  Description of Artificial Sequence: Synthetic oligonucleotide
caguagccgucagggucuu

SEQ ID NO: 2751760 - RNA, 19 nt, Artificial Sequence
  Description of Artificial Sequence: Synthetic oligonucleotide
gccgcugggcgcgggcugu

SEQ ID NO: 2751761 - RNA, 19 nt, Artificial Sequence
  Description of Artificial Sequence: Synthetic oligonucleotide
ccucauccgugaggccgcu

SEQ ID NO: 2751762 - RNA, 19 nt, Artificial Sequence
  Description of Artificial Sequence: Synthetic oligonucleotide
acaaucaucaauuuucugc

SEQ ID NO: 2751763 - RNA, 19 nt, Artificial Sequence
  Description of Artificial Sequence: Synthetic oligonucleotide
auuaauguaaccuagagau

SEQ ID NO: 2751764 - RNA, 19 nt, Artificial Sequence
  Description of Artificial Sequence: Synthetic oligonucleotide
uauuauauaaugcauggca

SEQ ID NO: 2751765 - RNA, 19 nt, Artificial Sequence
  Description of Artificial Sequence: Synthetic oligonucleotide
ucuauuauauaaugcaugg

SEQ ID NO: 2751766 - RNA, 19 nt, Artificial Sequence
  Description of Artificial Sequence: Synthetic oligonucleotide
aaugcaaauuaucucauag

SEQ ID NO: 2751767 - RNA, 19 nt, Artificial Sequence
  Description of Artificial Sequence: Synthetic oligonucleotide
auacugauggccuugauac

SEQ ID NO: 2751768 - RNA, 19 nt, Artificial Sequence
  Description of Artificial Sequence: Synthetic oligonucleotide
acuuggagcaauuaguacc

SEQ ID NO: 2751769 - RNA, 19 nt, Artificial Sequence
  Description of Artificial Sequence: Synthetic oligonucleotide
uauaaagaauagaauaaag

SEQ ID NO: 2751770 - RNA, 19 nt, Artificial Sequence
  Description of Artificial Sequence: Synthetic oligonucleotide
ucauuauuauuccaaagag

SEQ ID NO: 2751771 - RNA, 19 nt, Artificial Sequence
  Description of Artificial Sequence: Synthetic oligonucleotide
aaagaguggaauucagggc

SEQ ID NO: 2751772 - RNA, 19 nt, Artificial Sequence
  Description of Artificial Sequence: Synthetic oligonucleotide
ucuucuauuauauaaugca

SEQ ID NO: 2751773 - RNA, 19 nt, Artificial Sequence
  Description of Artificial Sequence: Synthetic oligonucleotide
acaaccuguauauaagugc

SEQ ID NO: 2751774 - RNA, 19 nt, Artificial Sequence
  Description of Artificial Sequence: Synthetic oligonucleotide
gaauagaauaaagaaaucc

SEQ ID NO: 2751775 - RNA, 19 nt, Artificial Sequence
  Description of Artificial Sequence: Synthetic oligonucleotide
auuauuauuccaaagagug

SEQ ID NO: 2751776 - RNA, 19 nt, Artificial Sequence
  Description of Artificial Sequence: Synthetic oligonucleotide
aaauucuugaucaaagcuc

SEQ ID NO: 2751777 - RNA, 19 nt, Artificial Sequence
  Description of Artificial Sequence: Synthetic oligonucleotide
aauucuugaucaaagcucg

SEQ ID NO: 2751778 - RNA, 19 nt, Artificial Sequence
  Description of Artificial Sequence: Synthetic oligonucleotide
uaucacaugucacaacucg

SEQ ID NO: 2751779 - RNA, 19 nt, Artificial Sequence
  Description of Artificial Sequence: Synthetic oligonucleotide
uaaugcauggcaaacuuag

SEQ ID NO: 2751780 - RNA, 19 nt, Artificial Sequence
  Description of Artificial Sequence: Synthetic oligonucleotide
aauagaauaaagaaaucca

SEQ ID NO: 2751781 - RNA, 19 nt, Artificial Sequence
  Description of Artificial Sequence: Synthetic oligonucleotide
uauauaagugccacaauca

SEQ ID NO: 2751782 - RNA, 19 nt, Artificial Sequence
  Description of Artificial Sequence: Synthetic oligonucleotide
aauuaauguaaccuagaga

SEQ ID NO: 2751783 - RNA, 19 nt, Artificial Sequence
  Description of Artificial Sequence: Synthetic oligonucleotide
aaugguuccugccacaaug

SEQ ID NO: 2751784 - RNA, 19 nt, Artificial Sequence
  Description of Artificial Sequence: Synthetic oligonucleotide
uagaauaaagaaauccacc

SEQ ID NO: 2751785 - RNA, 19 nt, Artificial Sequence
  Description of Artificial Sequence: Synthetic oligonucleotide
agaauaaagaaauccacca

SEQ ID NO: 2751786 - RNA, 19 nt, Artificial Sequence
  Description of Artificial Sequence: Synthetic oligonucleotide
aagaguggaauucagggcu

SEQ ID NO: 2751787 - RNA, 19 nt, Artificial Sequence
  Description of Artificial Sequence: Synthetic oligonucleotide
uucuauuauauaaugcaug

SEQ ID NO: 2751788 - RNA, 19 nt, Artificial Sequence
  Description of Artificial Sequence: Synthetic oligonucleotide
acaugucacaacucgaagc

SEQ ID NO: 2751789 - RNA, 19 nt, Artificial Sequence
  Description of Artificial Sequence: Synthetic oligonucleotide
aauggucgcuuuuauaaag

SEQ ID NO: 2751790 - RNA, 19 nt, Artificial Sequence
  Description of Artificial Sequence: Synthetic oligonucleotide
uguaucacaugucacaacu

SEQ ID NO: 2751791 - RNA, 19 nt, Artificial Sequence
  Description of Artificial Sequence: Synthetic oligonucleotide
uuagagauguccuuuauuc

SEQ ID NO: 2751792 - RNA, 19 nt, Artificial Sequence
  Description of Artificial Sequence: Synthetic oligonucleotide
ugauacauaauuuagucuu

SEQ ID NO: 2751793 - RNA, 19 nt, Artificial Sequence
  Description of Artificial Sequence: Synthetic oligonucleotide
ugcaaauuaucucauagaa

SEQ ID NO: 2751794 - RNA, 19 nt, Artificial Sequence
  Description of Artificial Sequence: Synthetic oligonucleotide
ugugaugcuaacauuugag

SEQ ID NO: 2751795 - RNA, 19 nt, Artificial Sequence
  Description of Artificial Sequence: Synthetic oligonucleotide
uuauuauuccaaagagugg

SEQ ID NO: 2751796 - RNA, 19 nt, Artificial Sequence
  Description of Artificial Sequence: Synthetic oligonucleotide
uauuauuccaaagagugga

SEQ ID NO: 2751797 - RNA, 19 nt, Artificial Sequence
  Description of Artificial Sequence: Synthetic oligonucleotide
cuugauacauaauuuaguc

SEQ ID NO: 2751798 - RNA, 19 nt, Artificial Sequence
  Description of Artificial Sequence: Synthetic oligonucleotide
uaauguaaccuagagauac

SEQ ID NO: 2751799 - RNA, 19 nt, Artificial Sequence
  Description of Artificial Sequence: Synthetic oligonucleotide
ucucauagaaacaaacuaa

SEQ ID NO: 2751800 - RNA, 19 nt, Artificial Sequence
  Description of Artificial Sequence: Synthetic oligonucleotide
uuaucucauagaaacaaac

SEQ ID NO: 2751801 - RNA, 19 nt, Artificial Sequence
  Description of Artificial Sequence: Synthetic oligonucleotide
auagaauaaagaaauccac

SEQ ID NO: 2751802 - RNA, 19 nt, Artificial Sequence
  Description of Artificial Sequence: Synthetic oligonucleotide
acauaauuuagucuuguca

SEQ ID NO: 2751803 - RNA, 19 nt, Artificial Sequence
  Description of Artificial Sequence: Synthetic oligonucleotide
uaacauuugaggaaggaau

SEQ ID NO: 2751804 - RNA, 19 nt, Artificial Sequence
  Description of Artificial Sequence: Synthetic oligonucleotide
ugcaugaugcucaagacaa

SEQ ID NO: 2751805 - RNA, 19 nt, Artificial Sequence
  Description of Artificial Sequence: Synthetic oligonucleotide
uucuucuauuauauaaugc

SEQ ID NO: 2751806 - RNA, 19 nt, Artificial Sequence
  Description of Artificial Sequence: Synthetic oligonucleotide
uuucuucuauuauauaaug

SEQ ID NO: 2751807 - RNA, 19 nt, Artificial Sequence
  Description of Artificial Sequence: Synthetic oligonucleotide
cuagcaggaacuuuccugg

SEQ ID NO: 2751808 - RNA, 19 nt, Artificial Sequence
  Description of Artificial Sequence: Synthetic oligonucleotide
auuaguaccgauguaucac

SEQ ID NO: 2751809 - RNA, 19 nt, Artificial Sequence
  Description of Artificial Sequence: Synthetic oligonucleotide
cuuggagcaauuaguaccg

SEQ ID NO: 2751810 - RNA, 19 nt, Artificial Sequence
  Description of Artificial Sequence: Synthetic oligonucleotide
aauuaguaccgauguauca

SEQ ID NO: 2751811 - RNA, 19 nt, Artificial Sequence
  Description of Artificial Sequence: Synthetic oligonucleotide
acaauggucgcuuuuauaa

SEQ ID NO: 2751812 - RNA, 19 nt, Artificial Sequence
  Description of Artificial Sequence: Synthetic oligonucleotide
aaacaaacuaacaaccugu

SEQ ID NO: 2751813 - RNA, 19 nt, Artificial Sequence
  Description of Artificial Sequence: Synthetic oligonucleotide
uguccuuuauuccacugag

SEQ ID NO: 2751814 - RNA, 19 nt, Artificial Sequence
  Description of Artificial Sequence: Synthetic oligonucleotide
gaauucagggcucuggggc

SEQ ID NO: 2751815 - RNA, 19 nt, Artificial Sequence
  Description of Artificial Sequence: Synthetic oligonucleotide
acuaaaacccgacuuggag

SEQ ID NO: 2751816 - RNA, 19 nt, Artificial Sequence
  Description of Artificial Sequence: Synthetic oligonucleotide
auaaagaauagaauaaaga

SEQ ID NO: 2751817 - RNA, 19 nt, Artificial Sequence
  Description of Artificial Sequence: Synthetic oligonucleotide
cuaacaaccuguauauaag

SEQ ID NO: 2751818 - RNA, 19 nt, Artificial Sequence
  Description of Artificial Sequence: Synthetic oligonucleotide
uguucgauugugcugaaaa

SEQ ID NO: 2751819 - RNA, 19 nt, Artificial Sequence
  Description of Artificial Sequence: Synthetic oligonucleotide
acuaacaaccuguauauaa

SEQ ID NO: 2751820 - RNA, 19 nt, Artificial Sequence
  Description of Artificial Sequence: Synthetic oligonucleotide
uaaaacccgacuuggagca

SEQ ID NO: 2751821 - RNA, 19 nt, Artificial Sequence
  Description of Artificial Sequence: Synthetic oligonucleotide
aaucacuaaaacccgacuu

SEQ ID NO: 2751822 - RNA, 19 nt, Artificial Sequence
  Description of Artificial Sequence: Synthetic oligonucleotide
aacauuugaggaaggaauc

SEQ ID NO: 2751823 - RNA, 19 nt, Artificial Sequence
  Description of Artificial Sequence: Synthetic oligonucleotide
cuaaaacccgacuuggagc

SEQ ID NO: 2751824 - RNA, 19 nt, Artificial Sequence
  Description of Artificial Sequence: Synthetic oligonucleotide
caaccuguauauaagugcc

SEQ ID NO: 2751825 - RNA, 19 nt, Artificial Sequence
  Description of Artificial Sequence: Synthetic oligonucleotide
guauauaagugccacaauc

SEQ ID NO: 2751826 - RNA, 19 nt, Artificial Sequence
  Description of Artificial Sequence: Synthetic oligonucleotide
caugucacaacucgaagcc

SEQ ID NO: 2751827 - RNA, 19 nt, Artificial Sequence
  Description of Artificial Sequence: Synthetic oligonucleotide
aggaaggaaucacuaaaac

SEQ ID NO: 2751828 - RNA, 19 nt, Artificial Sequence
  Description of Artificial Sequence: Synthetic oligonucleotide
aagucuuccauugaugugu

SEQ ID NO: 2751829 - RNA, 19 nt, Artificial Sequence
  Description of Artificial Sequence: Synthetic oligonucleotide
uccuuuauuccacugagau

SEQ ID NO: 2751830 - RNA, 19 nt, Artificial Sequence
  Description of Artificial Sequence: Synthetic oligonucleotide
ucauagaaacaaacuaaca

SEQ ID NO: 2751831 - RNA, 19 nt, Artificial Sequence
  Description of Artificial Sequence: Synthetic oligonucleotide
caauuaauguaaccuagag

SEQ ID NO: 2751832 - RNA, 19 nt, Artificial Sequence
  Description of Artificial Sequence: Synthetic oligonucleotide
gucauuauuauuccaaaga

SEQ ID NO: 2751833 - RNA, 19 nt, Artificial Sequence
  Description of Artificial Sequence: Synthetic oligonucleotide
ugaggaaggaaucacuaaa

SEQ ID NO: 2751834 - RNA, 19 nt, Artificial Sequence
  Description of Artificial Sequence: Synthetic oligonucleotide
ucaauuaauguaaccuaga

SEQ ID NO: 2751835 - RNA, 19 nt, Artificial Sequence
  Description of Artificial Sequence: Synthetic oligonucleotide
uccacugagaugcaugaug

SEQ ID NO: 2751836 - RNA, 19 nt, Artificial Sequence
  Description of Artificial Sequence: Synthetic oligonucleotide
augguggacguugugaugc

SEQ ID NO: 2751837 - RNA, 19 nt, Artificial Sequence
  Description of Artificial Sequence: Synthetic oligonucleotide
uuauaaagaauagaauaaa

SEQ ID NO: 2751838 - RNA, 19 nt, Artificial Sequence
  Description of Artificial Sequence: Synthetic oligonucleotide
aaugucauaggcuguucga

SEQ ID NO: 2751839 - RNA, 19 nt, Artificial Sequence
  Description of Artificial Sequence: Synthetic oligonucleotide
aucacuaaaacccgacuug

SEQ ID NO: 2751840 - RNA, 19 nt, Artificial Sequence
  Description of Artificial Sequence: Synthetic oligonucleotide
uugauacauaauuuagucu

SEQ ID NO: 2751841 - RNA, 19 nt, Artificial Sequence
  Description of Artificial Sequence: Synthetic oligonucleotide
uuauauaaugcauggcaaa

SEQ ID NO: 2751842 - RNA, 19 nt, Artificial Sequence
  Description of Artificial Sequence: Synthetic oligonucleotide
uauaaugcauggcaaacuu

SEQ ID NO: 2751843 - RNA, 19 nt, Artificial Sequence
  Description of Artificial Sequence: Synthetic oligonucleotide
gugaugcuaacauuugagg

SEQ ID NO: 2751844 - RNA, 19 nt, Artificial Sequence
  Description of Artificial Sequence: Synthetic oligonucleotide
gaucaaagcucguauggug

SEQ ID NO: 2751845 - RNA, 19 nt, Artificial Sequence
  Description of Artificial Sequence: Synthetic oligonucleotide
aaggaaucacuaaaacccg

SEQ ID NO: 2751846 - RNA, 19 nt, Artificial Sequence
  Description of Artificial Sequence: Synthetic oligonucleotide
auuccaaagaguggaauuc

SEQ ID NO: 2751847 - RNA, 19 nt, Artificial Sequence
  Description of Artificial Sequence: Synthetic oligonucleotide
aacagcagugugaugaaag

SEQ ID NO: 2751848 - RNA, 19 nt, Artificial Sequence
  Description of Artificial Sequence: Synthetic oligonucleotide
ugugaugaaagcagggaaa

SEQ ID NO: 2751849 - RNA, 19 nt, Artificial Sequence
  Description of Artificial Sequence: Synthetic oligonucleotide
augcucaagacaauggucg

SEQ ID NO: 2751850 - RNA, 19 nt, Artificial Sequence
  Description of Artificial Sequence: Synthetic oligonucleotide
aucucauagaaacaaacua

SEQ ID NO: 2751851 - RNA, 19 nt, Artificial Sequence
  Description of Artificial Sequence: Synthetic oligonucleotide
gaugcuaacauuugaggaa

SEQ ID NO: 2751852 - RNA, 19 nt, Artificial Sequence
  Description of Artificial Sequence: Synthetic oligonucleotide
ucacuaaaacccgacuugg

SEQ ID NO: 2751853 - RNA, 19 nt, Artificial Sequence
  Description of Artificial Sequence: Synthetic oligonucleotide
ucgcuuuuauaaagaauag

SEQ ID NO: 2751854 - RNA, 19 nt, Artificial Sequence
  Description of Artificial Sequence: Synthetic oligonucleotide
uuugaggaaggaaucacua

SEQ ID NO: 2751855 - RNA, 19 nt, Artificial Sequence
  Description of Artificial Sequence: Synthetic oligonucleotide
aucaauuaauguaaccuag

SEQ ID NO: 2751856 - RNA, 19 nt, Artificial Sequence
  Description of Artificial Sequence: Synthetic oligonucleotide
ugaugcucaagacaauggu

SEQ ID NO: 2751857 - RNA, 19 nt, Artificial Sequence
  Description of Artificial Sequence: Synthetic oligonucleotide
ugcauggcaaacuuagaga

SEQ ID NO: 2751858 - RNA, 19 nt, Artificial Sequence
  Description of Artificial Sequence: Synthetic oligonucleotide
uauaagugccacaaucauc

SEQ ID NO: 2751859 - RNA, 19 nt, Artificial Sequence
  Description of Artificial Sequence: Synthetic oligonucleotide
uuuaccacaaugguuccug

SEQ ID NO: 2751860 - RNA, 19 nt, Artificial Sequence
  Description of Artificial Sequence: Synthetic oligonucleotide
ucuugaucaaagcucguau

SEQ ID NO: 2751861 - RNA, 19 nt, Artificial Sequence
  Description of Artificial Sequence: Synthetic oligonucleotide
aaagcucguaugguggacg

SEQ ID NO: 2751862 - RNA, 19 nt, Artificial Sequence
  Description of Artificial Sequence: Synthetic oligonucleotide
uuaguaccgauguaucaca

SEQ ID NO: 2751863 - RNA, 19 nt, Artificial Sequence
  Description of Artificial Sequence: Synthetic oligonucleotide
caaacuaacaaccuguaua

SEQ ID NO: 2751864 - RNA, 19 nt, Artificial Sequence
  Description of Artificial Sequence: Synthetic oligonucleotide
caaucaucaauuuucugca

SEQ ID NO: 2751865 - RNA, 19 nt, Artificial Sequence
  Description of Artificial Sequence: Synthetic oligonucleotide
aacaaccuguauauaagug

SEQ ID NO: 2751866 - RNA, 19 nt, Artificial Sequence
  Description of Artificial Sequence: Synthetic oligonucleotide
uaacaaccuguauauaagu

SEQ ID NO: 2751867 - RNA, 19 nt, Artificial Sequence
  Description of Artificial Sequence: Synthetic oligonucleotide
auggcaaacuuagagaugu

SEQ ID NO: 2751868 - RNA, 19 nt, Artificial Sequence
  Description of Artificial Sequence: Synthetic oligonucleotide
uguaaccuagagauacuga

SEQ ID NO: 2751869 - RNA, 19 nt, Artificial Sequence
  Description of Artificial Sequence: Synthetic oligonucleotide
acugagaugcaugaugcuc

SEQ ID NO: 2751870 - RNA, 19 nt, Artificial Sequence
  Description of Artificial Sequence: Synthetic oligonucleotide
uagagauguccuuuauucc

SEQ ID NO: 2751871 - RNA, 19 nt, Artificial Sequence
  Description of Artificial Sequence: Synthetic oligonucleotide
ugucacaacucgaagcccu

SEQ ID NO: 2751872 - RNA, 19 nt, Artificial Sequence
  Description of Artificial Sequence: Synthetic oligonucleotide
auggccuugauacauaauu

SEQ ID NO: 2751873 - RNA, 19 nt, Artificial Sequence
  Description of Artificial Sequence: Synthetic oligonucleotide
aauuuagucuugucauuau

SEQ ID NO: 2751874 - RNA, 19 nt, Artificial Sequence
  Description of Artificial Sequence: Synthetic oligonucleotide
accgauguaucacauguca

SEQ ID NO: 2751875 - RNA, 19 nt, Artificial Sequence
  Description of Artificial Sequence: Synthetic oligonucleotide
gaugcaugaugcucaagac

SEQ ID NO: 2751876 - RNA, 19 nt, Artificial Sequence
  Description of Artificial Sequence: Synthetic oligonucleotide
aucaaagcucguauggugg

SEQ ID NO: 2751877 - RNA, 19 nt, Artificial Sequence
  Description of Artificial Sequence: Synthetic oligonucleotide
aauucagggcucuggggca

SEQ ID NO: 2751878 - RNA, 19 nt, Artificial Sequence
  Description of Artificial Sequence: Synthetic oligonucleotide
accuguauauaagugccac

SEQ ID NO: 2751879 - RNA, 19 nt, Artificial Sequence
  Description of Artificial Sequence: Synthetic oligonucleotide
auauaagugccacaaucau

SEQ ID NO: 2751880 - RNA, 19 nt, Artificial Sequence
  Description of Artificial Sequence: Synthetic oligonucleotide
ucacaugucacaacucgaa

SEQ ID NO: 2751881 - RNA, 19 nt, Artificial Sequence
  Description of Artificial Sequence: Synthetic oligonucleotide
uauuccaaagaguggaauu

SEQ ID NO: 2751882 - RNA, 19 nt, Artificial Sequence
  Description of Artificial Sequence: Synthetic oligonucleotide
gauacauaauuuagucuug

SEQ ID NO: 2751883 - RNA, 19 nt, Artificial Sequence
  Description of Artificial Sequence: Synthetic oligonucleotide
cuugucauuauuauuccaa

SEQ ID NO: 2751884 - RNA, 19 nt, Artificial Sequence
  Description of Artificial Sequence: Synthetic oligonucleotide
gucauaggcuguucgauug

SEQ ID NO: 2751885 - RNA, 19 nt, Artificial Sequence
  Description of Artificial Sequence: Synthetic oligonucleotide
uugugaugcuaacauuuga

SEQ ID NO: 2751886 - RNA, 19 nt, Artificial Sequence
  Description of Artificial Sequence: Synthetic oligonucleotide
uaauuuagucuugucauua

SEQ ID NO: 2751887 - RNA, 19 nt, Artificial Sequence
  Description of Artificial Sequence: Synthetic oligonucleotide
agcagugugaugaaagcag

SEQ ID NO: 2751888 - RNA, 19 nt, Artificial Sequence
  Description of Artificial Sequence: Synthetic oligonucleotide
augcaaauuaucucauaga

SEQ ID NO: 2751889 - RNA, 19 nt, Artificial Sequence
  Description of Artificial Sequence: Synthetic oligonucleotide
gucgcuuuuauaaagaaua

SEQ ID NO: 2751890 - RNA, 19 nt, Artificial Sequence
  Description of Artificial Sequence: Synthetic oligonucleotide
cauaauuuagucuugucau

SEQ ID NO: 2751891 - RNA, 19 nt, Artificial Sequence
  Description of Artificial Sequence: Synthetic oligonucleotide
auuauauaaugcauggcaa

SEQ ID NO: 2751892 - RNA, 19 nt, Artificial Sequence
  Description of Artificial Sequence: Synthetic oligonucleotide
gcuuuuauaaagaauagaa

SEQ ID NO: 2751893 - RNA, 19 nt, Artificial Sequence
  Description of Artificial Sequence: Synthetic oligonucleotide
auguaucacaugucacaac

SEQ ID NO: 2751894 - RNA, 19 nt, Artificial Sequence
  Description of Artificial Sequence: Synthetic oligonucleotide
ucuugucauuauuauucca

SEQ ID NO: 2751895 - RNA, 19 nt, Artificial Sequence
  Description of Artificial Sequence: Synthetic oligonucleotide
caauuaguaccgauguauc

SEQ ID NO: 2751896 - RNA, 19 nt, Artificial Sequence
  Description of Artificial Sequence: Synthetic oligonucleotide
aaaacagcagugugaugaa

SEQ ID NO: 2751897 - RNA, 19 nt, Artificial Sequence
  Description of Artificial Sequence: Synthetic oligonucleotide
augcuaacauuugaggaag

SEQ ID NO: 2751898 - RNA, 19 nt, Artificial Sequence
  Description of Artificial Sequence: Synthetic oligonucleotide
accuagagauacugauggc

SEQ ID NO: 2751899 - RNA, 19 nt, Artificial Sequence
  Description of Artificial Sequence: Synthetic oligonucleotide
ugcuaacauuugaggaagg

SEQ ID NO: 2751900 - RNA, 19 nt, Artificial Sequence
  Description of Artificial Sequence: Synthetic oligonucleotide
gucuugucauuauuauucc

SEQ ID NO: 2751901 - RNA, 19 nt, Artificial Sequence
  Description of Artificial Sequence: Synthetic oligonucleotide
acaacucgaagcccuagca

SEQ ID NO: 2751902 - RNA, 19 nt, Artificial Sequence
  Description of Artificial Sequence: Synthetic oligonucleotide
uuaauguaaccuagagaua

SEQ ID NO: 2751903 - RNA, 19 nt, Artificial Sequence
  Description of Artificial Sequence: Synthetic oligonucleotide
auauaaugcauggcaaacu

SEQ ID NO: 2751904 - RNA, 19 nt, Artificial Sequence
  Description of Artificial Sequence: Synthetic oligonucleotide
aaacuuagagauguccuuu

SEQ ID NO: 2751905 - RNA, 19 nt, Artificial Sequence
  Description of Artificial Sequence: Synthetic oligonucleotide
uguauauaagugccacaau

SEQ ID NO: 2751906 - RNA, 19 nt, Artificial Sequence
  Description of Artificial Sequence: Synthetic oligonucleotide
uccccaaaugcaaauuauc

SEQ ID NO: 2751907 - RNA, 19 nt, Artificial Sequence
  Description of Artificial Sequence: Synthetic oligonucleotide
ucaaagcucguauggugga

SEQ ID NO: 2751908 - RNA, 19 nt, Artificial Sequence
  Description of Artificial Sequence: Synthetic oligonucleotide
aacuuagagauguccuuua

SEQ ID NO: 2751909 - RNA, 19 nt, Artificial Sequence
  Description of Artificial Sequence: Synthetic oligonucleotide
ucugcaagucuuccauuga

SEQ ID NO: 2751910 - RNA, 19 nt, Artificial Sequence
  Description of Artificial Sequence: Synthetic oligonucleotide
cagugugaugaaagcaggg

SEQ ID NO: 2751911 - RNA, 19 nt, Artificial Sequence
  Description of Artificial Sequence: Synthetic oligonucleotide
aagugccacaaucaucaau

SEQ ID NO: 2751912 - RNA, 19 nt, Artificial Sequence
  Description of Artificial Sequence: Synthetic oligonucleotide
gacuuggagcaauuaguac

SEQ ID NO: 2751913 - RNA, 19 nt, Artificial Sequence
  Description of Artificial Sequence: Synthetic oligonucleotide
auaauuuagucuugucauu

SEQ ID NO: 2751914 - RNA, 19 nt, Artificial Sequence
  Description of Artificial Sequence: Synthetic oligonucleotide
cugagaugcaugaugcuca

SEQ ID NO: 2751915 - RNA, 19 nt, Artificial Sequence
  Description of Artificial Sequence: Synthetic oligonucleotide
gaugcucaagacaaugguc

SEQ ID NO: 2751916 - RNA, 19 nt, Artificial Sequence
  Description of Artificial Sequence: Synthetic oligonucleotide
uugaggaaggaaucacuaa

SEQ ID NO: 2751917 - RNA, 19 nt, Artificial Sequence
  Description of Artificial Sequence: Synthetic oligonucleotide
agcaggaacuuuccuggag

SEQ ID NO: 2751918 - RNA, 19 nt, Artificial Sequence
  Description of Artificial Sequence: Synthetic oligonucleotide
ugaucaaagcucguauggu

SEQ ID NO: 2751919 - RNA, 19 nt, Artificial Sequence
  Description of Artificial Sequence: Synthetic oligonucleotide
agugugaugaaagcaggga

SEQ ID NO: 2751920 - RNA, 19 nt, Artificial Sequence
  Description of Artificial Sequence: Synthetic oligonucleotide
guaccgauguaucacaugu

SEQ ID NO: 2751921 - RNA, 19 nt, Artificial Sequence
  Description of Artificial Sequence: Synthetic oligonucleotide
auaggcuguucgauugugc

SEQ ID NO: 2751922 - RNA, 19 nt, Artificial Sequence
  Description of Artificial Sequence: Synthetic oligonucleotide
gagcaauuaguaccgaugu

SEQ ID NO: 2751923 - RNA, 19 nt, Artificial Sequence
  Description of Artificial Sequence: Synthetic oligonucleotide
cauuugaggaaggaaucac

SEQ ID NO: 2751924 - RNA, 19 nt, Artificial Sequence
  Description of Artificial Sequence: Synthetic oligonucleotide
aagacaauggucgcuuuua

SEQ ID NO: 2751925 - RNA, 19 nt, Artificial Sequence
  Description of Artificial Sequence: Synthetic oligonucleotide
auguaaccuagagauacug

SEQ ID NO: 2751926 - RNA, 19 nt, Artificial Sequence
  Description of Artificial Sequence: Synthetic oligonucleotide
ugcucaagacaauggucgc

SEQ ID NO: 2751927 - RNA, 19 nt, Artificial Sequence
  Description of Artificial Sequence: Synthetic oligonucleotide
gccacaaucaucaauuuuc

SEQ ID NO: 2751928 - RNA, 19 nt, Artificial Sequence
  Description of Artificial Sequence: Synthetic oligonucleotide
ucuuccauugaugugucuu

SEQ ID NO: 2751929 - RNA, 19 nt, Artificial Sequence
  Description of Artificial Sequence: Synthetic oligonucleotide
uuccaaagaguggaauuca

SEQ ID NO: 2751930 - RNA, 19 nt, Artificial Sequence
  Description of Artificial Sequence: Synthetic oligonucleotide
aauguaaccuagagauacu

SEQ ID NO: 2751931 - RNA, 19 nt, Artificial Sequence
  Description of Artificial Sequence: Synthetic oligonucleotide
auacauaauuuagucuugu

SEQ ID NO: 2751932 - RNA, 19 nt, Artificial Sequence
  Description of Artificial Sequence: Synthetic oligonucleotide
cacaugucacaacucgaag

SEQ ID NO: 2751933 - RNA, 19 nt, Artificial Sequence
  Description of Artificial Sequence: Synthetic oligonucleotide
cauuauuauuccaaagagu

SEQ ID NO: 2751934 - RNA, 19 nt, Artificial Sequence
  Description of Artificial Sequence: Synthetic oligonucleotide
uggccuugauacauaauuu

SEQ ID NO: 2751935 - RNA, 19 nt, Artificial Sequence
  Description of Artificial Sequence: Synthetic oligonucleotide
uaugguggacguugugaug

SEQ ID NO: 2751936 - RNA, 19 nt, Artificial Sequence
  Description of Artificial Sequence: Synthetic oligonucleotide
augucacaacucgaagccc

SEQ ID NO: 2751937 - RNA, 19 nt, Artificial Sequence
  Description of Artificial Sequence: Synthetic oligonucleotide
acaaacuaacaaccuguau

SEQ ID NO: 2751938 - RNA, 19 nt, Artificial Sequence
  Description of Artificial Sequence: Synthetic oligonucleotide
uuuauuccacugagaugca

SEQ ID NO: 2751939 - RNA, 19 nt, Artificial Sequence
  Description of Artificial Sequence: Synthetic oligonucleotide
uuauuccaaagaguggaau

SEQ ID NO: 2751940 - RNA, 19 nt, Artificial Sequence
  Description of Artificial Sequence: Synthetic oligonucleotide
aagcucguaugguggacgu

SEQ ID NO: 2751941 - RNA, 19 nt, Artificial Sequence
  Description of Artificial Sequence: Synthetic oligonucleotide
gacguugugaugcuaacau

SEQ ID NO: 2751942 - RNA, 19 nt, Artificial Sequence
  Description of Artificial Sequence: Synthetic oligonucleotide
acauuugaggaaggaauca

SEQ ID NO: 2751943 - RNA, 19 nt, Artificial Sequence
  Description of Artificial Sequence: Synthetic oligonucleotide
agcccuagcaggaacuuuc

SEQ ID NO: 2751944 - RNA, 19 nt, Artificial Sequence
  Description of Artificial Sequence: Synthetic oligonucleotide
ggaacuuuccuggaguagc

SEQ ID NO: 2751945 - RNA, 19 nt, Artificial Sequence
  Description of Artificial Sequence: Synthetic oligonucleotide
cauugaugugucuucaucu

SEQ ID NO: 2751946 - RNA, 19 nt, Artificial Sequence
  Description of Artificial Sequence: Synthetic oligonucleotide
guggaauucagggcucugg

SEQ ID NO: 2751947 - RNA, 19 nt, Artificial Sequence
  Description of Artificial Sequence: Synthetic oligonucleotide
acugauggccuugauacau

SEQ ID NO: 2751948 - RNA, 19 nt, Artificial Sequence
  Description of Artificial Sequence: Synthetic oligonucleotide
uggucgcuuuuauaaagaa

SEQ ID NO: 2751949 - RNA, 19 nt, Artificial Sequence
  Description of Artificial Sequence: Synthetic oligonucleotide
agagauacugauggccuug

SEQ ID NO: 2751950 - RNA, 19 nt, Artificial Sequence
  Description of Artificial Sequence: Synthetic oligonucleotide
cugccacaaugucauaggc

SEQ ID NO: 2751951 - RNA, 19 nt, Artificial Sequence
  Description of Artificial Sequence: Synthetic oligonucleotide
gagauguccuuuauuccac

SEQ ID NO: 2751952 - RNA, 19 nt, Artificial Sequence
  Description of Artificial Sequence: Synthetic oligonucleotide
ggagcaauuaguaccgaug

SEQ ID NO: 2751953 - RNA, 19 nt, Artificial Sequence
  Description of Artificial Sequence: Synthetic oligonucleotide
gugugaugaaagcagggaa

SEQ ID NO: 2751954 - RNA, 19 nt, Artificial Sequence
  Description of Artificial Sequence: Synthetic oligonucleotide
cacaacucgaagcccuagc

SEQ ID NO: 2751955 - RNA, 19 nt, Artificial Sequence
  Description of Artificial Sequence: Synthetic oligonucleotide
cacaaucaucaauuuucug

SEQ ID NO: 2751956 - RNA, 19 nt, Artificial Sequence
  Description of Artificial Sequence: Synthetic oligonucleotide
ugucauaggcuguucgauu

SEQ ID NO: 2751957 - RNA, 19 nt, Artificial Sequence
  Description of Artificial Sequence: Synthetic oligonucleotide
ucgaagcccuagcaggaac

SEQ ID NO: 2751958 - RNA, 19 nt, Artificial Sequence
  Description of Artificial Sequence: Synthetic oligonucleotide
aaugcauggcaaacuuaga

SEQ ID NO: 2751959 - RNA, 19 nt, Artificial Sequence
  Description of Artificial Sequence: Synthetic oligonucleotide
ccuagcaggaacuuuccug

SEQ ID NO: 2751960 - RNA, 19 nt, Artificial Sequence
  Description of Artificial Sequence: Synthetic oligonucleotide
caucaauuuucugcaaguc

SEQ ID NO: 2751961 - RNA, 19 nt, Artificial Sequence
  Description of Artificial Sequence: Synthetic oligonucleotide
cuagagauacugauggccu

SEQ ID NO: 2751962 - RNA, 19 nt, Artificial Sequence
  Description of Artificial Sequence: Synthetic oligonucleotide
ggcaaacuuagagaugucc

SEQ ID NO: 2751963 - RNA, 19 nt, Artificial Sequence
  Description of Artificial Sequence: Synthetic oligonucleotide
ugccacaaucaucaauuuu

SEQ ID NO: 2751964 - RNA, 19 nt, Artificial Sequence
  Description of Artificial Sequence: Synthetic oligonucleotide
uggagcaauuaguaccgau

SEQ ID NO: 2751965 - RNA, 19 nt, Artificial Sequence
  Description of Artificial Sequence: Synthetic oligonucleotide
gccuugauacauaauuuag

SEQ ID NO: 2751966 - RNA, 19 nt, Artificial Sequence
  Description of Artificial Sequence: Synthetic oligonucleotide
acuuagagauguccuuuau

SEQ ID NO: 2751967 - RNA, 19 nt, Artificial Sequence
  Description of Artificial Sequence: Synthetic oligonucleotide
cuucuauuauauaaugcau

SEQ ID NO: 2751968 - RNA, 19 nt, Artificial Sequence
  Description of Artificial Sequence: Synthetic oligonucleotide
cuaacauuugaggaaggaa

SEQ ID NO: 2751969 - RNA, 19 nt, Artificial Sequence
  Description of Artificial Sequence: Synthetic oligonucleotide
acaaugucauaggcuguuc

SEQ ID NO: 2751970 - RNA, 19 nt, Artificial Sequence
  Description of Artificial Sequence: Synthetic oligonucleotide
agauguccuuuauuccacu

SEQ ID NO: 2751971 - RNA, 19 nt, Artificial Sequence
  Description of Artificial Sequence: Synthetic oligonucleotide
uaguaccgauguaucacau

SEQ ID NO: 2751972 - RNA, 19 nt, Artificial Sequence
  Description of Artificial Sequence: Synthetic oligonucleotide
uacugauggccuugauaca

SEQ ID NO: 2751973 - RNA, 19 nt, Artificial Sequence
  Description of Artificial Sequence: Synthetic oligonucleotide
aggcuguucgauugugcug

SEQ ID NO: 2751974 - RNA, 19 nt, Artificial Sequence
  Description of Artificial Sequence: Synthetic oligonucleotide
cccaaaugcaaauuaucuc

SEQ ID NO: 2751975 - RNA, 19 nt, Artificial Sequence
  Description of Artificial Sequence: Synthetic oligonucleotide
cuggggcaucaucugaccc

SEQ ID NO: 2751976 - RNA, 19 nt, Artificial Sequence
  Description of Artificial Sequence: Synthetic oligonucleotide
uggacguugugaugcuaac

SEQ ID NO: 2751977 - RNA, 19 nt, Artificial Sequence
  Description of Artificial Sequence: Synthetic oligonucleotide
agacaauggucgcuuuuau

SEQ ID NO: 2751978 - RNA, 19 nt, Artificial Sequence
  Description of Artificial Sequence: Synthetic oligonucleotide
aggaacuuuccuggaguag

SEQ ID NO: 2751979 - RNA, 19 nt, Artificial Sequence
  Description of Artificial Sequence: Synthetic oligonucleotide
uaccgauguaucacauguc

SEQ ID NO: 2751980 - RNA, 19 nt, Artificial Sequence
  Description of Artificial Sequence: Synthetic oligonucleotide
ucacaacucgaagcccuag

SEQ ID NO: 2751981 - RNA, 19 nt, Artificial Sequence
  Description of Artificial Sequence: Synthetic oligonucleotide
ucguaugguggacguugug

SEQ ID NO: 2751982 - RNA, 19 nt, Artificial Sequence
  Description of Artificial Sequence: Synthetic oligonucleotide
gugaugaaagcagggaaaa

SEQ ID NO: 2751983 - RNA, 19 nt, Artificial Sequence
  Description of Artificial Sequence: Synthetic oligonucleotide
gcagugugaugaaagcagg

SEQ ID NO: 2751984 - RNA, 19 nt, Artificial Sequence
  Description of Artificial Sequence: Synthetic oligonucleotide
agucuuccauugauguguc

SEQ ID NO: 2751985 - RNA, 19 nt, Artificial Sequence
  Description of Artificial Sequence: Synthetic oligonucleotide
aucacaugucacaacucga

SEQ ID NO: 2751986 - RNA, 19 nt, Artificial Sequence
  Description of Artificial Sequence: Synthetic oligonucleotide
aaacccgacuuggagcaau

SEQ ID NO: 2751987 - RNA, 19 nt, Artificial Sequence
  Description of Artificial Sequence: Synthetic oligonucleotide
agcaauuaguaccgaugua

SEQ ID NO: 2751988 - RNA, 19 nt, Artificial Sequence
  Description of Artificial Sequence: Synthetic oligonucleotide
auggucgcuuuuauaaaga

SEQ ID NO: 2751989 - RNA, 19 nt, Artificial Sequence
  Description of Artificial Sequence: Synthetic oligonucleotide
ggaaucacuaaaacccgac

SEQ ID NO: 2751990 - RNA, 19 nt, Artificial Sequence
  Description of Artificial Sequence: Synthetic oligonucleotide
augucauaggcuguucgau

SEQ ID NO: 2751991 - RNA, 19 nt, Artificial Sequence
  Description of Artificial Sequence: Synthetic oligonucleotide
ugguuccugccacaauguc

SEQ ID NO: 2751992 - RNA, 19 nt, Artificial Sequence
  Description of Artificial Sequence: Synthetic oligonucleotide
aaacagcagugugaugaaa

SEQ ID NO: 2751993 - RNA, 19 nt, Artificial Sequence
  Description of Artificial Sequence: Synthetic oligonucleotide
cauaggcuguucgauugug

SEQ ID NO: 2751994 - RNA, 19 nt, Artificial Sequence
  Description of Artificial Sequence: Synthetic oligonucleotide
ccuuuauuccacugagaug

SEQ ID NO: 2751995 - RNA, 19 nt, Artificial Sequence
  Description of Artificial Sequence: Synthetic oligonucleotide
aggaaucacuaaaacccga

SEQ ID NO: 2751996 - RNA, 19 nt, Artificial Sequence
  Description of Artificial Sequence: Synthetic oligonucleotide
gcaagucuuccauugaugu

SEQ ID NO: 2751997 - RNA, 19 nt, Artificial Sequence
  Description of Artificial Sequence: Synthetic oligonucleotide
aacuaacaaccuguauaua

SEQ ID NO: 2751998 - RNA, 19 nt, Artificial Sequence
  Description of Artificial Sequence: Synthetic oligonucleotide
gcucguaugguggacguug

SEQ ID NO: 2751999 - RNA, 19 nt, Artificial Sequence
  Description of Artificial Sequence: Synthetic oligonucleotide
caauggucgcuuuuauaaa

SEQ ID NO: 2752000 - RNA, 19 nt, Artificial Sequence
  Description of Artificial Sequence: Synthetic oligonucleotide
acaaugguuccugccacaa

SEQ ID NO: 2752001 - RNA, 19 nt, Artificial Sequence
  Description of Artificial Sequence: Synthetic oligonucleotide
ggcuguucgauugugcuga

SEQ ID NO: 2752002 - RNA, 19 nt, Artificial Sequence
  Description of Artificial Sequence: Synthetic oligonucleotide
guaucacaugucacaacuc

SEQ ID NO: 2752003 - RNA, 19 nt, Artificial Sequence
  Description of Artificial Sequence: Synthetic oligonucleotide
gcauggcaaacuuagagau

SEQ ID NO: 2752004 - RNA, 19 nt, Artificial Sequence
  Description of Artificial Sequence: Synthetic oligonucleotide
cacuaaaacccgacuugga

SEQ ID NO: 2752005 - RNA, 19 nt, Artificial Sequence
  Description of Artificial Sequence: Synthetic oligonucleotide
ucaagacaauggucgcuuu

SEQ ID NO: 2752006 - RNA, 19 nt, Artificial Sequence
  Description of Artificial Sequence: Synthetic oligonucleotide
auaaugcauggcaaacuua

SEQ ID NO: 2752007 - RNA, 19 nt, Artificial Sequence
  Description of Artificial Sequence: Synthetic oligonucleotide
acguugugaugcuaacauu

SEQ ID NO: 2752008 - RNA, 19 nt, Artificial Sequence
  Description of Artificial Sequence: Synthetic oligonucleotide
ggccuugauacauaauuua

SEQ ID NO: 2752009 - RNA, 19 nt, Artificial Sequence
  Description of Artificial Sequence: Synthetic oligonucleotide
gcaauuaguaccgauguau

SEQ ID NO: 2752010 - RNA, 19 nt, Artificial Sequence
  Description of Artificial Sequence: Synthetic oligonucleotide
cccgacuuggagcaauuag

SEQ ID NO: 2752011 - RNA, 19 nt, Artificial Sequence
  Description of Artificial Sequence: Synthetic oligonucleotide
gagauacugauggccuuga

SEQ ID NO: 2752012 - RNA, 19 nt, Artificial Sequence
  Description of Artificial Sequence: Synthetic oligonucleotide
aucugaccccauuucuuuu

SEQ ID NO: 2752013 - RNA, 19 nt, Artificial Sequence
  Description of Artificial Sequence: Synthetic oligonucleotide
caaagcucguaugguggac

SEQ ID NO: 2752014 - RNA, 19 nt, Artificial Sequence
  Description of Artificial Sequence: Synthetic oligonucleotide
gguuccugccacaauguca

SEQ ID NO: 2752015 - RNA, 19 nt, Artificial Sequence
  Description of Artificial Sequence: Synthetic oligonucleotide
caaacuuagagauguccuu

SEQ ID NO: 2752016 - RNA, 19 nt, Artificial Sequence
  Description of Artificial Sequence: Synthetic oligonucleotide
uggcaaacuuagagauguc

SEQ ID NO: 2752017 - RNA, 19 nt, Artificial Sequence
  Description of Artificial Sequence: Synthetic oligonucleotide
gagaugcaugaugcucaag

SEQ ID NO: 2752018 - RNA, 19 nt, Artificial Sequence
  Description of Artificial Sequence: Synthetic oligonucleotide
cagcagugugaugaaagca

SEQ ID NO: 2752019 - RNA, 19 nt, Artificial Sequence
  Description of Artificial Sequence: Synthetic oligonucleotide
cgauguaucacaugucaca

SEQ ID NO: 2752020 - RNA, 19 nt, Artificial Sequence
  Description of Artificial Sequence: Synthetic oligonucleotide
ugguggacguugugaugcu

SEQ ID NO: 2752021 - RNA, 19 nt, Artificial Sequence
  Description of Artificial Sequence: Synthetic oligonucleotide
ccgauguaucacaugucac

SEQ ID NO: 2752022 - RNA, 19 nt, Artificial Sequence
  Description of Artificial Sequence: Synthetic oligonucleotide
agauacugauggccuugau

SEQ ID NO: 2752023 - RNA, 19 nt, Artificial Sequence
  Description of Artificial Sequence: Synthetic oligonucleotide
uuggagcaauuaguaccga

SEQ ID NO: 2752024 - RNA, 19 nt, Artificial Sequence
  Description of Artificial Sequence: Synthetic oligonucleotide
cacaaugguuccugccaca

SEQ ID NO: 2752025 - RNA, 19 nt, Artificial Sequence
  Description of Artificial Sequence: Synthetic oligonucleotide
guggacguugugaugcuaa

SEQ ID NO: 2752026 - RNA, 19 nt, Artificial Sequence
  Description of Artificial Sequence: Synthetic oligonucleotide
gcaaacuuagagauguccu

SEQ ID NO: 2752027 - RNA, 19 nt, Artificial Sequence
  Description of Artificial Sequence: Synthetic oligonucleotide
gaacuuuccuggaguagcu

SEQ ID NO: 2752028 - RNA, 19 nt, Artificial Sequence
  Description of Artificial Sequence: Synthetic oligonucleotide
cuuagagauguccuuuauu

SEQ ID NO: 2752029 - RNA, 19 nt, Artificial Sequence
  Description of Artificial Sequence: Synthetic oligonucleotide
caggaacuuuccuggagua

SEQ ID NO: 2752030 - RNA, 19 nt, Artificial Sequence
  Description of Artificial Sequence: Synthetic oligonucleotide
aaaacccgacuuggagcaa

SEQ ID NO: 2752031 - RNA, 19 nt, Artificial Sequence
  Description of Artificial Sequence: Synthetic oligonucleotide
ccacaaugguuccugccac

SEQ ID NO: 2752032 - RNA, 19 nt, Artificial Sequence
  Description of Artificial Sequence: Synthetic oligonucleotide
auucuugaucaaagcucgu

SEQ ID NO: 2752033 - RNA, 19 nt, Artificial Sequence
  Description of Artificial Sequence: Synthetic oligonucleotide
ggcucuggggcaucaucug

SEQ ID NO: 2752034 - RNA, 19 nt, Artificial Sequence
  Description of Artificial Sequence: Synthetic oligonucleotide
aagcccuagcaggaacuuu

SEQ ID NO: 2752035 - RNA, 19 nt, Artificial Sequence
  Description of Artificial Sequence: Synthetic oligonucleotide
ccccaaaugcaaauuaucu

SEQ ID NO: 2752036 - RNA, 19 nt, Artificial Sequence
  Description of Artificial Sequence: Synthetic oligonucleotide
gcaggaacuuuccuggagu

SEQ ID NO: 2752037 - RNA, 19 nt, Artificial Sequence
  Description of Artificial Sequence: Synthetic oligonucleotide
uuccacugagaugcaugau

SEQ ID NO: 2752038 - RNA, 19 nt, Artificial Sequence
  Description of Artificial Sequence: Synthetic oligonucleotide
cuccccaaaugcaaauuau

SEQ ID NO: 2752039 - RNA, 19 nt, Artificial Sequence
  Description of Artificial Sequence: Synthetic oligonucleotide
caucugaccccauuucuuu

SEQ ID NO: 2752040 - RNA, 19 nt, Artificial Sequence
  Description of Artificial Sequence: Synthetic oligonucleotide
ccuguauauaagugccaca

SEQ ID NO: 2752041 - RNA, 19 nt, Artificial Sequence
  Description of Artificial Sequence: Synthetic oligonucleotide
ggacguugugaugcuaaca

SEQ ID NO: 2752042 - RNA, 19 nt, Artificial Sequence
  Description of Artificial Sequence: Synthetic oligonucleotide
auucagggcucuggggcau

SEQ ID NO: 2752043 - RNA, 19 nt, Artificial Sequence
  Description of Artificial Sequence: Synthetic oligonucleotide
cucaagacaauggucgcuu

SEQ ID NO: 2752044 - RNA, 19 nt, Artificial Sequence
  Description of Artificial Sequence: Synthetic oligonucleotide
aacccgacuuggagcaauu

SEQ ID NO: 2752045 - RNA, 19 nt, Artificial Sequence
  Description of Artificial Sequence: Synthetic oligonucleotide
gaguggaauucagggcucu

SEQ ID NO: 2752046 - RNA, 19 nt, Artificial Sequence
  Description of Artificial Sequence: Synthetic oligonucleotide
cucguaugguggacguugu

SEQ ID NO: 2752047 - RNA, 19 nt, Artificial Sequence
  Description of Artificial Sequence: Synthetic oligonucleotide
cgcuuuuauaaagaauaga

SEQ ID NO: 2752048 - RNA, 19 nt, Artificial Sequence
  Description of Artificial Sequence: Synthetic oligonucleotide
cacugagaugcaugaugcu

SEQ ID NO: 2752049 - RNA, 19 nt, Artificial Sequence
  Description of Artificial Sequence: Synthetic oligonucleotide
cgacuuggagcaauuagua

SEQ ID NO: 2752050 - RNA, 19 nt, Artificial Sequence
  Description of Artificial Sequence: Synthetic oligonucleotide
gcccuagcaggaacuuucc

SEQ ID NO: 2752051 - RNA, 19 nt, Artificial Sequence
  Description of Artificial Sequence: Synthetic oligonucleotide
ccuccccaaaugcaaauua

SEQ ID NO: 2752052 - RNA, 19 nt, Artificial Sequence
  Description of Artificial Sequence: Synthetic oligonucleotide
gaagcccuagcaggaacuu

SEQ ID NO: 2752053 - RNA, 19 nt, Artificial Sequence
  Description of Artificial Sequence: Synthetic oligonucleotide
ggucgcuuuuauaaagaau

SEQ ID NO: 2752054 - RNA, 19 nt, Artificial Sequence
  Description of Artificial Sequence: Synthetic oligonucleotide
gucacaacucgaagcccua

SEQ ID NO: 2752055 - RNA, 19 nt, Artificial Sequence
  Description of Artificial Sequence: Synthetic oligonucleotide
gugccacaaucaucaauuu

SEQ ID NO: 2752056 - RNA, 19 nt, Artificial Sequence
  Description of Artificial Sequence: Synthetic oligonucleotide
cucgaagcccuagcaggaa

SEQ ID NO: 2752057 - RNA, 19 nt, Artificial Sequence
  Description of Artificial Sequence: Synthetic oligonucleotide
acccgacuuggagcaauua

SEQ ID NO: 2752058 - RNA, 19 nt, Artificial Sequence
  Description of Artificial Sequence: Synthetic oligonucleotide
gucuuccauugaugugucu

SEQ ID NO: 2752059 - RNA, 19 nt, Artificial Sequence
  Description of Artificial Sequence: Synthetic oligonucleotide
agcucguaugguggacguu

SEQ ID NO: 2752060 - RNA, 19 nt, Artificial Sequence
  Description of Artificial Sequence: Synthetic oligonucleotide
gcucaagacaauggucgcu

SEQ ID NO: 2752061 - RNA, 19 nt, Artificial Sequence
  Description of Artificial Sequence: Synthetic oligonucleotide
caaugguuccugccacaau

SEQ ID NO: 2752062 - RNA, 19 nt, Artificial Sequence
  Description of Artificial Sequence: Synthetic oligonucleotide
cuguucgauugugcugaaa

SEQ ID NO: 2752063 - RNA, 19 nt, Artificial Sequence
  Description of Artificial Sequence: Synthetic oligonucleotide
gcuguucgauugugcugaa

SEQ ID NO: 2752064 - RNA, 19 nt, Artificial Sequence
  Description of Artificial Sequence: Synthetic oligonucleotide
ccacaaugucauaggcugu

SEQ ID NO: 2752065 - RNA, 19 nt, Artificial Sequence
  Description of Artificial Sequence: Synthetic oligonucleotide
cgaagcccuagcaggaacu

SEQ ID NO: 2752066 - RNA, 19 nt, Artificial Sequence
  Description of Artificial Sequence: Synthetic oligonucleotide
gguggacguugugaugcua

SEQ ID NO: 2752067 - RNA, 19 nt, Artificial Sequence
  Description of Artificial Sequence: Synthetic oligonucleotide
ccccgccuccccaaaugca

SEQ ID NO: 2752068 - RNA, 19 nt, Artificial Sequence
  Description of Artificial Sequence: Synthetic oligonucleotide
cccuagcaggaacuuuccu

SEQ ID NO: 2752069 - RNA, 19 nt, Artificial Sequence
  Description of Artificial Sequence: Synthetic oligonucleotide
gccuccccaaaugcaaauu

SEQ ID NO: 2752070 - RNA, 19 nt, Artificial Sequence
  Description of Artificial Sequence: Synthetic oligonucleotide
cgccuccccaaaugcaaau

SEQ ID NO: 2752071 - RNA, 19 nt, Artificial Sequence
  Description of Artificial Sequence: Synthetic oligonucleotide
cagggcucuggggcaucau

SEQ ID NO: 2752072 - RNA, 19 nt, Artificial Sequence
  Description of Artificial Sequence: Synthetic oligonucleotide
aacauaauaacacaggcag

SEQ ID NO: 2752073 - RNA, 19 nt, Artificial Sequence
  Description of Artificial Sequence: Synthetic oligonucleotide
aaagauauuauaucuucuc

SEQ ID NO: 2752074 - RNA, 19 nt, Artificial Sequence
  Description of Artificial Sequence: Synthetic oligonucleotide
gauauuauaucuucucugg

SEQ ID NO: 2752075 - RNA, 19 nt, Artificial Sequence
  Description of Artificial Sequence: Synthetic oligonucleotide
aaaguaguggcauugguga

SEQ ID NO: 2752076 - RNA, 19 nt, Artificial Sequence
  Description of Artificial Sequence: Synthetic oligonucleotide
acaaagauauuauaucuuc

SEQ ID NO: 2752077 - RNA, 19 nt, Artificial Sequence
  Description of Artificial Sequence: Synthetic oligonucleotide
uaauaacacaggcagaagc

SEQ ID NO: 2752078 - RNA, 19 nt, Artificial Sequence
  Description of Artificial Sequence: Synthetic oligonucleotide
ugcaauaucccacaguuga

SEQ ID NO: 2752079 - RNA, 19 nt, Artificial Sequence
  Description of Artificial Sequence: Synthetic oligonucleotide
aacgaggacucucauggcc

SEQ ID NO: 2752080 - RNA, 19 nt, Artificial Sequence
  Description of Artificial Sequence: Synthetic oligonucleotide
uggagauugauguaguucc

SEQ ID NO: 2752081 - RNA, 19 nt, Artificial Sequence
  Description of Artificial Sequence: Synthetic oligonucleotide
auagucuugucauagaggu

SEQ ID NO: 2752082 - RNA, 19 nt, Artificial Sequence
  Description of Artificial Sequence: Synthetic oligonucleotide
uauagucuugucauagagg

SEQ ID NO: 2752083 - RNA, 19 nt, Artificial Sequence
  Description of Artificial Sequence: Synthetic oligonucleotide
ucgaacauaauaacacagg

SEQ ID NO: 2752084 - RNA, 19 nt, Artificial Sequence
  Description of Artificial Sequence: Synthetic oligonucleotide
agacaaagauauuauaucu

SEQ ID NO: 2752085 - RNA, 19 nt, Artificial Sequence
  Description of Artificial Sequence: Synthetic oligonucleotide
uuggcuuggagauugaugu

SEQ ID NO: 2752086 - RNA, 19 nt, Artificial Sequence
  Description of Artificial Sequence: Synthetic oligonucleotide
gacagaucacucuuguugg

SEQ ID NO: 2752087 - RNA, 19 nt, Artificial Sequence
  Description of Artificial Sequence: Synthetic oligonucleotide
auugauguaguucccuugg

SEQ ID NO: 2752088 - RNA, 19 nt, Artificial Sequence
  Description of Artificial Sequence: Synthetic oligonucleotide
agauauuauaucuucucug

SEQ ID NO: 2752089 - RNA, 19 nt, Artificial Sequence
  Description of Artificial Sequence: Synthetic oligonucleotide
gaaccggucaaucuggucc

SEQ ID NO: 2752090 - RNA, 19 nt, Artificial Sequence
  Description of Artificial Sequence: Synthetic oligonucleotide
acucuuguuggccaagagc

SEQ ID NO: 2752091 - RNA, 19 nt, Artificial Sequence
  Description of Artificial Sequence: Synthetic oligonucleotide
auaucccacaguugaaggc

SEQ ID NO: 2752092 - RNA, 19 nt, Artificial Sequence
  Description of Artificial Sequence: Synthetic oligonucleotide
aaacagaacuagcagcaug

SEQ ID NO: 2752093 - RNA, 19 nt, Artificial Sequence
  Description of Artificial Sequence: Synthetic oligonucleotide
gaaaccguucucuuuacug

SEQ ID NO: 2752094 - RNA, 19 nt, Artificial Sequence
  Description of Artificial Sequence: Synthetic oligonucleotide
uagacaaagauauuauauc

SEQ ID NO: 2752095 - RNA, 19 nt, Artificial Sequence
  Description of Artificial Sequence: Synthetic oligonucleotide
aaccggucaaucugguccc

SEQ ID NO: 2752096 - RNA, 19 nt, Artificial Sequence
  Description of Artificial Sequence: Synthetic oligonucleotide
cuugucauagaggugaacc

SEQ ID NO: 2752097 - RNA, 19 nt, Artificial Sequence
  Description of Artificial Sequence: Synthetic oligonucleotide
uauuauaucuucucuggaa

SEQ ID NO: 2752098 - RNA, 19 nt, Artificial Sequence
  Description of Artificial Sequence: Synthetic oligonucleotide
uugucauagaggugaaccg

SEQ ID NO: 2752099 - RNA, 19 nt, Artificial Sequence
  Description of Artificial Sequence: Synthetic oligonucleotide
uaugaaaccguucucuuua

SEQ ID NO: 2752100 - RNA, 19 nt, Artificial Sequence
  Description of Artificial Sequence: Synthetic oligonucleotide
aaaccguucucuuuacuga

SEQ ID NO: 2752101 - RNA, 19 nt, Artificial Sequence
  Description of Artificial Sequence: Synthetic oligonucleotide
uuuucaacgaggacucuca

SEQ ID NO: 2752102 - RNA, 19 nt, Artificial Sequence
  Description of Artificial Sequence: Synthetic oligonucleotide
ucuggaauuguucaucauc

SEQ ID NO: 2752103 - RNA, 19 nt, Artificial Sequence
  Description of Artificial Sequence: Synthetic oligonucleotide
guauagucuugucauagag

SEQ ID NO: 2752104 - RNA, 19 nt, Artificial Sequence
  Description of Artificial Sequence: Synthetic oligonucleotide
uaucccacaguugaaggcg

SEQ ID NO: 2752105 - RNA, 19 nt, Artificial Sequence
  Description of Artificial Sequence: Synthetic oligonucleotide
gauaguauagucuugucau

SEQ ID NO: 2752106 - RNA, 19 nt, Artificial Sequence
  Description of Artificial Sequence: Synthetic oligonucleotide
acgucgaacauaauaacac

SEQ ID NO: 2752107 - RNA, 19 nt, Artificial Sequence
  Description of Artificial Sequence: Synthetic oligonucleotide
uauaucuucucuggaauug

SEQ ID NO: 2752108 - RNA, 19 nt, Artificial Sequence
  Description of Artificial Sequence: Synthetic oligonucleotide
uacugaaccggucaaucug

SEQ ID NO: 2752109 - RNA, 19 nt, Artificial Sequence
  Description of Artificial Sequence: Synthetic oligonucleotide
ggcagaagcaucucgauag

SEQ ID NO: 2752110 - RNA, 19 nt, Artificial Sequence
  Description of Artificial Sequence: Synthetic oligonucleotide
aaugugagcuugcugucca

SEQ ID NO: 2752111 - RNA, 19 nt, Artificial Sequence
  Description of Artificial Sequence: Synthetic oligonucleotide
cucuuguuggccaagagca

SEQ ID NO: 2752112 - RNA, 19 nt, Artificial Sequence
  Description of Artificial Sequence: Synthetic oligonucleotide
aaguaguggcauuggugac

SEQ ID NO: 2752113 - RNA, 19 nt, Artificial Sequence
  Description of Artificial Sequence: Synthetic oligonucleotide
agaacuagcagcaugucca

SEQ ID NO: 2752114 - RNA, 19 nt, Artificial Sequence
  Description of Artificial Sequence: Synthetic oligonucleotide
aguggcauuggugacgucg

SEQ ID NO: 2752115 - RNA, 19 nt, Artificial Sequence
  Description of Artificial Sequence: Synthetic oligonucleotide
uuguagugcuugcugaagc

SEQ ID NO: 2752116 - RNA, 19 nt, Artificial Sequence
  Description of Artificial Sequence: Synthetic oligonucleotide
gaaaguaguggcauuggug

SEQ ID NO: 2752117 - RNA, 19 nt, Artificial Sequence
  Description of Artificial Sequence: Synthetic oligonucleotide
aacagaacuagcagcaugu

SEQ ID NO: 2752118 - RNA, 19 nt, Artificial Sequence
  Description of Artificial Sequence: Synthetic oligonucleotide
gaaccuucagagcaaaguc

SEQ ID NO: 2752119 - RNA, 19 nt, Artificial Sequence
  Description of Artificial Sequence: Synthetic oligonucleotide
gauugauguaguucccuug

SEQ ID NO: 2752120 - RNA, 19 nt, Artificial Sequence
  Description of Artificial Sequence: Synthetic oligonucleotide
uccuguuuccaucuuuggc

SEQ ID NO: 2752121 - RNA, 19 nt, Artificial Sequence
  Description of Artificial Sequence: Synthetic oligonucleotide
aggugaaccgcuccugccc

SEQ ID NO: 2752122 - RNA, 19 nt, Artificial Sequence
  Description of Artificial Sequence: Synthetic oligonucleotide
uguucuccuugacugaugu

SEQ ID NO: 2752123 - RNA, 19 nt, Artificial Sequence
  Description of Artificial Sequence: Synthetic oligonucleotide
agaggugaaccgcuccugc

SEQ ID NO: 2752124 - RNA, 19 nt, Artificial Sequence
  Description of Artificial Sequence: Synthetic oligonucleotide
uuggugacgucgaacauaa

SEQ ID NO: 2752125 - RNA, 19 nt, Artificial Sequence
  Description of Artificial Sequence: Synthetic oligonucleotide
aucuuuucaacgaggacuc

SEQ ID NO: 2752126 - RNA, 19 nt, Artificial Sequence
  Description of Artificial Sequence: Synthetic oligonucleotide
ucuccacuggguaauguga

SEQ ID NO: 2752127 - RNA, 19 nt, Artificial Sequence
  Description of Artificial Sequence: Synthetic oligonucleotide
gcaaaguccacucccacgg

SEQ ID NO: 2752128 - RNA, 19 nt, Artificial Sequence
  Description of Artificial Sequence: Synthetic oligonucleotide
aucucgauaguauagucuu

SEQ ID NO: 2752129 - RNA, 19 nt, Artificial Sequence
  Description of Artificial Sequence: Synthetic oligonucleotide
agcaaaguccacucccacg

SEQ ID NO: 2752130 - RNA, 19 nt, Artificial Sequence
  Description of Artificial Sequence: Synthetic oligonucleotide
gucgaacauaauaacacag

SEQ ID NO: 2752131 - RNA, 19 nt, Artificial Sequence
  Description of Artificial Sequence: Synthetic oligonucleotide
ugaaaguaguggcauuggu

SEQ ID NO: 2752132 - RNA, 19 nt, Artificial Sequence
  Description of Artificial Sequence: Synthetic oligonucleotide
acagaucacucuuguuggc

SEQ ID NO: 2752133 - RNA, 19 nt, Artificial Sequence
  Description of Artificial Sequence: Synthetic oligonucleotide
ugucauagaggugaaccgc

SEQ ID NO: 2752134 - RNA, 19 nt, Artificial Sequence
  Description of Artificial Sequence: Synthetic oligonucleotide
auauuauaucuucucugga

SEQ ID NO: 2752135 - RNA, 19 nt, Artificial Sequence
  Description of Artificial Sequence: Synthetic oligonucleotide
gauguuuccguccagccua

SEQ ID NO: 2752136 - RNA, 19 nt, Artificial Sequence
  Description of Artificial Sequence: Synthetic oligonucleotide
ucucuggaauuguucauca

SEQ ID NO: 2752137 - RNA, 19 nt, Artificial Sequence
  Description of Artificial Sequence: Synthetic oligonucleotide
cuuggguagacaaagauau

SEQ ID NO: 2752138 - RNA, 19 nt, Artificial Sequence
  Description of Artificial Sequence: Synthetic oligonucleotide
cagagcaaaguccacuccc

SEQ ID NO: 2752139 - RNA, 19 nt, Artificial Sequence
  Description of Artificial Sequence: Synthetic oligonucleotide
uucccuuggguagacaaag

SEQ ID NO: 2752140 - RNA, 19 nt, Artificial Sequence
  Description of Artificial Sequence: Synthetic oligonucleotide
gaacauaauaacacaggca

SEQ ID NO: 2752141 - RNA, 19 nt, Artificial Sequence
  Description of Artificial Sequence: Synthetic oligonucleotide
aacacaggcagaagcaucu

SEQ ID NO: 2752142 - RNA, 19 nt, Artificial Sequence
  Description of Artificial Sequence: Synthetic oligonucleotide
uuuacugaaccggucaauc

SEQ ID NO: 2752143 - RNA, 19 nt, Artificial Sequence
  Description of Artificial Sequence: Synthetic oligonucleotide
uggguagacaaagauauua

SEQ ID NO: 2752144 - RNA, 19 nt, Artificial Sequence
  Description of Artificial Sequence: Synthetic oligonucleotide
aguaguggcauuggugacg

SEQ ID NO: 2752145 - RNA, 19 nt, Artificial Sequence
  Description of Artificial Sequence: Synthetic oligonucleotide
uucagagcaaaguccacuc

SEQ ID NO: 2752146 - RNA, 19 nt, Artificial Sequence
  Description of Artificial Sequence: Synthetic oligonucleotide
uugaaggcgcaccaucucu

SEQ ID NO: 2752147 - RNA, 19 nt, Artificial Sequence
  Description of Artificial Sequence: Synthetic oligonucleotide
ugacugauguuuccgucca

SEQ ID NO: 2752148 - RNA, 19 nt, Artificial Sequence
  Description of Artificial Sequence: Synthetic oligonucleotide
uuuccguccagccuaugaa

SEQ ID NO: 2752149 - RNA, 19 nt, Artificial Sequence
  Description of Artificial Sequence: Synthetic oligonucleotide
gguaaugugagcuugcugu

SEQ ID NO: 2752150 - RNA, 19 nt, Artificial Sequence
  Description of Artificial Sequence: Synthetic oligonucleotide
gauguaguucccuugggua

SEQ ID NO: 2752151 - RNA, 19 nt, Artificial Sequence
  Description of Artificial Sequence: Synthetic oligonucleotide
uguagugcuugcugaagcu

SEQ ID NO: 2752152 - RNA, 19 nt, Artificial Sequence
  Description of Artificial Sequence: Synthetic oligonucleotide
cuuggcuuggagauugaug

SEQ ID NO: 2752153 - RNA, 19 nt, Artificial Sequence
  Description of Artificial Sequence: Synthetic oligonucleotide
cauaauaacacaggcagaa

SEQ ID NO: 2752154 - RNA, 19 nt, Artificial Sequence
  Description of Artificial Sequence: Synthetic oligonucleotide
aagcaucucgauaguauag

SEQ ID NO: 2752155 - RNA, 19 nt, Artificial Sequence
  Description of Artificial Sequence: Synthetic oligonucleotide
agaaccuucagagcaaagu

SEQ ID NO: 2752156 - RNA, 19 nt, Artificial Sequence
  Description of Artificial Sequence: Synthetic oligonucleotide
uuacugaaccggucaaucu

SEQ ID NO: 2752157 - RNA, 19 nt, Artificial Sequence
  Description of Artificial Sequence: Synthetic oligonucleotide
ucuuuacugaaccggucaa

SEQ ID NO: 2752158 - RNA, 19 nt, Artificial Sequence
  Description of Artificial Sequence: Synthetic oligonucleotide
uucuccuugacugauguuu

SEQ ID NO: 2752159 - RNA, 19 nt, Artificial Sequence
  Description of Artificial Sequence: Synthetic oligonucleotide
ugaaggcgcaccaucucug

SEQ ID NO: 2752160 - RNA, 19 nt, Artificial Sequence
  Description of Artificial Sequence: Synthetic oligonucleotide
augaaaccguucucuuuac

SEQ ID NO: 2752161 - RNA, 19 nt, Artificial Sequence
  Description of Artificial Sequence: Synthetic oligonucleotide
uccuugacugauguuuccg

SEQ ID NO: 2752162 - RNA, 19 nt, Artificial Sequence
  Description of Artificial Sequence: Synthetic oligonucleotide
cucugagucagaccacugg

SEQ ID NO: 2752163 - RNA, 19 nt, Artificial Sequence
  Description of Artificial Sequence: Synthetic oligonucleotide
ugacgucgaacauaauaac

SEQ ID NO: 2752164 - RNA, 19 nt, Artificial Sequence
  Description of Artificial Sequence: Synthetic oligonucleotide
uucaacgaggacucucaug

SEQ ID NO: 2752165 - RNA, 19 nt, Artificial Sequence
  Description of Artificial Sequence: Synthetic oligonucleotide
gauccuguuuccaucuuug

SEQ ID NO: 2752166 - RNA, 19 nt, Artificial Sequence
  Description of Artificial Sequence: Synthetic oligonucleotide
aaggggacagaucacucuu

SEQ ID NO: 2752167 - RNA, 19 nt, Artificial Sequence
  Description of Artificial Sequence: Synthetic oligonucleotide
ucaaucuggucccggcuca

SEQ ID NO: 2752168 - RNA, 19 nt, Artificial Sequence
  Description of Artificial Sequence: Synthetic oligonucleotide
uuauaucuucucuggaauu

SEQ ID NO: 2752169 - RNA, 19 nt, Artificial Sequence
  Description of Artificial Sequence: Synthetic oligonucleotide
uuggagauugauguaguuc

SEQ ID NO: 2752170 - RNA, 19 nt, Artificial Sequence
  Description of Artificial Sequence: Synthetic oligonucleotide
cugauguuuccguccagcc

SEQ ID NO: 2752171 - RNA, 19 nt, Artificial Sequence
  Description of Artificial Sequence: Synthetic oligonucleotide
cauagaggugaaccgcucc

SEQ ID NO: 2752172 - RNA, 19 nt, Artificial Sequence
  Description of Artificial Sequence: Synthetic oligonucleotide
uaacacaggcagaagcauc

SEQ ID NO: 2752173 - RNA, 19 nt, Artificial Sequence
  Description of Artificial Sequence: Synthetic oligonucleotide
auagaggugaaccgcuccu

SEQ ID NO: 2752174 - RNA, 19 nt, Artificial Sequence
  Description of Artificial Sequence: Synthetic oligonucleotide
cugggaguagcgcuggacc

SEQ ID NO: 2752175 - RNA, 19 nt, Artificial Sequence
  Description of Artificial Sequence: Synthetic oligonucleotide
gacuuguagugcuugcuga

SEQ ID NO: 2752176 - RNA, 19 nt, Artificial Sequence
  Description of Artificial Sequence: Synthetic oligonucleotide
gaacuagcagcauguccag

SEQ ID NO: 2752177 - RNA, 19 nt, Artificial Sequence
  Description of Artificial Sequence: Synthetic oligonucleotide
aguucccuuggguagacaa

SEQ ID NO: 2752178 - RNA, 19 nt, Artificial Sequence
  Description of Artificial Sequence: Synthetic oligonucleotide
auaauaacacaggcagaag

SEQ ID NO: 2752179 - RNA, 19 nt, Artificial Sequence
  Description of Artificial Sequence: Synthetic oligonucleotide
ucuccuugacugauguuuc

SEQ ID NO: 2752180 - RNA, 19 nt, Artificial Sequence
  Description of Artificial Sequence: Synthetic oligonucleotide
aucuccacuggguaaugug

SEQ ID NO: 2752181 - RNA, 19 nt, Artificial Sequence
  Description of Artificial Sequence: Synthetic oligonucleotide
uccguccagccuaugaaac

SEQ ID NO: 2752182 - RNA, 19 nt, Artificial Sequence
  Description of Artificial Sequence: Synthetic oligonucleotide
ucucgauaguauagucuug

SEQ ID NO: 2752183 - RNA, 19 nt, Artificial Sequence
  Description of Artificial Sequence: Synthetic oligonucleotide
cuguuuccaucuuuggcug

SEQ ID NO: 2752184 - RNA, 19 nt, Artificial Sequence
  Description of Artificial Sequence: Synthetic oligonucleotide
gacgucgaacauaauaaca

SEQ ID NO: 2752185 - RNA, 19 nt, Artificial Sequence
  Description of Artificial Sequence: Synthetic oligonucleotide
uagcgcuggaccagugacg

SEQ ID NO: 2752186 - RNA, 19 nt, Artificial Sequence
  Description of Artificial Sequence: Synthetic oligonucleotide
gaagcaucucgauaguaua

SEQ ID NO: 2752187 - RNA, 19 nt, Artificial Sequence
  Description of Artificial Sequence: Synthetic oligonucleotide
cugagucagaccacuggag

SEQ ID NO: 2752188 - RNA, 19 nt, Artificial Sequence
  Description of Artificial Sequence: Synthetic oligonucleotide
cgaacauaauaacacaggc

SEQ ID NO: 2752189 - RNA, 19 nt, Artificial Sequence
  Description of Artificial Sequence: Synthetic oligonucleotide
gugacgucgaacauaauaa

SEQ ID NO: 2752190 - RNA, 19 nt, Artificial Sequence
  Description of Artificial Sequence: Synthetic oligonucleotide
uaaugugagcuugcugucc

SEQ ID NO: 2752191 - RNA, 19 nt, Artificial Sequence
  Description of Artificial Sequence: Synthetic oligonucleotide
cuccacuggguaaugugag

SEQ ID NO: 2752192 - RNA, 19 nt, Artificial Sequence
  Description of Artificial Sequence: Synthetic oligonucleotide
cuggaauuguucaucaucu

SEQ ID NO: 2752193 - RNA, 19 nt, Artificial Sequence
  Description of Artificial Sequence: Synthetic oligonucleotide
uccagauccuguuuccauc

SEQ ID NO: 2752194 - RNA, 19 nt, Artificial Sequence
  Description of Artificial Sequence: Synthetic oligonucleotide
acuggguaaugugagcuug

SEQ ID NO: 2752195 - RNA, 19 nt, Artificial Sequence
  Description of Artificial Sequence: Synthetic oligonucleotide
ugggaguagcgcuggacca

SEQ ID NO: 2752196 - RNA, 19 nt, Artificial Sequence
  Description of Artificial Sequence: Synthetic oligonucleotide
ugaaaccguucucuuuacu

SEQ ID NO: 2752197 - RNA, 19 nt, Artificial Sequence
  Description of Artificial Sequence: Synthetic oligonucleotide
aaggcgcaccaucucugag

SEQ ID NO: 2752198 - RNA, 19 nt, Artificial Sequence
  Description of Artificial Sequence: Synthetic oligonucleotide
uguaguucccuuggguaga

SEQ ID NO: 2752199 - RNA, 19 nt, Artificial Sequence
  Description of Artificial Sequence: Synthetic oligonucleotide
guuggccaagagcaggcag

SEQ ID NO: 2752200 - RNA, 19 nt, Artificial Sequence
  Description of Artificial Sequence: Synthetic oligonucleotide
uucucuggaauuguucauc

SEQ ID NO: 2752201 - RNA, 19 nt, Artificial Sequence
  Description of Artificial Sequence: Synthetic oligonucleotide
cauuaauauuucuguucuc

SEQ ID NO: 2752202 - RNA, 19 nt, Artificial Sequence
  Description of Artificial Sequence: Synthetic oligonucleotide
cugaaaguaguggcauugg

SEQ ID NO: 2752203 - RNA, 19 nt, Artificial Sequence
  Description of Artificial Sequence: Synthetic oligonucleotide
uagucuugucauagaggug

SEQ ID NO: 2752204 - RNA, 19 nt, Artificial Sequence
  Description of Artificial Sequence: Synthetic oligonucleotide
agauugauguaguucccuu

SEQ ID NO: 2752205 - RNA, 19 nt, Artificial Sequence
  Description of Artificial Sequence: Synthetic oligonucleotide
agccuaugaaaccguucuc

SEQ ID NO: 2752206 - RNA, 19 nt, Artificial Sequence
  Description of Artificial Sequence: Synthetic oligonucleotide
uucuguucuccuugacuga

SEQ ID NO: 2752207 - RNA, 19 nt, Artificial Sequence
  Description of Artificial Sequence: Synthetic oligonucleotide
agaagcaucucgauaguau

SEQ ID NO: 2752208 - RNA, 19 nt, Artificial Sequence
  Description of Artificial Sequence: Synthetic oligonucleotide
ucucugagucagaccacug

SEQ ID NO: 2752209 - RNA, 19 nt, Artificial Sequence
  Description of Artificial Sequence: Synthetic oligonucleotide
cuuuucaacgaggacucuc

SEQ ID NO: 2752210 - RNA, 19 nt, Artificial Sequence
  Description of Artificial Sequence: Synthetic oligonucleotide
uggagaaccuucagagcaa

SEQ ID NO: 2752211 - RNA, 19 nt, Artificial Sequence
  Description of Artificial Sequence: Synthetic oligonucleotide
uggaccagugacgucuugc

SEQ ID NO: 2752212 - RNA, 19 nt, Artificial Sequence
  Description of Artificial Sequence: Synthetic oligonucleotide
accacuggagaaccuucag

SEQ ID NO: 2752213 - RNA, 19 nt, Artificial Sequence
  Description of Artificial Sequence: Synthetic oligonucleotide
gaggugaaccgcuccugcc

SEQ ID NO: 2752214 - RNA, 19 nt, Artificial Sequence
  Description of Artificial Sequence: Synthetic oligonucleotide
guaaugugagcuugcuguc

SEQ ID NO: 2752215 - RNA, 19 nt, Artificial Sequence
  Description of Artificial Sequence: Synthetic oligonucleotide
ugcccugcaauaucccaca

SEQ ID NO: 2752216 - RNA, 19 nt, Artificial Sequence
  Description of Artificial Sequence: Synthetic oligonucleotide
cuguccagauccuguuucc

SEQ ID NO: 2752217 - RNA, 19 nt, Artificial Sequence
  Description of Artificial Sequence: Synthetic oligonucleotide
auaguauagucuugucaua

SEQ ID NO: 2752218 - RNA, 19 nt, Artificial Sequence
  Description of Artificial Sequence: Synthetic oligonucleotide
agcaucucgauaguauagu

SEQ ID NO: 2752219 - RNA, 19 nt, Artificial Sequence
  Description of Artificial Sequence: Synthetic oligonucleotide
gagucagaccacuggagaa

SEQ ID NO: 2752220 - RNA, 19 nt, Artificial Sequence
  Description of Artificial Sequence: Synthetic oligonucleotide
ggugacgucgaacauaaua

SEQ ID NO: 2752221 - RNA, 19 nt, Artificial Sequence
  Description of Artificial Sequence: Synthetic oligonucleotide
auaucuucucuggaauugu

SEQ ID NO: 2752222 - RNA, 19 nt, Artificial Sequence
  Description of Artificial Sequence: Synthetic oligonucleotide
gaggacuuggcuuggagau

SEQ ID NO: 2752223 - RNA, 19 nt, Artificial Sequence
  Description of Artificial Sequence: Synthetic oligonucleotide
cauguccagccagaggagg

SEQ ID NO: 2752224 - RNA, 19 nt, Artificial Sequence
  Description of Artificial Sequence: Synthetic oligonucleotide
aggaggacuuggcuuggag

SEQ ID NO: 2752225 - RNA, 19 nt, Artificial Sequence
  Description of Artificial Sequence: Synthetic oligonucleotide
gcauuggugacgucgaaca

SEQ ID NO: 2752226 - RNA, 19 nt, Artificial Sequence
  Description of Artificial Sequence: Synthetic oligonucleotide
auggccucauuaauauuuc

SEQ ID NO: 2752227 - RNA, 19 nt, Artificial Sequence
  Description of Artificial Sequence: Synthetic oligonucleotide
uuccguccagccuaugaaa

SEQ ID NO: 2752228 - RNA, 19 nt, Artificial Sequence
  Description of Artificial Sequence: Synthetic oligonucleotide
aguugaaggcgcaccaucu

SEQ ID NO: 2752229 - RNA, 19 nt, Artificial Sequence
  Description of Artificial Sequence: Synthetic oligonucleotide
cugcccugcaauaucccac

SEQ ID NO: 2752230 - RNA, 19 nt, Artificial Sequence
  Description of Artificial Sequence: Synthetic oligonucleotide
gaagcuguccugggaguag

SEQ ID NO: 2752231 - RNA, 19 nt, Artificial Sequence
  Description of Artificial Sequence: Synthetic oligonucleotide
acgguggacuuguagugcu

SEQ ID NO: 2752232 - RNA, 19 nt, Artificial Sequence
  Description of Artificial Sequence: Synthetic oligonucleotide
aucuggucccggcucacug

SEQ ID NO: 2752233 - RNA, 19 nt, Artificial Sequence
  Description of Artificial Sequence: Synthetic oligonucleotide
cuccuugacugauguuucc

SEQ ID NO: 2752234 - RNA, 19 nt, Artificial Sequence
  Description of Artificial Sequence: Synthetic oligonucleotide
gucaaucuggucccggcuc

SEQ ID NO: 2752235 - RNA, 19 nt, Artificial Sequence
  Description of Artificial Sequence: Synthetic oligonucleotide
cauggccucauuaauauuu

SEQ ID NO: 2752236 - RNA, 19 nt, Artificial Sequence
  Description of Artificial Sequence: Synthetic oligonucleotide
caucuuuggcuguugcuga

SEQ ID NO: 2752237 - RNA, 19 nt, Artificial Sequence
  Description of Artificial Sequence: Synthetic oligonucleotide
guuuccguccagccuauga

SEQ ID NO: 2752238 - RNA, 19 nt, Artificial Sequence
  Description of Artificial Sequence: Synthetic oligonucleotide
ucuguucuccuugacugau

SEQ ID NO: 2752239 - RNA, 19 nt, Artificial Sequence
  Description of Artificial Sequence: Synthetic oligonucleotide
uuucaacgaggacucucau

SEQ ID NO: 2752240 - RNA, 19 nt, Artificial Sequence
  Description of Artificial Sequence: Synthetic oligonucleotide
gcugaaaguaguggcauug

SEQ ID NO: 2752241 - RNA, 19 nt, Artificial Sequence
  Description of Artificial Sequence: Synthetic oligonucleotide
acaggcagaagcaucucga

SEQ ID NO: 2752242 - RNA, 19 nt, Artificial Sequence
  Description of Artificial Sequence: Synthetic oligonucleotide
gagcaaaguccacucccac

SEQ ID NO: 2752243 - RNA, 19 nt, Artificial Sequence
  Description of Artificial Sequence: Synthetic oligonucleotide
cugcaauaucccacaguug

SEQ ID NO: 2752244 - RNA, 19 nt, Artificial Sequence
  Description of Artificial Sequence: Synthetic oligonucleotide
acauaauaacacaggcaga

SEQ ID NO: 2752245 - RNA, 19 nt, Artificial Sequence
  Description of Artificial Sequence: Synthetic oligonucleotide
agaccacuggagaaccuuc

SEQ ID NO: 2752246 - RNA, 19 nt, Artificial Sequence
  Description of Artificial Sequence: Synthetic oligonucleotide
auuggugacgucgaacaua

SEQ ID NO: 2752247 - RNA, 19 nt, Artificial Sequence
  Description of Artificial Sequence: Synthetic oligonucleotide
uggccucauuaauauuucu

SEQ ID NO: 2752248 - RNA, 19 nt, Artificial Sequence
  Description of Artificial Sequence: Synthetic oligonucleotide
ugugagcuugcuguccaga

SEQ ID NO: 2752249 - RNA, 19 nt, Artificial Sequence
  Description of Artificial Sequence: Synthetic oligonucleotide
aggcgcaccaucucugagu

SEQ ID NO: 2752250 - RNA, 19 nt, Artificial Sequence
  Description of Artificial Sequence: Synthetic oligonucleotide
guagugcuugcugaagcug

SEQ ID NO: 2752251 - RNA, 19 nt, Artificial Sequence
  Description of Artificial Sequence: Synthetic oligonucleotide
agauccuguuuccaucuuu

SEQ ID NO: 2752252 - RNA, 19 nt, Artificial Sequence
  Description of Artificial Sequence: Synthetic oligonucleotide
uguuuccaucuuuggcugu

SEQ ID NO: 2752253 - RNA, 19 nt, Artificial Sequence
  Description of Artificial Sequence: Synthetic oligonucleotide
gacucucauggccucauua

SEQ ID NO: 2752254 - RNA, 19 nt, Artificial Sequence
  Description of Artificial Sequence: Synthetic oligonucleotide
uggaucuccacuggguaau

SEQ ID NO: 2752255 - RNA, 19 nt, Artificial Sequence
  Description of Artificial Sequence: Synthetic oligonucleotide
aucucugagucagaccacu

SEQ ID NO: 2752256 - RNA, 19 nt, Artificial Sequence
  Description of Artificial Sequence: Synthetic oligonucleotide
agggcacuggaucuccacu

SEQ ID NO: 2752257 - RNA, 19 nt, Artificial Sequence
  Description of Artificial Sequence: Synthetic oligonucleotide
ggaccagugacgucuugcc

SEQ ID NO: 2752258 - RNA, 19 nt, Artificial Sequence
  Description of Artificial Sequence: Synthetic oligonucleotide
ucccuuggguagacaaaga

SEQ ID NO: 2752259 - RNA, 19 nt, Artificial Sequence
  Description of Artificial Sequence: Synthetic oligonucleotide
uagaggugaaccgcuccug

SEQ ID NO: 2752260 - RNA, 19 nt, Artificial Sequence
  Description of Artificial Sequence: Synthetic oligonucleotide
guggacuuguagugcuugc

SEQ ID NO: 2752261 - RNA, 19 nt, Artificial Sequence
  Description of Artificial Sequence: Synthetic oligonucleotide
ggccucauuaauauuucug

SEQ ID NO: 2752262 - RNA, 19 nt, Artificial Sequence
  Description of Artificial Sequence: Synthetic oligonucleotide
agcgcuggaccagugacgu

SEQ ID NO: 2752263 - RNA, 19 nt, Artificial Sequence
  Description of Artificial Sequence: Synthetic oligonucleotide
caucucgauaguauagucu

SEQ ID NO: 2752264 - RNA, 19 nt, Artificial Sequence
  Description of Artificial Sequence: Synthetic oligonucleotide
guugaaggcgcaccaucuc

SEQ ID NO: 2752265 - RNA, 19 nt, Artificial Sequence
  Description of Artificial Sequence: Synthetic oligonucleotide
agagcaaaguccacuccca

SEQ ID NO: 2752266 - RNA, 19 nt, Artificial Sequence
  Description of Artificial Sequence: Synthetic oligonucleotide
ggacuuggcuuggagauug

SEQ ID NO: 2752267 - RNA, 19 nt, Artificial Sequence
  Description of Artificial Sequence: Synthetic oligonucleotide
uggaauuguucaucaucuu

SEQ ID NO: 2752268 - RNA, 19 nt, Artificial Sequence
  Description of Artificial Sequence: Synthetic oligonucleotide
cuggucccggcucacugcc

SEQ ID NO: 2752269 - RNA, 19 nt, Artificial Sequence
  Description of Artificial Sequence: Synthetic oligonucleotide
gacaaagauauuauaucuu

SEQ ID NO: 2752270 - RNA, 19 nt, Artificial Sequence
  Description of Artificial Sequence: Synthetic oligonucleotide
ugaaccggucaaucugguc

SEQ ID NO: 2752271 - RNA, 19 nt, Artificial Sequence
  Description of Artificial Sequence: Synthetic oligonucleotide
ucagaccacuggagaaccu

SEQ ID NO: 2752272 - RNA, 19 nt, Artificial Sequence
  Description of Artificial Sequence: Synthetic oligonucleotide
gaaggcgcaccaucucuga

SEQ ID NO: 2752273 - RNA, 19 nt, Artificial Sequence
  Description of Artificial Sequence: Synthetic oligonucleotide
gacugauguuuccguccag

SEQ ID NO: 2752274 - RNA, 19 nt, Artificial Sequence
  Description of Artificial Sequence: Synthetic oligonucleotide
ucacugcccaaggggacag

SEQ ID NO: 2752275 - RNA, 19 nt, Artificial Sequence
  Description of Artificial Sequence: Synthetic oligonucleotide
cacaguugaaggcgcacca

SEQ ID NO: 2752276 - RNA, 19 nt, Artificial Sequence
  Description of Artificial Sequence: Synthetic oligonucleotide
ccguucucuuuacugaacc

SEQ ID NO: 2752277 - RNA, 19 nt, Artificial Sequence
  Description of Artificial Sequence: Synthetic oligonucleotide
cacgguggacuuguagugc

SEQ ID NO: 2752278 - RNA, 19 nt, Artificial Sequence
  Description of Artificial Sequence: Synthetic oligonucleotide
caacgaggacucucauggc

SEQ ID NO: 2752279 - RNA, 19 nt, Artificial Sequence
  Description of Artificial Sequence: Synthetic oligonucleotide
gccucauuaauauuucugu

SEQ ID NO: 2752280 - RNA, 19 nt, Artificial Sequence
  Description of Artificial Sequence: Synthetic oligonucleotide
uuggguagacaaagauauu

SEQ ID NO: 2752281 - RNA, 19 nt, Artificial Sequence
  Description of Artificial Sequence: Synthetic oligonucleotide
cagccuaugaaaccguucu

SEQ ID NO: 2752282 - RNA, 19 nt, Artificial Sequence
  Description of Artificial Sequence: Synthetic oligonucleotide
acgaggacucucauggccu

SEQ ID NO: 2752283 - RNA, 19 nt, Artificial Sequence
  Description of Artificial Sequence: Synthetic oligonucleotide
ugaagcuguccugggagua

SEQ ID NO: 2752284 - RNA, 19 nt, Artificial Sequence
  Description of Artificial Sequence: Synthetic oligonucleotide
ucuugucauagaggugaac

SEQ ID NO: 2752285 - RNA, 19 nt, Artificial Sequence
  Description of Artificial Sequence: Synthetic oligonucleotide
uguccagccagaggaggac

SEQ ID NO: 2752286 - RNA, 19 nt, Artificial Sequence
  Description of Artificial Sequence: Synthetic oligonucleotide
augugagcuugcuguccag

SEQ ID NO: 2752287 - RNA, 19 nt, Artificial Sequence
  Description of Artificial Sequence: Synthetic oligonucleotide
uccagccuaugaaaccguu

SEQ ID NO: 2752288 - RNA, 19 nt, Artificial Sequence
  Description of Artificial Sequence: Synthetic oligonucleotide
acucccacgguggacuugu

SEQ ID NO: 2752289 - RNA, 19 nt, Artificial Sequence
  Description of Artificial Sequence: Synthetic oligonucleotide
ggaggacuuggcuuggaga

SEQ ID NO: 2752290 - RNA, 19 nt, Artificial Sequence
  Description of Artificial Sequence: Synthetic oligonucleotide
cuguucuccuugacugaug

SEQ ID NO: 2752291 - RNA, 19 nt, Artificial Sequence
  Description of Artificial Sequence: Synthetic oligonucleotide
gggcacuggaucuccacug

SEQ ID NO: 2752292 - RNA, 19 nt, Artificial Sequence
  Description of Artificial Sequence: Synthetic oligonucleotide
caccaucucugagucagac

SEQ ID NO: 2752293 - RNA, 19 nt, Artificial Sequence
  Description of Artificial Sequence: Synthetic oligonucleotide
uguuggccaagagcaggca

SEQ ID NO: 2752294 - RNA, 19 nt, Artificial Sequence
  Description of Artificial Sequence: Synthetic oligonucleotide
gcaucucgauaguauaguc

SEQ ID NO: 2752295 - RNA, 19 nt, Artificial Sequence
  Description of Artificial Sequence: Synthetic oligonucleotide
aaucuggucccggcucacu

SEQ ID NO: 2752296 - RNA, 19 nt, Artificial Sequence
  Description of Artificial Sequence: Synthetic oligonucleotide
gagauugauguaguucccu

SEQ ID NO: 2752297 - RNA, 19 nt, Artificial Sequence
  Description of Artificial Sequence: Synthetic oligonucleotide
cguucucuuuacugaaccg

SEQ ID NO: 2752298 - RNA, 19 nt, Artificial Sequence
  Description of Artificial Sequence: Synthetic oligonucleotide
cucgauaguauagucuugu

SEQ ID NO: 2752299 - RNA, 19 nt, Artificial Sequence
  Description of Artificial Sequence: Synthetic oligonucleotide
ggaauuguucaucaucuuu

SEQ ID NO: 2752300 - RNA, 19 nt, Artificial Sequence
  Description of Artificial Sequence: Synthetic oligonucleotide
gguggacuuguagugcuug

SEQ ID NO: 2752301 - RNA, 19 nt, Artificial Sequence
  Description of Artificial Sequence: Synthetic oligonucleotide
ggagauugauguaguuccc

SEQ ID NO: 2752302 - RNA, 19 nt, Artificial Sequence
  Description of Artificial Sequence: Synthetic oligonucleotide
ggcgcaccaucucugaguc

SEQ ID NO: 2752303 - RNA, 19 nt, Artificial Sequence
  Description of Artificial Sequence: Synthetic oligonucleotide
gaccacuggagaaccuuca

SEQ ID NO: 2752304 - RNA, 19 nt, Artificial Sequence
  Description of Artificial Sequence: Synthetic oligonucleotide
ucuuuucaacgaggacucu

SEQ ID NO: 2752305 - RNA, 19 nt, Artificial Sequence
  Description of Artificial Sequence: Synthetic oligonucleotide
cuggaucuccacuggguaa

SEQ ID NO: 2752306 - RNA, 19 nt, Artificial Sequence
  Description of Artificial Sequence: Synthetic oligonucleotide
gagcaggcagggcacugga

SEQ ID NO: 2752307 - RNA, 19 nt, Artificial Sequence
  Description of Artificial Sequence: Synthetic oligonucleotide
uggcuuggagauugaugua

SEQ ID NO: 2752308 - RNA, 19 nt, Artificial Sequence
  Description of Artificial Sequence: Synthetic oligonucleotide
cgauaguauagucuuguca

SEQ ID NO: 2752309 - RNA, 19 nt, Artificial Sequence
  Description of Artificial Sequence: Synthetic oligonucleotide
cguccagccuaugaaaccg

SEQ ID NO: 2752310 - RNA, 19 nt, Artificial Sequence
  Description of Artificial Sequence: Synthetic oligonucleotide
gucauagaggugaaccgcu

SEQ ID NO: 2752311 - RNA, 19 nt, Artificial Sequence
  Description of Artificial Sequence: Synthetic oligonucleotide
cgcaccaucucugagucag

SEQ ID NO: 2752312 - RNA, 19 nt, Artificial Sequence
  Description of Artificial Sequence: Synthetic oligonucleotide
agcagcauguccagccaga

SEQ ID NO: 2752313 - RNA, 19 nt, Artificial Sequence
  Description of Artificial Sequence: Synthetic oligonucleotide
guggcauuggugacgucga

SEQ ID NO: 2752314 - RNA, 19 nt, Artificial Sequence
  Description of Artificial Sequence: Synthetic oligonucleotide
cuucagagcaaaguccacu

SEQ ID NO: 2752315 - RNA, 19 nt, Artificial Sequence
  Description of Artificial Sequence: Synthetic oligonucleotide
acugcccaaggggacagau

SEQ ID NO: 2752316 - RNA, 19 nt, Artificial Sequence
  Description of Artificial Sequence: Synthetic oligonucleotide
caaggggacagaucacucu

SEQ ID NO: 2752317 - RNA, 19 nt, Artificial Sequence
  Description of Artificial Sequence: Synthetic oligonucleotide
uggcauuggugacgucgaa

SEQ ID NO: 2752318 - RNA, 19 nt, Artificial Sequence
  Description of Artificial Sequence: Synthetic oligonucleotide
guccugggaguagcgcugg

SEQ ID NO: 2752319 - RNA, 19 nt, Artificial Sequence
  Description of Artificial Sequence: Synthetic oligonucleotide
acaguugaaggcgcaccau

SEQ ID NO: 2752320 - RNA, 19 nt, Artificial Sequence
  Description of Artificial Sequence: Synthetic oligonucleotide
aggggacagaucacucuug

SEQ ID NO: 2752321 - RNA, 19 nt, Artificial Sequence
  Description of Artificial Sequence: Synthetic oligonucleotide
ccguccagccuaugaaacc

SEQ ID NO: 2752322 - RNA, 19 nt, Artificial Sequence
  Description of Artificial Sequence: Synthetic oligonucleotide
cuaugaaaccguucucuuu

SEQ ID NO: 2752323 - RNA, 19 nt, Artificial Sequence
  Description of Artificial Sequence: Synthetic oligonucleotide
ggcauuggugacgucgaac

SEQ ID NO: 2752324 - RNA, 19 nt, Artificial Sequence
  Description of Artificial Sequence: Synthetic oligonucleotide
guaguucccuuggguagac

SEQ ID NO: 2752325 - RNA, 19 nt, Artificial Sequence
  Description of Artificial Sequence: Synthetic oligonucleotide
ccugcaauaucccacaguu

SEQ ID NO: 2752326 - RNA, 19 nt, Artificial Sequence
  Description of Artificial Sequence: Synthetic oligonucleotide
aggcagggcacuggaucuc

SEQ ID NO: 2752327 - RNA, 19 nt, Artificial Sequence
  Description of Artificial Sequence: Synthetic oligonucleotide
acuuggcuuggagauugau

SEQ ID NO: 2752328 - RNA, 19 nt, Artificial Sequence
  Description of Artificial Sequence: Synthetic oligonucleotide
uggucccggcucacugccc

SEQ ID NO: 2752329 - RNA, 19 nt, Artificial Sequence
  Description of Artificial Sequence: Synthetic oligonucleotide
ucccggcucacugcccaag

SEQ ID NO: 2752330 - RNA, 19 nt, Artificial Sequence
  Description of Artificial Sequence: Synthetic oligonucleotide
ccuuggguagacaaagaua

SEQ ID NO: 2752331 - RNA, 19 nt, Artificial Sequence
  Description of Artificial Sequence: Synthetic oligonucleotide
ccagccuaugaaaccguuc

SEQ ID NO: 2752332 - RNA, 19 nt, Artificial Sequence
  Description of Artificial Sequence: Synthetic oligonucleotide
uccugggaguagcgcugga

SEQ ID NO: 2752333 - RNA, 19 nt, Artificial Sequence
  Description of Artificial Sequence: Synthetic oligonucleotide
accggucaaucuggucccg

SEQ ID NO: 2752334 - RNA, 19 nt, Artificial Sequence
  Description of Artificial Sequence: Synthetic oligonucleotide
cgucgaacauaauaacaca

SEQ ID NO: 2752335 - RNA, 19 nt, Artificial Sequence
  Description of Artificial Sequence: Synthetic oligonucleotide
ggcucacugcccaagggga

SEQ ID NO: 2752336 - RNA, 19 nt, Artificial Sequence
  Description of Artificial Sequence: Synthetic oligonucleotide
gaguagcgcuggaccagug

SEQ ID NO: 2752337 - RNA, 19 nt, Artificial Sequence
  Description of Artificial Sequence: Synthetic oligonucleotide
cuucucuggaauuguucau

SEQ ID NO: 2752338 - RNA, 19 nt, Artificial Sequence
  Description of Artificial Sequence: Synthetic oligonucleotide
aggacucucauggccucau

SEQ ID NO: 2752339 - RNA, 19 nt, Artificial Sequence
  Description of Artificial Sequence: Synthetic oligonucleotide
gccuaugaaaccguucucu

SEQ ID NO: 2752340 - RNA, 19 nt, Artificial Sequence
  Description of Artificial Sequence: Synthetic oligonucleotide
cucucauggccucauuaau

SEQ ID NO: 2752341 - RNA, 19 nt, Artificial Sequence
  Description of Artificial Sequence: Synthetic oligonucleotide
caaucuggucccggcucac

SEQ ID NO: 2752342 - RNA, 19 nt, Artificial Sequence
  Description of Artificial Sequence: Synthetic oligonucleotide
uaguucccuuggguagaca

SEQ ID NO: 2752343 - RNA, 19 nt, Artificial Sequence
  Description of Artificial Sequence: Synthetic oligonucleotide
uguuuccguccagccuaug

SEQ ID NO: 2752344 - RNA, 19 nt, Artificial Sequence
  Description of Artificial Sequence: Synthetic oligonucleotide
gaucuccacuggguaaugu

SEQ ID NO: 2752345 - RNA, 19 nt, Artificial Sequence
  Description of Artificial Sequence: Synthetic oligonucleotide
cugaagcuguccugggagu

SEQ ID NO: 2752346 - RNA, 19 nt, Artificial Sequence
  Description of Artificial Sequence: Synthetic oligonucleotide
ggguagacaaagauauuau

SEQ ID NO: 2752347 - RNA, 19 nt, Artificial Sequence
  Description of Artificial Sequence: Synthetic oligonucleotide
ggcagggcacuggaucucc

SEQ ID NO: 2752348 - RNA, 19 nt, Artificial Sequence
  Description of Artificial Sequence: Synthetic oligonucleotide
cagaagcaucucgauagua

SEQ ID NO: 2752349 - RNA, 19 nt, Artificial Sequence
  Description of Artificial Sequence: Synthetic oligonucleotide
cuggaccagugacgucuug

SEQ ID NO: 2752350 - RNA, 19 nt, Artificial Sequence
  Description of Artificial Sequence: Synthetic oligonucleotide
ggggacagaucacucuugu

SEQ ID NO: 2752351 - RNA, 19 nt, Artificial Sequence
  Description of Artificial Sequence: Synthetic oligonucleotide
ccggcucacugcccaaggg

SEQ ID NO: 2752352 - RNA, 19 nt, Artificial Sequence
  Description of Artificial Sequence: Synthetic oligonucleotide
cuuuacugaaccggucaau

SEQ ID NO: 2752353 - RNA, 19 nt, Artificial Sequence
  Description of Artificial Sequence: Synthetic oligonucleotide
cggucaaucuggucccggc

SEQ ID NO: 2752354 - RNA, 19 nt, Artificial Sequence
  Description of Artificial Sequence: Synthetic oligonucleotide
ggaucuccacuggguaaug

SEQ ID NO: 2752355 - RNA, 19 nt, Artificial Sequence
  Description of Artificial Sequence: Synthetic oligonucleotide
ggcuguugcugaaaguagu

SEQ ID NO: 2752356 - RNA, 19 nt, Artificial Sequence
  Description of Artificial Sequence: Synthetic oligonucleotide
uggugacgucgaacauaau

SEQ ID NO: 2752357 - RNA, 19 nt, Artificial Sequence
  Description of Artificial Sequence: Synthetic oligonucleotide
gacuuggcuuggagauuga

SEQ ID NO: 2752358 - RNA, 19 nt, Artificial Sequence
  Description of Artificial Sequence: Synthetic oligonucleotide
gcccugcaauaucccacag

SEQ ID NO: 2752359 - RNA, 19 nt, Artificial Sequence
  Description of Artificial Sequence: Synthetic oligonucleotide
ccagauccuguuuccaucu

SEQ ID NO: 2752360 - RNA, 19 nt, Artificial Sequence
  Description of Artificial Sequence: Synthetic oligonucleotide
cauuggugacgucgaacau

SEQ ID NO: 2752361 - RNA, 19 nt, Artificial Sequence
  Description of Artificial Sequence: Synthetic oligonucleotide
cccggcucacugcccaagg

SEQ ID NO: 2752362 - RNA, 19 nt, Artificial Sequence
  Description of Artificial Sequence: Synthetic oligonucleotide
ccugggaguagcgcuggac

SEQ ID NO: 2752363 - RNA, 19 nt, Artificial Sequence
  Description of Artificial Sequence: Synthetic oligonucleotide
cucuggaauuguucaucau

SEQ ID NO: 2752364 - RNA, 19 nt, Artificial Sequence
  Description of Artificial Sequence: Synthetic oligonucleotide
ccucauuaauauuucuguu

SEQ ID NO: 2752365 - RNA, 19 nt, Artificial Sequence
  Description of Artificial Sequence: Synthetic oligonucleotide
caaaguccacucccacggu

SEQ ID NO: 2752366 - RNA, 19 nt, Artificial Sequence
  Description of Artificial Sequence: Synthetic oligonucleotide
gcagaagcaucucgauagu

SEQ ID NO: 2752367 - RNA, 19 nt, Artificial Sequence
  Description of Artificial Sequence: Synthetic oligonucleotide
gcuuggagauugauguagu

SEQ ID NO: 2752368 - RNA, 19 nt, Artificial Sequence
  Description of Artificial Sequence: Synthetic oligonucleotide
cacuggguaaugugagcuu

SEQ ID NO: 2752369 - RNA, 19 nt, Artificial Sequence
  Description of Artificial Sequence: Synthetic oligonucleotide
ccagaggaggacuuggcuu

SEQ ID NO: 2752370 - RNA, 19 nt, Artificial Sequence
  Description of Artificial Sequence: Synthetic oligonucleotide
ccuaugaaaccguucucuu

SEQ ID NO: 2752371 - RNA, 19 nt, Artificial Sequence
  Description of Artificial Sequence: Synthetic oligonucleotide
cagaccacuggagaaccuu

SEQ ID NO: 2752372 - RNA, 19 nt, Artificial Sequence
  Description of Artificial Sequence: Synthetic oligonucleotide
guucuccuugacugauguu

SEQ ID NO: 2752373 - RNA, 19 nt, Artificial Sequence
  Description of Artificial Sequence: Synthetic oligonucleotide
cgaggacucucauggccuc

SEQ ID NO: 2752374 - RNA, 19 nt, Artificial Sequence
  Description of Artificial Sequence: Synthetic oligonucleotide
gggacagaucacucuuguu

SEQ ID NO: 2752375 - RNA, 19 nt, Artificial Sequence
  Description of Artificial Sequence: Synthetic oligonucleotide
gcgcaccaucucugaguca

SEQ ID NO: 2752376 - RNA, 19 nt, Artificial Sequence
  Description of Artificial Sequence: Synthetic oligonucleotide
gcagggcacuggaucucca

SEQ ID NO: 2752377 - RNA, 19 nt, Artificial Sequence
  Description of Artificial Sequence: Synthetic oligonucleotide
gcgcuggaccagugacguc

SEQ ID NO: 2752378 - RNA, 19 nt, Artificial Sequence
  Description of Artificial Sequence: Synthetic oligonucleotide
cucccacgguggacuugua

SEQ ID NO: 2752379 - RNA, 19 nt, Artificial Sequence
  Description of Artificial Sequence: Synthetic oligonucleotide
ggacucucauggccucauu

SEQ ID NO: 2752380 - RNA, 19 nt, Artificial Sequence
  Description of Artificial Sequence: Synthetic oligonucleotide
cgcuccugcccugcaauau

SEQ ID NO: 2752381 - RNA, 19 nt, Artificial Sequence
  Description of Artificial Sequence: Synthetic oligonucleotide
ccacucccacgguggacuu

SEQ ID NO: 2752382 - RNA, 19 nt, Artificial Sequence
  Description of Artificial Sequence: Synthetic oligonucleotide
cgguggacuuguagugcuu

SEQ ID NO: 2752383 - RNA, 19 nt, Artificial Sequence
  Description of Artificial Sequence: Synthetic oligonucleotide
aaaucuuuuacuuuuguag

SEQ ID NO: 2752384 - RNA, 19 nt, Artificial Sequence
  Description of Artificial Sequence: Synthetic oligonucleotide
aaugaauuauuugacuucc

SEQ ID NO: 2752385 - RNA, 19 nt, Artificial Sequence
  Description of Artificial Sequence: Synthetic oligonucleotide
guuauaaagauuaacaaag

SEQ ID NO: 2752386 - RNA, 19 nt, Artificial Sequence
  Description of Artificial Sequence: Synthetic oligonucleotide
acguauaaggauuauauuc

SEQ ID NO: 2752387 - RNA, 19 nt, Artificial Sequence
  Description of Artificial Sequence: Synthetic oligonucleotide
uucagaaugaauuauuuga

SEQ ID NO: 2752388 - RNA, 19 nt, Artificial Sequence
  Description of Artificial Sequence: Synthetic oligonucleotide
uuugacuuccuuuaaaggc

SEQ ID NO: 2752389 - RNA, 19 nt, Artificial Sequence
  Description of Artificial Sequence: Synthetic oligonucleotide
uucagaaugaauauuuuga

SEQ ID NO: 2752390 - RNA, 19 nt, Artificial Sequence
  Description of Artificial Sequence: Synthetic oligonucleotide
uuauaaagauuaacaaagg

SEQ ID NO: 2752391 - RNA, 19 nt, Artificial Sequence
  Description of Artificial Sequence: Synthetic oligonucleotide
agauguguaaaucuuuuac

SEQ ID NO: 2752392 - RNA, 19 nt, Artificial Sequence
  Description of Artificial Sequence: Synthetic oligonucleotide
uaaagauuaacaaaggcuu

SEQ ID NO: 2752393 - RNA, 19 nt, Artificial Sequence
  Description of Artificial Sequence: Synthetic oligonucleotide
auaaggauuauauucggag

SEQ ID NO: 2752394 - RNA, 19 nt, Artificial Sequence
  Description of Artificial Sequence: Synthetic oligonucleotide
auuguacacacguauaagg

SEQ ID NO: 2752395 - RNA, 19 nt, Artificial Sequence
  Description of Artificial Sequence: Synthetic oligonucleotide
uugauguucuugaagaugc

SEQ ID NO: 2752396 - RNA, 19 nt, Artificial Sequence
  Description of Artificial Sequence: Synthetic oligonucleotide
auucuugacacuuguaugg

SEQ ID NO: 2752397 - RNA, 19 nt, Artificial Sequence
  Description of Artificial Sequence: Synthetic oligonucleotide
uuaacaaaggcuuugccac

SEQ ID NO: 2752398 - RNA, 19 nt, Artificial Sequence
  Description of Artificial Sequence: Synthetic oligonucleotide
aaaaccguuugccacauug

SEQ ID NO: 2752399 - RNA, 19 nt, Artificial Sequence
  Description of Artificial Sequence: Synthetic oligonucleotide
uguuugauguucuugaaga

SEQ ID NO: 2752400 - RNA, 19 nt, Artificial Sequence
  Description of Artificial Sequence: Synthetic oligonucleotide
ugaagaauaggaaaagacu

SEQ ID NO: 2752401 - RNA, 19 nt, Artificial Sequence
  Description of Artificial Sequence: Synthetic oligonucleotide
aaggauuauauucggagug

SEQ ID NO: 2752402 - RNA, 19 nt, Artificial Sequence
  Description of Artificial Sequence: Synthetic oligonucleotide
aagacuuuaccacacucuc

SEQ ID NO: 2752403 - RNA, 19 nt, Artificial Sequence
  Description of Artificial Sequence: Synthetic oligonucleotide
aaucuuuuacuuuuguaga

SEQ ID NO: 2752404 - RNA, 19 nt, Artificial Sequence
  Description of Artificial Sequence: Synthetic oligonucleotide
aauuauuugacuuccuuua

SEQ ID NO: 2752405 - RNA, 19 nt, Artificial Sequence
  Description of Artificial Sequence: Synthetic oligonucleotide
uauuugacuuccuuuaaag

SEQ ID NO: 2752406 - RNA, 19 nt, Artificial Sequence
  Description of Artificial Sequence: Synthetic oligonucleotide
auaggaaaagacuuuacca

SEQ ID NO: 2752407 - RNA, 19 nt, Artificial Sequence
  Description of Artificial Sequence: Synthetic oligonucleotide
uuaugaaaggcuuugugac

SEQ ID NO: 2752408 - RNA, 19 nt, Artificial Sequence
  Description of Artificial Sequence: Synthetic oligonucleotide
ucgaguaagguuauaaaga

SEQ ID NO: 2752409 - RNA, 19 nt, Artificial Sequence
  Description of Artificial Sequence: Synthetic oligonucleotide
uaugcauuguuugaugucg

SEQ ID NO: 2752410 - RNA, 19 nt, Artificial Sequence
  Description of Artificial Sequence: Synthetic oligonucleotide
uuuaaggucugaagaauag

SEQ ID NO: 2752411 - RNA, 19 nt, Artificial Sequence
  Description of Artificial Sequence: Synthetic oligonucleotide
uugaagaugccuagaauag

SEQ ID NO: 2752412 - RNA, 19 nt, Artificial Sequence
  Description of Artificial Sequence: Synthetic oligonucleotide
aauauuuugaugucuuuua

SEQ ID NO: 2752413 - RNA, 19 nt, Artificial Sequence
  Description of Artificial Sequence: Synthetic oligonucleotide
auuaugaaaggcuuuguga

SEQ ID NO: 2752414 - RNA, 19 nt, Artificial Sequence
  Description of Artificial Sequence: Synthetic oligonucleotide
aagagaugaagauaaguaa

SEQ ID NO: 2752415 - RNA, 19 nt, Artificial Sequence
  Description of Artificial Sequence: Synthetic oligonucleotide
auuaacaaaggcuuugcca

SEQ ID NO: 2752416 - RNA, 19 nt, Artificial Sequence
  Description of Artificial Sequence: Synthetic oligonucleotide
uaaggucugaagaauagga

SEQ ID NO: 2752417 - RNA, 19 nt, Artificial Sequence
  Description of Artificial Sequence: Synthetic oligonucleotide
uuugaugucuuuuaagguc

SEQ ID NO: 2752418 - RNA, 19 nt, Artificial Sequence
  Description of Artificial Sequence: Synthetic oligonucleotide
auaaagauuaacaaaggcu

SEQ ID NO: 2752419 - RNA, 19 nt, Artificial Sequence
  Description of Artificial Sequence: Synthetic oligonucleotide
ugagugauuaugaaaggcu

SEQ ID NO: 2752420 - RNA, 19 nt, Artificial Sequence
  Description of Artificial Sequence: Synthetic oligonucleotide
uuuacuaugcauuguuuga

SEQ ID NO: 2752421 - RNA, 19 nt, Artificial Sequence
  Description of Artificial Sequence: Synthetic oligonucleotide
ucagaaugaauuauuugac

SEQ ID NO: 2752422 - RNA, 19 nt, Artificial Sequence
  Description of Artificial Sequence: Synthetic oligonucleotide
uuuaugucgucuaagggau

SEQ ID NO: 2752423 - RNA, 19 nt, Artificial Sequence
  Description of Artificial Sequence: Synthetic oligonucleotide
auuugacuuccuuuaaagg

SEQ ID NO: 2752424 - RNA, 19 nt, Artificial Sequence
  Description of Artificial Sequence: Synthetic oligonucleotide
uaggaaaagacuuuaccac

SEQ ID NO: 2752425 - RNA, 19 nt, Artificial Sequence
  Description of Artificial Sequence: Synthetic oligonucleotide
cugaagaauaggaaaagac

SEQ ID NO: 2752426 - RNA, 19 nt, Artificial Sequence
  Description of Artificial Sequence: Synthetic oligonucleotide
uccuuuaaaggcuaaagau

SEQ ID NO: 2752427 - RNA, 19 nt, Artificial Sequence
  Description of Artificial Sequence: Synthetic oligonucleotide
uuugucuuuacuaugcauu

SEQ ID NO: 2752428 - RNA, 19 nt, Artificial Sequence
  Description of Artificial Sequence: Synthetic oligonucleotide
uaagggauacuaaugagua

SEQ ID NO: 2752429 - RNA, 19 nt, Artificial Sequence
  Description of Artificial Sequence: Synthetic oligonucleotide
gucgaguaagguuauaaag

SEQ ID NO: 2752430 - RNA, 19 nt, Artificial Sequence
  Description of Artificial Sequence: Synthetic oligonucleotide
gauuaugaaaggcuuugug

SEQ ID NO: 2752431 - RNA, 19 nt, Artificial Sequence
  Description of Artificial Sequence: Synthetic oligonucleotide
uugacuuccuuuaaaggcu

SEQ ID NO: 2752432 - RNA, 19 nt, Artificial Sequence
  Description of Artificial Sequence: Synthetic oligonucleotide
acuuuuguagaauuucucu

SEQ ID NO: 2752433 - RNA, 19 nt, Artificial Sequence
  Description of Artificial Sequence: Synthetic oligonucleotide
uguagaauuucucuccagu

SEQ ID NO: 2752434 - RNA, 19 nt, Artificial Sequence
  Description of Artificial Sequence: Synthetic oligonucleotide
cuuuacuaugcauuguuug

SEQ ID NO: 2752435 - RNA, 19 nt, Artificial Sequence
  Description of Artificial Sequence: Synthetic oligonucleotide
agaauuucucuccaguaug

SEQ ID NO: 2752436 - RNA, 19 nt, Artificial Sequence
  Description of Artificial Sequence: Synthetic oligonucleotide
ucuuuuaaggucugaagaa

SEQ ID NO: 2752437 - RNA, 19 nt, Artificial Sequence
  Description of Artificial Sequence: Synthetic oligonucleotide
ucuaagggauacuaaugag

SEQ ID NO: 2752438 - RNA, 19 nt, Artificial Sequence
  Description of Artificial Sequence: Synthetic oligonucleotide
uuccuuuaaaggcuaaaga

SEQ ID NO: 2752439 - RNA, 19 nt, Artificial Sequence
  Description of Artificial Sequence: Synthetic oligonucleotide
agaaugaauuauuugacuu

SEQ ID NO: 2752440 - RNA, 19 nt, Artificial Sequence
  Description of Artificial Sequence: Synthetic oligonucleotide
uuguacacacguauaagga

SEQ ID NO: 2752441 - RNA, 19 nt, Artificial Sequence
  Description of Artificial Sequence: Synthetic oligonucleotide
aguaagguuauaaagauua

SEQ ID NO: 2752442 - RNA, 19 nt, Artificial Sequence
  Description of Artificial Sequence: Synthetic oligonucleotide
uuacuuuuguagaauuucu

SEQ ID NO: 2752443 - RNA, 19 nt, Artificial Sequence
  Description of Artificial Sequence: Synthetic oligonucleotide
uuugaugucgccgaagaga

SEQ ID NO: 2752444 - RNA, 19 nt, Artificial Sequence
  Description of Artificial Sequence: Synthetic oligonucleotide
guauaaggauuauauucgg

SEQ ID NO: 2752445 - RNA, 19 nt, Artificial Sequence
  Description of Artificial Sequence: Synthetic oligonucleotide
uguaugauuucucuccagu

SEQ ID NO: 2752446 - RNA, 19 nt, Artificial Sequence
  Description of Artificial Sequence: Synthetic oligonucleotide
uaugaacugucuugugucg

SEQ ID NO: 2752447 - RNA, 19 nt, Artificial Sequence
  Description of Artificial Sequence: Synthetic oligonucleotide
uuuacuuuuguagaauuuc

SEQ ID NO: 2752448 - RNA, 19 nt, Artificial Sequence
  Description of Artificial Sequence: Synthetic oligonucleotide
ugucuuuuaaggucugaag

SEQ ID NO: 2752449 - RNA, 19 nt, Artificial Sequence
  Description of Artificial Sequence: Synthetic oligonucleotide
gaaugaauuauuugacuuc

SEQ ID NO: 2752450 - RNA, 19 nt, Artificial Sequence
  Description of Artificial Sequence: Synthetic oligonucleotide
uguaaaucuuuuacuuuug

SEQ ID NO: 2752451 - RNA, 19 nt, Artificial Sequence
  Description of Artificial Sequence: Synthetic oligonucleotide
uguaugaaccgccuugugu

SEQ ID NO: 2752452 - RNA, 19 nt, Artificial Sequence
  Description of Artificial Sequence: Synthetic oligonucleotide
uguuugaugucgccgaaga

SEQ ID NO: 2752453 - RNA, 19 nt, Artificial Sequence
  Description of Artificial Sequence: Synthetic oligonucleotide
agaauaggaaaaccguuug

SEQ ID NO: 2752454 - RNA, 19 nt, Artificial Sequence
  Description of Artificial Sequence: Synthetic oligonucleotide
aagauuaacaaaggcuuug

SEQ ID NO: 2752455 - RNA, 19 nt, Artificial Sequence
  Description of Artificial Sequence: Synthetic oligonucleotide
auucagaaugaauuauuug

SEQ ID NO: 2752456 - RNA, 19 nt, Artificial Sequence
  Description of Artificial Sequence: Synthetic oligonucleotide
uauaaggauuauauucgga

SEQ ID NO: 2752457 - RNA, 19 nt, Artificial Sequence
  Description of Artificial Sequence: Synthetic oligonucleotide
uuuguagaauuucucucca

SEQ ID NO: 2752458 - RNA, 19 nt, Artificial Sequence
  Description of Artificial Sequence: Synthetic oligonucleotide
agauuaacaaaggcuuugc

SEQ ID NO: 2752459 - RNA, 19 nt, Artificial Sequence
  Description of Artificial Sequence: Synthetic oligonucleotide
uguucuugaagaugccuag

SEQ ID NO: 2752460 - RNA, 19 nt, Artificial Sequence
  Description of Artificial Sequence: Synthetic oligonucleotide
uuaaaggcuaaagaugugu

SEQ ID NO: 2752461 - RNA, 19 nt, Artificial Sequence
  Description of Artificial Sequence: Synthetic oligonucleotide
agguuauaaagauuaacaa

SEQ ID NO: 2752462 - RNA, 19 nt, Artificial Sequence
  Description of Artificial Sequence: Synthetic oligonucleotide
uugucuuuacuaugcauug

SEQ ID NO: 2752463 - RNA, 19 nt, Artificial Sequence
  Description of Artificial Sequence: Synthetic oligonucleotide
cuuuuguagaauuucucuc

SEQ ID NO: 2752464 - RNA, 19 nt, Artificial Sequence
  Description of Artificial Sequence: Synthetic oligonucleotide
cuucagaaugaauauuuug

SEQ ID NO: 2752465 - RNA, 19 nt, Artificial Sequence
  Description of Artificial Sequence: Synthetic oligonucleotide
uauucagaaugaauuauuu

SEQ ID NO: 2752466 - RNA, 19 nt, Artificial Sequence
  Description of Artificial Sequence: Synthetic oligonucleotide
uaaggauuauauucggagu

SEQ ID NO: 2752467 - RNA, 19 nt, Artificial Sequence
  Description of Artificial Sequence: Synthetic oligonucleotide
ugucuugugucgaguaagg

SEQ ID NO: 2752468 - RNA, 19 nt, Artificial Sequence
  Description of Artificial Sequence: Synthetic oligonucleotide
uuaaggucugaagaauagg

SEQ ID NO: 2752469 - RNA, 19 nt, Artificial Sequence
  Description of Artificial Sequence: Synthetic oligonucleotide
ucagaaugaauauuuugau

SEQ ID NO: 2752470 - RNA, 19 nt, Artificial Sequence
  Description of Artificial Sequence: Synthetic oligonucleotide
uuuuaaggucugaagaaua

SEQ ID NO: 2752471 - RNA, 19 nt, Artificial Sequence
  Description of Artificial Sequence: Synthetic oligonucleotide
uggauugucuucagaauga

SEQ ID NO: 2752472 - RNA, 19 nt, Artificial Sequence
  Description of Artificial Sequence: Synthetic oligonucleotide
acauucuugacacuuguau

SEQ ID NO: 2752473 - RNA, 19 nt, Artificial Sequence
  Description of Artificial Sequence: Synthetic oligonucleotide
acauuugccacacuccuca

SEQ ID NO: 2752474 - RNA, 19 nt, Artificial Sequence
  Description of Artificial Sequence: Synthetic oligonucleotide
gacuuuaccacacucucca

SEQ ID NO: 2752475 - RNA, 19 nt, Artificial Sequence
  Description of Artificial Sequence: Synthetic oligonucleotide
uuauauucggaguggauuu

SEQ ID NO: 2752476 - RNA, 19 nt, Artificial Sequence
  Description of Artificial Sequence: Synthetic oligonucleotide
gauuaacaaaggcuuugcc

SEQ ID NO: 2752477 - RNA, 19 nt, Artificial Sequence
  Description of Artificial Sequence: Synthetic oligonucleotide
uuauucagaaugaauuauu

SEQ ID NO: 2752478 - RNA, 19 nt, Artificial Sequence
  Description of Artificial Sequence: Synthetic oligonucleotide
gaauaggaaaaccguuugc

SEQ ID NO: 2752479 - RNA, 19 nt, Artificial Sequence
  Description of Artificial Sequence: Synthetic oligonucleotide
acuuguguggauugucuuc

SEQ ID NO: 2752480 - RNA, 19 nt, Artificial Sequence
  Description of Artificial Sequence: Synthetic oligonucleotide
ugccacauuguacacacgu

SEQ ID NO: 2752481 - RNA, 19 nt, Artificial Sequence
  Description of Artificial Sequence: Synthetic oligonucleotide
aaaggcuaaagauguguaa

SEQ ID NO: 2752482 - RNA, 19 nt, Artificial Sequence
  Description of Artificial Sequence: Synthetic oligonucleotide
uaggaaaaccguuugccac

SEQ ID NO: 2752483 - RNA, 19 nt, Artificial Sequence
  Description of Artificial Sequence: Synthetic oligonucleotide
uccuguaugaaccgccuug

SEQ ID NO: 2752484 - RNA, 19 nt, Artificial Sequence
  Description of Artificial Sequence: Synthetic oligonucleotide
uagaauaggaaaaccguuu

SEQ ID NO: 2752485 - RNA, 19 nt, Artificial Sequence
  Description of Artificial Sequence: Synthetic oligonucleotide
cuuuaaaggcuaaagaugu

SEQ ID NO: 2752486 - RNA, 19 nt, Artificial Sequence
  Description of Artificial Sequence: Synthetic oligonucleotide
cguauaaggauuauauucg

SEQ ID NO: 2752487 - RNA, 19 nt, Artificial Sequence
  Description of Artificial Sequence: Synthetic oligonucleotide
guggauugucuucagaaug

SEQ ID NO: 2752488 - RNA, 19 nt, Artificial Sequence
  Description of Artificial Sequence: Synthetic oligonucleotide
auugucuucagaaugaaua

SEQ ID NO: 2752489 - RNA, 19 nt, Artificial Sequence
  Description of Artificial Sequence: Synthetic oligonucleotide
aggaaaagacuuuaccaca

SEQ ID NO: 2752490 - RNA, 19 nt, Artificial Sequence
  Description of Artificial Sequence: Synthetic oligonucleotide
guaugaaccgccuuguguc

SEQ ID NO: 2752491 - RNA, 19 nt, Artificial Sequence
  Description of Artificial Sequence: Synthetic oligonucleotide
gacuguuugauguucuuga

SEQ ID NO: 2752492 - RNA, 19 nt, Artificial Sequence
  Description of Artificial Sequence: Synthetic oligonucleotide
cuugaagaugccuagaaua

SEQ ID NO: 2752493 - RNA, 19 nt, Artificial Sequence
  Description of Artificial Sequence: Synthetic oligonucleotide
uuauuugacuuccuuuaaa

SEQ ID NO: 2752494 - RNA, 19 nt, Artificial Sequence
  Description of Artificial Sequence: Synthetic oligonucleotide
cauucuugacacuuguaug

SEQ ID NO: 2752495 - RNA, 19 nt, Artificial Sequence
  Description of Artificial Sequence: Synthetic oligonucleotide
acuaugcauuguuugaugu

SEQ ID NO: 2752496 - RNA, 19 nt, Artificial Sequence
  Description of Artificial Sequence: Synthetic oligonucleotide
uugaugucgccgaagagau

SEQ ID NO: 2752497 - RNA, 19 nt, Artificial Sequence
  Description of Artificial Sequence: Synthetic oligonucleotide
ugaauuauuugacuuccuu

SEQ ID NO: 2752498 - RNA, 19 nt, Artificial Sequence
  Description of Artificial Sequence: Synthetic oligonucleotide
gaagagaugaagauaagua

SEQ ID NO: 2752499 - RNA, 19 nt, Artificial Sequence
  Description of Artificial Sequence: Synthetic oligonucleotide
auguguaaaucuuuuacuu

SEQ ID NO: 2752500 - RNA, 19 nt, Artificial Sequence
  Description of Artificial Sequence: Synthetic oligonucleotide
uaaagauguguaaaucuuu

SEQ ID NO: 2752501 - RNA, 19 nt, Artificial Sequence
  Description of Artificial Sequence: Synthetic oligonucleotide
uuuaaaggcuaaagaugug

SEQ ID NO: 2752502 - RNA, 19 nt, Artificial Sequence
  Description of Artificial Sequence: Synthetic oligonucleotide
ugaagaugccuagaauagg

SEQ ID NO: 2752503 - RNA, 19 nt, Artificial Sequence
  Description of Artificial Sequence: Synthetic oligonucleotide
uaugaaaggcuuugugaca

SEQ ID NO: 2752504 - RNA, 19 nt, Artificial Sequence
  Description of Artificial Sequence: Synthetic oligonucleotide
gucucuuaagggcugagug

SEQ ID NO: 2752505 - RNA, 19 nt, Artificial Sequence
  Description of Artificial Sequence: Synthetic oligonucleotide
uaaaucuuuuacuuuugua

SEQ ID NO: 2752506 - RNA, 19 nt, Artificial Sequence
  Description of Artificial Sequence: Synthetic oligonucleotide
auaggaaaaccguuugcca

SEQ ID NO: 2752507 - RNA, 19 nt, Artificial Sequence
  Description of Artificial Sequence: Synthetic oligonucleotide
uucuugaagaugccuagaa

SEQ ID NO: 2752508 - RNA, 19 nt, Artificial Sequence
  Description of Artificial Sequence: Synthetic oligonucleotide
gaugucgccgaagagauga

SEQ ID NO: 2752509 - RNA, 19 nt, Artificial Sequence
  Description of Artificial Sequence: Synthetic oligonucleotide
aaggcuaaagauguguaaa

SEQ ID NO: 2752510 - RNA, 19 nt, Artificial Sequence
  Description of Artificial Sequence: Synthetic oligonucleotide
guaugaacugucuuguguc

SEQ ID NO: 2752511 - RNA, 19 nt, Artificial Sequence
  Description of Artificial Sequence: Synthetic oligonucleotide
uguacacacguauaaggau

SEQ ID NO: 2752512 - RNA, 19 nt, Artificial Sequence
  Description of Artificial Sequence: Synthetic oligonucleotide
ucugaagaauaggaaaaga

SEQ ID NO: 2752513 - RNA, 19 nt, Artificial Sequence
  Description of Artificial Sequence: Synthetic oligonucleotide
gaaugaauauuuugauguc

SEQ ID NO: 2752514 - RNA, 19 nt, Artificial Sequence
  Description of Artificial Sequence: Synthetic oligonucleotide
gauguguaaaucuuuuacu

SEQ ID NO: 2752515 - RNA, 19 nt, Artificial Sequence
  Description of Artificial Sequence: Synthetic oligonucleotide
ggcugagugauuaugaaag

SEQ ID NO: 2752516 - RNA, 19 nt, Artificial Sequence
  Description of Artificial Sequence: Synthetic oligonucleotide
gucuaagggauacuaauga

SEQ ID NO: 2752517 - RNA, 19 nt, Artificial Sequence
  Description of Artificial Sequence: Synthetic oligonucleotide
ucucuuaagggcugaguga

SEQ ID NO: 2752518 - RNA, 19 nt, Artificial Sequence
  Description of Artificial Sequence: Synthetic oligonucleotide
uacuuuuguagaauuucuc

SEQ ID NO: 2752519 - RNA, 19 nt, Artificial Sequence
  Description of Artificial Sequence: Synthetic oligonucleotide
acauuguacacacguauaa

SEQ ID NO: 2752520 - RNA, 19 nt, Artificial Sequence
  Description of Artificial Sequence: Synthetic oligonucleotide
uguguaaaucuuuuacuuu

SEQ ID NO: 2752521 - RNA, 19 nt, Artificial Sequence
  Description of Artificial Sequence: Synthetic oligonucleotide
auaggguuugucuuuacua

SEQ ID NO: 2752522 - RNA, 19 nt, Artificial Sequence
  Description of Artificial Sequence: Synthetic oligonucleotide
uaaaggcuaaagaugugua

SEQ ID NO: 2752523 - RNA, 19 nt, Artificial Sequence
  Description of Artificial Sequence: Synthetic oligonucleotide
cuugugucgaguaagguua

SEQ ID NO: 2752524 - RNA, 19 nt, Artificial Sequence
  Description of Artificial Sequence: Synthetic oligonucleotide
gguuauaaagauuaacaaa

SEQ ID NO: 2752525 - RNA, 19 nt, Artificial Sequence
  Description of Artificial Sequence: Synthetic oligonucleotide
aggucugaagaauaggaaa

SEQ ID NO: 2752526 - RNA, 19 nt, Artificial Sequence
  Description of Artificial Sequence: Synthetic oligonucleotide
uacuaugcauuguuugaug

SEQ ID NO: 2752527 - RNA, 19 nt, Artificial Sequence
  Description of Artificial Sequence: Synthetic oligonucleotide
auuauauucggaguggauu

SEQ ID NO: 2752528 - RNA, 19 nt, Artificial Sequence
  Description of Artificial Sequence: Synthetic oligonucleotide
gaagaugccuagaauagga

SEQ ID NO: 2752529 - RNA, 19 nt, Artificial Sequence
  Description of Artificial Sequence: Synthetic oligonucleotide
cuuccuuuaaaggcuaaag

SEQ ID NO: 2752530 - RNA, 19 nt, Artificial Sequence
  Description of Artificial Sequence: Synthetic oligonucleotide
uugucuucagaaugaauau

SEQ ID NO: 2752531 - RNA, 19 nt, Artificial Sequence
  Description of Artificial Sequence: Synthetic oligonucleotide
aggauuauauucggagugg

SEQ ID NO: 2752532 - RNA, 19 nt, Artificial Sequence
  Description of Artificial Sequence: Synthetic oligonucleotide
ugaacugucuugugucgag

SEQ ID NO: 2752533 - RNA, 19 nt, Artificial Sequence
  Description of Artificial Sequence: Synthetic oligonucleotide
ucuugugucgaguaagguu

SEQ ID NO: 2752534 - RNA, 19 nt, Artificial Sequence
  Description of Artificial Sequence: Synthetic oligonucleotide
ccuuuaaaggcuaaagaug

SEQ ID NO: 2752535 - RNA, 19 nt, Artificial Sequence
  Description of Artificial Sequence: Synthetic oligonucleotide
cugagugauuaugaaaggc

SEQ ID NO: 2752536 - RNA, 19 nt, Artificial Sequence
  Description of Artificial Sequence: Synthetic oligonucleotide
aaagauguguaaaucuuuu

SEQ ID NO: 2752537 - RNA, 19 nt, Artificial Sequence
  Description of Artificial Sequence: Synthetic oligonucleotide
ucgucuaagggauacuaau

SEQ ID NO: 2752538 - RNA, 19 nt, Artificial Sequence
  Description of Artificial Sequence: Synthetic oligonucleotide
acacguauaaggauuauau

SEQ ID NO: 2752539 - RNA, 19 nt, Artificial Sequence
  Description of Artificial Sequence: Synthetic oligonucleotide
uaggguuugucuuuacuau

SEQ ID NO: 2752540 - RNA, 19 nt, Artificial Sequence
  Description of Artificial Sequence: Synthetic oligonucleotide
gaugccuagaauaggaaaa

SEQ ID NO: 2752541 - RNA, 19 nt, Artificial Sequence
  Description of Artificial Sequence: Synthetic oligonucleotide
agagaugaagauaaguaaa

SEQ ID NO: 2752542 - RNA, 19 nt, Artificial Sequence
  Description of Artificial Sequence: Synthetic oligonucleotide
cuguuugauguucuugaag

SEQ ID NO: 2752543 - RNA, 19 nt, Artificial Sequence
  Description of Artificial Sequence: Synthetic oligonucleotide
augccuagaauaggaaaac

SEQ ID NO: 2752544 - RNA, 19 nt, Artificial Sequence
  Description of Artificial Sequence: Synthetic oligonucleotide
ucuugaagaugccuagaau

SEQ ID NO: 2752545 - RNA, 19 nt, Artificial Sequence
  Description of Artificial Sequence: Synthetic oligonucleotide
uccgguauggacuguuuga

SEQ ID NO: 2752546 - RNA, 19 nt, Artificial Sequence
  Description of Artificial Sequence: Synthetic oligonucleotide
gaagaauaggaaaagacuu

SEQ ID NO: 2752547 - RNA, 19 nt, Artificial Sequence
  Description of Artificial Sequence: Synthetic oligonucleotide
aucuuuuacuuuuguagaa

SEQ ID NO: 2752548 - RNA, 19 nt, Artificial Sequence
  Description of Artificial Sequence: Synthetic oligonucleotide
aagauguguaaaucuuuua

SEQ ID NO: 2752549 - RNA, 19 nt, Artificial Sequence
  Description of Artificial Sequence: Synthetic oligonucleotide
gugauuaugaaaggcuuug

SEQ ID NO: 2752550 - RNA, 19 nt, Artificial Sequence
  Description of Artificial Sequence: Synthetic oligonucleotide
auuauuugacuuccuuuaa

SEQ ID NO: 2752551 - RNA, 19 nt, Artificial Sequence
  Description of Artificial Sequence: Synthetic oligonucleotide
agggauacuaaugaguaaa

SEQ ID NO: 2752552 - RNA, 19 nt, Artificial Sequence
  Description of Artificial Sequence: Synthetic oligonucleotide
uaugucgucuaagggauac

SEQ ID NO: 2752553 - RNA, 19 nt, Artificial Sequence
  Description of Artificial Sequence: Synthetic oligonucleotide
ugucgaguaagguuauaaa

SEQ ID NO: 2752554 - RNA, 19 nt, Artificial Sequence
  Description of Artificial Sequence: Synthetic oligonucleotide
uuguagaauuucucuccag

SEQ ID NO: 2752555 - RNA, 19 nt, Artificial Sequence
  Description of Artificial Sequence: Synthetic oligonucleotide
aggaaaaccguuugccaca

SEQ ID NO: 2752556 - RNA, 19 nt, Artificial Sequence
  Description of Artificial Sequence: Synthetic oligonucleotide
acaucugccacacucuuua

SEQ ID NO: 2752557 - RNA, 19 nt, Artificial Sequence
  Description of Artificial Sequence: Synthetic oligonucleotide
agaugccuagaauaggaaa

SEQ ID NO: 2752558 - RNA, 19 nt, Artificial Sequence
  Description of Artificial Sequence: Synthetic oligonucleotide
agacuuuaccacacucucc

SEQ ID NO: 2752559 - RNA, 19 nt, Artificial Sequence
  Description of Artificial Sequence: Synthetic oligonucleotide
aagaauaggaaaagacuuu

SEQ ID NO: 2752560 - RNA, 19 nt, Artificial Sequence
  Description of Artificial Sequence: Synthetic oligonucleotide
aacauuugccacacuccuc

SEQ ID NO: 2752561 - RNA, 19 nt, Artificial Sequence
  Description of Artificial Sequence: Synthetic oligonucleotide
uguggauugucuucagaau

SEQ ID NO: 2752562 - RNA, 19 nt, Artificial Sequence
  Description of Artificial Sequence: Synthetic oligonucleotide
cauuguuugaugucgccga

SEQ ID NO: 2752563 - RNA, 19 nt, Artificial Sequence
  Description of Artificial Sequence: Synthetic oligonucleotide
uacacacguauaaggauua

SEQ ID NO: 2752564 - RNA, 19 nt, Artificial Sequence
  Description of Artificial Sequence: Synthetic oligonucleotide
cauuguacacacguauaag

SEQ ID NO: 2752565 - RNA, 19 nt, Artificial Sequence
  Description of Artificial Sequence: Synthetic oligonucleotide
ccuugugucucuuaagggc

SEQ ID NO: 2752566 - RNA, 19 nt, Artificial Sequence
  Description of Artificial Sequence: Synthetic oligonucleotide
gccuagaauaggaaaaccg

SEQ ID NO: 2752567 - RNA, 19 nt, Artificial Sequence
  Description of Artificial Sequence: Synthetic oligonucleotide
aggguuugucuuuacuaug

SEQ ID NO: 2752568 - RNA, 19 nt, Artificial Sequence
  Description of Artificial Sequence: Synthetic oligonucleotide
ugauguucuugaagaugcc

SEQ ID NO: 2752569 - RNA, 19 nt, Artificial Sequence
  Description of Artificial Sequence: Synthetic oligonucleotide
cucuccuguaugaaccgcc

SEQ ID NO: 2752570 - RNA, 19 nt, Artificial Sequence
  Description of Artificial Sequence: Synthetic oligonucleotide
aaccguuugccacauugua

SEQ ID NO: 2752571 - RNA, 19 nt, Artificial Sequence
  Description of Artificial Sequence: Synthetic oligonucleotide
gagaugaagauaaguaaaa

SEQ ID NO: 2752572 - RNA, 19 nt, Artificial Sequence
  Description of Artificial Sequence: Synthetic oligonucleotide
aagggauacuaaugaguaa

SEQ ID NO: 2752573 - RNA, 19 nt, Artificial Sequence
  Description of Artificial Sequence: Synthetic oligonucleotide
ugcauuguuugaugucgcc

SEQ ID NO: 2752574 - RNA, 19 nt, Artificial Sequence
  Description of Artificial Sequence: Synthetic oligonucleotide
gaauaggaaaagacuuuac

SEQ ID NO: 2752575 - RNA, 19 nt, Artificial Sequence
  Description of Artificial Sequence: Synthetic oligonucleotide
uguguggauugucuucaga

SEQ ID NO: 2752576 - RNA, 19 nt, Artificial Sequence
  Description of Artificial Sequence: Synthetic oligonucleotide
uuacuaugcauuguuugau

SEQ ID NO: 2752577 - RNA, 19 nt, Artificial Sequence
  Description of Artificial Sequence: Synthetic oligonucleotide
gucugaagaauaggaaaag

SEQ ID NO: 2752578 - RNA, 19 nt, Artificial Sequence
  Description of Artificial Sequence: Synthetic oligonucleotide
agaauaggaaaagacuuua

SEQ ID NO: 2752579 - RNA, 19 nt, Artificial Sequence
  Description of Artificial Sequence: Synthetic oligonucleotide
cuaugcauuguuugauguc

SEQ ID NO: 2752580 - RNA, 19 nt, Artificial Sequence
  Description of Artificial Sequence: Synthetic oligonucleotide
gaauuauuugacuuccuuu

SEQ ID NO: 2752581 - RNA, 19 nt, Artificial Sequence
  Description of Artificial Sequence: Synthetic oligonucleotide
aacugucuugugucgagua

SEQ ID NO: 2752582 - RNA, 19 nt, Artificial Sequence
  Description of Artificial Sequence: Synthetic oligonucleotide
ugaauauuuugaugucuuu

SEQ ID NO: 2752583 - RNA, 19 nt, Artificial Sequence
  Description of Artificial Sequence: Synthetic oligonucleotide
acuuuaccacacucuccac

SEQ ID NO: 2752584 - RNA, 19 nt, Artificial Sequence
  Description of Artificial Sequence: Synthetic oligonucleotide
gaauuucucuccaguauga

SEQ ID NO: 2752585 - RNA, 19 nt, Artificial Sequence
  Description of Artificial Sequence: Synthetic oligonucleotide
cuaagggauacuaaugagu

SEQ ID NO: 2752586 - RNA, 19 nt, Artificial Sequence
  Description of Artificial Sequence: Synthetic oligonucleotide
aagggcugagugauuauga

SEQ ID NO: 2752587 - RNA, 19 nt, Artificial Sequence
  Description of Artificial Sequence: Synthetic oligonucleotide
uaugaaccgccuugugucu

SEQ ID NO: 2752588 - RNA, 19 nt, Artificial Sequence
  Description of Artificial Sequence: Synthetic oligonucleotide
ucuccuguaugaaccgccu

SEQ ID NO: 2752589 - RNA, 19 nt, Artificial Sequence
  Description of Artificial Sequence: Synthetic oligonucleotide
aggcuaaagauguguaaau

SEQ ID NO: 2752590 - RNA, 19 nt, Artificial Sequence
  Description of Artificial Sequence: Synthetic oligonucleotide
ugccuagaauaggaaaacc

SEQ ID NO: 2752591 - RNA, 19 nt, Artificial Sequence
  Description of Artificial Sequence: Synthetic oligonucleotide
aaggucugaagaauaggaa

SEQ ID NO: 2752592 - RNA, 19 nt, Artificial Sequence
  Description of Artificial Sequence: Synthetic oligonucleotide
uauggacuguuugauguuc

SEQ ID NO: 2752593 - RNA, 19 nt, Artificial Sequence
  Description of Artificial Sequence: Synthetic oligonucleotide
cugucuugugucgaguaag

SEQ ID NO: 2752594 - RNA, 19 nt, Artificial Sequence
  Description of Artificial Sequence: Synthetic oligonucleotide
guagaauuucucuccagua

SEQ ID NO: 2752595 - RNA, 19 nt, Artificial Sequence
  Description of Artificial Sequence: Synthetic oligonucleotide
guuugaugucgccgaagag

SEQ ID NO: 2752596 - RNA, 19 nt, Artificial Sequence
  Description of Artificial Sequence: Synthetic oligonucleotide
augcauuguuugaugucgc

SEQ ID NO: 2752597 - RNA, 19 nt, Artificial Sequence
  Description of Artificial Sequence: Synthetic oligonucleotide
ucuccacacuuguagaguu

SEQ ID NO: 2752598 - RNA, 19 nt, Artificial Sequence
  Description of Artificial Sequence: Synthetic oligonucleotide
ugauuaugaaaggcuuugu

SEQ ID NO: 2752599 - RNA, 19 nt, Artificial Sequence
  Description of Artificial Sequence: Synthetic oligonucleotide
gguauggacuguuugaugu

SEQ ID NO: 2752600 - RNA, 19 nt, Artificial Sequence
  Description of Artificial Sequence: Synthetic oligonucleotide
uugacacuuguaugguuuc

SEQ ID NO: 2752601 - RNA, 19 nt, Artificial Sequence
  Description of Artificial Sequence: Synthetic oligonucleotide
aauuucucuccaguaugaa

SEQ ID NO: 2752602 - RNA, 19 nt, Artificial Sequence
  Description of Artificial Sequence: Synthetic oligonucleotide
aaaccguuugccacauugu

SEQ ID NO: 2752603 - RNA, 19 nt, Artificial Sequence
  Description of Artificial Sequence: Synthetic oligonucleotide
gcugagugauuaugaaagg

SEQ ID NO: 2752604 - RNA, 19 nt, Artificial Sequence
  Description of Artificial Sequence: Synthetic oligonucleotide
gcuaaagauguguaaaucu

SEQ ID NO: 2752605 - RNA, 19 nt, Artificial Sequence
  Description of Artificial Sequence: Synthetic oligonucleotide
cuuguaugauuucucucca

SEQ ID NO: 2752606 - RNA, 19 nt, Artificial Sequence
  Description of Artificial Sequence: Synthetic oligonucleotide
ugacuuccuuuaaaggcua

SEQ ID NO: 2752607 - RNA, 19 nt, Artificial Sequence
  Description of Artificial Sequence: Synthetic oligonucleotide
augaauauuuugaugucuu

SEQ ID NO: 2752608 - RNA, 19 nt, Artificial Sequence
  Description of Artificial Sequence: Synthetic oligonucleotide
uuguuugaugucgccgaag

SEQ ID NO: 2752609 - RNA, 19 nt, Artificial Sequence
  Description of Artificial Sequence: Synthetic oligonucleotide
uccacacuuguagaguuuc

SEQ ID NO: 2752610 - RNA, 19 nt, Artificial Sequence
  Description of Artificial Sequence: Synthetic oligonucleotide
uucuugacacuuguauggu

SEQ ID NO: 2752611 - RNA, 19 nt, Artificial Sequence
  Description of Artificial Sequence: Synthetic oligonucleotide
ucgccgaagagaugaagau

SEQ ID NO: 2752612 - RNA, 19 nt, Artificial Sequence
  Description of Artificial Sequence: Synthetic oligonucleotide
acuguuugauguucuugaa

SEQ ID NO: 2752613 - RNA, 19 nt, Artificial Sequence
  Description of Artificial Sequence: Synthetic oligonucleotide
acucauaggguuugucuuu

SEQ ID NO: 2752614 - RNA, 19 nt, Artificial Sequence
  Description of Artificial Sequence: Synthetic oligonucleotide
ugucgucuaagggauacua

SEQ ID NO: 2752615 - RNA, 19 nt, Artificial Sequence
  Description of Artificial Sequence: Synthetic oligonucleotide
cuaaagauguguaaaucuu

SEQ ID NO: 2752616 - RNA, 19 nt, Artificial Sequence
  Description of Artificial Sequence: Synthetic oligonucleotide
ugucuuuacuaugcauugu

SEQ ID NO: 2752617 - RNA, 19 nt, Artificial Sequence
  Description of Artificial Sequence: Synthetic oligonucleotide
cuuguguggauugucuuca

SEQ ID NO: 2752618 - RNA, 19 nt, Artificial Sequence
  Description of Artificial Sequence: Synthetic oligonucleotide
gcauuguuugaugucgccg

SEQ ID NO: 2752619 - RNA, 19 nt, Artificial Sequence
  Description of Artificial Sequence: Synthetic oligonucleotide
cuugugucucuuaagggcu

SEQ ID NO: 2752620 - RNA, 19 nt, Artificial Sequence
  Description of Artificial Sequence: Synthetic oligonucleotide
ggguuugucuuuacuaugc

SEQ ID NO: 2752621 - RNA, 19 nt, Artificial Sequence
  Description of Artificial Sequence: Synthetic oligonucleotide
gaauauuuugaugucuuuu

SEQ ID NO: 2752622 - RNA, 19 nt, Artificial Sequence
  Description of Artificial Sequence: Synthetic oligonucleotide
gccuugugucucuuaaggg

SEQ ID NO: 2752623 - RNA, 19 nt, Artificial Sequence
  Description of Artificial Sequence: Synthetic oligonucleotide
ugucuucagaaugaauauu

SEQ ID NO: 2752624 - RNA, 19 nt, Artificial Sequence
  Description of Artificial Sequence: Synthetic oligonucleotide
acugucuugugucgaguaa

SEQ ID NO: 2752625 - RNA, 19 nt, Artificial Sequence
  Description of Artificial Sequence: Synthetic oligonucleotide
uuguguggauugucuucag

SEQ ID NO: 2752626 - RNA, 19 nt, Artificial Sequence
  Description of Artificial Sequence: Synthetic oligonucleotide
guaaaucuuuuacuuuugu

SEQ ID NO: 2752627 - RNA, 19 nt, Artificial Sequence
  Description of Artificial Sequence: Synthetic oligonucleotide
augucuuuuaaggucugaa

SEQ ID NO: 2752628 - RNA, 19 nt, Artificial Sequence
  Description of Artificial Sequence: Synthetic oligonucleotide
aagaugccuagaauaggaa

SEQ ID NO: 2752629 - RNA, 19 nt, Artificial Sequence
  Description of Artificial Sequence: Synthetic oligonucleotide
auuguuugaugucgccgaa

SEQ ID NO: 2752630 - RNA, 19 nt, Artificial Sequence
  Description of Artificial Sequence: Synthetic oligonucleotide
cagaaugaauuauuugacu

SEQ ID NO: 2752631 - RNA, 19 nt, Artificial Sequence
  Description of Artificial Sequence: Synthetic oligonucleotide
ucuugacacuuguaugguu

SEQ ID NO: 2752632 - RNA, 19 nt, Artificial Sequence
  Description of Artificial Sequence: Synthetic oligonucleotide
ugucgccgaagagaugaag

SEQ ID NO: 2752633 - RNA, 19 nt, Artificial Sequence
  Description of Artificial Sequence: Synthetic oligonucleotide
ugaaccgccuugugucucu

SEQ ID NO: 2752634 - RNA, 19 nt, Artificial Sequence
  Description of Artificial Sequence: Synthetic oligonucleotide
uugccacauuguacacacg

SEQ ID NO: 2752635 - RNA, 19 nt, Artificial Sequence
  Description of Artificial Sequence: Synthetic oligonucleotide
ugucucuuaagggcugagu

SEQ ID NO: 2752636 - RNA, 19 nt, Artificial Sequence
  Description of Artificial Sequence: Synthetic oligonucleotide
uuaagggcugagugauuau

SEQ ID NO: 2752637 - RNA, 19 nt, Artificial Sequence
  Description of Artificial Sequence: Synthetic oligonucleotide
agugauuaugaaaggcuuu

SEQ ID NO: 2752638 - RNA, 19 nt, Artificial Sequence
  Description of Artificial Sequence: Synthetic oligonucleotide
cuuaagggcugagugauua

SEQ ID NO: 2752639 - RNA, 19 nt, Artificial Sequence
  Description of Artificial Sequence: Synthetic oligonucleotide
auguucuugaagaugccua

SEQ ID NO: 2752640 - RNA, 19 nt, Artificial Sequence
  Description of Artificial Sequence: Synthetic oligonucleotide
agggcugagugauuaugaa

SEQ ID NO: 2752641 - RNA, 19 nt, Artificial Sequence
  Description of Artificial Sequence: Synthetic oligonucleotide
cuagaauaggaaaaccguu

SEQ ID NO: 2752642 - RNA, 19 nt, Artificial Sequence
  Description of Artificial Sequence: Synthetic oligonucleotide
gauguucuugaagaugccu

SEQ ID NO: 2752643 - RNA, 19 nt, Artificial Sequence
  Description of Artificial Sequence: Synthetic oligonucleotide
gccgaagagaugaagauaa

SEQ ID NO: 2752644 - RNA, 19 nt, Artificial Sequence
  Description of Artificial Sequence: Synthetic oligonucleotide
cuccgguauggacuguuug

SEQ ID NO: 2752645 - RNA, 19 nt, Artificial Sequence
  Description of Artificial Sequence: Synthetic oligonucleotide
ggucugaagaauaggaaaa

SEQ ID NO: 2752646 - RNA, 19 nt, Artificial Sequence
  Description of Artificial Sequence: Synthetic oligonucleotide
gucgccgaagagaugaaga

SEQ ID NO: 2752647 - RNA, 19 nt, Artificial Sequence
  Description of Artificial Sequence: Synthetic oligonucleotide
accgccuugugucucuuaa

SEQ ID NO: 2752648 - RNA, 19 nt, Artificial Sequence
  Description of Artificial Sequence: Synthetic oligonucleotide
ucauaggguuugucuuuac

SEQ ID NO: 2752649 - RNA, 19 nt, Artificial Sequence
  Description of Artificial Sequence: Synthetic oligonucleotide
cuugacacuuguaugguuu

SEQ ID NO: 2752650 - RNA, 19 nt, Artificial Sequence
  Description of Artificial Sequence: Synthetic oligonucleotide
ugugucucuuaagggcuga

SEQ ID NO: 2752651 - RNA, 19 nt, Artificial Sequence
  Description of Artificial Sequence: Synthetic oligonucleotide
augaacugucuugugucga

SEQ ID NO: 2752652 - RNA, 19 nt, Artificial Sequence
  Description of Artificial Sequence: Synthetic oligonucleotide
uauauucggaguggauuuu

SEQ ID NO: 2752653 - RNA, 19 nt, Artificial Sequence
  Description of Artificial Sequence: Synthetic oligonucleotide
uugugucgaguaagguuau

SEQ ID NO: 2752654 - RNA, 19 nt, Artificial Sequence
  Description of Artificial Sequence: Synthetic oligonucleotide
ugaugucgccgaagagaug

SEQ ID NO: 2752655 - RNA, 19 nt, Artificial Sequence
  Description of Artificial Sequence: Synthetic oligonucleotide
augaaccgccuugugucuc

SEQ ID NO: 2752656 - RNA, 19 nt, Artificial Sequence
  Description of Artificial Sequence: Synthetic oligonucleotide
gugucgaguaagguuauaa

SEQ ID NO: 2752657 - RNA, 19 nt, Artificial Sequence
  Description of Artificial Sequence: Synthetic oligonucleotide
ggcuaaagauguguaaauc

SEQ ID NO: 2752658 - RNA, 19 nt, Artificial Sequence
  Description of Artificial Sequence: Synthetic oligonucleotide
uuaugucgucuaagggaua

SEQ ID NO: 2752659 - RNA, 19 nt, Artificial Sequence
  Description of Artificial Sequence: Synthetic oligonucleotide
ccguuugccacauuguaca

SEQ ID NO: 2752660 - RNA, 19 nt, Artificial Sequence
  Description of Artificial Sequence: Synthetic oligonucleotide
augaauuauuugacuuccu

SEQ ID NO: 2752661 - RNA, 19 nt, Artificial Sequence
  Description of Artificial Sequence: Synthetic oligonucleotide
guuugucuuuacuaugcau

SEQ ID NO: 2752662 - RNA, 19 nt, Artificial Sequence
  Description of Artificial Sequence: Synthetic oligonucleotide
cuguaugaaccgccuugug

SEQ ID NO: 2752663 - RNA, 19 nt, Artificial Sequence
  Description of Artificial Sequence: Synthetic oligonucleotide
cgccuugugucucuuaagg

SEQ ID NO: 2752664 - RNA, 19 nt, Artificial Sequence
  Description of Artificial Sequence: Synthetic oligonucleotide
ucuuaagggcugagugauu

SEQ ID NO: 2752665 - RNA, 19 nt, Artificial Sequence
  Description of Artificial Sequence: Synthetic oligonucleotide
guaagguuauaaagauuaa

SEQ ID NO: 2752666 - RNA, 19 nt, Artificial Sequence
  Description of Artificial Sequence: Synthetic oligonucleotide
acuuccuuuaaaggcuaaa

SEQ ID NO: 2752667 - RNA, 19 nt, Artificial Sequence
  Description of Artificial Sequence: Synthetic oligonucleotide
gagugauuaugaaaggcuu

SEQ ID NO: 2752668 - RNA, 19 nt, Artificial Sequence
  Description of Artificial Sequence: Synthetic oligonucleotide
ggacuguuugauguucuug

SEQ ID NO: 2752669 - RNA, 19 nt, Artificial Sequence
  Description of Artificial Sequence: Synthetic oligonucleotide
ccuagaauaggaaaaccgu

SEQ ID NO: 2752670 - RNA, 19 nt, Artificial Sequence
  Description of Artificial Sequence: Synthetic oligonucleotide
uggacuguuugauguucuu

SEQ ID NO: 2752671 - RNA, 19 nt, Artificial Sequence
  Description of Artificial Sequence: Synthetic oligonucleotide
gguuugucuuuacuaugca

SEQ ID NO: 2752672 - RNA, 19 nt, Artificial Sequence
  Description of Artificial Sequence: Synthetic oligonucleotide
cgucuaagggauacuaaug

SEQ ID NO: 2752673 - RNA, 19 nt, Artificial Sequence
  Description of Artificial Sequence: Synthetic oligonucleotide
auggacuguuugauguucu

SEQ ID NO: 2752674 - RNA, 19 nt, Artificial Sequence
  Description of Artificial Sequence: Synthetic oligonucleotide
cuuuuaaggucugaagaau

SEQ ID NO: 2752675 - RNA, 19 nt, Artificial Sequence
  Description of Artificial Sequence: Synthetic oligonucleotide
ggauuauauucggagugga

SEQ ID NO: 2752676 - RNA, 19 nt, Artificial Sequence
  Description of Artificial Sequence: Synthetic oligonucleotide
ucuccgguauggacuguuu

SEQ ID NO: 2752677 - RNA, 19 nt, Artificial Sequence
  Description of Artificial Sequence: Synthetic oligonucleotide
guucuugaagaugccuaga

SEQ ID NO: 2752678 - RNA, 19 nt, Artificial Sequence
  Description of Artificial Sequence: Synthetic oligonucleotide
gauuauauucggaguggau

SEQ ID NO: 2752679 - RNA, 19 nt, Artificial Sequence
  Description of Artificial Sequence: Synthetic oligonucleotide
guacacacguauaaggauu

SEQ ID NO: 2752680 - RNA, 19 nt, Artificial Sequence
  Description of Artificial Sequence: Synthetic oligonucleotide
ugaaaggcuuugugacauu

SEQ ID NO: 2752681 - RNA, 19 nt, Artificial Sequence
  Description of Artificial Sequence: Synthetic oligonucleotide
cccacacuuguguggauug

SEQ ID NO: 2752682 - RNA, 19 nt, Artificial Sequence
  Description of Artificial Sequence: Synthetic oligonucleotide
cucuuaagggcugagugau

SEQ ID NO: 2752683 - RNA, 19 nt, Artificial Sequence
  Description of Artificial Sequence: Synthetic oligonucleotide
gggcugagugauuaugaaa

SEQ ID NO: 2752684 - RNA, 19 nt, Artificial Sequence
  Description of Artificial Sequence: Synthetic oligonucleotide
gucgucuaagggauacuaa

SEQ ID NO: 2752685 - RNA, 19 nt, Artificial Sequence
  Description of Artificial Sequence: Synthetic oligonucleotide
cacguauaaggauuauauu

SEQ ID NO: 2752686 - RNA, 19 nt, Artificial Sequence
  Description of Artificial Sequence: Synthetic oligonucleotide
gugucucuuaagggcugag

SEQ ID NO: 2752687 - RNA, 19 nt, Artificial Sequence
  Description of Artificial Sequence: Synthetic oligonucleotide
cacacguauaaggauuaua

SEQ ID NO: 2752688 - RNA, 19 nt, Artificial Sequence
  Description of Artificial Sequence: Synthetic oligonucleotide
gaguaagguuauaaagauu

SEQ ID NO: 2752689 - RNA, 19 nt, Artificial Sequence
  Description of Artificial Sequence: Synthetic oligonucleotide
augucgucuaagggauacu

SEQ ID NO: 2752690 - RNA, 19 nt, Artificial Sequence
  Description of Artificial Sequence: Synthetic oligonucleotide
ugugucgaguaagguuaua

SEQ ID NO: 2752691 - RNA, 19 nt, Artificial Sequence
  Description of Artificial Sequence: Synthetic oligonucleotide
ccgaagagaugaagauaag

SEQ ID NO: 2752692 - RNA, 19 nt, Artificial Sequence
  Description of Artificial Sequence: Synthetic oligonucleotide
aaccgccuugugucucuua

SEQ ID NO: 2752693 - RNA, 19 nt, Artificial Sequence
  Description of Artificial Sequence: Synthetic oligonucleotide
gggauacuaaugaguaaaa

SEQ ID NO: 2752694 - RNA, 19 nt, Artificial Sequence
  Description of Artificial Sequence: Synthetic oligonucleotide
cucauaggguuugucuuua

SEQ ID NO: 2752695 - RNA, 19 nt, Artificial Sequence
  Description of Artificial Sequence: Synthetic oligonucleotide
gaacugucuugugucgagu

SEQ ID NO: 2752696 - RNA, 19 nt, Artificial Sequence
  Description of Artificial Sequence: Synthetic oligonucleotide
acacacguauaaggauuau

SEQ ID NO: 2752697 - RNA, 19 nt, Artificial Sequence
  Description of Artificial Sequence: Synthetic oligonucleotide
guauggacuguuugauguu

SEQ ID NO: 2752698 - RNA, 19 nt, Artificial Sequence
  Description of Artificial Sequence: Synthetic oligonucleotide
cacacucuccacacuugua

SEQ ID NO: 2752699 - RNA, 19 nt, Artificial Sequence
  Description of Artificial Sequence: Synthetic oligonucleotide
gacuuccuuuaaaggcuaa

SEQ ID NO: 2752700 - RNA, 19 nt, Artificial Sequence
  Description of Artificial Sequence: Synthetic oligonucleotide
cgaguaagguuauaaagau

SEQ ID NO: 2752701 - RNA, 19 nt, Artificial Sequence
  Description of Artificial Sequence: Synthetic oligonucleotide
cucuccacacuuguagagu

SEQ ID NO: 2752702 - RNA, 19 nt, Artificial Sequence
  Description of Artificial Sequence: Synthetic oligonucleotide
ccacauuguacacacguau

SEQ ID NO: 2752703 - RNA, 19 nt, Artificial Sequence
  Description of Artificial Sequence: Synthetic oligonucleotide
gucuugugucgaguaaggu

SEQ ID NO: 2752704 - RNA, 19 nt, Artificial Sequence
  Description of Artificial Sequence: Synthetic oligonucleotide
cacuuguguggauugucuu

SEQ ID NO: 2752705 - RNA, 19 nt, Artificial Sequence
  Description of Artificial Sequence: Synthetic oligonucleotide
cgguauggacuguuugaug

SEQ ID NO: 2752706 - RNA, 19 nt, Artificial Sequence
  Description of Artificial Sequence: Synthetic oligonucleotide
ccgccuugugucucuuaag

SEQ ID NO: 2752707 - RNA, 19 nt, Artificial Sequence
  Description of Artificial Sequence: Synthetic oligonucleotide
ucucuccgguauggacugu

SEQ ID NO: 2752708 - RNA, 19 nt, Artificial Sequence
  Description of Artificial Sequence: Synthetic oligonucleotide
cgaagagaugaagauaagu

SEQ ID NO: 2752709 - RNA, 19 nt, Artificial Sequence
  Description of Artificial Sequence: Synthetic oligonucleotide
augucgccgaagagaugaa

SEQ ID NO: 2752710 - RNA, 19 nt, Artificial Sequence
  Description of Artificial Sequence: Synthetic oligonucleotide
ggaaaaccguuugccacau

SEQ ID NO: 2752711 - RNA, 19 nt, Artificial Sequence
  Description of Artificial Sequence: Synthetic oligonucleotide
cuccacacuuguagaguuu

SEQ ID NO: 2752712 - RNA, 19 nt, Artificial Sequence
  Description of Artificial Sequence: Synthetic oligonucleotide
gaaaaccguuugccacauu

SEQ ID NO: 2752713 - RNA, 19 nt, Artificial Sequence
  Description of Artificial Sequence: Synthetic oligonucleotide
ccuguaugaaccgccuugu

SEQ ID NO: 2752714 - RNA, 19 nt, Artificial Sequence
  Description of Artificial Sequence: Synthetic oligonucleotide
cucuccgguauggacuguu

SEQ ID NO: 2752715 - RNA, 19 nt, Artificial Sequence
  Description of Artificial Sequence: Synthetic oligonucleotide
ccgguauggacuguuugau

SEQ ID NO: 2752716 - RNA, 19 nt, Artificial Sequence
  Description of Artificial Sequence: Synthetic oligonucleotide
gaaccgccuugugucucuu

SEQ ID NO: 2752717 - RNA, 19 nt, Artificial Sequence
  Description of Artificial Sequence: Synthetic oligonucleotide
cgccgaagagaugaagaua

SEQ ID NO: 2752718 - RNA, 19 nt, Artificial Sequence
  Description of Artificial Sequence: Synthetic oligonucleotide
ccccacacuuguguggauu

SEQ ID NO: 2752719 - RNA, 19 nt, Artificial Sequence
  Description of Artificial Sequence: Synthetic oligonucleotide
aauacagugcucuauguag

SEQ ID NO: 2752720 - RNA, 19 nt, Artificial Sequence
  Description of Artificial Sequence: Synthetic oligonucleotide
gauagaagaguuuggagca

SEQ ID NO: 2752721 - RNA, 19 nt, Artificial Sequence
  Description of Artificial Sequence: Synthetic oligonucleotide
acacacuagagauagaaga

SEQ ID NO: 2752722 - RNA, 19 nt, Artificial Sequence
  Description of Artificial Sequence: Synthetic oligonucleotide
aguggaugagcucagaacu

SEQ ID NO: 2752723 - RNA, 19 nt, Artificial Sequence
  Description of Artificial Sequence: Synthetic oligonucleotide
aggacggcggcuuaaaagg

SEQ ID NO: 2752724 - RNA, 19 nt, Artificial Sequence
  Description of Artificial Sequence: Synthetic oligonucleotide
aacagugggccuucuuacc

SEQ ID NO: 2752725 - RNA, 19 nt, Artificial Sequence
  Description of Artificial Sequence: Synthetic oligonucleotide
aaggacggcggcuuaaaag

SEQ ID NO: 2752726 - RNA, 19 nt, Artificial Sequence
  Description of Artificial Sequence: Synthetic oligonucleotide
gaaggaggcgcuaaggacg

SEQ ID NO: 2752727 - RNA, 19 nt, Artificial Sequence
  Description of Artificial Sequence: Synthetic oligonucleotide
gaguuuggagcauugcggg

SEQ ID NO: 2752728 - RNA, 19 nt, Artificial Sequence
  Description of Artificial Sequence: Synthetic oligonucleotide
cuucuuaccggaaggaggc

SEQ ID NO: 2752729 - RNA, 19 nt, Artificial Sequence
  Description of Artificial Sequence: Synthetic oligonucleotide
uagagauagaagaguuugg

SEQ ID NO: 2752730 - RNA, 19 nt, Artificial Sequence
  Description of Artificial Sequence: Synthetic oligonucleotide
uugcauuucuugcagaaaa

SEQ ID NO: 2752731 - RNA, 19 nt, Artificial Sequence
  Description of Artificial Sequence: Synthetic oligonucleotide
gagauagaagaguuuggag

SEQ ID NO: 2752732 - RNA, 19 nt, Artificial Sequence
  Description of Artificial Sequence: Synthetic oligonucleotide
ugacuccuggcgcagaggg

SEQ ID NO: 2752733 - RNA, 19 nt, Artificial Sequence
  Description of Artificial Sequence: Synthetic oligonucleotide
cuagagauagaagaguuug

SEQ ID NO: 2752734 - RNA, 19 nt, Artificial Sequence
  Description of Artificial Sequence: Synthetic oligonucleotide
cacacuagagauagaagag

SEQ ID NO: 2752735 - RNA, 19 nt, Artificial Sequence
  Description of Artificial Sequence: Synthetic oligonucleotide
cagugcucuauguaggucg

SEQ ID NO: 2752736 - RNA, 19 nt, Artificial Sequence
  Description of Artificial Sequence: Synthetic oligonucleotide
aaggacaguucuguggaac

SEQ ID NO: 2752737 - RNA, 19 nt, Artificial Sequence
  Description of Artificial Sequence: Synthetic oligonucleotide
aacacacacgguucuuccg

SEQ ID NO: 2752738 - RNA, 19 nt, Artificial Sequence
  Description of Artificial Sequence: Synthetic oligonucleotide
aguucuguggaacacacua

SEQ ID NO: 2752739 - RNA, 19 nt, Artificial Sequence
  Description of Artificial Sequence: Synthetic oligonucleotide
uucuguggaacacacuaga

SEQ ID NO: 2752740 - RNA, 19 nt, Artificial Sequence
  Description of Artificial Sequence: Synthetic oligonucleotide
ggcaguaggacaccgagcg

SEQ ID NO: 2752741 - RNA, 19 nt, Artificial Sequence
  Description of Artificial Sequence: Synthetic oligonucleotide
agaguuuggagcauugcgg

SEQ ID NO: 2752742 - RNA, 19 nt, Artificial Sequence
  Description of Artificial Sequence: Synthetic oligonucleotide
uuaaaaggacaguucugug

SEQ ID NO: 2752743 - RNA, 19 nt, Artificial Sequence
  Description of Artificial Sequence: Synthetic oligonucleotide
gacgaugacgacgacgacg

SEQ ID NO: 2752744 - RNA, 19 nt, Artificial Sequence
  Description of Artificial Sequence: Synthetic oligonucleotide
cucuauguaggucgggugg

SEQ ID NO: 2752745 - RNA, 19 nt, Artificial Sequence
  Description of Artificial Sequence: Synthetic oligonucleotide
acagugggccuucuuaccg

SEQ ID NO: 2752746 - RNA, 19 nt, Artificial Sequence
  Description of Artificial Sequence: Synthetic oligonucleotide
acacacacgguucuuccgg

SEQ ID NO: 2752747 - RNA, 19 nt, Artificial Sequence
  Description of Artificial Sequence: Synthetic oligonucleotide
ucucgcagcgcgcacagcc

SEQ ID NO: 2752748 - RNA, 19 nt, Artificial Sequence
  Description of Artificial Sequence: Synthetic oligonucleotide
aguuuggagcauugcgggc

SEQ ID NO: 2752749 - RNA, 19 nt, Artificial Sequence
  Description of Artificial Sequence: Synthetic oligonucleotide
uccaccuccgacgaugacg

SEQ ID NO: 2752750 - RNA, 19 nt, Artificial Sequence
  Description of Artificial Sequence: Synthetic oligonucleotide
gaguggaugagcucagaac

SEQ ID NO: 2752751 - RNA, 19 nt, Artificial Sequence
  Description of Artificial Sequence: Synthetic oligonucleotide
aucacgggcguccuccucg

SEQ ID NO: 2752752 - RNA, 19 nt, Artificial Sequence
  Description of Artificial Sequence: Synthetic oligonucleotide
agaauacagugcucuaugu

SEQ ID NO: 2752753 - RNA, 19 nt, Artificial Sequence
  Description of Artificial Sequence: Synthetic oligonucleotide
ucuccaacacacacgguuc

SEQ ID NO: 2752754 - RNA, 19 nt, Artificial Sequence
  Description of Artificial Sequence: Synthetic oligonucleotide
acagaggggucuucacgcc

SEQ ID NO: 2752755 - RNA, 19 nt, Artificial Sequence
  Description of Artificial Sequence: Synthetic oligonucleotide
caguaggacaccgagcggg

SEQ ID NO: 2752756 - RNA, 19 nt, Artificial Sequence
  Description of Artificial Sequence: Synthetic oligonucleotide
auacagugcucuauguagg

SEQ ID NO: 2752757 - RNA, 19 nt, Artificial Sequence
  Description of Artificial Sequence: Synthetic oligonucleotide
augagcucagaacucccag

SEQ ID NO: 2752758 - RNA, 19 nt, Artificial Sequence
  Description of Artificial Sequence: Synthetic oligonucleotide
aaaggaucucgcagcgcgc

SEQ ID NO: 2752759 - RNA, 19 nt, Artificial Sequence
  Description of Artificial Sequence: Synthetic oligonucleotide
ugagcucagaacucccagc

SEQ ID NO: 2752760 - RNA, 19 nt, Artificial Sequence
  Description of Artificial Sequence: Synthetic oligonucleotide
ggugcuccagaauacagug

SEQ ID NO: 2752761 - RNA, 19 nt, Artificial Sequence
  Description of Artificial Sequence: Synthetic oligonucleotide
acgacgacgacgacgacuc

SEQ ID NO: 2752762 - RNA, 19 nt, Artificial Sequence
  Description of Artificial Sequence: Synthetic oligonucleotide
acgacgacgacucguccuc

SEQ ID NO: 2752763 - RNA, 19 nt, Artificial Sequence
  Description of Artificial Sequence: Synthetic oligonucleotide
ugggccuucuuaccggaag

SEQ ID NO: 2752764 - RNA, 19 nt, Artificial Sequence
  Description of Artificial Sequence: Synthetic oligonucleotide
acaacagugggccuucuua

SEQ ID NO: 2752765 - RNA, 19 nt, Artificial Sequence
  Description of Artificial Sequence: Synthetic oligonucleotide
aaggaggcgcuaaggacgg

SEQ ID NO: 2752766 - RNA, 19 nt, Artificial Sequence
  Description of Artificial Sequence: Synthetic oligonucleotide
uggcgcagagggcaguagg

SEQ ID NO: 2752767 - RNA, 19 nt, Artificial Sequence
  Description of Artificial Sequence: Synthetic oligonucleotide
ucuauguaggucggguggc

SEQ ID NO: 2752768 - RNA, 19 nt, Artificial Sequence
  Description of Artificial Sequence: Synthetic oligonucleotide
uccgacgaugacgacgacg

SEQ ID NO: 2752769 - RNA, 19 nt, Artificial Sequence
  Description of Artificial Sequence: Synthetic oligonucleotide
uggcuaugcaggcucuugc

SEQ ID NO: 2752770 - RNA, 19 nt, Artificial Sequence
  Description of Artificial Sequence: Synthetic oligonucleotide
acgggcguccuccucgacc

SEQ ID NO: 2752771 - RNA, 19 nt, Artificial Sequence
  Description of Artificial Sequence: Synthetic oligonucleotide
ucagggugcuccagaauac

SEQ ID NO: 2752772 - RNA, 19 nt, Artificial Sequence
  Description of Artificial Sequence: Synthetic oligonucleotide
caacagugggccuucuuac

SEQ ID NO: 2752773 - RNA, 19 nt, Artificial Sequence
  Description of Artificial Sequence: Synthetic oligonucleotide
uuuggagcauugcgggcgc

SEQ ID NO: 2752774 - RNA, 19 nt, Artificial Sequence
  Description of Artificial Sequence: Synthetic oligonucleotide
ccuucuuaccggaaggagg

SEQ ID NO: 2752775 - RNA, 19 nt, Artificial Sequence
  Description of Artificial Sequence: Synthetic oligonucleotide
uaugcaggcucuugcauuu

SEQ ID NO: 2752776 - RNA, 19 nt, Artificial Sequence
  Description of Artificial Sequence: Synthetic oligonucleotide
gaauacagugcucuaugua

SEQ ID NO: 2752777 - RNA, 19 nt, Artificial Sequence
  Description of Artificial Sequence: Synthetic oligonucleotide
uacagugcucuauguaggu

SEQ ID NO: 2752778 - RNA, 19 nt, Artificial Sequence
  Description of Artificial Sequence: Synthetic oligonucleotide
gcgucuccaacacacacgg

SEQ ID NO: 2752779 - RNA, 19 nt, Artificial Sequence
  Description of Artificial Sequence: Synthetic oligonucleotide
augacgacgacgacgacga

SEQ ID NO: 2752780 - RNA, 19 nt, Artificial Sequence
  Description of Artificial Sequence: Synthetic oligonucleotide
acacuagagauagaagagu

SEQ ID NO: 2752781 - RNA, 19 nt, Artificial Sequence
  Description of Artificial Sequence: Synthetic oligonucleotide
ucuuaccggaaggaggcgc

SEQ ID NO: 2752782 - RNA, 19 nt, Artificial Sequence
  Description of Artificial Sequence: Synthetic oligonucleotide
gaagaguuuggagcauugc

SEQ ID NO: 2752783 - RNA, 19 nt, Artificial Sequence
  Description of Artificial Sequence: Synthetic oligonucleotide
cucagaacucccagcggcc

SEQ ID NO: 2752784 - RNA, 19 nt, Artificial Sequence
  Description of Artificial Sequence: Synthetic oligonucleotide
accuccgacgaugacgacg

SEQ ID NO: 2752785 - RNA, 19 nt, Artificial Sequence
  Description of Artificial Sequence: Synthetic oligonucleotide
cgugaaacaacagugggcc

SEQ ID NO: 2752786 - RNA, 19 nt, Artificial Sequence
  Description of Artificial Sequence: Synthetic oligonucleotide
auugcgggcgcagaggcug

SEQ ID NO: 2752787 - RNA, 19 nt, Artificial Sequence
  Description of Artificial Sequence: Synthetic oligonucleotide
acgaugacgacgacgacga

SEQ ID NO: 2752788 - RNA, 19 nt, Artificial Sequence
  Description of Artificial Sequence: Synthetic oligonucleotide
gaucucgcagcgcgcacag

SEQ ID NO: 2752789 - RNA, 19 nt, Artificial Sequence
  Description of Artificial Sequence: Synthetic oligonucleotide
ucaggccucuccaccuccg

SEQ ID NO: 2752790 - RNA, 19 nt, Artificial Sequence
  Description of Artificial Sequence: Synthetic oligonucleotide
caggcucuugcauuucuug

SEQ ID NO: 2752791 - RNA, 19 nt, Artificial Sequence
  Description of Artificial Sequence: Synthetic oligonucleotide
ugcucuauguaggucgggu

SEQ ID NO: 2752792 - RNA, 19 nt, Artificial Sequence
  Description of Artificial Sequence: Synthetic oligonucleotide
uaggacaccgagcgggccu

SEQ ID NO: 2752793 - RNA, 19 nt, Artificial Sequence
  Description of Artificial Sequence: Synthetic oligonucleotide
aggucggguggcuaugcag

SEQ ID NO: 2752794 - RNA, 19 nt, Artificial Sequence
  Description of Artificial Sequence: Synthetic oligonucleotide
aagcugcuguccgagcguc

SEQ ID NO: 2752795 - RNA, 19 nt, Artificial Sequence
  Description of Artificial Sequence: Synthetic oligonucleotide
gcucagaacucccagcggc

SEQ ID NO: 2752796 - RNA, 19 nt, Artificial Sequence
  Description of Artificial Sequence: Synthetic oligonucleotide
aaaggacaguucuguggaa

SEQ ID NO: 2752797 - RNA, 19 nt, Artificial Sequence
  Description of Artificial Sequence: Synthetic oligonucleotide
gagcauugcgggcgcagag

SEQ ID NO: 2752798 - RNA, 19 nt, Artificial Sequence
  Description of Artificial Sequence: Synthetic oligonucleotide
cacacacgguucuuccggg

SEQ ID NO: 2752799 - RNA, 19 nt, Artificial Sequence
  Description of Artificial Sequence: Synthetic oligonucleotide
acuacccgggucagggugc

SEQ ID NO: 2752800 - RNA, 19 nt, Artificial Sequence
  Description of Artificial Sequence: Synthetic oligonucleotide
aaggaucucgcagcgcgca

SEQ ID NO: 2752801 - RNA, 19 nt, Artificial Sequence
  Description of Artificial Sequence: Synthetic oligonucleotide
acacacgguucuuccgggg

SEQ ID NO: 2752802 - RNA, 19 nt, Artificial Sequence
  Description of Artificial Sequence: Synthetic oligonucleotide
agugcucuauguaggucgg

SEQ ID NO: 2752803 - RNA, 19 nt, Artificial Sequence
  Description of Artificial Sequence: Synthetic oligonucleotide
ucuccaccuccgacgauga

SEQ ID NO: 2752804 - RNA, 19 nt, Artificial Sequence
  Description of Artificial Sequence: Synthetic oligonucleotide
cagugggccuucuuaccgg

SEQ ID NO: 2752805 - RNA, 19 nt, Artificial Sequence
  Description of Artificial Sequence: Synthetic oligonucleotide
agaagaguuuggagcauug

SEQ ID NO: 2752806 - RNA, 19 nt, Artificial Sequence
  Description of Artificial Sequence: Synthetic oligonucleotide
agcauugcgggcgcagagg

SEQ ID NO: 2752807 - RNA, 19 nt, Artificial Sequence
  Description of Artificial Sequence: Synthetic oligonucleotide
aggcgcuaaggacggcggc

SEQ ID NO: 2752808 - RNA, 19 nt, Artificial Sequence
  Description of Artificial Sequence: Synthetic oligonucleotide
ggucggguggcuaugcagg

SEQ ID NO: 2752809 - RNA, 19 nt, Artificial Sequence
  Description of Artificial Sequence: Synthetic oligonucleotide
uaaggacggcggcuuaaaa

SEQ ID NO: 2752810 - RNA, 19 nt, Artificial Sequence
  Description of Artificial Sequence: Synthetic oligonucleotide
agagggcaguaggacaccg

SEQ ID NO: 2752811 - RNA, 19 nt, Artificial Sequence
  Description of Artificial Sequence: Synthetic oligonucleotide
cacuacccgggucagggug

SEQ ID NO: 2752812 - RNA, 19 nt, Artificial Sequence
  Description of Artificial Sequence: Synthetic oligonucleotide
uucuuaccggaaggaggcg

SEQ ID NO: 2752813 - RNA, 19 nt, Artificial Sequence
  Description of Artificial Sequence: Synthetic oligonucleotide
acaccgagcgggccucucg

SEQ ID NO: 2752814 - RNA, 19 nt, Artificial Sequence
  Description of Artificial Sequence: Synthetic oligonucleotide
cuccuccgcaucacgggcg

SEQ ID NO: 2752815 - RNA, 19 nt, Artificial Sequence
  Description of Artificial Sequence: Synthetic oligonucleotide
ugcuguccgagcgucgcag

SEQ ID NO: 2752816 - RNA, 19 nt, Artificial Sequence
  Description of Artificial Sequence: Synthetic oligonucleotide
aacaacagugggccuucuu

SEQ ID NO: 2752817 - RNA, 19 nt, Artificial Sequence
  Description of Artificial Sequence: Synthetic oligonucleotide
gaggcgcuaaggacggcgg

SEQ ID NO: 2752818 - RNA, 19 nt, Artificial Sequence
  Description of Artificial Sequence: Synthetic oligonucleotide
uccacagaggggucuucac

SEQ ID NO: 2752819 - RNA, 19 nt, Artificial Sequence
  Description of Artificial Sequence: Synthetic oligonucleotide
aacucccagcggccuccgc

SEQ ID NO: 2752820 - RNA, 19 nt, Artificial Sequence
  Description of Artificial Sequence: Synthetic oligonucleotide
acgacgacgacgacucguc

SEQ ID NO: 2752821 - RNA, 19 nt, Artificial Sequence
  Description of Artificial Sequence: Synthetic oligonucleotide
ggccucuccaccuccgacg

SEQ ID NO: 2752822 - RNA, 19 nt, Artificial Sequence
  Description of Artificial Sequence: Synthetic oligonucleotide
uccagaauacagugcucua

SEQ ID NO: 2752823 - RNA, 19 nt, Artificial Sequence
  Description of Artificial Sequence: Synthetic oligonucleotide
aggaucucgcagcgcgcac

SEQ ID NO: 2752824 - RNA, 19 nt, Artificial Sequence
  Description of Artificial Sequence: Synthetic oligonucleotide
uguaggucggguggcuaug

SEQ ID NO: 2752825 - RNA, 19 nt, Artificial Sequence
  Description of Artificial Sequence: Synthetic oligonucleotide
acacgguucuuccggggca

SEQ ID NO: 2752826 - RNA, 19 nt, Artificial Sequence
  Description of Artificial Sequence: Synthetic oligonucleotide
uguccgagcgucgcagcag

SEQ ID NO: 2752827 - RNA, 19 nt, Artificial Sequence
  Description of Artificial Sequence: Synthetic oligonucleotide
agugggccuucuuaccgga

SEQ ID NO: 2752828 - RNA, 19 nt, Artificial Sequence
  Description of Artificial Sequence: Synthetic oligonucleotide
accggaaggaggcgcuaag

SEQ ID NO: 2752829 - RNA, 19 nt, Artificial Sequence
  Description of Artificial Sequence: Synthetic oligonucleotide
ucuuccggggcaccccgcu

SEQ ID NO: 2752830 - RNA, 19 nt, Artificial Sequence
  Description of Artificial Sequence: Synthetic oligonucleotide
auguaggucggguggcuau

SEQ ID NO: 2752831 - RNA, 19 nt, Artificial Sequence
  Description of Artificial Sequence: Synthetic oligonucleotide
gggccuucuuaccggaagg

SEQ ID NO: 2752832 - RNA, 19 nt, Artificial Sequence
  Description of Artificial Sequence: Synthetic oligonucleotide
acgacgacucguccuccag

SEQ ID NO: 2752833 - RNA, 19 nt, Artificial Sequence
  Description of Artificial Sequence: Synthetic oligonucleotide
gacgacucguccuccagcu

SEQ ID NO: 2752834 - RNA, 19 nt, Artificial Sequence
  Description of Artificial Sequence: Synthetic oligonucleotide
uuccacagaggggucuuca

SEQ ID NO: 2752835 - RNA, 19 nt, Artificial Sequence
  Description of Artificial Sequence: Synthetic oligonucleotide
aggcugggaguggaugagc

SEQ ID NO: 2752836 - RNA, 19 nt, Artificial Sequence
  Description of Artificial Sequence: Synthetic oligonucleotide
ggcucuugcauuucuugca

SEQ ID NO: 2752837 - RNA, 19 nt, Artificial Sequence
  Description of Artificial Sequence: Synthetic oligonucleotide
uagaagaguuuggagcauu

SEQ ID NO: 2752838 - RNA, 19 nt, Artificial Sequence
  Description of Artificial Sequence: Synthetic oligonucleotide
agggugcuccagaauacag

SEQ ID NO: 2752839 - RNA, 19 nt, Artificial Sequence
  Description of Artificial Sequence: Synthetic oligonucleotide
ucgaccuccgccgcgcucu

SEQ ID NO: 2752840 - RNA, 19 nt, Artificial Sequence
  Description of Artificial Sequence: Synthetic oligonucleotide
uuccggggcaccccgcuuc

SEQ ID NO: 2752841 - RNA, 19 nt, Artificial Sequence
  Description of Artificial Sequence: Synthetic oligonucleotide
acuagagauagaagaguuu

SEQ ID NO: 2752842 - RNA, 19 nt, Artificial Sequence
  Description of Artificial Sequence: Synthetic oligonucleotide
uggagcauugcgggcgcag

SEQ ID NO: 2752843 - RNA, 19 nt, Artificial Sequence
  Description of Artificial Sequence: Synthetic oligonucleotide
cucgcuccuccgcaucacg

SEQ ID NO: 2752844 - RNA, 19 nt, Artificial Sequence
  Description of Artificial Sequence: Synthetic oligonucleotide
gacggcggcuuaaaaggac

SEQ ID NO: 2752845 - RNA, 19 nt, Artificial Sequence
  Description of Artificial Sequence: Synthetic oligonucleotide
uaggucggguggcuaugca

SEQ ID NO: 2752846 - RNA, 19 nt, Artificial Sequence
  Description of Artificial Sequence: Synthetic oligonucleotide
gcauugcgggcgcagaggc

SEQ ID NO: 2752847 - RNA, 19 nt, Artificial Sequence
  Description of Artificial Sequence: Synthetic oligonucleotide
ggaggcgcuaaggacggcg

SEQ ID NO: 2752848 - RNA, 19 nt, Artificial Sequence
  Description of Artificial Sequence: Synthetic oligonucleotide
gucggguggcuaugcaggc

SEQ ID NO: 2752849 - RNA, 19 nt, Artificial Sequence
  Description of Artificial Sequence: Synthetic oligonucleotide
guccgagcgucgcagcagc

SEQ ID NO: 2752850 - RNA, 19 nt, Artificial Sequence
  Description of Artificial Sequence: Synthetic oligonucleotide
uccuccgcaucacgggcgu

SEQ ID NO: 2752851 - RNA, 19 nt, Artificial Sequence
  Description of Artificial Sequence: Synthetic oligonucleotide
ccgacgaugacgacgacga

SEQ ID NO: 2752852 - RNA, 19 nt, Artificial Sequence
  Description of Artificial Sequence: Synthetic oligonucleotide
ccacagaggggucuucacg

SEQ ID NO: 2752853 - RNA, 19 nt, Artificial Sequence
  Description of Artificial Sequence: Synthetic oligonucleotide
cuccgcaucacgggcgucc

SEQ ID NO: 2752854 - RNA, 19 nt, Artificial Sequence
  Description of Artificial Sequence: Synthetic oligonucleotide
agcgucgcagcagcgccac

SEQ ID NO: 2752855 - RNA, 19 nt, Artificial Sequence
  Description of Artificial Sequence: Synthetic oligonucleotide
gcucuauguaggucgggug

SEQ ID NO: 2752856 - RNA, 19 nt, Artificial Sequence
  Description of Artificial Sequence: Synthetic oligonucleotide
gacgacgacgacucguccu

SEQ ID NO: 2752857 - RNA, 19 nt, Artificial Sequence
  Description of Artificial Sequence: Synthetic oligonucleotide
agcggccuccgcacuaccc

SEQ ID NO: 2752858 - RNA, 19 nt, Artificial Sequence
  Description of Artificial Sequence: Synthetic oligonucleotide
uauguaggucggguggcua

SEQ ID NO: 2752859 - RNA, 19 nt, Artificial Sequence
  Description of Artificial Sequence: Synthetic oligonucleotide
guggaugagcucagaacuc

SEQ ID NO: 2752860 - RNA, 19 nt, Artificial Sequence
  Description of Artificial Sequence: Synthetic oligonucleotide
cucccagcggccuccgcac

SEQ ID NO: 2752861 - RNA, 19 nt, Artificial Sequence
  Description of Artificial Sequence: Synthetic oligonucleotide
gcagagggcaguaggacac

SEQ ID NO: 2752862 - RNA, 19 nt, Artificial Sequence
  Description of Artificial Sequence: Synthetic oligonucleotide
uccgccgcgcucucggggu

SEQ ID NO: 2752863 - RNA, 19 nt, Artificial Sequence
  Description of Artificial Sequence: Synthetic oligonucleotide
guggcuaugcaggcucuug

SEQ ID NO: 2752864 - RNA, 19 nt, Artificial Sequence
  Description of Artificial Sequence: Synthetic oligonucleotide
acggcggcuuaaaaggaca

SEQ ID NO: 2752865 - RNA, 19 nt, Artificial Sequence
  Description of Artificial Sequence: Synthetic oligonucleotide
caccgagcgggccucucgc

SEQ ID NO: 2752866 - RNA, 19 nt, Artificial Sequence
  Description of Artificial Sequence: Synthetic oligonucleotide
uccggggcaccccgcuucc

SEQ ID NO: 2752867 - RNA, 19 nt, Artificial Sequence
  Description of Artificial Sequence: Synthetic oligonucleotide
guaggucggguggcuaugc

SEQ ID NO: 2752868 - RNA, 19 nt, Artificial Sequence
  Description of Artificial Sequence: Synthetic oligonucleotide
uucuuccggggcaccccgc

SEQ ID NO: 2752869 - RNA, 19 nt, Artificial Sequence
  Description of Artificial Sequence: Synthetic oligonucleotide
gcggccuccgcacuacccg

SEQ ID NO: 2752870 - RNA, 19 nt, Artificial Sequence
  Description of Artificial Sequence: Synthetic oligonucleotide
gaagcugcuguccgagcgu

SEQ ID NO: 2752871 - RNA, 19 nt, Artificial Sequence
  Description of Artificial Sequence: Synthetic oligonucleotide
gacgacgacucguccucca

SEQ ID NO: 2752872 - RNA, 19 nt, Artificial Sequence
  Description of Artificial Sequence: Synthetic oligonucleotide
cagcagcgccaccugcugg

SEQ ID NO: 2752873 - RNA, 19 nt, Artificial Sequence
  Description of Artificial Sequence: Synthetic oligonucleotide
gacgacgacgacgacgacu

SEQ ID NO: 2752874 - RNA, 19 nt, Artificial Sequence
  Description of Artificial Sequence: Synthetic oligonucleotide
cuccagaauacagugcucu

SEQ ID NO: 2752875 - RNA, 19 nt, Artificial Sequence
  Description of Artificial Sequence: Synthetic oligonucleotide
aaacaacagugggccuucu

SEQ ID NO: 2752876 - RNA, 19 nt, Artificial Sequence
  Description of Artificial Sequence: Synthetic oligonucleotide
ucacgggcguccuccucga

SEQ ID NO: 2752877 - RNA, 19 nt, Artificial Sequence
  Description of Artificial Sequence: Synthetic oligonucleotide
ggaguggaugagcucagaa

SEQ ID NO: 2752878 - RNA, 19 nt, Artificial Sequence
  Description of Artificial Sequence: Synthetic oligonucleotide
gcaguaggacaccgagcgg

SEQ ID NO: 2752879 - RNA, 19 nt, Artificial Sequence
  Description of Artificial Sequence: Synthetic oligonucleotide
ggcuaugcaggcucuugca

SEQ ID NO: 2752880 - RNA, 19 nt, Artificial Sequence
  Description of Artificial Sequence: Synthetic oligonucleotide
cgacucguccuccagcucc

SEQ ID NO: 2752881 - RNA, 19 nt, Artificial Sequence
  Description of Artificial Sequence: Synthetic oligonucleotide
acgguucuuccggggcacc

SEQ ID NO: 2752882 - RNA, 19 nt, Artificial Sequence
  Description of Artificial Sequence: Synthetic oligonucleotide
cuuaccggaaggaggcgcu

SEQ ID NO: 2752883 - RNA, 19 nt, Artificial Sequence
  Description of Artificial Sequence: Synthetic oligonucleotide
ggcgcagaggcugggagug

SEQ ID NO: 2752884 - RNA, 19 nt, Artificial Sequence
  Description of Artificial Sequence: Synthetic oligonucleotide
ccuccgacgaugacgacga

SEQ ID NO: 2752885 - RNA, 19 nt, Artificial Sequence
  Description of Artificial Sequence: Synthetic oligonucleotide
cuccgccgcgcucucgggg

SEQ ID NO: 2752886 - RNA, 19 nt, Artificial Sequence
  Description of Artificial Sequence: Synthetic oligonucleotide
cucggcgcgguggucgccg

SEQ ID NO: 2752887 - RNA, 19 nt, Artificial Sequence
  Description of Artificial Sequence: Synthetic oligonucleotide
gccuucuuaccggaaggag

SEQ ID NO: 2752888 - RNA, 19 nt, Artificial Sequence
  Description of Artificial Sequence: Synthetic oligonucleotide
gacuccuggcgcagagggc

SEQ ID NO: 2752889 - RNA, 19 nt, Artificial Sequence
  Description of Artificial Sequence: Synthetic oligonucleotide
ccaccuccgacgaugacga

SEQ ID NO: 2752890 - RNA, 19 nt, Artificial Sequence
  Description of Artificial Sequence: Synthetic oligonucleotide
guaggacaccgagcgggcc

SEQ ID NO: 2752891 - RNA, 19 nt, Artificial Sequence
  Description of Artificial Sequence: Synthetic oligonucleotide
cgcgucuccaacacacacg

SEQ ID NO: 2752892 - RNA, 19 nt, Artificial Sequence
  Description of Artificial Sequence: Synthetic oligonucleotide
cuaugcaggcucuugcauu

SEQ ID NO: 2752893 - RNA, 19 nt, Artificial Sequence
  Description of Artificial Sequence: Synthetic oligonucleotide
gacgacgacgacgacucgu

SEQ ID NO: 2752894 - RNA, 19 nt, Artificial Sequence
  Description of Artificial Sequence: Synthetic oligonucleotide
cagaacucccagcggccuc

SEQ ID NO: 2752895 - RNA, 19 nt, Artificial Sequence
  Description of Artificial Sequence: Synthetic oligonucleotide
cagagggcaguaggacacc

SEQ ID NO: 2752896 - RNA, 19 nt, Artificial Sequence
  Description of Artificial Sequence: Synthetic oligonucleotide
gugcucuauguaggucggg

SEQ ID NO: 2752897 - RNA, 19 nt, Artificial Sequence
  Description of Artificial Sequence: Synthetic oligonucleotide
cacgguucuuccggggcac

SEQ ID NO: 2752898 - RNA, 19 nt, Artificial Sequence
  Description of Artificial Sequence: Synthetic oligonucleotide
ccgcuuccuccccagaagc

SEQ ID NO: 2752899 - RNA, 19 nt, Artificial Sequence
  Description of Artificial Sequence: Synthetic oligonucleotide
cuccucccuggccucgggc

SEQ ID NO: 2752900 - RNA, 19 nt, Artificial Sequence
  Description of Artificial Sequence: Synthetic oligonucleotide
cgcacuacccgggucaggg

SEQ ID NO: 2752901 - RNA, 19 nt, Artificial Sequence
  Description of Artificial Sequence: Synthetic oligonucleotide
gccaccugcuggcugcuug

SEQ ID NO: 2752902 - RNA, 19 nt, Artificial Sequence
  Description of Artificial Sequence: Synthetic oligonucleotide
gguucuuccggggcacccc

SEQ ID NO: 2752903 - RNA, 19 nt, Artificial Sequence
  Description of Artificial Sequence: Synthetic oligonucleotide
uccgcaucacgggcguccu

SEQ ID NO: 2752904 - RNA, 19 nt, Artificial Sequence
  Description of Artificial Sequence: Synthetic oligonucleotide
cuguccgagcgucgcagca

SEQ ID NO: 2752905 - RNA, 19 nt, Artificial Sequence
  Description of Artificial Sequence: Synthetic oligonucleotide
uggccucgggcuccuccac

SEQ ID NO: 2752906 - RNA, 19 nt, Artificial Sequence
  Description of Artificial Sequence: Synthetic oligonucleotide
gcugcuguccgagcgucgc

SEQ ID NO: 2752907 - RNA, 19 nt, Artificial Sequence
  Description of Artificial Sequence: Synthetic oligonucleotide
ggggcaccccgcuuccucc

SEQ ID NO: 2752908 - RNA, 19 nt, Artificial Sequence
  Description of Artificial Sequence: Synthetic oligonucleotide
ccaacacacacgguucuuc

SEQ ID NO: 2752909 - RNA, 19 nt, Artificial Sequence
  Description of Artificial Sequence: Synthetic oligonucleotide
cuaaggacggcggcuuaaa

SEQ ID NO: 2752910 - RNA, 19 nt, Artificial Sequence
  Description of Artificial Sequence: Synthetic oligonucleotide
gugaaacaacagugggccu

SEQ ID NO: 2752911 - RNA, 19 nt, Artificial Sequence
  Description of Artificial Sequence: Synthetic oligonucleotide
caccccgcuuccuccccag

SEQ ID NO: 2752912 - RNA, 19 nt, Artificial Sequence
  Description of Artificial Sequence: Synthetic oligonucleotide
uuaccggaaggaggcgcua

SEQ ID NO: 2752913 - RNA, 19 nt, Artificial Sequence
  Description of Artificial Sequence: Synthetic oligonucleotide
cggcuuaaaaggacaguuc

SEQ ID NO: 2752914 - RNA, 19 nt, Artificial Sequence
  Description of Artificial Sequence: Synthetic oligonucleotide
cagggugcuccagaauaca

SEQ ID NO: 2752915 - RNA, 19 nt, Artificial Sequence
  Description of Artificial Sequence: Synthetic oligonucleotide
ugacgacgacgacgacgac

SEQ ID NO: 2752916 - RNA, 19 nt, Artificial Sequence
  Description of Artificial Sequence: Synthetic oligonucleotide
aggaggcgcuaaggacggc

SEQ ID NO: 2752917 - RNA, 19 nt, Artificial Sequence
  Description of Artificial Sequence: Synthetic oligonucleotide
cgagcgucgcagcagcgcc

SEQ ID NO: 2752918 - RNA, 19 nt, Artificial Sequence
  Description of Artificial Sequence: Synthetic oligonucleotide
ucccagcggccuccgcacu

SEQ ID NO: 2752919 - RNA, 19 nt, Artificial Sequence
  Description of Artificial Sequence: Synthetic oligonucleotide
caucacgggcguccuccuc

SEQ ID NO: 2752920 - RNA, 19 nt, Artificial Sequence
  Description of Artificial Sequence: Synthetic oligonucleotide
cuggcgcagagggcaguag

SEQ ID NO: 2752921 - RNA, 19 nt, Artificial Sequence
  Description of Artificial Sequence: Synthetic oligonucleotide
cgccgcgucuccaacacac

SEQ ID NO: 2752922 - RNA, 19 nt, Artificial Sequence
  Description of Artificial Sequence: Synthetic oligonucleotide
uggucgccgccgcgucucc

SEQ ID NO: 2752923 - RNA, 19 nt, Artificial Sequence
  Description of Artificial Sequence: Synthetic oligonucleotide
ccgcgucuccaacacacac

SEQ ID NO: 2752924 - RNA, 19 nt, Artificial Sequence
  Description of Artificial Sequence: Synthetic oligonucleotide
gggcaguaggacaccgagc

SEQ ID NO: 2752925 - RNA, 19 nt, Artificial Sequence
  Description of Artificial Sequence: Synthetic oligonucleotide
cgcaucacgggcguccucc

SEQ ID NO: 2752926 - RNA, 19 nt, Artificial Sequence
  Description of Artificial Sequence: Synthetic oligonucleotide
gcuguccgagcgucgcagc

SEQ ID NO: 2752927 - RNA, 19 nt, Artificial Sequence
  Description of Artificial Sequence: Synthetic oligonucleotide
gccucuccaccuccgacga

SEQ ID NO: 2752928 - RNA, 19 nt, Artificial Sequence
  Description of Artificial Sequence: Synthetic oligonucleotide
cgcuccuccgcaucacggg

SEQ ID NO: 2752929 - RNA, 19 nt, Artificial Sequence
  Description of Artificial Sequence: Synthetic oligonucleotide
ggcgcagagggcaguagga

SEQ ID NO: 2752930 - RNA, 19 nt, Artificial Sequence
  Description of Artificial Sequence: Synthetic oligonucleotide
gggucagggugcuccagaa

SEQ ID NO: 2752931 - RNA, 19 nt, Artificial Sequence
  Description of Artificial Sequence: Synthetic oligonucleotide
ggaucucgcagcgcgcaca

SEQ ID NO: 2752932 - RNA, 19 nt, Artificial Sequence
  Description of Artificial Sequence: Synthetic oligonucleotide
gccgccgcgucuccaacac

SEQ ID NO: 2752933 - RNA, 19 nt, Artificial Sequence
  Description of Artificial Sequence: Synthetic oligonucleotide
ggucaggccucuccaccuc

SEQ ID NO: 2752934 - RNA, 19 nt, Artificial Sequence
  Description of Artificial Sequence: Synthetic oligonucleotide
guggucgccgccgcgucuc

SEQ ID NO: 2752935 - RNA, 19 nt, Artificial Sequence
  Description of Artificial Sequence: Synthetic oligonucleotide
gcggcuuaaaaggacaguu

SEQ ID NO: 2752936 - RNA, 19 nt, Artificial Sequence
  Description of Artificial Sequence: Synthetic oligonucleotide
ggccuucuuaccggaagga

SEQ ID NO: 2752937 - RNA, 19 nt, Artificial Sequence
  Description of Artificial Sequence: Synthetic oligonucleotide
gcuaugcaggcucuugcau

SEQ ID NO: 2752938 - RNA, 19 nt, Artificial Sequence
  Description of Artificial Sequence: Synthetic oligonucleotide
ucggcgcgguggucgccgc

SEQ ID NO: 2752939 - RNA, 19 nt, Artificial Sequence
  Description of Artificial Sequence: Synthetic oligonucleotide
cucgaccuccgccgcgcuc

SEQ ID NO: 2752940 - RNA, 19 nt, Artificial Sequence
  Description of Artificial Sequence: Synthetic oligonucleotide
gagcgucgcagcagcgcca

SEQ ID NO: 2752941 - RNA, 19 nt, Artificial Sequence
  Description of Artificial Sequence: Synthetic oligonucleotide
gaccuccgccgcgcucucg

SEQ ID NO: 2752942 - RNA, 19 nt, Artificial Sequence
  Description of Artificial Sequence: Synthetic oligonucleotide
ggacggcggcuuaaaagga

SEQ ID NO: 2752943 - RNA, 19 nt, Artificial Sequence
  Description of Artificial Sequence: Synthetic oligonucleotide
cgacgacucguccuccagc

SEQ ID NO: 2752944 - RNA, 19 nt, Artificial Sequence
  Description of Artificial Sequence: Synthetic oligonucleotide
ggagcauugcgggcgcaga

SEQ ID NO: 2752945 - RNA, 19 nt, Artificial Sequence
  Description of Artificial Sequence: Synthetic oligonucleotide
cagcggccuccgcacuacc

SEQ ID NO: 2752946 - RNA, 19 nt, Artificial Sequence
  Description of Artificial Sequence: Synthetic oligonucleotide
gcgcagagggcaguaggac

SEQ ID NO: 2752947 - RNA, 19 nt, Artificial Sequence
  Description of Artificial Sequence: Synthetic oligonucleotide
cggcggcuuaaaaggacag

SEQ ID NO: 2752948 - RNA, 19 nt, Artificial Sequence
  Description of Artificial Sequence: Synthetic oligonucleotide
cggguggcuaugcaggcuc

SEQ ID NO: 2752949 - RNA, 19 nt, Artificial Sequence
  Description of Artificial Sequence: Synthetic oligonucleotide
gggcaccccgcuuccuccc

SEQ ID NO: 2752950 - RNA, 19 nt, Artificial Sequence
  Description of Artificial Sequence: Synthetic oligonucleotide
cuauguaggucggguggcu

SEQ ID NO: 2752951 - RNA, 19 nt, Artificial Sequence
  Description of Artificial Sequence: Synthetic oligonucleotide
ggccucucgcuccuccgca

SEQ ID NO: 2752952 - RNA, 19 nt, Artificial Sequence
  Description of Artificial Sequence: Synthetic oligonucleotide
ggccuccgcacuacccggg

SEQ ID NO: 2752953 - RNA, 19 nt, Artificial Sequence
  Description of Artificial Sequence: Synthetic oligonucleotide
caguucuguggaacacacu

SEQ ID NO: 2752954 - RNA, 19 nt, Artificial Sequence
  Description of Artificial Sequence: Synthetic oligonucleotide
gggucaggccucuccaccu

SEQ ID NO: 2752955 - RNA, 19 nt, Artificial Sequence
  Description of Artificial Sequence: Synthetic oligonucleotide
gacaccgagcgggccucuc

SEQ ID NO: 2752956 - RNA, 19 nt, Artificial Sequence
  Description of Artificial Sequence: Synthetic oligonucleotide
gcgcucucggggucaggcc

SEQ ID NO: 2752957 - RNA, 19 nt, Artificial Sequence
  Description of Artificial Sequence: Synthetic oligonucleotide
ggcaccccgcuuccucccc

SEQ ID NO: 2752958 - RNA, 19 nt, Artificial Sequence
  Description of Artificial Sequence: Synthetic oligonucleotide
cugcuguccgagcgucgca

SEQ ID NO: 2752959 - RNA, 19 nt, Artificial Sequence
  Description of Artificial Sequence: Synthetic oligonucleotide
accccgcuuccuccccaga

SEQ ID NO: 2752960 - RNA, 19 nt, Artificial Sequence
  Description of Artificial Sequence: Synthetic oligonucleotide
gcuaaggacggcggcuuaa

SEQ ID NO: 2752961 - RNA, 19 nt, Artificial Sequence
  Description of Artificial Sequence: Synthetic oligonucleotide
ccgagcgucgcagcagcgc

SEQ ID NO: 2752962 - RNA, 19 nt, Artificial Sequence
  Description of Artificial Sequence: Synthetic oligonucleotide
gcgggccucucgcuccucc

SEQ ID NO: 2752963 - RNA, 19 nt, Artificial Sequence
  Description of Artificial Sequence: Synthetic oligonucleotide
cauugcgggcgcagaggcu

SEQ ID NO: 2752964 - RNA, 19 nt, Artificial Sequence
  Description of Artificial Sequence: Synthetic oligonucleotide
caccuccgacgaugacgac

SEQ ID NO: 2752965 - RNA, 19 nt, Artificial Sequence
  Description of Artificial Sequence: Synthetic oligonucleotide
cuccgacgaugacgacgac

SEQ ID NO: 2752966 - RNA, 19 nt, Artificial Sequence
  Description of Artificial Sequence: Synthetic oligonucleotide
cgcgcucucggggucaggc

SEQ ID NO: 2752967 - RNA, 19 nt, Artificial Sequence
  Description of Artificial Sequence: Synthetic oligonucleotide
cggccuccgcacuacccgg

SEQ ID NO: 2752968 - RNA, 19 nt, Artificial Sequence
  Description of Artificial Sequence: Synthetic oligonucleotide
cgggcgcagaggcugggag

SEQ ID NO: 2752969 - RNA, 19 nt, Artificial Sequence
  Description of Artificial Sequence: Synthetic oligonucleotide
cacgggcguccuccucgac

SEQ ID NO: 2752970 - RNA, 19 nt, Artificial Sequence
  Description of Artificial Sequence: Synthetic oligonucleotide
cgacgacgacgacucgucc

SEQ ID NO: 2752971 - RNA, 19 nt, Artificial Sequence
  Description of Artificial Sequence: Synthetic oligonucleotide
ggcgcuaaggacggcggcu

SEQ ID NO: 2752972 - RNA, 19 nt, Artificial Sequence
  Description of Artificial Sequence: Synthetic oligonucleotide
ccgagcgggccucucgcuc

SEQ ID NO: 2752973 - RNA, 19 nt, Artificial Sequence
  Description of Artificial Sequence: Synthetic oligonucleotide
ccucucgcuccuccgcauc

SEQ ID NO: 2752974 - RNA, 19 nt, Artificial Sequence
  Description of Artificial Sequence: Synthetic oligonucleotide
ccagaauacagugcucuau

SEQ ID NO: 2752975 - RNA, 19 nt, Artificial Sequence
  Description of Artificial Sequence: Synthetic oligonucleotide
ggcggcuuaaaaggacagu

SEQ ID NO: 2752976 - RNA, 19 nt, Artificial Sequence
  Description of Artificial Sequence: Synthetic oligonucleotide
ucccuggccucgggcuccu

SEQ ID NO: 2752977 - RNA, 19 nt, Artificial Sequence
  Description of Artificial Sequence: Synthetic oligonucleotide
gcgcagaggcugggagugg

SEQ ID NO: 2752978 - RNA, 19 nt, Artificial Sequence
  Description of Artificial Sequence: Synthetic oligonucleotide
ccuccgccgcgcucucggg

SEQ ID NO: 2752979 - RNA, 19 nt, Artificial Sequence
  Description of Artificial Sequence: Synthetic oligonucleotide
ccagcggccuccgcacuac

SEQ ID NO: 2752980 - RNA, 19 nt, Artificial Sequence
  Description of Artificial Sequence: Synthetic oligonucleotide
gugggccuucuuaccggaa

SEQ ID NO: 2752981 - RNA, 19 nt, Artificial Sequence
  Description of Artificial Sequence: Synthetic oligonucleotide
ccuccgcacuacccggguc

SEQ ID NO: 2752982 - RNA, 19 nt, Artificial Sequence
  Description of Artificial Sequence: Synthetic oligonucleotide
gcuugacuccuggcgcaga

SEQ ID NO: 2752983 - RNA, 19 nt, Artificial Sequence
  Description of Artificial Sequence: Synthetic oligonucleotide
gcaccccgcuuccucccca

SEQ ID NO: 2752984 - RNA, 19 nt, Artificial Sequence
  Description of Artificial Sequence: Synthetic oligonucleotide
gccgcgucuccaacacaca

SEQ ID NO: 2752985 - RNA, 19 nt, Artificial Sequence
  Description of Artificial Sequence: Synthetic oligonucleotide
cgacgaugacgacgacgac

SEQ ID NO: 2752986 - RNA, 19 nt, Artificial Sequence
  Description of Artificial Sequence: Synthetic oligonucleotide
ccccgcuuccuccccagaa

SEQ ID NO: 2752987 - RNA, 19 nt, Artificial Sequence
  Description of Artificial Sequence: Synthetic oligonucleotide
gguggucgccgccgcgucu

SEQ ID NO: 2752988 - RNA, 19 nt, Artificial Sequence
  Description of Artificial Sequence: Synthetic oligonucleotide
cuacccgggucagggugcu

SEQ ID NO: 2752989 - RNA, 19 nt, Artificial Sequence
  Description of Artificial Sequence: Synthetic oligonucleotide
cgacgacgacucguccucc

SEQ ID NO: 2752990 - RNA, 19 nt, Artificial Sequence
  Description of Artificial Sequence: Synthetic oligonucleotide
cgacgacgacgacgacucg

SEQ ID NO: 2752991 - RNA, 19 nt, Artificial Sequence
  Description of Artificial Sequence: Synthetic oligonucleotide
cgggcguccuccucgaccu

SEQ ID NO: 2752992 - RNA, 19 nt, Artificial Sequence
  Description of Artificial Sequence: Synthetic oligonucleotide
cggggcaccccgcuuccuc

SEQ ID NO: 2752993 - RNA, 19 nt, Artificial Sequence
  Description of Artificial Sequence: Synthetic oligonucleotide
ccgggucagggugcuccag

SEQ ID NO: 2752994 - RNA, 19 nt, Artificial Sequence
  Description of Artificial Sequence: Synthetic oligonucleotide
ccgcacuacccgggucagg

SEQ ID NO: 2752995 - RNA, 19 nt, Artificial Sequence
  Description of Artificial Sequence: Synthetic oligonucleotide
gccgcgcucucggggucag

SEQ ID NO: 2752996 - RNA, 19 nt, Artificial Sequence
  Description of Artificial Sequence: Synthetic oligonucleotide
gcgucgcagcagcgccacc

SEQ ID NO: 2752997 - RNA, 19 nt, Artificial Sequence
  Description of Artificial Sequence: Synthetic oligonucleotide
cuuccggggcaccccgcuu

SEQ ID NO: 2752998 - RNA, 19 nt, Artificial Sequence
  Description of Artificial Sequence: Synthetic oligonucleotide
cccgggucagggugcucca

SEQ ID NO: 2752999 - RNA, 19 nt, Artificial Sequence
  Description of Artificial Sequence: Synthetic oligonucleotide
cucucggggucaggccucu

SEQ ID NO: 2753000 - RNA, 19 nt, Artificial Sequence
  Description of Artificial Sequence: Synthetic oligonucleotide
cgcgguggucgccgccgcg

SEQ ID NO: 2753001 - RNA, 19 nt, Artificial Sequence
  Description of Artificial Sequence: Synthetic oligonucleotide
gccuccgcacuacccgggu

SEQ ID NO: 2753002 - RNA, 19 nt, Artificial Sequence
  Description of Artificial Sequence: Synthetic oligonucleotide
cgaugacgacgacgacgac

SEQ ID NO: 2753003 - RNA, 19 nt, Artificial Sequence
  Description of Artificial Sequence: Synthetic oligonucleotide
cgcucucggggucaggccu

SEQ ID NO: 2753004 - RNA, 19 nt, Artificial Sequence
  Description of Artificial Sequence: Synthetic oligonucleotide
ggguggcuaugcaggcucu

SEQ ID NO: 2753005 - RNA, 19 nt, Artificial Sequence
  Description of Artificial Sequence: Synthetic oligonucleotide
gguggcuaugcaggcucuu

SEQ ID NO: 2753006 - RNA, 19 nt, Artificial Sequence
  Description of Artificial Sequence: Synthetic oligonucleotide
gcgcuaaggacggcggcuu

SEQ ID NO: 2753007 - RNA, 19 nt, Artificial Sequence
  Description of Artificial Sequence: Synthetic oligonucleotide
gccucucgcuccuccgcau

SEQ ID NO: 2753008 - RNA, 19 nt, Artificial Sequence
  Description of Artificial Sequence: Synthetic oligonucleotide
gcgguggucgccgccgcgu

SEQ ID NO: 2753009 - RNA, 19 nt, Artificial Sequence
  Description of Artificial Sequence: Synthetic oligonucleotide
cccagcggccuccgcacua

SEQ ID NO: 2753010 - RNA, 19 nt, Artificial Sequence
  Description of Artificial Sequence: Synthetic oligonucleotide
ccuggcgcagagggcagua

SEQ ID NO: 2753011 - RNA, 19 nt, Artificial Sequence
  Description of Artificial Sequence: Synthetic oligonucleotide
ccgcaucacgggcguccuc

SEQ ID NO: 2753012 - RNA, 19 nt, Artificial Sequence
  Description of Artificial Sequence: Synthetic oligonucleotide
cgguggucgccgccgcguc

SEQ ID NO: 2753013 - RNA, 19 nt, Artificial Sequence
  Description of Artificial Sequence: Synthetic oligonucleotide
cgccgccgcgucuccaaca

SEQ ID NO: 2753014 - RNA, 19 nt, Artificial Sequence
  Description of Artificial Sequence: Synthetic oligonucleotide
ccuccgcaucacgggcguc

SEQ ID NO: 2753015 - RNA, 19 nt, Artificial Sequence
  Description of Artificial Sequence: Synthetic oligonucleotide
ccgccgcgucuccaacaca

SEQ ID NO: 2753016 - RNA, 19 nt, Artificial Sequence
  Description of Artificial Sequence: Synthetic oligonucleotide
cggcgcgguggucgccgcc

SEQ ID NO: 2753017 - RNA, 19 nt, Artificial Sequence
  Description of Artificial Sequence: Synthetic oligonucleotide
cgcuaaggacggcggcuua

SEQ ID NO: 2753018 - RNA, 19 nt, Artificial Sequence
  Description of Artificial Sequence: Synthetic oligonucleotide
ccgcgcucucggggucagg

SEQ ID NO: 2753019 - RNA, 19 nt, Artificial Sequence
  Description of Artificial Sequence: Synthetic oligonucleotide
ggacaccgagcgggccucu

SEQ ID NO: 2753020 - RNA, 19 nt, Artificial Sequence
  Description of Artificial Sequence: Synthetic oligonucleotide
cgaccuccgccgcgcucuc

SEQ ID NO: 2753021 - RNA, 19 nt, Artificial Sequence
  Description of Artificial Sequence: Synthetic oligonucleotide
cgucuccaacacacacggu

SEQ ID NO: 2753022 - RNA, 19 nt, Artificial Sequence
  Description of Artificial Sequence: Synthetic oligonucleotide
ccucgaccuccgccgcgcu

SEQ ID NO: 2753023 - RNA, 19 nt, Artificial Sequence
  Description of Artificial Sequence: Synthetic oligonucleotide
ccucuccaccuccgacgau

SEQ ID NO: 2753024 - RNA, 19 nt, Artificial Sequence
  Description of Artificial Sequence: Synthetic oligonucleotide
cgccgcgcucucgggguca

SEQ ID NO: 2753025 - RNA, 19 nt, Artificial Sequence
  Description of Artificial Sequence: Synthetic oligonucleotide
uagaaaauuauaaauagaa

SEQ ID NO: 2753026 - RNA, 19 nt, Artificial Sequence
  Description of Artificial Sequence: Synthetic oligonucleotide
gaagauuucacguccauag

SEQ ID NO: 2753027 - RNA, 19 nt, Artificial Sequence
  Description of Artificial Sequence: Synthetic oligonucleotide
aagggagucuuucaagucc

SEQ ID NO: 2753028 - RNA, 19 nt, Artificial Sequence
  Description of Artificial Sequence: Synthetic oligonucleotide
uuaauauuauuaccgaaga

SEQ ID NO: 2753029 - RNA, 19 nt, Artificial Sequence
  Description of Artificial Sequence: Synthetic oligonucleotide
aaugagacucgacaaggac

SEQ ID NO: 2753030 - RNA, 19 nt, Artificial Sequence
  Description of Artificial Sequence: Synthetic oligonucleotide
aauauuauuaccgaagauu

SEQ ID NO: 2753031 - RNA, 19 nt, Artificial Sequence
  Description of Artificial Sequence: Synthetic oligonucleotide
aaggacaagagcauucugc

SEQ ID NO: 2753032 - RNA, 19 nt, Artificial Sequence
  Description of Artificial Sequence: Synthetic oligonucleotide
auuaauauuauuaccgaag

SEQ ID NO: 2753033 - RNA, 19 nt, Artificial Sequence
  Description of Artificial Sequence: Synthetic oligonucleotide
agaucaaguccccagacuc

SEQ ID NO: 2753034 - RNA, 19 nt, Artificial Sequence
  Description of Artificial Sequence: Synthetic oligonucleotide
aagauuucacguccauagc

SEQ ID NO: 2753035 - RNA, 19 nt, Artificial Sequence
  Description of Artificial Sequence: Synthetic oligonucleotide
cuuacuucuagguaguaug

SEQ ID NO: 2753036 - RNA, 19 nt, Artificial Sequence
  Description of Artificial Sequence: Synthetic oligonucleotide
aacuuuguuucuucugagg

SEQ ID NO: 2753037 - RNA, 19 nt, Artificial Sequence
  Description of Artificial Sequence: Synthetic oligonucleotide
aacacauagaaaauuauaa

SEQ ID NO: 2753038 - RNA, 19 nt, Artificial Sequence
  Description of Artificial Sequence: Synthetic oligonucleotide
gaaaugagacucgacaagg

SEQ ID NO: 2753039 - RNA, 19 nt, Artificial Sequence
  Description of Artificial Sequence: Synthetic oligonucleotide
gagacaucaagugaguccg

SEQ ID NO: 2753040 - RNA, 19 nt, Artificial Sequence
  Description of Artificial Sequence: Synthetic oligonucleotide
cuacaaacacaacacauag

SEQ ID NO: 2753041 - RNA, 19 nt, Artificial Sequence
  Description of Artificial Sequence: Synthetic oligonucleotide
ucauaaucauuauuaauaa

SEQ ID NO: 2753042 - RNA, 19 nt, Artificial Sequence
  Description of Artificial Sequence: Synthetic oligonucleotide
auuaccgaagauuucacgu

SEQ ID NO: 2753043 - RNA, 19 nt, Artificial Sequence
  Description of Artificial Sequence: Synthetic oligonucleotide
uuauaaauagaacuuuguu

SEQ ID NO: 2753044 - RNA, 19 nt, Artificial Sequence
  Description of Artificial Sequence: Synthetic oligonucleotide
auuauuaccgaagauuuca

SEQ ID NO: 2753045 - RNA, 19 nt, Artificial Sequence
  Description of Artificial Sequence: Synthetic oligonucleotide
ucaccagggagccugauca

SEQ ID NO: 2753046 - RNA, 19 nt, Artificial Sequence
  Description of Artificial Sequence: Synthetic oligonucleotide
cuaagacaagacuacaaac

SEQ ID NO: 2753047 - RNA, 19 nt, Artificial Sequence
  Description of Artificial Sequence: Synthetic oligonucleotide
uauuaccgaagauuucacg

SEQ ID NO: 2753048 - RNA, 19 nt, Artificial Sequence
  Description of Artificial Sequence: Synthetic oligonucleotide
uauuaauauuauuaccgaa

SEQ ID NO: 2753049 - RNA, 19 nt, Artificial Sequence
  Description of Artificial Sequence: Synthetic oligonucleotide
gacgaaaugagacucgaca

SEQ ID NO: 2753050 - RNA, 19 nt, Artificial Sequence
  Description of Artificial Sequence: Synthetic oligonucleotide
ucuaccauugaaccgugca

SEQ ID NO: 2753051 - RNA, 19 nt, Artificial Sequence
  Description of Artificial Sequence: Synthetic oligonucleotide
auagcuaagacaagacuac

SEQ ID NO: 2753052 - RNA, 19 nt, Artificial Sequence
  Description of Artificial Sequence: Synthetic oligonucleotide
ucaguucucaccagggagc

SEQ ID NO: 2753053 - RNA, 19 nt, Artificial Sequence
  Description of Artificial Sequence: Synthetic oligonucleotide
ugagacucgacaaggacaa

SEQ ID NO: 2753054 - RNA, 19 nt, Artificial Sequence
  Description of Artificial Sequence: Synthetic oligonucleotide
uucucaguucucaccaggg

SEQ ID NO: 2753055 - RNA, 19 nt, Artificial Sequence
  Description of Artificial Sequence: Synthetic oligonucleotide
aaucauuauuaauaauauu

SEQ ID NO: 2753056 - RNA, 19 nt, Artificial Sequence
  Description of Artificial Sequence: Synthetic oligonucleotide
uaccauugaaccgugcacg

SEQ ID NO: 2753057 - RNA, 19 nt, Artificial Sequence
  Description of Artificial Sequence: Synthetic oligonucleotide
agauuucacguccauagcu

SEQ ID NO: 2753058 - RNA, 19 nt, Artificial Sequence
  Description of Artificial Sequence: Synthetic oligonucleotide
cucgacaaggacaagagca

SEQ ID NO: 2753059 - RNA, 19 nt, Artificial Sequence
  Description of Artificial Sequence: Synthetic oligonucleotide
cauugaaccgugcacgggg

SEQ ID NO: 2753060 - RNA, 19 nt, Artificial Sequence
  Description of Artificial Sequence: Synthetic oligonucleotide
ugcgcuggagaucaagucc

SEQ ID NO: 2753061 - RNA, 19 nt, Artificial Sequence
  Description of Artificial Sequence: Synthetic oligonucleotide
caagucugggguaagggag

SEQ ID NO: 2753062 - RNA, 19 nt, Artificial Sequence
  Description of Artificial Sequence: Synthetic oligonucleotide
aagugaguccgauucucag

SEQ ID NO: 2753063 - RNA, 19 nt, Artificial Sequence
  Description of Artificial Sequence: Synthetic oligonucleotide
uaccgaagauuucacgucc

SEQ ID NO: 2753064 - RNA, 19 nt, Artificial Sequence
  Description of Artificial Sequence: Synthetic oligonucleotide
gacauggacgaaaugagac

SEQ ID NO: 2753065 - RNA, 19 nt, Artificial Sequence
  Description of Artificial Sequence: Synthetic oligonucleotide
uaauauuauuaccgaagau

SEQ ID NO: 2753066 - RNA, 19 nt, Artificial Sequence
  Description of Artificial Sequence: Synthetic oligonucleotide
agcgaaucuaccauugaac

SEQ ID NO: 2753067 - RNA, 19 nt, Artificial Sequence
  Description of Artificial Sequence: Synthetic oligonucleotide
uaaauagaacuuuguuucu

SEQ ID NO: 2753068 - RNA, 19 nt, Artificial Sequence
  Description of Artificial Sequence: Synthetic oligonucleotide
auauuauuaccgaagauuu

SEQ ID NO: 2753069 - RNA, 19 nt, Artificial Sequence
  Description of Artificial Sequence: Synthetic oligonucleotide
uaggcagccuucaagcgcc

SEQ ID NO: 2753070 - RNA, 19 nt, Artificial Sequence
  Description of Artificial Sequence: Synthetic oligonucleotide
cauagcuaagacaagacua

SEQ ID NO: 2753071 - RNA, 19 nt, Artificial Sequence
  Description of Artificial Sequence: Synthetic oligonucleotide
ucuagguaguaugugcucc

SEQ ID NO: 2753072 - RNA, 19 nt, Artificial Sequence
  Description of Artificial Sequence: Synthetic oligonucleotide
auuauaaauagaacuuugu

SEQ ID NO: 2753073 - RNA, 19 nt, Artificial Sequence
  Description of Artificial Sequence: Synthetic oligonucleotide
gaacuuuguuucuucugag

SEQ ID NO: 2753074 - RNA, 19 nt, Artificial Sequence
  Description of Artificial Sequence: Synthetic oligonucleotide
uuacuucuagguaguaugu

SEQ ID NO: 2753075 - RNA, 19 nt, Artificial Sequence
  Description of Artificial Sequence: Synthetic oligonucleotide
uccauagcuaagacaagac

SEQ ID NO: 2753076 - RNA, 19 nt, Artificial Sequence
  Description of Artificial Sequence: Synthetic oligonucleotide
uuauuaccgaagauuucac

SEQ ID NO: 2753077 - RNA, 19 nt, Artificial Sequence
  Description of Artificial Sequence: Synthetic oligonucleotide
gacaagagcauucugcucu

SEQ ID NO: 2753078 - RNA, 19 nt, Artificial Sequence
  Description of Artificial Sequence: Synthetic oligonucleotide
uuccaggagacaucaagug

SEQ ID NO: 2753079 - RNA, 19 nt, Artificial Sequence
  Description of Artificial Sequence: Synthetic oligonucleotide
acucgacaaggacaagagc

SEQ ID NO: 2753080 - RNA, 19 nt, Artificial Sequence
  Description of Artificial Sequence: Synthetic oligonucleotide
cucaguucucaccagggag

SEQ ID NO: 2753081 - RNA, 19 nt, Artificial Sequence
  Description of Artificial Sequence: Synthetic oligonucleotide
aggacaagagcauucugcu

SEQ ID NO: 2753082 - RNA, 19 nt, Artificial Sequence
  Description of Artificial Sequence: Synthetic oligonucleotide
uacaaacacaacacauaga

SEQ ID NO: 2753083 - RNA, 19 nt, Artificial Sequence
  Description of Artificial Sequence: Synthetic oligonucleotide
aucaaguccccagacuccc

SEQ ID NO: 2753084 - RNA, 19 nt, Artificial Sequence
  Description of Artificial Sequence: Synthetic oligonucleotide
uauuauuaccgaagauuuc

SEQ ID NO: 2753085 - RNA, 19 nt, Artificial Sequence
  Description of Artificial Sequence: Synthetic oligonucleotide
uggguaggcagccuucaag

SEQ ID NO: 2753086 - RNA, 19 nt, Artificial Sequence
  Description of Artificial Sequence: Synthetic oligonucleotide
ucuucggggagggaggagg

SEQ ID NO: 2753087 - RNA, 19 nt, Artificial Sequence
  Description of Artificial Sequence: Synthetic oligonucleotide
gacaagucugggguaaggg

SEQ ID NO: 2753088 - RNA, 19 nt, Artificial Sequence
  Description of Artificial Sequence: Synthetic oligonucleotide
acgaaaugagacucgacaa

SEQ ID NO: 2753089 - RNA, 19 nt, Artificial Sequence
  Description of Artificial Sequence: Synthetic oligonucleotide
auagaacuuuguuucuucu

SEQ ID NO: 2753090 - RNA, 19 nt, Artificial Sequence
  Description of Artificial Sequence: Synthetic oligonucleotide
accauugaaccgugcacgg

SEQ ID NO: 2753091 - RNA, 19 nt, Artificial Sequence
  Description of Artificial Sequence: Synthetic oligonucleotide
aagagcauucugcucugcu

SEQ ID NO: 2753092 - RNA, 19 nt, Artificial Sequence
  Description of Artificial Sequence: Synthetic oligonucleotide
uuucaagucccugcugagg

SEQ ID NO: 2753093 - RNA, 19 nt, Artificial Sequence
  Description of Artificial Sequence: Synthetic oligonucleotide
uuaccgaagauuucacguc

SEQ ID NO: 2753094 - RNA, 19 nt, Artificial Sequence
  Description of Artificial Sequence: Synthetic oligonucleotide
acguccauagcuaagacaa

SEQ ID NO: 2753095 - RNA, 19 nt, Artificial Sequence
  Description of Artificial Sequence: Synthetic oligonucleotide
ggagacaucaagugagucc

SEQ ID NO: 2753096 - RNA, 19 nt, Artificial Sequence
  Description of Artificial Sequence: Synthetic oligonucleotide
gacucgacaaggacaagag

SEQ ID NO: 2753097 - RNA, 19 nt, Artificial Sequence
  Description of Artificial Sequence: Synthetic oligonucleotide
uuucacguccauagcuaag

SEQ ID NO: 2753098 - RNA, 19 nt, Artificial Sequence
  Description of Artificial Sequence: Synthetic oligonucleotide
uucacguccauagcuaaga

SEQ ID NO: 2753099 - RNA, 19 nt, Artificial Sequence
  Description of Artificial Sequence: Synthetic oligonucleotide
acauggacgaaaugagacu

SEQ ID NO: 2753100 - RNA, 19 nt, Artificial Sequence
  Description of Artificial Sequence: Synthetic oligonucleotide
gaccgcagagccuucuggg

SEQ ID NO: 2753101 - RNA, 19 nt, Artificial Sequence
  Description of Artificial Sequence: Synthetic oligonucleotide
gaaucuaccauugaaccgu

SEQ ID NO: 2753102 - RNA, 19 nt, Artificial Sequence
  Description of Artificial Sequence: Synthetic oligonucleotide
ccugaucaggccaaggugg

SEQ ID NO: 2753103 - RNA, 19 nt, Artificial Sequence
  Description of Artificial Sequence: Synthetic oligonucleotide
gcgaaucuaccauugaacc

SEQ ID NO: 2753104 - RNA, 19 nt, Artificial Sequence
  Description of Artificial Sequence: Synthetic oligonucleotide
agggagucuuucaaguccc

SEQ ID NO: 2753105 - RNA, 19 nt, Artificial Sequence
  Description of Artificial Sequence: Synthetic oligonucleotide
uggagaucaaguccccaga

SEQ ID NO: 2753106 - RNA, 19 nt, Artificial Sequence
  Description of Artificial Sequence: Synthetic oligonucleotide
agucuuucaagucccugcu

SEQ ID NO: 2753107 - RNA, 19 nt, Artificial Sequence
  Description of Artificial Sequence: Synthetic oligonucleotide
aaauagaacuuuguuucuu

SEQ ID NO: 2753108 - RNA, 19 nt, Artificial Sequence
  Description of Artificial Sequence: Synthetic oligonucleotide
guaggagagacaagucugg

SEQ ID NO: 2753109 - RNA, 19 nt, Artificial Sequence
  Description of Artificial Sequence: Synthetic oligonucleotide
cuuccagguggcuuuuggg

SEQ ID NO: 2753110 - RNA, 19 nt, Artificial Sequence
  Description of Artificial Sequence: Synthetic oligonucleotide
cauggacgaaaugagacuc

SEQ ID NO: 2753111 - RNA, 19 nt, Artificial Sequence
  Description of Artificial Sequence: Synthetic oligonucleotide
guaggcagccuucaagcgc

SEQ ID NO: 2753112 - RNA, 19 nt, Artificial Sequence
  Description of Artificial Sequence: Synthetic oligonucleotide
ucgacaaggacaagagcau

SEQ ID NO: 2753113 - RNA, 19 nt, Artificial Sequence
  Description of Artificial Sequence: Synthetic oligonucleotide
cuaccauugaaccgugcac

SEQ ID NO: 2753114 - RNA, 19 nt, Artificial Sequence
  Description of Artificial Sequence: Synthetic oligonucleotide
gguaagggagucuuucaag

SEQ ID NO: 2753115 - RNA, 19 nt, Artificial Sequence
  Description of Artificial Sequence: Synthetic oligonucleotide
gauucucaguucucaccag

SEQ ID NO: 2753116 - RNA, 19 nt, Artificial Sequence
  Description of Artificial Sequence: Synthetic oligonucleotide
ucucaguucucaccaggga

SEQ ID NO: 2753117 - RNA, 19 nt, Artificial Sequence
  Description of Artificial Sequence: Synthetic oligonucleotide
ugcucugcuuccaggagac

SEQ ID NO: 2753118 - RNA, 19 nt, Artificial Sequence
  Description of Artificial Sequence: Synthetic oligonucleotide
agggacagcgaaucuacca

SEQ ID NO: 2753119 - RNA, 19 nt, Artificial Sequence
  Description of Artificial Sequence: Synthetic oligonucleotide
aaaugagacucgacaagga

SEQ ID NO: 2753120 - RNA, 19 nt, Artificial Sequence
  Description of Artificial Sequence: Synthetic oligonucleotide
agugaguccgauucucagu

SEQ ID NO: 2753121 - RNA, 19 nt, Artificial Sequence
  Description of Artificial Sequence: Synthetic oligonucleotide
uaagggagucuuucaaguc

SEQ ID NO: 2753122 - RNA, 19 nt, Artificial Sequence
  Description of Artificial Sequence: Synthetic oligonucleotide
agaccgcagagccuucugg

SEQ ID NO: 2753123 - RNA, 19 nt, Artificial Sequence
  Description of Artificial Sequence: Synthetic oligonucleotide
ccuucaagcgcccaggaag

SEQ ID NO: 2753124 - RNA, 19 nt, Artificial Sequence
  Description of Artificial Sequence: Synthetic oligonucleotide
cugaucaggccaagguggg

SEQ ID NO: 2753125 - RNA, 19 nt, Artificial Sequence
  Description of Artificial Sequence: Synthetic oligonucleotide
cacaacacauagaaaauua

SEQ ID NO: 2753126 - RNA, 19 nt, Artificial Sequence
  Description of Artificial Sequence: Synthetic oligonucleotide
gacagcgaaucuaccauug

SEQ ID NO: 2753127 - RNA, 19 nt, Artificial Sequence
  Description of Artificial Sequence: Synthetic oligonucleotide
uaggagagacaagucuggg

SEQ ID NO: 2753128 - RNA, 19 nt, Artificial Sequence
  Description of Artificial Sequence: Synthetic oligonucleotide
gguaggagagacaagucug

SEQ ID NO: 2753129 - RNA, 19 nt, Artificial Sequence
  Description of Artificial Sequence: Synthetic oligonucleotide
augagacucgacaaggaca

SEQ ID NO: 2753130 - RNA, 19 nt, Artificial Sequence
  Description of Artificial Sequence: Synthetic oligonucleotide
auuucacguccauagcuaa

SEQ ID NO: 2753131 - RNA, 19 nt, Artificial Sequence
  Description of Artificial Sequence: Synthetic oligonucleotide
gacaaggacaagagcauuc

SEQ ID NO: 2753132 - RNA, 19 nt, Artificial Sequence
  Description of Artificial Sequence: Synthetic oligonucleotide
uaugugcuccuuccaggug

SEQ ID NO: 2753133 - RNA, 19 nt, Artificial Sequence
  Description of Artificial Sequence: Synthetic oligonucleotide
ucaagugaguccgauucuc

SEQ ID NO: 2753134 - RNA, 19 nt, Artificial Sequence
  Description of Artificial Sequence: Synthetic oligonucleotide
aggaagagcucugcgggcg

SEQ ID NO: 2753135 - RNA, 19 nt, Artificial Sequence
  Description of Artificial Sequence: Synthetic oligonucleotide
uacuucuagguaguaugug

SEQ ID NO: 2753136 - RNA, 19 nt, Artificial Sequence
  Description of Artificial Sequence: Synthetic oligonucleotide
aucaggccaagguggguuc

SEQ ID NO: 2753137 - RNA, 19 nt, Artificial Sequence
  Description of Artificial Sequence: Synthetic oligonucleotide
agccugaucaggccaaggu

SEQ ID NO: 2753138 - RNA, 19 nt, Artificial Sequence
  Description of Artificial Sequence: Synthetic oligonucleotide
acuacaaacacaacacaua

SEQ ID NO: 2753139 - RNA, 19 nt, Artificial Sequence
  Description of Artificial Sequence: Synthetic oligonucleotide
aagguggguucuucgggga

SEQ ID NO: 2753140 - RNA, 19 nt, Artificial Sequence
  Description of Artificial Sequence: Synthetic oligonucleotide
ucuuacuucuagguaguau

SEQ ID NO: 2753141 - RNA, 19 nt, Artificial Sequence
  Description of Artificial Sequence: Synthetic oligonucleotide
agacucgacaaggacaaga

SEQ ID NO: 2753142 - RNA, 19 nt, Artificial Sequence
  Description of Artificial Sequence: Synthetic oligonucleotide
guaagggagucuuucaagu

SEQ ID NO: 2753143 - RNA, 19 nt, Artificial Sequence
  Description of Artificial Sequence: Synthetic oligonucleotide
guucucaccagggagccug

SEQ ID NO: 2753144 - RNA, 19 nt, Artificial Sequence
  Description of Artificial Sequence: Synthetic oligonucleotide
uucuagguaguaugugcuc

SEQ ID NO: 2753145 - RNA, 19 nt, Artificial Sequence
  Description of Artificial Sequence: Synthetic oligonucleotide
aucaagugaguccgauucu

SEQ ID NO: 2753146 - RNA, 19 nt, Artificial Sequence
  Description of Artificial Sequence: Synthetic oligonucleotide
acaagagcauucugcucug

SEQ ID NO: 2753147 - RNA, 19 nt, Artificial Sequence
  Description of Artificial Sequence: Synthetic oligonucleotide
ggggacgucccagagagcg

SEQ ID NO: 2753148 - RNA, 19 nt, Artificial Sequence
  Description of Artificial Sequence: Synthetic oligonucleotide
ucacguccauagcuaagac

SEQ ID NO: 2753149 - RNA, 19 nt, Artificial Sequence
  Description of Artificial Sequence: Synthetic oligonucleotide
uuucgggugcccucgguuc

SEQ ID NO: 2753150 - RNA, 19 nt, Artificial Sequence
  Description of Artificial Sequence: Synthetic oligonucleotide
ugugcuccuuccagguggc

SEQ ID NO: 2753151 - RNA, 19 nt, Artificial Sequence
  Description of Artificial Sequence: Synthetic oligonucleotide
uggacgaaaugagacucga

SEQ ID NO: 2753152 - RNA, 19 nt, Artificial Sequence
  Description of Artificial Sequence: Synthetic oligonucleotide
ugaggcuccucuucuuacu

SEQ ID NO: 2753153 - RNA, 19 nt, Artificial Sequence
  Description of Artificial Sequence: Synthetic oligonucleotide
ucuugcgcuggagaucaag

SEQ ID NO: 2753154 - RNA, 19 nt, Artificial Sequence
  Description of Artificial Sequence: Synthetic oligonucleotide
uccgauucucaguucucac

SEQ ID NO: 2753155 - RNA, 19 nt, Artificial Sequence
  Description of Artificial Sequence: Synthetic oligonucleotide
aaguccccagacuccccag

SEQ ID NO: 2753156 - RNA, 19 nt, Artificial Sequence
  Description of Artificial Sequence: Synthetic oligonucleotide
gauuucacguccauagcua

SEQ ID NO: 2753157 - RNA, 19 nt, Artificial Sequence
  Description of Artificial Sequence: Synthetic oligonucleotide
uucgggugcccucgguucc

SEQ ID NO: 2753158 - RNA, 19 nt, Artificial Sequence
  Description of Artificial Sequence: Synthetic oligonucleotide
aaucuaccauugaaccgug

SEQ ID NO: 2753159 - RNA, 19 nt, Artificial Sequence
  Description of Artificial Sequence: Synthetic oligonucleotide
gcuaagacaagacuacaaa

SEQ ID NO: 2753160 - RNA, 19 nt, Artificial Sequence
  Description of Artificial Sequence: Synthetic oligonucleotide
cuucaagcgcccaggaaga

SEQ ID NO: 2753161 - RNA, 19 nt, Artificial Sequence
  Description of Artificial Sequence: Synthetic oligonucleotide
cauucugcucugcuuccag

SEQ ID NO: 2753162 - RNA, 19 nt, Artificial Sequence
  Description of Artificial Sequence: Synthetic oligonucleotide
uagcuaagacaagacuaca

SEQ ID NO: 2753163 - RNA, 19 nt, Artificial Sequence
  Description of Artificial Sequence: Synthetic oligonucleotide
ggagagacaagucuggggu

SEQ ID NO: 2753164 - RNA, 19 nt, Artificial Sequence
  Description of Artificial Sequence: Synthetic oligonucleotide
acacaacacauagaaaauu

SEQ ID NO: 2753165 - RNA, 19 nt, Artificial Sequence
  Description of Artificial Sequence: Synthetic oligonucleotide
gcggggacgucccagagag

SEQ ID NO: 2753166 - RNA, 19 nt, Artificial Sequence
  Description of Artificial Sequence: Synthetic oligonucleotide
auggacgaaaugagacucg

SEQ ID NO: 2753167 - RNA, 19 nt, Artificial Sequence
  Description of Artificial Sequence: Synthetic oligonucleotide
ucaagcgcccaggaagagc

SEQ ID NO: 2753168 - RNA, 19 nt, Artificial Sequence
  Description of Artificial Sequence: Synthetic oligonucleotide
uugcgcuggagaucaaguc

SEQ ID NO: 2753169 - RNA, 19 nt, Artificial Sequence
  Description of Artificial Sequence: Synthetic oligonucleotide
ggggacauggacgaaauga

SEQ ID NO: 2753170 - RNA, 19 nt, Artificial Sequence
  Description of Artificial Sequence: Synthetic oligonucleotide
acaagacuacaaacacaac

SEQ ID NO: 2753171 - RNA, 19 nt, Artificial Sequence
  Description of Artificial Sequence: Synthetic oligonucleotide
ugcugagggacagcgaauc

SEQ ID NO: 2753172 - RNA, 19 nt, Artificial Sequence
  Description of Artificial Sequence: Synthetic oligonucleotide
cgaaucuaccauugaaccg

SEQ ID NO: 2753173 - RNA, 19 nt, Artificial Sequence
  Description of Artificial Sequence: Synthetic oligonucleotide
acagcgaaucuaccauuga

SEQ ID NO: 2753174 - RNA, 19 nt, Artificial Sequence
  Description of Artificial Sequence: Synthetic oligonucleotide
ucaagucccugcugaggga

SEQ ID NO: 2753175 - RNA, 19 nt, Artificial Sequence
  Description of Artificial Sequence: Synthetic oligonucleotide
ugggguaagggagucuuuc

SEQ ID NO: 2753176 - RNA, 19 nt, Artificial Sequence
  Description of Artificial Sequence: Synthetic oligonucleotide
agggagccugaucaggcca

SEQ ID NO: 2753177 - RNA, 19 nt, Artificial Sequence
  Description of Artificial Sequence: Synthetic oligonucleotide
cuucuagguaguaugugcu

SEQ ID NO: 2753178 - RNA, 19 nt, Artificial Sequence
  Description of Artificial Sequence: Synthetic oligonucleotide
gacuccccagaccgcagag

SEQ ID NO: 2753179 - RNA, 19 nt, Artificial Sequence
  Description of Artificial Sequence: Synthetic oligonucleotide
cuucggggagggaggaggc

SEQ ID NO: 2753180 - RNA, 19 nt, Artificial Sequence
  Description of Artificial Sequence: Synthetic oligonucleotide
agagacaagucugggguaa

SEQ ID NO: 2753181 - RNA, 19 nt, Artificial Sequence
  Description of Artificial Sequence: Synthetic oligonucleotide
uccccagacuccccagacc

SEQ ID NO: 2753182 - RNA, 19 nt, Artificial Sequence
  Description of Artificial Sequence: Synthetic oligonucleotide
gaguccgauucucaguucu

SEQ ID NO: 2753183 - RNA, 19 nt, Artificial Sequence
  Description of Artificial Sequence: Synthetic oligonucleotide
agcuaagacaagacuacaa

SEQ ID NO: 2753184 - RNA, 19 nt, Artificial Sequence
  Description of Artificial Sequence: Synthetic oligonucleotide
cuuccaggagacaucaagu

SEQ ID NO: 2753185 - RNA, 19 nt, Artificial Sequence
  Description of Artificial Sequence: Synthetic oligonucleotide
ggagaucaaguccccagac

SEQ ID NO: 2753186 - RNA, 19 nt, Artificial Sequence
  Description of Artificial Sequence: Synthetic oligonucleotide
caguucucaccagggagcc

SEQ ID NO: 2753187 - RNA, 19 nt, Artificial Sequence
  Description of Artificial Sequence: Synthetic oligonucleotide
ccccagacuccccagaccg

SEQ ID NO: 2753188 - RNA, 19 nt, Artificial Sequence
  Description of Artificial Sequence: Synthetic oligonucleotide
caagucccugcugagggac

SEQ ID NO: 2753189 - RNA, 19 nt, Artificial Sequence
  Description of Artificial Sequence: Synthetic oligonucleotide
gguucuucggggagggagg

SEQ ID NO: 2753190 - RNA, 19 nt, Artificial Sequence
  Description of Artificial Sequence: Synthetic oligonucleotide
ucggggagggaggaggcgc

SEQ ID NO: 2753191 - RNA, 19 nt, Artificial Sequence
  Description of Artificial Sequence: Synthetic oligonucleotide
agguggguucuucggggag

SEQ ID NO: 2753192 - RNA, 19 nt, Artificial Sequence
  Description of Artificial Sequence: Synthetic oligonucleotide
gaagagcucugcgggcggg

SEQ ID NO: 2753193 - RNA, 19 nt, Artificial Sequence
  Description of Artificial Sequence: Synthetic oligonucleotide
caagugaguccgauucuca

SEQ ID NO: 2753194 - RNA, 19 nt, Artificial Sequence
  Description of Artificial Sequence: Synthetic oligonucleotide
cacguccauagcuaagaca

SEQ ID NO: 2753195 - RNA, 19 nt, Artificial Sequence
  Description of Artificial Sequence: Synthetic oligonucleotide
acaucaagugaguccgauu

SEQ ID NO: 2753196 - RNA, 19 nt, Artificial Sequence
  Description of Artificial Sequence: Synthetic oligonucleotide
gagaucaaguccccagacu

SEQ ID NO: 2753197 - RNA, 19 nt, Artificial Sequence
  Description of Artificial Sequence: Synthetic oligonucleotide
agcucugcgggcggggacg

SEQ ID NO: 2753198 - RNA, 19 nt, Artificial Sequence
  Description of Artificial Sequence: Synthetic oligonucleotide
cgaaaugagacucgacaag

SEQ ID NO: 2753199 - RNA, 19 nt, Artificial Sequence
  Description of Artificial Sequence: Synthetic oligonucleotide
ccaagguggguucuucggg

SEQ ID NO: 2753200 - RNA, 19 nt, Artificial Sequence
  Description of Artificial Sequence: Synthetic oligonucleotide
cagggagccugaucaggcc

SEQ ID NO: 2753201 - RNA, 19 nt, Artificial Sequence
  Description of Artificial Sequence: Synthetic oligonucleotide
ccgauucucaguucucacc

SEQ ID NO: 2753202 - RNA, 19 nt, Artificial Sequence
  Description of Artificial Sequence: Synthetic oligonucleotide
gagacaagucugggguaag

SEQ ID NO: 2753203 - RNA, 19 nt, Artificial Sequence
  Description of Artificial Sequence: Synthetic oligonucleotide
aucuaccauugaaccgugc

SEQ ID NO: 2753204 - RNA, 19 nt, Artificial Sequence
  Description of Artificial Sequence: Synthetic oligonucleotide
uucaagcgcccaggaagag

SEQ ID NO: 2753205 - RNA, 19 nt, Artificial Sequence
  Description of Artificial Sequence: Synthetic oligonucleotide
gccugaucaggccaaggug

SEQ ID NO: 2753206 - RNA, 19 nt, Artificial Sequence
  Description of Artificial Sequence: Synthetic oligonucleotide
aguccgauucucaguucuc

SEQ ID NO: 2753207 - RNA, 19 nt, Artificial Sequence
  Description of Artificial Sequence: Synthetic oligonucleotide
cagguggcuuuugggaggg

SEQ ID NO: 2753208 - RNA, 19 nt, Artificial Sequence
  Description of Artificial Sequence: Synthetic oligonucleotide
ggguucuucggggagggag

SEQ ID NO: 2753209 - RNA, 19 nt, Artificial Sequence
  Description of Artificial Sequence: Synthetic oligonucleotide
cagcgaaucuaccauugaa

SEQ ID NO: 2753210 - RNA, 19 nt, Artificial Sequence
  Description of Artificial Sequence: Synthetic oligonucleotide
ugaguccgauucucaguuc

SEQ ID NO: 2753211 - RNA, 19 nt, Artificial Sequence
  Description of Artificial Sequence: Synthetic oligonucleotide
gagccugaucaggccaagg

SEQ ID NO: 2753212 - RNA, 19 nt, Artificial Sequence
  Description of Artificial Sequence: Synthetic oligonucleotide
gguggguucuucggggagg

SEQ ID NO: 2753213 - RNA, 19 nt, Artificial Sequence
  Description of Artificial Sequence: Synthetic oligonucleotide
ggaagagcucugcgggcgg

SEQ ID NO: 2753214 - RNA, 19 nt, Artificial Sequence
  Description of Artificial Sequence: Synthetic oligonucleotide
gugaguccgauucucaguu

SEQ ID NO: 2753215 - RNA, 19 nt, Artificial Sequence
  Description of Artificial Sequence: Synthetic oligonucleotide
agacuccccagaccgcaga

SEQ ID NO: 2753216 - RNA, 19 nt, Artificial Sequence
  Description of Artificial Sequence: Synthetic oligonucleotide
uucuucugaggcuccucuu

SEQ ID NO: 2753217 - RNA, 19 nt, Artificial Sequence
  Description of Artificial Sequence: Synthetic oligonucleotide
aguccccagacuccccaga

SEQ ID NO: 2753218 - RNA, 19 nt, Artificial Sequence
  Description of Artificial Sequence: Synthetic oligonucleotide
agagccuucuggggcuuuc

SEQ ID NO: 2753219 - RNA, 19 nt, Artificial Sequence
  Description of Artificial Sequence: Synthetic oligonucleotide
cuugcgcuggagaucaagu

SEQ ID NO: 2753220 - RNA, 19 nt, Artificial Sequence
  Description of Artificial Sequence: Synthetic oligonucleotide
gagggacagcgaaucuacc

SEQ ID NO: 2753221 - RNA, 19 nt, Artificial Sequence
  Description of Artificial Sequence: Synthetic oligonucleotide
ccuuccagguggcuuuugg

SEQ ID NO: 2753222 - RNA, 19 nt, Artificial Sequence
  Description of Artificial Sequence: Synthetic oligonucleotide
agccuucaagcgcccagga

SEQ ID NO: 2753223 - RNA, 19 nt, Artificial Sequence
  Description of Artificial Sequence: Synthetic oligonucleotide
guccccagacuccccagac

SEQ ID NO: 2753224 - RNA, 19 nt, Artificial Sequence
  Description of Artificial Sequence: Synthetic oligonucleotide
gcagccuucaagcgcccag

SEQ ID NO: 2753225 - RNA, 19 nt, Artificial Sequence
  Description of Artificial Sequence: Synthetic oligonucleotide
guccgauucucaguucuca

SEQ ID NO: 2753226 - RNA, 19 nt, Artificial Sequence
  Description of Artificial Sequence: Synthetic oligonucleotide
gcgcuggagaucaaguccc

SEQ ID NO: 2753227 - RNA, 19 nt, Artificial Sequence
  Description of Artificial Sequence: Synthetic oligonucleotide
cuagguaguaugugcuccu

SEQ ID NO: 2753228 - RNA, 19 nt, Artificial Sequence
  Description of Artificial Sequence: Synthetic oligonucleotide
aggccaagguggguucuuc

SEQ ID NO: 2753229 - RNA, 19 nt, Artificial Sequence
  Description of Artificial Sequence: Synthetic oligonucleotide
ugaucaggccaaggugggu

SEQ ID NO: 2753230 - RNA, 19 nt, Artificial Sequence
  Description of Artificial Sequence: Synthetic oligonucleotide
caccagggagccugaucag

SEQ ID NO: 2753231 - RNA, 19 nt, Artificial Sequence
  Description of Artificial Sequence: Synthetic oligonucleotide
cagacuccccagaccgcag

SEQ ID NO: 2753232 - RNA, 19 nt, Artificial Sequence
  Description of Artificial Sequence: Synthetic oligonucleotide
uccccagaccgcagagccu

SEQ ID NO: 2753233 - RNA, 19 nt, Artificial Sequence
  Description of Artificial Sequence: Synthetic oligonucleotide
ggguaagggagucuuucaa

SEQ ID NO: 2753234 - RNA, 19 nt, Artificial Sequence
  Description of Artificial Sequence: Synthetic oligonucleotide
accgaagauuucacgucca

SEQ ID NO: 2753235 - RNA, 19 nt, Artificial Sequence
  Description of Artificial Sequence: Synthetic oligonucleotide
uucuucggggagggaggag

SEQ ID NO: 2753236 - RNA, 19 nt, Artificial Sequence
  Description of Artificial Sequence: Synthetic oligonucleotide
ggacaagagcauucugcuc

SEQ ID NO: 2753237 - RNA, 19 nt, Artificial Sequence
  Description of Artificial Sequence: Synthetic oligonucleotide
caagagcauucugcucugc

SEQ ID NO: 2753238 - RNA, 19 nt, Artificial Sequence
  Description of Artificial Sequence: Synthetic oligonucleotide
ucaggccaagguggguucu

SEQ ID NO: 2753239 - RNA, 19 nt, Artificial Sequence
  Description of Artificial Sequence: Synthetic oligonucleotide
uucuuacuucuagguagua

SEQ ID NO: 2753240 - RNA, 19 nt, Artificial Sequence
  Description of Artificial Sequence: Synthetic oligonucleotide
ggagucuuucaagucccug

SEQ ID NO: 2753241 - RNA, 19 nt, Artificial Sequence
  Description of Artificial Sequence: Synthetic oligonucleotide
gagagcgcugggccccgcc

SEQ ID NO: 2753242 - RNA, 19 nt, Artificial Sequence
  Description of Artificial Sequence: Synthetic oligonucleotide
cagaccgcagagccuucug

SEQ ID NO: 2753243 - RNA, 19 nt, Artificial Sequence
  Description of Artificial Sequence: Synthetic oligonucleotide
gggguaagggagucuuuca

SEQ ID NO: 2753244 - RNA, 19 nt, Artificial Sequence
  Description of Artificial Sequence: Synthetic oligonucleotide
gagacucgacaaggacaag

SEQ ID NO: 2753245 - RNA, 19 nt, Artificial Sequence
  Description of Artificial Sequence: Synthetic oligonucleotide
gcccaggaagagcucugcg

SEQ ID NO: 2753246 - RNA, 19 nt, Artificial Sequence
  Description of Artificial Sequence: Synthetic oligonucleotide
ggacauggacgaaaugaga

SEQ ID NO: 2753247 - RNA, 19 nt, Artificial Sequence
  Description of Artificial Sequence: Synthetic oligonucleotide
gaucaggccaagguggguu

SEQ ID NO: 2753248 - RNA, 19 nt, Artificial Sequence
  Description of Artificial Sequence: Synthetic oligonucleotide
aagucccugcugagggaca

SEQ ID NO: 2753249 - RNA, 19 nt, Artificial Sequence
  Description of Artificial Sequence: Synthetic oligonucleotide
uagguaguaugugcuccuu

SEQ ID NO: 2753250 - RNA, 19 nt, Artificial Sequence
  Description of Artificial Sequence: Synthetic oligonucleotide
ggaggcgcuggggugcugg

SEQ ID NO: 2753251 - RNA, 19 nt, Artificial Sequence
  Description of Artificial Sequence: Synthetic oligonucleotide
gacaucaagugaguccgau

SEQ ID NO: 2753252 - RNA, 19 nt, Artificial Sequence
  Description of Artificial Sequence: Synthetic oligonucleotide
uggggcuuucgggugcccu

SEQ ID NO: 2753253 - RNA, 19 nt, Artificial Sequence
  Description of Artificial Sequence: Synthetic oligonucleotide
ccgcagagccuucuggggc

SEQ ID NO: 2753254 - RNA, 19 nt, Artificial Sequence
  Description of Artificial Sequence: Synthetic oligonucleotide
cugagggacagcgaaucua

SEQ ID NO: 2753255 - RNA, 19 nt, Artificial Sequence
  Description of Artificial Sequence: Synthetic oligonucleotide
aagcgcccaggaagagcuc

SEQ ID NO: 2753256 - RNA, 19 nt, Artificial Sequence
  Description of Artificial Sequence: Synthetic oligonucleotide
gggcuuucgggugcccucg

SEQ ID NO: 2753257 - RNA, 19 nt, Artificial Sequence
  Description of Artificial Sequence: Synthetic oligonucleotide
gggacagcgaaucuaccau

SEQ ID NO: 2753258 - RNA, 19 nt, Artificial Sequence
  Description of Artificial Sequence: Synthetic oligonucleotide
ucgggugcccucgguuccc

SEQ ID NO: 2753259 - RNA, 19 nt, Artificial Sequence
  Description of Artificial Sequence: Synthetic oligonucleotide
ccauugaaccgugcacggg

SEQ ID NO: 2753260 - RNA, 19 nt, Artificial Sequence
  Description of Artificial Sequence: Synthetic oligonucleotide
ccagagagcgcugggcccc

SEQ ID NO: 2753261 - RNA, 19 nt, Artificial Sequence
  Description of Artificial Sequence: Synthetic oligonucleotide
caggagacaucaagugagu

SEQ ID NO: 2753262 - RNA, 19 nt, Artificial Sequence
  Description of Artificial Sequence: Synthetic oligonucleotide
uccuuccagguggcuuuug

SEQ ID NO: 2753263 - RNA, 19 nt, Artificial Sequence
  Description of Artificial Sequence: Synthetic oligonucleotide
ugggccccgcccgucuugc

SEQ ID NO: 2753264 - RNA, 19 nt, Artificial Sequence
  Description of Artificial Sequence: Synthetic oligonucleotide
ggacgaaaugagacucgac

SEQ ID NO: 2753265 - RNA, 19 nt, Artificial Sequence
  Description of Artificial Sequence: Synthetic oligonucleotide
aguucucaccagggagccu

SEQ ID NO: 2753266 - RNA, 19 nt, Artificial Sequence
  Description of Artificial Sequence: Synthetic oligonucleotide
agacaucaagugaguccga

SEQ ID NO: 2753267 - RNA, 19 nt, Artificial Sequence
  Description of Artificial Sequence: Synthetic oligonucleotide
agcgcugggccccgcccgu

SEQ ID NO: 2753268 - RNA, 19 nt, Artificial Sequence
  Description of Artificial Sequence: Synthetic oligonucleotide
gacgucccagagagcgcug

SEQ ID NO: 2753269 - RNA, 19 nt, Artificial Sequence
  Description of Artificial Sequence: Synthetic oligonucleotide
ggcuuucgggugcccucgg

SEQ ID NO: 2753270 - RNA, 19 nt, Artificial Sequence
  Description of Artificial Sequence: Synthetic oligonucleotide
cguccauagcuaagacaag

SEQ ID NO: 2753271 - RNA, 19 nt, Artificial Sequence
  Description of Artificial Sequence: Synthetic oligonucleotide
gggugcuggguaggcagcc

SEQ ID NO: 2753272 - RNA, 19 nt, Artificial Sequence
  Description of Artificial Sequence: Synthetic oligonucleotide
ggagccugaucaggccaag

SEQ ID NO: 2753273 - RNA, 19 nt, Artificial Sequence
  Description of Artificial Sequence: Synthetic oligonucleotide
cuuucgggugcccucgguu

SEQ ID NO: 2753274 - RNA, 19 nt, Artificial Sequence
  Description of Artificial Sequence: Synthetic oligonucleotide
cugggccccgcccgucuug

SEQ ID NO: 2753275 - RNA, 19 nt, Artificial Sequence
  Description of Artificial Sequence: Synthetic oligonucleotide
ggcgcuggggugcugggua

SEQ ID NO: 2753276 - RNA, 19 nt, Artificial Sequence
  Description of Artificial Sequence: Synthetic oligonucleotide
uggguucuucggggaggga

SEQ ID NO: 2753277 - RNA, 19 nt, Artificial Sequence
  Description of Artificial Sequence: Synthetic oligonucleotide
ugcgggcggggacguccca

SEQ ID NO: 2753278 - RNA, 19 nt, Artificial Sequence
  Description of Artificial Sequence: Synthetic oligonucleotide
cgucuugcgcuggagauca

SEQ ID NO: 2753279 - RNA, 19 nt, Artificial Sequence
  Description of Artificial Sequence: Synthetic oligonucleotide
agguggcuuuugggagggg

SEQ ID NO: 2753280 - RNA, 19 nt, Artificial Sequence
  Description of Artificial Sequence: Synthetic oligonucleotide
gcgcuggggugcuggguag

SEQ ID NO: 2753281 - RNA, 19 nt, Artificial Sequence
  Description of Artificial Sequence: Synthetic oligonucleotide
gucccugcugagggacagc

SEQ ID NO: 2753282 - RNA, 19 nt, Artificial Sequence
  Description of Artificial Sequence: Synthetic oligonucleotide
ggcggggacgucccagaga

SEQ ID NO: 2753283 - RNA, 19 nt, Artificial Sequence
  Description of Artificial Sequence: Synthetic oligonucleotide
ggacgucccagagagcgcu

SEQ ID NO: 2753284 - RNA, 19 nt, Artificial Sequence
  Description of Artificial Sequence: Synthetic oligonucleotide
ggacagcgaaucuaccauu

SEQ ID NO: 2753285 - RNA, 19 nt, Artificial Sequence
  Description of Artificial Sequence: Synthetic oligonucleotide
gggacgucccagagagcgc

SEQ ID NO: 2753286 - RNA, 19 nt, Artificial Sequence
  Description of Artificial Sequence: Synthetic oligonucleotide
gcccgucuugcgcuggaga

SEQ ID NO: 2753287 - RNA, 19 nt, Artificial Sequence
  Description of Artificial Sequence: Synthetic oligonucleotide
gccuucaagcgcccaggaa

SEQ ID NO: 2753288 - RNA, 19 nt, Artificial Sequence
  Description of Artificial Sequence: Synthetic oligonucleotide
gcugagggacagcgaaucu

SEQ ID NO: 2753289 - RNA, 19 nt, Artificial Sequence
  Description of Artificial Sequence: Synthetic oligonucleotide
gggagccugaucaggccaa

SEQ ID NO: 2753290 - RNA, 19 nt, Artificial Sequence
  Description of Artificial Sequence: Synthetic oligonucleotide
gugcuggguaggcagccuu

SEQ ID NO: 2753291 - RNA, 19 nt, Artificial Sequence
  Description of Artificial Sequence: Synthetic oligonucleotide
cugcugagggacagcgaau

SEQ ID NO: 2753292 - RNA, 19 nt, Artificial Sequence
  Description of Artificial Sequence: Synthetic oligonucleotide
cuggggcuuucgggugccc

SEQ ID NO: 2753293 - RNA, 19 nt, Artificial Sequence
  Description of Artificial Sequence: Synthetic oligonucleotide
ccgucuugcgcuggagauc

SEQ ID NO: 2753294 - RNA, 19 nt, Artificial Sequence
  Description of Artificial Sequence: Synthetic oligonucleotide
gcgggcggggacgucccag

SEQ ID NO: 2753295 - RNA, 19 nt, Artificial Sequence
  Description of Artificial Sequence: Synthetic oligonucleotide
cccgucuugcgcuggagau

SEQ ID NO: 2753296 - RNA, 19 nt, Artificial Sequence
  Description of Artificial Sequence: Synthetic oligonucleotide
cgaagauuucacguccaua

SEQ ID NO: 2753297 - RNA, 19 nt, Artificial Sequence
  Description of Artificial Sequence: Synthetic oligonucleotide
gggccccgcccgucuugcg

SEQ ID NO: 2753298 - RNA, 19 nt, Artificial Sequence
  Description of Artificial Sequence: Synthetic oligonucleotide
gcuuucgggugcccucggu

SEQ ID NO: 2753299 - RNA, 19 nt, Artificial Sequence
  Description of Artificial Sequence: Synthetic oligonucleotide
ggugcuggguaggcagccu

SEQ ID NO: 2753300 - RNA, 19 nt, Artificial Sequence
  Description of Artificial Sequence: Synthetic oligonucleotide
cccugcugagggacagcga

SEQ ID NO: 2753301 - RNA, 19 nt, Artificial Sequence
  Description of Artificial Sequence: Synthetic oligonucleotide
gggagucuuucaagucccu

SEQ ID NO: 2753302 - RNA, 19 nt, Artificial Sequence
  Description of Artificial Sequence: Synthetic oligonucleotide
ccgaagauuucacguccau

SEQ ID NO: 2753303 - RNA, 19 nt, Artificial Sequence
  Description of Artificial Sequence: Synthetic oligonucleotide
cucugcgggcggggacguc

SEQ ID NO: 2753304 - RNA, 19 nt, Artificial Sequence
  Description of Artificial Sequence: Synthetic oligonucleotide
cccgcccgucuugcgcugg

SEQ ID NO: 2753305 - RNA, 19 nt, Artificial Sequence
  Description of Artificial Sequence: Synthetic oligonucleotide
gucuugcgcuggagaucaa

SEQ ID NO: 2753306 - RNA, 19 nt, Artificial Sequence
  Description of Artificial Sequence: Synthetic oligonucleotide
cggggacgucccagagagc

SEQ ID NO: 2753307 - RNA, 19 nt, Artificial Sequence
  Description of Artificial Sequence: Synthetic oligonucleotide
ccccgcccgucuugcgcug

SEQ ID NO: 2753308 - RNA, 19 nt, Artificial Sequence
  Description of Artificial Sequence: Synthetic oligonucleotide
ccccagaccgcagagccuu

SEQ ID NO: 2753309 - RNA, 19 nt, Artificial Sequence
  Description of Artificial Sequence: Synthetic oligonucleotide
caggccaagguggguucuu

SEQ ID NO: 2753310 - RNA, 19 nt, Artificial Sequence
  Description of Artificial Sequence: Synthetic oligonucleotide
cuccuuccagguggcuuuu

SEQ ID NO: 2753311 - RNA, 19 nt, Artificial Sequence
  Description of Artificial Sequence: Synthetic oligonucleotide
ccagaccgcagagccuucu

SEQ ID NO: 2753312 - RNA, 19 nt, Artificial Sequence
  Description of Artificial Sequence: Synthetic oligonucleotide
cgcccgucuugcgcuggag

SEQ ID NO: 2753313 - RNA, 19 nt, Artificial Sequence
  Description of Artificial Sequence: Synthetic oligonucleotide
gcucugcgggcggggacgu

SEQ ID NO: 2753314 - RNA, 19 nt, Artificial Sequence
  Description of Artificial Sequence: Synthetic oligonucleotide
ccgcccgucuugcgcugga

SEQ ID NO: 2753315 - RNA, 19 nt, Artificial Sequence
  Description of Artificial Sequence: Synthetic oligonucleotide
gcagagccuucuggggcuu

SEQ ID NO: 2753316 - RNA, 19 nt, Artificial Sequence
  Description of Artificial Sequence: Synthetic oligonucleotide
gcugggccccgcccgucuu

SEQ ID NO: 2753317 - RNA, 19 nt, Artificial Sequence
  Description of Artificial Sequence: Synthetic oligonucleotide
cgcugggccccgcccgucu

SEQ ID NO: 2753318 - RNA, 19 nt, Artificial Sequence
  Description of Artificial Sequence: Synthetic oligonucleotide
uuaacuuucauuaacucag

SEQ ID NO: 2753319 - RNA, 19 nt, Artificial Sequence
  Description of Artificial Sequence: Synthetic oligonucleotide
aauuuuaacuuucauuaac

SEQ ID NO: 2753320 - RNA, 19 nt, Artificial Sequence
  Description of Artificial Sequence: Synthetic oligonucleotide
auaacuagggcucucggcg

SEQ ID NO: 2753321 - RNA, 19 nt, Artificial Sequence
  Description of Artificial Sequence: Synthetic oligonucleotide
uuuaacuuucauuaacuca

SEQ ID NO: 2753322 - RNA, 19 nt, Artificial Sequence
  Description of Artificial Sequence: Synthetic oligonucleotide
uuaacucaggguaaggcag

SEQ ID NO: 2753323 - RNA, 19 nt, Artificial Sequence
  Description of Artificial Sequence: Synthetic oligonucleotide
ugucugucaaauuuuaacu

SEQ ID NO: 2753324 - RNA, 19 nt, Artificial Sequence
  Description of Artificial Sequence: Synthetic oligonucleotide
ucaaauuuuaacuuucauu

SEQ ID NO: 2753325 - RNA, 19 nt, Artificial Sequence
  Description of Artificial Sequence: Synthetic oligonucleotide
aacuuucauuaacucaggg

SEQ ID NO: 2753326 - RNA, 19 nt, Artificial Sequence
  Description of Artificial Sequence: Synthetic oligonucleotide
agaguaucaguccaaggag

SEQ ID NO: 2753327 - RNA, 19 nt, Artificial Sequence
  Description of Artificial Sequence: Synthetic oligonucleotide
uugucugucaaauuuuaac

SEQ ID NO: 2753328 - RNA, 19 nt, Artificial Sequence
  Description of Artificial Sequence: Synthetic oligonucleotide
auuaacucaggguaaggca

SEQ ID NO: 2753329 - RNA, 19 nt, Artificial Sequence
  Description of Artificial Sequence: Synthetic oligonucleotide
aaauuuuaacuuucauuaa

SEQ ID NO: 2753330 - RNA, 19 nt, Artificial Sequence
  Description of Artificial Sequence: Synthetic oligonucleotide
acgaucugcuccuuagugc

SEQ ID NO: 2753331 - RNA, 19 nt, Artificial Sequence
  Description of Artificial Sequence: Synthetic oligonucleotide
aguccaaggagcuccuggc

SEQ ID NO: 2753332 - RNA, 19 nt, Artificial Sequence
  Description of Artificial Sequence: Synthetic oligonucleotide
cuuucauuaacucagggua

SEQ ID NO: 2753333 - RNA, 19 nt, Artificial Sequence
  Description of Artificial Sequence: Synthetic oligonucleotide
uuuuaacuuucauuaacuc

SEQ ID NO: 2753334 - RNA, 19 nt, Artificial Sequence
  Description of Artificial Sequence: Synthetic oligonucleotide
acuuucauuaacucagggu

SEQ ID NO: 2753335 - RNA, 19 nt, Artificial Sequence
  Description of Artificial Sequence: Synthetic oligonucleotide
aaggcagaguaucagucca

SEQ ID NO: 2753336 - RNA, 19 nt, Artificial Sequence
  Description of Artificial Sequence: Synthetic oligonucleotide
uaacuuucauuaacucagg

SEQ ID NO: 2753337 - RNA, 19 nt, Artificial Sequence
  Description of Artificial Sequence: Synthetic oligonucleotide
cuuagugcggaugucaggc

SEQ ID NO: 2753338 - RNA, 19 nt, Artificial Sequence
  Description of Artificial Sequence: Synthetic oligonucleotide
uaucaguccaaggagcucc

SEQ ID NO: 2753339 - RNA, 19 nt, Artificial Sequence
  Description of Artificial Sequence: Synthetic oligonucleotide
ugucaaauuuuaacuuuca

SEQ ID NO: 2753340 - RNA, 19 nt, Artificial Sequence
  Description of Artificial Sequence: Synthetic oligonucleotide
auuuuaacuuucauuaacu

SEQ ID NO: 2753341 - RNA, 19 nt, Artificial Sequence
  Description of Artificial Sequence: Synthetic oligonucleotide
aacgucucggggccgggcc

SEQ ID NO: 2753342 - RNA, 19 nt, Artificial Sequence
  Description of Artificial Sequence: Synthetic oligonucleotide
aaaggugcgggcgugccgg

SEQ ID NO: 2753343 - RNA, 19 nt, Artificial Sequence
  Description of Artificial Sequence: Synthetic oligonucleotide
uaaggcagaguaucagucc

SEQ ID NO: 2753344 - RNA, 19 nt, Artificial Sequence
  Description of Artificial Sequence: Synthetic oligonucleotide
uuucauuaacucaggguaa

SEQ ID NO: 2753345 - RNA, 19 nt, Artificial Sequence
  Description of Artificial Sequence: Synthetic oligonucleotide
ucugucaaauuuuaacuuu

SEQ ID NO: 2753346 - RNA, 19 nt, Artificial Sequence
  Description of Artificial Sequence: Synthetic oligonucleotide
uagugcggaugucaggccg

SEQ ID NO: 2753347 - RNA, 19 nt, Artificial Sequence
  Description of Artificial Sequence: Synthetic oligonucleotide
uucauuaacucaggguaag

SEQ ID NO: 2753348 - RNA, 19 nt, Artificial Sequence
  Description of Artificial Sequence: Synthetic oligonucleotide
cauuaacucaggguaaggc

SEQ ID NO: 2753349 - RNA, 19 nt, Artificial Sequence
  Description of Artificial Sequence: Synthetic oligonucleotide
cagaguaucaguccaagga

SEQ ID NO: 2753350 - RNA, 19 nt, Artificial Sequence
  Description of Artificial Sequence: Synthetic oligonucleotide
uccacgaucugcuccuuag

SEQ ID NO: 2753351 - RNA, 19 nt, Artificial Sequence
  Description of Artificial Sequence: Synthetic oligonucleotide
uccuuagugcggaugucag

SEQ ID NO: 2753352 - RNA, 19 nt, Artificial Sequence
  Description of Artificial Sequence: Synthetic oligonucleotide
ugcuccugcaccagcaucu

SEQ ID NO: 2753353 - RNA, 19 nt, Artificial Sequence
  Description of Artificial Sequence: Synthetic oligonucleotide
agugaugcgcacaucggcg

SEQ ID NO: 2753354 - RNA, 19 nt, Artificial Sequence
  Description of Artificial Sequence: Synthetic oligonucleotide
ucauuaacucaggguaagg

SEQ ID NO: 2753355 - RNA, 19 nt, Artificial Sequence
  Description of Artificial Sequence: Synthetic oligonucleotide
ugcuccuuagugcggaugu

SEQ ID NO: 2753356 - RNA, 19 nt, Artificial Sequence
  Description of Artificial Sequence: Synthetic oligonucleotide
uuugucugucaaauuuuaa

SEQ ID NO: 2753357 - RNA, 19 nt, Artificial Sequence
  Description of Artificial Sequence: Synthetic oligonucleotide
aacuagggcucucggcguc

SEQ ID NO: 2753358 - RNA, 19 nt, Artificial Sequence
  Description of Artificial Sequence: Synthetic oligonucleotide
ucacccuuugucccgcaag

SEQ ID NO: 2753359 - RNA, 19 nt, Artificial Sequence
  Description of Artificial Sequence: Synthetic oligonucleotide
gaugucaggccgcagccac

SEQ ID NO: 2753360 - RNA, 19 nt, Artificial Sequence
  Description of Artificial Sequence: Synthetic oligonucleotide
cugguagcggaacugccgg

SEQ ID NO: 2753361 - RNA, 19 nt, Artificial Sequence
  Description of Artificial Sequence: Synthetic oligonucleotide
ugaugcgcacaucggcgcg

SEQ ID NO: 2753362 - RNA, 19 nt, Artificial Sequence
  Description of Artificial Sequence: Synthetic oligonucleotide
ucggcgucacccuuugucc

SEQ ID NO: 2753363 - RNA, 19 nt, Artificial Sequence
  Description of Artificial Sequence: Synthetic oligonucleotide
gccagugaugcgcacaucg

SEQ ID NO: 2753364 - RNA, 19 nt, Artificial Sequence
  Description of Artificial Sequence: Synthetic oligonucleotide
uggcgaaacgucucggggc

SEQ ID NO: 2753365 - RNA, 19 nt, Artificial Sequence
  Description of Artificial Sequence: Synthetic oligonucleotide
accgucuccggcucccucc

SEQ ID NO: 2753366 - RNA, 19 nt, Artificial Sequence
  Description of Artificial Sequence: Synthetic oligonucleotide
cucugcgucuccgacagcg

SEQ ID NO: 2753367 - RNA, 19 nt, Artificial Sequence
  Description of Artificial Sequence: Synthetic oligonucleotide
gacgccauaacuagggcuc

SEQ ID NO: 2753368 - RNA, 19 nt, Artificial Sequence
  Description of Artificial Sequence: Synthetic oligonucleotide
uaacucaggguaaggcaga

SEQ ID NO: 2753369 - RNA, 19 nt, Artificial Sequence
  Description of Artificial Sequence: Synthetic oligonucleotide
agggcucucggcgucaccc

SEQ ID NO: 2753370 - RNA, 19 nt, Artificial Sequence
  Description of Artificial Sequence: Synthetic oligonucleotide
ugucccgcaaguccggacu

SEQ ID NO: 2753371 - RNA, 19 nt, Artificial Sequence
  Description of Artificial Sequence: Synthetic oligonucleotide
cuggcgaaacgucucgggg

SEQ ID NO: 2753372 - RNA, 19 nt, Artificial Sequence
  Description of Artificial Sequence: Synthetic oligonucleotide
uccaaggagcuccuggcuc

SEQ ID NO: 2753373 - RNA, 19 nt, Artificial Sequence
  Description of Artificial Sequence: Synthetic oligonucleotide
uagcggaacugccggaagc

SEQ ID NO: 2753374 - RNA, 19 nt, Artificial Sequence
  Description of Artificial Sequence: Synthetic oligonucleotide
caguccaaggagcuccugg

SEQ ID NO: 2753375 - RNA, 19 nt, Artificial Sequence
  Description of Artificial Sequence: Synthetic oligonucleotide
ugcagcgccgcguccaaag

SEQ ID NO: 2753376 - RNA, 19 nt, Artificial Sequence
  Description of Artificial Sequence: Synthetic oligonucleotide
cagugaugcgcacaucggc

SEQ ID NO: 2753377 - RNA, 19 nt, Artificial Sequence
  Description of Artificial Sequence: Synthetic oligonucleotide
cacgaucugcuccuuagug

SEQ ID NO: 2753378 - RNA, 19 nt, Artificial Sequence
  Description of Artificial Sequence: Synthetic oligonucleotide
uccggcucccuccugcugc

SEQ ID NO: 2753379 - RNA, 19 nt, Artificial Sequence
  Description of Artificial Sequence: Synthetic oligonucleotide
guaaggcagaguaucaguc

SEQ ID NO: 2753380 - RNA, 19 nt, Artificial Sequence
  Description of Artificial Sequence: Synthetic oligonucleotide
aguaucaguccaaggagcu

SEQ ID NO: 2753381 - RNA, 19 nt, Artificial Sequence
  Description of Artificial Sequence: Synthetic oligonucleotide
ugcgucuccgacagcgaag

SEQ ID NO: 2753382 - RNA, 19 nt, Artificial Sequence
  Description of Artificial Sequence: Synthetic oligonucleotide
ucaggccgcagccacuggc

SEQ ID NO: 2753383 - RNA, 19 nt, Artificial Sequence
  Description of Artificial Sequence: Synthetic oligonucleotide
ucccgcagcugccggaagg

SEQ ID NO: 2753384 - RNA, 19 nt, Artificial Sequence
  Description of Artificial Sequence: Synthetic oligonucleotide
cucaggguaaggcagagua

SEQ ID NO: 2753385 - RNA, 19 nt, Artificial Sequence
  Description of Artificial Sequence: Synthetic oligonucleotide
uuagugcggaugucaggcc

SEQ ID NO: 2753386 - RNA, 19 nt, Artificial Sequence
  Description of Artificial Sequence: Synthetic oligonucleotide
ugccggaaggcuucccggg

SEQ ID NO: 2753387 - RNA, 19 nt, Artificial Sequence
  Description of Artificial Sequence: Synthetic oligonucleotide
uccggcgacgccauaacua

SEQ ID NO: 2753388 - RNA, 19 nt, Artificial Sequence
  Description of Artificial Sequence: Synthetic oligonucleotide
aacugccggaagcgcuggc

SEQ ID NO: 2753389 - RNA, 19 nt, Artificial Sequence
  Description of Artificial Sequence: Synthetic oligonucleotide
aacucaggguaaggcagag

SEQ ID NO: 2753390 - RNA, 19 nt, Artificial Sequence
  Description of Artificial Sequence: Synthetic oligonucleotide
caggguaaggcagaguauc

SEQ ID NO: 2753391 - RNA, 19 nt, Artificial Sequence
  Description of Artificial Sequence: Synthetic oligonucleotide
cuuugucccgcaaguccgg

SEQ ID NO: 2753392 - RNA, 19 nt, Artificial Sequence
  Description of Artificial Sequence: Synthetic oligonucleotide
agcggaacugccggaagcg

SEQ ID NO: 2753393 - RNA, 19 nt, Artificial Sequence
  Description of Artificial Sequence: Synthetic oligonucleotide
aaacgucucggggccgggc

SEQ ID NO: 2753394 - RNA, 19 nt, Artificial Sequence
  Description of Artificial Sequence: Synthetic oligonucleotide
uccugguagcggaacugcc

SEQ ID NO: 2753395 - RNA, 19 nt, Artificial Sequence
  Description of Artificial Sequence: Synthetic oligonucleotide
ucaggguaaggcagaguau

SEQ ID NO: 2753396 - RNA, 19 nt, Artificial Sequence
  Description of Artificial Sequence: Synthetic oligonucleotide
uaacuagggcucucggcgu

SEQ ID NO: 2753397 - RNA, 19 nt, Artificial Sequence
  Description of Artificial Sequence: Synthetic oligonucleotide
cucggcgucacccuuuguc

SEQ ID NO: 2753398 - RNA, 19 nt, Artificial Sequence
  Description of Artificial Sequence: Synthetic oligonucleotide
agugcggaugucaggccgc

SEQ ID NO: 2753399 - RNA, 19 nt, Artificial Sequence
  Description of Artificial Sequence: Synthetic oligonucleotide
uccggacuggcucugcguc

SEQ ID NO: 2753400 - RNA, 19 nt, Artificial Sequence
  Description of Artificial Sequence: Synthetic oligonucleotide
gugaugcgcacaucggcgc

SEQ ID NO: 2753401 - RNA, 19 nt, Artificial Sequence
  Description of Artificial Sequence: Synthetic oligonucleotide
cgaucugcuccuuagugcg

SEQ ID NO: 2753402 - RNA, 19 nt, Artificial Sequence
  Description of Artificial Sequence: Synthetic oligonucleotide
aguccggacuggcucugcg

SEQ ID NO: 2753403 - RNA, 19 nt, Artificial Sequence
  Description of Artificial Sequence: Synthetic oligonucleotide
ggcgacgccauaacuaggg

SEQ ID NO: 2753404 - RNA, 19 nt, Artificial Sequence
  Description of Artificial Sequence: Synthetic oligonucleotide
ggcucugcgucuccgacag

SEQ ID NO: 2753405 - RNA, 19 nt, Artificial Sequence
  Description of Artificial Sequence: Synthetic oligonucleotide
gaugcgcacaucggcgcgg

SEQ ID NO: 2753406 - RNA, 19 nt, Artificial Sequence
  Description of Artificial Sequence: Synthetic oligonucleotide
ucagccagugaugcgcaca

SEQ ID NO: 2753407 - RNA, 19 nt, Artificial Sequence
  Description of Artificial Sequence: Synthetic oligonucleotide
gcagaguaucaguccaagg

SEQ ID NO: 2753408 - RNA, 19 nt, Artificial Sequence
  Description of Artificial Sequence: Synthetic oligonucleotide
cugccggaaggcuucccgg

SEQ ID NO: 2753409 - RNA, 19 nt, Artificial Sequence
  Description of Artificial Sequence: Synthetic oligonucleotide
caggccgcagccacuggcg

SEQ ID NO: 2753410 - RNA, 19 nt, Artificial Sequence
  Description of Artificial Sequence: Synthetic oligonucleotide
acugccggaagcgcuggcg

SEQ ID NO: 2753411 - RNA, 19 nt, Artificial Sequence
  Description of Artificial Sequence: Synthetic oligonucleotide
ugucaggccgcagccacug

SEQ ID NO: 2753412 - RNA, 19 nt, Artificial Sequence
  Description of Artificial Sequence: Synthetic oligonucleotide
guagcggaacugccggaag

SEQ ID NO: 2753413 - RNA, 19 nt, Artificial Sequence
  Description of Artificial Sequence: Synthetic oligonucleotide
ggcgaaacgucucggggcc

SEQ ID NO: 2753414 - RNA, 19 nt, Artificial Sequence
  Description of Artificial Sequence: Synthetic oligonucleotide
caaaggugcgggcgugccg

SEQ ID NO: 2753415 - RNA, 19 nt, Artificial Sequence
  Description of Artificial Sequence: Synthetic oligonucleotide
aaguccggacuggcucugc

SEQ ID NO: 2753416 - RNA, 19 nt, Artificial Sequence
  Description of Artificial Sequence: Synthetic oligonucleotide
ccugguagcggaacugccg

SEQ ID NO: 2753417 - RNA, 19 nt, Artificial Sequence
  Description of Artificial Sequence: Synthetic oligonucleotide
ucugcgucuccgacagcga

SEQ ID NO: 2753418 - RNA, 19 nt, Artificial Sequence
  Description of Artificial Sequence: Synthetic oligonucleotide
gucugucaaauuuuaacuu

SEQ ID NO: 2753419 - RNA, 19 nt, Artificial Sequence
  Description of Artificial Sequence: Synthetic oligonucleotide
cuggcuccgcugcucagcc

SEQ ID NO: 2753420 - RNA, 19 nt, Artificial Sequence
  Description of Artificial Sequence: Synthetic oligonucleotide
gcuggcgaaacgucucggg

SEQ ID NO: 2753421 - RNA, 19 nt, Artificial Sequence
  Description of Artificial Sequence: Synthetic oligonucleotide
gucaaauuuuaacuuucau

SEQ ID NO: 2753422 - RNA, 19 nt, Artificial Sequence
  Description of Artificial Sequence: Synthetic oligonucleotide
gaacugccggaagcgcugg

SEQ ID NO: 2753423 - RNA, 19 nt, Artificial Sequence
  Description of Artificial Sequence: Synthetic oligonucleotide
ggcuccgcugcucagccag

SEQ ID NO: 2753424 - RNA, 19 nt, Artificial Sequence
  Description of Artificial Sequence: Synthetic oligonucleotide
aaggugcgggcgugccggg

SEQ ID NO: 2753425 - RNA, 19 nt, Artificial Sequence
  Description of Artificial Sequence: Synthetic oligonucleotide
cccuuugucccgcaagucc

SEQ ID NO: 2753426 - RNA, 19 nt, Artificial Sequence
  Description of Artificial Sequence: Synthetic oligonucleotide
aaggagcuccuggcuccgc

SEQ ID NO: 2753427 - RNA, 19 nt, Artificial Sequence
  Description of Artificial Sequence: Synthetic oligonucleotide
acuggcgggacagcucccg

SEQ ID NO: 2753428 - RNA, 19 nt, Artificial Sequence
  Description of Artificial Sequence: Synthetic oligonucleotide
ccaaggagcuccuggcucc

SEQ ID NO: 2753429 - RNA, 19 nt, Artificial Sequence
  Description of Artificial Sequence: Synthetic oligonucleotide
agcgcuggcgaaacgucuc

SEQ ID NO: 2753430 - RNA, 19 nt, Artificial Sequence
  Description of Artificial Sequence: Synthetic oligonucleotide
gaagcgcuggcgaaacguc

SEQ ID NO: 2753431 - RNA, 19 nt, Artificial Sequence
  Description of Artificial Sequence: Synthetic oligonucleotide
acagcucccgcagcugccg

SEQ ID NO: 2753432 - RNA, 19 nt, Artificial Sequence
  Description of Artificial Sequence: Synthetic oligonucleotide
aagcgcuggcgaaacgucu

SEQ ID NO: 2753433 - RNA, 19 nt, Artificial Sequence
  Description of Artificial Sequence: Synthetic oligonucleotide
gucuccggcucccuccugc

SEQ ID NO: 2753434 - RNA, 19 nt, Artificial Sequence
  Description of Artificial Sequence: Synthetic oligonucleotide
uggcucugcgucuccgaca

SEQ ID NO: 2753435 - RNA, 19 nt, Artificial Sequence
  Description of Artificial Sequence: Synthetic oligonucleotide
gcugccggaaggcuucccg

SEQ ID NO: 2753436 - RNA, 19 nt, Artificial Sequence
  Description of Artificial Sequence: Synthetic oligonucleotide
ugccggggagcuccggggc

SEQ ID NO: 2753437 - RNA, 19 nt, Artificial Sequence
  Description of Artificial Sequence: Synthetic oligonucleotide
uccgcugcucagccaguga

SEQ ID NO: 2753438 - RNA, 19 nt, Artificial Sequence
  Description of Artificial Sequence: Synthetic oligonucleotide
gccauaacuagggcucucg

SEQ ID NO: 2753439 - RNA, 19 nt, Artificial Sequence
  Description of Artificial Sequence: Synthetic oligonucleotide
ccagugaugcgcacaucgg

SEQ ID NO: 2753440 - RNA, 19 nt, Artificial Sequence
  Description of Artificial Sequence: Synthetic oligonucleotide
uccggguccgcaccgucuc

SEQ ID NO: 2753441 - RNA, 19 nt, Artificial Sequence
  Description of Artificial Sequence: Synthetic oligonucleotide
gugccggggagcuccgggg

SEQ ID NO: 2753442 - RNA, 19 nt, Artificial Sequence
  Description of Artificial Sequence: Synthetic oligonucleotide
ggcgucacccuuugucccg

SEQ ID NO: 2753443 - RNA, 19 nt, Artificial Sequence
  Description of Artificial Sequence: Synthetic oligonucleotide
gacuggcucugcgucuccg

SEQ ID NO: 2753444 - RNA, 19 nt, Artificial Sequence
  Description of Artificial Sequence: Synthetic oligonucleotide
acgucucggggccgggccg

SEQ ID NO: 2753445 - RNA, 19 nt, Artificial Sequence
  Description of Artificial Sequence: Synthetic oligonucleotide
ggcagaguaucaguccaag

SEQ ID NO: 2753446 - RNA, 19 nt, Artificial Sequence
  Description of Artificial Sequence: Synthetic oligonucleotide
cucggggccgggccgagag

SEQ ID NO: 2753447 - RNA, 19 nt, Artificial Sequence
  Description of Artificial Sequence: Synthetic oligonucleotide
acccuuugucccgcaaguc

SEQ ID NO: 2753448 - RNA, 19 nt, Artificial Sequence
  Description of Artificial Sequence: Synthetic oligonucleotide
ggguaaggcagaguaucag

SEQ ID NO: 2753449 - RNA, 19 nt, Artificial Sequence
  Description of Artificial Sequence: Synthetic oligonucleotide
cuucccggggacccgccgc

SEQ ID NO: 2753450 - RNA, 19 nt, Artificial Sequence
  Description of Artificial Sequence: Synthetic oligonucleotide
cugcaccagcaucuccacg

SEQ ID NO: 2753451 - RNA, 19 nt, Artificial Sequence
  Description of Artificial Sequence: Synthetic oligonucleotide
uccaaaggugcgggcgugc

SEQ ID NO: 2753452 - RNA, 19 nt, Artificial Sequence
  Description of Artificial Sequence: Synthetic oligonucleotide
uuugucccgcaaguccgga

SEQ ID NO: 2753453 - RNA, 19 nt, Artificial Sequence
  Description of Artificial Sequence: Synthetic oligonucleotide
gguaaggcagaguaucagu

SEQ ID NO: 2753454 - RNA, 19 nt, Artificial Sequence
  Description of Artificial Sequence: Synthetic oligonucleotide
acuggcucugcgucuccga

SEQ ID NO: 2753455 - RNA, 19 nt, Artificial Sequence
  Description of Artificial Sequence: Synthetic oligonucleotide
aggguaaggcagaguauca

SEQ ID NO: 2753456 - RNA, 19 nt, Artificial Sequence
  Description of Artificial Sequence: Synthetic oligonucleotide
cugcucagccagugaugcg

SEQ ID NO: 2753457 - RNA, 19 nt, Artificial Sequence
  Description of Artificial Sequence: Synthetic oligonucleotide
cuggcucugcgucuccgac

SEQ ID NO: 2753458 - RNA, 19 nt, Artificial Sequence
  Description of Artificial Sequence: Synthetic oligonucleotide
gcggccucggccugcagcg

SEQ ID NO: 2753459 - RNA, 19 nt, Artificial Sequence
  Description of Artificial Sequence: Synthetic oligonucleotide
gaggcaccgggccgcgggg

SEQ ID NO: 2753460 - RNA, 19 nt, Artificial Sequence
  Description of Artificial Sequence: Synthetic oligonucleotide
gaaacgucucggggccggg

SEQ ID NO: 2753461 - RNA, 19 nt, Artificial Sequence
  Description of Artificial Sequence: Synthetic oligonucleotide
ccauaacuagggcucucgg

SEQ ID NO: 2753462 - RNA, 19 nt, Artificial Sequence
  Description of Artificial Sequence: Synthetic oligonucleotide
acccgccgcguccugguag

SEQ ID NO: 2753463 - RNA, 19 nt, Artificial Sequence
  Description of Artificial Sequence: Synthetic oligonucleotide
augcgcacaucggcgcggc

SEQ ID NO: 2753464 - RNA, 19 nt, Artificial Sequence
  Description of Artificial Sequence: Synthetic oligonucleotide
uugucccgcaaguccggac

SEQ ID NO: 2753465 - RNA, 19 nt, Artificial Sequence
  Description of Artificial Sequence: Synthetic oligonucleotide
agggcagcgggcuccgggu

SEQ ID NO: 2753466 - RNA, 19 nt, Artificial Sequence
  Description of Artificial Sequence: Synthetic oligonucleotide
ccuuagugcggaugucagg

SEQ ID NO: 2753467 - RNA, 19 nt, Artificial Sequence
  Description of Artificial Sequence: Synthetic oligonucleotide
cuccuuagugcggauguca

SEQ ID NO: 2753468 - RNA, 19 nt, Artificial Sequence
  Description of Artificial Sequence: Synthetic oligonucleotide
ucccgcaaguccggacugg

SEQ ID NO: 2753469 - RNA, 19 nt, Artificial Sequence
  Description of Artificial Sequence: Synthetic oligonucleotide
ccggcgacgccauaacuag

SEQ ID NO: 2753470 - RNA, 19 nt, Artificial Sequence
  Description of Artificial Sequence: Synthetic oligonucleotide
ccacuggcgggacagcucc

SEQ ID NO: 2753471 - RNA, 19 nt, Artificial Sequence
  Description of Artificial Sequence: Synthetic oligonucleotide
gacagcucccgcagcugcc

SEQ ID NO: 2753472 - RNA, 19 nt, Artificial Sequence
  Description of Artificial Sequence: Synthetic oligonucleotide
uccgcaccgucuccggcuc

SEQ ID NO: 2753473 - RNA, 19 nt, Artificial Sequence
  Description of Artificial Sequence: Synthetic oligonucleotide
gcguccaaaggugcgggcg

SEQ ID NO: 2753474 - RNA, 19 nt, Artificial Sequence
  Description of Artificial Sequence: Synthetic oligonucleotide
gccgccucgggcaggaugg

SEQ ID NO: 2753475 - RNA, 19 nt, Artificial Sequence
  Description of Artificial Sequence: Synthetic oligonucleotide
guaucaguccaaggagcuc

SEQ ID NO: 2753476 - RNA, 19 nt, Artificial Sequence
  Description of Artificial Sequence: Synthetic oligonucleotide
caaggagcuccuggcuccg

SEQ ID NO: 2753477 - RNA, 19 nt, Artificial Sequence
  Description of Artificial Sequence: Synthetic oligonucleotide
ggcgggacagcucccgcag

SEQ ID NO: 2753478 - RNA, 19 nt, Artificial Sequence
  Description of Artificial Sequence: Synthetic oligonucleotide
gucccgcaaguccggacug

SEQ ID NO: 2753479 - RNA, 19 nt, Artificial Sequence
  Description of Artificial Sequence: Synthetic oligonucleotide
aggcuucccggggacccgc

SEQ ID NO: 2753480 - RNA, 19 nt, Artificial Sequence
  Description of Artificial Sequence: Synthetic oligonucleotide
cugcuccugcaccagcauc

SEQ ID NO: 2753481 - RNA, 19 nt, Artificial Sequence
  Description of Artificial Sequence: Synthetic oligonucleotide
cucucggcgucacccuuug

SEQ ID NO: 2753482 - RNA, 19 nt, Artificial Sequence
  Description of Artificial Sequence: Synthetic oligonucleotide
ugcgcacaucggcgcggcg

SEQ ID NO: 2753483 - RNA, 19 nt, Artificial Sequence
  Description of Artificial Sequence: Synthetic oligonucleotide
ucggggccgggccgagagg

SEQ ID NO: 2753484 - RNA, 19 nt, Artificial Sequence
  Description of Artificial Sequence: Synthetic oligonucleotide
ucaguccaaggagcuccug

SEQ ID NO: 2753485 - RNA, 19 nt, Artificial Sequence
  Description of Artificial Sequence: Synthetic oligonucleotide
uccugcugccccggcggcg

SEQ ID NO: 2753486 - RNA, 19 nt, Artificial Sequence
  Description of Artificial Sequence: Synthetic oligonucleotide
ugccggaagcgcuggcgaa

SEQ ID NO: 2753487 - RNA, 19 nt, Artificial Sequence
  Description of Artificial Sequence: Synthetic oligonucleotide
uccuggcuccgcugcucag

SEQ ID NO: 2753488 - RNA, 19 nt, Artificial Sequence
  Description of Artificial Sequence: Synthetic oligonucleotide
gccgagaggcaccgggccg

SEQ ID NO: 2753489 - RNA, 19 nt, Artificial Sequence
  Description of Artificial Sequence: Synthetic oligonucleotide
ucgggcaggauggccugca

SEQ ID NO: 2753490 - RNA, 19 nt, Artificial Sequence
  Description of Artificial Sequence: Synthetic oligonucleotide
gccggaaggcuucccgggg

SEQ ID NO: 2753491 - RNA, 19 nt, Artificial Sequence
  Description of Artificial Sequence: Synthetic oligonucleotide
ccuccugcugccccggcgg

SEQ ID NO: 2753492 - RNA, 19 nt, Artificial Sequence
  Description of Artificial Sequence: Synthetic oligonucleotide
uagggcucucggcgucacc

SEQ ID NO: 2753493 - RNA, 19 nt, Artificial Sequence
  Description of Artificial Sequence: Synthetic oligonucleotide
gggcaggauggccugcagc

SEQ ID NO: 2753494 - RNA, 19 nt, Artificial Sequence
  Description of Artificial Sequence: Synthetic oligonucleotide
gcgucuccgacagcgaagc

SEQ ID NO: 2753495 - RNA, 19 nt, Artificial Sequence
  Description of Artificial Sequence: Synthetic oligonucleotide
cucagccagugaugcgcac

SEQ ID NO: 2753496 - RNA, 19 nt, Artificial Sequence
  Description of Artificial Sequence: Synthetic oligonucleotide
ggagcuccggggccgcggg

SEQ ID NO: 2753497 - RNA, 19 nt, Artificial Sequence
  Description of Artificial Sequence: Synthetic oligonucleotide
ggccgagaggcaccgggcc

SEQ ID NO: 2753498 - RNA, 19 nt, Artificial Sequence
  Description of Artificial Sequence: Synthetic oligonucleotide
cuggcgggacagcucccgc

SEQ ID NO: 2753499 - RNA, 19 nt, Artificial Sequence
  Description of Artificial Sequence: Synthetic oligonucleotide
cugcuccuuagugcggaug

SEQ ID NO: 2753500 - RNA, 19 nt, Artificial Sequence
  Description of Artificial Sequence: Synthetic oligonucleotide
acuagggcucucggcguca

SEQ ID NO: 2753501 - RNA, 19 nt, Artificial Sequence
  Description of Artificial Sequence: Synthetic oligonucleotide
gcgcuggcgaaacgucucg

SEQ ID NO: 2753502 - RNA, 19 nt, Artificial Sequence
  Description of Artificial Sequence: Synthetic oligonucleotide
gcagcgccgcguccaaagg

SEQ ID NO: 2753503 - RNA, 19 nt, Artificial Sequence
  Description of Artificial Sequence: Synthetic oligonucleotide
aucaguccaaggagcuccu

SEQ ID NO: 2753504 - RNA, 19 nt, Artificial Sequence
  Description of Artificial Sequence: Synthetic oligonucleotide
guccaaaggugcgggcgug

SEQ ID NO: 2753505 - RNA, 19 nt, Artificial Sequence
  Description of Artificial Sequence: Synthetic oligonucleotide
cugccggaagcgcuggcga

SEQ ID NO: 2753506 - RNA, 19 nt, Artificial Sequence
  Description of Artificial Sequence: Synthetic oligonucleotide
cacaucggcgcggcgccgc

SEQ ID NO: 2753507 - RNA, 19 nt, Artificial Sequence
  Description of Artificial Sequence: Synthetic oligonucleotide
acucaggguaaggcagagu

SEQ ID NO: 2753508 - RNA, 19 nt, Artificial Sequence
  Description of Artificial Sequence: Synthetic oligonucleotide
acgccauaacuagggcucu

SEQ ID NO: 2753509 - RNA, 19 nt, Artificial Sequence
  Description of Artificial Sequence: Synthetic oligonucleotide
aggcaccgggccgcggggc

SEQ ID NO: 2753510 - RNA, 19 nt, Artificial Sequence
  Description of Artificial Sequence: Synthetic oligonucleotide
ggcggccucggccugcagc

SEQ ID NO: 2753511 - RNA, 19 nt, Artificial Sequence
  Description of Artificial Sequence: Synthetic oligonucleotide
agcucccgcagcugccgga

SEQ ID NO: 2753512 - RNA, 19 nt, Artificial Sequence
  Description of Artificial Sequence: Synthetic oligonucleotide
ggccgcagccacuggcggg

SEQ ID NO: 2753513 - RNA, 19 nt, Artificial Sequence
  Description of Artificial Sequence: Synthetic oligonucleotide
ugcggaugucaggccgcag

SEQ ID NO: 2753514 - RNA, 19 nt, Artificial Sequence
  Description of Artificial Sequence: Synthetic oligonucleotide
caaguccggacuggcucug

SEQ ID NO: 2753515 - RNA, 19 nt, Artificial Sequence
  Description of Artificial Sequence: Synthetic oligonucleotide
gcgacgccauaacuagggc

SEQ ID NO: 2753516 - RNA, 19 nt, Artificial Sequence
  Description of Artificial Sequence: Synthetic oligonucleotide
cacccuuugucccgcaagu

SEQ ID NO: 2753517 - RNA, 19 nt, Artificial Sequence
  Description of Artificial Sequence: Synthetic oligonucleotide
cagcucccgcagcugccgg

SEQ ID NO: 2753518 - RNA, 19 nt, Artificial Sequence
  Description of Artificial Sequence: Synthetic oligonucleotide
cacuggcgggacagcuccc

SEQ ID NO: 2753519 - RNA, 19 nt, Artificial Sequence
  Description of Artificial Sequence: Synthetic oligonucleotide
cugggcuccggcgacgcca

SEQ ID NO: 2753520 - RNA, 19 nt, Artificial Sequence
  Description of Artificial Sequence: Synthetic oligonucleotide
ggcagcgggcuccgggucc

SEQ ID NO: 2753521 - RNA, 19 nt, Artificial Sequence
  Description of Artificial Sequence: Synthetic oligonucleotide
cggaugucaggccgcagcc

SEQ ID NO: 2753522 - RNA, 19 nt, Artificial Sequence
  Description of Artificial Sequence: Synthetic oligonucleotide
gccgcguccaaaggugcgg

SEQ ID NO: 2753523 - RNA, 19 nt, Artificial Sequence
  Description of Artificial Sequence: Synthetic oligonucleotide
ucucggcgucacccuuugu

SEQ ID NO: 2753524 - RNA, 19 nt, Artificial Sequence
  Description of Artificial Sequence: Synthetic oligonucleotide
guccaaggagcuccuggcu

SEQ ID NO: 2753525 - RNA, 19 nt, Artificial Sequence
  Description of Artificial Sequence: Synthetic oligonucleotide
cuccugcugccccggcggc

SEQ ID NO: 2753526 - RNA, 19 nt, Artificial Sequence
  Description of Artificial Sequence: Synthetic oligonucleotide
ggaagcgcuggcgaaacgu

SEQ ID NO: 2753527 - RNA, 19 nt, Artificial Sequence
  Description of Artificial Sequence: Synthetic oligonucleotide
cugcgucuccgacagcgaa

SEQ ID NO: 2753528 - RNA, 19 nt, Artificial Sequence
  Description of Artificial Sequence: Synthetic oligonucleotide
cuccgcugcucagccagug

SEQ ID NO: 2753529 - RNA, 19 nt, Artificial Sequence
  Description of Artificial Sequence: Synthetic oligonucleotide
ccugcaccagcaucuccac

SEQ ID NO: 2753530 - RNA, 19 nt, Artificial Sequence
  Description of Artificial Sequence: Synthetic oligonucleotide
ggccgcggggcucagggca

SEQ ID NO: 2753531 - RNA, 19 nt, Artificial Sequence
  Description of Artificial Sequence: Synthetic oligonucleotide
gguagcggaacugccggaa

SEQ ID NO: 2753532 - RNA, 19 nt, Artificial Sequence
  Description of Artificial Sequence: Synthetic oligonucleotide
ggcaccgggccgcggggcg

SEQ ID NO: 2753533 - RNA, 19 nt, Artificial Sequence
  Description of Artificial Sequence: Synthetic oligonucleotide
cuccuggcuccgcugcuca

SEQ ID NO: 2753534 - RNA, 19 nt, Artificial Sequence
  Description of Artificial Sequence: Synthetic oligonucleotide
aggcagaguaucaguccaa

SEQ ID NO: 2753535 - RNA, 19 nt, Artificial Sequence
  Description of Artificial Sequence: Synthetic oligonucleotide
ggguccgcaccgucuccgg

SEQ ID NO: 2753536 - RNA, 19 nt, Artificial Sequence
  Description of Artificial Sequence: Synthetic oligonucleotide
cuagggcucucggcgucac

SEQ ID NO: 2753537 - RNA, 19 nt, Artificial Sequence
  Description of Artificial Sequence: Synthetic oligonucleotide
guccgcaccgucuccggcu

SEQ ID NO: 2753538 - RNA, 19 nt, Artificial Sequence
  Description of Artificial Sequence: Synthetic oligonucleotide
acaucggcgcggcgccgca

SEQ ID NO: 2753539 - RNA, 19 nt, Artificial Sequence
  Description of Artificial Sequence: Synthetic oligonucleotide
gggcgugccggggagcucc

SEQ ID NO: 2753540 - RNA, 19 nt, Artificial Sequence
  Description of Artificial Sequence: Synthetic oligonucleotide
ugccccggcggcgccgcgg

SEQ ID NO: 2753541 - RNA, 19 nt, Artificial Sequence
  Description of Artificial Sequence: Synthetic oligonucleotide
uccggggccgcggggcuca

SEQ ID NO: 2753542 - RNA, 19 nt, Artificial Sequence
  Description of Artificial Sequence: Synthetic oligonucleotide
gccgcguccugguagcgga

SEQ ID NO: 2753543 - RNA, 19 nt, Artificial Sequence
  Description of Artificial Sequence: Synthetic oligonucleotide
gcucagggcagcgggcucc

SEQ ID NO: 2753544 - RNA, 19 nt, Artificial Sequence
  Description of Artificial Sequence: Synthetic oligonucleotide
ucccuccugcugccccggc

SEQ ID NO: 2753545 - RNA, 19 nt, Artificial Sequence
  Description of Artificial Sequence: Synthetic oligonucleotide
uggcuccgcugcucagcca

SEQ ID NO: 2753546 - RNA, 19 nt, Artificial Sequence
  Description of Artificial Sequence: Synthetic oligonucleotide
ggccgccucgggcaggaug

SEQ ID NO: 2753547 - RNA, 19 nt, Artificial Sequence
  Description of Artificial Sequence: Synthetic oligonucleotide
gguccgcaccgucuccggc

SEQ ID NO: 2753548 - RNA, 19 nt, Artificial Sequence
  Description of Artificial Sequence: Synthetic oligonucleotide
ccaaaggugcgggcgugcc

SEQ ID NO: 2753549 - RNA, 19 nt, Artificial Sequence
  Description of Artificial Sequence: Synthetic oligonucleotide
gcuucccggggacccgccg

SEQ ID NO: 2753550 - RNA, 19 nt, Artificial Sequence
  Description of Artificial Sequence: Synthetic oligonucleotide
ggaaggcuucccggggacc

SEQ ID NO: 2753551 - RNA, 19 nt, Artificial Sequence
  Description of Artificial Sequence: Synthetic oligonucleotide
aggugcgggcgugccgggg

SEQ ID NO: 2753552 - RNA, 19 nt, Artificial Sequence
  Description of Artificial Sequence: Synthetic oligonucleotide
gcgcacaucggcgcggcgc

SEQ ID NO: 2753553 - RNA, 19 nt, Artificial Sequence
  Description of Artificial Sequence: Synthetic oligonucleotide
gucacccuuugucccgcaa

SEQ ID NO: 2753554 - RNA, 19 nt, Artificial Sequence
  Description of Artificial Sequence: Synthetic oligonucleotide
cuccggcucccuccugcug

SEQ ID NO: 2753555 - RNA, 19 nt, Artificial Sequence
  Description of Artificial Sequence: Synthetic oligonucleotide
cucgggcaggauggccugc

SEQ ID NO: 2753556 - RNA, 19 nt, Artificial Sequence
  Description of Artificial Sequence: Synthetic oligonucleotide
augucaggccgcagccacu

SEQ ID NO: 2753557 - RNA, 19 nt, Artificial Sequence
  Description of Artificial Sequence: Synthetic oligonucleotide
gcuccggcgacgccauaac

SEQ ID NO: 2753558 - RNA, 19 nt, Artificial Sequence
  Description of Artificial Sequence: Synthetic oligonucleotide
cucccgcagcugccggaag

SEQ ID NO: 2753559 - RNA, 19 nt, Artificial Sequence
  Description of Artificial Sequence: Synthetic oligonucleotide
cggggcucagggcagcggg

SEQ ID NO: 2753560 - RNA, 19 nt, Artificial Sequence
  Description of Artificial Sequence: Synthetic oligonucleotide
cgggccgagaggcaccggg

SEQ ID NO: 2753561 - RNA, 19 nt, Artificial Sequence
  Description of Artificial Sequence: Synthetic oligonucleotide
ccuggcuccgcugcucagc

SEQ ID NO: 2753562 - RNA, 19 nt, Artificial Sequence
  Description of Artificial Sequence: Synthetic oligonucleotide
gggcuccggguccgcaccg

SEQ ID NO: 2753563 - RNA, 19 nt, Artificial Sequence
  Description of Artificial Sequence: Synthetic oligonucleotide
cgcacaucggcgcggcgcc

SEQ ID NO: 2753564 - RNA, 19 nt, Artificial Sequence
  Description of Artificial Sequence: Synthetic oligonucleotide
cgaaacgucucggggccgg

SEQ ID NO: 2753565 - RNA, 19 nt, Artificial Sequence
  Description of Artificial Sequence: Synthetic oligonucleotide
gccgcagccgccgggcccg

SEQ ID NO: 2753566 - RNA, 19 nt, Artificial Sequence
  Description of Artificial Sequence: Synthetic oligonucleotide
ccgagaggcaccgggccgc

SEQ ID NO: 2753567 - RNA, 19 nt, Artificial Sequence
  Description of Artificial Sequence: Synthetic oligonucleotide
cggcgucacccuuuguccc

SEQ ID NO: 2753568 - RNA, 19 nt, Artificial Sequence
  Description of Artificial Sequence: Synthetic oligonucleotide
gcagcgggcuccggguccg

SEQ ID NO: 2753569 - RNA, 19 nt, Artificial Sequence
  Description of Artificial Sequence: Synthetic oligonucleotide
cccgccgcguccugguagc

SEQ ID NO: 2753570 - RNA, 19 nt, Artificial Sequence
  Description of Artificial Sequence: Synthetic oligonucleotide
guccggacuggcucugcgu

SEQ ID NO: 2753571 - RNA, 19 nt, Artificial Sequence
  Description of Artificial Sequence: Synthetic oligonucleotide
caccgucuccggcucccuc

SEQ ID NO: 2753572 - RNA, 19 nt, Artificial Sequence
  Description of Artificial Sequence: Synthetic oligonucleotide
gggagcuccggggccgcgg

SEQ ID NO: 2753573 - RNA, 19 nt, Artificial Sequence
  Description of Artificial Sequence: Synthetic oligonucleotide
ggacuggcucugcgucucc

SEQ ID NO: 2753574 - RNA, 19 nt, Artificial Sequence
  Description of Artificial Sequence: Synthetic oligonucleotide
cgugccggggagcuccggg

SEQ ID NO: 2753575 - RNA, 19 nt, Artificial Sequence
  Description of Artificial Sequence: Synthetic oligonucleotide
ggaugucaggccgcagcca

SEQ ID NO: 2753576 - RNA, 19 nt, Artificial Sequence
  Description of Artificial Sequence: Synthetic oligonucleotide
cccgcaaguccggacuggc

SEQ ID NO: 2753577 - RNA, 19 nt, Artificial Sequence
  Description of Artificial Sequence: Synthetic oligonucleotide
cccgcagcugccggaaggc

SEQ ID NO: 2753578 - RNA, 19 nt, Artificial Sequence
  Description of Artificial Sequence: Synthetic oligonucleotide
gcgaaacgucucggggccg

SEQ ID NO: 2753579 - RNA, 19 nt, Artificial Sequence
  Description of Artificial Sequence: Synthetic oligonucleotide
ccucgggcaggauggccug

SEQ ID NO: 2753580 - RNA, 19 nt, Artificial Sequence
  Description of Artificial Sequence: Synthetic oligonucleotide
ccgcguccaaaggugcggg

SEQ ID NO: 2753581 - RNA, 19 nt, Artificial Sequence
  Description of Artificial Sequence: Synthetic oligonucleotide
gugcggaugucaggccgca

SEQ ID NO: 2753582 - RNA, 19 nt, Artificial Sequence
  Description of Artificial Sequence: Synthetic oligonucleotide
gcuccgggcggccgggcug

SEQ ID NO: 2753583 - RNA, 19 nt, Artificial Sequence
  Description of Artificial Sequence: Synthetic oligonucleotide
gggccgagaggcaccgggc

SEQ ID NO: 2753584 - RNA, 19 nt, Artificial Sequence
  Description of Artificial Sequence: Synthetic oligonucleotide
ccugcugccccggcggcgc

SEQ ID NO: 2753585 - RNA, 19 nt, Artificial Sequence
  Description of Artificial Sequence: Synthetic oligonucleotide
gggacccgccgcguccugg

SEQ ID NO: 2753586 - RNA, 19 nt, Artificial Sequence
  Description of Artificial Sequence: Synthetic oligonucleotide
gcucagccagugaugcgca

SEQ ID NO: 2753587 - RNA, 19 nt, Artificial Sequence
  Description of Artificial Sequence: Synthetic oligonucleotide
cgcugcucagccagugaug

SEQ ID NO: 2753588 - RNA, 19 nt, Artificial Sequence
  Description of Artificial Sequence: Synthetic oligonucleotide
cuccacgaucugcuccuua

SEQ ID NO: 2753589 - RNA, 19 nt, Artificial Sequence
  Description of Artificial Sequence: Synthetic oligonucleotide
gccgggccgagaggcaccg

SEQ ID NO: 2753590 - RNA, 19 nt, Artificial Sequence
  Description of Artificial Sequence: Synthetic oligonucleotide
ccggaagcgcuggcgaaac

SEQ ID NO: 2753591 - RNA, 19 nt, Artificial Sequence
  Description of Artificial Sequence: Synthetic oligonucleotide
cagcgccgcguccaaaggu

SEQ ID NO: 2753592 - RNA, 19 nt, Artificial Sequence
  Description of Artificial Sequence: Synthetic oligonucleotide
ucucggggccgggccgaga

SEQ ID NO: 2753593 - RNA, 19 nt, Artificial Sequence
  Description of Artificial Sequence: Synthetic oligonucleotide
ccggcucccuccugcugcc

SEQ ID NO: 2753594 - RNA, 19 nt, Artificial Sequence
  Description of Artificial Sequence: Synthetic oligonucleotide
cgccgcguccaaaggugcg

SEQ ID NO: 2753595 - RNA, 19 nt, Artificial Sequence
  Description of Artificial Sequence: Synthetic oligonucleotide
cggcgacgccauaacuagg

SEQ ID NO: 2753596 - RNA, 19 nt, Artificial Sequence
  Description of Artificial Sequence: Synthetic oligonucleotide
ggggcucagggcagcgggc

SEQ ID NO: 2753597 - RNA, 19 nt, Artificial Sequence
  Description of Artificial Sequence: Synthetic oligonucleotide
gcgggacagcucccgcagc

SEQ ID NO: 2753598 - RNA, 19 nt, Artificial Sequence
  Description of Artificial Sequence: Synthetic oligonucleotide
gcgucacccuuugucccgc

SEQ ID NO: 2753599 - RNA, 19 nt, Artificial Sequence
  Description of Artificial Sequence: Synthetic oligonucleotide
gccgcagccacuggcggga

SEQ ID NO: 2753600 - RNA, 19 nt, Artificial Sequence
  Description of Artificial Sequence: Synthetic oligonucleotide
ccggggacccgccgcgucc

SEQ ID NO: 2753601 - RNA, 19 nt, Artificial Sequence
  Description of Artificial Sequence: Synthetic oligonucleotide
caucggcgcggcgccgcag

SEQ ID NO: 2753602 - RNA, 19 nt, Artificial Sequence
  Description of Artificial Sequence: Synthetic oligonucleotide
cuccggguccgcaccgucu

SEQ ID NO: 2753603 - RNA, 19 nt, Artificial Sequence
  Description of Artificial Sequence: Synthetic oligonucleotide
ggcuccggcgacgccauaa

SEQ ID NO: 2753604 - RNA, 19 nt, Artificial Sequence
  Description of Artificial Sequence: Synthetic oligonucleotide
ggcgccgcagccgccgggc

SEQ ID NO: 2753605 - RNA, 19 nt, Artificial Sequence
  Description of Artificial Sequence: Synthetic oligonucleotide
cuccggcgacgccauaacu

SEQ ID NO: 2753606 - RNA, 19 nt, Artificial Sequence
  Description of Artificial Sequence: Synthetic oligonucleotide
gccccggcggcgccgcggg

SEQ ID NO: 2753607 - RNA, 19 nt, Artificial Sequence
  Description of Artificial Sequence: Synthetic oligonucleotide
gcuccuuagugcggauguc

SEQ ID NO: 2753608 - RNA, 19 nt, Artificial Sequence
  Description of Artificial Sequence: Synthetic oligonucleotide
cggaaggcuucccggggac

SEQ ID NO: 2753609 - RNA, 19 nt, Artificial Sequence
  Description of Artificial Sequence: Synthetic oligonucleotide
caccgggccgcggggcggc

SEQ ID NO: 2753610 - RNA, 19 nt, Artificial Sequence
  Description of Artificial Sequence: Synthetic oligonucleotide
gcgccgcguccaaaggugc

SEQ ID NO: 2753611 - RNA, 19 nt, Artificial Sequence
  Description of Artificial Sequence: Synthetic oligonucleotide
gcgggcuccggguccgcac

SEQ ID NO: 2753612 - RNA, 19 nt, Artificial Sequence
  Description of Artificial Sequence: Synthetic oligonucleotide
ccggaaggcuucccgggga

SEQ ID NO: 2753613 - RNA, 19 nt, Artificial Sequence
  Description of Artificial Sequence: Synthetic oligonucleotide
cgacgccauaacuagggcu

SEQ ID NO: 2753614 - RNA, 19 nt, Artificial Sequence
  Description of Artificial Sequence: Synthetic oligonucleotide
gucucggggccgggccgag

SEQ ID NO: 2753615 - RNA, 19 nt, Artificial Sequence
  Description of Artificial Sequence: Synthetic oligonucleotide
ucccggggacccgccgcgu

SEQ ID NO: 2753616 - RNA, 19 nt, Artificial Sequence
  Description of Artificial Sequence: Synthetic oligonucleotide
cgcguccaaaggugcgggc

SEQ ID NO: 2753617 - RNA, 19 nt, Artificial Sequence
  Description of Artificial Sequence: Synthetic oligonucleotide
gcuccggguccgcaccguc

SEQ ID NO: 2753618 - RNA, 19 nt, Artificial Sequence
  Description of Artificial Sequence: Synthetic oligonucleotide
gcggggcucagggcagcgg

SEQ ID NO: 2753619 - RNA, 19 nt, Artificial Sequence
  Description of Artificial Sequence: Synthetic oligonucleotide
cggaagcgcuggcgaaacg

SEQ ID NO: 2753620 - RNA, 19 nt, Artificial Sequence
  Description of Artificial Sequence: Synthetic oligonucleotide
ccgcggggcggccucggcc

SEQ ID NO: 2753621 - RNA, 19 nt, Artificial Sequence
  Description of Artificial Sequence: Synthetic oligonucleotide
gccgcggggcucagggcag

SEQ ID NO: 2753622 - RNA, 19 nt, Artificial Sequence
  Description of Artificial Sequence: Synthetic oligonucleotide
gccucgggcaggauggccu

SEQ ID NO: 2753623 - RNA, 19 nt, Artificial Sequence
  Description of Artificial Sequence: Synthetic oligonucleotide
cgggcuccggguccgcacc

SEQ ID NO: 2753624 - RNA, 19 nt, Artificial Sequence
  Description of Artificial Sequence: Synthetic oligonucleotide
gcacaucggcgcggcgccg

SEQ ID NO: 2753625 - RNA, 19 nt, Artificial Sequence
  Description of Artificial Sequence: Synthetic oligonucleotide
cggguccgcaccgucuccg

SEQ ID NO: 2753626 - RNA, 19 nt, Artificial Sequence
  Description of Artificial Sequence: Synthetic oligonucleotide
gcugggcuccggcgacgcc

SEQ ID NO: 2753627 - RNA, 19 nt, Artificial Sequence
  Description of Artificial Sequence: Synthetic oligonucleotide
gcguccugguagcggaacu

SEQ ID NO: 2753628 - RNA, 19 nt, Artificial Sequence
  Description of Artificial Sequence: Synthetic oligonucleotide
gacccgccgcguccuggua

SEQ ID NO: 2753629 - RNA, 19 nt, Artificial Sequence
  Description of Artificial Sequence: Synthetic oligonucleotide
gcaccgggccgcggggcgg

SEQ ID NO: 2753630 - RNA, 19 nt, Artificial Sequence
  Description of Artificial Sequence: Synthetic oligonucleotide
ggccgggccgagaggcacc

SEQ ID NO: 2753631 - RNA, 19 nt, Artificial Sequence
  Description of Artificial Sequence: Synthetic oligonucleotide
gccggaagcgcuggcgaaa

SEQ ID NO: 2753632 - RNA, 19 nt, Artificial Sequence
  Description of Artificial Sequence: Synthetic oligonucleotide
ccggguccgcaccgucucc

SEQ ID NO: 2753633 - RNA, 19 nt, Artificial Sequence
  Description of Artificial Sequence: Synthetic oligonucleotide
cgccgcggggcuccgggcg

SEQ ID NO: 2753634 - RNA, 19 nt, Artificial Sequence
  Description of Artificial Sequence: Synthetic oligonucleotide
ggcgugccggggagcuccg

SEQ ID NO: 2753635 - RNA, 19 nt, Artificial Sequence
  Description of Artificial Sequence: Synthetic oligonucleotide
gcucugcgucuccgacagc

SEQ ID NO: 2753636 - RNA, 19 nt, Artificial Sequence
  Description of Artificial Sequence: Synthetic oligonucleotide
ggacccgccgcguccuggu

SEQ ID NO: 2753637 - RNA, 19 nt, Artificial Sequence
  Description of Artificial Sequence: Synthetic oligonucleotide
ccgggcugggcuccggcga

SEQ ID NO: 2753638 - RNA, 19 nt, Artificial Sequence
  Description of Artificial Sequence: Synthetic oligonucleotide
cgcaccgucuccggcuccc

SEQ ID NO: 2753639 - RNA, 19 nt, Artificial Sequence
  Description of Artificial Sequence: Synthetic oligonucleotide
gcugcuccugcaccagcau

SEQ ID NO: 2753640 - RNA, 19 nt, Artificial Sequence
  Description of Artificial Sequence: Synthetic oligonucleotide
ggcuucccggggacccgcc

SEQ ID NO: 2753641 - RNA, 19 nt, Artificial Sequence
  Description of Artificial Sequence: Synthetic oligonucleotide
gcucccgcagcugccggaa

SEQ ID NO: 2753642 - RNA, 19 nt, Artificial Sequence
  Description of Artificial Sequence: Synthetic oligonucleotide
cccggcggcgccgcggggc

SEQ ID NO: 2753643 - RNA, 19 nt, Artificial Sequence
  Description of Artificial Sequence: Synthetic oligonucleotide
cugccccggcggcgccgcg

SEQ ID NO: 2753644 - RNA, 19 nt, Artificial Sequence
  Description of Artificial Sequence: Synthetic oligonucleotide
cuccggggccgcggggcuc

SEQ ID NO: 2753645 - RNA, 19 nt, Artificial Sequence
  Description of Artificial Sequence: Synthetic oligonucleotide
ccacgaucugcuccuuagu

SEQ ID NO: 2753646 - RNA, 19 nt, Artificial Sequence
  Description of Artificial Sequence: Synthetic oligonucleotide
ggggagcuccggggccgcg

SEQ ID NO: 2753647 - RNA, 19 nt, Artificial Sequence
  Description of Artificial Sequence: Synthetic oligonucleotide
gggcucucggcgucacccu

SEQ ID NO: 2753648 - RNA, 19 nt, Artificial Sequence
  Description of Artificial Sequence: Synthetic oligonucleotide
cgagaggcaccgggccgcg

SEQ ID NO: 2753649 - RNA, 19 nt, Artificial Sequence
  Description of Artificial Sequence: Synthetic oligonucleotide
cgcguccugguagcggaac

SEQ ID NO: 2753650 - RNA, 19 nt, Artificial Sequence
  Description of Artificial Sequence: Synthetic oligonucleotide
cggggcuccgggcggccgg

SEQ ID NO: 2753651 - RNA, 19 nt, Artificial Sequence
  Description of Artificial Sequence: Synthetic oligonucleotide
ccgcugcucagccagugau

SEQ ID NO: 2753652 - RNA, 19 nt, Artificial Sequence
  Description of Artificial Sequence: Synthetic oligonucleotide
cguccaaaggugcgggcgu

SEQ ID NO: 2753653 - RNA, 19 nt, Artificial Sequence
  Description of Artificial Sequence: Synthetic oligonucleotide
cagcgggcuccggguccgc

SEQ ID NO: 2753654 - RNA, 19 nt, Artificial Sequence
  Description of Artificial Sequence: Synthetic oligonucleotide
gcggggcuccgggcggccg

SEQ ID NO: 2753655 - RNA, 19 nt, Artificial Sequence
  Description of Artificial Sequence: Synthetic oligonucleotide
cgccgcguccugguagcgg

SEQ ID NO: 2753656 - RNA, 19 nt, Artificial Sequence
  Description of Artificial Sequence: Synthetic oligonucleotide
gcgccgcagccgccgggcc

SEQ ID NO: 2753657 - RNA, 19 nt, Artificial Sequence
  Description of Artificial Sequence: Synthetic oligonucleotide
cgccgcagccgccgggccc

SEQ ID NO: 2753658 - RNA, 19 nt, Artificial Sequence
  Description of Artificial Sequence: Synthetic oligonucleotide
ggcucucggcgucacccuu

SEQ ID NO: 2753659 - RNA, 19 nt, Artificial Sequence
  Description of Artificial Sequence: Synthetic oligonucleotide
ccgcaccgucuccggcucc

SEQ ID NO: 2753660 - RNA, 19 nt, Artificial Sequence
  Description of Artificial Sequence: Synthetic oligonucleotide
ggccgcggggcggccucgg

SEQ ID NO: 2753661 - RNA, 19 nt, Artificial Sequence
  Description of Artificial Sequence: Synthetic oligonucleotide
cgcggcgccgcagccgccg

SEQ ID NO: 2753662 - RNA, 19 nt, Artificial Sequence
  Description of Artificial Sequence: Synthetic oligonucleotide
gccgcggggcggccucggc

SEQ ID NO: 2753663 - RNA, 19 nt, Artificial Sequence
  Description of Artificial Sequence: Synthetic oligonucleotide
cccggggacccgccgcguc

SEQ ID NO: 2753664 - RNA, 19 nt, Artificial Sequence
  Description of Artificial Sequence: Synthetic oligonucleotide
cgccucgggcaggauggcc

SEQ ID NO: 2753665 - RNA, 19 nt, Artificial Sequence
  Description of Artificial Sequence: Synthetic oligonucleotide
ccggacuggcucugcgucu

SEQ ID NO: 2753666 - RNA, 19 nt, Artificial Sequence
  Description of Artificial Sequence: Synthetic oligonucleotide
gcgugccggggagcuccgg

SEQ ID NO: 2753667 - RNA, 19 nt, Artificial Sequence
  Description of Artificial Sequence: Synthetic oligonucleotide
gcggggcggccucggccug

SEQ ID NO: 2753668 - RNA, 19 nt, Artificial Sequence
  Description of Artificial Sequence: Synthetic oligonucleotide
cgccauaacuagggcucuc

SEQ ID NO: 2753669 - RNA, 19 nt, Artificial Sequence
  Description of Artificial Sequence: Synthetic oligonucleotide
cugcagcgccgcguccaaa

SEQ ID NO: 2753670 - RNA, 19 nt, Artificial Sequence
  Description of Artificial Sequence: Synthetic oligonucleotide
ccugcagcgccgcguccaa

SEQ ID NO: 2753671 - RNA, 19 nt, Artificial Sequence
  Description of Artificial Sequence: Synthetic oligonucleotide
gggccgcggggcggccucg

SEQ ID NO: 2753672 - RNA, 19 nt, Artificial Sequence
  Description of Artificial Sequence: Synthetic oligonucleotide
ccgccgcguccugguagcg

SEQ ID NO: 2753673 - RNA, 19 nt, Artificial Sequence
  Description of Artificial Sequence: Synthetic oligonucleotide
ggcuccgggcggccgggcu

SEQ ID NO: 2753674 - RNA, 19 nt, Artificial Sequence
  Description of Artificial Sequence: Synthetic oligonucleotide
ccgcaaguccggacuggcu

SEQ ID NO: 2753675 - RNA, 19 nt, Artificial Sequence
  Description of Artificial Sequence: Synthetic oligonucleotide
cgcggggcucagggcagcg

SEQ ID NO: 2753676 - RNA, 19 nt, Artificial Sequence
  Description of Artificial Sequence: Synthetic oligonucleotide
ggggcggccucggccugca

SEQ ID NO: 2753677 - RNA, 19 nt, Artificial Sequence
  Description of Artificial Sequence: Synthetic oligonucleotide
gggcggccucggccugcag

SEQ ID NO: 2753678 - RNA, 19 nt, Artificial Sequence
  Description of Artificial Sequence: Synthetic oligonucleotide
ccgccucgggcaggauggc

SEQ ID NO: 2753679 - RNA, 19 nt, Artificial Sequence
  Description of Artificial Sequence: Synthetic oligonucleotide
gcgggcgugccggggagcu

SEQ ID NO: 2753680 - RNA, 19 nt, Artificial Sequence
  Description of Artificial Sequence: Synthetic oligonucleotide
gcuccggggccgcggggcu

SEQ ID NO: 2753681 - RNA, 19 nt, Artificial Sequence
  Description of Artificial Sequence: Synthetic oligonucleotide
gcucucggcgucacccuuu

SEQ ID NO: 2753682 - RNA, 19 nt, Artificial Sequence
  Description of Artificial Sequence: Synthetic oligonucleotide
cgucuccggcucccuccug

SEQ ID NO: 2753683 - RNA, 19 nt, Artificial Sequence
  Description of Artificial Sequence: Synthetic oligonucleotide
cgcagcugccggaaggcuu

SEQ ID NO: 2753684 - RNA, 19 nt, Artificial Sequence
  Description of Artificial Sequence: Synthetic oligonucleotide
ccgucuccggcucccuccu

SEQ ID NO: 2753685 - RNA, 19 nt, Artificial Sequence
  Description of Artificial Sequence: Synthetic oligonucleotide
cggcgcggcgccgcagccg

SEQ ID NO: 2753686 - RNA, 19 nt, Artificial Sequence
  Description of Artificial Sequence: Synthetic oligonucleotide
cgcggggcggccucggccu

SEQ ID NO: 2753687 - RNA, 19 nt, Artificial Sequence
  Description of Artificial Sequence: Synthetic oligonucleotide
cgucacccuuugucccgca

SEQ ID NO: 2753688 - RNA, 19 nt, Artificial Sequence
  Description of Artificial Sequence: Synthetic oligonucleotide
ccgggccgagaggcaccgg

SEQ ID NO: 2753689 - RNA, 19 nt, Artificial Sequence
  Description of Artificial Sequence: Synthetic oligonucleotide
ccgcguccugguagcggaa

SEQ ID NO: 2753690 - RNA, 19 nt, Artificial Sequence
  Description of Artificial Sequence: Synthetic oligonucleotide
cggcgccgcagccgccggg

SEQ ID NO: 2753691 - RNA, 19 nt, Artificial Sequence
  Description of Artificial Sequence: Synthetic oligonucleotide
ccgcagccacuggcgggac

SEQ ID NO: 2753692 - RNA, 19 nt, Artificial Sequence
  Description of Artificial Sequence: Synthetic oligonucleotide
ggcuccggguccgcaccgu

SEQ ID NO: 2753693 - RNA, 19 nt, Artificial Sequence
  Description of Artificial Sequence: Synthetic oligonucleotide
cggggagcuccggggccgc

SEQ ID NO: 2753694 - RNA, 19 nt, Artificial Sequence
  Description of Artificial Sequence: Synthetic oligonucleotide
cgcagccacuggcgggaca

SEQ ID NO: 2753695 - RNA, 19 nt, Artificial Sequence
  Description of Artificial Sequence: Synthetic oligonucleotide
cgucucggggccgggccga

SEQ ID NO: 2753696 - RNA, 19 nt, Artificial Sequence
  Description of Artificial Sequence: Synthetic oligonucleotide
ccccggcggcgccgcgggg

SEQ ID NO: 2753697 - RNA, 19 nt, Artificial Sequence
  Description of Artificial Sequence: Synthetic oligonucleotide
cggggcggccucggccugc

SEQ ID NO: 2753698 - RNA, 19 nt, Artificial Sequence
  Description of Artificial Sequence: Synthetic oligonucleotide
cggcucccuccugcugccc

SEQ ID NO: 2753699 - RNA, 19 nt, Artificial Sequence
  Description of Artificial Sequence: Synthetic oligonucleotide
ccgcagcugccggaaggcu

SEQ ID NO: 2753700 - RNA, 19 nt, Artificial Sequence
  Description of Artificial Sequence: Synthetic oligonucleotide
gggcuccggcgacgccaua

SEQ ID NO: 2753701 - RNA, 19 nt, Artificial Sequence
  Description of Artificial Sequence: Synthetic oligonucleotide
cggggccgcggggcucagg

SEQ ID NO: 2753702 - RNA, 19 nt, Artificial Sequence
  Description of Artificial Sequence: Synthetic oligonucleotide
cgggcgugccggggagcuc

SEQ ID NO: 2753703 - RNA, 19 nt, Artificial Sequence
  Description of Artificial Sequence: Synthetic oligonucleotide
ccggggccgcggggcucag

SEQ ID NO: 2753704 - RNA, 19 nt, Artificial Sequence
  Description of Artificial Sequence: Synthetic oligonucleotide
acauccauugauuaggugc

SEQ ID NO: 2753705 - RNA, 19 nt, Artificial Sequence
  Description of Artificial Sequence: Synthetic oligonucleotide
aaggcauugaagaagcggc

SEQ ID NO: 2753706 - RNA, 19 nt, Artificial Sequence
  Description of Artificial Sequence: Synthetic oligonucleotide
uaauaaagggcccacacgu

SEQ ID NO: 2753707 - RNA, 19 nt, Artificial Sequence
  Description of Artificial Sequence: Synthetic oligonucleotide
uagcaaaaggcauugaaga

SEQ ID NO: 2753708 - RNA, 19 nt, Artificial Sequence
  Description of Artificial Sequence: Synthetic oligonucleotide
agagauucguggcaguacc

SEQ ID NO: 2753709 - RNA, 19 nt, Artificial Sequence
  Description of Artificial Sequence: Synthetic oligonucleotide
ucugcaguuguccucuucg

SEQ ID NO: 2753710 - RNA, 19 nt, Artificial Sequence
  Description of Artificial Sequence: Synthetic oligonucleotide
aaaggcauugaagaagcgg

SEQ ID NO: 2753711 - RNA, 19 nt, Artificial Sequence
  Description of Artificial Sequence: Synthetic oligonucleotide
auugauuaggugcggcugc

SEQ ID NO: 2753712 - RNA, 19 nt, Artificial Sequence
  Description of Artificial Sequence: Synthetic oligonucleotide
uugccuaaagaguugcugg

SEQ ID NO: 2753713 - RNA, 19 nt, Artificial Sequence
  Description of Artificial Sequence: Synthetic oligonucleotide
aucgcagcaagguacuugc

SEQ ID NO: 2753714 - RNA, 19 nt, Artificial Sequence
  Description of Artificial Sequence: Synthetic oligonucleotide
agcauuacagucagcaugc

SEQ ID NO: 2753715 - RNA, 19 nt, Artificial Sequence
  Description of Artificial Sequence: Synthetic oligonucleotide
cauccauugauuaggugcg

SEQ ID NO: 2753716 - RNA, 19 nt, Artificial Sequence
  Description of Artificial Sequence: Synthetic oligonucleotide
ucagacuuagaccugggaa

SEQ ID NO: 2753717 - RNA, 19 nt, Artificial Sequence
  Description of Artificial Sequence: Synthetic oligonucleotide
ugcggcaguagcaaaaggc

SEQ ID NO: 2753718 - RNA, 19 nt, Artificial Sequence
  Description of Artificial Sequence: Synthetic oligonucleotide
ugugcaucuagcaccuccg

SEQ ID NO: 2753719 - RNA, 19 nt, Artificial Sequence
  Description of Artificial Sequence: Synthetic oligonucleotide
aaugccagcagcagggcac

SEQ ID NO: 2753720 - RNA, 19 nt, Artificial Sequence
  Description of Artificial Sequence: Synthetic oligonucleotide
ugaagaagcggcaguagca

SEQ ID NO: 2753721 - RNA, 19 nt, Artificial Sequence
  Description of Artificial Sequence: Synthetic oligonucleotide
cuucugaugccuuccaggg

SEQ ID NO: 2753722 - RNA, 19 nt, Artificial Sequence
  Description of Artificial Sequence: Synthetic oligonucleotide
cagggucuaauaaagggcc

SEQ ID NO: 2753723 - RNA, 19 nt, Artificial Sequence
  Description of Artificial Sequence: Synthetic oligonucleotide
ugauccuugccuaaagagu

SEQ ID NO: 2753724 - RNA, 19 nt, Artificial Sequence
  Description of Artificial Sequence: Synthetic oligonucleotide
uugaagaagcggcaguagc

SEQ ID NO: 2753725 - RNA, 19 nt, Artificial Sequence
  Description of Artificial Sequence: Synthetic oligonucleotide
aacgcuucugccuucugca

SEQ ID NO: 2753726 - RNA, 19 nt, Artificial Sequence
  Description of Artificial Sequence: Synthetic oligonucleotide
gauucugugcaucuagcac

SEQ ID NO: 2753727 - RNA, 19 nt, Artificial Sequence
  Description of Artificial Sequence: Synthetic oligonucleotide
aguugcuggccacuugugc

SEQ ID NO: 2753728 - RNA, 19 nt, Artificial Sequence
  Description of Artificial Sequence: Synthetic oligonucleotide
cugauccuugccuaaagag

SEQ ID NO: 2753729 - RNA, 19 nt, Artificial Sequence
  Description of Artificial Sequence: Synthetic oligonucleotide
gucagcaugccuuugcuug

SEQ ID NO: 2753730 - RNA, 19 nt, Artificial Sequence
  Description of Artificial Sequence: Synthetic oligonucleotide
ugccuuugcuugcugaucc

SEQ ID NO: 2753731 - RNA, 19 nt, Artificial Sequence
  Description of Artificial Sequence: Synthetic oligonucleotide
guagcaaaaggcauugaag

SEQ ID NO: 2753732 - RNA, 19 nt, Artificial Sequence
  Description of Artificial Sequence: Synthetic oligonucleotide
uccucuucgggccauucag

SEQ ID NO: 2753733 - RNA, 19 nt, Artificial Sequence
  Description of Artificial Sequence: Synthetic oligonucleotide
ucuagcaccuccgccaacg

SEQ ID NO: 2753734 - RNA, 19 nt, Artificial Sequence
  Description of Artificial Sequence: Synthetic oligonucleotide
auuaggugcggcugcagag

SEQ ID NO: 2753735 - RNA, 19 nt, Artificial Sequence
  Description of Artificial Sequence: Synthetic oligonucleotide
aguagcaaaaggcauugaa

SEQ ID NO: 2753736 - RNA, 19 nt, Artificial Sequence
  Description of Artificial Sequence: Synthetic oligonucleotide
agcaaagccucuucuguuc

SEQ ID NO: 2753737 - RNA, 19 nt, Artificial Sequence
  Description of Artificial Sequence: Synthetic oligonucleotide
cuuuauucgcgacucugcc

SEQ ID NO: 2753738 - RNA, 19 nt, Artificial Sequence
  Description of Artificial Sequence: Synthetic oligonucleotide
uuauucgcgacucugccuu

SEQ ID NO: 2753739 - RNA, 19 nt, Artificial Sequence
  Description of Artificial Sequence: Synthetic oligonucleotide
cagcauuacagucagcaug

SEQ ID NO: 2753740 - RNA, 19 nt, Artificial Sequence
  Description of Artificial Sequence: Synthetic oligonucleotide
ggcagggucuaauaaaggg

SEQ ID NO: 2753741 - RNA, 19 nt, Artificial Sequence
  Description of Artificial Sequence: Synthetic oligonucleotide
aauucugggaacagggccu

SEQ ID NO: 2753742 - RNA, 19 nt, Artificial Sequence
  Description of Artificial Sequence: Synthetic oligonucleotide
aacagggccuggucaggcc

SEQ ID NO: 2753743 - RNA, 19 nt, Artificial Sequence
  Description of Artificial Sequence: Synthetic oligonucleotide
auaaagggcccacacguga

SEQ ID NO: 2753744 - RNA, 19 nt, Artificial Sequence
  Description of Artificial Sequence: Synthetic oligonucleotide
ucugccuuugcccaacauc

SEQ ID NO: 2753745 - RNA, 19 nt, Artificial Sequence
  Description of Artificial Sequence: Synthetic oligonucleotide
uacacagcgacgcggagaa

SEQ ID NO: 2753746 - RNA, 19 nt, Artificial Sequence
  Description of Artificial Sequence: Synthetic oligonucleotide
ugugcccugagcuuauaug

SEQ ID NO: 2753747 - RNA, 19 nt, Artificial Sequence
  Description of Artificial Sequence: Synthetic oligonucleotide
agacaggacucgugcagcc

SEQ ID NO: 2753748 - RNA, 19 nt, Artificial Sequence
  Description of Artificial Sequence: Synthetic oligonucleotide
agucucgcgauucugugca

SEQ ID NO: 2753749 - RNA, 19 nt, Artificial Sequence
  Description of Artificial Sequence: Synthetic oligonucleotide
auuacagucagcaugccuu

SEQ ID NO: 2753750 - RNA, 19 nt, Artificial Sequence
  Description of Artificial Sequence: Synthetic oligonucleotide
aacauccauugauuaggug

SEQ ID NO: 2753751 - RNA, 19 nt, Artificial Sequence
  Description of Artificial Sequence: Synthetic oligonucleotide
gagcuuauauggcaggguc

SEQ ID NO: 2753752 - RNA, 19 nt, Artificial Sequence
  Description of Artificial Sequence: Synthetic oligonucleotide
uuuauucgcgacucugccu

SEQ ID NO: 2753753 - RNA, 19 nt, Artificial Sequence
  Description of Artificial Sequence: Synthetic oligonucleotide
cauucagacuuagaccugg

SEQ ID NO: 2753754 - RNA, 19 nt, Artificial Sequence
  Description of Artificial Sequence: Synthetic oligonucleotide
ugcaucuagcaccuccgcc

SEQ ID NO: 2753755 - RNA, 19 nt, Artificial Sequence
  Description of Artificial Sequence: Synthetic oligonucleotide
ucccagacaggacucgugc

SEQ ID NO: 2753756 - RNA, 19 nt, Artificial Sequence
  Description of Artificial Sequence: Synthetic oligonucleotide
acggaucgcagcaagguac

SEQ ID NO: 2753757 - RNA, 19 nt, Artificial Sequence
  Description of Artificial Sequence: Synthetic oligonucleotide
gauucguggcaguacccag

SEQ ID NO: 2753758 - RNA, 19 nt, Artificial Sequence
  Description of Artificial Sequence: Synthetic oligonucleotide
agaacgagucucgcgauuc

SEQ ID NO: 2753759 - RNA, 19 nt, Artificial Sequence
  Description of Artificial Sequence: Synthetic oligonucleotide
ugccaagcgcaucuggacc

SEQ ID NO: 2753760 - RNA, 19 nt, Artificial Sequence
  Description of Artificial Sequence: Synthetic oligonucleotide
cagggcacagcucagcagc

SEQ ID NO: 2753761 - RNA, 19 nt, Artificial Sequence
  Description of Artificial Sequence: Synthetic oligonucleotide
uggcagggucuaauaaagg

SEQ ID NO: 2753762 - RNA, 19 nt, Artificial Sequence
  Description of Artificial Sequence: Synthetic oligonucleotide
cacagcgacgcggagaacg

SEQ ID NO: 2753763 - RNA, 19 nt, Artificial Sequence
  Description of Artificial Sequence: Synthetic oligonucleotide
agcaagguacuugcugucc

SEQ ID NO: 2753764 - RNA, 19 nt, Artificial Sequence
  Description of Artificial Sequence: Synthetic oligonucleotide
uucugugcaucuagcaccu

SEQ ID NO: 2753765 - RNA, 19 nt, Artificial Sequence
  Description of Artificial Sequence: Synthetic oligonucleotide
agcaaaaggcauugaagaa

SEQ ID NO: 2753766 - RNA, 19 nt, Artificial Sequence
  Description of Artificial Sequence: Synthetic oligonucleotide
ugcagcaaagccucuucug

SEQ ID NO: 2753767 - RNA, 19 nt, Artificial Sequence
  Description of Artificial Sequence: Synthetic oligonucleotide
aauaaagggcccacacgug

SEQ ID NO: 2753768 - RNA, 19 nt, Artificial Sequence
  Description of Artificial Sequence: Synthetic oligonucleotide
ugcugauccuugccuaaag

SEQ ID NO: 2753769 - RNA, 19 nt, Artificial Sequence
  Description of Artificial Sequence: Synthetic oligonucleotide
uauauggcagggucuaaua

SEQ ID NO: 2753770 - RNA, 19 nt, Artificial Sequence
  Description of Artificial Sequence: Synthetic oligonucleotide
auggcagggucuaauaaag

SEQ ID NO: 2753771 - RNA, 19 nt, Artificial Sequence
  Description of Artificial Sequence: Synthetic oligonucleotide
cugugcaucuagcaccucc

SEQ ID NO: 2753772 - RNA, 19 nt, Artificial Sequence
  Description of Artificial Sequence: Synthetic oligonucleotide
ccaacauccauugauuagg

SEQ ID NO: 2753773 - RNA, 19 nt, Artificial Sequence
  Description of Artificial Sequence: Synthetic oligonucleotide
uucagacuuagaccuggga

SEQ ID NO: 2753774 - RNA, 19 nt, Artificial Sequence
  Description of Artificial Sequence: Synthetic oligonucleotide
uccaggggugccaagcgca

SEQ ID NO: 2753775 - RNA, 19 nt, Artificial Sequence
  Description of Artificial Sequence: Synthetic oligonucleotide
cuugccuaaagaguugcug

SEQ ID NO: 2753776 - RNA, 19 nt, Artificial Sequence
  Description of Artificial Sequence: Synthetic oligonucleotide
uaaagggcccacacgugac

SEQ ID NO: 2753777 - RNA, 19 nt, Artificial Sequence
  Description of Artificial Sequence: Synthetic oligonucleotide
aaagccucuucuguucugu

SEQ ID NO: 2753778 - RNA, 19 nt, Artificial Sequence
  Description of Artificial Sequence: Synthetic oligonucleotide
auucguggcaguacccagc

SEQ ID NO: 2753779 - RNA, 19 nt, Artificial Sequence
  Description of Artificial Sequence: Synthetic oligonucleotide
cuaaagaguugcuggccac

SEQ ID NO: 2753780 - RNA, 19 nt, Artificial Sequence
  Description of Artificial Sequence: Synthetic oligonucleotide
uucguggcaguacccagcu

SEQ ID NO: 2753781 - RNA, 19 nt, Artificial Sequence
  Description of Artificial Sequence: Synthetic oligonucleotide
auauggcagggucuaauaa

SEQ ID NO: 2753782 - RNA, 19 nt, Artificial Sequence
  Description of Artificial Sequence: Synthetic oligonucleotide
agaccugggaauucuggga

SEQ ID NO: 2753783 - RNA, 19 nt, Artificial Sequence
  Description of Artificial Sequence: Synthetic oligonucleotide
caguuguccucuucgggcc

SEQ ID NO: 2753784 - RNA, 19 nt, Artificial Sequence
  Description of Artificial Sequence: Synthetic oligonucleotide
agcucagcagcauuacagu

SEQ ID NO: 2753785 - RNA, 19 nt, Artificial Sequence
  Description of Artificial Sequence: Synthetic oligonucleotide
cucagcagcauuacaguca

SEQ ID NO: 2753786 - RNA, 19 nt, Artificial Sequence
  Description of Artificial Sequence: Synthetic oligonucleotide
aaagggcccacacgugacu

SEQ ID NO: 2753787 - RNA, 19 nt, Artificial Sequence
  Description of Artificial Sequence: Synthetic oligonucleotide
uugcggcaguagcaaaagg

SEQ ID NO: 2753788 - RNA, 19 nt, Artificial Sequence
  Description of Artificial Sequence: Synthetic oligonucleotide
aagguacuugcugucccag

SEQ ID NO: 2753789 - RNA, 19 nt, Artificial Sequence
  Description of Artificial Sequence: Synthetic oligonucleotide
cauugauuaggugcggcug

SEQ ID NO: 2753790 - RNA, 19 nt, Artificial Sequence
  Description of Artificial Sequence: Synthetic oligonucleotide
gauuaggugcggcugcaga

SEQ ID NO: 2753791 - RNA, 19 nt, Artificial Sequence
  Description of Artificial Sequence: Synthetic oligonucleotide
cugagcuuauauggcaggg

SEQ ID NO: 2753792 - RNA, 19 nt, Artificial Sequence
  Description of Artificial Sequence: Synthetic oligonucleotide
uccgccaacgcuucugccu

SEQ ID NO: 2753793 - RNA, 19 nt, Artificial Sequence
  Description of Artificial Sequence: Synthetic oligonucleotide
ugcagccguacacagcgac

SEQ ID NO: 2753794 - RNA, 19 nt, Artificial Sequence
  Description of Artificial Sequence: Synthetic oligonucleotide
gggccauucagacuuagac

SEQ ID NO: 2753795 - RNA, 19 nt, Artificial Sequence
  Description of Artificial Sequence: Synthetic oligonucleotide
cucuucgggccauucagac

SEQ ID NO: 2753796 - RNA, 19 nt, Artificial Sequence
  Description of Artificial Sequence: Synthetic oligonucleotide
ggccauucagacuuagacc

SEQ ID NO: 2753797 - RNA, 19 nt, Artificial Sequence
  Description of Artificial Sequence: Synthetic oligonucleotide
uugcuggccacuugugccc

SEQ ID NO: 2753798 - RNA, 19 nt, Artificial Sequence
  Description of Artificial Sequence: Synthetic oligonucleotide
uuauauggcagggucuaau

SEQ ID NO: 2753799 - RNA, 19 nt, Artificial Sequence
  Description of Artificial Sequence: Synthetic oligonucleotide
uccuugccuaaagaguugc

SEQ ID NO: 2753800 - RNA, 19 nt, Artificial Sequence
  Description of Artificial Sequence: Synthetic oligonucleotide
cuuccaggggugccaagcg

SEQ ID NO: 2753801 - RNA, 19 nt, Artificial Sequence
  Description of Artificial Sequence: Synthetic oligonucleotide
ugggaggcaaugccagcag

SEQ ID NO: 2753802 - RNA, 19 nt, Artificial Sequence
  Description of Artificial Sequence: Synthetic oligonucleotide
gagucucgcgauucugugc

SEQ ID NO: 2753803 - RNA, 19 nt, Artificial Sequence
  Description of Artificial Sequence: Synthetic oligonucleotide
caacgcuucugccuucugc

SEQ ID NO: 2753804 - RNA, 19 nt, Artificial Sequence
  Description of Artificial Sequence: Synthetic oligonucleotide
uuggucccguccuuuauuc

SEQ ID NO: 2753805 - RNA, 19 nt, Artificial Sequence
  Description of Artificial Sequence: Synthetic oligonucleotide
gcaguuguccucuucgggc

SEQ ID NO: 2753806 - RNA, 19 nt, Artificial Sequence
  Description of Artificial Sequence: Synthetic oligonucleotide
uccauugauuaggugcggc

SEQ ID NO: 2753807 - RNA, 19 nt, Artificial Sequence
  Description of Artificial Sequence: Synthetic oligonucleotide
agggucuaauaaagggccc

SEQ ID NO: 2753808 - RNA, 19 nt, Artificial Sequence
  Description of Artificial Sequence: Synthetic oligonucleotide
uaaagaguugcuggccacu

SEQ ID NO: 2753809 - RNA, 19 nt, Artificial Sequence
  Description of Artificial Sequence: Synthetic oligonucleotide
gccauucagacuuagaccu

SEQ ID NO: 2753810 - RNA, 19 nt, Artificial Sequence
  Description of Artificial Sequence: Synthetic oligonucleotide
ggcaguacccagcuugcgg

SEQ ID NO: 2753811 - RNA, 19 nt, Artificial Sequence
  Description of Artificial Sequence: Synthetic oligonucleotide
ugagcuuauauggcagggu

SEQ ID NO: 2753812 - RNA, 19 nt, Artificial Sequence
  Description of Artificial Sequence: Synthetic oligonucleotide
agcggcaguagcacguggc

SEQ ID NO: 2753813 - RNA, 19 nt, Artificial Sequence
  Description of Artificial Sequence: Synthetic oligonucleotide
acaggacucgugcagccgu

SEQ ID NO: 2753814 - RNA, 19 nt, Artificial Sequence
  Description of Artificial Sequence: Synthetic oligonucleotide
gguacuugcugucccagac

SEQ ID NO: 2753815 - RNA, 19 nt, Artificial Sequence
  Description of Artificial Sequence: Synthetic oligonucleotide
aacgagucucgcgauucug

SEQ ID NO: 2753816 - RNA, 19 nt, Artificial Sequence
  Description of Artificial Sequence: Synthetic oligonucleotide
aggggugccaagcgcaucu

SEQ ID NO: 2753817 - RNA, 19 nt, Artificial Sequence
  Description of Artificial Sequence: Synthetic oligonucleotide
uuaggugcggcugcagaga

SEQ ID NO: 2753818 - RNA, 19 nt, Artificial Sequence
  Description of Artificial Sequence: Synthetic oligonucleotide
acuuagaccugggaauucu

SEQ ID NO: 2753819 - RNA, 19 nt, Artificial Sequence
  Description of Artificial Sequence: Synthetic oligonucleotide
gacgcggagaacgagucuc

SEQ ID NO: 2753820 - RNA, 19 nt, Artificial Sequence
  Description of Artificial Sequence: Synthetic oligonucleotide
cgugcagccguacacagcg

SEQ ID NO: 2753821 - RNA, 19 nt, Artificial Sequence
  Description of Artificial Sequence: Synthetic oligonucleotide
agggcccacacgugacugc

SEQ ID NO: 2753822 - RNA, 19 nt, Artificial Sequence
  Description of Artificial Sequence: Synthetic oligonucleotide
cucgugcagccguacacag

SEQ ID NO: 2753823 - RNA, 19 nt, Artificial Sequence
  Description of Artificial Sequence: Synthetic oligonucleotide
uggcgcacggaucgcagca

SEQ ID NO: 2753824 - RNA, 19 nt, Artificial Sequence
  Description of Artificial Sequence: Synthetic oligonucleotide
ucuucgggccauucagacu

SEQ ID NO: 2753825 - RNA, 19 nt, Artificial Sequence
  Description of Artificial Sequence: Synthetic oligonucleotide
gcaguacccagcuugcggc

SEQ ID NO: 2753826 - RNA, 19 nt, Artificial Sequence
  Description of Artificial Sequence: Synthetic oligonucleotide
agauucguggcaguaccca

SEQ ID NO: 2753827 - RNA, 19 nt, Artificial Sequence
  Description of Artificial Sequence: Synthetic oligonucleotide
ccuuuauucgcgacucugc

SEQ ID NO: 2753828 - RNA, 19 nt, Artificial Sequence
  Description of Artificial Sequence: Synthetic oligonucleotide
aggccuucugaugccuucc

SEQ ID NO: 2753829 - RNA, 19 nt, Artificial Sequence
  Description of Artificial Sequence: Synthetic oligonucleotide
agcagggcacagcucagca

SEQ ID NO: 2753830 - RNA, 19 nt, Artificial Sequence
  Description of Artificial Sequence: Synthetic oligonucleotide
aaagaguugcuggccacuu

SEQ ID NO: 2753831 - RNA, 19 nt, Artificial Sequence
  Description of Artificial Sequence: Synthetic oligonucleotide
cagccguacacagcgacgc

SEQ ID NO: 2753832 - RNA, 19 nt, Artificial Sequence
  Description of Artificial Sequence: Synthetic oligonucleotide
gcagggucuaauaaagggc

SEQ ID NO: 2753833 - RNA, 19 nt, Artificial Sequence
  Description of Artificial Sequence: Synthetic oligonucleotide
uagcacguggcgcacggau

SEQ ID NO: 2753834 - RNA, 19 nt, Artificial Sequence
  Description of Artificial Sequence: Synthetic oligonucleotide
ggucccguccuuuauucgc

SEQ ID NO: 2753835 - RNA, 19 nt, Artificial Sequence
  Description of Artificial Sequence: Synthetic oligonucleotide
uuacagucagcaugccuuu

SEQ ID NO: 2753836 - RNA, 19 nt, Artificial Sequence
  Description of Artificial Sequence: Synthetic oligonucleotide
gcacguggcgcacggaucg

SEQ ID NO: 2753837 - RNA, 19 nt, Artificial Sequence
  Description of Artificial Sequence: Synthetic oligonucleotide
uucgcgacucugccuuugc

SEQ ID NO: 2753838 - RNA, 19 nt, Artificial Sequence
  Description of Artificial Sequence: Synthetic oligonucleotide
gcaucuagcaccuccgcca

SEQ ID NO: 2753839 - RNA, 19 nt, Artificial Sequence
  Description of Artificial Sequence: Synthetic oligonucleotide
gacaggacucgugcagccg

SEQ ID NO: 2753840 - RNA, 19 nt, Artificial Sequence
  Description of Artificial Sequence: Synthetic oligonucleotide
gauccuugccuaaagaguu

SEQ ID NO: 2753841 - RNA, 19 nt, Artificial Sequence
  Description of Artificial Sequence: Synthetic oligonucleotide
gagauucguggcaguaccc

SEQ ID NO: 2753842 - RNA, 19 nt, Artificial Sequence
  Description of Artificial Sequence: Synthetic oligonucleotide
uguuggucccguccuuuau

SEQ ID NO: 2753843 - RNA, 19 nt, Artificial Sequence
  Description of Artificial Sequence: Synthetic oligonucleotide
uuuuguuggucccguccuu

SEQ ID NO: 2753844 - RNA, 19 nt, Artificial Sequence
  Description of Artificial Sequence: Synthetic oligonucleotide
uugauuaggugcggcugca

SEQ ID NO: 2753845 - RNA, 19 nt, Artificial Sequence
  Description of Artificial Sequence: Synthetic oligonucleotide
cuggucaggccuucugaug

SEQ ID NO: 2753846 - RNA, 19 nt, Artificial Sequence
  Description of Artificial Sequence: Synthetic oligonucleotide
gucccguccuuuauucgcg

SEQ ID NO: 2753847 - RNA, 19 nt, Artificial Sequence
  Description of Artificial Sequence: Synthetic oligonucleotide
cagcgugggaggcaaugcc

SEQ ID NO: 2753848 - RNA, 19 nt, Artificial Sequence
  Description of Artificial Sequence: Synthetic oligonucleotide
auucagacuuagaccuggg

SEQ ID NO: 2753849 - RNA, 19 nt, Artificial Sequence
  Description of Artificial Sequence: Synthetic oligonucleotide
uugugcccugagcuuauau

SEQ ID NO: 2753850 - RNA, 19 nt, Artificial Sequence
  Description of Artificial Sequence: Synthetic oligonucleotide
gcaagguacuugcuguccc

SEQ ID NO: 2753851 - RNA, 19 nt, Artificial Sequence
  Description of Artificial Sequence: Synthetic oligonucleotide
cccaacauccauugauuag

SEQ ID NO: 2753852 - RNA, 19 nt, Artificial Sequence
  Description of Artificial Sequence: Synthetic oligonucleotide
gaacagggccuggucaggc

SEQ ID NO: 2753853 - RNA, 19 nt, Artificial Sequence
  Description of Artificial Sequence: Synthetic oligonucleotide
cugcagagauucguggcag

SEQ ID NO: 2753854 - RNA, 19 nt, Artificial Sequence
  Description of Artificial Sequence: Synthetic oligonucleotide
ucgugcagccguacacagc

SEQ ID NO: 2753855 - RNA, 19 nt, Artificial Sequence
  Description of Artificial Sequence: Synthetic oligonucleotide
agcuuauauggcagggucu

SEQ ID NO: 2753856 - RNA, 19 nt, Artificial Sequence
  Description of Artificial Sequence: Synthetic oligonucleotide
ugauuaggugcggcugcag

SEQ ID NO: 2753857 - RNA, 19 nt, Artificial Sequence
  Description of Artificial Sequence: Synthetic oligonucleotide
gugccaagcgcaucuggac

SEQ ID NO: 2753858 - RNA, 19 nt, Artificial Sequence
  Description of Artificial Sequence: Synthetic oligonucleotide
gcaguagcaaaaggcauug

SEQ ID NO: 2753859 - RNA, 19 nt, Artificial Sequence
  Description of Artificial Sequence: Synthetic oligonucleotide
ggugcggcugcagagauuc

SEQ ID NO: 2753860 - RNA, 19 nt, Artificial Sequence
  Description of Artificial Sequence: Synthetic oligonucleotide
uaggugcggcugcagagau

SEQ ID NO: 2753861 - RNA, 19 nt, Artificial Sequence
  Description of Artificial Sequence: Synthetic oligonucleotide
cagacuuagaccugggaau

SEQ ID NO: 2753862 - RNA, 19 nt, Artificial Sequence
  Description of Artificial Sequence: Synthetic oligonucleotide
ucgcgacucugccuuugcc

SEQ ID NO: 2753863 - RNA, 19 nt, Artificial Sequence
  Description of Artificial Sequence: Synthetic oligonucleotide
ccugagcuuauauggcagg

SEQ ID NO: 2753864 - RNA, 19 nt, Artificial Sequence
  Description of Artificial Sequence: Synthetic oligonucleotide
ugcagagauucguggcagu

SEQ ID NO: 2753865 - RNA, 19 nt, Artificial Sequence
  Description of Artificial Sequence: Synthetic oligonucleotide
ugcggcugcagagauucgu

SEQ ID NO: 2753866 - RNA, 19 nt, Artificial Sequence
  Description of Artificial Sequence: Synthetic oligonucleotide
cagagauucguggcaguac

SEQ ID NO: 2753867 - RNA, 19 nt, Artificial Sequence
  Description of Artificial Sequence: Synthetic oligonucleotide
agacuuagaccugggaauu

SEQ ID NO: 2753868 - RNA, 19 nt, Artificial Sequence
  Description of Artificial Sequence: Synthetic oligonucleotide
ggcugcagagauucguggc

SEQ ID NO: 2753869 - RNA, 19 nt, Artificial Sequence
  Description of Artificial Sequence: Synthetic oligonucleotide
ucugggaacagggccuggu

SEQ ID NO: 2753870 - RNA, 19 nt, Artificial Sequence
  Description of Artificial Sequence: Synthetic oligonucleotide
auccauugauuaggugcgg

SEQ ID NO: 2753871 - RNA, 19 nt, Artificial Sequence
  Description of Artificial Sequence: Synthetic oligonucleotide
agccguacacagcgacgcg

SEQ ID NO: 2753872 - RNA, 19 nt, Artificial Sequence
  Description of Artificial Sequence: Synthetic oligonucleotide
uagcaccuccgccaacgcu

SEQ ID NO: 2753873 - RNA, 19 nt, Artificial Sequence
  Description of Artificial Sequence: Synthetic oligonucleotide
acgcuucugccuucugcag

SEQ ID NO: 2753874 - RNA, 19 nt, Artificial Sequence
  Description of Artificial Sequence: Synthetic oligonucleotide
cuucgggccauucagacuu

SEQ ID NO: 2753875 - RNA, 19 nt, Artificial Sequence
  Description of Artificial Sequence: Synthetic oligonucleotide
aguuguccucuucgggcca

SEQ ID NO: 2753876 - RNA, 19 nt, Artificial Sequence
  Description of Artificial Sequence: Synthetic oligonucleotide
agggcuugaggggcccucc

SEQ ID NO: 2753877 - RNA, 19 nt, Artificial Sequence
  Description of Artificial Sequence: Synthetic oligonucleotide
ggcaguagcacguggcgca

SEQ ID NO: 2753878 - RNA, 19 nt, Artificial Sequence
  Description of Artificial Sequence: Synthetic oligonucleotide
acucgugcagccguacaca

SEQ ID NO: 2753879 - RNA, 19 nt, Artificial Sequence
  Description of Artificial Sequence: Synthetic oligonucleotide
cugggaauucugggaacag

SEQ ID NO: 2753880 - RNA, 19 nt, Artificial Sequence
  Description of Artificial Sequence: Synthetic oligonucleotide
agguacuugcugucccaga

SEQ ID NO: 2753881 - RNA, 19 nt, Artificial Sequence
  Description of Artificial Sequence: Synthetic oligonucleotide
uggcaguacccagcuugcg

SEQ ID NO: 2753882 - RNA, 19 nt, Artificial Sequence
  Description of Artificial Sequence: Synthetic oligonucleotide
cauugaagaagcggcagua

SEQ ID NO: 2753883 - RNA, 19 nt, Artificial Sequence
  Description of Artificial Sequence: Synthetic oligonucleotide
gcggagaacgagucucgcg

SEQ ID NO: 2753884 - RNA, 19 nt, Artificial Sequence
  Description of Artificial Sequence: Synthetic oligonucleotide
cagcaagguacuugcuguc

SEQ ID NO: 2753885 - RNA, 19 nt, Artificial Sequence
  Description of Artificial Sequence: Synthetic oligonucleotide
cuugcugauccuugccuaa

SEQ ID NO: 2753886 - RNA, 19 nt, Artificial Sequence
  Description of Artificial Sequence: Synthetic oligonucleotide
gugcaucuagcaccuccgc

SEQ ID NO: 2753887 - RNA, 19 nt, Artificial Sequence
  Description of Artificial Sequence: Synthetic oligonucleotide
aggacucgugcagccguac

SEQ ID NO: 2753888 - RNA, 19 nt, Artificial Sequence
  Description of Artificial Sequence: Synthetic oligonucleotide
uuguuggucccguccuuua

SEQ ID NO: 2753889 - RNA, 19 nt, Artificial Sequence
  Description of Artificial Sequence: Synthetic oligonucleotide
gacuuagaccugggaauuc

SEQ ID NO: 2753890 - RNA, 19 nt, Artificial Sequence
  Description of Artificial Sequence: Synthetic oligonucleotide
cuucuguucugucugcagu

SEQ ID NO: 2753891 - RNA, 19 nt, Artificial Sequence
  Description of Artificial Sequence: Synthetic oligonucleotide
agcaccuccgccaacgcuu

SEQ ID NO: 2753892 - RNA, 19 nt, Artificial Sequence
  Description of Artificial Sequence: Synthetic oligonucleotide
agcacguggcgcacggauc

SEQ ID NO: 2753893 - RNA, 19 nt, Artificial Sequence
  Description of Artificial Sequence: Synthetic oligonucleotide
gcggcaguagcacguggcg

SEQ ID NO: 2753894 - RNA, 19 nt, Artificial Sequence
  Description of Artificial Sequence: Synthetic oligonucleotide
gccacuugugcccugagcu

SEQ ID NO: 2753895 - RNA, 19 nt, Artificial Sequence
  Description of Artificial Sequence: Synthetic oligonucleotide
cacacgugacugcuuccug

SEQ ID NO: 2753896 - RNA, 19 nt, Artificial Sequence
  Description of Artificial Sequence: Synthetic oligonucleotide
cccugagcuuauauggcag

SEQ ID NO: 2753897 - RNA, 19 nt, Artificial Sequence
  Description of Artificial Sequence: Synthetic oligonucleotide
ucucgcgauucugugcauc

SEQ ID NO: 2753898 - RNA, 19 nt, Artificial Sequence
  Description of Artificial Sequence: Synthetic oligonucleotide
cacagcucagcagcauuac

SEQ ID NO: 2753899 - RNA, 19 nt, Artificial Sequence
  Description of Artificial Sequence: Synthetic oligonucleotide
gaguugcuggccacuugug

SEQ ID NO: 2753900 - RNA, 19 nt, Artificial Sequence
  Description of Artificial Sequence: Synthetic oligonucleotide
gugggaggcaaugccagca

SEQ ID NO: 2753901 - RNA, 19 nt, Artificial Sequence
  Description of Artificial Sequence: Synthetic oligonucleotide
acgagucucgcgauucugu

SEQ ID NO: 2753902 - RNA, 19 nt, Artificial Sequence
  Description of Artificial Sequence: Synthetic oligonucleotide
ucccguccuuuauucgcga

SEQ ID NO: 2753903 - RNA, 19 nt, Artificial Sequence
  Description of Artificial Sequence: Synthetic oligonucleotide
aggcauugaagaagcggca

SEQ ID NO: 2753904 - RNA, 19 nt, Artificial Sequence
  Description of Artificial Sequence: Synthetic oligonucleotide
guacacagcgacgcggaga

SEQ ID NO: 2753905 - RNA, 19 nt, Artificial Sequence
  Description of Artificial Sequence: Synthetic oligonucleotide
gcucagcagcauuacaguc

SEQ ID NO: 2753906 - RNA, 19 nt, Artificial Sequence
  Description of Artificial Sequence: Synthetic oligonucleotide
gucuaauaaagggcccaca

SEQ ID NO: 2753907 - RNA, 19 nt, Artificial Sequence
  Description of Artificial Sequence: Synthetic oligonucleotide
gcagcaagguacuugcugu

SEQ ID NO: 2753908 - RNA, 19 nt, Artificial Sequence
  Description of Artificial Sequence: Synthetic oligonucleotide
agcgugggaggcaaugcca

SEQ ID NO: 2753909 - RNA, 19 nt, Artificial Sequence
  Description of Artificial Sequence: Synthetic oligonucleotide
ccuaaagaguugcuggcca

SEQ ID NO: 2753910 - RNA, 19 nt, Artificial Sequence
  Description of Artificial Sequence: Synthetic oligonucleotide
auccuugccuaaagaguug

SEQ ID NO: 2753911 - RNA, 19 nt, Artificial Sequence
  Description of Artificial Sequence: Synthetic oligonucleotide
cauuacagucagcaugccu

SEQ ID NO: 2753912 - RNA, 19 nt, Artificial Sequence
  Description of Artificial Sequence: Synthetic oligonucleotide
ucgggccauucagacuuag

SEQ ID NO: 2753913 - RNA, 19 nt, Artificial Sequence
  Description of Artificial Sequence: Synthetic oligonucleotide
agcgacgcggagaacgagu

SEQ ID NO: 2753914 - RNA, 19 nt, Artificial Sequence
  Description of Artificial Sequence: Synthetic oligonucleotide
ggucuaauaaagggcccac

SEQ ID NO: 2753915 - RNA, 19 nt, Artificial Sequence
  Description of Artificial Sequence: Synthetic oligonucleotide
uugcugauccuugccuaaa

SEQ ID NO: 2753916 - RNA, 19 nt, Artificial Sequence
  Description of Artificial Sequence: Synthetic oligonucleotide
acgcggagaacgagucucg

SEQ ID NO: 2753917 - RNA, 19 nt, Artificial Sequence
  Description of Artificial Sequence: Synthetic oligonucleotide
auucgcgacucugccuuug

SEQ ID NO: 2753918 - RNA, 19 nt, Artificial Sequence
  Description of Artificial Sequence: Synthetic oligonucleotide
gccguacacagcgacgcgg

SEQ ID NO: 2753919 - RNA, 19 nt, Artificial Sequence
  Description of Artificial Sequence: Synthetic oligonucleotide
caacauccauugauuaggu

SEQ ID NO: 2753920 - RNA, 19 nt, Artificial Sequence
  Description of Artificial Sequence: Synthetic oligonucleotide
ucgcagcaagguacuugcu

SEQ ID NO: 2753921 - RNA, 19 nt, Artificial Sequence
  Description of Artificial Sequence: Synthetic oligonucleotide
uggccacuugugcccugag

SEQ ID NO: 2753922 - RNA, 19 nt, Artificial Sequence
  Description of Artificial Sequence: Synthetic oligonucleotide
gcgacucugccuuugccca

SEQ ID NO: 2753923 - RNA, 19 nt, Artificial Sequence
  Description of Artificial Sequence: Synthetic oligonucleotide
gccuaaagaguugcuggcc

SEQ ID NO: 2753924 - RNA, 19 nt, Artificial Sequence
  Description of Artificial Sequence: Synthetic oligonucleotide
gcggcaguagcaaaaggca

SEQ ID NO: 2753925 - RNA, 19 nt, Artificial Sequence
  Description of Artificial Sequence: Synthetic oligonucleotide
caaugccagcagcagggca

SEQ ID NO: 2753926 - RNA, 19 nt, Artificial Sequence
  Description of Artificial Sequence: Synthetic oligonucleotide
ggaggcaaugccagcagca

SEQ ID NO: 2753927 - RNA, 19 nt, Artificial Sequence
  Description of Artificial Sequence: Synthetic oligonucleotide
cuccgccaacgcuucugcc

SEQ ID NO: 2753928 - RNA, 19 nt, Artificial Sequence
  Description of Artificial Sequence: Synthetic oligonucleotide
gggucuaauaaagggccca

SEQ ID NO: 2753929 - RNA, 19 nt, Artificial Sequence
  Description of Artificial Sequence: Synthetic oligonucleotide
accuccgccaacgcuucug

SEQ ID NO: 2753930 - RNA, 19 nt, Artificial Sequence
  Description of Artificial Sequence: Synthetic oligonucleotide
agcuugcggcaguagcaaa

SEQ ID NO: 2753931 - RNA, 19 nt, Artificial Sequence
  Description of Artificial Sequence: Synthetic oligonucleotide
cgcgacucugccuuugccc

SEQ ID NO: 2753932 - RNA, 19 nt, Artificial Sequence
  Description of Artificial Sequence: Synthetic oligonucleotide
acagcgacgcggagaacga

SEQ ID NO: 2753933 - RNA, 19 nt, Artificial Sequence
  Description of Artificial Sequence: Synthetic oligonucleotide
gcuuauauggcagggucua

SEQ ID NO: 2753934 - RNA, 19 nt, Artificial Sequence
  Description of Artificial Sequence: Synthetic oligonucleotide
cgcgauucugugcaucuag

SEQ ID NO: 2753935 - RNA, 19 nt, Artificial Sequence
  Description of Artificial Sequence: Synthetic oligonucleotide
cucgcgauucugugcaucu

SEQ ID NO: 2753936 - RNA, 19 nt, Artificial Sequence
  Description of Artificial Sequence: Synthetic oligonucleotide
gcagccguacacagcgacg

SEQ ID NO: 2753937 - RNA, 19 nt, Artificial Sequence
  Description of Artificial Sequence: Synthetic oligonucleotide
gaacgagucucgcgauucu

SEQ ID NO: 2753938 - RNA, 19 nt, Artificial Sequence
  Description of Artificial Sequence: Synthetic oligonucleotide
gucccagacaggacucgug

SEQ ID NO: 2753939 - RNA, 19 nt, Artificial Sequence
  Description of Artificial Sequence: Synthetic oligonucleotide
ggugccaagcgcaucugga

SEQ ID NO: 2753940 - RNA, 19 nt, Artificial Sequence
  Description of Artificial Sequence: Synthetic oligonucleotide
uauucgcgacucugccuuu

SEQ ID NO: 2753941 - RNA, 19 nt, Artificial Sequence
  Description of Artificial Sequence: Synthetic oligonucleotide
gcgauucugugcaucuagc

SEQ ID NO: 2753942 - RNA, 19 nt, Artificial Sequence
  Description of Artificial Sequence: Synthetic oligonucleotide
caguagcacguggcgcacg

SEQ ID NO: 2753943 - RNA, 19 nt, Artificial Sequence
  Description of Artificial Sequence: Synthetic oligonucleotide
caugccuuugcuugcugau

SEQ ID NO: 2753944 - RNA, 19 nt, Artificial Sequence
  Description of Artificial Sequence: Synthetic oligonucleotide
ugacugcuuccugcagcca

SEQ ID NO: 2753945 - RNA, 19 nt, Artificial Sequence
  Description of Artificial Sequence: Synthetic oligonucleotide
gcgugggaggcaaugccag

SEQ ID NO: 2753946 - RNA, 19 nt, Artificial Sequence
  Description of Artificial Sequence: Synthetic oligonucleotide
gcuugcugauccuugccua

SEQ ID NO: 2753947 - RNA, 19 nt, Artificial Sequence
  Description of Artificial Sequence: Synthetic oligonucleotide
cacuugugcccugagcuua

SEQ ID NO: 2753948 - RNA, 19 nt, Artificial Sequence
  Description of Artificial Sequence: Synthetic oligonucleotide
gcccacacgugacugcuuc

SEQ ID NO: 2753949 - RNA, 19 nt, Artificial Sequence
  Description of Artificial Sequence: Synthetic oligonucleotide
cugucugcaguuguccucu

SEQ ID NO: 2753950 - RNA, 19 nt, Artificial Sequence
  Description of Artificial Sequence: Synthetic oligonucleotide
cggagaacgagucucgcga

SEQ ID NO: 2753951 - RNA, 19 nt, Artificial Sequence
  Description of Artificial Sequence: Synthetic oligonucleotide
uucgggccauucagacuua

SEQ ID NO: 2753952 - RNA, 19 nt, Artificial Sequence
  Description of Artificial Sequence: Synthetic oligonucleotide
cacggaucgcagcaaggua

SEQ ID NO: 2753953 - RNA, 19 nt, Artificial Sequence
  Description of Artificial Sequence: Synthetic oligonucleotide
cuuauauggcagggucuaa

SEQ ID NO: 2753954 - RNA, 19 nt, Artificial Sequence
  Description of Artificial Sequence: Synthetic oligonucleotide
guuggucccguccuuuauu

SEQ ID NO: 2753955 - RNA, 19 nt, Artificial Sequence
  Description of Artificial Sequence: Synthetic oligonucleotide
gcccaacauccauugauua

SEQ ID NO: 2753956 - RNA, 19 nt, Artificial Sequence
  Description of Artificial Sequence: Synthetic oligonucleotide
gagaacgagucucgcgauu

SEQ ID NO: 2753957 - RNA, 19 nt, Artificial Sequence
  Description of Artificial Sequence: Synthetic oligonucleotide
ccuccgccaacgcuucugc

SEQ ID NO: 2753958 - RNA, 19 nt, Artificial Sequence
  Description of Artificial Sequence: Synthetic oligonucleotide
cguccuuuauucgcgacuc

SEQ ID NO: 2753959 - RNA, 19 nt, Artificial Sequence
  Description of Artificial Sequence: Synthetic oligonucleotide
gcgcacggaucgcagcaag

SEQ ID NO: 2753960 - RNA, 19 nt, Artificial Sequence
  Description of Artificial Sequence: Synthetic oligonucleotide
cgagucucgcgauucugug

SEQ ID NO: 2753961 - RNA, 19 nt, Artificial Sequence
  Description of Artificial Sequence: Synthetic oligonucleotide
cgauucugugcaucuagca

SEQ ID NO: 2753962 - RNA, 19 nt, Artificial Sequence
  Description of Artificial Sequence: Synthetic oligonucleotide
gccuggucaggccuucuga

SEQ ID NO: 2753963 - RNA, 19 nt, Artificial Sequence
  Description of Artificial Sequence: Synthetic oligonucleotide
ugccuuccaggggugccaa

SEQ ID NO: 2753964 - RNA, 19 nt, Artificial Sequence
  Description of Artificial Sequence: Synthetic oligonucleotide
acuugugcccugagcuuau

SEQ ID NO: 2753965 - RNA, 19 nt, Artificial Sequence
  Description of Artificial Sequence: Synthetic oligonucleotide
agggcacagcucagcagca

SEQ ID NO: 2753966 - RNA, 19 nt, Artificial Sequence
  Description of Artificial Sequence: Synthetic oligonucleotide
ucgcgauucugugcaucua

SEQ ID NO: 2753967 - RNA, 19 nt, Artificial Sequence
  Description of Artificial Sequence: Synthetic oligonucleotide
cugcagcaaagccucuucu

SEQ ID NO: 2753968 - RNA, 19 nt, Artificial Sequence
  Description of Artificial Sequence: Synthetic oligonucleotide
acacagcgacgcggagaac

SEQ ID NO: 2753969 - RNA, 19 nt, Artificial Sequence
  Description of Artificial Sequence: Synthetic oligonucleotide
acguggcgcacggaucgca

SEQ ID NO: 2753970 - RNA, 19 nt, Artificial Sequence
  Description of Artificial Sequence: Synthetic oligonucleotide
uacccagcuugcggcagua

SEQ ID NO: 2753971 - RNA, 19 nt, Artificial Sequence
  Description of Artificial Sequence: Synthetic oligonucleotide
gcugucccagacaggacuc

SEQ ID NO: 2753972 - RNA, 19 nt, Artificial Sequence
  Description of Artificial Sequence: Synthetic oligonucleotide
cagcuugcggcaguagcaa

SEQ ID NO: 2753973 - RNA, 19 nt, Artificial Sequence
  Description of Artificial Sequence: Synthetic oligonucleotide
cagcgacgcggagaacgag

SEQ ID NO: 2753974 - RNA, 19 nt, Artificial Sequence
  Description of Artificial Sequence: Synthetic oligonucleotide
cgcacggaucgcagcaagg

SEQ ID NO: 2753975 - RNA, 19 nt, Artificial Sequence
  Description of Artificial Sequence: Synthetic oligonucleotide
gcuugcggcaguagcaaaa

SEQ ID NO: 2753976 - RNA, 19 nt, Artificial Sequence
  Description of Artificial Sequence: Synthetic oligonucleotide
cccacacgugacugcuucc

SEQ ID NO: 2753977 - RNA, 19 nt, Artificial Sequence
  Description of Artificial Sequence: Synthetic oligonucleotide
gcaaugccagcagcagggc

SEQ ID NO: 2753978 - RNA, 19 nt, Artificial Sequence
  Description of Artificial Sequence: Synthetic oligonucleotide
cagcaaagccucuucuguu

SEQ ID NO: 2753979 - RNA, 19 nt, Artificial Sequence
  Description of Artificial Sequence: Synthetic oligonucleotide
gcauuacagucagcaugcc

SEQ ID NO: 2753980 - RNA, 19 nt, Artificial Sequence
  Description of Artificial Sequence: Synthetic oligonucleotide
ucugugcaucuagcaccuc

SEQ ID NO: 2753981 - RNA, 19 nt, Artificial Sequence
  Description of Artificial Sequence: Synthetic oligonucleotide
ucguggcaguacccagcuu

SEQ ID NO: 2753982 - RNA, 19 nt, Artificial Sequence
  Description of Artificial Sequence: Synthetic oligonucleotide
cacguggcgcacggaucgc

SEQ ID NO: 2753983 - RNA, 19 nt, Artificial Sequence
  Description of Artificial Sequence: Synthetic oligonucleotide
ccauugauuaggugcggcu

SEQ ID NO: 2753984 - RNA, 19 nt, Artificial Sequence
  Description of Artificial Sequence: Synthetic oligonucleotide
caguagcaaaaggcauuga

SEQ ID NO: 2753985 - RNA, 19 nt, Artificial Sequence
  Description of Artificial Sequence: Synthetic oligonucleotide
ggccuucugaugccuucca

SEQ ID NO: 2753986 - RNA, 19 nt, Artificial Sequence
  Description of Artificial Sequence: Synthetic oligonucleotide
ggcaguagcaaaaggcauu

SEQ ID NO: 2753987 - RNA, 19 nt, Artificial Sequence
  Description of Artificial Sequence: Synthetic oligonucleotide
guccuuuauucgcgacucu

SEQ ID NO: 2753988 - RNA, 19 nt, Artificial Sequence
  Description of Artificial Sequence: Synthetic oligonucleotide
gggcuugaggggcccuccc

SEQ ID NO: 2753989 - RNA, 19 nt, Artificial Sequence
  Description of Artificial Sequence: Synthetic oligonucleotide
ccguacacagcgacgcgga

SEQ ID NO: 2753990 - RNA, 19 nt, Artificial Sequence
  Description of Artificial Sequence: Synthetic oligonucleotide
gcgacgcggagaacgaguc

SEQ ID NO: 2753991 - RNA, 19 nt, Artificial Sequence
  Description of Artificial Sequence: Synthetic oligonucleotide
gcagagauucguggcagua

SEQ ID NO: 2753992 - RNA, 19 nt, Artificial Sequence
  Description of Artificial Sequence: Synthetic oligonucleotide
gugcggcugcagagauucg

SEQ ID NO: 2753993 - RNA, 19 nt, Artificial Sequence
  Description of Artificial Sequence: Synthetic oligonucleotide
cgugggaggcaaugccagc

SEQ ID NO: 2753994 - RNA, 19 nt, Artificial Sequence
  Description of Artificial Sequence: Synthetic oligonucleotide
cccguccuuuauucgcgac

SEQ ID NO: 2753995 - RNA, 19 nt, Artificial Sequence
  Description of Artificial Sequence: Synthetic oligonucleotide
ccucuucgggccauucaga

SEQ ID NO: 2753996 - RNA, 19 nt, Artificial Sequence
  Description of Artificial Sequence: Synthetic oligonucleotide
gcagcauuacagucagcau

SEQ ID NO: 2753997 - RNA, 19 nt, Artificial Sequence
  Description of Artificial Sequence: Synthetic oligonucleotide
ggagaacgagucucgcgau

SEQ ID NO: 2753998 - RNA, 19 nt, Artificial Sequence
  Description of Artificial Sequence: Synthetic oligonucleotide
cccagacaggacucgugca

SEQ ID NO: 2753999 - RNA, 19 nt, Artificial Sequence
  Description of Artificial Sequence: Synthetic oligonucleotide
caggggugccaagcgcauc

SEQ ID NO: 2754000 - RNA, 19 nt, Artificial Sequence
  Description of Artificial Sequence: Synthetic oligonucleotide
cguggcgcacggaucgcag

SEQ ID NO: 2754001 - RNA, 19 nt, Artificial Sequence
  Description of Artificial Sequence: Synthetic oligonucleotide
gcacggaucgcagcaaggu

SEQ ID NO: 2754002 - RNA, 19 nt, Artificial Sequence
  Description of Artificial Sequence: Synthetic oligonucleotide
caggacucgugcagccgua

SEQ ID NO: 2754003 - RNA, 19 nt, Artificial Sequence
  Description of Artificial Sequence: Synthetic oligonucleotide
gccuuugcccaacauccau

SEQ ID NO: 2754004 - RNA, 19 nt, Artificial Sequence
  Description of Artificial Sequence: Synthetic oligonucleotide
guagcacguggcgcacgga

SEQ ID NO: 2754005 - RNA, 19 nt, Artificial Sequence
  Description of Artificial Sequence: Synthetic oligonucleotide
gcaguagcacguggcgcac

SEQ ID NO: 2754006 - RNA, 19 nt, Artificial Sequence
  Description of Artificial Sequence: Synthetic oligonucleotide
cguacacagcgacgcggag

SEQ ID NO: 2754007 - RNA, 19 nt, Artificial Sequence
  Description of Artificial Sequence: Synthetic oligonucleotide
ggcacagcucagcagcauu

SEQ ID NO: 2754008 - RNA, 19 nt, Artificial Sequence
  Description of Artificial Sequence: Synthetic oligonucleotide
cggcaguagcacguggcgc

SEQ ID NO: 2754009 - RNA, 19 nt, Artificial Sequence
  Description of Artificial Sequence: Synthetic oligonucleotide
ggggugccaagcgcaucug

SEQ ID NO: 2754010 - RNA, 19 nt, Artificial Sequence
  Description of Artificial Sequence: Synthetic oligonucleotide
ccaacgcuucugccuucug

SEQ ID NO: 2754011 - RNA, 19 nt, Artificial Sequence
  Description of Artificial Sequence: Synthetic oligonucleotide
ggcuugaggggcccucccu

SEQ ID NO: 2754012 - RNA, 19 nt, Artificial Sequence
  Description of Artificial Sequence: Synthetic oligonucleotide
gcuggccacuugugcccug

SEQ ID NO: 2754013 - RNA, 19 nt, Artificial Sequence
  Description of Artificial Sequence: Synthetic oligonucleotide
gugcagccguacacagcga

SEQ ID NO: 2754014 - RNA, 19 nt, Artificial Sequence
  Description of Artificial Sequence: Synthetic oligonucleotide
guuguccucuucgggccau

SEQ ID NO: 2754015 - RNA, 19 nt, Artificial Sequence
  Description of Artificial Sequence: Synthetic oligonucleotide
ccuggucaggccuucugau

SEQ ID NO: 2754016 - RNA, 19 nt, Artificial Sequence
  Description of Artificial Sequence: Synthetic oligonucleotide
ccguccuuuauucgcgacu

SEQ ID NO: 2754017 - RNA, 19 nt, Artificial Sequence
  Description of Artificial Sequence: Synthetic oligonucleotide
ccuuugcccaacauccauu

SEQ ID NO: 2754018 - RNA, 19 nt, Artificial Sequence
  Description of Artificial Sequence: Synthetic oligonucleotide
cucugccuuugcccaacau

SEQ ID NO: 2754019 - RNA, 19 nt, Artificial Sequence
  Description of Artificial Sequence: Synthetic oligonucleotide
cgcggagaacgagucucgc

SEQ ID NO: 2754020 - RNA, 19 nt, Artificial Sequence
  Description of Artificial Sequence: Synthetic oligonucleotide
cuugugcccugagcuuaua

SEQ ID NO: 2754021 - RNA, 19 nt, Artificial Sequence
  Description of Artificial Sequence: Synthetic oligonucleotide
aggugcggcugcagagauu

SEQ ID NO: 2754022 - RNA, 19 nt, Artificial Sequence
  Description of Artificial Sequence: Synthetic oligonucleotide
ccuugccuaaagaguugcu

SEQ ID NO: 2754023 - RNA, 19 nt, Artificial Sequence
  Description of Artificial Sequence: Synthetic oligonucleotide
gucucgcgauucugugcau

SEQ ID NO: 2754024 - RNA, 19 nt, Artificial Sequence
  Description of Artificial Sequence: Synthetic oligonucleotide
gggcccacacgugacugcu

SEQ ID NO: 2754025 - RNA, 19 nt, Artificial Sequence
  Description of Artificial Sequence: Synthetic oligonucleotide
ccacacgugacugcuuccu

SEQ ID NO: 2754026 - RNA, 19 nt, Artificial Sequence
  Description of Artificial Sequence: Synthetic oligonucleotide
ggcgcacggaucgcagcaa

SEQ ID NO: 2754027 - RNA, 19 nt, Artificial Sequence
  Description of Artificial Sequence: Synthetic oligonucleotide
gccaacgcuucugccuucu

SEQ ID NO: 2754028 - RNA, 19 nt, Artificial Sequence
  Description of Artificial Sequence: Synthetic oligonucleotide
cggaucgcagcaagguacu

SEQ ID NO: 2754029 - RNA, 19 nt, Artificial Sequence
  Description of Artificial Sequence: Synthetic oligonucleotide
cggcaguagcaaaaggcau

SEQ ID NO: 2754030 - RNA, 19 nt, Artificial Sequence
  Description of Artificial Sequence: Synthetic oligonucleotide
cagggccuggucaggccuu

SEQ ID NO: 2754031 - RNA, 19 nt, Artificial Sequence
  Description of Artificial Sequence: Synthetic oligonucleotide
ccgccaacgcuucugccuu

SEQ ID NO: 2754032 - RNA, 19 nt, Artificial Sequence
  Description of Artificial Sequence: Synthetic oligonucleotide
cgacucugccuuugcccaa

SEQ ID NO: 2754033 - RNA, 19 nt, Artificial Sequence
  Description of Artificial Sequence: Synthetic oligonucleotide
ccaggggugccaagcgcau

SEQ ID NO: 2754034 - RNA, 19 nt, Artificial Sequence
  Description of Artificial Sequence: Synthetic oligonucleotide
ggaucgcagcaagguacuu

SEQ ID NO: 2754035 - RNA, 19 nt, Artificial Sequence
  Description of Artificial Sequence: Synthetic oligonucleotide
caccuccgccaacgcuucu

SEQ ID NO: 2754036 - RNA, 19 nt, Artificial Sequence
  Description of Artificial Sequence: Synthetic oligonucleotide
cgacgcggagaacgagucu

SEQ ID NO: 2754037 - RNA, 19 nt, Artificial Sequence
  Description of Artificial Sequence: Synthetic oligonucleotide
gggccuggucaggccuucu

SEQ ID NO: 2754038 - RNA, 19 nt, Artificial Sequence
  Description of Artificial Sequence: Synthetic oligonucleotide
ggcccacacgugacugcuu

SEQ ID NO: 2754039 - RNA, 19 nt, Artificial Sequence
  Description of Artificial Sequence: Synthetic oligonucleotide
ccagggcuugaggggcccu

SEQ ID NO: 2754040 - RNA, 19 nt, Artificial Sequence
  Description of Artificial Sequence: Synthetic oligonucleotide
ccccagcgugggaggcaau

SEQ ID NO: 2754041 - RNA, 19 nt, Artificial Sequence
  Description of Artificial Sequence: Synthetic oligonucleotide
ucaguuuucacuuuaguga

SEQ ID NO: 2754042 - RNA, 19 nt, Artificial Sequence
  Description of Artificial Sequence: Synthetic oligonucleotide
aaauaaucggcugccaugc

SEQ ID NO: 2754043 - RNA, 19 nt, Artificial Sequence
  Description of Artificial Sequence: Synthetic oligonucleotide
gaauaaucaaggcaagucc

SEQ ID NO: 2754044 - RNA, 19 nt, Artificial Sequence
  Description of Artificial Sequence: Synthetic oligonucleotide
aaaggcucugcacagugac

SEQ ID NO: 2754045 - RNA, 19 nt, Artificial Sequence
  Description of Artificial Sequence: Synthetic oligonucleotide
aaaauaaucggcugccaug

SEQ ID NO: 2754046 - RNA, 19 nt, Artificial Sequence
  Description of Artificial Sequence: Synthetic oligonucleotide
acuuuagugaccuuggaca

SEQ ID NO: 2754047 - RNA, 19 nt, Artificial Sequence
  Description of Artificial Sequence: Synthetic oligonucleotide
acacuggucaaauuuggcc

SEQ ID NO: 2754048 - RNA, 19 nt, Artificial Sequence
  Description of Artificial Sequence: Synthetic oligonucleotide
agcauaaacuccuuauugg

SEQ ID NO: 2754049 - RNA, 19 nt, Artificial Sequence
  Description of Artificial Sequence: Synthetic oligonucleotide
acagugacgcuuuaucugc

SEQ ID NO: 2754050 - RNA, 19 nt, Artificial Sequence
  Description of Artificial Sequence: Synthetic oligonucleotide
aagguuggaauaaucaagg

SEQ ID NO: 2754051 - RNA, 19 nt, Artificial Sequence
  Description of Artificial Sequence: Synthetic oligonucleotide
guaacgaaacagcugaagg

SEQ ID NO: 2754052 - RNA, 19 nt, Artificial Sequence
  Description of Artificial Sequence: Synthetic oligonucleotide
agugauaaggguucacugg

SEQ ID NO: 2754053 - RNA, 19 nt, Artificial Sequence
  Description of Artificial Sequence: Synthetic oligonucleotide
uuuaucugccugaagaagu

SEQ ID NO: 2754054 - RNA, 19 nt, Artificial Sequence
  Description of Artificial Sequence: Synthetic oligonucleotide
uucacuuuagugaccuugg

SEQ ID NO: 2754055 - RNA, 19 nt, Artificial Sequence
  Description of Artificial Sequence: Synthetic oligonucleotide
ugcucuugagugauaaggg

SEQ ID NO: 2754056 - RNA, 19 nt, Artificial Sequence
  Description of Artificial Sequence: Synthetic oligonucleotide
aauuuggccugcuguuugc

SEQ ID NO: 2754057 - RNA, 19 nt, Artificial Sequence
  Description of Artificial Sequence: Synthetic oligonucleotide
uugcucuugagugauaagg

SEQ ID NO: 2754058 - RNA, 19 nt, Artificial Sequence
  Description of Artificial Sequence: Synthetic oligonucleotide
gaagguuggaauaaucaag

SEQ ID NO: 2754059 - RNA, 19 nt, Artificial Sequence
  Description of Artificial Sequence: Synthetic oligonucleotide
auaaacuccuuauuggccu

SEQ ID NO: 2754060 - RNA, 19 nt, Artificial Sequence
  Description of Artificial Sequence: Synthetic oligonucleotide
aauaaucaaggcaagucca

SEQ ID NO: 2754061 - RNA, 19 nt, Artificial Sequence
  Description of Artificial Sequence: Synthetic oligonucleotide
cuuauuggccuuaucacac

SEQ ID NO: 2754062 - RNA, 19 nt, Artificial Sequence
  Description of Artificial Sequence: Synthetic oligonucleotide
gagcauaaacuccuuauug

SEQ ID NO: 2754063 - RNA, 19 nt, Artificial Sequence
  Description of Artificial Sequence: Synthetic oligonucleotide
ucuaucacaggguuugggc

SEQ ID NO: 2754064 - RNA, 19 nt, Artificial Sequence
  Description of Artificial Sequence: Synthetic oligonucleotide
ggccuuaucacacugagcc

SEQ ID NO: 2754065 - RNA, 19 nt, Artificial Sequence
  Description of Artificial Sequence: Synthetic oligonucleotide
cauaaacuccuuauuggcc

SEQ ID NO: 2754066 - RNA, 19 nt, Artificial Sequence
  Description of Artificial Sequence: Synthetic oligonucleotide
cucaguuuucacuuuagug

SEQ ID NO: 2754067 - RNA, 19 nt, Artificial Sequence
  Description of Artificial Sequence: Synthetic oligonucleotide
uuaaggacggcugagcuga

SEQ ID NO: 2754068 - RNA, 19 nt, Artificial Sequence
  Description of Artificial Sequence: Synthetic oligonucleotide
aaguccagcgcacagcugu

SEQ ID NO: 2754069 - RNA, 19 nt, Artificial Sequence
  Description of Artificial Sequence: Synthetic oligonucleotide
gauuguccagcacacacug

SEQ ID NO: 2754070 - RNA, 19 nt, Artificial Sequence
  Description of Artificial Sequence: Synthetic oligonucleotide
uaacgaaacagcugaaggu

SEQ ID NO: 2754071 - RNA, 19 nt, Artificial Sequence
  Description of Artificial Sequence: Synthetic oligonucleotide
ugugaaaggcucugcacag

SEQ ID NO: 2754072 - RNA, 19 nt, Artificial Sequence
  Description of Artificial Sequence: Synthetic oligonucleotide
acuauucccggcaugaccg

SEQ ID NO: 2754073 - RNA, 19 nt, Artificial Sequence
  Description of Artificial Sequence: Synthetic oligonucleotide
ucuugagugauaaggguuc

SEQ ID NO: 2754074 - RNA, 19 nt, Artificial Sequence
  Description of Artificial Sequence: Synthetic oligonucleotide
uucagauccccuucuauca

SEQ ID NO: 2754075 - RNA, 19 nt, Artificial Sequence
  Description of Artificial Sequence: Synthetic oligonucleotide
guuggaauaaucaaggcaa

SEQ ID NO: 2754076 - RNA, 19 nt, Artificial Sequence
  Description of Artificial Sequence: Synthetic oligonucleotide
uaaggguucacugguaaag

SEQ ID NO: 2754077 - RNA, 19 nt, Artificial Sequence
  Description of Artificial Sequence: Synthetic oligonucleotide
aagaaguccagcgcacagc

SEQ ID NO: 2754078 - RNA, 19 nt, Artificial Sequence
  Description of Artificial Sequence: Synthetic oligonucleotide
uaaucggcugccaugcuug

SEQ ID NO: 2754079 - RNA, 19 nt, Artificial Sequence
  Description of Artificial Sequence: Synthetic oligonucleotide
ugccugaagaaguccagcg

SEQ ID NO: 2754080 - RNA, 19 nt, Artificial Sequence
  Description of Artificial Sequence: Synthetic oligonucleotide
uuggccuuaucacacugag

SEQ ID NO: 2754081 - RNA, 19 nt, Artificial Sequence
  Description of Artificial Sequence: Synthetic oligonucleotide
aacagcugaagguuggaau

SEQ ID NO: 2754082 - RNA, 19 nt, Artificial Sequence
  Description of Artificial Sequence: Synthetic oligonucleotide
agguuggaauaaucaaggc

SEQ ID NO: 2754083 - RNA, 19 nt, Artificial Sequence
  Description of Artificial Sequence: Synthetic oligonucleotide
cauagacccauccuuacac

SEQ ID NO: 2754084 - RNA, 19 nt, Artificial Sequence
  Description of Artificial Sequence: Synthetic oligonucleotide
cauccuuacacguuccaag

SEQ ID NO: 2754085 - RNA, 19 nt, Artificial Sequence
  Description of Artificial Sequence: Synthetic oligonucleotide
aagacagcgccuggggucc

SEQ ID NO: 2754086 - RNA, 19 nt, Artificial Sequence
  Description of Artificial Sequence: Synthetic oligonucleotide
caguuuucacuuuagugac

SEQ ID NO: 2754087 - RNA, 19 nt, Artificial Sequence
  Description of Artificial Sequence: Synthetic oligonucleotide
uuggaauaaucaaggcaag

SEQ ID NO: 2754088 - RNA, 19 nt, Artificial Sequence
  Description of Artificial Sequence: Synthetic oligonucleotide
agugaccuuggacagcuuc

SEQ ID NO: 2754089 - RNA, 19 nt, Artificial Sequence
  Description of Artificial Sequence: Synthetic oligonucleotide
uccuuauuggccuuaucac

SEQ ID NO: 2754090 - RNA, 19 nt, Artificial Sequence
  Description of Artificial Sequence: Synthetic oligonucleotide
gagugauaaggguucacug

SEQ ID NO: 2754091 - RNA, 19 nt, Artificial Sequence
  Description of Artificial Sequence: Synthetic oligonucleotide
aaggguucacugguaaagg

SEQ ID NO: 2754092 - RNA, 19 nt, Artificial Sequence
  Description of Artificial Sequence: Synthetic oligonucleotide
uccaguacucugugaaagg

SEQ ID NO: 2754093 - RNA, 19 nt, Artificial Sequence
  Description of Artificial Sequence: Synthetic oligonucleotide
cauagugaugggcagcagc

SEQ ID NO: 2754094 - RNA, 19 nt, Artificial Sequence
  Description of Artificial Sequence: Synthetic oligonucleotide
ugguaaaggacgcucaguu

SEQ ID NO: 2754095 - RNA, 19 nt, Artificial Sequence
  Description of Artificial Sequence: Synthetic oligonucleotide
aguacucugugaaaggcuc

SEQ ID NO: 2754096 - RNA, 19 nt, Artificial Sequence
  Description of Artificial Sequence: Synthetic oligonucleotide
aggcucugcacagugacgc

SEQ ID NO: 2754097 - RNA, 19 nt, Artificial Sequence
  Description of Artificial Sequence: Synthetic oligonucleotide
cuggccuugcucuugagug

SEQ ID NO: 2754098 - RNA, 19 nt, Artificial Sequence
  Description of Artificial Sequence: Synthetic oligonucleotide
ugcggcaguaacgaaacag

SEQ ID NO: 2754099 - RNA, 19 nt, Artificial Sequence
  Description of Artificial Sequence: Synthetic oligonucleotide
auagacccauccuuacacg

SEQ ID NO: 2754100 - RNA, 19 nt, Artificial Sequence
  Description of Artificial Sequence: Synthetic oligonucleotide
uauuggccuuaucacacug

SEQ ID NO: 2754101 - RNA, 19 nt, Artificial Sequence
  Description of Artificial Sequence: Synthetic oligonucleotide
gaagaaguccagcgcacag

SEQ ID NO: 2754102 - RNA, 19 nt, Artificial Sequence
  Description of Artificial Sequence: Synthetic oligonucleotide
aacgaaacagcugaagguu

SEQ ID NO: 2754103 - RNA, 19 nt, Artificial Sequence
  Description of Artificial Sequence: Synthetic oligonucleotide
ucaaggcaaguccaguacu

SEQ ID NO: 2754104 - RNA, 19 nt, Artificial Sequence
  Description of Artificial Sequence: Synthetic oligonucleotide
aaggacgcucaguuuucac

SEQ ID NO: 2754105 - RNA, 19 nt, Artificial Sequence
  Description of Artificial Sequence: Synthetic oligonucleotide
ugcacagugacgcuuuauc

SEQ ID NO: 2754106 - RNA, 19 nt, Artificial Sequence
  Description of Artificial Sequence: Synthetic oligonucleotide
uuagugaccuuggacagcu

SEQ ID NO: 2754107 - RNA, 19 nt, Artificial Sequence
  Description of Artificial Sequence: Synthetic oligonucleotide
cagauuguccagcacacac

SEQ ID NO: 2754108 - RNA, 19 nt, Artificial Sequence
  Description of Artificial Sequence: Synthetic oligonucleotide
ucaaauuuggccugcuguu

SEQ ID NO: 2754109 - RNA, 19 nt, Artificial Sequence
  Description of Artificial Sequence: Synthetic oligonucleotide
aguaacgaaacagcugaag

SEQ ID NO: 2754110 - RNA, 19 nt, Artificial Sequence
  Description of Artificial Sequence: Synthetic oligonucleotide
cacagugacgcuuuaucug

SEQ ID NO: 2754111 - RNA, 19 nt, Artificial Sequence
  Description of Artificial Sequence: Synthetic oligonucleotide
uccuucucuucccagcggc

SEQ ID NO: 2754112 - RNA, 19 nt, Artificial Sequence
  Description of Artificial Sequence: Synthetic oligonucleotide
cuucagauccccuucuauc

SEQ ID NO: 2754113 - RNA, 19 nt, Artificial Sequence
  Description of Artificial Sequence: Synthetic oligonucleotide
gcaguaacgaaacagcuga

SEQ ID NO: 2754114 - RNA, 19 nt, Artificial Sequence
  Description of Artificial Sequence: Synthetic oligonucleotide
ugagugauaaggguucacu

SEQ ID NO: 2754115 - RNA, 19 nt, Artificial Sequence
  Description of Artificial Sequence: Synthetic oligonucleotide
cuccuuauuggccuuauca

SEQ ID NO: 2754116 - RNA, 19 nt, Artificial Sequence
  Description of Artificial Sequence: Synthetic oligonucleotide
cuuuaucugccugaagaag

SEQ ID NO: 2754117 - RNA, 19 nt, Artificial Sequence
  Description of Artificial Sequence: Synthetic oligonucleotide
gcauaaacuccuuauuggc

SEQ ID NO: 2754118 - RNA, 19 nt, Artificial Sequence
  Description of Artificial Sequence: Synthetic oligonucleotide
ugcuguuugcggcaguaac

SEQ ID NO: 2754119 - RNA, 19 nt, Artificial Sequence
  Description of Artificial Sequence: Synthetic oligonucleotide
gaagacagcgccugggguc

SEQ ID NO: 2754120 - RNA, 19 nt, Artificial Sequence
  Description of Artificial Sequence: Synthetic oligonucleotide
gauaaggguucacugguaa

SEQ ID NO: 2754121 - RNA, 19 nt, Artificial Sequence
  Description of Artificial Sequence: Synthetic oligonucleotide
acugguaaaggacgcucag

SEQ ID NO: 2754122 - RNA, 19 nt, Artificial Sequence
  Description of Artificial Sequence: Synthetic oligonucleotide
uucuaucacaggguuuggg

SEQ ID NO: 2754123 - RNA, 19 nt, Artificial Sequence
  Description of Artificial Sequence: Synthetic oligonucleotide
gguuggaauaaucaaggca

SEQ ID NO: 2754124 - RNA, 19 nt, Artificial Sequence
  Description of Artificial Sequence: Synthetic oligonucleotide
acuggucaaauuuggccug

SEQ ID NO: 2754125 - RNA, 19 nt, Artificial Sequence
  Description of Artificial Sequence: Synthetic oligonucleotide
ucuucccagcggcagagca

SEQ ID NO: 2754126 - RNA, 19 nt, Artificial Sequence
  Description of Artificial Sequence: Synthetic oligonucleotide
cacuuuagugaccuuggac

SEQ ID NO: 2754127 - RNA, 19 nt, Artificial Sequence
  Description of Artificial Sequence: Synthetic oligonucleotide
auccuuacacguuccaaga

SEQ ID NO: 2754128 - RNA, 19 nt, Artificial Sequence
  Description of Artificial Sequence: Synthetic oligonucleotide
uccacuauucccggcauga

SEQ ID NO: 2754129 - RNA, 19 nt, Artificial Sequence
  Description of Artificial Sequence: Synthetic oligonucleotide
auaaucaaggcaaguccag

SEQ ID NO: 2754130 - RNA, 19 nt, Artificial Sequence
  Description of Artificial Sequence: Synthetic oligonucleotide
uagacccauccuuacacgu

SEQ ID NO: 2754131 - RNA, 19 nt, Artificial Sequence
  Description of Artificial Sequence: Synthetic oligonucleotide
uaucacaggguuugggcuc

SEQ ID NO: 2754132 - RNA, 19 nt, Artificial Sequence
  Description of Artificial Sequence: Synthetic oligonucleotide
uuggccugcuguuugcggc

SEQ ID NO: 2754133 - RNA, 19 nt, Artificial Sequence
  Description of Artificial Sequence: Synthetic oligonucleotide
ugaagacagcgccuggggu

SEQ ID NO: 2754134 - RNA, 19 nt, Artificial Sequence
  Description of Artificial Sequence: Synthetic oligonucleotide
cuuacacguuccaagaaaa

SEQ ID NO: 2754135 - RNA, 19 nt, Artificial Sequence
  Description of Artificial Sequence: Synthetic oligonucleotide
cacuauucccggcaugacc

SEQ ID NO: 2754136 - RNA, 19 nt, Artificial Sequence
  Description of Artificial Sequence: Synthetic oligonucleotide
uaaaggacgcucaguuuuc

SEQ ID NO: 2754137 - RNA, 19 nt, Artificial Sequence
  Description of Artificial Sequence: Synthetic oligonucleotide
ucaggccgcacccagccca

SEQ ID NO: 2754138 - RNA, 19 nt, Artificial Sequence
  Description of Artificial Sequence: Synthetic oligonucleotide
agagcauaaacuccuuauu

SEQ ID NO: 2754139 - RNA, 19 nt, Artificial Sequence
  Description of Artificial Sequence: Synthetic oligonucleotide
cugaagacagcgccugggg

SEQ ID NO: 2754140 - RNA, 19 nt, Artificial Sequence
  Description of Artificial Sequence: Synthetic oligonucleotide
auagugaugggcagcagcu

SEQ ID NO: 2754141 - RNA, 19 nt, Artificial Sequence
  Description of Artificial Sequence: Synthetic oligonucleotide
ucagauccccuucuaucac

SEQ ID NO: 2754142 - RNA, 19 nt, Artificial Sequence
  Description of Artificial Sequence: Synthetic oligonucleotide
guccaguacucugugaaag

SEQ ID NO: 2754143 - RNA, 19 nt, Artificial Sequence
  Description of Artificial Sequence: Synthetic oligonucleotide
ggaauaaucaaggcaaguc

SEQ ID NO: 2754144 - RNA, 19 nt, Artificial Sequence
  Description of Artificial Sequence: Synthetic oligonucleotide
ugacgcuuuaucugccuga

SEQ ID NO: 2754145 - RNA, 19 nt, Artificial Sequence
  Description of Artificial Sequence: Synthetic oligonucleotide
aauaaucggcugccaugcu

SEQ ID NO: 2754146 - RNA, 19 nt, Artificial Sequence
  Description of Artificial Sequence: Synthetic oligonucleotide
cugugaaaggcucugcaca

SEQ ID NO: 2754147 - RNA, 19 nt, Artificial Sequence
  Description of Artificial Sequence: Synthetic oligonucleotide
agcuuccccaaggucaggc

SEQ ID NO: 2754148 - RNA, 19 nt, Artificial Sequence
  Description of Artificial Sequence: Synthetic oligonucleotide
uggaauaaucaaggcaagu

SEQ ID NO: 2754149 - RNA, 19 nt, Artificial Sequence
  Description of Artificial Sequence: Synthetic oligonucleotide
uuuagugaccuuggacagc

SEQ ID NO: 2754150 - RNA, 19 nt, Artificial Sequence
  Description of Artificial Sequence: Synthetic oligonucleotide
ucuggccuugcucuugagu

SEQ ID NO: 2754151 - RNA, 19 nt, Artificial Sequence
  Description of Artificial Sequence: Synthetic oligonucleotide
aggacggcugagcugaccu

SEQ ID NO: 2754152 - RNA, 19 nt, Artificial Sequence
  Description of Artificial Sequence: Synthetic oligonucleotide
uuauuggccuuaucacacu

SEQ ID NO: 2754153 - RNA, 19 nt, Artificial Sequence
  Description of Artificial Sequence: Synthetic oligonucleotide
ucacuuuagugaccuugga

SEQ ID NO: 2754154 - RNA, 19 nt, Artificial Sequence
  Description of Artificial Sequence: Synthetic oligonucleotide
uaaucaaggcaaguccagu

SEQ ID NO: 2754155 - RNA, 19 nt, Artificial Sequence
  Description of Artificial Sequence: Synthetic oligonucleotide
caaggcaaguccaguacuc

SEQ ID NO: 2754156 - RNA, 19 nt, Artificial Sequence
  Description of Artificial Sequence: Synthetic oligonucleotide
uccccuucuaucacagggu

SEQ ID NO: 2754157 - RNA, 19 nt, Artificial Sequence
  Description of Artificial Sequence: Synthetic oligonucleotide
ugggccauagacccauccu

SEQ ID NO: 2754158 - RNA, 19 nt, Artificial Sequence
  Description of Artificial Sequence: Synthetic oligonucleotide
cagcuguugaccagcuugc

SEQ ID NO: 2754159 - RNA, 19 nt, Artificial Sequence
  Description of Artificial Sequence: Synthetic oligonucleotide
gacccauccuuacacguuc

SEQ ID NO: 2754160 - RNA, 19 nt, Artificial Sequence
  Description of Artificial Sequence: Synthetic oligonucleotide
aggguucacugguaaagga

SEQ ID NO: 2754161 - RNA, 19 nt, Artificial Sequence
  Description of Artificial Sequence: Synthetic oligonucleotide
aaggcaaguccaguacucu

SEQ ID NO: 2754162 - RNA, 19 nt, Artificial Sequence
  Description of Artificial Sequence: Synthetic oligonucleotide
uccuuacacguuccaagaa

SEQ ID NO: 2754163 - RNA, 19 nt, Artificial Sequence
  Description of Artificial Sequence: Synthetic oligonucleotide
guaaaggacgcucaguuuu

SEQ ID NO: 2754164 - RNA, 19 nt, Artificial Sequence
  Description of Artificial Sequence: Synthetic oligonucleotide
uacucugugaaaggcucug

SEQ ID NO: 2754165 - RNA, 19 nt, Artificial Sequence
  Description of Artificial Sequence: Synthetic oligonucleotide
uccagcgcacagcuguuga

SEQ ID NO: 2754166 - RNA, 19 nt, Artificial Sequence
  Description of Artificial Sequence: Synthetic oligonucleotide
gguccuucucuucccagcg

SEQ ID NO: 2754167 - RNA, 19 nt, Artificial Sequence
  Description of Artificial Sequence: Synthetic oligonucleotide
auaaucggcugccaugcuu

SEQ ID NO: 2754168 - RNA, 19 nt, Artificial Sequence
  Description of Artificial Sequence: Synthetic oligonucleotide
accgcggcagacgcgaccc

SEQ ID NO: 2754169 - RNA, 19 nt, Artificial Sequence
  Description of Artificial Sequence: Synthetic oligonucleotide
agcagcuuuaaggacggcu

SEQ ID NO: 2754170 - RNA, 19 nt, Artificial Sequence
  Description of Artificial Sequence: Synthetic oligonucleotide
ugaccuuggacagcuuccc

SEQ ID NO: 2754171 - RNA, 19 nt, Artificial Sequence
  Description of Artificial Sequence: Synthetic oligonucleotide
ugaagaaguccagcgcaca

SEQ ID NO: 2754172 - RNA, 19 nt, Artificial Sequence
  Description of Artificial Sequence: Synthetic oligonucleotide
uauucccggcaugaccgcg

SEQ ID NO: 2754173 - RNA, 19 nt, Artificial Sequence
  Description of Artificial Sequence: Synthetic oligonucleotide
uaucugccugaagaagucc

SEQ ID NO: 2754174 - RNA, 19 nt, Artificial Sequence
  Description of Artificial Sequence: Synthetic oligonucleotide
auaaggguucacugguaaa

SEQ ID NO: 2754175 - RNA, 19 nt, Artificial Sequence
  Description of Artificial Sequence: Synthetic oligonucleotide
ugauaaggguucacuggua

SEQ ID NO: 2754176 - RNA, 19 nt, Artificial Sequence
  Description of Artificial Sequence: Synthetic oligonucleotide
ccuuaucacacugagcccc

SEQ ID NO: 2754177 - RNA, 19 nt, Artificial Sequence
  Description of Artificial Sequence: Synthetic oligonucleotide
ucacugguaaaggacgcuc

SEQ ID NO: 2754178 - RNA, 19 nt, Artificial Sequence
  Description of Artificial Sequence: Synthetic oligonucleotide
gugauaaggguucacuggu

SEQ ID NO: 2754179 - RNA, 19 nt, Artificial Sequence
  Description of Artificial Sequence: Synthetic oligonucleotide
agcgcacagcuguugacca

SEQ ID NO: 2754180 - RNA, 19 nt, Artificial Sequence
  Description of Artificial Sequence: Synthetic oligonucleotide
uggccuuaucacacugagc

SEQ ID NO: 2754181 - RNA, 19 nt, Artificial Sequence
  Description of Artificial Sequence: Synthetic oligonucleotide
cuugcucuugagugauaag

SEQ ID NO: 2754182 - RNA, 19 nt, Artificial Sequence
  Description of Artificial Sequence: Synthetic oligonucleotide
auuuggccugcuguuugcg

SEQ ID NO: 2754183 - RNA, 19 nt, Artificial Sequence
  Description of Artificial Sequence: Synthetic oligonucleotide
aaaggacgcucaguuuuca

SEQ ID NO: 2754184 - RNA, 19 nt, Artificial Sequence
  Description of Artificial Sequence: Synthetic oligonucleotide
gcagacgcgacccugcccc

SEQ ID NO: 2754185 - RNA, 19 nt, Artificial Sequence
  Description of Artificial Sequence: Synthetic oligonucleotide
gcuguuugcggcaguaacg

SEQ ID NO: 2754186 - RNA, 19 nt, Artificial Sequence
  Description of Artificial Sequence: Synthetic oligonucleotide
ccuucuaucacaggguuug

SEQ ID NO: 2754187 - RNA, 19 nt, Artificial Sequence
  Description of Artificial Sequence: Synthetic oligonucleotide
agugacgcuuuaucugccu

SEQ ID NO: 2754188 - RNA, 19 nt, Artificial Sequence
  Description of Artificial Sequence: Synthetic oligonucleotide
gauccccuucuaucacagg

SEQ ID NO: 2754189 - RNA, 19 nt, Artificial Sequence
  Description of Artificial Sequence: Synthetic oligonucleotide
agcuuuaaggacggcugag

SEQ ID NO: 2754190 - RNA, 19 nt, Artificial Sequence
  Description of Artificial Sequence: Synthetic oligonucleotide
cuguugaccagcuugcccu

SEQ ID NO: 2754191 - RNA, 19 nt, Artificial Sequence
  Description of Artificial Sequence: Synthetic oligonucleotide
agauccccuucuaucacag

SEQ ID NO: 2754192 - RNA, 19 nt, Artificial Sequence
  Description of Artificial Sequence: Synthetic oligonucleotide
ucuuccagagugggcaacu

SEQ ID NO: 2754193 - RNA, 19 nt, Artificial Sequence
  Description of Artificial Sequence: Synthetic oligonucleotide
gugaccuuggacagcuucc

SEQ ID NO: 2754194 - RNA, 19 nt, Artificial Sequence
  Description of Artificial Sequence: Synthetic oligonucleotide
gcaacuccacuauucccgg

SEQ ID NO: 2754195 - RNA, 19 nt, Artificial Sequence
  Description of Artificial Sequence: Synthetic oligonucleotide
cuccacuuucagcucuucc

SEQ ID NO: 2754196 - RNA, 19 nt, Artificial Sequence
  Description of Artificial Sequence: Synthetic oligonucleotide
agcuguugaccagcuugcc

SEQ ID NO: 2754197 - RNA, 19 nt, Artificial Sequence
  Description of Artificial Sequence: Synthetic oligonucleotide
gacgcgacccugccccugg

SEQ ID NO: 2754198 - RNA, 19 nt, Artificial Sequence
  Description of Artificial Sequence: Synthetic oligonucleotide
acgaaacagcugaagguug

SEQ ID NO: 2754199 - RNA, 19 nt, Artificial Sequence
  Description of Artificial Sequence: Synthetic oligonucleotide
uugggcucuggccuugcuc

SEQ ID NO: 2754200 - RNA, 19 nt, Artificial Sequence
  Description of Artificial Sequence: Synthetic oligonucleotide
gugacgcuuuaucugccug

SEQ ID NO: 2754201 - RNA, 19 nt, Artificial Sequence
  Description of Artificial Sequence: Synthetic oligonucleotide
agauuguccagcacacacu

SEQ ID NO: 2754202 - RNA, 19 nt, Artificial Sequence
  Description of Artificial Sequence: Synthetic oligonucleotide
uucacugguaaaggacgcu

SEQ ID NO: 2754203 - RNA, 19 nt, Artificial Sequence
  Description of Artificial Sequence: Synthetic oligonucleotide
uaaacuccuuauuggccuu

SEQ ID NO: 2754204 - RNA, 19 nt, Artificial Sequence
  Description of Artificial Sequence: Synthetic oligonucleotide
augcuuggcaggcuucaga

SEQ ID NO: 2754205 - RNA, 19 nt, Artificial Sequence
  Description of Artificial Sequence: Synthetic oligonucleotide
guuugcggcaguaacgaaa

SEQ ID NO: 2754206 - RNA, 19 nt, Artificial Sequence
  Description of Artificial Sequence: Synthetic oligonucleotide
gcagcuuuaaggacggcug

SEQ ID NO: 2754207 - RNA, 19 nt, Artificial Sequence
  Description of Artificial Sequence: Synthetic oligonucleotide
cuaucacaggguuugggcu

SEQ ID NO: 2754208 - RNA, 19 nt, Artificial Sequence
  Description of Artificial Sequence: Synthetic oligonucleotide
agccccauagugaugggca

SEQ ID NO: 2754209 - RNA, 19 nt, Artificial Sequence
  Description of Artificial Sequence: Synthetic oligonucleotide
gaccuuggacagcuucccc

SEQ ID NO: 2754210 - RNA, 19 nt, Artificial Sequence
  Description of Artificial Sequence: Synthetic oligonucleotide
cuguuugcggcaguaacga

SEQ ID NO: 2754211 - RNA, 19 nt, Artificial Sequence
  Description of Artificial Sequence: Synthetic oligonucleotide
cagugacgcuuuaucugcc

SEQ ID NO: 2754212 - RNA, 19 nt, Artificial Sequence
  Description of Artificial Sequence: Synthetic oligonucleotide
cuauucccggcaugaccgc

SEQ ID NO: 2754213 - RNA, 19 nt, Artificial Sequence
  Description of Artificial Sequence: Synthetic oligonucleotide
caggcuucagauccccuuc

SEQ ID NO: 2754214 - RNA, 19 nt, Artificial Sequence
  Description of Artificial Sequence: Synthetic oligonucleotide
cagcgcacagcuguugacc

SEQ ID NO: 2754215 - RNA, 19 nt, Artificial Sequence
  Description of Artificial Sequence: Synthetic oligonucleotide
gugggccauagacccaucc

SEQ ID NO: 2754216 - RNA, 19 nt, Artificial Sequence
  Description of Artificial Sequence: Synthetic oligonucleotide
ugagccccauagugauggg

SEQ ID NO: 2754217 - RNA, 19 nt, Artificial Sequence
  Description of Artificial Sequence: Synthetic oligonucleotide
ggcaguaacgaaacagcug

SEQ ID NO: 2754218 - RNA, 19 nt, Artificial Sequence
  Description of Artificial Sequence: Synthetic oligonucleotide
cuuaucacacugagcccca

SEQ ID NO: 2754219 - RNA, 19 nt, Artificial Sequence
  Description of Artificial Sequence: Synthetic oligonucleotide
ccacuuucagcucuuccag

SEQ ID NO: 2754220 - RNA, 19 nt, Artificial Sequence
  Description of Artificial Sequence: Synthetic oligonucleotide
uugagugauaaggguucac

SEQ ID NO: 2754221 - RNA, 19 nt, Artificial Sequence
  Description of Artificial Sequence: Synthetic oligonucleotide
ccuuauuggccuuaucaca

SEQ ID NO: 2754222 - RNA, 19 nt, Artificial Sequence
  Description of Artificial Sequence: Synthetic oligonucleotide
cacugguaaaggacgcuca

SEQ ID NO: 2754223 - RNA, 19 nt, Artificial Sequence
  Description of Artificial Sequence: Synthetic oligonucleotide
cuucuaucacaggguuugg

SEQ ID NO: 2754224 - RNA, 19 nt, Artificial Sequence
  Description of Artificial Sequence: Synthetic oligonucleotide
caugaccgcggcagacgcg

SEQ ID NO: 2754225 - RNA, 19 nt, Artificial Sequence
  Description of Artificial Sequence: Synthetic oligonucleotide
cugccugaagaaguccagc

SEQ ID NO: 2754226 - RNA, 19 nt, Artificial Sequence
  Description of Artificial Sequence: Synthetic oligonucleotide
augaccgcggcagacgcga

SEQ ID NO: 2754227 - RNA, 19 nt, Artificial Sequence
  Description of Artificial Sequence: Synthetic oligonucleotide
cccuccugaagacagcgcc

SEQ ID NO: 2754228 - RNA, 19 nt, Artificial Sequence
  Description of Artificial Sequence: Synthetic oligonucleotide
agcgccugggguccuucuc

SEQ ID NO: 2754229 - RNA, 19 nt, Artificial Sequence
  Description of Artificial Sequence: Synthetic oligonucleotide
uggccugcuguuugcggca

SEQ ID NO: 2754230 - RNA, 19 nt, Artificial Sequence
  Description of Artificial Sequence: Synthetic oligonucleotide
gacggcugagcugaccuuc

SEQ ID NO: 2754231 - RNA, 19 nt, Artificial Sequence
  Description of Artificial Sequence: Synthetic oligonucleotide
cagagcauaaacuccuuau

SEQ ID NO: 2754232 - RNA, 19 nt, Artificial Sequence
  Description of Artificial Sequence: Synthetic oligonucleotide
uguuugcggcaguaacgaa

SEQ ID NO: 2754233 - RNA, 19 nt, Artificial Sequence
  Description of Artificial Sequence: Synthetic oligonucleotide
auucccggcaugaccgcgg

SEQ ID NO: 2754234 - RNA, 19 nt, Artificial Sequence
  Description of Artificial Sequence: Synthetic oligonucleotide
ugaccagcuugcccuccug

SEQ ID NO: 2754235 - RNA, 19 nt, Artificial Sequence
  Description of Artificial Sequence: Synthetic oligonucleotide
aggcuucagauccccuucu

SEQ ID NO: 2754236 - RNA, 19 nt, Artificial Sequence
  Description of Artificial Sequence: Synthetic oligonucleotide
gcuuuaucugccugaagaa

SEQ ID NO: 2754237 - RNA, 19 nt, Artificial Sequence
  Description of Artificial Sequence: Synthetic oligonucleotide
cuggucaaauuuggccugc

SEQ ID NO: 2754238 - RNA, 19 nt, Artificial Sequence
  Description of Artificial Sequence: Synthetic oligonucleotide
gcugagcugaccuucaccu

SEQ ID NO: 2754239 - RNA, 19 nt, Artificial Sequence
  Description of Artificial Sequence: Synthetic oligonucleotide
gcggcaguaacgaaacagc

SEQ ID NO: 2754240 - RNA, 19 nt, Artificial Sequence
  Description of Artificial Sequence: Synthetic oligonucleotide
uucccagcggcagagcaua

SEQ ID NO: 2754241 - RNA, 19 nt, Artificial Sequence
  Description of Artificial Sequence: Synthetic oligonucleotide
gcaaguccaguacucugug

SEQ ID NO: 2754242 - RNA, 19 nt, Artificial Sequence
  Description of Artificial Sequence: Synthetic oligonucleotide
uucccggcaugaccgcggc

SEQ ID NO: 2754243 - RNA, 19 nt, Artificial Sequence
  Description of Artificial Sequence: Synthetic oligonucleotide
auuggccuuaucacacuga

SEQ ID NO: 2754244 - RNA, 19 nt, Artificial Sequence
  Description of Artificial Sequence: Synthetic oligonucleotide
cuuggacagcuuccccaag

SEQ ID NO: 2754245 - RNA, 19 nt, Artificial Sequence
  Description of Artificial Sequence: Synthetic oligonucleotide
acgcuuuaucugccugaag

SEQ ID NO: 2754246 - RNA, 19 nt, Artificial Sequence
  Description of Artificial Sequence: Synthetic oligonucleotide
gaaaggcucugcacaguga

SEQ ID NO: 2754247 - RNA, 19 nt, Artificial Sequence
  Description of Artificial Sequence: Synthetic oligonucleotide
accagcuugcccuccugaa

SEQ ID NO: 2754248 - RNA, 19 nt, Artificial Sequence
  Description of Artificial Sequence: Synthetic oligonucleotide
ggguucacugguaaaggac

SEQ ID NO: 2754249 - RNA, 19 nt, Artificial Sequence
  Description of Artificial Sequence: Synthetic oligonucleotide
aacuccuuauuggccuuau

SEQ ID NO: 2754250 - RNA, 19 nt, Artificial Sequence
  Description of Artificial Sequence: Synthetic oligonucleotide
gcuuuaaggacggcugagc

SEQ ID NO: 2754251 - RNA, 19 nt, Artificial Sequence
  Description of Artificial Sequence: Synthetic oligonucleotide
cgcuuuaucugccugaaga

SEQ ID NO: 2754252 - RNA, 19 nt, Artificial Sequence
  Description of Artificial Sequence: Synthetic oligonucleotide
gggcaacuccacuauuccc

SEQ ID NO: 2754253 - RNA, 19 nt, Artificial Sequence
  Description of Artificial Sequence: Synthetic oligonucleotide
ccagcggcagagcauaaac

SEQ ID NO: 2754254 - RNA, 19 nt, Artificial Sequence
  Description of Artificial Sequence: Synthetic oligonucleotide
acuccacuauucccggcau

SEQ ID NO: 2754255 - RNA, 19 nt, Artificial Sequence
  Description of Artificial Sequence: Synthetic oligonucleotide
cagauccccuucuaucaca

SEQ ID NO: 2754256 - RNA, 19 nt, Artificial Sequence
  Description of Artificial Sequence: Synthetic oligonucleotide
aucacaggguuugggcucu

SEQ ID NO: 2754257 - RNA, 19 nt, Artificial Sequence
  Description of Artificial Sequence: Synthetic oligonucleotide
cugagcugaccuucaccuc

SEQ ID NO: 2754258 - RNA, 19 nt, Artificial Sequence
  Description of Artificial Sequence: Synthetic oligonucleotide
gacgcuuuaucugccugaa

SEQ ID NO: 2754259 - RNA, 19 nt, Artificial Sequence
  Description of Artificial Sequence: Synthetic oligonucleotide
aaacuccuuauuggccuua

SEQ ID NO: 2754260 - RNA, 19 nt, Artificial Sequence
  Description of Artificial Sequence: Synthetic oligonucleotide
acgcucaguuuucacuuua

SEQ ID NO: 2754261 - RNA, 19 nt, Artificial Sequence
  Description of Artificial Sequence: Synthetic oligonucleotide
uugcggcaguaacgaaaca

SEQ ID NO: 2754262 - RNA, 19 nt, Artificial Sequence
  Description of Artificial Sequence: Synthetic oligonucleotide
gcaugaccgcggcagacgc

SEQ ID NO: 2754263 - RNA, 19 nt, Artificial Sequence
  Description of Artificial Sequence: Synthetic oligonucleotide
cuugagugauaaggguuca

SEQ ID NO: 2754264 - RNA, 19 nt, Artificial Sequence
  Description of Artificial Sequence: Synthetic oligonucleotide
gcugccaugcuuggcaggc

SEQ ID NO: 2754265 - RNA, 19 nt, Artificial Sequence
  Description of Artificial Sequence: Synthetic oligonucleotide
cagcuuuaaggacggcuga

SEQ ID NO: 2754266 - RNA, 19 nt, Artificial Sequence
  Description of Artificial Sequence: Synthetic oligonucleotide
ggcaugaccgcggcagacg

SEQ ID NO: 2754267 - RNA, 19 nt, Artificial Sequence
  Description of Artificial Sequence: Synthetic oligonucleotide
gccuuaucacacugagccc

SEQ ID NO: 2754268 - RNA, 19 nt, Artificial Sequence
  Description of Artificial Sequence: Synthetic oligonucleotide
cuccacuauucccggcaug

SEQ ID NO: 2754269 - RNA, 19 nt, Artificial Sequence
  Description of Artificial Sequence: Synthetic oligonucleotide
gcggcagagcauaaacucc

SEQ ID NO: 2754270 - RNA, 19 nt, Artificial Sequence
  Description of Artificial Sequence: Synthetic oligonucleotide
gccauagacccauccuuac

SEQ ID NO: 2754271 - RNA, 19 nt, Artificial Sequence
  Description of Artificial Sequence: Synthetic oligonucleotide
caugcuuggcaggcuucag

SEQ ID NO: 2754272 - RNA, 19 nt, Artificial Sequence
  Description of Artificial Sequence: Synthetic oligonucleotide
gaaguccagcgcacagcug

SEQ ID NO: 2754273 - RNA, 19 nt, Artificial Sequence
  Description of Artificial Sequence: Synthetic oligonucleotide
gacccugccccuggcgucc

SEQ ID NO: 2754274 - RNA, 19 nt, Artificial Sequence
  Description of Artificial Sequence: Synthetic oligonucleotide
agcugaagguuggaauaau

SEQ ID NO: 2754275 - RNA, 19 nt, Artificial Sequence
  Description of Artificial Sequence: Synthetic oligonucleotide
ccuuacacguuccaagaaa

SEQ ID NO: 2754276 - RNA, 19 nt, Artificial Sequence
  Description of Artificial Sequence: Synthetic oligonucleotide
uaaggacggcugagcugac

SEQ ID NO: 2754277 - RNA, 19 nt, Artificial Sequence
  Description of Artificial Sequence: Synthetic oligonucleotide
ccagcuugcccuccugaag

SEQ ID NO: 2754278 - RNA, 19 nt, Artificial Sequence
  Description of Artificial Sequence: Synthetic oligonucleotide
gagugggcaacuccacuau

SEQ ID NO: 2754279 - RNA, 19 nt, Artificial Sequence
  Description of Artificial Sequence: Synthetic oligonucleotide
gcuuccccaaggucaggcc

SEQ ID NO: 2754280 - RNA, 19 nt, Artificial Sequence
  Description of Artificial Sequence: Synthetic oligonucleotide
gcacagugacgcuuuaucu

SEQ ID NO: 2754281 - RNA, 19 nt, Artificial Sequence
  Description of Artificial Sequence: Synthetic oligonucleotide
acgcgacccugccccuggc

SEQ ID NO: 2754282 - RNA, 19 nt, Artificial Sequence
  Description of Artificial Sequence: Synthetic oligonucleotide
cacaggguuugggcucugg

SEQ ID NO: 2754283 - RNA, 19 nt, Artificial Sequence
  Description of Artificial Sequence: Synthetic oligonucleotide
gccccauagugaugggcag

SEQ ID NO: 2754284 - RNA, 19 nt, Artificial Sequence
  Description of Artificial Sequence: Synthetic oligonucleotide
uagugaugggcagcagcuu

SEQ ID NO: 2754285 - RNA, 19 nt, Artificial Sequence
  Description of Artificial Sequence: Synthetic oligonucleotide
caguaacgaaacagcugaa

SEQ ID NO: 2754286 - RNA, 19 nt, Artificial Sequence
  Description of Artificial Sequence: Synthetic oligonucleotide
agacccauccuuacacguu

SEQ ID NO: 2754287 - RNA, 19 nt, Artificial Sequence
  Description of Artificial Sequence: Synthetic oligonucleotide
cugccccuggcguccucgg

SEQ ID NO: 2754288 - RNA, 19 nt, Artificial Sequence
  Description of Artificial Sequence: Synthetic oligonucleotide
uuaucacacugagccccau

SEQ ID NO: 2754289 - RNA, 19 nt, Artificial Sequence
  Description of Artificial Sequence: Synthetic oligonucleotide
ugugggccauagacccauc

SEQ ID NO: 2754290 - RNA, 19 nt, Artificial Sequence
  Description of Artificial Sequence: Synthetic oligonucleotide
caggccgcacccagcccag

SEQ ID NO: 2754291 - RNA, 19 nt, Artificial Sequence
  Description of Artificial Sequence: Synthetic oligonucleotide
acagcgccugggguccuuc

SEQ ID NO: 2754292 - RNA, 19 nt, Artificial Sequence
  Description of Artificial Sequence: Synthetic oligonucleotide
gucaggccgcacccagccc

SEQ ID NO: 2754293 - RNA, 19 nt, Artificial Sequence
  Description of Artificial Sequence: Synthetic oligonucleotide
ggacgcucaguuuucacuu

SEQ ID NO: 2754294 - RNA, 19 nt, Artificial Sequence
  Description of Artificial Sequence: Synthetic oligonucleotide
ggcagacgcgacccugccc

SEQ ID NO: 2754295 - RNA, 19 nt, Artificial Sequence
  Description of Artificial Sequence: Synthetic oligonucleotide
guccagcgcacagcuguug

SEQ ID NO: 2754296 - RNA, 19 nt, Artificial Sequence
  Description of Artificial Sequence: Synthetic oligonucleotide
cgcucaguuuucacuuuag

SEQ ID NO: 2754297 - RNA, 19 nt, Artificial Sequence
  Description of Artificial Sequence: Synthetic oligonucleotide
ucccagcggcagagcauaa

SEQ ID NO: 2754298 - RNA, 19 nt, Artificial Sequence
  Description of Artificial Sequence: Synthetic oligonucleotide
ccauagacccauccuuaca

SEQ ID NO: 2754299 - RNA, 19 nt, Artificial Sequence
  Description of Artificial Sequence: Synthetic oligonucleotide
gguaaaggacgcucaguuu

SEQ ID NO: 2754300 - RNA, 19 nt, Artificial Sequence
  Description of Artificial Sequence: Synthetic oligonucleotide
gugaugggcagcagcuuua

SEQ ID NO: 2754301 - RNA, 19 nt, Artificial Sequence
  Description of Artificial Sequence: Synthetic oligonucleotide
ucccggcaugaccgcggca

SEQ ID NO: 2754302 - RNA, 19 nt, Artificial Sequence
  Description of Artificial Sequence: Synthetic oligonucleotide
guacucugugaaaggcucu

SEQ ID NO: 2754303 - RNA, 19 nt, Artificial Sequence
  Description of Artificial Sequence: Synthetic oligonucleotide
cgcacagcuguugaccagc

SEQ ID NO: 2754304 - RNA, 19 nt, Artificial Sequence
  Description of Artificial Sequence: Synthetic oligonucleotide
cccauagugaugggcagca

SEQ ID NO: 2754305 - RNA, 19 nt, Artificial Sequence
  Description of Artificial Sequence: Synthetic oligonucleotide
ccagcgcacagcuguugac

SEQ ID NO: 2754306 - RNA, 19 nt, Artificial Sequence
  Description of Artificial Sequence: Synthetic oligonucleotide
gcgcacagcuguugaccag

SEQ ID NO: 2754307 - RNA, 19 nt, Artificial Sequence
  Description of Artificial Sequence: Synthetic oligonucleotide
ccuuggacagcuuccccaa

SEQ ID NO: 2754308 - RNA, 19 nt, Artificial Sequence
  Description of Artificial Sequence: Synthetic oligonucleotide
cugguaaaggacgcucagu

SEQ ID NO: 2754309 - RNA, 19 nt, Artificial Sequence
  Description of Artificial Sequence: Synthetic oligonucleotide
agacgcgacccugccccug

SEQ ID NO: 2754310 - RNA, 19 nt, Artificial Sequence
  Description of Artificial Sequence: Synthetic oligonucleotide
gguuugggcucuggccuug

SEQ ID NO: 2754311 - RNA, 19 nt, Artificial Sequence
  Description of Artificial Sequence: Synthetic oligonucleotide
ccuugcucuugagugauaa

SEQ ID NO: 2754312 - RNA, 19 nt, Artificial Sequence
  Description of Artificial Sequence: Synthetic oligonucleotide
ggccauagacccauccuua

SEQ ID NO: 2754313 - RNA, 19 nt, Artificial Sequence
  Description of Artificial Sequence: Synthetic oligonucleotide
uagugaccuuggacagcuu

SEQ ID NO: 2754314 - RNA, 19 nt, Artificial Sequence
  Description of Artificial Sequence: Synthetic oligonucleotide
gggccauagacccauccuu

SEQ ID NO: 2754315 - RNA, 19 nt, Artificial Sequence
  Description of Artificial Sequence: Synthetic oligonucleotide
gcuucagauccccuucuau

SEQ ID NO: 2754316 - RNA, 19 nt, Artificial Sequence
  Description of Artificial Sequence: Synthetic oligonucleotide
ccccauagugaugggcagc

SEQ ID NO: 2754317 - RNA, 19 nt, Artificial Sequence
  Description of Artificial Sequence: Synthetic oligonucleotide
gagcugaccuucaccuccu

SEQ ID NO: 2754318 - RNA, 19 nt, Artificial Sequence
  Description of Artificial Sequence: Synthetic oligonucleotide
cuucccagcggcagagcau

SEQ ID NO: 2754319 - RNA, 19 nt, Artificial Sequence
  Description of Artificial Sequence: Synthetic oligonucleotide
gcacccagcccagauuguc

SEQ ID NO: 2754320 - RNA, 19 nt, Artificial Sequence
  Description of Artificial Sequence: Synthetic oligonucleotide
aguccagcgcacagcuguu

SEQ ID NO: 2754321 - RNA, 19 nt, Artificial Sequence
  Description of Artificial Sequence: Synthetic oligonucleotide
ccugccccuggcguccucg

SEQ ID NO: 2754322 - RNA, 19 nt, Artificial Sequence
  Description of Artificial Sequence: Synthetic oligonucleotide
gcucuuccagagugggcaa

SEQ ID NO: 2754323 - RNA, 19 nt, Artificial Sequence
  Description of Artificial Sequence: Synthetic oligonucleotide
gcggcagacgcgacccugc

SEQ ID NO: 2754324 - RNA, 19 nt, Artificial Sequence
  Description of Artificial Sequence: Synthetic oligonucleotide
ggcuucagauccccuucua

SEQ ID NO: 2754325 - RNA, 19 nt, Artificial Sequence
  Description of Artificial Sequence: Synthetic oligonucleotide
cagcagcuuuaaggacggc

SEQ ID NO: 2754326 - RNA, 19 nt, Artificial Sequence
  Description of Artificial Sequence: Synthetic oligonucleotide
gcaggcuucagauccccuu

SEQ ID NO: 2754327 - RNA, 19 nt, Artificial Sequence
  Description of Artificial Sequence: Synthetic oligonucleotide
cugcuguuugcggcaguaa

SEQ ID NO: 2754328 - RNA, 19 nt, Artificial Sequence
  Description of Artificial Sequence: Synthetic oligonucleotide
ccacuauucccggcaugac

SEQ ID NO: 2754329 - RNA, 19 nt, Artificial Sequence
  Description of Artificial Sequence: Synthetic oligonucleotide
cagcacacacuggucaaau

SEQ ID NO: 2754330 - RNA, 19 nt, Artificial Sequence
  Description of Artificial Sequence: Synthetic oligonucleotide
ccauccuuacacguuccaa

SEQ ID NO: 2754331 - RNA, 19 nt, Artificial Sequence
  Description of Artificial Sequence: Synthetic oligonucleotide
cccauccuuacacguucca

SEQ ID NO: 2754332 - RNA, 19 nt, Artificial Sequence
  Description of Artificial Sequence: Synthetic oligonucleotide
cggcagagcauaaacuccu

SEQ ID NO: 2754333 - RNA, 19 nt, Artificial Sequence
  Description of Artificial Sequence: Synthetic oligonucleotide
gcgacccugccccuggcgu

SEQ ID NO: 2754334 - RNA, 19 nt, Artificial Sequence
  Description of Artificial Sequence: Synthetic oligonucleotide
gcgccugggguccuucucu

SEQ ID NO: 2754335 - RNA, 19 nt, Artificial Sequence
  Description of Artificial Sequence: Synthetic oligonucleotide
cggcaguaacgaaacagcu

SEQ ID NO: 2754336 - RNA, 19 nt, Artificial Sequence
  Description of Artificial Sequence: Synthetic oligonucleotide
agacagcgccugggguccu

SEQ ID NO: 2754337 - RNA, 19 nt, Artificial Sequence
  Description of Artificial Sequence: Synthetic oligonucleotide
ccagauuguccagcacaca

SEQ ID NO: 2754338 - RNA, 19 nt, Artificial Sequence
  Description of Artificial Sequence: Synthetic oligonucleotide
ggcucugcacagugacgcu

SEQ ID NO: 2754339 - RNA, 19 nt, Artificial Sequence
  Description of Artificial Sequence: Synthetic oligonucleotide
ggccuugcucuugagugau

SEQ ID NO: 2754340 - RNA, 19 nt, Artificial Sequence
  Description of Artificial Sequence: Synthetic oligonucleotide
cgcgacccugccccuggcg

SEQ ID NO: 2754341 - RNA, 19 nt, Artificial Sequence
  Description of Artificial Sequence: Synthetic oligonucleotide
cggcagacgcgacccugcc

SEQ ID NO: 2754342 - RNA, 19 nt, Artificial Sequence
  Description of Artificial Sequence: Synthetic oligonucleotide
cugcacagugacgcuuuau

SEQ ID NO: 2754343 - RNA, 19 nt, Artificial Sequence
  Description of Artificial Sequence: Synthetic oligonucleotide
cagacgcgacccugccccu

SEQ ID NO: 2754344 - RNA, 19 nt, Artificial Sequence
  Description of Artificial Sequence: Synthetic oligonucleotide
ccccuucuaucacaggguu

SEQ ID NO: 2754345 - RNA, 19 nt, Artificial Sequence
  Description of Artificial Sequence: Synthetic oligonucleotide
aggccgcacccagcccaga

SEQ ID NO: 2754346 - RNA, 19 nt, Artificial Sequence
  Description of Artificial Sequence: Synthetic oligonucleotide
acccugccccuggcguccu

SEQ ID NO: 2754347 - RNA, 19 nt, Artificial Sequence
  Description of Artificial Sequence: Synthetic oligonucleotide
cggcaugaccgcggcagac

SEQ ID NO: 2754348 - RNA, 19 nt, Artificial Sequence
  Description of Artificial Sequence: Synthetic oligonucleotide
cgcggcagacgcgacccug

SEQ ID NO: 2754349 - RNA, 19 nt, Artificial Sequence
  Description of Artificial Sequence: Synthetic oligonucleotide
cagcgccugggguccuucu

SEQ ID NO: 2754350 - RNA, 19 nt, Artificial Sequence
  Description of Artificial Sequence: Synthetic oligonucleotide
ccggcaugaccgcggcaga

SEQ ID NO: 2754351 - RNA, 19 nt, Artificial Sequence
  Description of Artificial Sequence: Synthetic oligonucleotide
cccuucuaucacaggguuu

SEQ ID NO: 2754352 - RNA, 19 nt, Artificial Sequence
  Description of Artificial Sequence: Synthetic oligonucleotide
gacagcgccugggguccuu

SEQ ID NO: 2754353 - RNA, 19 nt, Artificial Sequence
  Description of Artificial Sequence: Synthetic oligonucleotide
gccugcuguuugcggcagu

SEQ ID NO: 2754354 - RNA, 19 nt, Artificial Sequence
  Description of Artificial Sequence: Synthetic oligonucleotide
cccugccccuggcguccuc

SEQ ID NO: 2754355 - RNA, 19 nt, Artificial Sequence
  Description of Artificial Sequence: Synthetic oligonucleotide
cgccugggguccuucucuu

SEQ ID NO: 2754356 - RNA, 19 nt, Artificial Sequence
  Description of Artificial Sequence: Synthetic oligonucleotide
ucaacguagacaaugauca

SEQ ID NO: 2754357 - RNA, 19 nt, Artificial Sequence
  Description of Artificial Sequence: Synthetic oligonucleotide
aacaauucgcccaagguac

SEQ ID NO: 2754358 - RNA, 19 nt, Artificial Sequence
  Description of Artificial Sequence: Synthetic oligonucleotide
uuauaguaaacauuauuug

SEQ ID NO: 2754359 - RNA, 19 nt, Artificial Sequence
  Description of Artificial Sequence: Synthetic oligonucleotide
auucucaagacucugaagu

SEQ ID NO: 2754360 - RNA, 19 nt, Artificial Sequence
  Description of Artificial Sequence: Synthetic oligonucleotide
gauauuauaguaaacauua

SEQ ID NO: 2754361 - RNA, 19 nt, Artificial Sequence
  Description of Artificial Sequence: Synthetic oligonucleotide
aaagacagauauuauagua

SEQ ID NO: 2754362 - RNA, 19 nt, Artificial Sequence
  Description of Artificial Sequence: Synthetic oligonucleotide
uauuccaaguaucccaagg

SEQ ID NO: 2754363 - RNA, 19 nt, Artificial Sequence
  Description of Artificial Sequence: Synthetic oligonucleotide
ugguaauuuguuaaaauuc

SEQ ID NO: 2754364 - RNA, 19 nt, Artificial Sequence
  Description of Artificial Sequence: Synthetic oligonucleotide
cauuucaucagagucagcg

SEQ ID NO: 2754365 - RNA, 19 nt, Artificial Sequence
  Description of Artificial Sequence: Synthetic oligonucleotide
uguuaaaauucucaagacu

SEQ ID NO: 2754366 - RNA, 19 nt, Artificial Sequence
  Description of Artificial Sequence: Synthetic oligonucleotide
aagaucaccacaguugccg

SEQ ID NO: 2754367 - RNA, 19 nt, Artificial Sequence
  Description of Artificial Sequence: Synthetic oligonucleotide
aagguacacagauuugggg

SEQ ID NO: 2754368 - RNA, 19 nt, Artificial Sequence
  Description of Artificial Sequence: Synthetic oligonucleotide
uucuuuauuccaaguaucc

SEQ ID NO: 2754369 - RNA, 19 nt, Artificial Sequence
  Description of Artificial Sequence: Synthetic oligonucleotide
ugguccauuacacagcacc

SEQ ID NO: 2754370 - RNA, 19 nt, Artificial Sequence
  Description of Artificial Sequence: Synthetic oligonucleotide
ugacauagugccuagguga

SEQ ID NO: 2754371 - RNA, 19 nt, Artificial Sequence
  Description of Artificial Sequence: Synthetic oligonucleotide
agauuugggguacuucucc

SEQ ID NO: 2754372 - RNA, 19 nt, Artificial Sequence
  Description of Artificial Sequence: Synthetic oligonucleotide
cauuugucaaacaauucgc

SEQ ID NO: 2754373 - RNA, 19 nt, Artificial Sequence
  Description of Artificial Sequence: Synthetic oligonucleotide
acagggauaaaguuuccac

SEQ ID NO: 2754374 - RNA, 19 nt, Artificial Sequence
  Description of Artificial Sequence: Synthetic oligonucleotide
uagacaaugaucacuuucu

SEQ ID NO: 2754375 - RNA, 19 nt, Artificial Sequence
  Description of Artificial Sequence: Synthetic oligonucleotide
gauccagcuacuaucaagg

SEQ ID NO: 2754376 - RNA, 19 nt, Artificial Sequence
  Description of Artificial Sequence: Synthetic oligonucleotide
gaacacauguuccuggucc

SEQ ID NO: 2754377 - RNA, 19 nt, Artificial Sequence
  Description of Artificial Sequence: Synthetic oligonucleotide
agggauaaaguuuccacuc

SEQ ID NO: 2754378 - RNA, 19 nt, Artificial Sequence
  Description of Artificial Sequence: Synthetic oligonucleotide
acagauauuauaguaaaca

SEQ ID NO: 2754379 - RNA, 19 nt, Artificial Sequence
  Description of Artificial Sequence: Synthetic oligonucleotide
uauuauaguaaacauuauu

SEQ ID NO: 2754380 - RNA, 19 nt, Artificial Sequence
  Description of Artificial Sequence: Synthetic oligonucleotide
ucaaacaauucgcccaagg

SEQ ID NO: 2754381 - RNA, 19 nt, Artificial Sequence
  Description of Artificial Sequence: Synthetic oligonucleotide
acaaugaucacuuucuuua

SEQ ID NO: 2754382 - RNA, 19 nt, Artificial Sequence
  Description of Artificial Sequence: Synthetic oligonucleotide
acuaucaagggugugagag

SEQ ID NO: 2754383 - RNA, 19 nt, Artificial Sequence
  Description of Artificial Sequence: Synthetic oligonucleotide
ugaaggggccgaaugaccg

SEQ ID NO: 2754384 - RNA, 19 nt, Artificial Sequence
  Description of Artificial Sequence: Synthetic oligonucleotide
auuauaguaaacauuauuu

SEQ ID NO: 2754385 - RNA, 19 nt, Artificial Sequence
  Description of Artificial Sequence: Synthetic oligonucleotide
aaacaauucgcccaaggua

SEQ ID NO: 2754386 - RNA, 19 nt, Artificial Sequence
  Description of Artificial Sequence: Synthetic oligonucleotide
uuaaaauucucaagacucu

SEQ ID NO: 2754387 - RNA, 19 nt, Artificial Sequence
  Description of Artificial Sequence: Synthetic oligonucleotide
agaaucuucccagacaggg

SEQ ID NO: 2754388 - RNA, 19 nt, Artificial Sequence
  Description of Artificial Sequence: Synthetic oligonucleotide
uucaaaagauucaauuuuc

SEQ ID NO: 2754389 - RNA, 19 nt, Artificial Sequence
  Description of Artificial Sequence: Synthetic oligonucleotide
uggaagagaaucuucccag

SEQ ID NO: 2754390 - RNA, 19 nt, Artificial Sequence
  Description of Artificial Sequence: Synthetic oligonucleotide
uugucaaacaauucgccca

SEQ ID NO: 2754391 - RNA, 19 nt, Artificial Sequence
  Description of Artificial Sequence: Synthetic oligonucleotide
ucggcagaugcucucaacg

SEQ ID NO: 2754392 - RNA, 19 nt, Artificial Sequence
  Description of Artificial Sequence: Synthetic oligonucleotide
acgacuagcagcaagauca

SEQ ID NO: 2754393 - RNA, 19 nt, Artificial Sequence
  Description of Artificial Sequence: Synthetic oligonucleotide
aaagggauggcgcaugcgu

SEQ ID NO: 2754394 - RNA, 19 nt, Artificial Sequence
  Description of Artificial Sequence: Synthetic oligonucleotide
agagagguggaagagaauc

SEQ ID NO: 2754395 - RNA, 19 nt, Artificial Sequence
  Description of Artificial Sequence: Synthetic oligonucleotide
ucgggaaacgacgugaagg

SEQ ID NO: 2754396 - RNA, 19 nt, Artificial Sequence
  Description of Artificial Sequence: Synthetic oligonucleotide
aaugaccgcccauagucuc

SEQ ID NO: 2754397 - RNA, 19 nt, Artificial Sequence
  Description of Artificial Sequence: Synthetic oligonucleotide
ucaaaagauucaauuuucu

SEQ ID NO: 2754398 - RNA, 19 nt, Artificial Sequence
  Description of Artificial Sequence: Synthetic oligonucleotide
aaauucucaagacucugaa

SEQ ID NO: 2754399 - RNA, 19 nt, Artificial Sequence
  Description of Artificial Sequence: Synthetic oligonucleotide
uccaaguaucccaaggagc

SEQ ID NO: 2754400 - RNA, 19 nt, Artificial Sequence
  Description of Artificial Sequence: Synthetic oligonucleotide
uuucuuuauuccaaguauc

SEQ ID NO: 2754401 - RNA, 19 nt, Artificial Sequence
  Description of Artificial Sequence: Synthetic oligonucleotide
aaucaggaggcucaccaug

SEQ ID NO: 2754402 - RNA, 19 nt, Artificial Sequence
  Description of Artificial Sequence: Synthetic oligonucleotide
aggcucaccaugcaaaggg

SEQ ID NO: 2754403 - RNA, 19 nt, Artificial Sequence
  Description of Artificial Sequence: Synthetic oligonucleotide
aaucuucccagacagggau

SEQ ID NO: 2754404 - RNA, 19 nt, Artificial Sequence
  Description of Artificial Sequence: Synthetic oligonucleotide
ugguauguccaccggaucc

SEQ ID NO: 2754405 - RNA, 19 nt, Artificial Sequence
  Description of Artificial Sequence: Synthetic oligonucleotide
acagauuugggguacuucu

SEQ ID NO: 2754406 - RNA, 19 nt, Artificial Sequence
  Description of Artificial Sequence: Synthetic oligonucleotide
agaaucaggaggcucacca

SEQ ID NO: 2754407 - RNA, 19 nt, Artificial Sequence
  Description of Artificial Sequence: Synthetic oligonucleotide
uuguuaaaauucucaagac

SEQ ID NO: 2754408 - RNA, 19 nt, Artificial Sequence
  Description of Artificial Sequence: Synthetic oligonucleotide
auaguaaacauuauuuggu

SEQ ID NO: 2754409 - RNA, 19 nt, Artificial Sequence
  Description of Artificial Sequence: Synthetic oligonucleotide
agagucagcgaugacauag

SEQ ID NO: 2754410 - RNA, 19 nt, Artificial Sequence
  Description of Artificial Sequence: Synthetic oligonucleotide
ucaccaugcaaagggaugg

SEQ ID NO: 2754411 - RNA, 19 nt, Artificial Sequence
  Description of Artificial Sequence: Synthetic oligonucleotide
uaaagacagauauuauagu

SEQ ID NO: 2754412 - RNA, 19 nt, Artificial Sequence
  Description of Artificial Sequence: Synthetic oligonucleotide
guuuccacucggcagaugc

SEQ ID NO: 2754413 - RNA, 19 nt, Artificial Sequence
  Description of Artificial Sequence: Synthetic oligonucleotide
caagcuuccaaccagccuc

SEQ ID NO: 2754414 - RNA, 19 nt, Artificial Sequence
  Description of Artificial Sequence: Synthetic oligonucleotide
ggcagcuagaaucaggagg

SEQ ID NO: 2754415 - RNA, 19 nt, Artificial Sequence
  Description of Artificial Sequence: Synthetic oligonucleotide
accggauccagcuacuauc

SEQ ID NO: 2754416 - RNA, 19 nt, Artificial Sequence
  Description of Artificial Sequence: Synthetic oligonucleotide
aacguagacaaugaucacu

SEQ ID NO: 2754417 - RNA, 19 nt, Artificial Sequence
  Description of Artificial Sequence: Synthetic oligonucleotide
cucaagacucugaaguugc

SEQ ID NO: 2754418 - RNA, 19 nt, Artificial Sequence
  Description of Artificial Sequence: Synthetic oligonucleotide
uguuccugguccauuacac

SEQ ID NO: 2754419 - RNA, 19 nt, Artificial Sequence
  Description of Artificial Sequence: Synthetic oligonucleotide
agacagauauuauaguaaa

SEQ ID NO: 2754420 - RNA, 19 nt, Artificial Sequence
  Description of Artificial Sequence: Synthetic oligonucleotide
uaaaauucucaagacucug

SEQ ID NO: 2754421 - RNA, 19 nt, Artificial Sequence
  Description of Artificial Sequence: Synthetic oligonucleotide
caagguacacagauuuggg

SEQ ID NO: 2754422 - RNA, 19 nt, Artificial Sequence
  Description of Artificial Sequence: Synthetic oligonucleotide
cucaacguagacaaugauc

SEQ ID NO: 2754423 - RNA, 19 nt, Artificial Sequence
  Description of Artificial Sequence: Synthetic oligonucleotide
aagacagauauuauaguaa

SEQ ID NO: 2754424 - RNA, 19 nt, Artificial Sequence
  Description of Artificial Sequence: Synthetic oligonucleotide
cacagcaccauucaaaaga

SEQ ID NO: 2754425 - RNA, 19 nt, Artificial Sequence
  Description of Artificial Sequence: Synthetic oligonucleotide
uagucucacgacuagcagc

SEQ ID NO: 2754426 - RNA, 19 nt, Artificial Sequence
  Description of Artificial Sequence: Synthetic oligonucleotide
gaaucucagugguaugucc

SEQ ID NO: 2754427 - RNA, 19 nt, Artificial Sequence
  Description of Artificial Sequence: Synthetic oligonucleotide
augaaguaaucagagaggu

SEQ ID NO: 2754428 - RNA, 19 nt, Artificial Sequence
  Description of Artificial Sequence: Synthetic oligonucleotide
ugccauuugucaaacaauu

SEQ ID NO: 2754429 - RNA, 19 nt, Artificial Sequence
  Description of Artificial Sequence: Synthetic oligonucleotide
ggguacuucuccuugagag

SEQ ID NO: 2754430 - RNA, 19 nt, Artificial Sequence
  Description of Artificial Sequence: Synthetic oligonucleotide
guagacaaugaucacuuuc

SEQ ID NO: 2754431 - RNA, 19 nt, Artificial Sequence
  Description of Artificial Sequence: Synthetic oligonucleotide
gaagagaaucuucccagac

SEQ ID NO: 2754432 - RNA, 19 nt, Artificial Sequence
  Description of Artificial Sequence: Synthetic oligonucleotide
agaugggaacacauguucc

SEQ ID NO: 2754433 - RNA, 19 nt, Artificial Sequence
  Description of Artificial Sequence: Synthetic oligonucleotide
agauucaauuuucuuggca

SEQ ID NO: 2754434 - RNA, 19 nt, Artificial Sequence
  Description of Artificial Sequence: Synthetic oligonucleotide
augcucucaacguagacaa

SEQ ID NO: 2754435 - RNA, 19 nt, Artificial Sequence
  Description of Artificial Sequence: Synthetic oligonucleotide
agaucaccacaguugccgc

SEQ ID NO: 2754436 - RNA, 19 nt, Artificial Sequence
  Description of Artificial Sequence: Synthetic oligonucleotide
agccucagaaucucagugg

SEQ ID NO: 2754437 - RNA, 19 nt, Artificial Sequence
  Description of Artificial Sequence: Synthetic oligonucleotide
uaguaaacauuauuuggua

SEQ ID NO: 2754438 - RNA, 19 nt, Artificial Sequence
  Description of Artificial Sequence: Synthetic oligonucleotide
uaucaagggugugagagac

SEQ ID NO: 2754439 - RNA, 19 nt, Artificial Sequence
  Description of Artificial Sequence: Synthetic oligonucleotide
agcaagaucaccacaguug

SEQ ID NO: 2754440 - RNA, 19 nt, Artificial Sequence
  Description of Artificial Sequence: Synthetic oligonucleotide
ucucacgacuagcagcaag

SEQ ID NO: 2754441 - RNA, 19 nt, Artificial Sequence
  Description of Artificial Sequence: Synthetic oligonucleotide
gauaaaguuuccacucggc

SEQ ID NO: 2754442 - RNA, 19 nt, Artificial Sequence
  Description of Artificial Sequence: Synthetic oligonucleotide
ccagcuacuaucaagggug

SEQ ID NO: 2754443 - RNA, 19 nt, Artificial Sequence
  Description of Artificial Sequence: Synthetic oligonucleotide
auucaauuuucuuggcacu

SEQ ID NO: 2754444 - RNA, 19 nt, Artificial Sequence
  Description of Artificial Sequence: Synthetic oligonucleotide
ugaaguaaucagagaggug

SEQ ID NO: 2754445 - RNA, 19 nt, Artificial Sequence
  Description of Artificial Sequence: Synthetic oligonucleotide
uucccagacagggauaaag

SEQ ID NO: 2754446 - RNA, 19 nt, Artificial Sequence
  Description of Artificial Sequence: Synthetic oligonucleotide
uugagagccggccacugca

SEQ ID NO: 2754447 - RNA, 19 nt, Artificial Sequence
  Description of Artificial Sequence: Synthetic oligonucleotide
uucaucagagucagcgaug

SEQ ID NO: 2754448 - RNA, 19 nt, Artificial Sequence
  Description of Artificial Sequence: Synthetic oligonucleotide
auagucucacgacuagcag

SEQ ID NO: 2754449 - RNA, 19 nt, Artificial Sequence
  Description of Artificial Sequence: Synthetic oligonucleotide
ugucaaacaauucgcccaa

SEQ ID NO: 2754450 - RNA, 19 nt, Artificial Sequence
  Description of Artificial Sequence: Synthetic oligonucleotide
aggugaguaagccccggac

SEQ ID NO: 2754451 - RNA, 19 nt, Artificial Sequence
  Description of Artificial Sequence: Synthetic oligonucleotide
augacauagugccuaggug

SEQ ID NO: 2754452 - RNA, 19 nt, Artificial Sequence
  Description of Artificial Sequence: Synthetic oligonucleotide
uccaaccagccucagaauc

SEQ ID NO: 2754453 - RNA, 19 nt, Artificial Sequence
  Description of Artificial Sequence: Synthetic oligonucleotide
uccagcuacuaucaagggu

SEQ ID NO: 2754454 - RNA, 19 nt, Artificial Sequence
  Description of Artificial Sequence: Synthetic oligonucleotide
auucgcccaagguacacag

SEQ ID NO: 2754455 - RNA, 19 nt, Artificial Sequence
  Description of Artificial Sequence: Synthetic oligonucleotide
aacacauguuccuggucca

SEQ ID NO: 2754456 - RNA, 19 nt, Artificial Sequence
  Description of Artificial Sequence: Synthetic oligonucleotide
guaaucagagagguggaag

SEQ ID NO: 2754457 - RNA, 19 nt, Artificial Sequence
  Description of Artificial Sequence: Synthetic oligonucleotide
acauuauuugguaauuugu

SEQ ID NO: 2754458 - RNA, 19 nt, Artificial Sequence
  Description of Artificial Sequence: Synthetic oligonucleotide
aucucagugguauguccac

SEQ ID NO: 2754459 - RNA, 19 nt, Artificial Sequence
  Description of Artificial Sequence: Synthetic oligonucleotide
guugccauuugucaaacaa

SEQ ID NO: 2754460 - RNA, 19 nt, Artificial Sequence
  Description of Artificial Sequence: Synthetic oligonucleotide
ggauaaaguuuccacucgg

SEQ ID NO: 2754461 - RNA, 19 nt, Artificial Sequence
  Description of Artificial Sequence: Synthetic oligonucleotide
aaggggccgaaugaccgcc

SEQ ID NO: 2754462 - RNA, 19 nt, Artificial Sequence
  Description of Artificial Sequence: Synthetic oligonucleotide
acuagcagcaagaucacca

SEQ ID NO: 2754463 - RNA, 19 nt, Artificial Sequence
  Description of Artificial Sequence: Synthetic oligonucleotide
ucagugguauguccaccgg

SEQ ID NO: 2754464 - RNA, 19 nt, Artificial Sequence
  Description of Artificial Sequence: Synthetic oligonucleotide
aaucucagugguaugucca

SEQ ID NO: 2754465 - RNA, 19 nt, Artificial Sequence
  Description of Artificial Sequence: Synthetic oligonucleotide
ucaagggugugagagacuc

SEQ ID NO: 2754466 - RNA, 19 nt, Artificial Sequence
  Description of Artificial Sequence: Synthetic oligonucleotide
agaugcucucaacguagac

SEQ ID NO: 2754467 - RNA, 19 nt, Artificial Sequence
  Description of Artificial Sequence: Synthetic oligonucleotide
ugcggcagcuagaaucagg

SEQ ID NO: 2754468 - RNA, 19 nt, Artificial Sequence
  Description of Artificial Sequence: Synthetic oligonucleotide
cauagucucacgacuagca

SEQ ID NO: 2754469 - RNA, 19 nt, Artificial Sequence
  Description of Artificial Sequence: Synthetic oligonucleotide
gacgugaaggggccgaaug

SEQ ID NO: 2754470 - RNA, 19 nt, Artificial Sequence
  Description of Artificial Sequence: Synthetic oligonucleotide
cagaugggaacacauguuc

SEQ ID NO: 2754471 - RNA, 19 nt, Artificial Sequence
  Description of Artificial Sequence: Synthetic oligonucleotide
gaaacgacgugaaggggcc

SEQ ID NO: 2754472 - RNA, 19 nt, Artificial Sequence
  Description of Artificial Sequence: Synthetic oligonucleotide
aaacauuauuugguaauuu

SEQ ID NO: 2754473 - RNA, 19 nt, Artificial Sequence
  Description of Artificial Sequence: Synthetic oligonucleotide
gaugcucucaacguagaca

SEQ ID NO: 2754474 - RNA, 19 nt, Artificial Sequence
  Description of Artificial Sequence: Synthetic oligonucleotide
uuuucuuggcacucauuuc

SEQ ID NO: 2754475 - RNA, 19 nt, Artificial Sequence
  Description of Artificial Sequence: Synthetic oligonucleotide
agauauuauaguaaacauu

SEQ ID NO: 2754476 - RNA, 19 nt, Artificial Sequence
  Description of Artificial Sequence: Synthetic oligonucleotide
uugccauuugucaaacaau

SEQ ID NO: 2754477 - RNA, 19 nt, Artificial Sequence
  Description of Artificial Sequence: Synthetic oligonucleotide
gacauagugccuaggugag

SEQ ID NO: 2754478 - RNA, 19 nt, Artificial Sequence
  Description of Artificial Sequence: Synthetic oligonucleotide
gcaagaucaccacaguugc

SEQ ID NO: 2754479 - RNA, 19 nt, Artificial Sequence
  Description of Artificial Sequence: Synthetic oligonucleotide
uaagccccggacaagcuuc

SEQ ID NO: 2754480 - RNA, 19 nt, Artificial Sequence
  Description of Artificial Sequence: Synthetic oligonucleotide
agugccuaggugaguaagc

SEQ ID NO: 2754481 - RNA, 19 nt, Artificial Sequence
  Description of Artificial Sequence: Synthetic oligonucleotide
uaaacauuauuugguaauu

SEQ ID NO: 2754482 - RNA, 19 nt, Artificial Sequence
  Description of Artificial Sequence: Synthetic oligonucleotide
acucauuucaucagaguca

SEQ ID NO: 2754483 - RNA, 19 nt, Artificial Sequence
  Description of Artificial Sequence: Synthetic oligonucleotide
ucgcccaagguacacagau

SEQ ID NO: 2754484 - RNA, 19 nt, Artificial Sequence
  Description of Artificial Sequence: Synthetic oligonucleotide
uccugguccauuacacagc

SEQ ID NO: 2754485 - RNA, 19 nt, Artificial Sequence
  Description of Artificial Sequence: Synthetic oligonucleotide
cuagcagcaagaucaccac

SEQ ID NO: 2754486 - RNA, 19 nt, Artificial Sequence
  Description of Artificial Sequence: Synthetic oligonucleotide
cucaccaugcaaagggaug

SEQ ID NO: 2754487 - RNA, 19 nt, Artificial Sequence
  Description of Artificial Sequence: Synthetic oligonucleotide
gaugacauagugccuaggu

SEQ ID NO: 2754488 - RNA, 19 nt, Artificial Sequence
  Description of Artificial Sequence: Synthetic oligonucleotide
cuacuaucaagggugugag

SEQ ID NO: 2754489 - RNA, 19 nt, Artificial Sequence
  Description of Artificial Sequence: Synthetic oligonucleotide
ucaauuuucuuggcacuca

SEQ ID NO: 2754490 - RNA, 19 nt, Artificial Sequence
  Description of Artificial Sequence: Synthetic oligonucleotide
agaaucucagugguauguc

SEQ ID NO: 2754491 - RNA, 19 nt, Artificial Sequence
  Description of Artificial Sequence: Synthetic oligonucleotide
gggauaaaguuuccacucg

SEQ ID NO: 2754492 - RNA, 19 nt, Artificial Sequence
  Description of Artificial Sequence: Synthetic oligonucleotide
uucaauuuucuuggcacuc

SEQ ID NO: 2754493 - RNA, 19 nt, Artificial Sequence
  Description of Artificial Sequence: Synthetic oligonucleotide
uccauuacacagcaccauu

SEQ ID NO: 2754494 - RNA, 19 nt, Artificial Sequence
  Description of Artificial Sequence: Synthetic oligonucleotide
ggauccagcuacuaucaag

SEQ ID NO: 2754495 - RNA, 19 nt, Artificial Sequence
  Description of Artificial Sequence: Synthetic oligonucleotide
gcagcuagaaucaggaggc

SEQ ID NO: 2754496 - RNA, 19 nt, Artificial Sequence
  Description of Artificial Sequence: Synthetic oligonucleotide
guggaagagaaucuuccca

SEQ ID NO: 2754497 - RNA, 19 nt, Artificial Sequence
  Description of Artificial Sequence: Synthetic oligonucleotide
ucaagacucugaaguugcc

SEQ ID NO: 2754498 - RNA, 19 nt, Artificial Sequence
  Description of Artificial Sequence: Synthetic oligonucleotide
auccagcuacuaucaaggg

SEQ ID NO: 2754499 - RNA, 19 nt, Artificial Sequence
  Description of Artificial Sequence: Synthetic oligonucleotide
gaguaagccccggacaagc

SEQ ID NO: 2754500 - RNA, 19 nt, Artificial Sequence
  Description of Artificial Sequence: Synthetic oligonucleotide
ucuccuugagagccggcca

SEQ ID NO: 2754501 - RNA, 19 nt, Artificial Sequence
  Description of Artificial Sequence: Synthetic oligonucleotide
agucucacgacuagcagca

SEQ ID NO: 2754502 - RNA, 19 nt, Artificial Sequence
  Description of Artificial Sequence: Synthetic oligonucleotide
uggcacucauuucaucaga

SEQ ID NO: 2754503 - RNA, 19 nt, Artificial Sequence
  Description of Artificial Sequence: Synthetic oligonucleotide
uucuccuugagagccggcc

SEQ ID NO: 2754504 - RNA, 19 nt, Artificial Sequence
  Description of Artificial Sequence: Synthetic oligonucleotide
ggaaacgacgugaaggggc

SEQ ID NO: 2754505 - RNA, 19 nt, Artificial Sequence
  Description of Artificial Sequence: Synthetic oligonucleotide
ccaagguacacagauuugg

SEQ ID NO: 2754506 - RNA, 19 nt, Artificial Sequence
  Description of Artificial Sequence: Synthetic oligonucleotide
agcuagaaucaggaggcuc

SEQ ID NO: 2754507 - RNA, 19 nt, Artificial Sequence
  Description of Artificial Sequence: Synthetic oligonucleotide
caugcaaagggauggcgca

SEQ ID NO: 2754508 - RNA, 19 nt, Artificial Sequence
  Description of Artificial Sequence: Synthetic oligonucleotide
cucacgacuagcagcaaga

SEQ ID NO: 2754509 - RNA, 19 nt, Artificial Sequence
  Description of Artificial Sequence: Synthetic oligonucleotide
ugagagacucucgggaaac

SEQ ID NO: 2754510 - RNA, 19 nt, Artificial Sequence
  Description of Artificial Sequence: Synthetic oligonucleotide
agucagcgaugacauagug

SEQ ID NO: 2754511 - RNA, 19 nt, Artificial Sequence
  Description of Artificial Sequence: Synthetic oligonucleotide
cuuucuuuauuccaaguau

SEQ ID NO: 2754512 - RNA, 19 nt, Artificial Sequence
  Description of Artificial Sequence: Synthetic oligonucleotide
gaugggaacacauguuccu

SEQ ID NO: 2754513 - RNA, 19 nt, Artificial Sequence
  Description of Artificial Sequence: Synthetic oligonucleotide
uagugccuaggugaguaag

SEQ ID NO: 2754514 - RNA, 19 nt, Artificial Sequence
  Description of Artificial Sequence: Synthetic oligonucleotide
ugccuaggugaguaagccc

SEQ ID NO: 2754515 - RNA, 19 nt, Artificial Sequence
  Description of Artificial Sequence: Synthetic oligonucleotide
aaguaaucagagaggugga

SEQ ID NO: 2754516 - RNA, 19 nt, Artificial Sequence
  Description of Artificial Sequence: Synthetic oligonucleotide
aauucgcccaagguacaca

SEQ ID NO: 2754517 - RNA, 19 nt, Artificial Sequence
  Description of Artificial Sequence: Synthetic oligonucleotide
accaugcaaagggauggcg

SEQ ID NO: 2754518 - RNA, 19 nt, Artificial Sequence
  Description of Artificial Sequence: Synthetic oligonucleotide
ucuucccagacagggauaa

SEQ ID NO: 2754519 - RNA, 19 nt, Artificial Sequence
  Description of Artificial Sequence: Synthetic oligonucleotide
gguggaagagaaucuuccc

SEQ ID NO: 2754520 - RNA, 19 nt, Artificial Sequence
  Description of Artificial Sequence: Synthetic oligonucleotide
caagaucaccacaguugcc

SEQ ID NO: 2754521 - RNA, 19 nt, Artificial Sequence
  Description of Artificial Sequence: Synthetic oligonucleotide
gugaguaagccccggacaa

SEQ ID NO: 2754522 - RNA, 19 nt, Artificial Sequence
  Description of Artificial Sequence: Synthetic oligonucleotide
acuucuccuugagagccgg

SEQ ID NO: 2754523 - RNA, 19 nt, Artificial Sequence
  Description of Artificial Sequence: Synthetic oligonucleotide
ccaaguaucccaaggagca

SEQ ID NO: 2754524 - RNA, 19 nt, Artificial Sequence
  Description of Artificial Sequence: Synthetic oligonucleotide
acgugaaggggccgaauga

SEQ ID NO: 2754525 - RNA, 19 nt, Artificial Sequence
  Description of Artificial Sequence: Synthetic oligonucleotide
cucucaacguagacaauga

SEQ ID NO: 2754526 - RNA, 19 nt, Artificial Sequence
  Description of Artificial Sequence: Synthetic oligonucleotide
gagaaucuucccagacagg

SEQ ID NO: 2754527 - RNA, 19 nt, Artificial Sequence
  Description of Artificial Sequence: Synthetic oligonucleotide
ucucgggaaacgacgugaa

SEQ ID NO: 2754528 - RNA, 19 nt, Artificial Sequence
  Description of Artificial Sequence: Synthetic oligonucleotide
gaaggggccgaaugaccgc

SEQ ID NO: 2754529 - RNA, 19 nt, Artificial Sequence
  Description of Artificial Sequence: Synthetic oligonucleotide
cauuauuugguaauuuguu

SEQ ID NO: 2754530 - RNA, 19 nt, Artificial Sequence
  Description of Artificial Sequence: Synthetic oligonucleotide
uuuccacucggcagaugcu

SEQ ID NO: 2754531 - RNA, 19 nt, Artificial Sequence
  Description of Artificial Sequence: Synthetic oligonucleotide
acauguuccugguccauua

SEQ ID NO: 2754532 - RNA, 19 nt, Artificial Sequence
  Description of Artificial Sequence: Synthetic oligonucleotide
ugaguaagccccggacaag

SEQ ID NO: 2754533 - RNA, 19 nt, Artificial Sequence
  Description of Artificial Sequence: Synthetic oligonucleotide
cagauuugggguacuucuc

SEQ ID NO: 2754534 - RNA, 19 nt, Artificial Sequence
  Description of Artificial Sequence: Synthetic oligonucleotide
cgaaugaccgcccauaguc

SEQ ID NO: 2754535 - RNA, 19 nt, Artificial Sequence
  Description of Artificial Sequence: Synthetic oligonucleotide
gaggcucaccaugcaaagg

SEQ ID NO: 2754536 - RNA, 19 nt, Artificial Sequence
  Description of Artificial Sequence: Synthetic oligonucleotide
uaggugaguaagccccgga

SEQ ID NO: 2754537 - RNA, 19 nt, Artificial Sequence
  Description of Artificial Sequence: Synthetic oligonucleotide
gccuaggugaguaagcccc

SEQ ID NO: 2754538 - RNA, 19 nt, Artificial Sequence
  Description of Artificial Sequence: Synthetic oligonucleotide
gcucucaacguagacaaug

SEQ ID NO: 2754539 - RNA, 19 nt, Artificial Sequence
  Description of Artificial Sequence: Synthetic oligonucleotide
accgcccauagucucacga

SEQ ID NO: 2754540 - RNA, 19 nt, Artificial Sequence
  Description of Artificial Sequence: Synthetic oligonucleotide
cacagaugggaacacaugu

SEQ ID NO: 2754541 - RNA, 19 nt, Artificial Sequence
  Description of Artificial Sequence: Synthetic oligonucleotide
acguagacaaugaucacuu

SEQ ID NO: 2754542 - RNA, 19 nt, Artificial Sequence
  Description of Artificial Sequence: Synthetic oligonucleotide
ccaugcaaagggauggcgc

SEQ ID NO: 2754543 - RNA, 19 nt, Artificial Sequence
  Description of Artificial Sequence: Synthetic oligonucleotide
gugccuaggugaguaagcc

SEQ ID NO: 2754544 - RNA, 19 nt, Artificial Sequence
  Description of Artificial Sequence: Synthetic oligonucleotide
aacgacgugaaggggccga

SEQ ID NO: 2754545 - RNA, 19 nt, Artificial Sequence
  Description of Artificial Sequence: Synthetic oligonucleotide
aucaccacaguugccgcug

SEQ ID NO: 2754546 - RNA, 19 nt, Artificial Sequence
  Description of Artificial Sequence: Synthetic oligonucleotide
agcgaugacauagugccua

SEQ ID NO: 2754547 - RNA, 19 nt, Artificial Sequence
  Description of Artificial Sequence: Synthetic oligonucleotide
agacaaugaucacuuucuu

SEQ ID NO: 2754548 - RNA, 19 nt, Artificial Sequence
  Description of Artificial Sequence: Synthetic oligonucleotide
caaacaauucgcccaaggu

SEQ ID NO: 2754549 - RNA, 19 nt, Artificial Sequence
  Description of Artificial Sequence: Synthetic oligonucleotide
uacuaucaagggugugaga

SEQ ID NO: 2754550 - RNA, 19 nt, Artificial Sequence
  Description of Artificial Sequence: Synthetic oligonucleotide
agacagggauaaaguuucc

SEQ ID NO: 2754551 - RNA, 19 nt, Artificial Sequence
  Description of Artificial Sequence: Synthetic oligonucleotide
caacguagacaaugaucac

SEQ ID NO: 2754552 - RNA, 19 nt, Artificial Sequence
  Description of Artificial Sequence: Synthetic oligonucleotide
aaacgacgugaaggggccg

SEQ ID NO: 2754553 - RNA, 19 nt, Artificial Sequence
  Description of Artificial Sequence: Synthetic oligonucleotide
agugguauguccaccggau

SEQ ID NO: 2754554 - RNA, 19 nt, Artificial Sequence
  Description of Artificial Sequence: Synthetic oligonucleotide
cuaucaagggugugagaga

SEQ ID NO: 2754555 - RNA, 19 nt, Artificial Sequence
  Description of Artificial Sequence: Synthetic oligonucleotide
cuugagagccggccacugc

SEQ ID NO: 2754556 - RNA, 19 nt, Artificial Sequence
  Description of Artificial Sequence: Synthetic oligonucleotide
ucuuggcacucauuucauc

SEQ ID NO: 2754557 - RNA, 19 nt, Artificial Sequence
  Description of Artificial Sequence: Synthetic oligonucleotide
uugccgcugcggcagcuag

SEQ ID NO: 2754558 - RNA, 19 nt, Artificial Sequence
  Description of Artificial Sequence: Synthetic oligonucleotide
aagccccggacaagcuucc

SEQ ID NO: 2754559 - RNA, 19 nt, Artificial Sequence
  Description of Artificial Sequence: Synthetic oligonucleotide
ugagagccggccacugcac

SEQ ID NO: 2754560 - RNA, 19 nt, Artificial Sequence
  Description of Artificial Sequence: Synthetic oligonucleotide
acugcacaaugaaguaauc

SEQ ID NO: 2754561 - RNA, 19 nt, Artificial Sequence
  Description of Artificial Sequence: Synthetic oligonucleotide
gagguggaagagaaucuuc

SEQ ID NO: 2754562 - RNA, 19 nt, Artificial Sequence
  Description of Artificial Sequence: Synthetic oligonucleotide
gcuagaaucaggaggcuca

SEQ ID NO: 2754563 - RNA, 19 nt, Artificial Sequence
  Description of Artificial Sequence: Synthetic oligonucleotide
guccaccggauccagcuac

SEQ ID NO: 2754564 - RNA, 19 nt, Artificial Sequence
  Description of Artificial Sequence: Synthetic oligonucleotide
gauuugggguacuucuccu

SEQ ID NO: 2754565 - RNA, 19 nt, Artificial Sequence
  Description of Artificial Sequence: Synthetic oligonucleotide
cauguuccugguccauuac

SEQ ID NO: 2754566 - RNA, 19 nt, Artificial Sequence
  Description of Artificial Sequence: Synthetic oligonucleotide
cgggaaacgacgugaaggg

SEQ ID NO: 2754567 - RNA, 19 nt, Artificial Sequence
  Description of Artificial Sequence: Synthetic oligonucleotide
uuccacucggcagaugcuc

SEQ ID NO: 2754568 - RNA, 19 nt, Artificial Sequence
  Description of Artificial Sequence: Synthetic oligonucleotide
gcuacuaucaaggguguga

SEQ ID NO: 2754569 - RNA, 19 nt, Artificial Sequence
  Description of Artificial Sequence: Synthetic oligonucleotide
accagccucagaaucucag

SEQ ID NO: 2754570 - RNA, 19 nt, Artificial Sequence
  Description of Artificial Sequence: Synthetic oligonucleotide
aguaaucagagagguggaa

SEQ ID NO: 2754571 - RNA, 19 nt, Artificial Sequence
  Description of Artificial Sequence: Synthetic oligonucleotide
guuccugguccauuacaca

SEQ ID NO: 2754572 - RNA, 19 nt, Artificial Sequence
  Description of Artificial Sequence: Synthetic oligonucleotide
cacgacuagcagcaagauc

SEQ ID NO: 2754573 - RNA, 19 nt, Artificial Sequence
  Description of Artificial Sequence: Synthetic oligonucleotide
acacagaugggaacacaug

SEQ ID NO: 2754574 - RNA, 19 nt, Artificial Sequence
  Description of Artificial Sequence: Synthetic oligonucleotide
cagggauaaaguuuccacu

SEQ ID NO: 2754575 - RNA, 19 nt, Artificial Sequence
  Description of Artificial Sequence: Synthetic oligonucleotide
agagguggaagagaaucuu

SEQ ID NO: 2754576 - RNA, 19 nt, Artificial Sequence
  Description of Artificial Sequence: Synthetic oligonucleotide
cuaggugaguaagccccgg

SEQ ID NO: 2754577 - RNA, 19 nt, Artificial Sequence
  Description of Artificial Sequence: Synthetic oligonucleotide
ggcacucauuucaucagag

SEQ ID NO: 2754578 - RNA, 19 nt, Artificial Sequence
  Description of Artificial Sequence: Synthetic oligonucleotide
gugaaggggccgaaugacc

SEQ ID NO: 2754579 - RNA, 19 nt, Artificial Sequence
  Description of Artificial Sequence: Synthetic oligonucleotide
caaagggauggcgcaugcg

SEQ ID NO: 2754580 - RNA, 19 nt, Artificial Sequence
  Description of Artificial Sequence: Synthetic oligonucleotide
cuagaaucaggaggcucac

SEQ ID NO: 2754581 - RNA, 19 nt, Artificial Sequence
  Description of Artificial Sequence: Synthetic oligonucleotide
ccauuacacagcaccauuc

SEQ ID NO: 2754582 - RNA, 19 nt, Artificial Sequence
  Description of Artificial Sequence: Synthetic oligonucleotide
aagcuuccaaccagccuca

SEQ ID NO: 2754583 - RNA, 19 nt, Artificial Sequence
  Description of Artificial Sequence: Synthetic oligonucleotide
guacacagauuugggguac

SEQ ID NO: 2754584 - RNA, 19 nt, Artificial Sequence
  Description of Artificial Sequence: Synthetic oligonucleotide
uagaaucaggaggcucacc

SEQ ID NO: 2754585 - RNA, 19 nt, Artificial Sequence
  Description of Artificial Sequence: Synthetic oligonucleotide
uucgcccaagguacacaga

SEQ ID NO: 2754586 - RNA, 19 nt, Artificial Sequence
  Description of Artificial Sequence: Synthetic oligonucleotide
gguacacagauuuggggua

SEQ ID NO: 2754587 - RNA, 19 nt, Artificial Sequence
  Description of Artificial Sequence: Synthetic oligonucleotide
cucgggaaacgacgugaag

SEQ ID NO: 2754588 - RNA, 19 nt, Artificial Sequence
  Description of Artificial Sequence: Synthetic oligonucleotide
uccaccggauccagcuacu

SEQ ID NO: 2754589 - RNA, 19 nt, Artificial Sequence
  Description of Artificial Sequence: Synthetic oligonucleotide
cucagaaucucagugguau

SEQ ID NO: 2754590 - RNA, 19 nt, Artificial Sequence
  Description of Artificial Sequence: Synthetic oligonucleotide
accauucaaaagauucaau

SEQ ID NO: 2754591 - RNA, 19 nt, Artificial Sequence
  Description of Artificial Sequence: Synthetic oligonucleotide
agacucugaaguugccauu

SEQ ID NO: 2754592 - RNA, 19 nt, Artificial Sequence
  Description of Artificial Sequence: Synthetic oligonucleotide
cucucgggaaacgacguga

SEQ ID NO: 2754593 - RNA, 19 nt, Artificial Sequence
  Description of Artificial Sequence: Synthetic oligonucleotide
agagccggccacugcacaa

SEQ ID NO: 2754594 - RNA, 19 nt, Artificial Sequence
  Description of Artificial Sequence: Synthetic oligonucleotide
acagaugggaacacauguu

SEQ ID NO: 2754595 - RNA, 19 nt, Artificial Sequence
  Description of Artificial Sequence: Synthetic oligonucleotide
caauucgcccaagguacac

SEQ ID NO: 2754596 - RNA, 19 nt, Artificial Sequence
  Description of Artificial Sequence: Synthetic oligonucleotide
gugagagacucucgggaaa

SEQ ID NO: 2754597 - RNA, 19 nt, Artificial Sequence
  Description of Artificial Sequence: Synthetic oligonucleotide
guauguccaccggauccag

SEQ ID NO: 2754598 - RNA, 19 nt, Artificial Sequence
  Description of Artificial Sequence: Synthetic oligonucleotide
ucacgacuagcagcaagau

SEQ ID NO: 2754599 - RNA, 19 nt, Artificial Sequence
  Description of Artificial Sequence: Synthetic oligonucleotide
agggugugagagacucucg

SEQ ID NO: 2754600 - RNA, 19 nt, Artificial Sequence
  Description of Artificial Sequence: Synthetic oligonucleotide
uacacagauuugggguacu

SEQ ID NO: 2754601 - RNA, 19 nt, Artificial Sequence
  Description of Artificial Sequence: Synthetic oligonucleotide
ccuaggugaguaagccccg

SEQ ID NO: 2754602 - RNA, 19 nt, Artificial Sequence
  Description of Artificial Sequence: Synthetic oligonucleotide
cacacagaugggaacacau

SEQ ID NO: 2754603 - RNA, 19 nt, Artificial Sequence
  Description of Artificial Sequence: Synthetic oligonucleotide
uguccaccggauccagcua

SEQ ID NO: 2754604 - RNA, 19 nt, Artificial Sequence
  Description of Artificial Sequence: Synthetic oligonucleotide
gugguauguccaccggauc

SEQ ID NO: 2754605 - RNA, 19 nt, Artificial Sequence
  Description of Artificial Sequence: Synthetic oligonucleotide
ugaccgcccauagucucac

SEQ ID NO: 2754606 - RNA, 19 nt, Artificial Sequence
  Description of Artificial Sequence: Synthetic oligonucleotide
cagugguauguccaccgga

SEQ ID NO: 2754607 - RNA, 19 nt, Artificial Sequence
  Description of Artificial Sequence: Synthetic oligonucleotide
gggaaacgacgugaagggg

SEQ ID NO: 2754608 - RNA, 19 nt, Artificial Sequence
  Description of Artificial Sequence: Synthetic oligonucleotide
gccgaaugaccgcccauag

SEQ ID NO: 2754609 - RNA, 19 nt, Artificial Sequence
  Description of Artificial Sequence: Synthetic oligonucleotide
gucaaacaauucgcccaag

SEQ ID NO: 2754610 - RNA, 19 nt, Artificial Sequence
  Description of Artificial Sequence: Synthetic oligonucleotide
ccauucaaaagauucaauu

SEQ ID NO: 2754611 - RNA, 19 nt, Artificial Sequence
  Description of Artificial Sequence: Synthetic oligonucleotide
cuucuccuugagagccggc

SEQ ID NO: 2754612 - RNA, 19 nt, Artificial Sequence
  Description of Artificial Sequence: Synthetic oligonucleotide
caccaugcaaagggauggc

SEQ ID NO: 2754613 - RNA, 19 nt, Artificial Sequence
  Description of Artificial Sequence: Synthetic oligonucleotide
acaauucgcccaagguaca

SEQ ID NO: 2754614 - RNA, 19 nt, Artificial Sequence
  Description of Artificial Sequence: Synthetic oligonucleotide
gcaaagggauggcgcaugc

SEQ ID NO: 2754615 - RNA, 19 nt, Artificial Sequence
  Description of Artificial Sequence: Synthetic oligonucleotide
gaaugaccgcccauagucu

SEQ ID NO: 2754616 - RNA, 19 nt, Artificial Sequence
  Description of Artificial Sequence: Synthetic oligonucleotide
cgcugcggcagcuagaauc

SEQ ID NO: 2754617 - RNA, 19 nt, Artificial Sequence
  Description of Artificial Sequence: Synthetic oligonucleotide
cagaugcucucaacguaga

SEQ ID NO: 2754618 - RNA, 19 nt, Artificial Sequence
  Description of Artificial Sequence: Synthetic oligonucleotide
cagaaucucagugguaugu

SEQ ID NO: 2754619 - RNA, 19 nt, Artificial Sequence
  Description of Artificial Sequence: Synthetic oligonucleotide
gagagccggccacugcaca

SEQ ID NO: 2754620 - RNA, 19 nt, Artificial Sequence
  Description of Artificial Sequence: Synthetic oligonucleotide
gguccauuacacagcacca

SEQ ID NO: 2754621 - RNA, 19 nt, Artificial Sequence
  Description of Artificial Sequence: Synthetic oligonucleotide
aguaagccccggacaagcu

SEQ ID NO: 2754622 - RNA, 19 nt, Artificial Sequence
  Description of Artificial Sequence: Synthetic oligonucleotide
uccuugagagccggccacu

SEQ ID NO: 2754623 - RNA, 19 nt, Artificial Sequence
  Description of Artificial Sequence: Synthetic oligonucleotide
agcuacuaucaagggugug

SEQ ID NO: 2754624 - RNA, 19 nt, Artificial Sequence
  Description of Artificial Sequence: Synthetic oligonucleotide
ggaacacauguuccugguc

SEQ ID NO: 2754625 - RNA, 19 nt, Artificial Sequence
  Description of Artificial Sequence: Synthetic oligonucleotide
cccggacaagcuuccaacc

SEQ ID NO: 2754626 - RNA, 19 nt, Artificial Sequence
  Description of Artificial Sequence: Synthetic oligonucleotide
cacaguugccgcugcggca

SEQ ID NO: 2754627 - RNA, 19 nt, Artificial Sequence
  Description of Artificial Sequence: Synthetic oligonucleotide
gacucugaaguugccauuu

SEQ ID NO: 2754628 - RNA, 19 nt, Artificial Sequence
  Description of Artificial Sequence: Synthetic oligonucleotide
ugcucucaacguagacaau

SEQ ID NO: 2754629 - RNA, 19 nt, Artificial Sequence
  Description of Artificial Sequence: Synthetic oligonucleotide
cacuuucuuuauuccaagu

SEQ ID NO: 2754630 - RNA, 19 nt, Artificial Sequence
  Description of Artificial Sequence: Synthetic oligonucleotide
cccauagucucacgacuag

SEQ ID NO: 2754631 - RNA, 19 nt, Artificial Sequence
  Description of Artificial Sequence: Synthetic oligonucleotide
ccacaguugccgcugcggc

SEQ ID NO: 2754632 - RNA, 19 nt, Artificial Sequence
  Description of Artificial Sequence: Synthetic oligonucleotide
cggacaagcuuccaaccag

SEQ ID NO: 2754633 - RNA, 19 nt, Artificial Sequence
  Description of Artificial Sequence: Synthetic oligonucleotide
acucggcagaugcucucaa

SEQ ID NO: 2754634 - RNA, 19 nt, Artificial Sequence
  Description of Artificial Sequence: Synthetic oligonucleotide
gaccgcccauagucucacg

SEQ ID NO: 2754635 - RNA, 19 nt, Artificial Sequence
  Description of Artificial Sequence: Synthetic oligonucleotide
caucagagucagcgaugac

SEQ ID NO: 2754636 - RNA, 19 nt, Artificial Sequence
  Description of Artificial Sequence: Synthetic oligonucleotide
guaucccaaggagcagggc

SEQ ID NO: 2754637 - RNA, 19 nt, Artificial Sequence
  Description of Artificial Sequence: Synthetic oligonucleotide
acauagugccuaggugagu

SEQ ID NO: 2754638 - RNA, 19 nt, Artificial Sequence
  Description of Artificial Sequence: Synthetic oligonucleotide
augaccgcccauagucuca

SEQ ID NO: 2754639 - RNA, 19 nt, Artificial Sequence
  Description of Artificial Sequence: Synthetic oligonucleotide
gcggcagcuagaaucagga

SEQ ID NO: 2754640 - RNA, 19 nt, Artificial Sequence
  Description of Artificial Sequence: Synthetic oligonucleotide
cugguccauuacacagcac

SEQ ID NO: 2754641 - RNA, 19 nt, Artificial Sequence
  Description of Artificial Sequence: Synthetic oligonucleotide
ccauagucucacgacuagc

SEQ ID NO: 2754642 - RNA, 19 nt, Artificial Sequence
  Description of Artificial Sequence: Synthetic oligonucleotide
ccccggacaagcuuccaac

SEQ ID NO: 2754643 - RNA, 19 nt, Artificial Sequence
  Description of Artificial Sequence: Synthetic oligonucleotide
gacucucgggaaacgacgu

SEQ ID NO: 2754644 - RNA, 19 nt, Artificial Sequence
  Description of Artificial Sequence: Synthetic oligonucleotide
ugccgcugcggcagcuaga

SEQ ID NO: 2754645 - RNA, 19 nt, Artificial Sequence
  Description of Artificial Sequence: Synthetic oligonucleotide
aggggccgaaugaccgccc

SEQ ID NO: 2754646 - RNA, 19 nt, Artificial Sequence
  Description of Artificial Sequence: Synthetic oligonucleotide
cccaagguacacagauuug

SEQ ID NO: 2754647 - RNA, 19 nt, Artificial Sequence
  Description of Artificial Sequence: Synthetic oligonucleotide
augcaaagggauggcgcau

SEQ ID NO: 2754648 - RNA, 19 nt, Artificial Sequence
  Description of Artificial Sequence: Synthetic oligonucleotide
gcccaagguacacagauuu

SEQ ID NO: 2754649 - RNA, 19 nt, Artificial Sequence
  Description of Artificial Sequence: Synthetic oligonucleotide
aucaagggugugagagacu

SEQ ID NO: 2754650 - RNA, 19 nt, Artificial Sequence
  Description of Artificial Sequence: Synthetic oligonucleotide
caauuuucuuggcacucau

SEQ ID NO: 2754651 - RNA, 19 nt, Artificial Sequence
  Description of Artificial Sequence: Synthetic oligonucleotide
aguuuccacucggcagaug

SEQ ID NO: 2754652 - RNA, 19 nt, Artificial Sequence
  Description of Artificial Sequence: Synthetic oligonucleotide
gagucagcgaugacauagu

SEQ ID NO: 2754653 - RNA, 19 nt, Artificial Sequence
  Description of Artificial Sequence: Synthetic oligonucleotide
caggaggcucaccaugcaa

SEQ ID NO: 2754654 - RNA, 19 nt, Artificial Sequence
  Description of Artificial Sequence: Synthetic oligonucleotide
ccggauccagcuacuauca

SEQ ID NO: 2754655 - RNA, 19 nt, Artificial Sequence
  Description of Artificial Sequence: Synthetic oligonucleotide
acacagauuugggguacuu

SEQ ID NO: 2754656 - RNA, 19 nt, Artificial Sequence
  Description of Artificial Sequence: Synthetic oligonucleotide
gggcagacacacagauggg

SEQ ID NO: 2754657 - RNA, 19 nt, Artificial Sequence
  Description of Artificial Sequence: Synthetic oligonucleotide
guaagccccggacaagcuu

SEQ ID NO: 2754658 - RNA, 19 nt, Artificial Sequence
  Description of Artificial Sequence: Synthetic oligonucleotide
ccgcccauagucucacgac

SEQ ID NO: 2754659 - RNA, 19 nt, Artificial Sequence
  Description of Artificial Sequence: Synthetic oligonucleotide
ccagacagggauaaaguuu

SEQ ID NO: 2754660 - RNA, 19 nt, Artificial Sequence
  Description of Artificial Sequence: Synthetic oligonucleotide
cgugaaggggccgaaugac

SEQ ID NO: 2754661 - RNA, 19 nt, Artificial Sequence
  Description of Artificial Sequence: Synthetic oligonucleotide
cagcaagaucaccacaguu

SEQ ID NO: 2754662 - RNA, 19 nt, Artificial Sequence
  Description of Artificial Sequence: Synthetic oligonucleotide
gcuuccaaccagccucaga

SEQ ID NO: 2754663 - RNA, 19 nt, Artificial Sequence
  Description of Artificial Sequence: Synthetic oligonucleotide
cacucggcagaugcucuca

SEQ ID NO: 2754664 - RNA, 19 nt, Artificial Sequence
  Description of Artificial Sequence: Synthetic oligonucleotide
ccggacaagcuuccaacca

SEQ ID NO: 2754665 - RNA, 19 nt, Artificial Sequence
  Description of Artificial Sequence: Synthetic oligonucleotide
gcacucauuucaucagagu

SEQ ID NO: 2754666 - RNA, 19 nt, Artificial Sequence
  Description of Artificial Sequence: Synthetic oligonucleotide
aguugccgcugcggcagcu

SEQ ID NO: 2754667 - RNA, 19 nt, Artificial Sequence
  Description of Artificial Sequence: Synthetic oligonucleotide
cagcuacuaucaagggugu

SEQ ID NO: 2754668 - RNA, 19 nt, Artificial Sequence
  Description of Artificial Sequence: Synthetic oligonucleotide
cugcggcagcuagaaucag

SEQ ID NO: 2754669 - RNA, 19 nt, Artificial Sequence
  Description of Artificial Sequence: Synthetic oligonucleotide
ggcucaccaugcaaaggga

SEQ ID NO: 2754670 - RNA, 19 nt, Artificial Sequence
  Description of Artificial Sequence: Synthetic oligonucleotide
caguugccgcugcggcagc

SEQ ID NO: 2754671 - RNA, 19 nt, Artificial Sequence
  Description of Artificial Sequence: Synthetic oligonucleotide
cggccacugcacaaugaag

SEQ ID NO: 2754672 - RNA, 19 nt, Artificial Sequence
  Description of Artificial Sequence: Synthetic oligonucleotide
cgacuagcagcaagaucac

SEQ ID NO: 2754673 - RNA, 19 nt, Artificial Sequence
  Description of Artificial Sequence: Synthetic oligonucleotide
acgacgugaaggggccgaa

SEQ ID NO: 2754674 - RNA, 19 nt, Artificial Sequence
  Description of Artificial Sequence: Synthetic oligonucleotide
caagggugugagagacucu

SEQ ID NO: 2754675 - RNA, 19 nt, Artificial Sequence
  Description of Artificial Sequence: Synthetic oligonucleotide
ccuugagagccggccacug

SEQ ID NO: 2754676 - RNA, 19 nt, Artificial Sequence
  Description of Artificial Sequence: Synthetic oligonucleotide
cgaugacauagugccuagg

SEQ ID NO: 2754677 - RNA, 19 nt, Artificial Sequence
  Description of Artificial Sequence: Synthetic oligonucleotide
ccacucggcagaugcucuc

SEQ ID NO: 2754678 - RNA, 19 nt, Artificial Sequence
  Description of Artificial Sequence: Synthetic oligonucleotide
gcccauagucucacgacua

SEQ ID NO: 2754679 - RNA, 19 nt, Artificial Sequence
  Description of Artificial Sequence: Synthetic oligonucleotide
ccggccacugcacaaugaa

SEQ ID NO: 2754680 - RNA, 19 nt, Artificial Sequence
  Description of Artificial Sequence: Synthetic oligonucleotide
ggggccgaaugaccgccca

SEQ ID NO: 2754681 - RNA, 19 nt, Artificial Sequence
  Description of Artificial Sequence: Synthetic oligonucleotide
cagagucagcgaugacaua

SEQ ID NO: 2754682 - RNA, 19 nt, Artificial Sequence
  Description of Artificial Sequence: Synthetic oligonucleotide
ggccgaaugaccgcccaua

SEQ ID NO: 2754683 - RNA, 19 nt, Artificial Sequence
  Description of Artificial Sequence: Synthetic oligonucleotide
caccggauccagcuacuau

SEQ ID NO: 2754684 - RNA, 19 nt, Artificial Sequence
  Description of Artificial Sequence: Synthetic oligonucleotide
cagagagguggaagagaau

SEQ ID NO: 2754685 - RNA, 19 nt, Artificial Sequence
  Description of Artificial Sequence: Synthetic oligonucleotide
cagcgaugacauagugccu

SEQ ID NO: 2754686 - RNA, 19 nt, Artificial Sequence
  Description of Artificial Sequence: Synthetic oligonucleotide
cggcagcuagaaucaggag

SEQ ID NO: 2754687 - RNA, 19 nt, Artificial Sequence
  Description of Artificial Sequence: Synthetic oligonucleotide
guugccgcugcggcagcua

SEQ ID NO: 2754688 - RNA, 19 nt, Artificial Sequence
  Description of Artificial Sequence: Synthetic oligonucleotide
gcucaccaugcaaagggau

SEQ ID NO: 2754689 - RNA, 19 nt, Artificial Sequence
  Description of Artificial Sequence: Synthetic oligonucleotide
cuucccagacagggauaaa

SEQ ID NO: 2754690 - RNA, 19 nt, Artificial Sequence
  Description of Artificial Sequence: Synthetic oligonucleotide
agccccggacaagcuucca

SEQ ID NO: 2754691 - RNA, 19 nt, Artificial Sequence
  Description of Artificial Sequence: Synthetic oligonucleotide
ccucagaaucucaguggua

SEQ ID NO: 2754692 - RNA, 19 nt, Artificial Sequence
  Description of Artificial Sequence: Synthetic oligonucleotide
cacauguuccugguccauu

SEQ ID NO: 2754693 - RNA, 19 nt, Artificial Sequence
  Description of Artificial Sequence: Synthetic oligonucleotide
gucucacgacuagcagcaa

SEQ ID NO: 2754694 - RNA, 19 nt, Artificial Sequence
  Description of Artificial Sequence: Synthetic oligonucleotide
cagcuagaaucaggaggcu

SEQ ID NO: 2754695 - RNA, 19 nt, Artificial Sequence
  Description of Artificial Sequence: Synthetic oligonucleotide
gccggccacugcacaauga

SEQ ID NO: 2754696 - RNA, 19 nt, Artificial Sequence
  Description of Artificial Sequence: Synthetic oligonucleotide
cggcagaugcucucaacgu

SEQ ID NO: 2754697 - RNA, 19 nt, Artificial Sequence
  Description of Artificial Sequence: Synthetic oligonucleotide
ccgaaugaccgcccauagu

SEQ ID NO: 2754698 - RNA, 19 nt, Artificial Sequence
  Description of Artificial Sequence: Synthetic oligonucleotide
gggccgaaugaccgcccau

SEQ ID NO: 2754699 - RNA, 19 nt, Artificial Sequence
  Description of Artificial Sequence: Synthetic oligonucleotide
cggauccagcuacuaucaa

SEQ ID NO: 2754700 - RNA, 19 nt, Artificial Sequence
  Description of Artificial Sequence: Synthetic oligonucleotide
ccaccggauccagcuacua

SEQ ID NO: 2754701 - RNA, 19 nt, Artificial Sequence
  Description of Artificial Sequence: Synthetic oligonucleotide
cgcccaagguacacagauu

SEQ ID NO: 2754702 - RNA, 19 nt, Artificial Sequence
  Description of Artificial Sequence: Synthetic oligonucleotide
cgacgugaaggggccgaau

SEQ ID NO: 2754703 - RNA, 19 nt, Artificial Sequence
  Description of Artificial Sequence: Synthetic oligonucleotide
ccgcugcggcagcuagaau

SEQ ID NO: 2754704 - RNA, 19 nt, Artificial Sequence
  Description of Artificial Sequence: Synthetic oligonucleotide
aauggaaggacgcgaucac

SEQ ID NO: 2754705 - RNA, 19 nt, Artificial Sequence
  Description of Artificial Sequence: Synthetic oligonucleotide
ggaaacauguuccaaaacc

SEQ ID NO: 2754706 - RNA, 19 nt, Artificial Sequence
  Description of Artificial Sequence: Synthetic oligonucleotide
aaaauggaaggacgcgauc

SEQ ID NO: 2754707 - RNA, 19 nt, Artificial Sequence
  Description of Artificial Sequence: Synthetic oligonucleotide
aaauggaaggacgcgauca

SEQ ID NO: 2754708 - RNA, 19 nt, Artificial Sequence
  Description of Artificial Sequence: Synthetic oligonucleotide
uuccaaaaccucaggaaug

SEQ ID NO: 2754709 - RNA, 19 nt, Artificial Sequence
  Description of Artificial Sequence: Synthetic oligonucleotide
uguuccaaaaccucaggaa

SEQ ID NO: 2754710 - RNA, 19 nt, Artificial Sequence
  Description of Artificial Sequence: Synthetic oligonucleotide
gaaggacgcgaucacauug

SEQ ID NO: 2754711 - RNA, 19 nt, Artificial Sequence
  Description of Artificial Sequence: Synthetic oligonucleotide
aaugucccuaaagcgcugc

SEQ ID NO: 2754712 - RNA, 19 nt, Artificial Sequence
  Description of Artificial Sequence: Synthetic oligonucleotide
aaggacgcgaucacauugc

SEQ ID NO: 2754713 - RNA, 19 nt, Artificial Sequence
  Description of Artificial Sequence: Synthetic oligonucleotide
aacauguuccaaaaccuca

SEQ ID NO: 2754714 - RNA, 19 nt, Artificial Sequence
  Description of Artificial Sequence: Synthetic oligonucleotide
uccaaaaccucaggaauga

SEQ ID NO: 2754715 - RNA, 19 nt, Artificial Sequence
  Description of Artificial Sequence: Synthetic oligonucleotide
cauguuccaaaaccucagg

SEQ ID NO: 2754716 - RNA, 19 nt, Artificial Sequence
  Description of Artificial Sequence: Synthetic oligonucleotide
uggaaggacgcgaucacau

SEQ ID NO: 2754717 - RNA, 19 nt, Artificial Sequence
  Description of Artificial Sequence: Synthetic oligonucleotide
ggggcaaugucccuaaagc

SEQ ID NO: 2754718 - RNA, 19 nt, Artificial Sequence
  Description of Artificial Sequence: Synthetic oligonucleotide
gaaacauguuccaaaaccu

SEQ ID NO: 2754719 - RNA, 19 nt, Artificial Sequence
  Description of Artificial Sequence: Synthetic oligonucleotide
gucccuaaagcgcugcacc

SEQ ID NO: 2754720 - RNA, 19 nt, Artificial Sequence
  Description of Artificial Sequence: Synthetic oligonucleotide
gggcaaugucccuaaagcg

SEQ ID NO: 2754721 - RNA, 19 nt, Artificial Sequence
  Description of Artificial Sequence: Synthetic oligonucleotide
acauguuccaaaaccucag

SEQ ID NO: 2754722 - RNA, 19 nt, Artificial Sequence
  Description of Artificial Sequence: Synthetic oligonucleotide
ggcaaugucccuaaagcgc

SEQ ID NO: 2754723 - RNA, 19 nt, Artificial Sequence
  Description of Artificial Sequence: Synthetic oligonucleotide
guuccaaaaccucaggaau

SEQ ID NO: 2754724 - RNA, 19 nt, Artificial Sequence
  Description of Artificial Sequence: Synthetic oligonucleotide
ucccuaaagcgcugcaccu

SEQ ID NO: 2754725 - RNA, 19 nt, Artificial Sequence
  Description of Artificial Sequence: Synthetic oligonucleotide
ugucccuaaagcgcugcac

SEQ ID NO: 2754726 - RNA, 19 nt, Artificial Sequence
  Description of Artificial Sequence: Synthetic oligonucleotide
caaugucccuaaagcgcug

SEQ ID NO: 2754727 - RNA, 19 nt, Artificial Sequence
  Description of Artificial Sequence: Synthetic oligonucleotide
auggaaggacgcgaucaca

SEQ ID NO: 2754728 - RNA, 19 nt, Artificial Sequence
  Description of Artificial Sequence: Synthetic oligonucleotide
augucccuaaagcgcugca

SEQ ID NO: 2754729 - RNA, 19 nt, Artificial Sequence
  Description of Artificial Sequence: Synthetic oligonucleotide
gcaaugucccuaaagcgcu

SEQ ID NO: 2754730 - RNA, 19 nt, Artificial Sequence
  Description of Artificial Sequence: Synthetic oligonucleotide
caauggggcaaugucccua

SEQ ID NO: 2754731 - RNA, 19 nt, Artificial Sequence
  Description of Artificial Sequence: Synthetic oligonucleotide
cccuaaagcgcugcaccuc

SEQ ID NO: 2754732 - RNA, 19 nt, Artificial Sequence
  Description of Artificial Sequence: Synthetic oligonucleotide
ggaaggacgcgaucacauu

SEQ ID NO: 2754733 - RNA, 19 nt, Artificial Sequence
  Description of Artificial Sequence: Synthetic oligonucleotide
aaugacagccauuuuaucc

SEQ ID NO: 2754734 - RNA, 19 nt, Artificial Sequence
  Description of Artificial Sequence: Synthetic oligonucleotide
aaauauguaaauuaccuug

SEQ ID NO: 2754735 - RNA, 19 nt, Artificial Sequence
  Description of Artificial Sequence: Synthetic oligonucleotide
guaaauauaagccuuaaag

SEQ ID NO: 2754736 - RNA, 19 nt, Artificial Sequence
  Description of Artificial Sequence: Synthetic oligonucleotide
aaauauaagccuuaaagaa

SEQ ID NO: 2754737 - RNA, 19 nt, Artificial Sequence
  Description of Artificial Sequence: Synthetic oligonucleotide
aguuuauagaaugacagcc

SEQ ID NO: 2754738 - RNA, 19 nt, Artificial Sequence
  Description of Artificial Sequence: Synthetic oligonucleotide
acaacuuaaauacauauga

SEQ ID NO: 2754739 - RNA, 19 nt, Artificial Sequence
  Description of Artificial Sequence: Synthetic oligonucleotide
gacacaaccaucuagcugc

SEQ ID NO: 2754740 - RNA, 19 nt, Artificial Sequence
  Description of Artificial Sequence: Synthetic oligonucleotide
auguaaauuaccuuguaag

SEQ ID NO: 2754741 - RNA, 19 nt, Artificial Sequence
  Description of Artificial Sequence: Synthetic oligonucleotide
aauggggaaauaaaguggc

SEQ ID NO: 2754742 - RNA, 19 nt, Artificial Sequence
  Description of Artificial Sequence: Synthetic oligonucleotide
uaaguuaccaggcugauaa

SEQ ID NO: 2754743 - RNA, 19 nt, Artificial Sequence
  Description of Artificial Sequence: Synthetic oligonucleotide
uacacuuucagucauuuca

SEQ ID NO: 2754744 - RNA, 19 nt, Artificial Sequence
  Description of Artificial Sequence: Synthetic oligonucleotide
aauggugaacaguuuauag

SEQ ID NO: 2754745 - RNA, 19 nt, Artificial Sequence
  Description of Artificial Sequence: Synthetic oligonucleotide
ugaacuaagacagaauuag

SEQ ID NO: 2754746 - RNA, 19 nt, Artificial Sequence
  Description of Artificial Sequence: Synthetic oligonucleotide
ugagauuucaauuggugag

SEQ ID NO: 2754747 - RNA, 19 nt, Artificial Sequence
  Description of Artificial Sequence: Synthetic oligonucleotide
uuuuauccuagacaucugg

SEQ ID NO: 2754748 - RNA, 19 nt, Artificial Sequence
  Description of Artificial Sequence: Synthetic oligonucleotide
acuagaauaaguuuccuga

SEQ ID NO: 2754749 - RNA, 19 nt, Artificial Sequence
  Description of Artificial Sequence: Synthetic oligonucleotide
uuaaauggggaaauaaagu

SEQ ID NO: 2754750 - RNA, 19 nt, Artificial Sequence
  Description of Artificial Sequence: Synthetic oligonucleotide
aaaauacacaacuuaaaua

SEQ ID NO: 2754751 - RNA, 19 nt, Artificial Sequence
  Description of Artificial Sequence: Synthetic oligonucleotide
aaauacauaugacacucug

SEQ ID NO: 2754752 - RNA, 19 nt, Artificial Sequence
  Description of Artificial Sequence: Synthetic oligonucleotide
uaaagaaguauuuaucacu

SEQ ID NO: 2754753 - RNA, 19 nt, Artificial Sequence
  Description of Artificial Sequence: Synthetic oligonucleotide
uuagguaccaguguguagg

SEQ ID NO: 2754754 - RNA, 19 nt, Artificial Sequence
  Description of Artificial Sequence: Synthetic oligonucleotide
cuuguaagagcauucacag

SEQ ID NO: 2754755 - RNA, 19 nt, Artificial Sequence
  Description of Artificial Sequence: Synthetic oligonucleotide
cuuucagucauuucaacag

SEQ ID NO: 2754756 - RNA, 19 nt, Artificial Sequence
  Description of Artificial Sequence: Synthetic oligonucleotide
aaauggggaaauaaagugg

SEQ ID NO: 2754757 - RNA, 19 nt, Artificial Sequence
  Description of Artificial Sequence: Synthetic oligonucleotide
aacuuuacaguaacagucc

SEQ ID NO: 2754758 - RNA, 19 nt, Artificial Sequence
  Description of Artificial Sequence: Synthetic oligonucleotide
ugcuauuugacuuuacucu

SEQ ID NO: 2754759 - RNA, 19 nt, Artificial Sequence
  Description of Artificial Sequence: Synthetic oligonucleotide
uaaagaauggugaacaguu

SEQ ID NO: 2754760 - RNA, 19 nt, Artificial Sequence
  Description of Artificial Sequence: Synthetic oligonucleotide
uuuacaguaacaguccucc

SEQ ID NO: 2754761 - RNA, 19 nt, Artificial Sequence
  Description of Artificial Sequence: Synthetic oligonucleotide
uguaaauuaccuuguaaga

SEQ ID NO: 2754762 - RNA, 19 nt, Artificial Sequence
  Description of Artificial Sequence: Synthetic oligonucleotide
cuaagacagaauuagguac

SEQ ID NO: 2754763 - RNA, 19 nt, Artificial Sequence
  Description of Artificial Sequence: Synthetic oligonucleotide
agagcauucacagucaagg

SEQ ID NO: 2754764 - RNA, 19 nt, Artificial Sequence
  Description of Artificial Sequence: Synthetic oligonucleotide
uguauacaagacauaaaca

SEQ ID NO: 2754765 - RNA, 19 nt, Artificial Sequence
  Description of Artificial Sequence: Synthetic oligonucleotide
uagaauaaguuuccugagg

SEQ ID NO: 2754766 - RNA, 19 nt, Artificial Sequence
  Description of Artificial Sequence: Synthetic oligonucleotide
uugacuuuacucuauaaaa

SEQ ID NO: 2754767 - RNA, 19 nt, Artificial Sequence
  Description of Artificial Sequence: Synthetic oligonucleotide
agucauuucaacagaaagc

SEQ ID NO: 2754768 - RNA, 19 nt, Artificial Sequence
  Description of Artificial Sequence: Synthetic oligonucleotide
auagacacaaccaucuagc

SEQ ID NO: 2754769 - RNA, 19 nt, Artificial Sequence
  Description of Artificial Sequence: Synthetic oligonucleotide
aaacugcccaacuuuacag

SEQ ID NO: 2754770 - RNA, 19 nt, Artificial Sequence
  Description of Artificial Sequence: Synthetic oligonucleotide
gauagacacaaccaucuag

SEQ ID NO: 2754771 - RNA, 19 nt, Artificial Sequence
  Description of Artificial Sequence: Synthetic oligonucleotide
aagcaaauauguaaauuac

SEQ ID NO: 2754772 - RNA, 19 nt, Artificial Sequence
  Description of Artificial Sequence: Synthetic oligonucleotide
guaagagacgcugacaucg

SEQ ID NO: 2754773 - RNA, 19 nt, Artificial Sequence
  Description of Artificial Sequence: Synthetic oligonucleotide
aguauuuaucacuugagau

SEQ ID NO: 2754774 - RNA, 19 nt, Artificial Sequence
  Description of Artificial Sequence: Synthetic oligonucleotide
uaagacagaauuagguacc

SEQ ID NO: 2754775 - RNA, 19 nt, Artificial Sequence
  Description of Artificial Sequence: Synthetic oligonucleotide
cauacuagaauaaguuucc

SEQ ID NO: 2754776 - RNA, 19 nt, Artificial Sequence
  Description of Artificial Sequence: Synthetic oligonucleotide
agacauaaacaacugguag

SEQ ID NO: 2754777 - RNA, 19 nt, Artificial Sequence
  Description of Artificial Sequence: Synthetic oligonucleotide
uuuccugagguaaauauaa

SEQ ID NO: 2754778 - RNA, 19 nt, Artificial Sequence
  Description of Artificial Sequence: Synthetic oligonucleotide
agaauuagguaccagugug

SEQ ID NO: 2754779 - RNA, 19 nt, Artificial Sequence
  Description of Artificial Sequence: Synthetic oligonucleotide
caacuuuacaguaacaguc

SEQ ID NO: 2754780 - RNA, 19 nt, Artificial Sequence
  Description of Artificial Sequence: Synthetic oligonucleotide
acauacuagaauaaguuuc

SEQ ID NO: 2754781 - RNA, 19 nt, Artificial Sequence
  Description of Artificial Sequence: Synthetic oligonucleotide
auaaacaacugguagauuu

SEQ ID NO: 2754782 - RNA, 19 nt, Artificial Sequence
  Description of Artificial Sequence: Synthetic oligonucleotide
aaguaagagacgcugacau

SEQ ID NO: 2754783 - RNA, 19 nt, Artificial Sequence
  Description of Artificial Sequence: Synthetic oligonucleotide
aaguauuuaucacuugaga

SEQ ID NO: 2754784 - RNA, 19 nt, Artificial Sequence
  Description of Artificial Sequence: Synthetic oligonucleotide
uguguagguguaaagaagu

SEQ ID NO: 2754785 - RNA, 19 nt, Artificial Sequence
  Description of Artificial Sequence: Synthetic oligonucleotide
ucaauuggugagaacauac

SEQ ID NO: 2754786 - RNA, 19 nt, Artificial Sequence
  Description of Artificial Sequence: Synthetic oligonucleotide
agaauaaguuuccugaggu

SEQ ID NO: 2754787 - RNA, 19 nt, Artificial Sequence
  Description of Artificial Sequence: Synthetic oligonucleotide
uuugacuuuacucuauaaa

SEQ ID NO: 2754788 - RNA, 19 nt, Artificial Sequence
  Description of Artificial Sequence: Synthetic oligonucleotide
ucacuugagauuucaauug

SEQ ID NO: 2754789 - RNA, 19 nt, Artificial Sequence
  Description of Artificial Sequence: Synthetic oligonucleotide
agaaguauuuaucacuuga

SEQ ID NO: 2754790 - RNA, 19 nt, Artificial Sequence
  Description of Artificial Sequence: Synthetic oligonucleotide
aguccucccaccaagagcc

SEQ ID NO: 2754791 - RNA, 19 nt, Artificial Sequence
  Description of Artificial Sequence: Synthetic oligonucleotide
acaguuuauagaaugacag

SEQ ID NO: 2754792 - RNA, 19 nt, Artificial Sequence
  Description of Artificial Sequence: Synthetic oligonucleotide
aauaaguuuccugagguaa

SEQ ID NO: 2754793 - RNA, 19 nt, Artificial Sequence
  Description of Artificial Sequence: Synthetic oligonucleotide
ucuuaaguuaccaggcuga

SEQ ID NO: 2754794 - RNA, 19 nt, Artificial Sequence
  Description of Artificial Sequence: Synthetic oligonucleotide
guaaauuaccuuguaagag

SEQ ID NO: 2754795 - RNA, 19 nt, Artificial Sequence
  Description of Artificial Sequence: Synthetic oligonucleotide
aagagccuuuaccagacag

SEQ ID NO: 2754796 - RNA, 19 nt, Artificial Sequence
  Description of Artificial Sequence: Synthetic oligonucleotide
aacugguagauuuuacacu

SEQ ID NO: 2754797 - RNA, 19 nt, Artificial Sequence
  Description of Artificial Sequence: Synthetic oligonucleotide
aacuaagacagaauuaggu

SEQ ID NO: 2754798 - RNA, 19 nt, Artificial Sequence
  Description of Artificial Sequence: Synthetic oligonucleotide
ugaacaguuuauagaauga

SEQ ID NO: 2754799 - RNA, 19 nt, Artificial Sequence
  Description of Artificial Sequence: Synthetic oligonucleotide
agcaaauauguaaauuacc

SEQ ID NO: 2754800 - RNA, 19 nt, Artificial Sequence
  Description of Artificial Sequence: Synthetic oligonucleotide
uggugaacaguuuauagaa

SEQ ID NO: 2754801 - RNA, 19 nt, Artificial Sequence
  Description of Artificial Sequence: Synthetic oligonucleotide
uauguaaauuaccuuguaa

SEQ ID NO: 2754802 - RNA, 19 nt, Artificial Sequence
  Description of Artificial Sequence: Synthetic oligonucleotide
uccugagguaaauauaagc

SEQ ID NO: 2754803 - RNA, 19 nt, Artificial Sequence
  Description of Artificial Sequence: Synthetic oligonucleotide
uuaaguaagagacgcugac

SEQ ID NO: 2754804 - RNA, 19 nt, Artificial Sequence
  Description of Artificial Sequence: Synthetic oligonucleotide
gugaacaguuuauagaaug

SEQ ID NO: 2754805 - RNA, 19 nt, Artificial Sequence
  Description of Artificial Sequence: Synthetic oligonucleotide
uuuauagaaugacagccau

SEQ ID NO: 2754806 - RNA, 19 nt, Artificial Sequence
  Description of Artificial Sequence: Synthetic oligonucleotide
uagaaugacagccauuuua

SEQ ID NO: 2754807 - RNA, 19 nt, Artificial Sequence
  Description of Artificial Sequence: Synthetic oligonucleotide
aauauaagccuuaaagaau

SEQ ID NO: 2754808 - RNA, 19 nt, Artificial Sequence
  Description of Artificial Sequence: Synthetic oligonucleotide
aauauguaaauuaccuugu

SEQ ID NO: 2754809 - RNA, 19 nt, Artificial Sequence
  Description of Artificial Sequence: Synthetic oligonucleotide
auauaagccuuaaagaaug

SEQ ID NO: 2754810 - RNA, 19 nt, Artificial Sequence
  Description of Artificial Sequence: Synthetic oligonucleotide
aauaaaguggcagugcuua

SEQ ID NO: 2754811 - RNA, 19 nt, Artificial Sequence
  Description of Artificial Sequence: Synthetic oligonucleotide
uacaagacauaaacaacug

SEQ ID NO: 2754812 - RNA, 19 nt, Artificial Sequence
  Description of Artificial Sequence: Synthetic oligonucleotide
aauuggugagaacauacua

SEQ ID NO: 2754813 - RNA, 19 nt, Artificial Sequence
  Description of Artificial Sequence: Synthetic oligonucleotide
uauccuagacaucuggacu

SEQ ID NO: 2754814 - RNA, 19 nt, Artificial Sequence
  Description of Artificial Sequence: Synthetic oligonucleotide
uauagaaugacagccauuu

SEQ ID NO: 2754815 - RNA, 19 nt, Artificial Sequence
  Description of Artificial Sequence: Synthetic oligonucleotide
aaagaaugugcacagcaua

SEQ ID NO: 2754816 - RNA, 19 nt, Artificial Sequence
  Description of Artificial Sequence: Synthetic oligonucleotide
gacauaaacaacugguaga

SEQ ID NO: 2754817 - RNA, 19 nt, Artificial Sequence
  Description of Artificial Sequence: Synthetic oligonucleotide
uauaagccuuaaagaaugg

SEQ ID NO: 2754818 - RNA, 19 nt, Artificial Sequence
  Description of Artificial Sequence: Synthetic oligonucleotide
uuaccaggcugauaaaacc

SEQ ID NO: 2754819 - RNA, 19 nt, Artificial Sequence
  Description of Artificial Sequence: Synthetic oligonucleotide
auccuagacaucuggacuc

SEQ ID NO: 2754820 - RNA, 19 nt, Artificial Sequence
  Description of Artificial Sequence: Synthetic oligonucleotide
cacgggcacauuuaaaugg

SEQ ID NO: 2754821 - RNA, 19 nt, Artificial Sequence
  Description of Artificial Sequence: Synthetic oligonucleotide
cugugugauagacacaacc

SEQ ID NO: 2754822 - RNA, 19 nt, Artificial Sequence
  Description of Artificial Sequence: Synthetic oligonucleotide
aagggaaagaaugugcaca

SEQ ID NO: 2754823 - RNA, 19 nt, Artificial Sequence
  Description of Artificial Sequence: Synthetic oligonucleotide
uauuuaucacuugagauuu

SEQ ID NO: 2754824 - RNA, 19 nt, Artificial Sequence
  Description of Artificial Sequence: Synthetic oligonucleotide
cuugagauuucaauuggug

SEQ ID NO: 2754825 - RNA, 19 nt, Artificial Sequence
  Description of Artificial Sequence: Synthetic oligonucleotide
uuuauccuagacaucugga

SEQ ID NO: 2754826 - RNA, 19 nt, Artificial Sequence
  Description of Artificial Sequence: Synthetic oligonucleotide
ugagguaaauauaagccuu

SEQ ID NO: 2754827 - RNA, 19 nt, Artificial Sequence
  Description of Artificial Sequence: Synthetic oligonucleotide
auacauaugacacucugua

SEQ ID NO: 2754828 - RNA, 19 nt, Artificial Sequence
  Description of Artificial Sequence: Synthetic oligonucleotide
guaaagaaguauuuaucac

SEQ ID NO: 2754829 - RNA, 19 nt, Artificial Sequence
  Description of Artificial Sequence: Synthetic oligonucleotide
ugugauagacacaaccauc

SEQ ID NO: 2754830 - RNA, 19 nt, Artificial Sequence
  Description of Artificial Sequence: Synthetic oligonucleotide
auacaagacauaaacaacu

SEQ ID NO: 2754831 - RNA, 19 nt, Artificial Sequence
  Description of Artificial Sequence: Synthetic oligonucleotide
ugacacucuguauacaaga

SEQ ID NO: 2754832 - RNA, 19 nt, Artificial Sequence
  Description of Artificial Sequence: Synthetic oligonucleotide
gaaguauuuaucacuugag

SEQ ID NO: 2754833 - RNA, 19 nt, Artificial Sequence
  Description of Artificial Sequence: Synthetic oligonucleotide
cauaugacacucuguauac

SEQ ID NO: 2754834 - RNA, 19 nt, Artificial Sequence
  Description of Artificial Sequence: Synthetic oligonucleotide
ccugagguaaauauaagcc

SEQ ID NO: 2754835 - RNA, 19 nt, Artificial Sequence
  Description of Artificial Sequence: Synthetic oligonucleotide
uaugacacucuguauacaa

SEQ ID NO: 2754836 - RNA, 19 nt, Artificial Sequence
  Description of Artificial Sequence: Synthetic oligonucleotide
acacaacuuaaauacauau

SEQ ID NO: 2754837 - RNA, 19 nt, Artificial Sequence
  Description of Artificial Sequence: Synthetic oligonucleotide
acauaugacacucuguaua

SEQ ID NO: 2754838 - RNA, 19 nt, Artificial Sequence
  Description of Artificial Sequence: Synthetic oligonucleotide
gucauuucaacagaaagca

SEQ ID NO: 2754839 - RNA, 19 nt, Artificial Sequence
  Description of Artificial Sequence: Synthetic oligonucleotide
aaauuaccuuguaagagca

SEQ ID NO: 2754840 - RNA, 19 nt, Artificial Sequence
  Description of Artificial Sequence: Synthetic oligonucleotide
uuauccuagacaucuggac

SEQ ID NO: 2754841 - RNA, 19 nt, Artificial Sequence
  Description of Artificial Sequence: Synthetic oligonucleotide
cuagaauaaguuuccugag

SEQ ID NO: 2754842 - RNA, 19 nt, Artificial Sequence
  Description of Artificial Sequence: Synthetic oligonucleotide
uacuagaauaaguuuccug

SEQ ID NO: 2754843 - RNA, 19 nt, Artificial Sequence
  Description of Artificial Sequence: Synthetic oligonucleotide
aaagaaguauuuaucacuu

SEQ ID NO: 2754844 - RNA, 19 nt, Artificial Sequence
  Description of Artificial Sequence: Synthetic oligonucleotide
caacugguagauuuuacac

SEQ ID NO: 2754845 - RNA, 19 nt, Artificial Sequence
  Description of Artificial Sequence: Synthetic oligonucleotide
aagccuuaaagaaugguga

SEQ ID NO: 2754846 - RNA, 19 nt, Artificial Sequence
  Description of Artificial Sequence: Synthetic oligonucleotide
acuuucagucauuucaaca

SEQ ID NO: 2754847 - RNA, 19 nt, Artificial Sequence
  Description of Artificial Sequence: Synthetic oligonucleotide
aacaguuuauagaaugaca

SEQ ID NO: 2754848 - RNA, 19 nt, Artificial Sequence
  Description of Artificial Sequence: Synthetic oligonucleotide
aucacuugagauuucaauu

SEQ ID NO: 2754849 - RNA, 19 nt, Artificial Sequence
  Description of Artificial Sequence: Synthetic oligonucleotide
ggacucuuaaguuaccagg

SEQ ID NO: 2754850 - RNA, 19 nt, Artificial Sequence
  Description of Artificial Sequence: Synthetic oligonucleotide
auggugaacaguuuauaga

SEQ ID NO: 2754851 - RNA, 19 nt, Artificial Sequence
  Description of Artificial Sequence: Synthetic oligonucleotide
acugguagauuuuacacuu

SEQ ID NO: 2754852 - RNA, 19 nt, Artificial Sequence
  Description of Artificial Sequence: Synthetic oligonucleotide
acuaagacagaauuaggua

SEQ ID NO: 2754853 - RNA, 19 nt, Artificial Sequence
  Description of Artificial Sequence: Synthetic oligonucleotide
cuuaaagaauggugaacag

SEQ ID NO: 2754854 - RNA, 19 nt, Artificial Sequence
  Description of Artificial Sequence: Synthetic oligonucleotide
uugcuauuugacuuuacuc

SEQ ID NO: 2754855 - RNA, 19 nt, Artificial Sequence
  Description of Artificial Sequence: Synthetic oligonucleotide
gagaacauacuagaauaag

SEQ ID NO: 2754856 - RNA, 19 nt, Artificial Sequence
  Description of Artificial Sequence: Synthetic oligonucleotide
acaacugguagauuuuaca

SEQ ID NO: 2754857 - RNA, 19 nt, Artificial Sequence
  Description of Artificial Sequence: Synthetic oligonucleotide
uaucacuugagauuucaau

SEQ ID NO: 2754858 - RNA, 19 nt, Artificial Sequence
  Description of Artificial Sequence: Synthetic oligonucleotide
uaacaguccucccaccaag

SEQ ID NO: 2754859 - RNA, 19 nt, Artificial Sequence
  Description of Artificial Sequence: Synthetic oligonucleotide
aagaaguauuuaucacuug

SEQ ID NO: 2754860 - RNA, 19 nt, Artificial Sequence
  Description of Artificial Sequence: Synthetic oligonucleotide
cacaacuuaaauacauaug

SEQ ID NO: 2754861 - RNA, 19 nt, Artificial Sequence
  Description of Artificial Sequence: Synthetic oligonucleotide
cauuucaacagaaagcaaa

SEQ ID NO: 2754862 - RNA, 19 nt, Artificial Sequence
  Description of Artificial Sequence: Synthetic oligonucleotide
ugagaacauacuagaauaa

SEQ ID NO: 2754863 - RNA, 19 nt, Artificial Sequence
  Description of Artificial Sequence: Synthetic oligonucleotide
caacuuaaauacauaugac

SEQ ID NO: 2754864 - RNA, 19 nt, Artificial Sequence
  Description of Artificial Sequence: Synthetic oligonucleotide
aguguguagguguaaagaa

SEQ ID NO: 2754865 - RNA, 19 nt, Artificial Sequence
  Description of Artificial Sequence: Synthetic oligonucleotide
agggagcuaacccaaacug

SEQ ID NO: 2754866 - RNA, 19 nt, Artificial Sequence
  Description of Artificial Sequence: Synthetic oligonucleotide
acaaccaucuagcugccug

SEQ ID NO: 2754867 - RNA, 19 nt, Artificial Sequence
  Description of Artificial Sequence: Synthetic oligonucleotide
uaccaggcugauaaaacca

SEQ ID NO: 2754868 - RNA, 19 nt, Artificial Sequence
  Description of Artificial Sequence: Synthetic oligonucleotide
caggcugauaaaaccacgg

SEQ ID NO: 2754869 - RNA, 19 nt, Artificial Sequence
  Description of Artificial Sequence: Synthetic oligonucleotide
aauacauaugacacucugu

SEQ ID NO: 2754870 - RNA, 19 nt, Artificial Sequence
  Description of Artificial Sequence: Synthetic oligonucleotide
aacaacugguagauuuuac

SEQ ID NO: 2754871 - RNA, 19 nt, Artificial Sequence
  Description of Artificial Sequence: Synthetic oligonucleotide
gacucuuaaguuaccaggc

SEQ ID NO: 2754872 - RNA, 19 nt, Artificial Sequence
  Description of Artificial Sequence: Synthetic oligonucleotide
gugagaacauacuagaaua

SEQ ID NO: 2754873 - RNA, 19 nt, Artificial Sequence
  Description of Artificial Sequence: Synthetic oligonucleotide
cacagcauaaucagugcag

SEQ ID NO: 2754874 - RNA, 19 nt, Artificial Sequence
  Description of Artificial Sequence: Synthetic oligonucleotide
uauggcucacugaacuaag

SEQ ID NO: 2754875 - RNA, 19 nt, Artificial Sequence
  Description of Artificial Sequence: Synthetic oligonucleotide
caguuuauagaaugacagc

SEQ ID NO: 2754876 - RNA, 19 nt, Artificial Sequence
  Description of Artificial Sequence: Synthetic oligonucleotide
aauacacaacuuaaauaca

SEQ ID NO: 2754877 - RNA, 19 nt, Artificial Sequence
  Description of Artificial Sequence: Synthetic oligonucleotide
gaacuaagacagaauuagg

SEQ ID NO: 2754878 - RNA, 19 nt, Artificial Sequence
  Description of Artificial Sequence: Synthetic oligonucleotide
gccuuuaccagacagccgg

SEQ ID NO: 2754879 - RNA, 19 nt, Artificial Sequence
  Description of Artificial Sequence: Synthetic oligonucleotide
agugcagggagcuaaccca

SEQ ID NO: 2754880 - RNA, 19 nt, Artificial Sequence
  Description of Artificial Sequence: Synthetic oligonucleotide
gaaugugcacagcauaauc

SEQ ID NO: 2754881 - RNA, 19 nt, Artificial Sequence
  Description of Artificial Sequence: Synthetic oligonucleotide
agaacauacuagaauaagu

SEQ ID NO: 2754882 - RNA, 19 nt, Artificial Sequence
  Description of Artificial Sequence: Synthetic oligonucleotide
gagcauucacagucaaggg

SEQ ID NO: 2754883 - RNA, 19 nt, Artificial Sequence
  Description of Artificial Sequence: Synthetic oligonucleotide
uuuaccagacagccgggca

SEQ ID NO: 2754884 - RNA, 19 nt, Artificial Sequence
  Description of Artificial Sequence: Synthetic oligonucleotide
gaaauaaaguggcagugcu

SEQ ID NO: 2754885 - RNA, 19 nt, Artificial Sequence
  Description of Artificial Sequence: Synthetic oligonucleotide
ugguagauuuuacacuuuc

SEQ ID NO: 2754886 - RNA, 19 nt, Artificial Sequence
  Description of Artificial Sequence: Synthetic oligonucleotide
aguggcagugcuuaaguaa

SEQ ID NO: 2754887 - RNA, 19 nt, Artificial Sequence
  Description of Artificial Sequence: Synthetic oligonucleotide
acagaauuagguaccagug

SEQ ID NO: 2754888 - RNA, 19 nt, Artificial Sequence
  Description of Artificial Sequence: Synthetic oligonucleotide
acagcauaaucagugcagg

SEQ ID NO: 2754889 - RNA, 19 nt, Artificial Sequence
  Description of Artificial Sequence: Synthetic oligonucleotide
gaacaguuuauagaaugac

SEQ ID NO: 2754890 - RNA, 19 nt, Artificial Sequence
  Description of Artificial Sequence: Synthetic oligonucleotide
gagccuuuaccagacagcc

SEQ ID NO: 2754891 - RNA, 19 nt, Artificial Sequence
  Description of Artificial Sequence: Synthetic oligonucleotide
uuaccuuguaagagcauuc

SEQ ID NO: 2754892 - RNA, 19 nt, Artificial Sequence
  Description of Artificial Sequence: Synthetic oligonucleotide
aucuggacucuuaaguuac

SEQ ID NO: 2754893 - RNA, 19 nt, Artificial Sequence
  Description of Artificial Sequence: Synthetic oligonucleotide
aguaacaguccucccacca

SEQ ID NO: 2754894 - RNA, 19 nt, Artificial Sequence
  Description of Artificial Sequence: Synthetic oligonucleotide
aggcugauaaaaccacggg

SEQ ID NO: 2754895 - RNA, 19 nt, Artificial Sequence
  Description of Artificial Sequence: Synthetic oligonucleotide
gugcuuaaguaagagacgc

SEQ ID NO: 2754896 - RNA, 19 nt, Artificial Sequence
  Description of Artificial Sequence: Synthetic oligonucleotide
aguaagagacgcugacauc

SEQ ID NO: 2754897 - RNA, 19 nt, Artificial Sequence
  Description of Artificial Sequence: Synthetic oligonucleotide
uaaaaccacgggcacauuu

SEQ ID NO: 2754898 - RNA, 19 nt, Artificial Sequence
  Description of Artificial Sequence: Synthetic oligonucleotide
acauaaacaacugguagau

SEQ ID NO: 2754899 - RNA, 19 nt, Artificial Sequence
  Description of Artificial Sequence: Synthetic oligonucleotide
gacaucuggacucuuaagu

SEQ ID NO: 2754900 - RNA, 19 nt, Artificial Sequence
  Description of Artificial Sequence: Synthetic oligonucleotide
agacacaaccaucuagcug

SEQ ID NO: 2754901 - RNA, 19 nt, Artificial Sequence
  Description of Artificial Sequence: Synthetic oligonucleotide
cucuuaaguuaccaggcug

SEQ ID NO: 2754902 - RNA, 19 nt, Artificial Sequence
  Description of Artificial Sequence: Synthetic oligonucleotide
agugcuuaaguaagagacg

SEQ ID NO: 2754903 - RNA, 19 nt, Artificial Sequence
  Description of Artificial Sequence: Synthetic oligonucleotide
agaaagcaaauauguaaau

SEQ ID NO: 2754904 - RNA, 19 nt, Artificial Sequence
  Description of Artificial Sequence: Synthetic oligonucleotide
accacgggcacauuuaaau

SEQ ID NO: 2754905 - RNA, 19 nt, Artificial Sequence
  Description of Artificial Sequence: Synthetic oligonucleotide
accacacugugugauagac

SEQ ID NO: 2754906 - RNA, 19 nt, Artificial Sequence
  Description of Artificial Sequence: Synthetic oligonucleotide
agagccuuuaccagacagc

SEQ ID NO: 2754907 - RNA, 19 nt, Artificial Sequence
  Description of Artificial Sequence: Synthetic oligonucleotide
uuccugagguaaauauaag

SEQ ID NO: 2754908 - RNA, 19 nt, Artificial Sequence
  Description of Artificial Sequence: Synthetic oligonucleotide
cauaaucagugcagggagc

SEQ ID NO: 2754909 - RNA, 19 nt, Artificial Sequence
  Description of Artificial Sequence: Synthetic oligonucleotide
auuuuacacuuucagucau

SEQ ID NO: 2754910 - RNA, 19 nt, Artificial Sequence
  Description of Artificial Sequence: Synthetic oligonucleotide
uggcucacugaacuaagac

SEQ ID NO: 2754911 - RNA, 19 nt, Artificial Sequence
  Description of Artificial Sequence: Synthetic oligonucleotide
gcauaaucagugcagggag

SEQ ID NO: 2754912 - RNA, 19 nt, Artificial Sequence
  Description of Artificial Sequence: Synthetic oligonucleotide
aagaaugugcacagcauaa

SEQ ID NO: 2754913 - RNA, 19 nt, Artificial Sequence
  Description of Artificial Sequence: Synthetic oligonucleotide
gacagaauuagguaccagu

SEQ ID NO: 2754914 - RNA, 19 nt, Artificial Sequence
  Description of Artificial Sequence: Synthetic oligonucleotide
ugcacagcauaaucagugc

SEQ ID NO: 2754915 - RNA, 19 nt, Artificial Sequence
  Description of Artificial Sequence: Synthetic oligonucleotide
caacagaaagcaaauaugu

SEQ ID NO: 2754916 - RNA, 19 nt, Artificial Sequence
  Description of Artificial Sequence: Synthetic oligonucleotide
uguagguguaaagaaguau

SEQ ID NO: 2754917 - RNA, 19 nt, Artificial Sequence
  Description of Artificial Sequence: Synthetic oligonucleotide
ggaaagaaugugcacagca

SEQ ID NO: 2754918 - RNA, 19 nt, Artificial Sequence
  Description of Artificial Sequence: Synthetic oligonucleotide
uagguguaaagaaguauuu

SEQ ID NO: 2754919 - RNA, 19 nt, Artificial Sequence
  Description of Artificial Sequence: Synthetic oligonucleotide
acacucuguauacaagaca

SEQ ID NO: 2754920 - RNA, 19 nt, Artificial Sequence
  Description of Artificial Sequence: Synthetic oligonucleotide
acuuuacaguaacaguccu

SEQ ID NO: 2754921 - RNA, 19 nt, Artificial Sequence
  Description of Artificial Sequence: Synthetic oligonucleotide
aaucagugcagggagcuaa

SEQ ID NO: 2754922 - RNA, 19 nt, Artificial Sequence
  Description of Artificial Sequence: Synthetic oligonucleotide
agcauaaucagugcaggga

SEQ ID NO: 2754923 - RNA, 19 nt, Artificial Sequence
  Description of Artificial Sequence: Synthetic oligonucleotide
aauuagguaccagugugua

SEQ ID NO: 2754924 - RNA, 19 nt, Artificial Sequence
  Description of Artificial Sequence: Synthetic oligonucleotide
ggcugauaaaaccacgggc

SEQ ID NO: 2754925 - RNA, 19 nt, Artificial Sequence
  Description of Artificial Sequence: Synthetic oligonucleotide
uaaguaagagacgcugaca

SEQ ID NO: 2754926 - RNA, 19 nt, Artificial Sequence
  Description of Artificial Sequence: Synthetic oligonucleotide
auacacaacuuaaauacau

SEQ ID NO: 2754927 - RNA, 19 nt, Artificial Sequence
  Description of Artificial Sequence: Synthetic oligonucleotide
ucacugaacuaagacagaa

SEQ ID NO: 2754928 - RNA, 19 nt, Artificial Sequence
  Description of Artificial Sequence: Synthetic oligonucleotide
cuuaaguaagagacgcuga

SEQ ID NO: 2754929 - RNA, 19 nt, Artificial Sequence
  Description of Artificial Sequence: Synthetic oligonucleotide
gugcacagcauaaucagug

SEQ ID NO: 2754930 - RNA, 19 nt, Artificial Sequence
  Description of Artificial Sequence: Synthetic oligonucleotide
acaucuggacucuuaaguu

SEQ ID NO: 2754931 - RNA, 19 nt, Artificial Sequence
  Description of Artificial Sequence: Synthetic oligonucleotide
cugauaaaaccacgggcac

SEQ ID NO: 2754932 - RNA, 19 nt, Artificial Sequence
  Description of Artificial Sequence: Synthetic oligonucleotide
cuuuacaguaacaguccuc

SEQ ID NO: 2754933 - RNA, 19 nt, Artificial Sequence
  Description of Artificial Sequence: Synthetic oligonucleotide
agcuaacccaaacugccca

SEQ ID NO: 2754934 - RNA, 19 nt, Artificial Sequence
  Description of Artificial Sequence: Synthetic oligonucleotide
agacaucuggacucuuaag

SEQ ID NO: 2754935 - RNA, 19 nt, Artificial Sequence
  Description of Artificial Sequence: Synthetic oligonucleotide
ucauuucaacagaaagcaa

SEQ ID NO: 2754936 - RNA, 19 nt, Artificial Sequence
  Description of Artificial Sequence: Synthetic oligonucleotide
auuugacuuuacucuauaa

SEQ ID NO: 2754937 - RNA, 19 nt, Artificial Sequence
  Description of Artificial Sequence: Synthetic oligonucleotide
aaaccacgggcacauuuaa

SEQ ID NO: 2754938 - RNA, 19 nt, Artificial Sequence
  Description of Artificial Sequence: Synthetic oligonucleotide
guuuauagaaugacagcca

SEQ ID NO: 2754939 - RNA, 19 nt, Artificial Sequence
  Description of Artificial Sequence: Synthetic oligonucleotide
guguaaagaaguauuuauc

SEQ ID NO: 2754940 - RNA, 19 nt, Artificial Sequence
  Description of Artificial Sequence: Synthetic oligonucleotide
uaagagcauucacagucaa

SEQ ID NO: 2754941 - RNA, 19 nt, Artificial Sequence
  Description of Artificial Sequence: Synthetic oligonucleotide
guuaccaggcugauaaaac

SEQ ID NO: 2754942 - RNA, 19 nt, Artificial Sequence
  Description of Artificial Sequence: Synthetic oligonucleotide
auuucaacagaaagcaaau

SEQ ID NO: 2754943 - RNA, 19 nt, Artificial Sequence
  Description of Artificial Sequence: Synthetic oligonucleotide
guauuuaucacuugagauu

SEQ ID NO: 2754944 - RNA, 19 nt, Artificial Sequence
  Description of Artificial Sequence: Synthetic oligonucleotide
guguguagguguaaagaag

SEQ ID NO: 2754945 - RNA, 19 nt, Artificial Sequence
  Description of Artificial Sequence: Synthetic oligonucleotide
acucuuaaguuaccaggcu

SEQ ID NO: 2754946 - RNA, 19 nt, Artificial Sequence
  Description of Artificial Sequence: Synthetic oligonucleotide
agucaagggaaagaaugug

SEQ ID NO: 2754947 - RNA, 19 nt, Artificial Sequence
  Description of Artificial Sequence: Synthetic oligonucleotide
aagacagaauuagguacca

SEQ ID NO: 2754948 - RNA, 19 nt, Artificial Sequence
  Description of Artificial Sequence: Synthetic oligonucleotide
uaacccaaacugcccaacu

SEQ ID NO: 2754949 - RNA, 19 nt, Artificial Sequence
  Description of Artificial Sequence: Synthetic oligonucleotide
uagacacaaccaucuagcu

SEQ ID NO: 2754950 - RNA, 19 nt, Artificial Sequence
  Description of Artificial Sequence: Synthetic oligonucleotide
cagcauaaucagugcaggg

SEQ ID NO: 2754951 - RNA, 19 nt, Artificial Sequence
  Description of Artificial Sequence: Synthetic oligonucleotide
uacauaugacacucuguau

SEQ ID NO: 2754952 - RNA, 19 nt, Artificial Sequence
  Description of Artificial Sequence: Synthetic oligonucleotide
uuauagaaugacagccauu

SEQ ID NO: 2754953 - RNA, 19 nt, Artificial Sequence
  Description of Artificial Sequence: Synthetic oligonucleotide
auuaccuuguaagagcauu

SEQ ID NO: 2754954 - RNA, 19 nt, Artificial Sequence
  Description of Artificial Sequence: Synthetic oligonucleotide
aacagaaagcaaauaugua

SEQ ID NO: 2754955 - RNA, 19 nt, Artificial Sequence
  Description of Artificial Sequence: Synthetic oligonucleotide
gaacauacuagaauaaguu

SEQ ID NO: 2754956 - RNA, 19 nt, Artificial Sequence
  Description of Artificial Sequence: Synthetic oligonucleotide
acagccgggcaccacacug

SEQ ID NO: 2754957 - RNA, 19 nt, Artificial Sequence
  Description of Artificial Sequence: Synthetic oligonucleotide
gauuucaauuggugagaac

SEQ ID NO: 2754958 - RNA, 19 nt, Artificial Sequence
  Description of Artificial Sequence: Synthetic oligonucleotide
cauuuaaauggggaaauaa

SEQ ID NO: 2754959 - RNA, 19 nt, Artificial Sequence
  Description of Artificial Sequence: Synthetic oligonucleotide
gagauuucaauuggugaga

SEQ ID NO: 2754960 - RNA, 19 nt, Artificial Sequence
  Description of Artificial Sequence: Synthetic oligonucleotide
aacccaaacugcccaacuu

SEQ ID NO: 2754961 - RNA, 19 nt, Artificial Sequence
  Description of Artificial Sequence: Synthetic oligonucleotide
ugcuuaaguaagagacgcu

SEQ ID NO: 2754962 - RNA, 19 nt, Artificial Sequence
  Description of Artificial Sequence: Synthetic oligonucleotide
uuuugcuauuugacuuuac

SEQ ID NO: 2754963 - RNA, 19 nt, Artificial Sequence
  Description of Artificial Sequence: Synthetic oligonucleotide
gacacucuguauacaagac

SEQ ID NO: 2754964 - RNA, 19 nt, Artificial Sequence
  Description of Artificial Sequence: Synthetic oligonucleotide
ggagcuaacccaaacugcc

SEQ ID NO: 2754965 - RNA, 19 nt, Artificial Sequence
  Description of Artificial Sequence: Synthetic oligonucleotide
cagugcagggagcuaaccc

SEQ ID NO: 2754966 - RNA, 19 nt, Artificial Sequence
  Description of Artificial Sequence: Synthetic oligonucleotide
auaagccuuaaagaauggu

SEQ ID NO: 2754967 - RNA, 19 nt, Artificial Sequence
  Description of Artificial Sequence: Synthetic oligonucleotide
gcuuaaguaagagacgcug

SEQ ID NO: 2754968 - RNA, 19 nt, Artificial Sequence
  Description of Artificial Sequence: Synthetic oligonucleotide
gcugauaaaaccacgggca

SEQ ID NO: 2754969 - RNA, 19 nt, Artificial Sequence
  Description of Artificial Sequence: Synthetic oligonucleotide
aagagcauucacagucaag

SEQ ID NO: 2754970 - RNA, 19 nt, Artificial Sequence
  Description of Artificial Sequence: Synthetic oligonucleotide
auauguaaauuaccuugua

SEQ ID NO: 2754971 - RNA, 19 nt, Artificial Sequence
  Description of Artificial Sequence: Synthetic oligonucleotide
aaaaccacgggcacauuua

SEQ ID NO: 2754972 - RNA, 19 nt, Artificial Sequence
  Description of Artificial Sequence: Synthetic oligonucleotide
uuacaguaacaguccuccc

SEQ ID NO: 2754973 - RNA, 19 nt, Artificial Sequence
  Description of Artificial Sequence: Synthetic oligonucleotide
ggaaauaaaguggcagugc

SEQ ID NO: 2754974 - RNA, 19 nt, Artificial Sequence
  Description of Artificial Sequence: Synthetic oligonucleotide
acaguccucccaccaagag

SEQ ID NO: 2754975 - RNA, 19 nt, Artificial Sequence
  Description of Artificial Sequence: Synthetic oligonucleotide
acgggcacauuuaaauggg

SEQ ID NO: 2754976 - RNA, 19 nt, Artificial Sequence
  Description of Artificial Sequence: Synthetic oligonucleotide
uaccuuguaagagcauuca

SEQ ID NO: 2754977 - RNA, 19 nt, Artificial Sequence
  Description of Artificial Sequence: Synthetic oligonucleotide
cugagguaaauauaagccu

SEQ ID NO: 2754978 - RNA, 19 nt, Artificial Sequence
  Description of Artificial Sequence: Synthetic oligonucleotide
gaaugacagccauuuuauc

SEQ ID NO: 2754979 - RNA, 19 nt, Artificial Sequence
  Description of Artificial Sequence: Synthetic oligonucleotide
uuuuacacuuucagucauu

SEQ ID NO: 2754980 - RNA, 19 nt, Artificial Sequence
  Description of Artificial Sequence: Synthetic oligonucleotide
agccuuaaagaauggugaa

SEQ ID NO: 2754981 - RNA, 19 nt, Artificial Sequence
  Description of Artificial Sequence: Synthetic oligonucleotide
gcaaauauguaaauuaccu

SEQ ID NO: 2754982 - RNA, 19 nt, Artificial Sequence
  Description of Artificial Sequence: Synthetic oligonucleotide
gauaaaaccacgggcacau

SEQ ID NO: 2754983 - RNA, 19 nt, Artificial Sequence
  Description of Artificial Sequence: Synthetic oligonucleotide
caguccucccaccaagagc

SEQ ID NO: 2754984 - RNA, 19 nt, Artificial Sequence
  Description of Artificial Sequence: Synthetic oligonucleotide
gaauaaguuuccugaggua

SEQ ID NO: 2754985 - RNA, 19 nt, Artificial Sequence
  Description of Artificial Sequence: Synthetic oligonucleotide
acugcccaacuuuacagua

SEQ ID NO: 2754986 - RNA, 19 nt, Artificial Sequence
  Description of Artificial Sequence: Synthetic oligonucleotide
cacucuguauacaagacau

SEQ ID NO: 2754987 - RNA, 19 nt, Artificial Sequence
  Description of Artificial Sequence: Synthetic oligonucleotide
agagacgcugacaucggag

SEQ ID NO: 2754988 - RNA, 19 nt, Artificial Sequence
  Description of Artificial Sequence: Synthetic oligonucleotide
caaacugcccaacuuuaca

SEQ ID NO: 2754989 - RNA, 19 nt, Artificial Sequence
  Description of Artificial Sequence: Synthetic oligonucleotide
gguguaaagaaguauuuau

SEQ ID NO: 2754990 - RNA, 19 nt, Artificial Sequence
  Description of Artificial Sequence: Synthetic oligonucleotide
cccaacuuuacaguaacag

SEQ ID NO: 2754991 - RNA, 19 nt, Artificial Sequence
  Description of Artificial Sequence: Synthetic oligonucleotide
aaauaaaguggcagugcuu

SEQ ID NO: 2754992 - RNA, 19 nt, Artificial Sequence
  Description of Artificial Sequence: Synthetic oligonucleotide
uucaauuggugagaacaua

SEQ ID NO: 2754993 - RNA, 19 nt, Artificial Sequence
  Description of Artificial Sequence: Synthetic oligonucleotide
uuucaacagaaagcaaaua

SEQ ID NO: 2754994 - RNA, 19 nt, Artificial Sequence
  Description of Artificial Sequence: Synthetic oligonucleotide
cugaacuaagacagaauua

SEQ ID NO: 2754995 - RNA, 19 nt, Artificial Sequence
  Description of Artificial Sequence: Synthetic oligonucleotide
acccaaacugcccaacuuu

SEQ ID NO: 2754996 - RNA, 19 nt, Artificial Sequence
  Description of Artificial Sequence: Synthetic oligonucleotide
aaagaauggugaacaguuu

SEQ ID NO: 2754997 - RNA, 19 nt, Artificial Sequence
  Description of Artificial Sequence: Synthetic oligonucleotide
gugauagacacaaccaucu

SEQ ID NO: 2754998 - RNA, 19 nt, Artificial Sequence
  Description of Artificial Sequence: Synthetic oligonucleotide
cagccauuuuauccuagac

SEQ ID NO: 2754999 - RNA, 19 nt, Artificial Sequence
  Description of Artificial Sequence: Synthetic oligonucleotide
uuacacuuucagucauuuc

SEQ ID NO: 2755000 - RNA, 19 nt, Artificial Sequence
  Description of Artificial Sequence: Synthetic oligonucleotide
ggcucacugaacuaagaca

SEQ ID NO: 2755001 - RNA, 19 nt, Artificial Sequence
  Description of Artificial Sequence: Synthetic oligonucleotide
ccuuguaagagcauucaca

SEQ ID NO: 2755002 - RNA, 19 nt, Artificial Sequence
  Description of Artificial Sequence: Synthetic oligonucleotide
agauuucaauuggugagaa

SEQ ID NO: 2755003 - RNA, 19 nt, Artificial Sequence
  Description of Artificial Sequence: Synthetic oligonucleotide
ggcacauuuaaauggggaa

SEQ ID NO: 2755004 - RNA, 19 nt, Artificial Sequence
  Description of Artificial Sequence: Synthetic oligonucleotide
cccaccaagagccuuuacc

SEQ ID NO: 2755005 - RNA, 19 nt, Artificial Sequence
  Description of Artificial Sequence: Synthetic oligonucleotide
uggcagugcuuaaguaaga

SEQ ID NO: 2755006 - RNA, 19 nt, Artificial Sequence
  Description of Artificial Sequence: Synthetic oligonucleotide
cuuuaccagacagccgggc

SEQ ID NO: 2755007 - RNA, 19 nt, Artificial Sequence
  Description of Artificial Sequence: Synthetic oligonucleotide
auacuagaauaaguuuccu

SEQ ID NO: 2755008 - RNA, 19 nt, Artificial Sequence
  Description of Artificial Sequence: Synthetic oligonucleotide
gagcuaacccaaacugccc

SEQ ID NO: 2755009 - RNA, 19 nt, Artificial Sequence
  Description of Artificial Sequence: Synthetic oligonucleotide
caguguguagguguaaaga

SEQ ID NO: 2755010 - RNA, 19 nt, Artificial Sequence
  Description of Artificial Sequence: Synthetic oligonucleotide
auuuuauccuagacaucug

SEQ ID NO: 2755011 - RNA, 19 nt, Artificial Sequence
  Description of Artificial Sequence: Synthetic oligonucleotide
auaaaguggcagugcuuaa

SEQ ID NO: 2755012 - RNA, 19 nt, Artificial Sequence
  Description of Artificial Sequence: Synthetic oligonucleotide
aaguuaccaggcugauaaa

SEQ ID NO: 2755013 - RNA, 19 nt, Artificial Sequence
  Description of Artificial Sequence: Synthetic oligonucleotide
guaagagcauucacaguca

SEQ ID NO: 2755014 - RNA, 19 nt, Artificial Sequence
  Description of Artificial Sequence: Synthetic oligonucleotide
uagguaccaguguguaggu

SEQ ID NO: 2755015 - RNA, 19 nt, Artificial Sequence
  Description of Artificial Sequence: Synthetic oligonucleotide
auaaguuuccugagguaaa

SEQ ID NO: 2755016 - RNA, 19 nt, Artificial Sequence
  Description of Artificial Sequence: Synthetic oligonucleotide
agguguaaagaaguauuua

SEQ ID NO: 2755017 - RNA, 19 nt, Artificial Sequence
  Description of Artificial Sequence: Synthetic oligonucleotide
uaccagacagccgggcacc

SEQ ID NO: 2755018 - RNA, 19 nt, Artificial Sequence
  Description of Artificial Sequence: Synthetic oligonucleotide
ucagugcagggagcuaacc

SEQ ID NO: 2755019 - RNA, 19 nt, Artificial Sequence
  Description of Artificial Sequence: Synthetic oligonucleotide
uuaaguuaccaggcugaua

SEQ ID NO: 2755020 - RNA, 19 nt, Artificial Sequence
  Description of Artificial Sequence: Synthetic oligonucleotide
gguaaauauaagccuuaaa

SEQ ID NO: 2755021 - RNA, 19 nt, Artificial Sequence
  Description of Artificial Sequence: Synthetic oligonucleotide
ggugagaacauacuagaau

SEQ ID NO: 2755022 - RNA, 19 nt, Artificial Sequence
  Description of Artificial Sequence: Synthetic oligonucleotide
acacuuucagucauuucaa

SEQ ID NO: 2755023 - RNA, 19 nt, Artificial Sequence
  Description of Artificial Sequence: Synthetic oligonucleotide
agaaugugcacagcauaau

SEQ ID NO: 2755024 - RNA, 19 nt, Artificial Sequence
  Description of Artificial Sequence: Synthetic oligonucleotide
aauuaccuuguaagagcau

SEQ ID NO: 2755025 - RNA, 19 nt, Artificial Sequence
  Description of Artificial Sequence: Synthetic oligonucleotide
agacagaauuagguaccag

SEQ ID NO: 2755026 - RNA, 19 nt, Artificial Sequence
  Description of Artificial Sequence: Synthetic oligonucleotide
ggcagugcuuaaguaagag

SEQ ID NO: 2755027 - RNA, 19 nt, Artificial Sequence
  Description of Artificial Sequence: Synthetic oligonucleotide
gcuauuugacuuuacucua

SEQ ID NO: 2755028 - RNA, 19 nt, Artificial Sequence
  Description of Artificial Sequence: Synthetic oligonucleotide
ccaggcugauaaaaccacg

SEQ ID NO: 2755029 - RNA, 19 nt, Artificial Sequence
  Description of Artificial Sequence: Synthetic oligonucleotide
ccaagagccuuuaccagac

SEQ ID NO: 2755030 - RNA, 19 nt, Artificial Sequence
  Description of Artificial Sequence: Synthetic oligonucleotide
aaguuuccugagguaaaua

SEQ ID NO: 2755031 - RNA, 19 nt, Artificial Sequence
  Description of Artificial Sequence: Synthetic oligonucleotide
cuaacccaaacugcccaac

SEQ ID NO: 2755032 - RNA, 19 nt, Artificial Sequence
  Description of Artificial Sequence: Synthetic oligonucleotide
agguaaauauaagccuuaa

SEQ ID NO: 2755033 - RNA, 19 nt, Artificial Sequence
  Description of Artificial Sequence: Synthetic oligonucleotide
ugacagccauuuuauccua

SEQ ID NO: 2755034 - RNA, 19 nt, Artificial Sequence
  Description of Artificial Sequence: Synthetic oligonucleotide
gaauuagguaccagugugu

SEQ ID NO: 2755035 - RNA, 19 nt, Artificial Sequence
  Description of Artificial Sequence: Synthetic oligonucleotide
aucagugcagggagcuaac

SEQ ID NO: 2755036 - RNA, 19 nt, Artificial Sequence
  Description of Artificial Sequence: Synthetic oligonucleotide
acacaaccaucuagcugcc

SEQ ID NO: 2755037 - RNA, 19 nt, Artificial Sequence
  Description of Artificial Sequence: Synthetic oligonucleotide
ccaccaagagccuuuacca

SEQ ID NO: 2755038 - RNA, 19 nt, Artificial Sequence
  Description of Artificial Sequence: Synthetic oligonucleotide
caaccaucuagcugccuga

SEQ ID NO: 2755039 - RNA, 19 nt, Artificial Sequence
  Description of Artificial Sequence: Synthetic oligonucleotide
uccuagacaucuggacucu

SEQ ID NO: 2755040 - RNA, 19 nt, Artificial Sequence
  Description of Artificial Sequence: Synthetic oligonucleotide
uagcugccugaccuauggc

SEQ ID NO: 2755041 - RNA, 19 nt, Artificial Sequence
  Description of Artificial Sequence: Synthetic oligonucleotide
acugugugauagacacaac

SEQ ID NO: 2755042 - RNA, 19 nt, Artificial Sequence
  Description of Artificial Sequence: Synthetic oligonucleotide
cuauggcucacugaacuaa

SEQ ID NO: 2755043 - RNA, 19 nt, Artificial Sequence
  Description of Artificial Sequence: Synthetic oligonucleotide
acauuuaaauggggaaaua

SEQ ID NO: 2755044 - RNA, 19 nt, Artificial Sequence
  Description of Artificial Sequence: Synthetic oligonucleotide
guuuccugagguaaauaua

SEQ ID NO: 2755045 - RNA, 19 nt, Artificial Sequence
  Description of Artificial Sequence: Synthetic oligonucleotide
gggagcuaacccaaacugc

SEQ ID NO: 2755046 - RNA, 19 nt, Artificial Sequence
  Description of Artificial Sequence: Synthetic oligonucleotide
caauuggugagaacauacu

SEQ ID NO: 2755047 - RNA, 19 nt, Artificial Sequence
  Description of Artificial Sequence: Synthetic oligonucleotide
cagaauuagguaccagugu

SEQ ID NO: 2755048 - RNA, 19 nt, Artificial Sequence
  Description of Artificial Sequence: Synthetic oligonucleotide
cagucaagggaaagaaugu

SEQ ID NO: 2755049 - RNA, 19 nt, Artificial Sequence
  Description of Artificial Sequence: Synthetic oligonucleotide
agacagccgggcaccacac

SEQ ID NO: 2755050 - RNA, 19 nt, Artificial Sequence
  Description of Artificial Sequence: Synthetic oligonucleotide
cuagacaucuggacucuua

SEQ ID NO: 2755051 - RNA, 19 nt, Artificial Sequence
  Description of Artificial Sequence: Synthetic oligonucleotide
accaguguguagguguaaa

SEQ ID NO: 2755052 - RNA, 19 nt, Artificial Sequence
  Description of Artificial Sequence: Synthetic oligonucleotide
gcagugcuuaaguaagaga

SEQ ID NO: 2755053 - RNA, 19 nt, Artificial Sequence
  Description of Artificial Sequence: Synthetic oligonucleotide
ccaguguguagguguaaag

SEQ ID NO: 2755054 - RNA, 19 nt, Artificial Sequence
  Description of Artificial Sequence: Synthetic oligonucleotide
ugcagggagcuaacccaaa

SEQ ID NO: 2755055 - RNA, 19 nt, Artificial Sequence
  Description of Artificial Sequence: Synthetic oligonucleotide
gcacagcauaaucagugca

SEQ ID NO: 2755056 - RNA, 19 nt, Artificial Sequence
  Description of Artificial Sequence: Synthetic oligonucleotide
cuggacucuuaaguuacca

SEQ ID NO: 2755057 - RNA, 19 nt, Artificial Sequence
  Description of Artificial Sequence: Synthetic oligonucleotide
gcaccacacugugugauag

SEQ ID NO: 2755058 - RNA, 19 nt, Artificial Sequence
  Description of Artificial Sequence: Synthetic oligonucleotide
cuauuugacuuuacucuau

SEQ ID NO: 2755059 - RNA, 19 nt, Artificial Sequence
  Description of Artificial Sequence: Synthetic oligonucleotide
agccgggcaccacacugug

SEQ ID NO: 2755060 - RNA, 19 nt, Artificial Sequence
  Description of Artificial Sequence: Synthetic oligonucleotide
ccgggcaccacacugugug

SEQ ID NO: 2755061 - RNA, 19 nt, Artificial Sequence
  Description of Artificial Sequence: Synthetic oligonucleotide
cagacagccgggcaccaca

SEQ ID NO: 2755062 - RNA, 19 nt, Artificial Sequence
  Description of Artificial Sequence: Synthetic oligonucleotide
gcacauuuaaauggggaaa

SEQ ID NO: 2755063 - RNA, 19 nt, Artificial Sequence
  Description of Artificial Sequence: Synthetic oligonucleotide
ccacgggcacauuuaaaug

SEQ ID NO: 2755064 - RNA, 19 nt, Artificial Sequence
  Description of Artificial Sequence: Synthetic oligonucleotide
ccaaacugcccaacuuuac

SEQ ID NO: 2755065 - RNA, 19 nt, Artificial Sequence
  Description of Artificial Sequence: Synthetic oligonucleotide
cauucacagucaagggaaa

SEQ ID NO: 2755066 - RNA, 19 nt, Artificial Sequence
  Description of Artificial Sequence: Synthetic oligonucleotide
auggggaaauaaaguggca

SEQ ID NO: 2755067 - RNA, 19 nt, Artificial Sequence
  Description of Artificial Sequence: Synthetic oligonucleotide
gcagggagcuaacccaaac

SEQ ID NO: 2755068 - RNA, 19 nt, Artificial Sequence
  Description of Artificial Sequence: Synthetic oligonucleotide
uaaucagugcagggagcua

SEQ ID NO: 2755069 - RNA, 19 nt, Artificial Sequence
  Description of Artificial Sequence: Synthetic oligonucleotide
cugccugaccuauggcuca

SEQ ID NO: 2755070 - RNA, 19 nt, Artificial Sequence
  Description of Artificial Sequence: Synthetic oligonucleotide
auggcucacugaacuaaga

SEQ ID NO: 2755071 - RNA, 19 nt, Artificial Sequence
  Description of Artificial Sequence: Synthetic oligonucleotide
cugcccaacuuuacaguaa

SEQ ID NO: 2755072 - RNA, 19 nt, Artificial Sequence
  Description of Artificial Sequence: Synthetic oligonucleotide
ccuuuaccagacagccggg

SEQ ID NO: 2755073 - RNA, 19 nt, Artificial Sequence
  Description of Artificial Sequence: Synthetic oligonucleotide
ccaacuuuacaguaacagu

SEQ ID NO: 2755074 - RNA, 19 nt, Artificial Sequence
  Description of Artificial Sequence: Synthetic oligonucleotide
ccaucuagcugccugaccu

SEQ ID NO: 2755075 - RNA, 19 nt, Artificial Sequence
  Description of Artificial Sequence: Synthetic oligonucleotide
ucccaccaagagccuuuac

SEQ ID NO: 2755076 - RNA, 19 nt, Artificial Sequence
  Description of Artificial Sequence: Synthetic oligonucleotide
gggaaagaaugugcacagc

SEQ ID NO: 2755077 - RNA, 19 nt, Artificial Sequence
  Description of Artificial Sequence: Synthetic oligonucleotide
gcugccugaccuauggcuc

SEQ ID NO: 2755078 - RNA, 19 nt, Artificial Sequence
  Description of Artificial Sequence: Synthetic oligonucleotide
guguagguguaaagaagua

SEQ ID NO: 2755079 - RNA, 19 nt, Artificial Sequence
  Description of Artificial Sequence: Synthetic oligonucleotide
cacugaacuaagacagaau

SEQ ID NO: 2755080 - RNA, 19 nt, Artificial Sequence
  Description of Artificial Sequence: Synthetic oligonucleotide
ugccugaccuauggcucac

SEQ ID NO: 2755081 - RNA, 19 nt, Artificial Sequence
  Description of Artificial Sequence: Synthetic oligonucleotide
cacagucaagggaaagaau

SEQ ID NO: 2755082 - RNA, 19 nt, Artificial Sequence
  Description of Artificial Sequence: Synthetic oligonucleotide
gcuaacccaaacugcccaa

SEQ ID NO: 2755083 - RNA, 19 nt, Artificial Sequence
  Description of Artificial Sequence: Synthetic oligonucleotide
cgggcacauuuaaaugggg

SEQ ID NO: 2755084 - RNA, 19 nt, Artificial Sequence
  Description of Artificial Sequence: Synthetic oligonucleotide
caccacacugugugauaga

SEQ ID NO: 2755085 - RNA, 19 nt, Artificial Sequence
  Description of Artificial Sequence: Synthetic oligonucleotide
gugcagggagcuaacccaa

SEQ ID NO: 2755086 - RNA, 19 nt, Artificial Sequence
  Description of Artificial Sequence: Synthetic oligonucleotide
uccucccaccaagagccuu

SEQ ID NO: 2755087 - RNA, 19 nt, Artificial Sequence
  Description of Artificial Sequence: Synthetic oligonucleotide
cuuaaguuaccaggcugau

SEQ ID NO: 2755088 - RNA, 19 nt, Artificial Sequence
  Description of Artificial Sequence: Synthetic oligonucleotide
auaaaaccacgggcacauu

SEQ ID NO: 2755089 - RNA, 19 nt, Artificial Sequence
  Description of Artificial Sequence: Synthetic oligonucleotide
cccaaacugcccaacuuua

SEQ ID NO: 2755090 - RNA, 19 nt, Artificial Sequence
  Description of Artificial Sequence: Synthetic oligonucleotide
ggugaacaguuuauagaau

SEQ ID NO: 2755091 - RNA, 19 nt, Artificial Sequence
  Description of Artificial Sequence: Synthetic oligonucleotide
ccuauggcucacugaacua

SEQ ID NO: 2755092 - RNA, 19 nt, Artificial Sequence
  Description of Artificial Sequence: Synthetic oligonucleotide
cagccgggcaccacacugu

SEQ ID NO: 2755093 - RNA, 19 nt, Artificial Sequence
  Description of Artificial Sequence: Synthetic oligonucleotide
gcccaacuuuacaguaaca

SEQ ID NO: 2755094 - RNA, 19 nt, Artificial Sequence
  Description of Artificial Sequence: Synthetic oligonucleotide
cucccaccaagagccuuua

SEQ ID NO: 2755095 - RNA, 19 nt, Artificial Sequence
  Description of Artificial Sequence: Synthetic oligonucleotide
cacaaccaucuagcugccu

SEQ ID NO: 2755096 - RNA, 19 nt, Artificial Sequence
  Description of Artificial Sequence: Synthetic oligonucleotide
ccucccaccaagagccuuu

SEQ ID NO: 2755097 - RNA, 19 nt, Artificial Sequence
  Description of Artificial Sequence: Synthetic oligonucleotide
guccucccaccaagagccu

SEQ ID NO: 2755098 - RNA, 19 nt, Artificial Sequence
  Description of Artificial Sequence: Synthetic oligonucleotide
cgggcaccacacuguguga

SEQ ID NO: 2755099 - RNA, 19 nt, Artificial Sequence
  Description of Artificial Sequence: Synthetic oligonucleotide
gccugaccuauggcucacu

SEQ ID NO: 2755100 - RNA, 19 nt, Artificial Sequence
  Description of Artificial Sequence: Synthetic oligonucleotide
gccgggcaccacacugugu

SEQ ID NO: 2755101 - RNA, 19 nt, Artificial Sequence
  Description of Artificial Sequence: Synthetic oligonucleotide
ccuagacaucuggacucuu

SEQ ID NO: 2755102 - RNA, 19 nt, Artificial Sequence
  Description of Artificial Sequence: Synthetic oligonucleotide
aaagacaucgguuugagga

SEQ ID NO: 2755103 - RNA, 19 nt, Artificial Sequence
  Description of Artificial Sequence: Synthetic oligonucleotide
aaucucucgggccauagcc

SEQ ID NO: 2755104 - RNA, 19 nt, Artificial Sequence
  Description of Artificial Sequence: Synthetic oligonucleotide
aagacagugcacuucuugc

SEQ ID NO: 2755105 - RNA, 19 nt, Artificial Sequence
  Description of Artificial Sequence: Synthetic oligonucleotide
agcaguaucccacagcccc

SEQ ID NO: 2755106 - RNA, 19 nt, Artificial Sequence
  Description of Artificial Sequence: Synthetic oligonucleotide
uagcugaucagcaagcacg

SEQ ID NO: 2755107 - RNA, 19 nt, Artificial Sequence
  Description of Artificial Sequence: Synthetic oligonucleotide
aaacuguggggauauacuc

SEQ ID NO: 2755108 - RNA, 19 nt, Artificial Sequence
  Description of Artificial Sequence: Synthetic oligonucleotide
ucaaacacugucuucagac

SEQ ID NO: 2755109 - RNA, 19 nt, Artificial Sequence
  Description of Artificial Sequence: Synthetic oligonucleotide
cuugucaucacggaggucc

SEQ ID NO: 2755110 - RNA, 19 nt, Artificial Sequence
  Description of Artificial Sequence: Synthetic oligonucleotide
agaaccaaucucucgggcc

SEQ ID NO: 2755111 - RNA, 19 nt, Artificial Sequence
  Description of Artificial Sequence: Synthetic oligonucleotide
agaaguauggguguguggg

SEQ ID NO: 2755112 - RNA, 19 nt, Artificial Sequence
  Description of Artificial Sequence: Synthetic oligonucleotide
uccaccaucacguuggcug

SEQ ID NO: 2755113 - RNA, 19 nt, Artificial Sequence
  Description of Artificial Sequence: Synthetic oligonucleotide
aagcagaucagaaagacau

SEQ ID NO: 2755114 - RNA, 19 nt, Artificial Sequence
  Description of Artificial Sequence: Synthetic oligonucleotide
aaggcguuggucguguagc

SEQ ID NO: 2755115 - RNA, 19 nt, Artificial Sequence
  Description of Artificial Sequence: Synthetic oligonucleotide
gaggauaggagaguggccg

SEQ ID NO: 2755116 - RNA, 19 nt, Artificial Sequence
  Description of Artificial Sequence: Synthetic oligonucleotide
agacagugcacuucuugcc

SEQ ID NO: 2755117 - RNA, 19 nt, Artificial Sequence
  Description of Artificial Sequence: Synthetic oligonucleotide
uucccauccaccaucacgu

SEQ ID NO: 2755118 - RNA, 19 nt, Artificial Sequence
  Description of Artificial Sequence: Synthetic oligonucleotide
uggggauauacucucccgg

SEQ ID NO: 2755119 - RNA, 19 nt, Artificial Sequence
  Description of Artificial Sequence: Synthetic oligonucleotide
cuugccucaucaaacacug

SEQ ID NO: 2755120 - RNA, 19 nt, Artificial Sequence
  Description of Artificial Sequence: Synthetic oligonucleotide
cuggguaccacuuggcgcg

SEQ ID NO: 2755121 - RNA, 19 nt, Artificial Sequence
  Description of Artificial Sequence: Synthetic oligonucleotide
uagaagacagugcacuucu

SEQ ID NO: 2755122 - RNA, 19 nt, Artificial Sequence
  Description of Artificial Sequence: Synthetic oligonucleotide
accagggagaagcagauca

SEQ ID NO: 2755123 - RNA, 19 nt, Artificial Sequence
  Description of Artificial Sequence: Synthetic oligonucleotide
aagccguucaauggugucc

SEQ ID NO: 2755124 - RNA, 19 nt, Artificial Sequence
  Description of Artificial Sequence: Synthetic oligonucleotide
agcuucuugucccgaagcc

SEQ ID NO: 2755125 - RNA, 19 nt, Artificial Sequence
  Description of Artificial Sequence: Synthetic oligonucleotide
uacuugacagaaccaaucu

SEQ ID NO: 2755126 - RNA, 19 nt, Artificial Sequence
  Description of Artificial Sequence: Synthetic oligonucleotide
uuggucguguagcugauca

SEQ ID NO: 2755127 - RNA, 19 nt, Artificial Sequence
  Description of Artificial Sequence: Synthetic oligonucleotide
agaucagaaagacaucggu

SEQ ID NO: 2755128 - RNA, 19 nt, Artificial Sequence
  Description of Artificial Sequence: Synthetic oligonucleotide
ucagaaagacaucgguuug

SEQ ID NO: 2755129 - RNA, 19 nt, Artificial Sequence
  Description of Artificial Sequence: Synthetic oligonucleotide
acuugacagaaccaaucuc

SEQ ID NO: 2755130 - RNA, 19 nt, Artificial Sequence
  Description of Artificial Sequence: Synthetic oligonucleotide
uugaggauaggagaguggc

SEQ ID NO: 2755131 - RNA, 19 nt, Artificial Sequence
  Description of Artificial Sequence: Synthetic oligonucleotide
ucgguuugaggauaggaga

SEQ ID NO: 2755132 - RNA, 19 nt, Artificial Sequence
  Description of Artificial Sequence: Synthetic oligonucleotide
gaagacagugcacuucuug

SEQ ID NO: 2755133 - RNA, 19 nt, Artificial Sequence
  Description of Artificial Sequence: Synthetic oligonucleotide
ugacagaaccaaucucucg

SEQ ID NO: 2755134 - RNA, 19 nt, Artificial Sequence
  Description of Artificial Sequence: Synthetic oligonucleotide
aaaacuguggggauauacu

SEQ ID NO: 2755135 - RNA, 19 nt, Artificial Sequence
  Description of Artificial Sequence: Synthetic oligonucleotide
gauauacucucccgggaag

SEQ ID NO: 2755136 - RNA, 19 nt, Artificial Sequence
  Description of Artificial Sequence: Synthetic oligonucleotide
cuucccauccaccaucacg

SEQ ID NO: 2755137 - RNA, 19 nt, Artificial Sequence
  Description of Artificial Sequence: Synthetic oligonucleotide
uguccuugucaucacggag

SEQ ID NO: 2755138 - RNA, 19 nt, Artificial Sequence
  Description of Artificial Sequence: Synthetic oligonucleotide
ucuggguaccacuuggcgc

SEQ ID NO: 2755139 - RNA, 19 nt, Artificial Sequence
  Description of Artificial Sequence: Synthetic oligonucleotide
aucacggagguccagcuug

SEQ ID NO: 2755140 - RNA, 19 nt, Artificial Sequence
  Description of Artificial Sequence: Synthetic oligonucleotide
ucagcaagcacgucuuccc

SEQ ID NO: 2755141 - RNA, 19 nt, Artificial Sequence
  Description of Artificial Sequence: Synthetic oligonucleotide
ugccucaucaaacacuguc

SEQ ID NO: 2755142 - RNA, 19 nt, Artificial Sequence
  Description of Artificial Sequence: Synthetic oligonucleotide
gaaguaugggugugugggg

SEQ ID NO: 2755143 - RNA, 19 nt, Artificial Sequence
  Description of Artificial Sequence: Synthetic oligonucleotide
accucucugggucagagcu

SEQ ID NO: 2755144 - RNA, 19 nt, Artificial Sequence
  Description of Artificial Sequence: Synthetic oligonucleotide
aucagcaagcacgucuucc

SEQ ID NO: 2755145 - RNA, 19 nt, Artificial Sequence
  Description of Artificial Sequence: Synthetic oligonucleotide
aagacaucgguuugaggau

SEQ ID NO: 2755146 - RNA, 19 nt, Artificial Sequence
  Description of Artificial Sequence: Synthetic oligonucleotide
ugcggauaggugaugggug

SEQ ID NO: 2755147 - RNA, 19 nt, Artificial Sequence
  Description of Artificial Sequence: Synthetic oligonucleotide
gcagaucagaaagacaucg

SEQ ID NO: 2755148 - RNA, 19 nt, Artificial Sequence
  Description of Artificial Sequence: Synthetic oligonucleotide
ucgggccauagccagaccc

SEQ ID NO: 2755149 - RNA, 19 nt, Artificial Sequence
  Description of Artificial Sequence: Synthetic oligonucleotide
ucucaaaggaggccgggcu

SEQ ID NO: 2755150 - RNA, 19 nt, Artificial Sequence
  Description of Artificial Sequence: Synthetic oligonucleotide
ucccgaagccguucaaugg

SEQ ID NO: 2755151 - RNA, 19 nt, Artificial Sequence
  Description of Artificial Sequence: Synthetic oligonucleotide
uagccuaucguagucuucc

SEQ ID NO: 2755152 - RNA, 19 nt, Artificial Sequence
  Description of Artificial Sequence: Synthetic oligonucleotide
aguggugccgcaccucugg

SEQ ID NO: 2755153 - RNA, 19 nt, Artificial Sequence
  Description of Artificial Sequence: Synthetic oligonucleotide
cuugacagaaccaaucucu

SEQ ID NO: 2755154 - RNA, 19 nt, Artificial Sequence
  Description of Artificial Sequence: Synthetic oligonucleotide
cagaucagaaagacaucgg

SEQ ID NO: 2755155 - RNA, 19 nt, Artificial Sequence
  Description of Artificial Sequence: Synthetic oligonucleotide
guccuugucaucacggagg

SEQ ID NO: 2755156 - RNA, 19 nt, Artificial Sequence
  Description of Artificial Sequence: Synthetic oligonucleotide
ucccacagccccaaguuga

SEQ ID NO: 2755157 - RNA, 19 nt, Artificial Sequence
  Description of Artificial Sequence: Synthetic oligonucleotide
auauacucucccgggaagg

SEQ ID NO: 2755158 - RNA, 19 nt, Artificial Sequence
  Description of Artificial Sequence: Synthetic oligonucleotide
agacccugcggauagguga

SEQ ID NO: 2755159 - RNA, 19 nt, Artificial Sequence
  Description of Artificial Sequence: Synthetic oligonucleotide
uaucguagucuuccuggcc

SEQ ID NO: 2755160 - RNA, 19 nt, Artificial Sequence
  Description of Artificial Sequence: Synthetic oligonucleotide
guugacuggcuucccaucc

SEQ ID NO: 2755161 - RNA, 19 nt, Artificial Sequence
  Description of Artificial Sequence: Synthetic oligonucleotide
cuucagaccucucuggguc

SEQ ID NO: 2755162 - RNA, 19 nt, Artificial Sequence
  Description of Artificial Sequence: Synthetic oligonucleotide
aaguugacuggcuucccau

SEQ ID NO: 2755163 - RNA, 19 nt, Artificial Sequence
  Description of Artificial Sequence: Synthetic oligonucleotide
ccuaucguagucuuccugg

SEQ ID NO: 2755164 - RNA, 19 nt, Artificial Sequence
  Description of Artificial Sequence: Synthetic oligonucleotide
aucacguuggcugaguagu

SEQ ID NO: 2755165 - RNA, 19 nt, Artificial Sequence
  Description of Artificial Sequence: Synthetic oligonucleotide
aucgguuugaggauaggag

SEQ ID NO: 2755166 - RNA, 19 nt, Artificial Sequence
  Description of Artificial Sequence: Synthetic oligonucleotide
gaaccaaucucucgggcca

SEQ ID NO: 2755167 - RNA, 19 nt, Artificial Sequence
  Description of Artificial Sequence: Synthetic oligonucleotide
ugaggauaggagaguggcc

SEQ ID NO: 2755168 - RNA, 19 nt, Artificial Sequence
  Description of Artificial Sequence: Synthetic oligonucleotide
acuggaggugggcagagca

SEQ ID NO: 2755169 - RNA, 19 nt, Artificial Sequence
  Description of Artificial Sequence: Synthetic oligonucleotide
uugacagaaccaaucucuc

SEQ ID NO: 2755170 - RNA, 19 nt, Artificial Sequence
  Description of Artificial Sequence: Synthetic oligonucleotide
aguugacuggcuucccauc

SEQ ID NO: 2755171 - RNA, 19 nt, Artificial Sequence
  Description of Artificial Sequence: Synthetic oligonucleotide
uaggagaguggccguagcc

SEQ ID NO: 2755172 - RNA, 19 nt, Artificial Sequence
  Description of Artificial Sequence: Synthetic oligonucleotide
ucucucgggccauagccag

SEQ ID NO: 2755173 - RNA, 19 nt, Artificial Sequence
  Description of Artificial Sequence: Synthetic oligonucleotide
gucuucagaccucucuggg

SEQ ID NO: 2755174 - RNA, 19 nt, Artificial Sequence
  Description of Artificial Sequence: Synthetic oligonucleotide
ccagguacuugacagaacc

SEQ ID NO: 2755175 - RNA, 19 nt, Artificial Sequence
  Description of Artificial Sequence: Synthetic oligonucleotide
guuggcugaguaguugucg

SEQ ID NO: 2755176 - RNA, 19 nt, Artificial Sequence
  Description of Artificial Sequence: Synthetic oligonucleotide
agagcugagcacuccaggu

SEQ ID NO: 2755177 - RNA, 19 nt, Artificial Sequence
  Description of Artificial Sequence: Synthetic oligonucleotide
agaaagacaucgguuugag

SEQ ID NO: 2755178 - RNA, 19 nt, Artificial Sequence
  Description of Artificial Sequence: Synthetic oligonucleotide
cuaucguagucuuccuggc

SEQ ID NO: 2755179 - RNA, 19 nt, Artificial Sequence
  Description of Artificial Sequence: Synthetic oligonucleotide
uuuucacuggaggugggca

SEQ ID NO: 2755180 - RNA, 19 nt, Artificial Sequence
  Description of Artificial Sequence: Synthetic oligonucleotide
uuggcugaguaguugucga

SEQ ID NO: 2755181 - RNA, 19 nt, Artificial Sequence
  Description of Artificial Sequence: Synthetic oligonucleotide
uggccguagccuaucguag

SEQ ID NO: 2755182 - RNA, 19 nt, Artificial Sequence
  Description of Artificial Sequence: Synthetic oligonucleotide
guuugaggauaggagagug

SEQ ID NO: 2755183 - RNA, 19 nt, Artificial Sequence
  Description of Artificial Sequence: Synthetic oligonucleotide
aacuguggggauauacucu

SEQ ID NO: 2755184 - RNA, 19 nt, Artificial Sequence
  Description of Artificial Sequence: Synthetic oligonucleotide
gaaggcguuggucguguag

SEQ ID NO: 2755185 - RNA, 19 nt, Artificial Sequence
  Description of Artificial Sequence: Synthetic oligonucleotide
uaucccacagccccaaguu

SEQ ID NO: 2755186 - RNA, 19 nt, Artificial Sequence
  Description of Artificial Sequence: Synthetic oligonucleotide
ugguguccuugucaucacg

SEQ ID NO: 2755187 - RNA, 19 nt, Artificial Sequence
  Description of Artificial Sequence: Synthetic oligonucleotide
uccuugucaucacggaggu

SEQ ID NO: 2755188 - RNA, 19 nt, Artificial Sequence
  Description of Artificial Sequence: Synthetic oligonucleotide
guggggauauacucucccg

SEQ ID NO: 2755189 - RNA, 19 nt, Artificial Sequence
  Description of Artificial Sequence: Synthetic oligonucleotide
ccagcaguaucccacagcc

SEQ ID NO: 2755190 - RNA, 19 nt, Artificial Sequence
  Description of Artificial Sequence: Synthetic oligonucleotide
cucuggguaccacuuggcg

SEQ ID NO: 2755191 - RNA, 19 nt, Artificial Sequence
  Description of Artificial Sequence: Synthetic oligonucleotide
ucuucagaccucucugggu

SEQ ID NO: 2755192 - RNA, 19 nt, Artificial Sequence
  Description of Artificial Sequence: Synthetic oligonucleotide
acagccccaaguugacugg

SEQ ID NO: 2755193 - RNA, 19 nt, Artificial Sequence
  Description of Artificial Sequence: Synthetic oligonucleotide
gugcccaccagaaguaugg

SEQ ID NO: 2755194 - RNA, 19 nt, Artificial Sequence
  Description of Artificial Sequence: Synthetic oligonucleotide
gauaggagaguggccguag

SEQ ID NO: 2755195 - RNA, 19 nt, Artificial Sequence
  Description of Artificial Sequence: Synthetic oligonucleotide
ugcacuucuugccuggcuu

SEQ ID NO: 2755196 - RNA, 19 nt, Artificial Sequence
  Description of Artificial Sequence: Synthetic oligonucleotide
cagaaguaugggugugugg

SEQ ID NO: 2755197 - RNA, 19 nt, Artificial Sequence
  Description of Artificial Sequence: Synthetic oligonucleotide
uacucucccgggaaggcgu

SEQ ID NO: 2755198 - RNA, 19 nt, Artificial Sequence
  Description of Artificial Sequence: Synthetic oligonucleotide
uaccacuuggcgcggacgu

SEQ ID NO: 2755199 - RNA, 19 nt, Artificial Sequence
  Description of Artificial Sequence: Synthetic oligonucleotide
uguagcugaucagcaagca

SEQ ID NO: 2755200 - RNA, 19 nt, Artificial Sequence
  Description of Artificial Sequence: Synthetic oligonucleotide
ggggauauacucucccggg

SEQ ID NO: 2755201 - RNA, 19 nt, Artificial Sequence
  Description of Artificial Sequence: Synthetic oligonucleotide
ugggucagagcugagcacu

SEQ ID NO: 2755202 - RNA, 19 nt, Artificial Sequence
  Description of Artificial Sequence: Synthetic oligonucleotide
uauacucucccgggaaggc

SEQ ID NO: 2755203 - RNA, 19 nt, Artificial Sequence
  Description of Artificial Sequence: Synthetic oligonucleotide
ucuagaagacagugcacuu

SEQ ID NO: 2755204 - RNA, 19 nt, Artificial Sequence
  Description of Artificial Sequence: Synthetic oligonucleotide
cagagcugagcacuccagg

SEQ ID NO: 2755205 - RNA, 19 nt, Artificial Sequence
  Description of Artificial Sequence: Synthetic oligonucleotide
caucacguuggcugaguag

SEQ ID NO: 2755206 - RNA, 19 nt, Artificial Sequence
  Description of Artificial Sequence: Synthetic oligonucleotide
ucaaaggaggccgggcuca

SEQ ID NO: 2755207 - RNA, 19 nt, Artificial Sequence
  Description of Artificial Sequence: Synthetic oligonucleotide
ucaucacggagguccagcu

SEQ ID NO: 2755208 - RNA, 19 nt, Artificial Sequence
  Description of Artificial Sequence: Synthetic oligonucleotide
uagucuuccuggccagcag

SEQ ID NO: 2755209 - RNA, 19 nt, Artificial Sequence
  Description of Artificial Sequence: Synthetic oligonucleotide
guacuugacagaaccaauc

SEQ ID NO: 2755210 - RNA, 19 nt, Artificial Sequence
  Description of Artificial Sequence: Synthetic oligonucleotide
aggcggggcgucuagaaga

SEQ ID NO: 2755211 - RNA, 19 nt, Artificial Sequence
  Description of Artificial Sequence: Synthetic oligonucleotide
uugacuggcuucccaucca

SEQ ID NO: 2755212 - RNA, 19 nt, Artificial Sequence
  Description of Artificial Sequence: Synthetic oligonucleotide
acagugcacuucuugccug

SEQ ID NO: 2755213 - RNA, 19 nt, Artificial Sequence
  Description of Artificial Sequence: Synthetic oligonucleotide
gauaggugaugggugccag

SEQ ID NO: 2755214 - RNA, 19 nt, Artificial Sequence
  Description of Artificial Sequence: Synthetic oligonucleotide
ucaccagggagaagcagau

SEQ ID NO: 2755215 - RNA, 19 nt, Artificial Sequence
  Description of Artificial Sequence: Synthetic oligonucleotide
gacuugccucaucaaacac

SEQ ID NO: 2755216 - RNA, 19 nt, Artificial Sequence
  Description of Artificial Sequence: Synthetic oligonucleotide
guagcugaucagcaagcac

SEQ ID NO: 2755217 - RNA, 19 nt, Artificial Sequence
  Description of Artificial Sequence: Synthetic oligonucleotide
gaugggugccagcuucuug

SEQ ID NO: 2755218 - RNA, 19 nt, Artificial Sequence
  Description of Artificial Sequence: Synthetic oligonucleotide
acguuggcugaguaguugu

SEQ ID NO: 2755219 - RNA, 19 nt, Artificial Sequence
  Description of Artificial Sequence: Synthetic oligonucleotide
agccagacccugcggauag

SEQ ID NO: 2755220 - RNA, 19 nt, Artificial Sequence
  Description of Artificial Sequence: Synthetic oligonucleotide
cccaccagaaguaugggug

SEQ ID NO: 2755221 - RNA, 19 nt, Artificial Sequence
  Description of Artificial Sequence: Synthetic oligonucleotide
cuagaagacagugcacuuc

SEQ ID NO: 2755222 - RNA, 19 nt, Artificial Sequence
  Description of Artificial Sequence: Synthetic oligonucleotide
gucccgaagccguucaaug

SEQ ID NO: 2755223 - RNA, 19 nt, Artificial Sequence
  Description of Artificial Sequence: Synthetic oligonucleotide
gacaucgguuugaggauag

SEQ ID NO: 2755224 - RNA, 19 nt, Artificial Sequence
  Description of Artificial Sequence: Synthetic oligonucleotide
augguguccuugucaucac

SEQ ID NO: 2755225 - RNA, 19 nt, Artificial Sequence
  Description of Artificial Sequence: Synthetic oligonucleotide
agccgggcuggucaggcgg

SEQ ID NO: 2755226 - RNA, 19 nt, Artificial Sequence
  Description of Artificial Sequence: Synthetic oligonucleotide
aaaggaggccgggcucacc

SEQ ID NO: 2755227 - RNA, 19 nt, Artificial Sequence
  Description of Artificial Sequence: Synthetic oligonucleotide
agguacuugacagaaccaa

SEQ ID NO: 2755228 - RNA, 19 nt, Artificial Sequence
  Description of Artificial Sequence: Synthetic oligonucleotide
cuuggugcccaccagaagu

SEQ ID NO: 2755229 - RNA, 19 nt, Artificial Sequence
  Description of Artificial Sequence: Synthetic oligonucleotide
gguguccuugucaucacgg

SEQ ID NO: 2755230 - RNA, 19 nt, Artificial Sequence
  Description of Artificial Sequence: Synthetic oligonucleotide
acuugccucaucaaacacu

SEQ ID NO: 2755231 - RNA, 19 nt, Artificial Sequence
  Description of Artificial Sequence: Synthetic oligonucleotide
gacguucucaaaggaggcc

SEQ ID NO: 2755232 - RNA, 19 nt, Artificial Sequence
  Description of Artificial Sequence: Synthetic oligonucleotide
ugacuggcuucccauccac

SEQ ID NO: 2755233 - RNA, 19 nt, Artificial Sequence
  Description of Artificial Sequence: Synthetic oligonucleotide
uucucaaaggaggccgggc

SEQ ID NO: 2755234 - RNA, 19 nt, Artificial Sequence
  Description of Artificial Sequence: Synthetic oligonucleotide
gcgucuagaagacagugca

SEQ ID NO: 2755235 - RNA, 19 nt, Artificial Sequence
  Description of Artificial Sequence: Synthetic oligonucleotide
uggucguguagcugaucag

SEQ ID NO: 2755236 - RNA, 19 nt, Artificial Sequence
  Description of Artificial Sequence: Synthetic oligonucleotide
auacucucccgggaaggcg

SEQ ID NO: 2755237 - RNA, 19 nt, Artificial Sequence
  Description of Artificial Sequence: Synthetic oligonucleotide
cauagccagacccugcgga

SEQ ID NO: 2755238 - RNA, 19 nt, Artificial Sequence
  Description of Artificial Sequence: Synthetic oligonucleotide
uucagaccucucuggguca

SEQ ID NO: 2755239 - RNA, 19 nt, Artificial Sequence
  Description of Artificial Sequence: Synthetic oligonucleotide
cggacguucucaaaggagg

SEQ ID NO: 2755240 - RNA, 19 nt, Artificial Sequence
  Description of Artificial Sequence: Synthetic oligonucleotide
uugucaucacggaggucca

SEQ ID NO: 2755241 - RNA, 19 nt, Artificial Sequence
  Description of Artificial Sequence: Synthetic oligonucleotide
uggcuucccauccaccauc

SEQ ID NO: 2755242 - RNA, 19 nt, Artificial Sequence
  Description of Artificial Sequence: Synthetic oligonucleotide
ggcgcggacguucucaaag

SEQ ID NO: 2755243 - RNA, 19 nt, Artificial Sequence
  Description of Artificial Sequence: Synthetic oligonucleotide
uggaggugggcagagcacu

SEQ ID NO: 2755244 - RNA, 19 nt, Artificial Sequence
  Description of Artificial Sequence: Synthetic oligonucleotide
ucucccgggaaggcguugg

SEQ ID NO: 2755245 - RNA, 19 nt, Artificial Sequence
  Description of Artificial Sequence: Synthetic oligonucleotide
guguagcugaucagcaagc

SEQ ID NO: 2755246 - RNA, 19 nt, Artificial Sequence
  Description of Artificial Sequence: Synthetic oligonucleotide
uuggugcccaccagaagua

SEQ ID NO: 2755247 - RNA, 19 nt, Artificial Sequence
  Description of Artificial Sequence: Synthetic oligonucleotide
aggagaguggccguagccu

SEQ ID NO: 2755248 - RNA, 19 nt, Artificial Sequence
  Description of Artificial Sequence: Synthetic oligonucleotide
ggugaugggugccagcuuc

SEQ ID NO: 2755249 - RNA, 19 nt, Artificial Sequence
  Description of Artificial Sequence: Synthetic oligonucleotide
agcagaucagaaagacauc

SEQ ID NO: 2755250 - RNA, 19 nt, Artificial Sequence
  Description of Artificial Sequence: Synthetic oligonucleotide
ugggcagagcacugcccgg

SEQ ID NO: 2755251 - RNA, 19 nt, Artificial Sequence
  Description of Artificial Sequence: Synthetic oligonucleotide
uccagguacuugacagaac

SEQ ID NO: 2755252 - RNA, 19 nt, Artificial Sequence
  Description of Artificial Sequence: Synthetic oligonucleotide
cugaucagcaagcacgucu

SEQ ID NO: 2755253 - RNA, 19 nt, Artificial Sequence
  Description of Artificial Sequence: Synthetic oligonucleotide
agugcacuucuugccuggc

SEQ ID NO: 2755254 - RNA, 19 nt, Artificial Sequence
  Description of Artificial Sequence: Synthetic oligonucleotide
gacagugcacuucuugccu

SEQ ID NO: 2755255 - RNA, 19 nt, Artificial Sequence
  Description of Artificial Sequence: Synthetic oligonucleotide
cccgggaaggcguuggucg

SEQ ID NO: 2755256 - RNA, 19 nt, Artificial Sequence
  Description of Artificial Sequence: Synthetic oligonucleotide
uucacuggaggugggcaga

SEQ ID NO: 2755257 - RNA, 19 nt, Artificial Sequence
  Description of Artificial Sequence: Synthetic oligonucleotide
ggucguguagcugaucagc

SEQ ID NO: 2755258 - RNA, 19 nt, Artificial Sequence
  Description of Artificial Sequence: Synthetic oligonucleotide
auagccagacccugcggau

SEQ ID NO: 2755259 - RNA, 19 nt, Artificial Sequence
  Description of Artificial Sequence: Synthetic oligonucleotide
gccauagccagacccugcg

SEQ ID NO: 2755260 - RNA, 19 nt, Artificial Sequence
  Description of Artificial Sequence: Synthetic oligonucleotide
ucguguagcugaucagcaa

SEQ ID NO: 2755261 - RNA, 19 nt, Artificial Sequence
  Description of Artificial Sequence: Synthetic oligonucleotide
acggagguccagcuuggug

SEQ ID NO: 2755262 - RNA, 19 nt, Artificial Sequence
  Description of Artificial Sequence: Synthetic oligonucleotide
ucucgggccauagccagac

SEQ ID NO: 2755263 - RNA, 19 nt, Artificial Sequence
  Description of Artificial Sequence: Synthetic oligonucleotide
gucuagaagacagugcacu

SEQ ID NO: 2755264 - RNA, 19 nt, Artificial Sequence
  Description of Artificial Sequence: Synthetic oligonucleotide
caaucucucgggccauagc

SEQ ID NO: 2755265 - RNA, 19 nt, Artificial Sequence
  Description of Artificial Sequence: Synthetic oligonucleotide
gucaucacggagguccagc

SEQ ID NO: 2755266 - RNA, 19 nt, Artificial Sequence
  Description of Artificial Sequence: Synthetic oligonucleotide
cucaaaggaggccgggcuc

SEQ ID NO: 2755267 - RNA, 19 nt, Artificial Sequence
  Description of Artificial Sequence: Synthetic oligonucleotide
gcuucuugucccgaagccg

SEQ ID NO: 2755268 - RNA, 19 nt, Artificial Sequence
  Description of Artificial Sequence: Synthetic oligonucleotide
gggcucaccagggagaagc

SEQ ID NO: 2755269 - RNA, 19 nt, Artificial Sequence
  Description of Artificial Sequence: Synthetic oligonucleotide
aggauaggagaguggccgu

SEQ ID NO: 2755270 - RNA, 19 nt, Artificial Sequence
  Description of Artificial Sequence: Synthetic oligonucleotide
cggagguccagcuuggugc

SEQ ID NO: 2755271 - RNA, 19 nt, Artificial Sequence
  Description of Artificial Sequence: Synthetic oligonucleotide
ucaggcggggcgucuagaa

SEQ ID NO: 2755272 - RNA, 19 nt, Artificial Sequence
  Description of Artificial Sequence: Synthetic oligonucleotide
agaccucucugggucagag

SEQ ID NO: 2755273 - RNA, 19 nt, Artificial Sequence
  Description of Artificial Sequence: Synthetic oligonucleotide
cuguggggauauacucucc

SEQ ID NO: 2755274 - RNA, 19 nt, Artificial Sequence
  Description of Artificial Sequence: Synthetic oligonucleotide
ucucagccgggcuggucag

SEQ ID NO: 2755275 - RNA, 19 nt, Artificial Sequence
  Description of Artificial Sequence: Synthetic oligonucleotide
cagcaagcacgucuucccc

SEQ ID NO: 2755276 - RNA, 19 nt, Artificial Sequence
  Description of Artificial Sequence: Synthetic oligonucleotide
agcacugcccggacuugcc

SEQ ID NO: 2755277 - RNA, 19 nt, Artificial Sequence
  Description of Artificial Sequence: Synthetic oligonucleotide
agccguucaaugguguccu

SEQ ID NO: 2755278 - RNA, 19 nt, Artificial Sequence
  Description of Artificial Sequence: Synthetic oligonucleotide
acugcccggacuugccuca

SEQ ID NO: 2755279 - RNA, 19 nt, Artificial Sequence
  Description of Artificial Sequence: Synthetic oligonucleotide
ucagccgggcuggucaggc

SEQ ID NO: 2755280 - RNA, 19 nt, Artificial Sequence
  Description of Artificial Sequence: Synthetic oligonucleotide
cuucuugucccgaagccgu

SEQ ID NO: 2755281 - RNA, 19 nt, Artificial Sequence
  Description of Artificial Sequence: Synthetic oligonucleotide
caggcucucagccgggcug

SEQ ID NO: 2755282 - RNA, 19 nt, Artificial Sequence
  Description of Artificial Sequence: Synthetic oligonucleotide
ugcccaccagaaguauggg

SEQ ID NO: 2755283 - RNA, 19 nt, Artificial Sequence
  Description of Artificial Sequence: Synthetic oligonucleotide
gaggccgggcucaccaggg

SEQ ID NO: 2755284 - RNA, 19 nt, Artificial Sequence
  Description of Artificial Sequence: Synthetic oligonucleotide
ggacuugccucaucaaaca

SEQ ID NO: 2755285 - RNA, 19 nt, Artificial Sequence
  Description of Artificial Sequence: Synthetic oligonucleotide
cguguagcugaucagcaag

SEQ ID NO: 2755286 - RNA, 19 nt, Artificial Sequence
  Description of Artificial Sequence: Synthetic oligonucleotide
gaucagaaagacaucgguu

SEQ ID NO: 2755287 - RNA, 19 nt, Artificial Sequence
  Description of Artificial Sequence: Synthetic oligonucleotide
ucacuggaggugggcagag

SEQ ID NO: 2755288 - RNA, 19 nt, Artificial Sequence
  Description of Artificial Sequence: Synthetic oligonucleotide
caucgguuugaggauagga

SEQ ID NO: 2755289 - RNA, 19 nt, Artificial Sequence
  Description of Artificial Sequence: Synthetic oligonucleotide
uggccagcaguaucccaca

SEQ ID NO: 2755290 - RNA, 19 nt, Artificial Sequence
  Description of Artificial Sequence: Synthetic oligonucleotide
guggccguagccuaucgua

SEQ ID NO: 2755291 - RNA, 19 nt, Artificial Sequence
  Description of Artificial Sequence: Synthetic oligonucleotide
guaccacuuggcgcggacg

SEQ ID NO: 2755292 - RNA, 19 nt, Artificial Sequence
  Description of Artificial Sequence: Synthetic oligonucleotide
agcugaucagcaagcacgu

SEQ ID NO: 2755293 - RNA, 19 nt, Artificial Sequence
  Description of Artificial Sequence: Synthetic oligonucleotide
cugggucagagcugagcac

SEQ ID NO: 2755294 - RNA, 19 nt, Artificial Sequence
  Description of Artificial Sequence: Synthetic oligonucleotide
ggauauacucucccgggaa

SEQ ID NO: 2755295 - RNA, 19 nt, Artificial Sequence
  Description of Artificial Sequence: Synthetic oligonucleotide
agaguggccguagccuauc

SEQ ID NO: 2755296 - RNA, 19 nt, Artificial Sequence
  Description of Artificial Sequence: Synthetic oligonucleotide
aguggccguagccuaucgu

SEQ ID NO: 2755297 - RNA, 19 nt, Artificial Sequence
  Description of Artificial Sequence: Synthetic oligonucleotide
gcggauaggugaugggugc

SEQ ID NO: 2755298 - RNA, 19 nt, Artificial Sequence
  Description of Artificial Sequence: Synthetic oligonucleotide
ggagguccagcuuggugcc

SEQ ID NO: 2755299 - RNA, 19 nt, Artificial Sequence
  Description of Artificial Sequence: Synthetic oligonucleotide
gaccucucugggucagagc

SEQ ID NO: 2755300 - RNA, 19 nt, Artificial Sequence
  Description of Artificial Sequence: Synthetic oligonucleotide
cagcaguaucccacagccc

SEQ ID NO: 2755301 - RNA, 19 nt, Artificial Sequence
  Description of Artificial Sequence: Synthetic oligonucleotide
agggagaagcagaucagaa

SEQ ID NO: 2755302 - RNA, 19 nt, Artificial Sequence
  Description of Artificial Sequence: Synthetic oligonucleotide
caaguugacuggcuuccca

SEQ ID NO: 2755303 - RNA, 19 nt, Artificial Sequence
  Description of Artificial Sequence: Synthetic oligonucleotide
aguaucccacagccccaag

SEQ ID NO: 2755304 - RNA, 19 nt, Artificial Sequence
  Description of Artificial Sequence: Synthetic oligonucleotide
guucaaugguguccuuguc

SEQ ID NO: 2755305 - RNA, 19 nt, Artificial Sequence
  Description of Artificial Sequence: Synthetic oligonucleotide
cgguuugaggauaggagag

SEQ ID NO: 2755306 - RNA, 19 nt, Artificial Sequence
  Description of Artificial Sequence: Synthetic oligonucleotide
cagaaagacaucgguuuga

SEQ ID NO: 2755307 - RNA, 19 nt, Artificial Sequence
  Description of Artificial Sequence: Synthetic oligonucleotide
gucguguagcugaucagca

SEQ ID NO: 2755308 - RNA, 19 nt, Artificial Sequence
  Description of Artificial Sequence: Synthetic oligonucleotide
gagcugagcacuccaggua

SEQ ID NO: 2755309 - RNA, 19 nt, Artificial Sequence
  Description of Artificial Sequence: Synthetic oligonucleotide
cacguuggcugaguaguug

SEQ ID NO: 2755310 - RNA, 19 nt, Artificial Sequence
  Description of Artificial Sequence: Synthetic oligonucleotide
ucacguuggcugaguaguu

SEQ ID NO: 2755311 - RNA, 19 nt, Artificial Sequence
  Description of Artificial Sequence: Synthetic oligonucleotide
accagaaguaugggugugu

SEQ ID NO: 2755312 - RNA, 19 nt, Artificial Sequence
  Description of Artificial Sequence: Synthetic oligonucleotide
guguccuugucaucacgga

SEQ ID NO: 2755313 - RNA, 19 nt, Artificial Sequence
  Description of Artificial Sequence: Synthetic oligonucleotide
acaucgguuugaggauagg

SEQ ID NO: 2755314 - RNA, 19 nt, Artificial Sequence
  Description of Artificial Sequence: Synthetic oligonucleotide
cagguacuugacagaacca

SEQ ID NO: 2755315 - RNA, 19 nt, Artificial Sequence
  Description of Artificial Sequence: Synthetic oligonucleotide
gaggugggcagagcacugc

SEQ ID NO: 2755316 - RNA, 19 nt, Artificial Sequence
  Description of Artificial Sequence: Synthetic oligonucleotide
ugucaucacggagguccag

SEQ ID NO: 2755317 - RNA, 19 nt, Artificial Sequence
  Description of Artificial Sequence: Synthetic oligonucleotide
aggcguuggucguguagcu

SEQ ID NO: 2755318 - RNA, 19 nt, Artificial Sequence
  Description of Artificial Sequence: Synthetic oligonucleotide
cuugucccgaagccguuca

SEQ ID NO: 2755319 - RNA, 19 nt, Artificial Sequence
  Description of Artificial Sequence: Synthetic oligonucleotide
ggacguucucaaaggaggc

SEQ ID NO: 2755320 - RNA, 19 nt, Artificial Sequence
  Description of Artificial Sequence: Synthetic oligonucleotide
uuggcgcggacguucucaa

SEQ ID NO: 2755321 - RNA, 19 nt, Artificial Sequence
  Description of Artificial Sequence: Synthetic oligonucleotide
gcguuggucguguagcuga

SEQ ID NO: 2755322 - RNA, 19 nt, Artificial Sequence
  Description of Artificial Sequence: Synthetic oligonucleotide
cucucugggucagagcuga

SEQ ID NO: 2755323 - RNA, 19 nt, Artificial Sequence
  Description of Artificial Sequence: Synthetic oligonucleotide
aggcucucagccgggcugg

SEQ ID NO: 2755324 - RNA, 19 nt, Artificial Sequence
  Description of Artificial Sequence: Synthetic oligonucleotide
cggacuugccucaucaaac

SEQ ID NO: 2755325 - RNA, 19 nt, Artificial Sequence
  Description of Artificial Sequence: Synthetic oligonucleotide
guggugccgcaccucuggg

SEQ ID NO: 2755326 - RNA, 19 nt, Artificial Sequence
  Description of Artificial Sequence: Synthetic oligonucleotide
cccaaguugacuggcuucc

SEQ ID NO: 2755327 - RNA, 19 nt, Artificial Sequence
  Description of Artificial Sequence: Synthetic oligonucleotide
cagacccugcggauaggug

SEQ ID NO: 2755328 - RNA, 19 nt, Artificial Sequence
  Description of Artificial Sequence: Synthetic oligonucleotide
ggaggccgggcucaccagg

SEQ ID NO: 2755329 - RNA, 19 nt, Artificial Sequence
  Description of Artificial Sequence: Synthetic oligonucleotide
ucuugucccgaagccguuc

SEQ ID NO: 2755330 - RNA, 19 nt, Artificial Sequence
  Description of Artificial Sequence: Synthetic oligonucleotide
aucucucgggccauagcca

SEQ ID NO: 2755331 - RNA, 19 nt, Artificial Sequence
  Description of Artificial Sequence: Synthetic oligonucleotide
gcugaguaguugucgaaaa

SEQ ID NO: 2755332 - RNA, 19 nt, Artificial Sequence
  Description of Artificial Sequence: Synthetic oligonucleotide
gcgcggacguucucaaagg

SEQ ID NO: 2755333 - RNA, 19 nt, Artificial Sequence
  Description of Artificial Sequence: Synthetic oligonucleotide
uggugccgcaccucugggu

SEQ ID NO: 2755334 - RNA, 19 nt, Artificial Sequence
  Description of Artificial Sequence: Synthetic oligonucleotide
agccuaucguagucuuccu

SEQ ID NO: 2755335 - RNA, 19 nt, Artificial Sequence
  Description of Artificial Sequence: Synthetic oligonucleotide
gggauauacucucccggga

SEQ ID NO: 2755336 - RNA, 19 nt, Artificial Sequence
  Description of Artificial Sequence: Synthetic oligonucleotide
gagcacugcccggacuugc

SEQ ID NO: 2755337 - RNA, 19 nt, Artificial Sequence
  Description of Artificial Sequence: Synthetic oligonucleotide
uugccucaucaaacacugu

SEQ ID NO: 2755338 - RNA, 19 nt, Artificial Sequence
  Description of Artificial Sequence: Synthetic oligonucleotide
ucucugggucagagcugag

SEQ ID NO: 2755339 - RNA, 19 nt, Artificial Sequence
  Description of Artificial Sequence: Synthetic oligonucleotide
cacugcccggacuugccuc

SEQ ID NO: 2755340 - RNA, 19 nt, Artificial Sequence
  Description of Artificial Sequence: Synthetic oligonucleotide
caggcggggcgucuagaag

SEQ ID NO: 2755341 - RNA, 19 nt, Artificial Sequence
  Description of Artificial Sequence: Synthetic oligonucleotide
guaucccacagccccaagu

SEQ ID NO: 2755342 - RNA, 19 nt, Artificial Sequence
  Description of Artificial Sequence: Synthetic oligonucleotide
cuccagguacuugacagaa

SEQ ID NO: 2755343 - RNA, 19 nt, Artificial Sequence
  Description of Artificial Sequence: Synthetic oligonucleotide
ggcgucuagaagacagugc

SEQ ID NO: 2755344 - RNA, 19 nt, Artificial Sequence
  Description of Artificial Sequence: Synthetic oligonucleotide
agacaucgguuugaggaua

SEQ ID NO: 2755345 - RNA, 19 nt, Artificial Sequence
  Description of Artificial Sequence: Synthetic oligonucleotide
cauccaccaucacguuggc

SEQ ID NO: 2755346 - RNA, 19 nt, Artificial Sequence
  Description of Artificial Sequence: Synthetic oligonucleotide
ugccgcaccucuggguacc

SEQ ID NO: 2755347 - RNA, 19 nt, Artificial Sequence
  Description of Artificial Sequence: Synthetic oligonucleotide
ucuuccuggccagcaguau

SEQ ID NO: 2755348 - RNA, 19 nt, Artificial Sequence
  Description of Artificial Sequence: Synthetic oligonucleotide
cuuggcgcggacguucuca

SEQ ID NO: 2755349 - RNA, 19 nt, Artificial Sequence
  Description of Artificial Sequence: Synthetic oligonucleotide
gccagcaguaucccacagc

SEQ ID NO: 2755350 - RNA, 19 nt, Artificial Sequence
  Description of Artificial Sequence: Synthetic oligonucleotide
gggcuggucaggcggggcg

SEQ ID NO: 2755351 - RNA, 19 nt, Artificial Sequence
  Description of Artificial Sequence: Synthetic oligonucleotide
uucuugucccgaagccguu

SEQ ID NO: 2755352 - RNA, 19 nt, Artificial Sequence
  Description of Artificial Sequence: Synthetic oligonucleotide
aaccaaucucucgggccau

SEQ ID NO: 2755353 - RNA, 19 nt, Artificial Sequence
  Description of Artificial Sequence: Synthetic oligonucleotide
aggaggccgggcucaccag

SEQ ID NO: 2755354 - RNA, 19 nt, Artificial Sequence
  Description of Artificial Sequence: Synthetic oligonucleotide
gggcgucuagaagacagug

SEQ ID NO: 2755355 - RNA, 19 nt, Artificial Sequence
  Description of Artificial Sequence: Synthetic oligonucleotide
gcggacguucucaaaggag

SEQ ID NO: 2755356 - RNA, 19 nt, Artificial Sequence
  Description of Artificial Sequence: Synthetic oligonucleotide
cggggcgucuagaagacag

SEQ ID NO: 2755357 - RNA, 19 nt, Artificial Sequence
  Description of Artificial Sequence: Synthetic oligonucleotide
uggguaccacuuggcgcgg

SEQ ID NO: 2755358 - RNA, 19 nt, Artificial Sequence
  Description of Artificial Sequence: Synthetic oligonucleotide
gccuaucguagucuuccug

SEQ ID NO: 2755359 - RNA, 19 nt, Artificial Sequence
  Description of Artificial Sequence: Synthetic oligonucleotide
cagggagaagcagaucaga

SEQ ID NO: 2755360 - RNA, 19 nt, Artificial Sequence
  Description of Artificial Sequence: Synthetic oligonucleotide
agcuuggugcccaccagaa

SEQ ID NO: 2755361 - RNA, 19 nt, Artificial Sequence
  Description of Artificial Sequence: Synthetic oligonucleotide
ccugcggauaggugauggg

SEQ ID NO: 2755362 - RNA, 19 nt, Artificial Sequence
  Description of Artificial Sequence: Synthetic oligonucleotide
cguucucaaaggaggccgg

SEQ ID NO: 2755363 - RNA, 19 nt, Artificial Sequence
  Description of Artificial Sequence: Synthetic oligonucleotide
accaucacguuggcugagu

SEQ ID NO: 2755364 - RNA, 19 nt, Artificial Sequence
  Description of Artificial Sequence: Synthetic oligonucleotide
guagccuaucguagucuuc

SEQ ID NO: 2755365 - RNA, 19 nt, Artificial Sequence
  Description of Artificial Sequence: Synthetic oligonucleotide
ccagaaguaugggugugug

SEQ ID NO: 2755366 - RNA, 19 nt, Artificial Sequence
  Description of Artificial Sequence: Synthetic oligonucleotide
cagccccaaguugacuggc

SEQ ID NO: 2755367 - RNA, 19 nt, Artificial Sequence
  Description of Artificial Sequence: Synthetic oligonucleotide
ggugccgcaccucugggua

SEQ ID NO: 2755368 - RNA, 19 nt, Artificial Sequence
  Description of Artificial Sequence: Synthetic oligonucleotide
ggagaguggccguagccua

SEQ ID NO: 2755369 - RNA, 19 nt, Artificial Sequence
  Description of Artificial Sequence: Synthetic oligonucleotide
gggugccagcuucuugucc

SEQ ID NO: 2755370 - RNA, 19 nt, Artificial Sequence
  Description of Artificial Sequence: Synthetic oligonucleotide
gguaccacuuggcgcggac

SEQ ID NO: 2755371 - RNA, 19 nt, Artificial Sequence
  Description of Artificial Sequence: Synthetic oligonucleotide
ggccgggcucaccagggag

SEQ ID NO: 2755372 - RNA, 19 nt, Artificial Sequence
  Description of Artificial Sequence: Synthetic oligonucleotide
ggugcccaccagaaguaug

SEQ ID NO: 2755373 - RNA, 19 nt, Artificial Sequence
  Description of Artificial Sequence: Synthetic oligonucleotide
uagccagacccugcggaua

SEQ ID NO: 2755374 - RNA, 19 nt, Artificial Sequence
  Description of Artificial Sequence: Synthetic oligonucleotide
ccgaagccguucaauggug

SEQ ID NO: 2755375 - RNA, 19 nt, Artificial Sequence
  Description of Artificial Sequence: Synthetic oligonucleotide
cccauccaccaucacguug

SEQ ID NO: 2755376 - RNA, 19 nt, Artificial Sequence
  Description of Artificial Sequence: Synthetic oligonucleotide
ccauagccagacccugcgg

SEQ ID NO: 2755377 - RNA, 19 nt, Artificial Sequence
  Description of Artificial Sequence: Synthetic oligonucleotide
uggugcccaccagaaguau

SEQ ID NO: 2755378 - RNA, 19 nt, Artificial Sequence
  Description of Artificial Sequence: Synthetic oligonucleotide
caguggugccgcaccucug

SEQ ID NO: 2755379 - RNA, 19 nt, Artificial Sequence
  Description of Artificial Sequence: Synthetic oligonucleotide
ucccgggaaggcguugguc

SEQ ID NO: 2755380 - RNA, 19 nt, Artificial Sequence
  Description of Artificial Sequence: Synthetic oligonucleotide
ggauaggugaugggugcca

SEQ ID NO: 2755381 - RNA, 19 nt, Artificial Sequence
  Description of Artificial Sequence: Synthetic oligonucleotide
gccguagccuaucguaguc

SEQ ID NO: 2755382 - RNA, 19 nt, Artificial Sequence
  Description of Artificial Sequence: Synthetic oligonucleotide
cccugcggauaggugaugg

SEQ ID NO: 2755383 - RNA, 19 nt, Artificial Sequence
  Description of Artificial Sequence: Synthetic oligonucleotide
aggugaugggugccagcuu

SEQ ID NO: 2755384 - RNA, 19 nt, Artificial Sequence
  Description of Artificial Sequence: Synthetic oligonucleotide
ugaugggugccagcuucuu

SEQ ID NO: 2755385 - RNA, 19 nt, Artificial Sequence
  Description of Artificial Sequence: Synthetic oligonucleotide
ggucagagcugagcacucc

SEQ ID NO: 2755386 - RNA, 19 nt, Artificial Sequence
  Description of Artificial Sequence: Synthetic oligonucleotide
caaaggaggccgggcucac

SEQ ID NO: 2755387 - RNA, 19 nt, Artificial Sequence
  Description of Artificial Sequence: Synthetic oligonucleotide
ccccaaguugacuggcuuc

SEQ ID NO: 2755388 - RNA, 19 nt, Artificial Sequence
  Description of Artificial Sequence: Synthetic oligonucleotide
gcccggacuugccucauca

SEQ ID NO: 2755389 - RNA, 19 nt, Artificial Sequence
  Description of Artificial Sequence: Synthetic oligonucleotide
cugcggauaggugaugggu

SEQ ID NO: 2755390 - RNA, 19 nt, Artificial Sequence
  Description of Artificial Sequence: Synthetic oligonucleotide
ucccauccaccaucacguu

SEQ ID NO: 2755391 - RNA, 19 nt, Artificial Sequence
  Description of Artificial Sequence: Synthetic oligonucleotide
gugccgcaccucuggguac

SEQ ID NO: 2755392 - RNA, 19 nt, Artificial Sequence
  Description of Artificial Sequence: Synthetic oligonucleotide
gcucaccagggagaagcag

SEQ ID NO: 2755393 - RNA, 19 nt, Artificial Sequence
  Description of Artificial Sequence: Synthetic oligonucleotide
cgucuagaagacagugcac

SEQ ID NO: 2755394 - RNA, 19 nt, Artificial Sequence
  Description of Artificial Sequence: Synthetic oligonucleotide
gagguccagcuuggugccc

SEQ ID NO: 2755395 - RNA, 19 nt, Artificial Sequence
  Description of Artificial Sequence: Synthetic oligonucleotide
ggucaggcggggcgucuag

SEQ ID NO: 2755396 - RNA, 19 nt, Artificial Sequence
  Description of Artificial Sequence: Synthetic oligonucleotide
ccaaucucucgggccauag

SEQ ID NO: 2755397 - RNA, 19 nt, Artificial Sequence
  Description of Artificial Sequence: Synthetic oligonucleotide
cucgggccauagccagacc

SEQ ID NO: 2755398 - RNA, 19 nt, Artificial Sequence
  Description of Artificial Sequence: Synthetic oligonucleotide
cucagccgggcuggucagg

SEQ ID NO: 2755399 - RNA, 19 nt, Artificial Sequence
  Description of Artificial Sequence: Synthetic oligonucleotide
ccguucaaugguguccuug

SEQ ID NO: 2755400 - RNA, 19 nt, Artificial Sequence
  Description of Artificial Sequence: Synthetic oligonucleotide
auccaccaucacguuggcu

SEQ ID NO: 2755401 - RNA, 19 nt, Artificial Sequence
  Description of Artificial Sequence: Synthetic oligonucleotide
gguacuugacagaaccaau

SEQ ID NO: 2755402 - RNA, 19 nt, Artificial Sequence
  Description of Artificial Sequence: Synthetic oligonucleotide
cacuggaggugggcagagc

SEQ ID NO: 2755403 - RNA, 19 nt, Artificial Sequence
  Description of Artificial Sequence: Synthetic oligonucleotide
ggaggugggcagagcacug

SEQ ID NO: 2755404 - RNA, 19 nt, Artificial Sequence
  Description of Artificial Sequence: Synthetic oligonucleotide
cagagcacugcccggacuu

SEQ ID NO: 2755405 - RNA, 19 nt, Artificial Sequence
  Description of Artificial Sequence: Synthetic oligonucleotide
agccccaaguugacuggcu

SEQ ID NO: 2755406 - RNA, 19 nt, Artificial Sequence
  Description of Artificial Sequence: Synthetic oligonucleotide
gccucaucaaacacugucu

SEQ ID NO: 2755407 - RNA, 19 nt, Artificial Sequence
  Description of Artificial Sequence: Synthetic oligonucleotide
ugcccggacuugccucauc

SEQ ID NO: 2755408 - RNA, 19 nt, Artificial Sequence
  Description of Artificial Sequence: Synthetic oligonucleotide
gggccauagccagacccug

SEQ ID NO: 2755409 - RNA, 19 nt, Artificial Sequence
  Description of Artificial Sequence: Synthetic oligonucleotide
ggcguuggucguguagcug

SEQ ID NO: 2755410 - RNA, 19 nt, Artificial Sequence
  Description of Artificial Sequence: Synthetic oligonucleotide
aggccgggcucaccaggga

SEQ ID NO: 2755411 - RNA, 19 nt, Artificial Sequence
  Description of Artificial Sequence: Synthetic oligonucleotide
gguuugaggauaggagagu

SEQ ID NO: 2755412 - RNA, 19 nt, Artificial Sequence
  Description of Artificial Sequence: Synthetic oligonucleotide
ggccauagccagacccugc

SEQ ID NO: 2755413 - RNA, 19 nt, Artificial Sequence
  Description of Artificial Sequence: Synthetic oligonucleotide
ccucucugggucagagcug

SEQ ID NO: 2755414 - RNA, 19 nt, Artificial Sequence
  Description of Artificial Sequence: Synthetic oligonucleotide
cccacagccccaaguugac

SEQ ID NO: 2755415 - RNA, 19 nt, Artificial Sequence
  Description of Artificial Sequence: Synthetic oligonucleotide
ggcagagcacugcccggac

SEQ ID NO: 2755416 - RNA, 19 nt, Artificial Sequence
  Description of Artificial Sequence: Synthetic oligonucleotide
uggcgcggacguucucaaa

SEQ ID NO: 2755417 - RNA, 19 nt, Artificial Sequence
  Description of Artificial Sequence: Synthetic oligonucleotide
ccaaguugacuggcuuccc

SEQ ID NO: 2755418 - RNA, 19 nt, Artificial Sequence
  Description of Artificial Sequence: Synthetic oligonucleotide
gacccugcggauaggugau

SEQ ID NO: 2755419 - RNA, 19 nt, Artificial Sequence
  Description of Artificial Sequence: Synthetic oligonucleotide
gugcacuucuugccuggcu

SEQ ID NO: 2755420 - RNA, 19 nt, Artificial Sequence
  Description of Artificial Sequence: Synthetic oligonucleotide
caccagggagaagcagauc

SEQ ID NO: 2755421 - RNA, 19 nt, Artificial Sequence
  Description of Artificial Sequence: Synthetic oligonucleotide
ccacuuggcgcggacguuc

SEQ ID NO: 2755422 - RNA, 19 nt, Artificial Sequence
  Description of Artificial Sequence: Synthetic oligonucleotide
ccggacuugccucaucaaa

SEQ ID NO: 2755423 - RNA, 19 nt, Artificial Sequence
  Description of Artificial Sequence: Synthetic oligonucleotide
uggucaggcggggcgucua

SEQ ID NO: 2755424 - RNA, 19 nt, Artificial Sequence
  Description of Artificial Sequence: Synthetic oligonucleotide
ggcggggcgucuagaagac

SEQ ID NO: 2755425 - RNA, 19 nt, Artificial Sequence
  Description of Artificial Sequence: Synthetic oligonucleotide
guccagcuuggugcccacc

SEQ ID NO: 2755426 - RNA, 19 nt, Artificial Sequence
  Description of Artificial Sequence: Synthetic oligonucleotide
caguaucccacagccccaa

SEQ ID NO: 2755427 - RNA, 19 nt, Artificial Sequence
  Description of Artificial Sequence: Synthetic oligonucleotide
ggcuucccauccaccauca

SEQ ID NO: 2755428 - RNA, 19 nt, Artificial Sequence
  Description of Artificial Sequence: Synthetic oligonucleotide
cguuggcugaguaguuguc

SEQ ID NO: 2755429 - RNA, 19 nt, Artificial Sequence
  Description of Artificial Sequence: Synthetic oligonucleotide
cguucaaugguguccuugu

SEQ ID NO: 2755430 - RNA, 19 nt, Artificial Sequence
  Description of Artificial Sequence: Synthetic oligonucleotide
cucucccgggaaggcguug

SEQ ID NO: 2755431 - RNA, 19 nt, Artificial Sequence
  Description of Artificial Sequence: Synthetic oligonucleotide
gagaguggccguagccuau

SEQ ID NO: 2755432 - RNA, 19 nt, Artificial Sequence
  Description of Artificial Sequence: Synthetic oligonucleotide
ggauaggagaguggccgua

SEQ ID NO: 2755433 - RNA, 19 nt, Artificial Sequence
  Description of Artificial Sequence: Synthetic oligonucleotide
accacuuggcgcggacguu

SEQ ID NO: 2755434 - RNA, 19 nt, Artificial Sequence
  Description of Artificial Sequence: Synthetic oligonucleotide
gugaugggugccagcuucu

SEQ ID NO: 2755435 - RNA, 19 nt, Artificial Sequence
  Description of Artificial Sequence: Synthetic oligonucleotide
accaaucucucgggccaua

SEQ ID NO: 2755436 - RNA, 19 nt, Artificial Sequence
  Description of Artificial Sequence: Synthetic oligonucleotide
ggccguagccuaucguagu

SEQ ID NO: 2755437 - RNA, 19 nt, Artificial Sequence
  Description of Artificial Sequence: Synthetic oligonucleotide
gucaggcggggcgucuaga

SEQ ID NO: 2755438 - RNA, 19 nt, Artificial Sequence
  Description of Artificial Sequence: Synthetic oligonucleotide
cccgaagccguucaauggu

SEQ ID NO: 2755439 - RNA, 19 nt, Artificial Sequence
  Description of Artificial Sequence: Synthetic oligonucleotide
gggcagagcacugcccgga

SEQ ID NO: 2755440 - RNA, 19 nt, Artificial Sequence
  Description of Artificial Sequence: Synthetic oligonucleotide
gggucagagcugagcacuc

SEQ ID NO: 2755441 - RNA, 19 nt, Artificial Sequence
  Description of Artificial Sequence: Synthetic oligonucleotide
gccgggcuggucaggcggg

SEQ ID NO: 2755442 - RNA, 19 nt, Artificial Sequence
  Description of Artificial Sequence: Synthetic oligonucleotide
cggauaggugaugggugcc

SEQ ID NO: 2755443 - RNA, 19 nt, Artificial Sequence
  Description of Artificial Sequence: Synthetic oligonucleotide
gcccaccagaaguaugggu

SEQ ID NO: 2755444 - RNA, 19 nt, Artificial Sequence
  Description of Artificial Sequence: Synthetic oligonucleotide
gcuucccauccaccaucac

SEQ ID NO: 2755445 - RNA, 19 nt, Artificial Sequence
  Description of Artificial Sequence: Synthetic oligonucleotide
ggcucaccagggagaagca

SEQ ID NO: 2755446 - RNA, 19 nt, Artificial Sequence
  Description of Artificial Sequence: Synthetic oligonucleotide
gccgggcucaccagggaga

SEQ ID NO: 2755447 - RNA, 19 nt, Artificial Sequence
  Description of Artificial Sequence: Synthetic oligonucleotide
gcugaucagcaagcacguc

SEQ ID NO: 2755448 - RNA, 19 nt, Artificial Sequence
  Description of Artificial Sequence: Synthetic oligonucleotide
gccagacccugcggauagg

SEQ ID NO: 2755449 - RNA, 19 nt, Artificial Sequence
  Description of Artificial Sequence: Synthetic oligonucleotide
caucacggagguccagcuu

SEQ ID NO: 2755450 - RNA, 19 nt, Artificial Sequence
  Description of Artificial Sequence: Synthetic oligonucleotide
cguagucuuccuggccagc

SEQ ID NO: 2755451 - RNA, 19 nt, Artificial Sequence
  Description of Artificial Sequence: Synthetic oligonucleotide
acucucccgggaaggcguu

SEQ ID NO: 2755452 - RNA, 19 nt, Artificial Sequence
  Description of Artificial Sequence: Synthetic oligonucleotide
gcacuucuugccuggcuuu

SEQ ID NO: 2755453 - RNA, 19 nt, Artificial Sequence
  Description of Artificial Sequence: Synthetic oligonucleotide
ccaucacguuggcugagua

SEQ ID NO: 2755454 - RNA, 19 nt, Artificial Sequence
  Description of Artificial Sequence: Synthetic oligonucleotide
gcagagcacugcccggacu

SEQ ID NO: 2755455 - RNA, 19 nt, Artificial Sequence
  Description of Artificial Sequence: Synthetic oligonucleotide
gggaaggcguuggucgugu

SEQ ID NO: 2755456 - RNA, 19 nt, Artificial Sequence
  Description of Artificial Sequence: Synthetic oligonucleotide
cagaccucucugggucaga

SEQ ID NO: 2755457 - RNA, 19 nt, Artificial Sequence
  Description of Artificial Sequence: Synthetic oligonucleotide
cgcggacguucucaaagga

SEQ ID NO: 2755458 - RNA, 19 nt, Artificial Sequence
  Description of Artificial Sequence: Synthetic oligonucleotide
gcacugcccggacuugccu

SEQ ID NO: 2755459 - RNA, 19 nt, Artificial Sequence
  Description of Artificial Sequence: Synthetic oligonucleotide
ggaaggcguuggucgugua

SEQ ID NO: 2755460 - RNA, 19 nt, Artificial Sequence
  Description of Artificial Sequence: Synthetic oligonucleotide
cacuucuugccuggcuuuu

SEQ ID NO: 2755461 - RNA, 19 nt, Artificial Sequence
  Description of Artificial Sequence: Synthetic oligonucleotide
gccccaaguugacuggcuu

SEQ ID NO: 2755462 - RNA, 19 nt, Artificial Sequence
  Description of Artificial Sequence: Synthetic oligonucleotide
gcuggucaggcggggcguc

SEQ ID NO: 2755463 - RNA, 19 nt, Artificial Sequence
  Description of Artificial Sequence: Synthetic oligonucleotide
ccuugucaucacggagguc

SEQ ID NO: 2755464 - RNA, 19 nt, Artificial Sequence
  Description of Artificial Sequence: Synthetic oligonucleotide
ggggcgucuagaagacagu

SEQ ID NO: 2755465 - RNA, 19 nt, Artificial Sequence
  Description of Artificial Sequence: Synthetic oligonucleotide
cccggacuugccucaucaa

SEQ ID NO: 2755466 - RNA, 19 nt, Artificial Sequence
  Description of Artificial Sequence: Synthetic oligonucleotide
cucccgggaaggcguuggu

SEQ ID NO: 2755467 - RNA, 19 nt, Artificial Sequence
  Description of Artificial Sequence: Synthetic oligonucleotide
cguagccuaucguagucuu

SEQ ID NO: 2755468 - RNA, 19 nt, Artificial Sequence
  Description of Artificial Sequence: Synthetic oligonucleotide
ccgggcuggucaggcgggg

SEQ ID NO: 2755469 - RNA, 19 nt, Artificial Sequence
  Description of Artificial Sequence: Synthetic oligonucleotide
cgcaccucuggguaccacu

SEQ ID NO: 2755470 - RNA, 19 nt, Artificial Sequence
  Description of Artificial Sequence: Synthetic oligonucleotide
ccagacccugcggauaggu

SEQ ID NO: 2755471 - RNA, 19 nt, Artificial Sequence
  Description of Artificial Sequence: Synthetic oligonucleotide
cgggaaggcguuggucgug

SEQ ID NO: 2755472 - RNA, 19 nt, Artificial Sequence
  Description of Artificial Sequence: Synthetic oligonucleotide
ggguaccacuuggcgcgga

SEQ ID NO: 2755473 - RNA, 19 nt, Artificial Sequence
  Description of Artificial Sequence: Synthetic oligonucleotide
ggcuggucaggcggggcgu

SEQ ID NO: 2755474 - RNA, 19 nt, Artificial Sequence
  Description of Artificial Sequence: Synthetic oligonucleotide
cgggccauagccagacccu

SEQ ID NO: 2755475 - RNA, 19 nt, Artificial Sequence
  Description of Artificial Sequence: Synthetic oligonucleotide
ccgggaaggcguuggucgu

SEQ ID NO: 2755476 - RNA, 19 nt, Artificial Sequence
  Description of Artificial Sequence: Synthetic oligonucleotide
ccguagccuaucguagucu

SEQ ID NO: 2755477 - RNA, 19 nt, Artificial Sequence
  Description of Artificial Sequence: Synthetic oligonucleotide
cuggucaggcggggcgucu

SEQ ID NO: 2755478 - RNA, 19 nt, Artificial Sequence
  Description of Artificial Sequence: Synthetic oligonucleotide
ccgggcucaccagggagaa

SEQ ID NO: 2755479 - RNA, 19 nt, Artificial Sequence
  Description of Artificial Sequence: Synthetic oligonucleotide
gcggggcgucuagaagaca

SEQ ID NO: 2755480 - RNA, 19 nt, Artificial Sequence
  Description of Artificial Sequence: Synthetic oligonucleotide
cgggcuggucaggcggggc

SEQ ID NO: 2755481 - RNA, 19 nt, Artificial Sequence
  Description of Artificial Sequence: Synthetic oligonucleotide
ccaggcucucagccgggcu

SEQ ID NO: 2755482 - RNA, 19 nt, Artificial Sequence
  Description of Artificial Sequence: Synthetic oligonucleotide
ccgcaccucuggguaccac

SEQ ID NO: 2755483 - RNA, 19 nt, Artificial Sequence
  Description of Artificial Sequence: Synthetic oligonucleotide
gccgcaccucuggguacca

SEQ ID NO: 2755484 - RNA, 19 nt, Artificial Sequence
  Description of Artificial Sequence: Synthetic oligonucleotide
cguuggucguguagcugau

SEQ ID NO: 2755485 - RNA, 19 nt, Artificial Sequence
  Description of Artificial Sequence: Synthetic oligonucleotide
cgggcucaccagggagaag

SEQ ID NO: 2755486 - RNA, 19 nt, Artificial Sequence
  Description of Artificial Sequence: Synthetic oligonucleotide
ccacagccccaaguugacu

SEQ ID NO: 2755487 - RNA, 19 nt, Artificial Sequence
  Description of Artificial Sequence: Synthetic oligonucleotide
cugcccggacuugccucau

SEQ ID NO: 2755488 - RNA, 19 nt, Artificial Sequence
  Description of Artificial Sequence: Synthetic oligonucleotide
ggcucucagccgggcuggu

SEQ ID NO: 2755489 - RNA, 19 nt, Artificial Sequence
  Description of Artificial Sequence: Synthetic oligonucleotide
uaaacgaggacaaugaaag

SEQ ID NO: 2755490 - RNA, 19 nt, Artificial Sequence
  Description of Artificial Sequence: Synthetic oligonucleotide
aacauuuccaguuuggcag

SEQ ID NO: 2755491 - RNA, 19 nt, Artificial Sequence
  Description of Artificial Sequence: Synthetic oligonucleotide
aaaugaaucaagcacaccu

SEQ ID NO: 2755492 - RNA, 19 nt, Artificial Sequence
  Description of Artificial Sequence: Synthetic oligonucleotide
gaaauuuaccuguaaaacg

SEQ ID NO: 2755493 - RNA, 19 nt, Artificial Sequence
  Description of Artificial Sequence: Synthetic oligonucleotide
acagagaccaaauucagcg

SEQ ID NO: 2755494 - RNA, 19 nt, Artificial Sequence
  Description of Artificial Sequence: Synthetic oligonucleotide
aaggucuugaagcacuucc

SEQ ID NO: 2755495 - RNA, 19 nt, Artificial Sequence
  Description of Artificial Sequence: Synthetic oligonucleotide
uguaaaacgaaguacuacu

SEQ ID NO: 2755496 - RNA, 19 nt, Artificial Sequence
  Description of Artificial Sequence: Synthetic oligonucleotide
uuguacucaagacagcagg

SEQ ID NO: 2755497 - RNA, 19 nt, Artificial Sequence
  Description of Artificial Sequence: Synthetic oligonucleotide
aacgaaguacuacuccacc

SEQ ID NO: 2755498 - RNA, 19 nt, Artificial Sequence
  Description of Artificial Sequence: Synthetic oligonucleotide
aaaacgaaguacuacucca

SEQ ID NO: 2755499 - RNA, 19 nt, Artificial Sequence
  Description of Artificial Sequence: Synthetic oligonucleotide
ucuauucuaacucuuuucu

SEQ ID NO: 2755500 - RNA, 19 nt, Artificial Sequence
  Description of Artificial Sequence: Synthetic oligonucleotide
uuugcagggaccaucagca

SEQ ID NO: 2755501 - RNA, 19 nt, Artificial Sequence
  Description of Artificial Sequence: Synthetic oligonucleotide
ugucaugucgccaaggucu

SEQ ID NO: 2755502 - RNA, 19 nt, Artificial Sequence
  Description of Artificial Sequence: Synthetic oligonucleotide
aacucuuuucuuugcaggg

SEQ ID NO: 2755503 - RNA, 19 nt, Artificial Sequence
  Description of Artificial Sequence: Synthetic oligonucleotide
aaauuuaccuguaaaacga

SEQ ID NO: 2755504 - RNA, 19 nt, Artificial Sequence
  Description of Artificial Sequence: Synthetic oligonucleotide
cugaauuucacccugcgag

SEQ ID NO: 2755505 - RNA, 19 nt, Artificial Sequence
  Description of Artificial Sequence: Synthetic oligonucleotide
aguaaauccccacaaaaca

SEQ ID NO: 2755506 - RNA, 19 nt, Artificial Sequence
  Description of Artificial Sequence: Synthetic oligonucleotide
uuuagcacugucaugucgc

SEQ ID NO: 2755507 - RNA, 19 nt, Artificial Sequence
  Description of Artificial Sequence: Synthetic oligonucleotide
uucacauuuguacucaaga

SEQ ID NO: 2755508 - RNA, 19 nt, Artificial Sequence
  Description of Artificial Sequence: Synthetic oligonucleotide
uuaugccugaauuucaccc

SEQ ID NO: 2755509 - RNA, 19 nt, Artificial Sequence
  Description of Artificial Sequence: Synthetic oligonucleotide
uuuggcagcaagcagucag

SEQ ID NO: 2755510 - RNA, 19 nt, Artificial Sequence
  Description of Artificial Sequence: Synthetic oligonucleotide
aaugaaagggccccaggag

SEQ ID NO: 2755511 - RNA, 19 nt, Artificial Sequence
  Description of Artificial Sequence: Synthetic oligonucleotide
uaaaacgaaguacuacucc

SEQ ID NO: 2755512 - RNA, 19 nt, Artificial Sequence
  Description of Artificial Sequence: Synthetic oligonucleotide
uuuccuaggaaugauacca

SEQ ID NO: 2755513 - RNA, 19 nt, Artificial Sequence
  Description of Artificial Sequence: Synthetic oligonucleotide
uucgguaaagagcaccugg

SEQ ID NO: 2755514 - RNA, 19 nt, Artificial Sequence
  Description of Artificial Sequence: Synthetic oligonucleotide
aaugauaccaugccaguaa

SEQ ID NO: 2755515 - RNA, 19 nt, Artificial Sequence
  Description of Artificial Sequence: Synthetic oligonucleotide
augaaagggccccaggagc

SEQ ID NO: 2755516 - RNA, 19 nt, Artificial Sequence
  Description of Artificial Sequence: Synthetic oligonucleotide
acuucccuaaaacugauug

SEQ ID NO: 2755517 - RNA, 19 nt, Artificial Sequence
  Description of Artificial Sequence: Synthetic oligonucleotide
aauucagcgggaauuuagc

SEQ ID NO: 2755518 - RNA, 19 nt, Artificial Sequence
  Description of Artificial Sequence: Synthetic oligonucleotide
aaacauuuccaguuuggca

SEQ ID NO: 2755519 - RNA, 19 nt, Artificial Sequence
  Description of Artificial Sequence: Synthetic oligonucleotide
agagaccaaauucagcggg

SEQ ID NO: 2755520 - RNA, 19 nt, Artificial Sequence
  Description of Artificial Sequence: Synthetic oligonucleotide
aauuaugccugaauuucac

SEQ ID NO: 2755521 - RNA, 19 nt, Artificial Sequence
  Description of Artificial Sequence: Synthetic oligonucleotide
acauuuguacucaagacag

SEQ ID NO: 2755522 - RNA, 19 nt, Artificial Sequence
  Description of Artificial Sequence: Synthetic oligonucleotide
cucacuagugacuccaugg

SEQ ID NO: 2755523 - RNA, 19 nt, Artificial Sequence
  Description of Artificial Sequence: Synthetic oligonucleotide
aucauucacauuuguacuc

SEQ ID NO: 2755524 - RNA, 19 nt, Artificial Sequence
  Description of Artificial Sequence: Synthetic oligonucleotide
agugucucucacuagugac

SEQ ID NO: 2755525 - RNA, 19 nt, Artificial Sequence
  Description of Artificial Sequence: Synthetic oligonucleotide
auuaugccugaauuucacc

SEQ ID NO: 2755526 - RNA, 19 nt, Artificial Sequence
  Description of Artificial Sequence: Synthetic oligonucleotide
aauuucacccugcgagcgc

SEQ ID NO: 2755527 - RNA, 19 nt, Artificial Sequence
  Description of Artificial Sequence: Synthetic oligonucleotide
uguguaaacgaggacaaug

SEQ ID NO: 2755528 - RNA, 19 nt, Artificial Sequence
  Description of Artificial Sequence: Synthetic oligonucleotide
acgaaguacuacuccaccc

SEQ ID NO: 2755529 - RNA, 19 nt, Artificial Sequence
  Description of Artificial Sequence: Synthetic oligonucleotide
agcaccuggcaacagagac

SEQ ID NO: 2755530 - RNA, 19 nt, Artificial Sequence
  Description of Artificial Sequence: Synthetic oligonucleotide
acugauugugccuugaaau

SEQ ID NO: 2755531 - RNA, 19 nt, Artificial Sequence
  Description of Artificial Sequence: Synthetic oligonucleotide
uaccaugccaguaaauccc

SEQ ID NO: 2755532 - RNA, 19 nt, Artificial Sequence
  Description of Artificial Sequence: Synthetic oligonucleotide
uccauggaaaugaaucaag

SEQ ID NO: 2755533 - RNA, 19 nt, Artificial Sequence
  Description of Artificial Sequence: Synthetic oligonucleotide
auuuagcacugucaugucg

SEQ ID NO: 2755534 - RNA, 19 nt, Artificial Sequence
  Description of Artificial Sequence: Synthetic oligonucleotide
uggcuuguagguaacagga

SEQ ID NO: 2755535 - RNA, 19 nt, Artificial Sequence
  Description of Artificial Sequence: Synthetic oligonucleotide
caaaacauuuccaguuugg

SEQ ID NO: 2755536 - RNA, 19 nt, Artificial Sequence
  Description of Artificial Sequence: Synthetic oligonucleotide
uuggcuuguagguaacagg

SEQ ID NO: 2755537 - RNA, 19 nt, Artificial Sequence
  Description of Artificial Sequence: Synthetic oligonucleotide
cuaggaaugauaccaugcc

SEQ ID NO: 2755538 - RNA, 19 nt, Artificial Sequence
  Description of Artificial Sequence: Synthetic oligonucleotide
augaaucaagcacaccuuc

SEQ ID NO: 2755539 - RNA, 19 nt, Artificial Sequence
  Description of Artificial Sequence: Synthetic oligonucleotide
aaacgaggacaaugaaagg

SEQ ID NO: 2755540 - RNA, 19 nt, Artificial Sequence
  Description of Artificial Sequence: Synthetic oligonucleotide
agauguguaaacgaggaca

SEQ ID NO: 2755541 - RNA, 19 nt, Artificial Sequence
  Description of Artificial Sequence: Synthetic oligonucleotide
aaauucagcgggaauuuag

SEQ ID NO: 2755542 - RNA, 19 nt, Artificial Sequence
  Description of Artificial Sequence: Synthetic oligonucleotide
ucagcgggaauuuagcacu

SEQ ID NO: 2755543 - RNA, 19 nt, Artificial Sequence
  Description of Artificial Sequence: Synthetic oligonucleotide
uguacucaagacagcaggc

SEQ ID NO: 2755544 - RNA, 19 nt, Artificial Sequence
  Description of Artificial Sequence: Synthetic oligonucleotide
uuuguacucaagacagcag

SEQ ID NO: 2755545 - RNA, 19 nt, Artificial Sequence
  Description of Artificial Sequence: Synthetic oligonucleotide
ucuaacucuuuucuuugca

SEQ ID NO: 2755546 - RNA, 19 nt, Artificial Sequence
  Description of Artificial Sequence: Synthetic oligonucleotide
ucacauuuguacucaagac

SEQ ID NO: 2755547 - RNA, 19 nt, Artificial Sequence
  Description of Artificial Sequence: Synthetic oligonucleotide
gaauuuagcacugucaugu

SEQ ID NO: 2755548 - RNA, 19 nt, Artificial Sequence
  Description of Artificial Sequence: Synthetic oligonucleotide
acauuuccaguuuggcagc

SEQ ID NO: 2755549 - RNA, 19 nt, Artificial Sequence
  Description of Artificial Sequence: Synthetic oligonucleotide
aaacgaaguacuacuccac

SEQ ID NO: 2755550 - RNA, 19 nt, Artificial Sequence
  Description of Artificial Sequence: Synthetic oligonucleotide
gacuccauggaaaugaauc

SEQ ID NO: 2755551 - RNA, 19 nt, Artificial Sequence
  Description of Artificial Sequence: Synthetic oligonucleotide
gauaccaugccaguaaauc

SEQ ID NO: 2755552 - RNA, 19 nt, Artificial Sequence
  Description of Artificial Sequence: Synthetic oligonucleotide
guaaagagcaccuggcaac

SEQ ID NO: 2755553 - RNA, 19 nt, Artificial Sequence
  Description of Artificial Sequence: Synthetic oligonucleotide
uuaccuguaaaacgaagua

SEQ ID NO: 2755554 - RNA, 19 nt, Artificial Sequence
  Description of Artificial Sequence: Synthetic oligonucleotide
ugaauuucacccugcgagc

SEQ ID NO: 2755555 - RNA, 19 nt, Artificial Sequence
  Description of Artificial Sequence: Synthetic oligonucleotide
ucaucaaagugucucucac

SEQ ID NO: 2755556 - RNA, 19 nt, Artificial Sequence
  Description of Artificial Sequence: Synthetic oligonucleotide
aagcacuucccuaaaacug

SEQ ID NO: 2755557 - RNA, 19 nt, Artificial Sequence
  Description of Artificial Sequence: Synthetic oligonucleotide
caguaaauccccacaaaac

SEQ ID NO: 2755558 - RNA, 19 nt, Artificial Sequence
  Description of Artificial Sequence: Synthetic oligonucleotide
uggcagauguguaaacgag

SEQ ID NO: 2755559 - RNA, 19 nt, Artificial Sequence
  Description of Artificial Sequence: Synthetic oligonucleotide
uaggaaugauaccaugcca

SEQ ID NO: 2755560 - RNA, 19 nt, Artificial Sequence
  Description of Artificial Sequence: Synthetic oligonucleotide
cuggggauuggcuuguagg

SEQ ID NO: 2755561 - RNA, 19 nt, Artificial Sequence
  Description of Artificial Sequence: Synthetic oligonucleotide
aggaaugauaccaugccag

SEQ ID NO: 2755562 - RNA, 19 nt, Artificial Sequence
  Description of Artificial Sequence: Synthetic oligonucleotide
gaauuucacccugcgagcg

SEQ ID NO: 2755563 - RNA, 19 nt, Artificial Sequence
  Description of Artificial Sequence: Synthetic oligonucleotide
uuuuccuaggaaugauacc

SEQ ID NO: 2755564 - RNA, 19 nt, Artificial Sequence
  Description of Artificial Sequence: Synthetic oligonucleotide
ugaaucaagcacaccuucu

SEQ ID NO: 2755565 - RNA, 19 nt, Artificial Sequence
  Description of Artificial Sequence: Synthetic oligonucleotide
ucgguaaagagcaccuggc

SEQ ID NO: 2755566 - RNA, 19 nt, Artificial Sequence
  Description of Artificial Sequence: Synthetic oligonucleotide
aucaaagugucucucacua

SEQ ID NO: 2755567 - RNA, 19 nt, Artificial Sequence
  Description of Artificial Sequence: Synthetic oligonucleotide
ugaaagggccccaggagca

SEQ ID NO: 2755568 - RNA, 19 nt, Artificial Sequence
  Description of Artificial Sequence: Synthetic oligonucleotide
acuccauggaaaugaauca

SEQ ID NO: 2755569 - RNA, 19 nt, Artificial Sequence
  Description of Artificial Sequence: Synthetic oligonucleotide
uuaguugggaagaugcauu

SEQ ID NO: 2755570 - RNA, 19 nt, Artificial Sequence
  Description of Artificial Sequence: Synthetic oligonucleotide
ucacuagugacuccaugga

SEQ ID NO: 2755571 - RNA, 19 nt, Artificial Sequence
  Description of Artificial Sequence: Synthetic oligonucleotide
uucagcgggaauuuagcac

SEQ ID NO: 2755572 - RNA, 19 nt, Artificial Sequence
  Description of Artificial Sequence: Synthetic oligonucleotide
aacaggacuuaguugggaa

SEQ ID NO: 2755573 - RNA, 19 nt, Artificial Sequence
  Description of Artificial Sequence: Synthetic oligonucleotide
uacucaagacagcaggccu

SEQ ID NO: 2755574 - RNA, 19 nt, Artificial Sequence
  Description of Artificial Sequence: Synthetic oligonucleotide
ccaucauucacauuuguac

SEQ ID NO: 2755575 - RNA, 19 nt, Artificial Sequence
  Description of Artificial Sequence: Synthetic oligonucleotide
cuuugcagggaccaucagc

SEQ ID NO: 2755576 - RNA, 19 nt, Artificial Sequence
  Description of Artificial Sequence: Synthetic oligonucleotide
uacuacuccaccccuuggc

SEQ ID NO: 2755577 - RNA, 19 nt, Artificial Sequence
  Description of Artificial Sequence: Synthetic oligonucleotide
aacugauugugccuugaaa

SEQ ID NO: 2755578 - RNA, 19 nt, Artificial Sequence
  Description of Artificial Sequence: Synthetic oligonucleotide
ucuaugucacugagaagca

SEQ ID NO: 2755579 - RNA, 19 nt, Artificial Sequence
  Description of Artificial Sequence: Synthetic oligonucleotide
ucauucgguaaagagcacc

SEQ ID NO: 2755580 - RNA, 19 nt, Artificial Sequence
  Description of Artificial Sequence: Synthetic oligonucleotide
ucccuaaaacugauugugc

SEQ ID NO: 2755581 - RNA, 19 nt, Artificial Sequence
  Description of Artificial Sequence: Synthetic oligonucleotide
uaugccugaauuucacccu

SEQ ID NO: 2755582 - RNA, 19 nt, Artificial Sequence
  Description of Artificial Sequence: Synthetic oligonucleotide
cacauuuguacucaagaca

SEQ ID NO: 2755583 - RNA, 19 nt, Artificial Sequence
  Description of Artificial Sequence: Synthetic oligonucleotide
aguacuacuccaccccuug

SEQ ID NO: 2755584 - RNA, 19 nt, Artificial Sequence
  Description of Artificial Sequence: Synthetic oligonucleotide
uguaaacgaggacaaugaa

SEQ ID NO: 2755585 - RNA, 19 nt, Artificial Sequence
  Description of Artificial Sequence: Synthetic oligonucleotide
acaaugaaagggccccagg

SEQ ID NO: 2755586 - RNA, 19 nt, Artificial Sequence
  Description of Artificial Sequence: Synthetic oligonucleotide
cucuauucuaacucuuuuc

SEQ ID NO: 2755587 - RNA, 19 nt, Artificial Sequence
  Description of Artificial Sequence: Synthetic oligonucleotide
ucaaagugucucucacuag

SEQ ID NO: 2755588 - RNA, 19 nt, Artificial Sequence
  Description of Artificial Sequence: Synthetic oligonucleotide
accuguaaaacgaaguacu

SEQ ID NO: 2755589 - RNA, 19 nt, Artificial Sequence
  Description of Artificial Sequence: Synthetic oligonucleotide
ucuccucuauucuaacucu

SEQ ID NO: 2755590 - RNA, 19 nt, Artificial Sequence
  Description of Artificial Sequence: Synthetic oligonucleotide
acaggacuuaguugggaag

SEQ ID NO: 2755591 - RNA, 19 nt, Artificial Sequence
  Description of Artificial Sequence: Synthetic oligonucleotide
caacagagaccaaauucag

SEQ ID NO: 2755592 - RNA, 19 nt, Artificial Sequence
  Description of Artificial Sequence: Synthetic oligonucleotide
aaucaagcacaccuucuuu

SEQ ID NO: 2755593 - RNA, 19 nt, Artificial Sequence
  Description of Artificial Sequence: Synthetic oligonucleotide
cucuccucuauucuaacuc

SEQ ID NO: 2755594 - RNA, 19 nt, Artificial Sequence
  Description of Artificial Sequence: Synthetic oligonucleotide
aagagcaccuggcaacaga

SEQ ID NO: 2755595 - RNA, 19 nt, Artificial Sequence
  Description of Artificial Sequence: Synthetic oligonucleotide
ucagcaucuaugucacuga

SEQ ID NO: 2755596 - RNA, 19 nt, Artificial Sequence
  Description of Artificial Sequence: Synthetic oligonucleotide
gagcaaaggaaggaccagg

SEQ ID NO: 2755597 - RNA, 19 nt, Artificial Sequence
  Description of Artificial Sequence: Synthetic oligonucleotide
uguagguaacaggacuuag

SEQ ID NO: 2755598 - RNA, 19 nt, Artificial Sequence
  Description of Artificial Sequence: Synthetic oligonucleotide
uucuaacucuuuucuuugc

SEQ ID NO: 2755599 - RNA, 19 nt, Artificial Sequence
  Description of Artificial Sequence: Synthetic oligonucleotide
agguaacaggacuuaguug

SEQ ID NO: 2755600 - RNA, 19 nt, Artificial Sequence
  Description of Artificial Sequence: Synthetic oligonucleotide
auuggcuuguagguaacag

SEQ ID NO: 2755601 - RNA, 19 nt, Artificial Sequence
  Description of Artificial Sequence: Synthetic oligonucleotide
cagagaccaaauucagcgg

SEQ ID NO: 2755602 - RNA, 19 nt, Artificial Sequence
  Description of Artificial Sequence: Synthetic oligonucleotide
cuguaaaacgaaguacuac

SEQ ID NO: 2755603 - RNA, 19 nt, Artificial Sequence
  Description of Artificial Sequence: Synthetic oligonucleotide
auucagcgggaauuuagca

SEQ ID NO: 2755604 - RNA, 19 nt, Artificial Sequence
  Description of Artificial Sequence: Synthetic oligonucleotide
cucuuuucuuugcagggac

SEQ ID NO: 2755605 - RNA, 19 nt, Artificial Sequence
  Description of Artificial Sequence: Synthetic oligonucleotide
auuuaccuguaaaacgaag

SEQ ID NO: 2755606 - RNA, 19 nt, Artificial Sequence
  Description of Artificial Sequence: Synthetic oligonucleotide
uccuaggaaugauaccaug

SEQ ID NO: 2755607 - RNA, 19 nt, Artificial Sequence
  Description of Artificial Sequence: Synthetic oligonucleotide
aaugaaucaagcacaccuu

SEQ ID NO: 2755608 - RNA, 19 nt, Artificial Sequence
  Description of Artificial Sequence: Synthetic oligonucleotide
ucucacuagugacuccaug

SEQ ID NO: 2755609 - RNA, 19 nt, Artificial Sequence
  Description of Artificial Sequence: Synthetic oligonucleotide
ccuaggaaugauaccaugc

SEQ ID NO: 2755610 - RNA, 19 nt, Artificial Sequence
  Description of Artificial Sequence: Synthetic oligonucleotide
gauguguaaacgaggacaa

SEQ ID NO: 2755611 - RNA, 19 nt, Artificial Sequence
  Description of Artificial Sequence: Synthetic oligonucleotide
ugccaguaaauccccacaa

SEQ ID NO: 2755612 - RNA, 19 nt, Artificial Sequence
  Description of Artificial Sequence: Synthetic oligonucleotide
auuucacccugcgagcgcg

SEQ ID NO: 2755613 - RNA, 19 nt, Artificial Sequence
  Description of Artificial Sequence: Synthetic oligonucleotide
aauccccacaaaacauuuc

SEQ ID NO: 2755614 - RNA, 19 nt, Artificial Sequence
  Description of Artificial Sequence: Synthetic oligonucleotide
ugcgagcgcgcucauucgg

SEQ ID NO: 2755615 - RNA, 19 nt, Artificial Sequence
  Description of Artificial Sequence: Synthetic oligonucleotide
uaaagagcaccuggcaaca

SEQ ID NO: 2755616 - RNA, 19 nt, Artificial Sequence
  Description of Artificial Sequence: Synthetic oligonucleotide
aggccugggcaaauuaugc

SEQ ID NO: 2755617 - RNA, 19 nt, Artificial Sequence
  Description of Artificial Sequence: Synthetic oligonucleotide
ucacugagaagcagguguc

SEQ ID NO: 2755618 - RNA, 19 nt, Artificial Sequence
  Description of Artificial Sequence: Synthetic oligonucleotide
acuacuccaccccuuggca

SEQ ID NO: 2755619 - RNA, 19 nt, Artificial Sequence
  Description of Artificial Sequence: Synthetic oligonucleotide
accaggaggguuggcagcc

SEQ ID NO: 2755620 - RNA, 19 nt, Artificial Sequence
  Description of Artificial Sequence: Synthetic oligonucleotide
caugccaguaaauccccac

SEQ ID NO: 2755621 - RNA, 19 nt, Artificial Sequence
  Description of Artificial Sequence: Synthetic oligonucleotide
ugcagggaccaucagcauc

SEQ ID NO: 2755622 - RNA, 19 nt, Artificial Sequence
  Description of Artificial Sequence: Synthetic oligonucleotide
uuagcacugucaugucgcc

SEQ ID NO: 2755623 - RNA, 19 nt, Artificial Sequence
  Description of Artificial Sequence: Synthetic oligonucleotide
gaaaugaaucaagcacacc

SEQ ID NO: 2755624 - RNA, 19 nt, Artificial Sequence
  Description of Artificial Sequence: Synthetic oligonucleotide
uuagggcucuccucuauuc

SEQ ID NO: 2755625 - RNA, 19 nt, Artificial Sequence
  Description of Artificial Sequence: Synthetic oligonucleotide
caagacagcaggccugggc

SEQ ID NO: 2755626 - RNA, 19 nt, Artificial Sequence
  Description of Artificial Sequence: Synthetic oligonucleotide
aauuuaccuguaaaacgaa

SEQ ID NO: 2755627 - RNA, 19 nt, Artificial Sequence
  Description of Artificial Sequence: Synthetic oligonucleotide
ugauugugccuugaaauuu

SEQ ID NO: 2755628 - RNA, 19 nt, Artificial Sequence
  Description of Artificial Sequence: Synthetic oligonucleotide
ugucgccaaggucuugaag

SEQ ID NO: 2755629 - RNA, 19 nt, Artificial Sequence
  Description of Artificial Sequence: Synthetic oligonucleotide
aguuuggcagcaagcaguc

SEQ ID NO: 2755630 - RNA, 19 nt, Artificial Sequence
  Description of Artificial Sequence: Synthetic oligonucleotide
aucgggucaucaaaguguc

SEQ ID NO: 2755631 - RNA, 19 nt, Artificial Sequence
  Description of Artificial Sequence: Synthetic oligonucleotide
acuagugacuccauggaaa

SEQ ID NO: 2755632 - RNA, 19 nt, Artificial Sequence
  Description of Artificial Sequence: Synthetic oligonucleotide
guaaaacgaaguacuacuc

SEQ ID NO: 2755633 - RNA, 19 nt, Artificial Sequence
  Description of Artificial Sequence: Synthetic oligonucleotide
ccauggaaaugaaucaagc

SEQ ID NO: 2755634 - RNA, 19 nt, Artificial Sequence
  Description of Artificial Sequence: Synthetic oligonucleotide
augccugaauuucacccug

SEQ ID NO: 2755635 - RNA, 19 nt, Artificial Sequence
  Description of Artificial Sequence: Synthetic oligonucleotide
guaaacgaggacaaugaaa

SEQ ID NO: 2755636 - RNA, 19 nt, Artificial Sequence
  Description of Artificial Sequence: Synthetic oligonucleotide
uuucuuugcagggaccauc

SEQ ID NO: 2755637 - RNA, 19 nt, Artificial Sequence
  Description of Artificial Sequence: Synthetic oligonucleotide
guguaaacgaggacaauga

SEQ ID NO: 2755638 - RNA, 19 nt, Artificial Sequence
  Description of Artificial Sequence: Synthetic oligonucleotide
accaugccaguaaaucccc

SEQ ID NO: 2755639 - RNA, 19 nt, Artificial Sequence
  Description of Artificial Sequence: Synthetic oligonucleotide
agagcaccuggcaacagag

SEQ ID NO: 2755640 - RNA, 19 nt, Artificial Sequence
  Description of Artificial Sequence: Synthetic oligonucleotide
gcucauucgguaaagagca

SEQ ID NO: 2755641 - RNA, 19 nt, Artificial Sequence
  Description of Artificial Sequence: Synthetic oligonucleotide
gacaaugaaagggccccag

SEQ ID NO: 2755642 - RNA, 19 nt, Artificial Sequence
  Description of Artificial Sequence: Synthetic oligonucleotide
aaauccccacaaaacauuu

SEQ ID NO: 2755643 - RNA, 19 nt, Artificial Sequence
  Description of Artificial Sequence: Synthetic oligonucleotide
ugucucucacuagugacuc

SEQ ID NO: 2755644 - RNA, 19 nt, Artificial Sequence
  Description of Artificial Sequence: Synthetic oligonucleotide
caaugaaagggccccagga

SEQ ID NO: 2755645 - RNA, 19 nt, Artificial Sequence
  Description of Artificial Sequence: Synthetic oligonucleotide
uuggcagcaagcagucagu

SEQ ID NO: 2755646 - RNA, 19 nt, Artificial Sequence
  Description of Artificial Sequence: Synthetic oligonucleotide
ucagucccaucauucacau

SEQ ID NO: 2755647 - RNA, 19 nt, Artificial Sequence
  Description of Artificial Sequence: Synthetic oligonucleotide
augccaguaaauccccaca

SEQ ID NO: 2755648 - RNA, 19 nt, Artificial Sequence
  Description of Artificial Sequence: Synthetic oligonucleotide
uuuuagggcucuccucuau

SEQ ID NO: 2755649 - RNA, 19 nt, Artificial Sequence
  Description of Artificial Sequence: Synthetic oligonucleotide
gcaacagagaccaaauuca

SEQ ID NO: 2755650 - RNA, 19 nt, Artificial Sequence
  Description of Artificial Sequence: Synthetic oligonucleotide
agcacuucccuaaaacuga

SEQ ID NO: 2755651 - RNA, 19 nt, Artificial Sequence
  Description of Artificial Sequence: Synthetic oligonucleotide
cuacuccaccccuuggcag

SEQ ID NO: 2755652 - RNA, 19 nt, Artificial Sequence
  Description of Artificial Sequence: Synthetic oligonucleotide
ugcccaucgggucaucaaa

SEQ ID NO: 2755653 - RNA, 19 nt, Artificial Sequence
  Description of Artificial Sequence: Synthetic oligonucleotide
ugauaccaugccaguaaau

SEQ ID NO: 2755654 - RNA, 19 nt, Artificial Sequence
  Description of Artificial Sequence: Synthetic oligonucleotide
uccucuauucuaacucuuu

SEQ ID NO: 2755655 - RNA, 19 nt, Artificial Sequence
  Description of Artificial Sequence: Synthetic oligonucleotide
uuccuaggaaugauaccau

SEQ ID NO: 2755656 - RNA, 19 nt, Artificial Sequence
  Description of Artificial Sequence: Synthetic oligonucleotide
ggaauuuagcacugucaug

SEQ ID NO: 2755657 - RNA, 19 nt, Artificial Sequence
  Description of Artificial Sequence: Synthetic oligonucleotide
uaguugggaagaugcauuu

SEQ ID NO: 2755658 - RNA, 19 nt, Artificial Sequence
  Description of Artificial Sequence: Synthetic oligonucleotide
ucuuugcagggaccaucag

SEQ ID NO: 2755659 - RNA, 19 nt, Artificial Sequence
  Description of Artificial Sequence: Synthetic oligonucleotide
caucauucacauuuguacu

SEQ ID NO: 2755660 - RNA, 19 nt, Artificial Sequence
  Description of Artificial Sequence: Synthetic oligonucleotide
ggcagauguguaaacgagg

SEQ ID NO: 2755661 - RNA, 19 nt, Artificial Sequence
  Description of Artificial Sequence: Synthetic oligonucleotide
uuuagggcucuccucuauu

SEQ ID NO: 2755662 - RNA, 19 nt, Artificial Sequence
  Description of Artificial Sequence: Synthetic oligonucleotide
ucccaucauucacauuugu

SEQ ID NO: 2755663 - RNA, 19 nt, Artificial Sequence
  Description of Artificial Sequence: Synthetic oligonucleotide
aaagagcaccuggcaacag

SEQ ID NO: 2755664 - RNA, 19 nt, Artificial Sequence
  Description of Artificial Sequence: Synthetic oligonucleotide
ugccugaauuucacccugc

SEQ ID NO: 2755665 - RNA, 19 nt, Artificial Sequence
  Description of Artificial Sequence: Synthetic oligonucleotide
aggagcaaaggaaggacca

SEQ ID NO: 2755666 - RNA, 19 nt, Artificial Sequence
  Description of Artificial Sequence: Synthetic oligonucleotide
guacuacuccaccccuugg

SEQ ID NO: 2755667 - RNA, 19 nt, Artificial Sequence
  Description of Artificial Sequence: Synthetic oligonucleotide
caucgggucaucaaagugu

SEQ ID NO: 2755668 - RNA, 19 nt, Artificial Sequence
  Description of Artificial Sequence: Synthetic oligonucleotide
gguaaagagcaccuggcaa

SEQ ID NO: 2755669 - RNA, 19 nt, Artificial Sequence
  Description of Artificial Sequence: Synthetic oligonucleotide
ggaaaugaaucaagcacac

SEQ ID NO: 2755670 - RNA, 19 nt, Artificial Sequence
  Description of Artificial Sequence: Synthetic oligonucleotide
caaagugucucucacuagu

SEQ ID NO: 2755671 - RNA, 19 nt, Artificial Sequence
  Description of Artificial Sequence: Synthetic oligonucleotide
cagcaucuaugucacugag

SEQ ID NO: 2755672 - RNA, 19 nt, Artificial Sequence
  Description of Artificial Sequence: Synthetic oligonucleotide
ucuuuggcuggggauuggc

SEQ ID NO: 2755673 - RNA, 19 nt, Artificial Sequence
  Description of Artificial Sequence: Synthetic oligonucleotide
cuaugucacugagaagcag

SEQ ID NO: 2755674 - RNA, 19 nt, Artificial Sequence
  Description of Artificial Sequence: Synthetic oligonucleotide
agccgucucccauccugcc

SEQ ID NO: 2755675 - RNA, 19 nt, Artificial Sequence
  Description of Artificial Sequence: Synthetic oligonucleotide
gaccaggaggguuggcagc

SEQ ID NO: 2755676 - RNA, 19 nt, Artificial Sequence
  Description of Artificial Sequence: Synthetic oligonucleotide
aagcaggugucagaaccga

SEQ ID NO: 2755677 - RNA, 19 nt, Artificial Sequence
  Description of Artificial Sequence: Synthetic oligonucleotide
agcaaaggaaggaccagga

SEQ ID NO: 2755678 - RNA, 19 nt, Artificial Sequence
  Description of Artificial Sequence: Synthetic oligonucleotide
cagauguguaaacgaggac

SEQ ID NO: 2755679 - RNA, 19 nt, Artificial Sequence
  Description of Artificial Sequence: Synthetic oligonucleotide
ccccacaaaacauuuccag

SEQ ID NO: 2755680 - RNA, 19 nt, Artificial Sequence
  Description of Artificial Sequence: Synthetic oligonucleotide
cgcucauucgguaaagagc

SEQ ID NO: 2755681 - RNA, 19 nt, Artificial Sequence
  Description of Artificial Sequence: Synthetic oligonucleotide
ugacuccauggaaaugaau

SEQ ID NO: 2755682 - RNA, 19 nt, Artificial Sequence
  Description of Artificial Sequence: Synthetic oligonucleotide
acucuuuucuuugcaggga

SEQ ID NO: 2755683 - RNA, 19 nt, Artificial Sequence
  Description of Artificial Sequence: Synthetic oligonucleotide
gaaguacuacuccaccccu

SEQ ID NO: 2755684 - RNA, 19 nt, Artificial Sequence
  Description of Artificial Sequence: Synthetic oligonucleotide
caguuuggcagcaagcagu

SEQ ID NO: 2755685 - RNA, 19 nt, Artificial Sequence
  Description of Artificial Sequence: Synthetic oligonucleotide
gaaucaagcacaccuucuu

SEQ ID NO: 2755686 - RNA, 19 nt, Artificial Sequence
  Description of Artificial Sequence: Synthetic oligonucleotide
cgaaguacuacuccacccc

SEQ ID NO: 2755687 - RNA, 19 nt, Artificial Sequence
  Description of Artificial Sequence: Synthetic oligonucleotide
uuguagguaacaggacuua

SEQ ID NO: 2755688 - RNA, 19 nt, Artificial Sequence
  Description of Artificial Sequence: Synthetic oligonucleotide
gcaaaggaaggaccaggag

SEQ ID NO: 2755689 - RNA, 19 nt, Artificial Sequence
  Description of Artificial Sequence: Synthetic oligonucleotide
gaaugauaccaugccagua

SEQ ID NO: 2755690 - RNA, 19 nt, Artificial Sequence
  Description of Artificial Sequence: Synthetic oligonucleotide
gcgcucauucgguaaagag

SEQ ID NO: 2755691 - RNA, 19 nt, Artificial Sequence
  Description of Artificial Sequence: Synthetic oligonucleotide
uggcagccgucucccaucc

SEQ ID NO: 2755692 - RNA, 19 nt, Artificial Sequence
  Description of Artificial Sequence: Synthetic oligonucleotide
gucagucccaucauucaca

SEQ ID NO: 2755693 - RNA, 19 nt, Artificial Sequence
  Description of Artificial Sequence: Synthetic oligonucleotide
cauucgguaaagagcaccu

SEQ ID NO: 2755694 - RNA, 19 nt, Artificial Sequence
  Description of Artificial Sequence: Synthetic oligonucleotide
uuggcagccgucucccauc

SEQ ID NO: 2755695 - RNA, 19 nt, Artificial Sequence
  Description of Artificial Sequence: Synthetic oligonucleotide
cugucaugucgccaagguc

SEQ ID NO: 2755696 - RNA, 19 nt, Artificial Sequence
  Description of Artificial Sequence: Synthetic oligonucleotide
guaaauccccacaaaacau

SEQ ID NO: 2755697 - RNA, 19 nt, Artificial Sequence
  Description of Artificial Sequence: Synthetic oligonucleotide
gcagauguguaaacgagga

SEQ ID NO: 2755698 - RNA, 19 nt, Artificial Sequence
  Description of Artificial Sequence: Synthetic oligonucleotide
ggcaaauuaugccugaauu

SEQ ID NO: 2755699 - RNA, 19 nt, Artificial Sequence
  Description of Artificial Sequence: Synthetic oligonucleotide
gggaauuuagcacugucau

SEQ ID NO: 2755700 - RNA, 19 nt, Artificial Sequence
  Description of Artificial Sequence: Synthetic oligonucleotide
gagaccaaauucagcggga

SEQ ID NO: 2755701 - RNA, 19 nt, Artificial Sequence
  Description of Artificial Sequence: Synthetic oligonucleotide
caggacuuaguugggaaga

SEQ ID NO: 2755702 - RNA, 19 nt, Artificial Sequence
  Description of Artificial Sequence: Synthetic oligonucleotide
auucgguaaagagcaccug

SEQ ID NO: 2755703 - RNA, 19 nt, Artificial Sequence
  Description of Artificial Sequence: Synthetic oligonucleotide
gggauuggcuuguagguaa

SEQ ID NO: 2755704 - RNA, 19 nt, Artificial Sequence
  Description of Artificial Sequence: Synthetic oligonucleotide
gccugaauuucacccugcg

SEQ ID NO: 2755705 - RNA, 19 nt, Artificial Sequence
  Description of Artificial Sequence: Synthetic oligonucleotide
cuuguagguaacaggacuu

SEQ ID NO: 2755706 - RNA, 19 nt, Artificial Sequence
  Description of Artificial Sequence: Synthetic oligonucleotide
cagccgucucccauccugc

SEQ ID NO: 2755707 - RNA, 19 nt, Artificial Sequence
  Description of Artificial Sequence: Synthetic oligonucleotide
agggcucuccucuauucua

SEQ ID NO: 2755708 - RNA, 19 nt, Artificial Sequence
  Description of Artificial Sequence: Synthetic oligonucleotide
cucauucgguaaagagcac

SEQ ID NO: 2755709 - RNA, 19 nt, Artificial Sequence
  Description of Artificial Sequence: Synthetic oligonucleotide
cugcgagcgcgcucauucg

SEQ ID NO: 2755710 - RNA, 19 nt, Artificial Sequence
  Description of Artificial Sequence: Synthetic oligonucleotide
agcagucagucccaucauu

SEQ ID NO: 2755711 - RNA, 19 nt, Artificial Sequence
  Description of Artificial Sequence: Synthetic oligonucleotide
uuucacccugcgagcgcgc

SEQ ID NO: 2755712 - RNA, 19 nt, Artificial Sequence
  Description of Artificial Sequence: Synthetic oligonucleotide
agcaucuaugucacugaga

SEQ ID NO: 2755713 - RNA, 19 nt, Artificial Sequence
  Description of Artificial Sequence: Synthetic oligonucleotide
ccaguaaauccccacaaaa

SEQ ID NO: 2755714 - RNA, 19 nt, Artificial Sequence
  Description of Artificial Sequence: Synthetic oligonucleotide
ucaagacagcaggccuggg

SEQ ID NO: 2755715 - RNA, 19 nt, Artificial Sequence
  Description of Artificial Sequence: Synthetic oligonucleotide
gucuugaagcacuucccua

SEQ ID NO: 2755716 - RNA, 19 nt, Artificial Sequence
  Description of Artificial Sequence: Synthetic oligonucleotide
gauuggcuuguagguaaca

SEQ ID NO: 2755717 - RNA, 19 nt, Artificial Sequence
  Description of Artificial Sequence: Synthetic oligonucleotide
cucccauccugcccaucgg

SEQ ID NO: 2755718 - RNA, 19 nt, Artificial Sequence
  Description of Artificial Sequence: Synthetic oligonucleotide
aaggaaggaccaggagggu

SEQ ID NO: 2755719 - RNA, 19 nt, Artificial Sequence
  Description of Artificial Sequence: Synthetic oligonucleotide
gcagccgucucccauccug

SEQ ID NO: 2755720 - RNA, 19 nt, Artificial Sequence
  Description of Artificial Sequence: Synthetic oligonucleotide
cauccugcccaucggguca

SEQ ID NO: 2755721 - RNA, 19 nt, Artificial Sequence
  Description of Artificial Sequence: Synthetic oligonucleotide
caugucgccaaggucuuga

SEQ ID NO: 2755722 - RNA, 19 nt, Artificial Sequence
  Description of Artificial Sequence: Synthetic oligonucleotide
gcaaauuaugccugaauuu

SEQ ID NO: 2755723 - RNA, 19 nt, Artificial Sequence
  Description of Artificial Sequence: Synthetic oligonucleotide
agaccaaauucagcgggaa

SEQ ID NO: 2755724 - RNA, 19 nt, Artificial Sequence
  Description of Artificial Sequence: Synthetic oligonucleotide
cuaaaacugauugugccuu

SEQ ID NO: 2755725 - RNA, 19 nt, Artificial Sequence
  Description of Artificial Sequence: Synthetic oligonucleotide
agcgcgcucauucgguaaa

SEQ ID NO: 2755726 - RNA, 19 nt, Artificial Sequence
  Description of Artificial Sequence: Synthetic oligonucleotide
ccaguuuggcagcaagcag

SEQ ID NO: 2755727 - RNA, 19 nt, Artificial Sequence
  Description of Artificial Sequence: Synthetic oligonucleotide
ggagcaaaggaaggaccag

SEQ ID NO: 2755728 - RNA, 19 nt, Artificial Sequence
  Description of Artificial Sequence: Synthetic oligonucleotide
ccugcgagcgcgcucauuc

SEQ ID NO: 2755729 - RNA, 19 nt, Artificial Sequence
  Description of Artificial Sequence: Synthetic oligonucleotide
agcaggccugggcaaauua

SEQ ID NO: 2755730 - RNA, 19 nt, Artificial Sequence
  Description of Artificial Sequence: Synthetic oligonucleotide
guagguaacaggacuuagu

SEQ ID NO: 2755731 - RNA, 19 nt, Artificial Sequence
  Description of Artificial Sequence: Synthetic oligonucleotide
cuugaagcacuucccuaaa

SEQ ID NO: 2755732 - RNA, 19 nt, Artificial Sequence
  Description of Artificial Sequence: Synthetic oligonucleotide
cuuaguugggaagaugcau

SEQ ID NO: 2755733 - RNA, 19 nt, Artificial Sequence
  Description of Artificial Sequence: Synthetic oligonucleotide
ucgggucaucaaagugucu

SEQ ID NO: 2755734 - RNA, 19 nt, Artificial Sequence
  Description of Artificial Sequence: Synthetic oligonucleotide
cacuagugacuccauggaa

SEQ ID NO: 2755735 - RNA, 19 nt, Artificial Sequence
  Description of Artificial Sequence: Synthetic oligonucleotide
ccaucgggucaucaaagug

SEQ ID NO: 2755736 - RNA, 19 nt, Artificial Sequence
  Description of Artificial Sequence: Synthetic oligonucleotide
cagcgggaauuuagcacug

SEQ ID NO: 2755737 - RNA, 19 nt, Artificial Sequence
  Description of Artificial Sequence: Synthetic oligonucleotide
aaguacuacuccaccccuu

SEQ ID NO: 2755738 - RNA, 19 nt, Artificial Sequence
  Description of Artificial Sequence: Synthetic oligonucleotide
cugauugugccuugaaauu

SEQ ID NO: 2755739 - RNA, 19 nt, Artificial Sequence
  Description of Artificial Sequence: Synthetic oligonucleotide
ugggcaaauuaugccugaa

SEQ ID NO: 2755740 - RNA, 19 nt, Artificial Sequence
  Description of Artificial Sequence: Synthetic oligonucleotide
aggacuuaguugggaagau

SEQ ID NO: 2755741 - RNA, 19 nt, Artificial Sequence
  Description of Artificial Sequence: Synthetic oligonucleotide
agcaggugucagaaccgag

SEQ ID NO: 2755742 - RNA, 19 nt, Artificial Sequence
  Description of Artificial Sequence: Synthetic oligonucleotide
caucaaagugucucucacu

SEQ ID NO: 2755743 - RNA, 19 nt, Artificial Sequence
  Description of Artificial Sequence: Synthetic oligonucleotide
cugggcaaauuaugccuga

SEQ ID NO: 2755744 - RNA, 19 nt, Artificial Sequence
  Description of Artificial Sequence: Synthetic oligonucleotide
uggcagcaagcagucaguc

SEQ ID NO: 2755745 - RNA, 19 nt, Artificial Sequence
  Description of Artificial Sequence: Synthetic oligonucleotide
aggaaggaccaggaggguu

SEQ ID NO: 2755746 - RNA, 19 nt, Artificial Sequence
  Description of Artificial Sequence: Synthetic oligonucleotide
ggaaugauaccaugccagu

SEQ ID NO: 2755747 - RNA, 19 nt, Artificial Sequence
  Description of Artificial Sequence: Synthetic oligonucleotide
ggacuuaguugggaagaug

SEQ ID NO: 2755748 - RNA, 19 nt, Artificial Sequence
  Description of Artificial Sequence: Synthetic oligonucleotide
gcuggggauuggcuuguag

SEQ ID NO: 2755749 - RNA, 19 nt, Artificial Sequence
  Description of Artificial Sequence: Synthetic oligonucleotide
aguugggaagaugcauuuu

SEQ ID NO: 2755750 - RNA, 19 nt, Artificial Sequence
  Description of Artificial Sequence: Synthetic oligonucleotide
cuggcaacagagaccaaau

SEQ ID NO: 2755751 - RNA, 19 nt, Artificial Sequence
  Description of Artificial Sequence: Synthetic oligonucleotide
caaggucuugaagcacuuc

SEQ ID NO: 2755752 - RNA, 19 nt, Artificial Sequence
  Description of Artificial Sequence: Synthetic oligonucleotide
ccuaaaacugauugugccu

SEQ ID NO: 2755753 - RNA, 19 nt, Artificial Sequence
  Description of Artificial Sequence: Synthetic oligonucleotide
ucaugucgccaaggucuug

SEQ ID NO: 2755754 - RNA, 19 nt, Artificial Sequence
  Description of Artificial Sequence: Synthetic oligonucleotide
gcaccuggcaacagagacc

SEQ ID NO: 2755755 - RNA, 19 nt, Artificial Sequence
  Description of Artificial Sequence: Synthetic oligonucleotide
gccugggcaaauuaugccu

SEQ ID NO: 2755756 - RNA, 19 nt, Artificial Sequence
  Description of Artificial Sequence: Synthetic oligonucleotide
ucacccugcgagcgcgcuc

SEQ ID NO: 2755757 - RNA, 19 nt, Artificial Sequence
  Description of Artificial Sequence: Synthetic oligonucleotide
gaccaaauucagcgggaau

SEQ ID NO: 2755758 - RNA, 19 nt, Artificial Sequence
  Description of Artificial Sequence: Synthetic oligonucleotide
augucgccaaggucuugaa

SEQ ID NO: 2755759 - RNA, 19 nt, Artificial Sequence
  Description of Artificial Sequence: Synthetic oligonucleotide
uucacccugcgagcgcgcu

SEQ ID NO: 2755760 - RNA, 19 nt, Artificial Sequence
  Description of Artificial Sequence: Synthetic oligonucleotide
gcgggaauuuagcacuguc

SEQ ID NO: 2755761 - RNA, 19 nt, Artificial Sequence
  Description of Artificial Sequence: Synthetic oligonucleotide
gagcgcgcucauucgguaa

SEQ ID NO: 2755762 - RNA, 19 nt, Artificial Sequence
  Description of Artificial Sequence: Synthetic oligonucleotide
gcccaucgggucaucaaag

SEQ ID NO: 2755763 - RNA, 19 nt, Artificial Sequence
  Description of Artificial Sequence: Synthetic oligonucleotide
agggaccaucagcaucuau

SEQ ID NO: 2755764 - RNA, 19 nt, Artificial Sequence
  Description of Artificial Sequence: Synthetic oligonucleotide
cagcaagcagucaguccca

SEQ ID NO: 2755765 - RNA, 19 nt, Artificial Sequence
  Description of Artificial Sequence: Synthetic oligonucleotide
cuuuggcuggggauuggcu

SEQ ID NO: 2755766 - RNA, 19 nt, Artificial Sequence
  Description of Artificial Sequence: Synthetic oligonucleotide
ccuguaaaacgaaguacua

SEQ ID NO: 2755767 - RNA, 19 nt, Artificial Sequence
  Description of Artificial Sequence: Synthetic oligonucleotide
ggcuuguagguaacaggac

SEQ ID NO: 2755768 - RNA, 19 nt, Artificial Sequence
  Description of Artificial Sequence: Synthetic oligonucleotide
agcgggaauuuagcacugu

SEQ ID NO: 2755769 - RNA, 19 nt, Artificial Sequence
  Description of Artificial Sequence: Synthetic oligonucleotide
cgggaauuuagcacuguca

SEQ ID NO: 2755770 - RNA, 19 nt, Artificial Sequence
  Description of Artificial Sequence: Synthetic oligonucleotide
cgggucaucaaagugucuc

SEQ ID NO: 2755771 - RNA, 19 nt, Artificial Sequence
  Description of Artificial Sequence: Synthetic oligonucleotide
gccaguaaauccccacaaa

SEQ ID NO: 2755772 - RNA, 19 nt, Artificial Sequence
  Description of Artificial Sequence: Synthetic oligonucleotide
caaauucagcgggaauuua

SEQ ID NO: 2755773 - RNA, 19 nt, Artificial Sequence
  Description of Artificial Sequence: Synthetic oligonucleotide
gaaagggccccaggagcaa

SEQ ID NO: 2755774 - RNA, 19 nt, Artificial Sequence
  Description of Artificial Sequence: Synthetic oligonucleotide
ccauccugcccaucggguc

SEQ ID NO: 2755775 - RNA, 19 nt, Artificial Sequence
  Description of Artificial Sequence: Synthetic oligonucleotide
guuggcagccgucucccau

SEQ ID NO: 2755776 - RNA, 19 nt, Artificial Sequence
  Description of Artificial Sequence: Synthetic oligonucleotide
ccugaauuucacccugcga

SEQ ID NO: 2755777 - RNA, 19 nt, Artificial Sequence
  Description of Artificial Sequence: Synthetic oligonucleotide
gggucaucaaagugucucu

SEQ ID NO: 2755778 - RNA, 19 nt, Artificial Sequence
  Description of Artificial Sequence: Synthetic oligonucleotide
cacccugcgagcgcgcuca

SEQ ID NO: 2755779 - RNA, 19 nt, Artificial Sequence
  Description of Artificial Sequence: Synthetic oligonucleotide
gccgucucccauccugccc

SEQ ID NO: 2755780 - RNA, 19 nt, Artificial Sequence
  Description of Artificial Sequence: Synthetic oligonucleotide
agcaagcagucagucccau

SEQ ID NO: 2755781 - RNA, 19 nt, Artificial Sequence
  Description of Artificial Sequence: Synthetic oligonucleotide
gcacugucaugucgccaag

SEQ ID NO: 2755782 - RNA, 19 nt, Artificial Sequence
  Description of Artificial Sequence: Synthetic oligonucleotide
cugcccaucgggucaucaa

SEQ ID NO: 2755783 - RNA, 19 nt, Artificial Sequence
  Description of Artificial Sequence: Synthetic oligonucleotide
ggauuggcuuguagguaac

SEQ ID NO: 2755784 - RNA, 19 nt, Artificial Sequence
  Description of Artificial Sequence: Synthetic oligonucleotide
cccaucauucacauuugua

SEQ ID NO: 2755785 - RNA, 19 nt, Artificial Sequence
  Description of Artificial Sequence: Synthetic oligonucleotide
guuuggcagcaagcaguca

SEQ ID NO: 2755786 - RNA, 19 nt, Artificial Sequence
  Description of Artificial Sequence: Synthetic oligonucleotide
gggcaaauuaugccugaau

SEQ ID NO: 2755787 - RNA, 19 nt, Artificial Sequence
  Description of Artificial Sequence: Synthetic oligonucleotide
acuccaccccuuggcagau

SEQ ID NO: 2755788 - RNA, 19 nt, Artificial Sequence
  Description of Artificial Sequence: Synthetic oligonucleotide
cuccucuauucuaacucuu

SEQ ID NO: 2755789 - RNA, 19 nt, Artificial Sequence
  Description of Artificial Sequence: Synthetic oligonucleotide
ccgucucccauccugccca

SEQ ID NO: 2755790 - RNA, 19 nt, Artificial Sequence
  Description of Artificial Sequence: Synthetic oligonucleotide
gcucuccucuauucuaacu

SEQ ID NO: 2755791 - RNA, 19 nt, Artificial Sequence
  Description of Artificial Sequence: Synthetic oligonucleotide
ggacaaugaaagggcccca

SEQ ID NO: 2755792 - RNA, 19 nt, Artificial Sequence
  Description of Artificial Sequence: Synthetic oligonucleotide
auccugcccaucgggucau

SEQ ID NO: 2755793 - RNA, 19 nt, Artificial Sequence
  Description of Artificial Sequence: Synthetic oligonucleotide
ggaggguuggcagccgucu

SEQ ID NO: 2755794 - RNA, 19 nt, Artificial Sequence
  Description of Artificial Sequence: Synthetic oligonucleotide
gcgcgcucauucgguaaag

SEQ ID NO: 2755795 - RNA, 19 nt, Artificial Sequence
  Description of Artificial Sequence: Synthetic oligonucleotide
ccaugccaguaaaucccca

SEQ ID NO: 2755796 - RNA, 19 nt, Artificial Sequence
  Description of Artificial Sequence: Synthetic oligonucleotide
cucucacuagugacuccau

SEQ ID NO: 2755797 - RNA, 19 nt, Artificial Sequence
  Description of Artificial Sequence: Synthetic oligonucleotide
ccucuauucuaacucuuuu

SEQ ID NO: 2755798 - RNA, 19 nt, Artificial Sequence
  Description of Artificial Sequence: Synthetic oligonucleotide
ccccuuggcagauguguaa

SEQ ID NO: 2755799 - RNA, 19 nt, Artificial Sequence
  Description of Artificial Sequence: Synthetic oligonucleotide
gucaugucgccaaggucuu

SEQ ID NO: 2755800 - RNA, 19 nt, Artificial Sequence
  Description of Artificial Sequence: Synthetic oligonucleotide
gccuugaaauuuaccugua

SEQ ID NO: 2755801 - RNA, 19 nt, Artificial Sequence
  Description of Artificial Sequence: Synthetic oligonucleotide
cacuucccuaaaacugauu

SEQ ID NO: 2755802 - RNA, 19 nt, Artificial Sequence
  Description of Artificial Sequence: Synthetic oligonucleotide
ccaggaggguuggcagccg

SEQ ID NO: 2755803 - RNA, 19 nt, Artificial Sequence
  Description of Artificial Sequence: Synthetic oligonucleotide
gguuggcagccgucuccca

SEQ ID NO: 2755804 - RNA, 19 nt, Artificial Sequence
  Description of Artificial Sequence: Synthetic oligonucleotide
ccaaauucagcgggaauuu

SEQ ID NO: 2755805 - RNA, 19 nt, Artificial Sequence
  Description of Artificial Sequence: Synthetic oligonucleotide
caucagcaucuaugucacu

SEQ ID NO: 2755806 - RNA, 19 nt, Artificial Sequence
  Description of Artificial Sequence: Synthetic oligonucleotide
ccuucuuuggcuggggauu

SEQ ID NO: 2755807 - RNA, 19 nt, Artificial Sequence
  Description of Artificial Sequence: Synthetic oligonucleotide
gcaggccugggcaaauuau

SEQ ID NO: 2755808 - RNA, 19 nt, Artificial Sequence
  Description of Artificial Sequence: Synthetic oligonucleotide
gucucccauccugcccauc

SEQ ID NO: 2755809 - RNA, 19 nt, Artificial Sequence
  Description of Artificial Sequence: Synthetic oligonucleotide
cccauccugcccaucgggu

SEQ ID NO: 2755810 - RNA, 19 nt, Artificial Sequence
  Description of Artificial Sequence: Synthetic oligonucleotide
uccugcccaucgggucauc

SEQ ID NO: 2755811 - RNA, 19 nt, Artificial Sequence
  Description of Artificial Sequence: Synthetic oligonucleotide
gcgagcgcgcucauucggu

SEQ ID NO: 2755812 - RNA, 19 nt, Artificial Sequence
  Description of Artificial Sequence: Synthetic oligonucleotide
accuggcaacagagaccaa

SEQ ID NO: 2755813 - RNA, 19 nt, Artificial Sequence
  Description of Artificial Sequence: Synthetic oligonucleotide
cagucccaucauucacauu

SEQ ID NO: 2755814 - RNA, 19 nt, Artificial Sequence
  Description of Artificial Sequence: Synthetic oligonucleotide
cgcgcucauucgguaaaga

SEQ ID NO: 2755815 - RNA, 19 nt, Artificial Sequence
  Description of Artificial Sequence: Synthetic oligonucleotide
cgagcgcgcucauucggua

SEQ ID NO: 2755816 - RNA, 19 nt, Artificial Sequence
  Description of Artificial Sequence: Synthetic oligonucleotide
ggcagccgucucccauccu

SEQ ID NO: 2755817 - RNA, 19 nt, Artificial Sequence
  Description of Artificial Sequence: Synthetic oligonucleotide
cagcaggccugggcaaauu

SEQ ID NO: 2755818 - RNA, 19 nt, Artificial Sequence
  Description of Artificial Sequence: Synthetic oligonucleotide
cccugcgagcgcgcucauu

SEQ ID NO: 2755819 - RNA, 19 nt, Artificial Sequence
  Description of Artificial Sequence: Synthetic oligonucleotide
auuaacauaaggcuugagc

SEQ ID NO: 2755820 - RNA, 19 nt, Artificial Sequence
  Description of Artificial Sequence: Synthetic oligonucleotide
auuaucuccacuuuguagg

SEQ ID NO: 2755821 - RNA, 19 nt, Artificial Sequence
  Description of Artificial Sequence: Synthetic oligonucleotide
aaauucugggaccauuucc

SEQ ID NO: 2755822 - RNA, 19 nt, Artificial Sequence
  Description of Artificial Sequence: Synthetic oligonucleotide
uuaacauaaggcuugagcu

SEQ ID NO: 2755823 - RNA, 19 nt, Artificial Sequence
  Description of Artificial Sequence: Synthetic oligonucleotide
ucgguaauuaacauaaggc

SEQ ID NO: 2755824 - RNA, 19 nt, Artificial Sequence
  Description of Artificial Sequence: Synthetic oligonucleotide
aaaugcacaaggaagcgcc

SEQ ID NO: 2755825 - RNA, 19 nt, Artificial Sequence
  Description of Artificial Sequence: Synthetic oligonucleotide
uuuguaggcaaacuuuugg

SEQ ID NO: 2755826 - RNA, 19 nt, Artificial Sequence
  Description of Artificial Sequence: Synthetic oligonucleotide
aauagaaaugcacaaggaa

SEQ ID NO: 2755827 - RNA, 19 nt, Artificial Sequence
  Description of Artificial Sequence: Synthetic oligonucleotide
uacuaaaggccuuuaauag

SEQ ID NO: 2755828 - RNA, 19 nt, Artificial Sequence
  Description of Artificial Sequence: Synthetic oligonucleotide
aggccuuuaauagaaaugc

SEQ ID NO: 2755829 - RNA, 19 nt, Artificial Sequence
  Description of Artificial Sequence: Synthetic oligonucleotide
uuaggauacaacuggaaga

SEQ ID NO: 2755830 - RNA, 19 nt, Artificial Sequence
  Description of Artificial Sequence: Synthetic oligonucleotide
uuuaucugcacaaacuuuc

SEQ ID NO: 2755831 - RNA, 19 nt, Artificial Sequence
  Description of Artificial Sequence: Synthetic oligonucleotide
aacuuuuggucacugucac

SEQ ID NO: 2755832 - RNA, 19 nt, Artificial Sequence
  Description of Artificial Sequence: Synthetic oligonucleotide
cuugaagccagucaagucc

SEQ ID NO: 2755833 - RNA, 19 nt, Artificial Sequence
  Description of Artificial Sequence: Synthetic oligonucleotide
agucccuucuauuaaaguc

SEQ ID NO: 2755834 - RNA, 19 nt, Artificial Sequence
  Description of Artificial Sequence: Synthetic oligonucleotide
acaaacuuuccauuagagg

SEQ ID NO: 2755835 - RNA, 19 nt, Artificial Sequence
  Description of Artificial Sequence: Synthetic oligonucleotide
auagaaaugcacaaggaag

SEQ ID NO: 2755836 - RNA, 19 nt, Artificial Sequence
  Description of Artificial Sequence: Synthetic oligonucleotide
uuagagguauagaugccgg

SEQ ID NO: 2755837 - RNA, 19 nt, Artificial Sequence
  Description of Artificial Sequence: Synthetic oligonucleotide
uccauuagagguauagaug

SEQ ID NO: 2755838 - RNA, 19 nt, Artificial Sequence
  Description of Artificial Sequence: Synthetic oligonucleotide
uacucuucgagacacucag

SEQ ID NO: 2755839 - RNA, 19 nt, Artificial Sequence
  Description of Artificial Sequence: Synthetic oligonucleotide
uugaagccagucaaguccg

SEQ ID NO: 2755840 - RNA, 19 nt, Artificial Sequence
  Description of Artificial Sequence: Synthetic oligonucleotide
cuucgagacacucagaauc

SEQ ID NO: 2755841 - RNA, 19 nt, Artificial Sequence
  Description of Artificial Sequence: Synthetic oligonucleotide
uaauagaaaugcacaagga

SEQ ID NO: 2755842 - RNA, 19 nt, Artificial Sequence
  Description of Artificial Sequence: Synthetic oligonucleotide
cucgguaauuaacauaagg

SEQ ID NO: 2755843 - RNA, 19 nt, Artificial Sequence
  Description of Artificial Sequence: Synthetic oligonucleotide
guaauuaacauaaggcuug

SEQ ID NO: 2755844 - RNA, 19 nt, Artificial Sequence
  Description of Artificial Sequence: Synthetic oligonucleotide
aacauaaggcuugagcuug

SEQ ID NO: 2755845 - RNA, 19 nt, Artificial Sequence
  Description of Artificial Sequence: Synthetic oligonucleotide
uaggauacaacuggaagag

SEQ ID NO: 2755846 - RNA, 19 nt, Artificial Sequence
  Description of Artificial Sequence: Synthetic oligonucleotide
ugagcuugaagccagucaa

SEQ ID NO: 2755847 - RNA, 19 nt, Artificial Sequence
  Description of Artificial Sequence: Synthetic oligonucleotide
auuagagguauagaugccg

SEQ ID NO: 2755848 - RNA, 19 nt, Artificial Sequence
  Description of Artificial Sequence: Synthetic oligonucleotide
aguucuuuggcggucaggg

SEQ ID NO: 2755849 - RNA, 19 nt, Artificial Sequence
  Description of Artificial Sequence: Synthetic oligonucleotide
aaaggccuuuaauagaaau

SEQ ID NO: 2755850 - RNA, 19 nt, Artificial Sequence
  Description of Artificial Sequence: Synthetic oligonucleotide
ucaaaagucccuucuauua

SEQ ID NO: 2755851 - RNA, 19 nt, Artificial Sequence
  Description of Artificial Sequence: Synthetic oligonucleotide
auacuaaaggccuuuaaua

SEQ ID NO: 2755852 - RNA, 19 nt, Artificial Sequence
  Description of Artificial Sequence: Synthetic oligonucleotide
cauuaucuccacuuuguag

SEQ ID NO: 2755853 - RNA, 19 nt, Artificial Sequence
  Description of Artificial Sequence: Synthetic oligonucleotide
ccauuagagguauagaugc

SEQ ID NO: 2755854 - RNA, 19 nt, Artificial Sequence
  Description of Artificial Sequence: Synthetic oligonucleotide
ugcacaaacuuuccauuag

SEQ ID NO: 2755855 - RNA, 19 nt, Artificial Sequence
  Description of Artificial Sequence: Synthetic oligonucleotide
ugcauuaucuccacuuugu

SEQ ID NO: 2755856 - RNA, 19 nt, Artificial Sequence
  Description of Artificial Sequence: Synthetic oligonucleotide
caaggcuugcauuaucucc

SEQ ID NO: 2755857 - RNA, 19 nt, Artificial Sequence
  Description of Artificial Sequence: Synthetic oligonucleotide
agacacucagaauccaagg

SEQ ID NO: 2755858 - RNA, 19 nt, Artificial Sequence
  Description of Artificial Sequence: Synthetic oligonucleotide
uucgagacacucagaaucc

SEQ ID NO: 2755859 - RNA, 19 nt, Artificial Sequence
  Description of Artificial Sequence: Synthetic oligonucleotide
aauucugggaccauuuccu

SEQ ID NO: 2755860 - RNA, 19 nt, Artificial Sequence
  Description of Artificial Sequence: Synthetic oligonucleotide
cuuuuggucacugucacug

SEQ ID NO: 2755861 - RNA, 19 nt, Artificial Sequence
  Description of Artificial Sequence: Synthetic oligonucleotide
agcgccuacucuucgagac

SEQ ID NO: 2755862 - RNA, 19 nt, Artificial Sequence
  Description of Artificial Sequence: Synthetic oligonucleotide
uuaucugcacaaacuuucc

SEQ ID NO: 2755863 - RNA, 19 nt, Artificial Sequence
  Description of Artificial Sequence: Synthetic oligonucleotide
uccgggacgacaaauucug

SEQ ID NO: 2755864 - RNA, 19 nt, Artificial Sequence
  Description of Artificial Sequence: Synthetic oligonucleotide
gucacuguuuucuagcgug

SEQ ID NO: 2755865 - RNA, 19 nt, Artificial Sequence
  Description of Artificial Sequence: Synthetic oligonucleotide
acuaaaggccuuuaauaga

SEQ ID NO: 2755866 - RNA, 19 nt, Artificial Sequence
  Description of Artificial Sequence: Synthetic oligonucleotide
cacaaacuuuccauuagag

SEQ ID NO: 2755867 - RNA, 19 nt, Artificial Sequence
  Description of Artificial Sequence: Synthetic oligonucleotide
uuuuaggauacaacuggaa

SEQ ID NO: 2755868 - RNA, 19 nt, Artificial Sequence
  Description of Artificial Sequence: Synthetic oligonucleotide
cuuuccauuagagguauag

SEQ ID NO: 2755869 - RNA, 19 nt, Artificial Sequence
  Description of Artificial Sequence: Synthetic oligonucleotide
acacucagaauccaaggcu

SEQ ID NO: 2755870 - RNA, 19 nt, Artificial Sequence
  Description of Artificial Sequence: Synthetic oligonucleotide
aaacuuuuggucacuguca

SEQ ID NO: 2755871 - RNA, 19 nt, Artificial Sequence
  Description of Artificial Sequence: Synthetic oligonucleotide
uguaggcaaacuuuugguc

SEQ ID NO: 2755872 - RNA, 19 nt, Artificial Sequence
  Description of Artificial Sequence: Synthetic oligonucleotide
auagaugccgguucucuug

SEQ ID NO: 2755873 - RNA, 19 nt, Artificial Sequence
  Description of Artificial Sequence: Synthetic oligonucleotide
aaggccuuuaauagaaaug

SEQ ID NO: 2755874 - RNA, 19 nt, Artificial Sequence
  Description of Artificial Sequence: Synthetic oligonucleotide
uugcauuaucuccacuuug

SEQ ID NO: 2755875 - RNA, 19 nt, Artificial Sequence
  Description of Artificial Sequence: Synthetic oligonucleotide
gacgacaaauucugggacc

SEQ ID NO: 2755876 - RNA, 19 nt, Artificial Sequence
  Description of Artificial Sequence: Synthetic oligonucleotide
uccaaggcuugcauuaucu

SEQ ID NO: 2755877 - RNA, 19 nt, Artificial Sequence
  Description of Artificial Sequence: Synthetic oligonucleotide
ugucuaugccugcaggagc

SEQ ID NO: 2755878 - RNA, 19 nt, Artificial Sequence
  Description of Artificial Sequence: Synthetic oligonucleotide
uagaugccgguucucuugg

SEQ ID NO: 2755879 - RNA, 19 nt, Artificial Sequence
  Description of Artificial Sequence: Synthetic oligonucleotide
uugauggcucuugagcucg

SEQ ID NO: 2755880 - RNA, 19 nt, Artificial Sequence
  Description of Artificial Sequence: Synthetic oligonucleotide
uuaucuccacuuuguaggc

SEQ ID NO: 2755881 - RNA, 19 nt, Artificial Sequence
  Description of Artificial Sequence: Synthetic oligonucleotide
cuaaaggccuuuaauagaa

SEQ ID NO: 2755882 - RNA, 19 nt, Artificial Sequence
  Description of Artificial Sequence: Synthetic oligonucleotide
aguugucagcaucaaaagu

SEQ ID NO: 2755883 - RNA, 19 nt, Artificial Sequence
  Description of Artificial Sequence: Synthetic oligonucleotide
uccugugugggcucaaagc

SEQ ID NO: 2755884 - RNA, 19 nt, Artificial Sequence
  Description of Artificial Sequence: Synthetic oligonucleotide
ugugucuaugccugcagga

SEQ ID NO: 2755885 - RNA, 19 nt, Artificial Sequence
  Description of Artificial Sequence: Synthetic oligonucleotide
agcaucaaaagucccuucu

SEQ ID NO: 2755886 - RNA, 19 nt, Artificial Sequence
  Description of Artificial Sequence: Synthetic oligonucleotide
aaggcuugcauuaucucca

SEQ ID NO: 2755887 - RNA, 19 nt, Artificial Sequence
  Description of Artificial Sequence: Synthetic oligonucleotide
uuccuuuaucugcacaaac

SEQ ID NO: 2755888 - RNA, 19 nt, Artificial Sequence
  Description of Artificial Sequence: Synthetic oligonucleotide
aguccgggacgacaaauuc

SEQ ID NO: 2755889 - RNA, 19 nt, Artificial Sequence
  Description of Artificial Sequence: Synthetic oligonucleotide
agccagucaaguccgggac

SEQ ID NO: 2755890 - RNA, 19 nt, Artificial Sequence
  Description of Artificial Sequence: Synthetic oligonucleotide
uacaacuggaagagcuugc

SEQ ID NO: 2755891 - RNA, 19 nt, Artificial Sequence
  Description of Artificial Sequence: Synthetic oligonucleotide
ugggcucaaagccauauuu

SEQ ID NO: 2755892 - RNA, 19 nt, Artificial Sequence
  Description of Artificial Sequence: Synthetic oligonucleotide
ugcucauccuauccgcucc

SEQ ID NO: 2755893 - RNA, 19 nt, Artificial Sequence
  Description of Artificial Sequence: Synthetic oligonucleotide
gauacuaaaggccuuuaau

SEQ ID NO: 2755894 - RNA, 19 nt, Artificial Sequence
  Description of Artificial Sequence: Synthetic oligonucleotide
cugucacuguuuucuagcg

SEQ ID NO: 2755895 - RNA, 19 nt, Artificial Sequence
  Description of Artificial Sequence: Synthetic oligonucleotide
uaugccugcaggagcucgg

SEQ ID NO: 2755896 - RNA, 19 nt, Artificial Sequence
  Description of Artificial Sequence: Synthetic oligonucleotide
gagacacucagaauccaag

SEQ ID NO: 2755897 - RNA, 19 nt, Artificial Sequence
  Description of Artificial Sequence: Synthetic oligonucleotide
uaucugcacaaacuuucca

SEQ ID NO: 2755898 - RNA, 19 nt, Artificial Sequence
  Description of Artificial Sequence: Synthetic oligonucleotide
agcucgguaauuaacauaa

SEQ ID NO: 2755899 - RNA, 19 nt, Artificial Sequence
  Description of Artificial Sequence: Synthetic oligonucleotide
caggccuugcguaacggcg

SEQ ID NO: 2755900 - RNA, 19 nt, Artificial Sequence
  Description of Artificial Sequence: Synthetic oligonucleotide
ucauccuauccgcuccccg

SEQ ID NO: 2755901 - RNA, 19 nt, Artificial Sequence
  Description of Artificial Sequence: Synthetic oligonucleotide
aucugcacaaacuuuccau

SEQ ID NO: 2755902 - RNA, 19 nt, Artificial Sequence
  Description of Artificial Sequence: Synthetic oligonucleotide
ugcagcuguuugcaggaag

SEQ ID NO: 2755903 - RNA, 19 nt, Artificial Sequence
  Description of Artificial Sequence: Synthetic oligonucleotide
cauuagagguauagaugcc

SEQ ID NO: 2755904 - RNA, 19 nt, Artificial Sequence
  Description of Artificial Sequence: Synthetic oligonucleotide
gaaaugcacaaggaagcgc

SEQ ID NO: 2755905 - RNA, 19 nt, Artificial Sequence
  Description of Artificial Sequence: Synthetic oligonucleotide
gaagcgccuacucuucgag

SEQ ID NO: 2755906 - RNA, 19 nt, Artificial Sequence
  Description of Artificial Sequence: Synthetic oligonucleotide
ucuuuggcggucaggggug

SEQ ID NO: 2755907 - RNA, 19 nt, Artificial Sequence
  Description of Artificial Sequence: Synthetic oligonucleotide
uaacauaaggcuugagcuu

SEQ ID NO: 2755908 - RNA, 19 nt, Artificial Sequence
  Description of Artificial Sequence: Synthetic oligonucleotide
aagccagucaaguccggga

SEQ ID NO: 2755909 - RNA, 19 nt, Artificial Sequence
  Description of Artificial Sequence: Synthetic oligonucleotide
ucugggaccauuuccuuua

SEQ ID NO: 2755910 - RNA, 19 nt, Artificial Sequence
  Description of Artificial Sequence: Synthetic oligonucleotide
aauuaacauaaggcuugag

SEQ ID NO: 2755911 - RNA, 19 nt, Artificial Sequence
  Description of Artificial Sequence: Synthetic oligonucleotide
augccgguucucuuggcac

SEQ ID NO: 2755912 - RNA, 19 nt, Artificial Sequence
  Description of Artificial Sequence: Synthetic oligonucleotide
aacggcggucaggaaaccc

SEQ ID NO: 2755913 - RNA, 19 nt, Artificial Sequence
  Description of Artificial Sequence: Synthetic oligonucleotide
ugucagcaucaaaaguccc

SEQ ID NO: 2755914 - RNA, 19 nt, Artificial Sequence
  Description of Artificial Sequence: Synthetic oligonucleotide
uuuccauuagagguauaga

SEQ ID NO: 2755915 - RNA, 19 nt, Artificial Sequence
  Description of Artificial Sequence: Synthetic oligonucleotide
auacaacuggaagagcuug

SEQ ID NO: 2755916 - RNA, 19 nt, Artificial Sequence
  Description of Artificial Sequence: Synthetic oligonucleotide
cuuguccacuugcucaucc

SEQ ID NO: 2755917 - RNA, 19 nt, Artificial Sequence
  Description of Artificial Sequence: Synthetic oligonucleotide
ucuugacgaaggugcgugg

SEQ ID NO: 2755918 - RNA, 19 nt, Artificial Sequence
  Description of Artificial Sequence: Synthetic oligonucleotide
ugugugggcucaaagccau

SEQ ID NO: 2755919 - RNA, 19 nt, Artificial Sequence
  Description of Artificial Sequence: Synthetic oligonucleotide
ugcacaaggaagcgccuac

SEQ ID NO: 2755920 - RNA, 19 nt, Artificial Sequence
  Description of Artificial Sequence: Synthetic oligonucleotide
uuccugugugggcucaaag

SEQ ID NO: 2755921 - RNA, 19 nt, Artificial Sequence
  Description of Artificial Sequence: Synthetic oligonucleotide
uaauuaacauaaggcuuga

SEQ ID NO: 2755922 - RNA, 19 nt, Artificial Sequence
  Description of Artificial Sequence: Synthetic oligonucleotide
ugacgaaggugcguggucc

SEQ ID NO: 2755923 - RNA, 19 nt, Artificial Sequence
  Description of Artificial Sequence: Synthetic oligonucleotide
cauccuauccgcuccccgc

SEQ ID NO: 2755924 - RNA, 19 nt, Artificial Sequence
  Description of Artificial Sequence: Synthetic oligonucleotide
ugcguaacggcggucagga

SEQ ID NO: 2755925 - RNA, 19 nt, Artificial Sequence
  Description of Artificial Sequence: Synthetic oligonucleotide
ccuuuaauagaaaugcaca

SEQ ID NO: 2755926 - RNA, 19 nt, Artificial Sequence
  Description of Artificial Sequence: Synthetic oligonucleotide
aucaaaagucccuucuauu

SEQ ID NO: 2755927 - RNA, 19 nt, Artificial Sequence
  Description of Artificial Sequence: Synthetic oligonucleotide
uguuugcaggaagaguucu

SEQ ID NO: 2755928 - RNA, 19 nt, Artificial Sequence
  Description of Artificial Sequence: Synthetic oligonucleotide
gugugucuaugccugcagg

SEQ ID NO: 2755929 - RNA, 19 nt, Artificial Sequence
  Description of Artificial Sequence: Synthetic oligonucleotide
ugucacuguuuucuagcgu

SEQ ID NO: 2755930 - RNA, 19 nt, Artificial Sequence
  Description of Artificial Sequence: Synthetic oligonucleotide
agaagacagcucuggguug

SEQ ID NO: 2755931 - RNA, 19 nt, Artificial Sequence
  Description of Artificial Sequence: Synthetic oligonucleotide
cauauuucuccaaguuguc

SEQ ID NO: 2755932 - RNA, 19 nt, Artificial Sequence
  Description of Artificial Sequence: Synthetic oligonucleotide
ggguugauggcucuugagc

SEQ ID NO: 2755933 - RNA, 19 nt, Artificial Sequence
  Description of Artificial Sequence: Synthetic oligonucleotide
ucagaauccaaggcuugca

SEQ ID NO: 2755934 - RNA, 19 nt, Artificial Sequence
  Description of Artificial Sequence: Synthetic oligonucleotide
uagcaggugcagcuguuug

SEQ ID NO: 2755935 - RNA, 19 nt, Artificial Sequence
  Description of Artificial Sequence: Synthetic oligonucleotide
uggguugauggcucuugag

SEQ ID NO: 2755936 - RNA, 19 nt, Artificial Sequence
  Description of Artificial Sequence: Synthetic oligonucleotide
aucuccacuuuguaggcaa

SEQ ID NO: 2755937 - RNA, 19 nt, Artificial Sequence
  Description of Artificial Sequence: Synthetic oligonucleotide
auauuucuccaaguuguca

SEQ ID NO: 2755938 - RNA, 19 nt, Artificial Sequence
  Description of Artificial Sequence: Synthetic oligonucleotide
ccugugugggcucaaagcc

SEQ ID NO: 2755939 - RNA, 19 nt, Artificial Sequence
  Description of Artificial Sequence: Synthetic oligonucleotide
agauacuaaaggccuuuaa

SEQ ID NO: 2755940 - RNA, 19 nt, Artificial Sequence
  Description of Artificial Sequence: Synthetic oligonucleotide
agguauagaugccgguucu

SEQ ID NO: 2755941 - RNA, 19 nt, Artificial Sequence
  Description of Artificial Sequence: Synthetic oligonucleotide
acuguuuucuagcguggga

SEQ ID NO: 2755942 - RNA, 19 nt, Artificial Sequence
  Description of Artificial Sequence: Synthetic oligonucleotide
aggauacaacuggaagagc

SEQ ID NO: 2755943 - RNA, 19 nt, Artificial Sequence
  Description of Artificial Sequence: Synthetic oligonucleotide
agccauauuucuccaaguu

SEQ ID NO: 2755944 - RNA, 19 nt, Artificial Sequence
  Description of Artificial Sequence: Synthetic oligonucleotide
guaacggcggucaggaaac

SEQ ID NO: 2755945 - RNA, 19 nt, Artificial Sequence
  Description of Artificial Sequence: Synthetic oligonucleotide
uuuggucacugucacuguu

SEQ ID NO: 2755946 - RNA, 19 nt, Artificial Sequence
  Description of Artificial Sequence: Synthetic oligonucleotide
cuugcuuguccacuugcuc

SEQ ID NO: 2755947 - RNA, 19 nt, Artificial Sequence
  Description of Artificial Sequence: Synthetic oligonucleotide
uaaaggccuuuaauagaaa

SEQ ID NO: 2755948 - RNA, 19 nt, Artificial Sequence
  Description of Artificial Sequence: Synthetic oligonucleotide
aggagcucgguaauuaaca

SEQ ID NO: 2755949 - RNA, 19 nt, Artificial Sequence
  Description of Artificial Sequence: Synthetic oligonucleotide
acgacaaauucugggacca

SEQ ID NO: 2755950 - RNA, 19 nt, Artificial Sequence
  Description of Artificial Sequence: Synthetic oligonucleotide
uagagguauagaugccggu

SEQ ID NO: 2755951 - RNA, 19 nt, Artificial Sequence
  Description of Artificial Sequence: Synthetic oligonucleotide
cucuucgagacacucagaa

SEQ ID NO: 2755952 - RNA, 19 nt, Artificial Sequence
  Description of Artificial Sequence: Synthetic oligonucleotide
accauuuccuuuaucugca

SEQ ID NO: 2755953 - RNA, 19 nt, Artificial Sequence
  Description of Artificial Sequence: Synthetic oligonucleotide
aggaagcgccuacucuucg

SEQ ID NO: 2755954 - RNA, 19 nt, Artificial Sequence
  Description of Artificial Sequence: Synthetic oligonucleotide
ucuggguugauggcucuug

SEQ ID NO: 2755955 - RNA, 19 nt, Artificial Sequence
  Description of Artificial Sequence: Synthetic oligonucleotide
cucuugacgaaggugcgug

SEQ ID NO: 2755956 - RNA, 19 nt, Artificial Sequence
  Description of Artificial Sequence: Synthetic oligonucleotide
guucuuuggcggucagggg

SEQ ID NO: 2755957 - RNA, 19 nt, Artificial Sequence
  Description of Artificial Sequence: Synthetic oligonucleotide
uuuuggucacugucacugu

SEQ ID NO: 2755958 - RNA, 19 nt, Artificial Sequence
  Description of Artificial Sequence: Synthetic oligonucleotide
caggagcucgguaauuaac

SEQ ID NO: 2755959 - RNA, 19 nt, Artificial Sequence
  Description of Artificial Sequence: Synthetic oligonucleotide
aggcuugcauuaucuccac

SEQ ID NO: 2755960 - RNA, 19 nt, Artificial Sequence
  Description of Artificial Sequence: Synthetic oligonucleotide
uauagaugccgguucucuu

SEQ ID NO: 2755961 - RNA, 19 nt, Artificial Sequence
  Description of Artificial Sequence: Synthetic oligonucleotide
gaugccgguucucuuggca

SEQ ID NO: 2755962 - RNA, 19 nt, Artificial Sequence
  Description of Artificial Sequence: Synthetic oligonucleotide
caaaagucccuucuauuaa

SEQ ID NO: 2755963 - RNA, 19 nt, Artificial Sequence
  Description of Artificial Sequence: Synthetic oligonucleotide
gugucuaugccugcaggag

SEQ ID NO: 2755964 - RNA, 19 nt, Artificial Sequence
  Description of Artificial Sequence: Synthetic oligonucleotide
gccuuuaauagaaaugcac

SEQ ID NO: 2755965 - RNA, 19 nt, Artificial Sequence
  Description of Artificial Sequence: Synthetic oligonucleotide
uugacgaaggugcgugguc

SEQ ID NO: 2755966 - RNA, 19 nt, Artificial Sequence
  Description of Artificial Sequence: Synthetic oligonucleotide
uuggucacugucacuguuu

SEQ ID NO: 2755967 - RNA, 19 nt, Artificial Sequence
  Description of Artificial Sequence: Synthetic oligonucleotide
ggaccauuuccuuuaucug

SEQ ID NO: 2755968 - RNA, 19 nt, Artificial Sequence
  Description of Artificial Sequence: Synthetic oligonucleotide
guugauggcucuugagcuc

SEQ ID NO: 2755969 - RNA, 19 nt, Artificial Sequence
  Description of Artificial Sequence: Synthetic oligonucleotide
agaugccgguucucuuggc

SEQ ID NO: 2755970 - RNA, 19 nt, Artificial Sequence
  Description of Artificial Sequence: Synthetic oligonucleotide
gacgaaggugcgugguccc

SEQ ID NO: 2755971 - RNA, 19 nt, Artificial Sequence
  Description of Artificial Sequence: Synthetic oligonucleotide
uuucuagcgugggaaauuu

SEQ ID NO: 2755972 - RNA, 19 nt, Artificial Sequence
  Description of Artificial Sequence: Synthetic oligonucleotide
uccacuugcucauccuauc

SEQ ID NO: 2755973 - RNA, 19 nt, Artificial Sequence
  Description of Artificial Sequence: Synthetic oligonucleotide
ucccuucuauuaaagucuu

SEQ ID NO: 2755974 - RNA, 19 nt, Artificial Sequence
  Description of Artificial Sequence: Synthetic oligonucleotide
ugccgguucucuuggcacc

SEQ ID NO: 2755975 - RNA, 19 nt, Artificial Sequence
  Description of Artificial Sequence: Synthetic oligonucleotide
cuccaaguugucagcauca

SEQ ID NO: 2755976 - RNA, 19 nt, Artificial Sequence
  Description of Artificial Sequence: Synthetic oligonucleotide
cuaugccugcaggagcucg

SEQ ID NO: 2755977 - RNA, 19 nt, Artificial Sequence
  Description of Artificial Sequence: Synthetic oligonucleotide
cuguuugcaggaagaguuc

SEQ ID NO: 2755978 - RNA, 19 nt, Artificial Sequence
  Description of Artificial Sequence: Synthetic oligonucleotide
aagcgccuacucuucgaga

SEQ ID NO: 2755979 - RNA, 19 nt, Artificial Sequence
  Description of Artificial Sequence: Synthetic oligonucleotide
gucaggggugugucuaugc

SEQ ID NO: 2755980 - RNA, 19 nt, Artificial Sequence
  Description of Artificial Sequence: Synthetic oligonucleotide
gggaccauuuccuuuaucu

SEQ ID NO: 2755981 - RNA, 19 nt, Artificial Sequence
  Description of Artificial Sequence: Synthetic oligonucleotide
uugcguaacggcggucagg

SEQ ID NO: 2755982 - RNA, 19 nt, Artificial Sequence
  Description of Artificial Sequence: Synthetic oligonucleotide
aauccaaggcuugcauuau

SEQ ID NO: 2755983 - RNA, 19 nt, Artificial Sequence
  Description of Artificial Sequence: Synthetic oligonucleotide
aggggugugucuaugccug

SEQ ID NO: 2755984 - RNA, 19 nt, Artificial Sequence
  Description of Artificial Sequence: Synthetic oligonucleotide
ggacgacaaauucugggac

SEQ ID NO: 2755985 - RNA, 19 nt, Artificial Sequence
  Description of Artificial Sequence: Synthetic oligonucleotide
gggacgacaaauucuggga

SEQ ID NO: 2755986 - RNA, 19 nt, Artificial Sequence
  Description of Artificial Sequence: Synthetic oligonucleotide
gaagacagcucuggguuga

SEQ ID NO: 2755987 - RNA, 19 nt, Artificial Sequence
  Description of Artificial Sequence: Synthetic oligonucleotide
cacuguuuucuagcguggg

SEQ ID NO: 2755988 - RNA, 19 nt, Artificial Sequence
  Description of Artificial Sequence: Synthetic oligonucleotide
agagguauagaugccgguu

SEQ ID NO: 2755989 - RNA, 19 nt, Artificial Sequence
  Description of Artificial Sequence: Synthetic oligonucleotide
ugauggcucuugagcucgg

SEQ ID NO: 2755990 - RNA, 19 nt, Artificial Sequence
  Description of Artificial Sequence: Synthetic oligonucleotide
acuuuuggucacugucacu

SEQ ID NO: 2755991 - RNA, 19 nt, Artificial Sequence
  Description of Artificial Sequence: Synthetic oligonucleotide
cacaaggaagcgccuacuc

SEQ ID NO: 2755992 - RNA, 19 nt, Artificial Sequence
  Description of Artificial Sequence: Synthetic oligonucleotide
aaugcacaaggaagcgccu

SEQ ID NO: 2755993 - RNA, 19 nt, Artificial Sequence
  Description of Artificial Sequence: Synthetic oligonucleotide
gguugauggcucuugagcu

SEQ ID NO: 2755994 - RNA, 19 nt, Artificial Sequence
  Description of Artificial Sequence: Synthetic oligonucleotide
gaaggugcgugguccccgc

SEQ ID NO: 2755995 - RNA, 19 nt, Artificial Sequence
  Description of Artificial Sequence: Synthetic oligonucleotide
uucugggaccauuuccuuu

SEQ ID NO: 2755996 - RNA, 19 nt, Artificial Sequence
  Description of Artificial Sequence: Synthetic oligonucleotide
gaagaguucuuuggcgguc

SEQ ID NO: 2755997 - RNA, 19 nt, Artificial Sequence
  Description of Artificial Sequence: Synthetic oligonucleotide
gcggucaggaaacccaugc

SEQ ID NO: 2755998 - RNA, 19 nt, Artificial Sequence
  Description of Artificial Sequence: Synthetic oligonucleotide
auccuauccgcuccccgca

SEQ ID NO: 2755999 - RNA, 19 nt, Artificial Sequence
  Description of Artificial Sequence: Synthetic oligonucleotide
auccgcuccccgcaccagg

SEQ ID NO: 2756000 - RNA, 19 nt, Artificial Sequence
  Description of Artificial Sequence: Synthetic oligonucleotide
cucugcagaagacagcucu

SEQ ID NO: 2756001 - RNA, 19 nt, Artificial Sequence
  Description of Artificial Sequence: Synthetic oligonucleotide
agaguucuuuggcggucag

SEQ ID NO: 2756002 - RNA, 19 nt, Artificial Sequence
  Description of Artificial Sequence: Synthetic oligonucleotide
ugcaggagcucgguaauua

SEQ ID NO: 2756003 - RNA, 19 nt, Artificial Sequence
  Description of Artificial Sequence: Synthetic oligonucleotide
uccgcuccccgcaccaggc

SEQ ID NO: 2756004 - RNA, 19 nt, Artificial Sequence
  Description of Artificial Sequence: Synthetic oligonucleotide
agcuguuugcaggaagagu

SEQ ID NO: 2756005 - RNA, 19 nt, Artificial Sequence
  Description of Artificial Sequence: Synthetic oligonucleotide
ggugugucuaugccugcag

SEQ ID NO: 2756006 - RNA, 19 nt, Artificial Sequence
  Description of Artificial Sequence: Synthetic oligonucleotide
agucaaguccgggacgaca

SEQ ID NO: 2756007 - RNA, 19 nt, Artificial Sequence
  Description of Artificial Sequence: Synthetic oligonucleotide
gagcucgguaauuaacaua

SEQ ID NO: 2756008 - RNA, 19 nt, Artificial Sequence
  Description of Artificial Sequence: Synthetic oligonucleotide
gguaauuaacauaaggcuu

SEQ ID NO: 2756009 - RNA, 19 nt, Artificial Sequence
  Description of Artificial Sequence: Synthetic oligonucleotide
cuacucuucgagacacuca

SEQ ID NO: 2756010 - RNA, 19 nt, Artificial Sequence
  Description of Artificial Sequence: Synthetic oligonucleotide
ggauacaacuggaagagcu

SEQ ID NO: 2756011 - RNA, 19 nt, Artificial Sequence
  Description of Artificial Sequence: Synthetic oligonucleotide
acgaaggugcguggucccc

SEQ ID NO: 2756012 - RNA, 19 nt, Artificial Sequence
  Description of Artificial Sequence: Synthetic oligonucleotide
agcuugccuuccugugugg

SEQ ID NO: 2756013 - RNA, 19 nt, Artificial Sequence
  Description of Artificial Sequence: Synthetic oligonucleotide
aggccuugcguaacggcgg

SEQ ID NO: 2756014 - RNA, 19 nt, Artificial Sequence
  Description of Artificial Sequence: Synthetic oligonucleotide
ucgagacacucagaaucca

SEQ ID NO: 2756015 - RNA, 19 nt, Artificial Sequence
  Description of Artificial Sequence: Synthetic oligonucleotide
cuugcguaacggcggucag

SEQ ID NO: 2756016 - RNA, 19 nt, Artificial Sequence
  Description of Artificial Sequence: Synthetic oligonucleotide
cugugugggcucaaagcca

SEQ ID NO: 2756017 - RNA, 19 nt, Artificial Sequence
  Description of Artificial Sequence: Synthetic oligonucleotide
cggcucuugacgaaggugc

SEQ ID NO: 2756018 - RNA, 19 nt, Artificial Sequence
  Description of Artificial Sequence: Synthetic oligonucleotide
ucaaguccgggacgacaaa

SEQ ID NO: 2756019 - RNA, 19 nt, Artificial Sequence
  Description of Artificial Sequence: Synthetic oligonucleotide
ggcaccccggcucuugacg

SEQ ID NO: 2756020 - RNA, 19 nt, Artificial Sequence
  Description of Artificial Sequence: Synthetic oligonucleotide
acucagaauccaaggcuug

SEQ ID NO: 2756021 - RNA, 19 nt, Artificial Sequence
  Description of Artificial Sequence: Synthetic oligonucleotide
cugcacaaacuuuccauua

SEQ ID NO: 2756022 - RNA, 19 nt, Artificial Sequence
  Description of Artificial Sequence: Synthetic oligonucleotide
uccaaguugucagcaucaa

SEQ ID NO: 2756023 - RNA, 19 nt, Artificial Sequence
  Description of Artificial Sequence: Synthetic oligonucleotide
ggcucaaagccauauuucu

SEQ ID NO: 2756024 - RNA, 19 nt, Artificial Sequence
  Description of Artificial Sequence: Synthetic oligonucleotide
auucugggaccauuuccuu

SEQ ID NO: 2756025 - RNA, 19 nt, Artificial Sequence
  Description of Artificial Sequence: Synthetic oligonucleotide
aaguccgggacgacaaauu

SEQ ID NO: 2756026 - RNA, 19 nt, Artificial Sequence
  Description of Artificial Sequence: Synthetic oligonucleotide
cuugagcuugaagccaguc

SEQ ID NO: 2756027 - RNA, 19 nt, Artificial Sequence
  Description of Artificial Sequence: Synthetic oligonucleotide
cgggacgacaaauucuggg

SEQ ID NO: 2756028 - RNA, 19 nt, Artificial Sequence
  Description of Artificial Sequence: Synthetic oligonucleotide
cagaagacagcucuggguu

SEQ ID NO: 2756029 - RNA, 19 nt, Artificial Sequence
  Description of Artificial Sequence: Synthetic oligonucleotide
caucaaaagucccuucuau

SEQ ID NO: 2756030 - RNA, 19 nt, Artificial Sequence
  Description of Artificial Sequence: Synthetic oligonucleotide
caccaggccuugcguaacg

SEQ ID NO: 2756031 - RNA, 19 nt, Artificial Sequence
  Description of Artificial Sequence: Synthetic oligonucleotide
ccacuugcucauccuaucc

SEQ ID NO: 2756032 - RNA, 19 nt, Artificial Sequence
  Description of Artificial Sequence: Synthetic oligonucleotide
gucaaguccgggacgacaa

SEQ ID NO: 2756033 - RNA, 19 nt, Artificial Sequence
  Description of Artificial Sequence: Synthetic oligonucleotide
ggcuugagcuugaagccag

SEQ ID NO: 2756034 - RNA, 19 nt, Artificial Sequence
  Description of Artificial Sequence: Synthetic oligonucleotide
uccuauccgcuccccgcac

SEQ ID NO: 2756035 - RNA, 19 nt, Artificial Sequence
  Description of Artificial Sequence: Synthetic oligonucleotide
uucuagcgugggaaauuuu

SEQ ID NO: 2756036 - RNA, 19 nt, Artificial Sequence
  Description of Artificial Sequence: Synthetic oligonucleotide
caaggaagcgccuacucuu

SEQ ID NO: 2756037 - RNA, 19 nt, Artificial Sequence
  Description of Artificial Sequence: Synthetic oligonucleotide
gcuugaagccagucaaguc

SEQ ID NO: 2756038 - RNA, 19 nt, Artificial Sequence
  Description of Artificial Sequence: Synthetic oligonucleotide
acggcggucaggaaaccca

SEQ ID NO: 2756039 - RNA, 19 nt, Artificial Sequence
  Description of Artificial Sequence: Synthetic oligonucleotide
guauagaugccgguucucu

SEQ ID NO: 2756040 - RNA, 19 nt, Artificial Sequence
  Description of Artificial Sequence: Synthetic oligonucleotide
uuggcggucaggggugugu

SEQ ID NO: 2756041 - RNA, 19 nt, Artificial Sequence
  Description of Artificial Sequence: Synthetic oligonucleotide
gauggcucuugagcucggc

SEQ ID NO: 2756042 - RNA, 19 nt, Artificial Sequence
  Description of Artificial Sequence: Synthetic oligonucleotide
caaagccauauuucuccaa

SEQ ID NO: 2756043 - RNA, 19 nt, Artificial Sequence
  Description of Artificial Sequence: Synthetic oligonucleotide
gucagcaucaaaagucccu

SEQ ID NO: 2756044 - RNA, 19 nt, Artificial Sequence
  Description of Artificial Sequence: Synthetic oligonucleotide
gauacaacuggaagagcuu

SEQ ID NO: 2756045 - RNA, 19 nt, Artificial Sequence
  Description of Artificial Sequence: Synthetic oligonucleotide
cgguaauuaacauaaggcu

SEQ ID NO: 2756046 - RNA, 19 nt, Artificial Sequence
  Description of Artificial Sequence: Synthetic oligonucleotide
ggugcgugguccccgcuug

SEQ ID NO: 2756047 - RNA, 19 nt, Artificial Sequence
  Description of Artificial Sequence: Synthetic oligonucleotide
gguucucuuggcaccccgg

SEQ ID NO: 2756048 - RNA, 19 nt, Artificial Sequence
  Description of Artificial Sequence: Synthetic oligonucleotide
cacucagaauccaaggcuu

SEQ ID NO: 2756049 - RNA, 19 nt, Artificial Sequence
  Description of Artificial Sequence: Synthetic oligonucleotide
aaggugcgugguccccgcu

SEQ ID NO: 2756050 - RNA, 19 nt, Artificial Sequence
  Description of Artificial Sequence: Synthetic oligonucleotide
ggcucuugacgaaggugcg

SEQ ID NO: 2756051 - RNA, 19 nt, Artificial Sequence
  Description of Artificial Sequence: Synthetic oligonucleotide
gcuugcauuaucuccacuu

SEQ ID NO: 2756052 - RNA, 19 nt, Artificial Sequence
  Description of Artificial Sequence: Synthetic oligonucleotide
cucauccuauccgcucccc

SEQ ID NO: 2756053 - RNA, 19 nt, Artificial Sequence
  Description of Artificial Sequence: Synthetic oligonucleotide
gucuaugccugcaggagcu

SEQ ID NO: 2756054 - RNA, 19 nt, Artificial Sequence
  Description of Artificial Sequence: Synthetic oligonucleotide
cuauccgcuccccgcacca

SEQ ID NO: 2756055 - RNA, 19 nt, Artificial Sequence
  Description of Artificial Sequence: Synthetic oligonucleotide
cuugcucauccuauccgcu

SEQ ID NO: 2756056 - RNA, 19 nt, Artificial Sequence
  Description of Artificial Sequence: Synthetic oligonucleotide
gcagaagacagcucugggu

SEQ ID NO: 2756057 - RNA, 19 nt, Artificial Sequence
  Description of Artificial Sequence: Synthetic oligonucleotide
cuuggcaccccggcucuug

SEQ ID NO: 2756058 - RNA, 19 nt, Artificial Sequence
  Description of Artificial Sequence: Synthetic oligonucleotide
auagcaggugcagcuguuu

SEQ ID NO: 2756059 - RNA, 19 nt, Artificial Sequence
  Description of Artificial Sequence: Synthetic oligonucleotide
gggcucaaagccauauuuc

SEQ ID NO: 2756060 - RNA, 19 nt, Artificial Sequence
  Description of Artificial Sequence: Synthetic oligonucleotide
cuggguugauggcucuuga

SEQ ID NO: 2756061 - RNA, 19 nt, Artificial Sequence
  Description of Artificial Sequence: Synthetic oligonucleotide
uauccgcuccccgcaccag

SEQ ID NO: 2756062 - RNA, 19 nt, Artificial Sequence
  Description of Artificial Sequence: Synthetic oligonucleotide
guccccgcuugcuugucca

SEQ ID NO: 2756063 - RNA, 19 nt, Artificial Sequence
  Description of Artificial Sequence: Synthetic oligonucleotide
ccuacucuucgagacacuc

SEQ ID NO: 2756064 - RNA, 19 nt, Artificial Sequence
  Description of Artificial Sequence: Synthetic oligonucleotide
acauaaggcuugagcuuga

SEQ ID NO: 2756065 - RNA, 19 nt, Artificial Sequence
  Description of Artificial Sequence: Synthetic oligonucleotide
uaacggcggucaggaaacc

SEQ ID NO: 2756066 - RNA, 19 nt, Artificial Sequence
  Description of Artificial Sequence: Synthetic oligonucleotide
ccaaggcuugcauuaucuc

SEQ ID NO: 2756067 - RNA, 19 nt, Artificial Sequence
  Description of Artificial Sequence: Synthetic oligonucleotide
agacagcucuggguugaug

SEQ ID NO: 2756068 - RNA, 19 nt, Artificial Sequence
  Description of Artificial Sequence: Synthetic oligonucleotide
ugcgugguccccgcuugcu

SEQ ID NO: 2756069 - RNA, 19 nt, Artificial Sequence
  Description of Artificial Sequence: Synthetic oligonucleotide
ucuaugccugcaggagcuc

SEQ ID NO: 2756070 - RNA, 19 nt, Artificial Sequence
  Description of Artificial Sequence: Synthetic oligonucleotide
ggaagaguucuuuggcggu

SEQ ID NO: 2756071 - RNA, 19 nt, Artificial Sequence
  Description of Artificial Sequence: Synthetic oligonucleotide
accccggcucuugacgaag

SEQ ID NO: 2756072 - RNA, 19 nt, Artificial Sequence
  Description of Artificial Sequence: Synthetic oligonucleotide
ggaagcgccuacucuucga

SEQ ID NO: 2756073 - RNA, 19 nt, Artificial Sequence
  Description of Artificial Sequence: Synthetic oligonucleotide
ggccuuuaauagaaaugca

SEQ ID NO: 2756074 - RNA, 19 nt, Artificial Sequence
  Description of Artificial Sequence: Synthetic oligonucleotide
ggcucugcagaagacagcu

SEQ ID NO: 2756075 - RNA, 19 nt, Artificial Sequence
  Description of Artificial Sequence: Synthetic oligonucleotide
ccaggccuugcguaacggc

SEQ ID NO: 2756076 - RNA, 19 nt, Artificial Sequence
  Description of Artificial Sequence: Synthetic oligonucleotide
gccugcaggagcucgguaa

SEQ ID NO: 2756077 - RNA, 19 nt, Artificial Sequence
  Description of Artificial Sequence: Synthetic oligonucleotide
aggcaaacuuuuggucacu

SEQ ID NO: 2756078 - RNA, 19 nt, Artificial Sequence
  Description of Artificial Sequence: Synthetic oligonucleotide
aagacagcucuggguugau

SEQ ID NO: 2756079 - RNA, 19 nt, Artificial Sequence
  Description of Artificial Sequence: Synthetic oligonucleotide
gcaggugcagcuguuugca

SEQ ID NO: 2756080 - RNA, 19 nt, Artificial Sequence
  Description of Artificial Sequence: Synthetic oligonucleotide
aggugcgugguccccgcuu

SEQ ID NO: 2756081 - RNA, 19 nt, Artificial Sequence
  Description of Artificial Sequence: Synthetic oligonucleotide
gcauuaucuccacuuugua

SEQ ID NO: 2756082 - RNA, 19 nt, Artificial Sequence
  Description of Artificial Sequence: Synthetic oligonucleotide
gguauagaugccgguucuc

SEQ ID NO: 2756083 - RNA, 19 nt, Artificial Sequence
  Description of Artificial Sequence: Synthetic oligonucleotide
caggggugugucuaugccu

SEQ ID NO: 2756084 - RNA, 19 nt, Artificial Sequence
  Description of Artificial Sequence: Synthetic oligonucleotide
augcacaaggaagcgccua

SEQ ID NO: 2756085 - RNA, 19 nt, Artificial Sequence
  Description of Artificial Sequence: Synthetic oligonucleotide
uccccgcuugcuuguccac

SEQ ID NO: 2756086 - RNA, 19 nt, Artificial Sequence
  Description of Artificial Sequence: Synthetic oligonucleotide
uggcaccccggcucuugac

SEQ ID NO: 2756087 - RNA, 19 nt, Artificial Sequence
  Description of Artificial Sequence: Synthetic oligonucleotide
acucuucgagacacucaga

SEQ ID NO: 2756088 - RNA, 19 nt, Artificial Sequence
  Description of Artificial Sequence: Synthetic oligonucleotide
cagaauccaaggcuugcau

SEQ ID NO: 2756089 - RNA, 19 nt, Artificial Sequence
  Description of Artificial Sequence: Synthetic oligonucleotide
ccuuuaucugcacaaacuu

SEQ ID NO: 2756090 - RNA, 19 nt, Artificial Sequence
  Description of Artificial Sequence: Synthetic oligonucleotide
cguaacggcggucaggaaa

SEQ ID NO: 2756091 - RNA, 19 nt, Artificial Sequence
  Description of Artificial Sequence: Synthetic oligonucleotide
ggagcucgguaauuaacau

SEQ ID NO: 2756092 - RNA, 19 nt, Artificial Sequence
  Description of Artificial Sequence: Synthetic oligonucleotide
uggcggucagggguguguc

SEQ ID NO: 2756093 - RNA, 19 nt, Artificial Sequence
  Description of Artificial Sequence: Synthetic oligonucleotide
cuugacgaaggugcguggu

SEQ ID NO: 2756094 - RNA, 19 nt, Artificial Sequence
  Description of Artificial Sequence: Synthetic oligonucleotide
ggucacugucacuguuuuc

SEQ ID NO: 2756095 - RNA, 19 nt, Artificial Sequence
  Description of Artificial Sequence: Synthetic oligonucleotide
gcucgguaauuaacauaag

SEQ ID NO: 2756096 - RNA, 19 nt, Artificial Sequence
  Description of Artificial Sequence: Synthetic oligonucleotide
ccgggacgacaaauucugg

SEQ ID NO: 2756097 - RNA, 19 nt, Artificial Sequence
  Description of Artificial Sequence: Synthetic oligonucleotide
guccgggacgacaaauucu

SEQ ID NO: 2756098 - RNA, 19 nt, Artificial Sequence
  Description of Artificial Sequence: Synthetic oligonucleotide
gcaggagcucgguaauuaa

SEQ ID NO: 2756099 - RNA, 19 nt, Artificial Sequence
  Description of Artificial Sequence: Synthetic oligonucleotide
gugcgugguccccgcuugc

SEQ ID NO: 2756100 - RNA, 19 nt, Artificial Sequence
  Description of Artificial Sequence: Synthetic oligonucleotide
cgugguccccgcuugcuug

SEQ ID NO: 2756101 - RNA, 19 nt, Artificial Sequence
  Description of Artificial Sequence: Synthetic oligonucleotide
ccuauccgcuccccgcacc

SEQ ID NO: 2756102 - RNA, 19 nt, Artificial Sequence
  Description of Artificial Sequence: Synthetic oligonucleotide
gcaaacuuuuggucacugu

SEQ ID NO: 2756103 - RNA, 19 nt, Artificial Sequence
  Description of Artificial Sequence: Synthetic oligonucleotide
ggggugugucuaugccugc

SEQ ID NO: 2756104 - RNA, 19 nt, Artificial Sequence
  Description of Artificial Sequence: Synthetic oligonucleotide
cgcuugcuuguccacuugc

SEQ ID NO: 2756105 - RNA, 19 nt, Artificial Sequence
  Description of Artificial Sequence: Synthetic oligonucleotide
gcaccccggcucuugacga

SEQ ID NO: 2756106 - RNA, 19 nt, Artificial Sequence
  Description of Artificial Sequence: Synthetic oligonucleotide
cauaaggcuugagcuugaa

SEQ ID NO: 2756107 - RNA, 19 nt, Artificial Sequence
  Description of Artificial Sequence: Synthetic oligonucleotide
ccuugcguaacggcgguca

SEQ ID NO: 2756108 - RNA, 19 nt, Artificial Sequence
  Description of Artificial Sequence: Synthetic oligonucleotide
ccagucaaguccgggacga

SEQ ID NO: 2756109 - RNA, 19 nt, Artificial Sequence
  Description of Artificial Sequence: Synthetic oligonucleotide
guccacuugcucauccuau

SEQ ID NO: 2756110 - RNA, 19 nt, Artificial Sequence
  Description of Artificial Sequence: Synthetic oligonucleotide
gccgguucucuuggcaccc

SEQ ID NO: 2756111 - RNA, 19 nt, Artificial Sequence
  Description of Artificial Sequence: Synthetic oligonucleotide
ccccggcucuugacgaagg

SEQ ID NO: 2756112 - RNA, 19 nt, Artificial Sequence
  Description of Artificial Sequence: Synthetic oligonucleotide
ccccgcaccaggccuugcg

SEQ ID NO: 2756113 - RNA, 19 nt, Artificial Sequence
  Description of Artificial Sequence: Synthetic oligonucleotide
ccggcucuugacgaaggug

SEQ ID NO: 2756114 - RNA, 19 nt, Artificial Sequence
  Description of Artificial Sequence: Synthetic oligonucleotide
caaguccgggacgacaaau

SEQ ID NO: 2756115 - RNA, 19 nt, Artificial Sequence
  Description of Artificial Sequence: Synthetic oligonucleotide
cgccuacucuucgagacac

SEQ ID NO: 2756116 - RNA, 19 nt, Artificial Sequence
  Description of Artificial Sequence: Synthetic oligonucleotide
cgaaggugcgugguccccg

SEQ ID NO: 2756117 - RNA, 19 nt, Artificial Sequence
  Description of Artificial Sequence: Synthetic oligonucleotide
gggugugucuaugccugca

SEQ ID NO: 2756118 - RNA, 19 nt, Artificial Sequence
  Description of Artificial Sequence: Synthetic oligonucleotide
cgguucucuuggcaccccg

SEQ ID NO: 2756119 - RNA, 19 nt, Artificial Sequence
  Description of Artificial Sequence: Synthetic oligonucleotide
gcgccuacucuucgagaca

SEQ ID NO: 2756120 - RNA, 19 nt, Artificial Sequence
  Description of Artificial Sequence: Synthetic oligonucleotide
cuuccugugugggcucaaa

SEQ ID NO: 2756121 - RNA, 19 nt, Artificial Sequence
  Description of Artificial Sequence: Synthetic oligonucleotide
gugguccccgcuugcuugu

SEQ ID NO: 2756122 - RNA, 19 nt, Artificial Sequence
  Description of Artificial Sequence: Synthetic oligonucleotide
ggcggucaggaaacccaug

SEQ ID NO: 2756123 - RNA, 19 nt, Artificial Sequence
  Description of Artificial Sequence: Synthetic oligonucleotide
cucuugagcucggcccgca

SEQ ID NO: 2756124 - RNA, 19 nt, Artificial Sequence
  Description of Artificial Sequence: Synthetic oligonucleotide
cgagacacucagaauccaa

SEQ ID NO: 2756125 - RNA, 19 nt, Artificial Sequence
  Description of Artificial Sequence: Synthetic oligonucleotide
gcucuugagcucggcccgc

SEQ ID NO: 2756126 - RNA, 19 nt, Artificial Sequence
  Description of Artificial Sequence: Synthetic oligonucleotide
cuccccgcaccaggccuug

SEQ ID NO: 2756127 - RNA, 19 nt, Artificial Sequence
  Description of Artificial Sequence: Synthetic oligonucleotide
ugguccccgcuugcuuguc

SEQ ID NO: 2756128 - RNA, 19 nt, Artificial Sequence
  Description of Artificial Sequence: Synthetic oligonucleotide
gcaccaggccuugcguaac

SEQ ID NO: 2756129 - RNA, 19 nt, Artificial Sequence
  Description of Artificial Sequence: Synthetic oligonucleotide
caccccggcucuugacgaa

SEQ ID NO: 2756130 - RNA, 19 nt, Artificial Sequence
  Description of Artificial Sequence: Synthetic oligonucleotide
ccgcuugcuuguccacuug

SEQ ID NO: 2756131 - RNA, 19 nt, Artificial Sequence
  Description of Artificial Sequence: Synthetic oligonucleotide
uccccgcaccaggccuugc

SEQ ID NO: 2756132 - RNA, 19 nt, Artificial Sequence
  Description of Artificial Sequence: Synthetic oligonucleotide
gcggucaggggugugucua

SEQ ID NO: 2756133 - RNA, 19 nt, Artificial Sequence
  Description of Artificial Sequence: Synthetic oligonucleotide
ggcuugcauuaucuccacu

SEQ ID NO: 2756134 - RNA, 19 nt, Artificial Sequence
  Description of Artificial Sequence: Synthetic oligonucleotide
gcucugcagaagacagcuc

SEQ ID NO: 2756135 - RNA, 19 nt, Artificial Sequence
  Description of Artificial Sequence: Synthetic oligonucleotide
cugggaccauuuccuuuau

SEQ ID NO: 2756136 - RNA, 19 nt, Artificial Sequence
  Description of Artificial Sequence: Synthetic oligonucleotide
gcacaaggaagcgccuacu

SEQ ID NO: 2756137 - RNA, 19 nt, Artificial Sequence
  Description of Artificial Sequence: Synthetic oligonucleotide
ggccuugcguaacggcggu

SEQ ID NO: 2756138 - RNA, 19 nt, Artificial Sequence
  Description of Artificial Sequence: Synthetic oligonucleotide
gcucuugacgaaggugcgu

SEQ ID NO: 2756139 - RNA, 19 nt, Artificial Sequence
  Description of Artificial Sequence: Synthetic oligonucleotide
ggcggucaggggugugucu

SEQ ID NO: 2756140 - RNA, 19 nt, Artificial Sequence
  Description of Artificial Sequence: Synthetic oligonucleotide
ccugcaggagcucgguaau

SEQ ID NO: 2756141 - RNA, 19 nt, Artificial Sequence
  Description of Artificial Sequence: Synthetic oligonucleotide
ccgguucucuuggcacccc

SEQ ID NO: 2756142 - RNA, 19 nt, Artificial Sequence
  Description of Artificial Sequence: Synthetic oligonucleotide
gugugggcucaaagccaua

SEQ ID NO: 2756143 - RNA, 19 nt, Artificial Sequence
  Description of Artificial Sequence: Synthetic oligonucleotide
gcuugagcuugaagccagu

SEQ ID NO: 2756144 - RNA, 19 nt, Artificial Sequence
  Description of Artificial Sequence: Synthetic oligonucleotide
gcguaacggcggucaggaa

SEQ ID NO: 2756145 - RNA, 19 nt, Artificial Sequence
  Description of Artificial Sequence: Synthetic oligonucleotide
gccuugcguaacggcgguc

SEQ ID NO: 2756146 - RNA, 19 nt, Artificial Sequence
  Description of Artificial Sequence: Synthetic oligonucleotide
cucuggguugauggcucuu

SEQ ID NO: 2756147 - RNA, 19 nt, Artificial Sequence
  Description of Artificial Sequence: Synthetic oligonucleotide
cccgcaccaggccuugcgu

SEQ ID NO: 2756148 - RNA, 19 nt, Artificial Sequence
  Description of Artificial Sequence: Synthetic oligonucleotide
gcgugguccccgcuugcuu

SEQ ID NO: 2756149 - RNA, 19 nt, Artificial Sequence
  Description of Artificial Sequence: Synthetic oligonucleotide
gccuacucuucgagacacu

SEQ ID NO: 2756150 - RNA, 19 nt, Artificial Sequence
  Description of Artificial Sequence: Synthetic oligonucleotide
cccuucuauuaaagucuuu

SEQ ID NO: 2756151 - RNA, 19 nt, Artificial Sequence
  Description of Artificial Sequence: Synthetic oligonucleotide
cccggcucuugacgaaggu

SEQ ID NO: 2756152 - RNA, 19 nt, Artificial Sequence
  Description of Artificial Sequence: Synthetic oligonucleotide
ccccgcuugcuuguccacu

SEQ ID NO: 2756153 - RNA, 19 nt, Artificial Sequence
  Description of Artificial Sequence: Synthetic oligonucleotide
cgcuccccgcaccaggccu

SEQ ID NO: 2756154 - RNA, 19 nt, Artificial Sequence
  Description of Artificial Sequence: Synthetic oligonucleotide
cggcggucaggaaacccau

SEQ ID NO: 2756155 - RNA, 19 nt, Artificial Sequence
  Description of Artificial Sequence: Synthetic oligonucleotide
gcuccccgcaccaggccuu

SEQ ID NO: 2756156 - RNA, 19 nt, Artificial Sequence
  Description of Artificial Sequence: Synthetic oligonucleotide
uuuacauuagaaaagauag

SEQ ID NO: 2756157 - RNA, 19 nt, Artificial Sequence
  Description of Artificial Sequence: Synthetic oligonucleotide
aaaacuauuguacacaaca

SEQ ID NO: 2756158 - RNA, 19 nt, Artificial Sequence
  Description of Artificial Sequence: Synthetic oligonucleotide
uuuaacuaaagacugcucc

SEQ ID NO: 2756159 - RNA, 19 nt, Artificial Sequence
  Description of Artificial Sequence: Synthetic oligonucleotide
aaugcaaagcagcagauga

SEQ ID NO: 2756160 - RNA, 19 nt, Artificial Sequence
  Description of Artificial Sequence: Synthetic oligonucleotide
aaaggaaacaggacgaugg

SEQ ID NO: 2756161 - RNA, 19 nt, Artificial Sequence
  Description of Artificial Sequence: Synthetic oligonucleotide
agcagaugaacccaaaagg

SEQ ID NO: 2756162 - RNA, 19 nt, Artificial Sequence
  Description of Artificial Sequence: Synthetic oligonucleotide
aaagauagcugaauguagg

SEQ ID NO: 2756163 - RNA, 19 nt, Artificial Sequence
  Description of Artificial Sequence: Synthetic oligonucleotide
uagaaaagauagcugaaug

SEQ ID NO: 2756164 - RNA, 19 nt, Artificial Sequence
  Description of Artificial Sequence: Synthetic oligonucleotide
ugucccuuuaacuaaagac

SEQ ID NO: 2756165 - RNA, 19 nt, Artificial Sequence
  Description of Artificial Sequence: Synthetic oligonucleotide
aauguaggaaaaccgggug

SEQ ID NO: 2756166 - RNA, 19 nt, Artificial Sequence
  Description of Artificial Sequence: Synthetic oligonucleotide
cugaauguaggaaaaccgg

SEQ ID NO: 2756167 - RNA, 19 nt, Artificial Sequence
  Description of Artificial Sequence: Synthetic oligonucleotide
uuguacacaacauuuacau

SEQ ID NO: 2756168 - RNA, 19 nt, Artificial Sequence
  Description of Artificial Sequence: Synthetic oligonucleotide
acgauggccaagaagaugc

SEQ ID NO: 2756169 - RNA, 19 nt, Artificial Sequence
  Description of Artificial Sequence: Synthetic oligonucleotide
cuguggaugcuauagaccc

SEQ ID NO: 2756170 - RNA, 19 nt, Artificial Sequence
  Description of Artificial Sequence: Synthetic oligonucleotide
acaacauuuacauuagaaa

SEQ ID NO: 2756171 - RNA, 19 nt, Artificial Sequence
  Description of Artificial Sequence: Synthetic oligonucleotide
ucccuuuaacuaaagacug

SEQ ID NO: 2756172 - RNA, 19 nt, Artificial Sequence
  Description of Artificial Sequence: Synthetic oligonucleotide
agaaaagauagcugaaugu

SEQ ID NO: 2756173 - RNA, 19 nt, Artificial Sequence
  Description of Artificial Sequence: Synthetic oligonucleotide
acaccaacccugcagaccg

SEQ ID NO: 2756174 - RNA, 19 nt, Artificial Sequence
  Description of Artificial Sequence: Synthetic oligonucleotide
uuacauuagaaaagauagc

SEQ ID NO: 2756175 - RNA, 19 nt, Artificial Sequence
  Description of Artificial Sequence: Synthetic oligonucleotide
uacacaacauuuacauuag

SEQ ID NO: 2756176 - RNA, 19 nt, Artificial Sequence
  Description of Artificial Sequence: Synthetic oligonucleotide
aaaaccggguguguguccc

SEQ ID NO: 2756177 - RNA, 19 nt, Artificial Sequence
  Description of Artificial Sequence: Synthetic oligonucleotide
acuaaagacugcuccacag

SEQ ID NO: 2756178 - RNA, 19 nt, Artificial Sequence
  Description of Artificial Sequence: Synthetic oligonucleotide
caacauuuacauuagaaaa

SEQ ID NO: 2756179 - RNA, 19 nt, Artificial Sequence
  Description of Artificial Sequence: Synthetic oligonucleotide
aacuauuguacacaacauu

SEQ ID NO: 2756180 - RNA, 19 nt, Artificial Sequence
  Description of Artificial Sequence: Synthetic oligonucleotide
gauagcugaauguaggaaa

SEQ ID NO: 2756181 - RNA, 19 nt, Artificial Sequence
  Description of Artificial Sequence: Synthetic oligonucleotide
aagauagcugaauguagga

SEQ ID NO: 2756182 - RNA, 19 nt, Artificial Sequence
  Description of Artificial Sequence: Synthetic oligonucleotide
uacuccaggacaccaaccc

SEQ ID NO: 2756183 - RNA, 19 nt, Artificial Sequence
  Description of Artificial Sequence: Synthetic oligonucleotide
acgacgauggaguuggcag

SEQ ID NO: 2756184 - RNA, 19 nt, Artificial Sequence
  Description of Artificial Sequence: Synthetic oligonucleotide
aucuucgcuuccucaaugc

SEQ ID NO: 2756185 - RNA, 19 nt, Artificial Sequence
  Description of Artificial Sequence: Synthetic oligonucleotide
gaagcaguacuccaggaca

SEQ ID NO: 2756186 - RNA, 19 nt, Artificial Sequence
  Description of Artificial Sequence: Synthetic oligonucleotide
cucguagucgcccuggccg

SEQ ID NO: 2756187 - RNA, 19 nt, Artificial Sequence
  Description of Artificial Sequence: Synthetic oligonucleotide
acauuuacauuagaaaaga

SEQ ID NO: 2756188 - RNA, 19 nt, Artificial Sequence
  Description of Artificial Sequence: Synthetic oligonucleotide
ugaacccaaaaggaaacag

SEQ ID NO: 2756189 - RNA, 19 nt, Artificial Sequence
  Description of Artificial Sequence: Synthetic oligonucleotide
ucgacuguggaugcuauag

SEQ ID NO: 2756190 - RNA, 19 nt, Artificial Sequence
  Description of Artificial Sequence: Synthetic oligonucleotide
acaguuggggcaucuucgc

SEQ ID NO: 2756191 - RNA, 19 nt, Artificial Sequence
  Description of Artificial Sequence: Synthetic oligonucleotide
cacaguuggggcaucuucg

SEQ ID NO: 2756192 - RNA, 19 nt, Artificial Sequence
  Description of Artificial Sequence: Synthetic oligonucleotide
ugaagcaguacuccaggac

SEQ ID NO: 2756193 - RNA, 19 nt, Artificial Sequence
  Description of Artificial Sequence: Synthetic oligonucleotide
accacgacgauggaguugg

SEQ ID NO: 2756194 - RNA, 19 nt, Artificial Sequence
  Description of Artificial Sequence: Synthetic oligonucleotide
acuguggaugcuauagacc

SEQ ID NO: 2756195 - RNA, 19 nt, Artificial Sequence
  Description of Artificial Sequence: Synthetic oligonucleotide
aaagcagcagaugaaccca

SEQ ID NO: 2756196 - RNA, 19 nt, Artificial Sequence
  Description of Artificial Sequence: Synthetic oligonucleotide
gaguuggcaggauaccggg

SEQ ID NO: 2756197 - RNA, 19 nt, Artificial Sequence
  Description of Artificial Sequence: Synthetic oligonucleotide
acuauuguacacaacauuu

SEQ ID NO: 2756198 - RNA, 19 nt, Artificial Sequence
  Description of Artificial Sequence: Synthetic oligonucleotide
uguaggaaaaccgggugug

SEQ ID NO: 2756199 - RNA, 19 nt, Artificial Sequence
  Description of Artificial Sequence: Synthetic oligonucleotide
uaaagacugcuccacaguu

SEQ ID NO: 2756200 - RNA, 19 nt, Artificial Sequence
  Description of Artificial Sequence: Synthetic oligonucleotide
gaaaagauagcugaaugua

SEQ ID NO: 2756201 - RNA, 19 nt, Artificial Sequence
  Description of Artificial Sequence: Synthetic oligonucleotide
gaugaacccaaaaggaaac

SEQ ID NO: 2756202 - RNA, 19 nt, Artificial Sequence
  Description of Artificial Sequence: Synthetic oligonucleotide
auuuacauuagaaaagaua

SEQ ID NO: 2756203 - RNA, 19 nt, Artificial Sequence
  Description of Artificial Sequence: Synthetic oligonucleotide
gauaccgggugaccguucg

SEQ ID NO: 2756204 - RNA, 19 nt, Artificial Sequence
  Description of Artificial Sequence: Synthetic oligonucleotide
ugugugucccuuuaacuaa

SEQ ID NO: 2756205 - RNA, 19 nt, Artificial Sequence
  Description of Artificial Sequence: Synthetic oligonucleotide
uguggaugcuauagacccg

SEQ ID NO: 2756206 - RNA, 19 nt, Artificial Sequence
  Description of Artificial Sequence: Synthetic oligonucleotide
cagcagaugaacccaaaag

SEQ ID NO: 2756207 - RNA, 19 nt, Artificial Sequence
  Description of Artificial Sequence: Synthetic oligonucleotide
acgagguagggguaaggcg

SEQ ID NO: 2756208 - RNA, 19 nt, Artificial Sequence
  Description of Artificial Sequence: Synthetic oligonucleotide
uucgcuuccucaaugcaaa

SEQ ID NO: 2756209 - RNA, 19 nt, Artificial Sequence
  Description of Artificial Sequence: Synthetic oligonucleotide
aggaaacaggacgauggcc

SEQ ID NO: 2756210 - RNA, 19 nt, Artificial Sequence
  Description of Artificial Sequence: Synthetic oligonucleotide
uuagaaaagauagcugaau

SEQ ID NO: 2756211 - RNA, 19 nt, Artificial Sequence
  Description of Artificial Sequence: Synthetic oligonucleotide
aagcaguacuccaggacac

SEQ ID NO: 2756212 - RNA, 19 nt, Artificial Sequence
  Description of Artificial Sequence: Synthetic oligonucleotide
uggaguuggcaggauaccg

SEQ ID NO: 2756213 - RNA, 19 nt, Artificial Sequence
  Description of Artificial Sequence: Synthetic oligonucleotide
gauggaguuggcaggauac

SEQ ID NO: 2756214 - RNA, 19 nt, Artificial Sequence
  Description of Artificial Sequence: Synthetic oligonucleotide
cuuccuuuggcccggcggg

SEQ ID NO: 2756215 - RNA, 19 nt, Artificial Sequence
  Description of Artificial Sequence: Synthetic oligonucleotide
cucaaugcaaagcagcaga

SEQ ID NO: 2756216 - RNA, 19 nt, Artificial Sequence
  Description of Artificial Sequence: Synthetic oligonucleotide
cacaacauuuacauuagaa

SEQ ID NO: 2756217 - RNA, 19 nt, Artificial Sequence
  Description of Artificial Sequence: Synthetic oligonucleotide
aacccugcagaccgggcag

SEQ ID NO: 2756218 - RNA, 19 nt, Artificial Sequence
  Description of Artificial Sequence: Synthetic oligonucleotide
aaacuauuguacacaacau

SEQ ID NO: 2756219 - RNA, 19 nt, Artificial Sequence
  Description of Artificial Sequence: Synthetic oligonucleotide
auguaggaaaaccgggugu

SEQ ID NO: 2756220 - RNA, 19 nt, Artificial Sequence
  Description of Artificial Sequence: Synthetic oligonucleotide
gaccguucgacuguggaug

SEQ ID NO: 2756221 - RNA, 19 nt, Artificial Sequence
  Description of Artificial Sequence: Synthetic oligonucleotide
uaacuaaagacugcuccac

SEQ ID NO: 2756222 - RNA, 19 nt, Artificial Sequence
  Description of Artificial Sequence: Synthetic oligonucleotide
cuuuaacuaaagacugcuc

SEQ ID NO: 2756223 - RNA, 19 nt, Artificial Sequence
  Description of Artificial Sequence: Synthetic oligonucleotide
ggugaagcaguacuccagg

SEQ ID NO: 2756224 - RNA, 19 nt, Artificial Sequence
  Description of Artificial Sequence: Synthetic oligonucleotide
aaagacugcuccacaguug

SEQ ID NO: 2756225 - RNA, 19 nt, Artificial Sequence
  Description of Artificial Sequence: Synthetic oligonucleotide
ucuucgcuuccucaaugca

SEQ ID NO: 2756226 - RNA, 19 nt, Artificial Sequence
  Description of Artificial Sequence: Synthetic oligonucleotide
guggaugcuauagacccgg

SEQ ID NO: 2756227 - RNA, 19 nt, Artificial Sequence
  Description of Artificial Sequence: Synthetic oligonucleotide
accguucgacuguggaugc

SEQ ID NO: 2756228 - RNA, 19 nt, Artificial Sequence
  Description of Artificial Sequence: Synthetic oligonucleotide
ugugucccuuuaacuaaag

SEQ ID NO: 2756229 - RNA, 19 nt, Artificial Sequence
  Description of Artificial Sequence: Synthetic oligonucleotide
acucguagucgcccuggcc

SEQ ID NO: 2756230 - RNA, 19 nt, Artificial Sequence
  Description of Artificial Sequence: Synthetic oligonucleotide
auuguacacaacauuuaca

SEQ ID NO: 2756231 - RNA, 19 nt, Artificial Sequence
  Description of Artificial Sequence: Synthetic oligonucleotide
agaugaacccaaaaggaaa

SEQ ID NO: 2756232 - RNA, 19 nt, Artificial Sequence
  Description of Artificial Sequence: Synthetic oligonucleotide
agaccgggcagccuccgac

SEQ ID NO: 2756233 - RNA, 19 nt, Artificial Sequence
  Description of Artificial Sequence: Synthetic oligonucleotide
aggcaggugaagcaguacu

SEQ ID NO: 2756234 - RNA, 19 nt, Artificial Sequence
  Description of Artificial Sequence: Synthetic oligonucleotide
aggaaaaccgggugugugu

SEQ ID NO: 2756235 - RNA, 19 nt, Artificial Sequence
  Description of Artificial Sequence: Synthetic oligonucleotide
gacgagguagggguaaggc

SEQ ID NO: 2756236 - RNA, 19 nt, Artificial Sequence
  Description of Artificial Sequence: Synthetic oligonucleotide
auggaguuggcaggauacc

SEQ ID NO: 2756237 - RNA, 19 nt, Artificial Sequence
  Description of Artificial Sequence: Synthetic oligonucleotide
gggcuugugguccauggcg

SEQ ID NO: 2756238 - RNA, 19 nt, Artificial Sequence
  Description of Artificial Sequence: Synthetic oligonucleotide
uaggaaaaccgggugugug

SEQ ID NO: 2756239 - RNA, 19 nt, Artificial Sequence
  Description of Artificial Sequence: Synthetic oligonucleotide
uguacacaacauuuacauu

SEQ ID NO: 2756240 - RNA, 19 nt, Artificial Sequence
  Description of Artificial Sequence: Synthetic oligonucleotide
auuagaaaagauagcugaa

SEQ ID NO: 2756241 - RNA, 19 nt, Artificial Sequence
  Description of Artificial Sequence: Synthetic oligonucleotide
gcuuccucaaugcaaagca

SEQ ID NO: 2756242 - RNA, 19 nt, Artificial Sequence
  Description of Artificial Sequence: Synthetic oligonucleotide
gaaaaccgggugugugucc

SEQ ID NO: 2756243 - RNA, 19 nt, Artificial Sequence
  Description of Artificial Sequence: Synthetic oligonucleotide
gcagccuccgaccacgacg

SEQ ID NO: 2756244 - RNA, 19 nt, Artificial Sequence
  Description of Artificial Sequence: Synthetic oligonucleotide
aguuggggcaucuucgcuu

SEQ ID NO: 2756245 - RNA, 19 nt, Artificial Sequence
  Description of Artificial Sequence: Synthetic oligonucleotide
uuggcaggauaccggguga

SEQ ID NO: 2756246 - RNA, 19 nt, Artificial Sequence
  Description of Artificial Sequence: Synthetic oligonucleotide
cagaugaacccaaaaggaa

SEQ ID NO: 2756247 - RNA, 19 nt, Artificial Sequence
  Description of Artificial Sequence: Synthetic oligonucleotide
gugugugucccuuuaacua

SEQ ID NO: 2756248 - RNA, 19 nt, Artificial Sequence
  Description of Artificial Sequence: Synthetic oligonucleotide
aaacaggacgauggccaag

SEQ ID NO: 2756249 - RNA, 19 nt, Artificial Sequence
  Description of Artificial Sequence: Synthetic oligonucleotide
gucccuuuaacuaaagacu

SEQ ID NO: 2756250 - RNA, 19 nt, Artificial Sequence
  Description of Artificial Sequence: Synthetic oligonucleotide
gacaccaacccugcagacc

SEQ ID NO: 2756251 - RNA, 19 nt, Artificial Sequence
  Description of Artificial Sequence: Synthetic oligonucleotide
auagcugaauguaggaaaa

SEQ ID NO: 2756252 - RNA, 19 nt, Artificial Sequence
  Description of Artificial Sequence: Synthetic oligonucleotide
cuauuguacacaacauuua

SEQ ID NO: 2756253 - RNA, 19 nt, Artificial Sequence
  Description of Artificial Sequence: Synthetic oligonucleotide
uccagguuguaggcgggcg

SEQ ID NO: 2756254 - RNA, 19 nt, Artificial Sequence
  Description of Artificial Sequence: Synthetic oligonucleotide
uggggauggccccguagcc

SEQ ID NO: 2756255 - RNA, 19 nt, Artificial Sequence
  Description of Artificial Sequence: Synthetic oligonucleotide
caucuucgcuuccucaaug

SEQ ID NO: 2756256 - RNA, 19 nt, Artificial Sequence
  Description of Artificial Sequence: Synthetic oligonucleotide
gucccgagcagcucggccc

SEQ ID NO: 2756257 - RNA, 19 nt, Artificial Sequence
  Description of Artificial Sequence: Synthetic oligonucleotide
ggaugcuauagacccgggg

SEQ ID NO: 2756258 - RNA, 19 nt, Artificial Sequence
  Description of Artificial Sequence: Synthetic oligonucleotide
agauagcugaauguaggaa

SEQ ID NO: 2756259 - RNA, 19 nt, Artificial Sequence
  Description of Artificial Sequence: Synthetic oligonucleotide
uggaugcuauagacccggg

SEQ ID NO: 2756260 - RNA, 19 nt, Artificial Sequence
  Description of Artificial Sequence: Synthetic oligonucleotide
gaauguaggaaaaccgggu

SEQ ID NO: 2756261 - RNA, 19 nt, Artificial Sequence
  Description of Artificial Sequence: Synthetic oligonucleotide
ugucccgagcagcucggcc

SEQ ID NO: 2756262 - RNA, 19 nt, Artificial Sequence
  Description of Artificial Sequence: Synthetic oligonucleotide
ccaaaaggaaacaggacga

SEQ ID NO: 2756263 - RNA, 19 nt, Artificial Sequence
  Description of Artificial Sequence: Synthetic oligonucleotide
guagggguaaggcggcggc

SEQ ID NO: 2756264 - RNA, 19 nt, Artificial Sequence
  Description of Artificial Sequence: Synthetic oligonucleotide
agcagcuccggcggugucc

SEQ ID NO: 2756265 - RNA, 19 nt, Artificial Sequence
  Description of Artificial Sequence: Synthetic oligonucleotide
ugaccguucgacuguggau

SEQ ID NO: 2756266 - RNA, 19 nt, Artificial Sequence
  Description of Artificial Sequence: Synthetic oligonucleotide
ggaguuggcaggauaccgg

SEQ ID NO: 2756267 - RNA, 19 nt, Artificial Sequence
  Description of Artificial Sequence: Synthetic oligonucleotide
gcagaugaacccaaaagga

SEQ ID NO: 2756268 - RNA, 19 nt, Artificial Sequence
  Description of Artificial Sequence: Synthetic oligonucleotide
aacaggggcuuguggucca

SEQ ID NO: 2756269 - RNA, 19 nt, Artificial Sequence
  Description of Artificial Sequence: Synthetic oligonucleotide
uccgaccacgacgauggag

SEQ ID NO: 2756270 - RNA, 19 nt, Artificial Sequence
  Description of Artificial Sequence: Synthetic oligonucleotide
uugugguccauggcggccc

SEQ ID NO: 2756271 - RNA, 19 nt, Artificial Sequence
  Description of Artificial Sequence: Synthetic oligonucleotide
acacaacauuuacauuaga

SEQ ID NO: 2756272 - RNA, 19 nt, Artificial Sequence
  Description of Artificial Sequence: Synthetic oligonucleotide
gcuuccuuuggcccggcgg

SEQ ID NO: 2756273 - RNA, 19 nt, Artificial Sequence
  Description of Artificial Sequence: Synthetic oligonucleotide
caaugcaaagcagcagaug

SEQ ID NO: 2756274 - RNA, 19 nt, Artificial Sequence
  Description of Artificial Sequence: Synthetic oligonucleotide
guuggggcaucuucgcuuc

SEQ ID NO: 2756275 - RNA, 19 nt, Artificial Sequence
  Description of Artificial Sequence: Synthetic oligonucleotide
ugugacgagguagggguaa

SEQ ID NO: 2756276 - RNA, 19 nt, Artificial Sequence
  Description of Artificial Sequence: Synthetic oligonucleotide
gaaacaggacgauggccaa

SEQ ID NO: 2756277 - RNA, 19 nt, Artificial Sequence
  Description of Artificial Sequence: Synthetic oligonucleotide
cuucgcuuccucaaugcaa

SEQ ID NO: 2756278 - RNA, 19 nt, Artificial Sequence
  Description of Artificial Sequence: Synthetic oligonucleotide
gccuccagguuguaggcgg

SEQ ID NO: 2756279 - RNA, 19 nt, Artificial Sequence
  Description of Artificial Sequence: Synthetic oligonucleotide
gcaggauaccgggugaccg

SEQ ID NO: 2756280 - RNA, 19 nt, Artificial Sequence
  Description of Artificial Sequence: Synthetic oligonucleotide
guuguaggcgggcgggcgc

SEQ ID NO: 2756281 - RNA, 19 nt, Artificial Sequence
  Description of Artificial Sequence: Synthetic oligonucleotide
cagguuguaggcgggcggg

SEQ ID NO: 2756282 - RNA, 19 nt, Artificial Sequence
  Description of Artificial Sequence: Synthetic oligonucleotide
uagcugaauguaggaaaac

SEQ ID NO: 2756283 - RNA, 19 nt, Artificial Sequence
  Description of Artificial Sequence: Synthetic oligonucleotide
ugcagaccgggcagccucc

SEQ ID NO: 2756284 - RNA, 19 nt, Artificial Sequence
  Description of Artificial Sequence: Synthetic oligonucleotide
gacgauggaguuggcagga

SEQ ID NO: 2756285 - RNA, 19 nt, Artificial Sequence
  Description of Artificial Sequence: Synthetic oligonucleotide
uaccgggugaccguucgac

SEQ ID NO: 2756286 - RNA, 19 nt, Artificial Sequence
  Description of Artificial Sequence: Synthetic oligonucleotide
ggcgggagcagcuccggcg

SEQ ID NO: 2756287 - RNA, 19 nt, Artificial Sequence
  Description of Artificial Sequence: Synthetic oligonucleotide
uagggguaaggcggcggcg

SEQ ID NO: 2756288 - RNA, 19 nt, Artificial Sequence
  Description of Artificial Sequence: Synthetic oligonucleotide
agugaggcgcgcgccgggc

SEQ ID NO: 2756289 - RNA, 19 nt, Artificial Sequence
  Description of Artificial Sequence: Synthetic oligonucleotide
gugaccguucgacugugga

SEQ ID NO: 2756290 - RNA, 19 nt, Artificial Sequence
  Description of Artificial Sequence: Synthetic oligonucleotide
gagguagggguaaggcggc

SEQ ID NO: 2756291 - RNA, 19 nt, Artificial Sequence
  Description of Artificial Sequence: Synthetic oligonucleotide
accaacccugcagaccggg

SEQ ID NO: 2756292 - RNA, 19 nt, Artificial Sequence
  Description of Artificial Sequence: Synthetic oligonucleotide
gaccgggcagccuccgacc

SEQ ID NO: 2756293 - RNA, 19 nt, Artificial Sequence
  Description of Artificial Sequence: Synthetic oligonucleotide
gugcgggccgcacucguag

SEQ ID NO: 2756294 - RNA, 19 nt, Artificial Sequence
  Description of Artificial Sequence: Synthetic oligonucleotide
ggcuugugguccauggcgg

SEQ ID NO: 2756295 - RNA, 19 nt, Artificial Sequence
  Description of Artificial Sequence: Synthetic oligonucleotide
cugcagaccgggcagccuc

SEQ ID NO: 2756296 - RNA, 19 nt, Artificial Sequence
  Description of Artificial Sequence: Synthetic oligonucleotide
cccuuuaacuaaagacugc

SEQ ID NO: 2756297 - RNA, 19 nt, Artificial Sequence
  Description of Artificial Sequence: Synthetic oligonucleotide
aaaccgggugugugucccu

SEQ ID NO: 2756298 - RNA, 19 nt, Artificial Sequence
  Description of Artificial Sequence: Synthetic oligonucleotide
gugaagcaguacuccagga

SEQ ID NO: 2756299 - RNA, 19 nt, Artificial Sequence
  Description of Artificial Sequence: Synthetic oligonucleotide
uuccuuuggcccggcgggg

SEQ ID NO: 2756300 - RNA, 19 nt, Artificial Sequence
  Description of Artificial Sequence: Synthetic oligonucleotide
agguuguaggcgggcgggc

SEQ ID NO: 2756301 - RNA, 19 nt, Artificial Sequence
  Description of Artificial Sequence: Synthetic oligonucleotide
gcucgcuuccuuuggcccg

SEQ ID NO: 2756302 - RNA, 19 nt, Artificial Sequence
  Description of Artificial Sequence: Synthetic oligonucleotide
gcaggugaagcaguacucc

SEQ ID NO: 2756303 - RNA, 19 nt, Artificial Sequence
  Description of Artificial Sequence: Synthetic oligonucleotide
cuaaagacugcuccacagu

SEQ ID NO: 2756304 - RNA, 19 nt, Artificial Sequence
  Description of Artificial Sequence: Synthetic oligonucleotide
cagccuccgaccacgacga

SEQ ID NO: 2756305 - RNA, 19 nt, Artificial Sequence
  Description of Artificial Sequence: Synthetic oligonucleotide
ugcuccacaguuggggcau

SEQ ID NO: 2756306 - RNA, 19 nt, Artificial Sequence
  Description of Artificial Sequence: Synthetic oligonucleotide
ggcucgcuuccuuuggccc

SEQ ID NO: 2756307 - RNA, 19 nt, Artificial Sequence
  Description of Artificial Sequence: Synthetic oligonucleotide
cagcucggcccagugaggc

SEQ ID NO: 2756308 - RNA, 19 nt, Artificial Sequence
  Description of Artificial Sequence: Synthetic oligonucleotide
gaccacgacgauggaguug

SEQ ID NO: 2756309 - RNA, 19 nt, Artificial Sequence
  Description of Artificial Sequence: Synthetic oligonucleotide
cucgcuuccuuuggcccgg

SEQ ID NO: 2756310 - RNA, 19 nt, Artificial Sequence
  Description of Artificial Sequence: Synthetic oligonucleotide
cauuuacauuagaaaagau

SEQ ID NO: 2756311 - RNA, 19 nt, Artificial Sequence
  Description of Artificial Sequence: Synthetic oligonucleotide
accgggugaccguucgacu

SEQ ID NO: 2756312 - RNA, 19 nt, Artificial Sequence
  Description of Artificial Sequence: Synthetic oligonucleotide
ggugugugucccuuuaacu

SEQ ID NO: 2756313 - RNA, 19 nt, Artificial Sequence
  Description of Artificial Sequence: Synthetic oligonucleotide
gguagggguaaggcggcgg

SEQ ID NO: 2756314 - RNA, 19 nt, Artificial Sequence
  Description of Artificial Sequence: Synthetic oligonucleotide
gguuguaggcgggcgggcg

SEQ ID NO: 2756315 - RNA, 19 nt, Artificial Sequence
  Description of Artificial Sequence: Synthetic oligonucleotide
uucgacuguggaugcuaua

SEQ ID NO: 2756316 - RNA, 19 nt, Artificial Sequence
  Description of Artificial Sequence: Synthetic oligonucleotide
uccugcaacaggggcuugu

SEQ ID NO: 2756317 - RNA, 19 nt, Artificial Sequence
  Description of Artificial Sequence: Synthetic oligonucleotide
gauggccccguagccgugc

SEQ ID NO: 2756318 - RNA, 19 nt, Artificial Sequence
  Description of Artificial Sequence: Synthetic oligonucleotide
ggaaaaccggguguguguc

SEQ ID NO: 2756319 - RNA, 19 nt, Artificial Sequence
  Description of Artificial Sequence: Synthetic oligonucleotide
auggccccguagccgugcg

SEQ ID NO: 2756320 - RNA, 19 nt, Artificial Sequence
  Description of Artificial Sequence: Synthetic oligonucleotide
uggccggccuccagguugu

SEQ ID NO: 2756321 - RNA, 19 nt, Artificial Sequence
  Description of Artificial Sequence: Synthetic oligonucleotide
gcaacaggggcuugugguc

SEQ ID NO: 2756322 - RNA, 19 nt, Artificial Sequence
  Description of Artificial Sequence: Synthetic oligonucleotide
cacucguagucgcccuggc

SEQ ID NO: 2756323 - RNA, 19 nt, Artificial Sequence
  Description of Artificial Sequence: Synthetic oligonucleotide
uggcaggauaccgggugac

SEQ ID NO: 2756324 - RNA, 19 nt, Artificial Sequence
  Description of Artificial Sequence: Synthetic oligonucleotide
gugaggcgcgcgccgggcg

SEQ ID NO: 2756325 - RNA, 19 nt, Artificial Sequence
  Description of Artificial Sequence: Synthetic oligonucleotide
ggggauggccccguagccg

SEQ ID NO: 2756326 - RNA, 19 nt, Artificial Sequence
  Description of Artificial Sequence: Synthetic oligonucleotide
ccagguuguaggcgggcgg

SEQ ID NO: 2756327 - RNA, 19 nt, Artificial Sequence
  Description of Artificial Sequence: Synthetic oligonucleotide
uccggcccggcucgcuucc

SEQ ID NO: 2756328 - RNA, 19 nt, Artificial Sequence
  Description of Artificial Sequence: Synthetic oligonucleotide
ccugugacgagguaggggu

SEQ ID NO: 2756329 - RNA, 19 nt, Artificial Sequence
  Description of Artificial Sequence: Synthetic oligonucleotide
cgacgauggaguuggcagg

SEQ ID NO: 2756330 - RNA, 19 nt, Artificial Sequence
  Description of Artificial Sequence: Synthetic oligonucleotide
cucggcccagugaggcgcg

SEQ ID NO: 2756331 - RNA, 19 nt, Artificial Sequence
  Description of Artificial Sequence: Synthetic oligonucleotide
uggccccguagccgugcgg

SEQ ID NO: 2756332 - RNA, 19 nt, Artificial Sequence
  Description of Artificial Sequence: Synthetic oligonucleotide
ggccccguagccgugcggg

SEQ ID NO: 2756333 - RNA, 19 nt, Artificial Sequence
  Description of Artificial Sequence: Synthetic oligonucleotide
auaccgggugaccguucga

SEQ ID NO: 2756334 - RNA, 19 nt, Artificial Sequence
  Description of Artificial Sequence: Synthetic oligonucleotide
cugcuccacaguuggggca

SEQ ID NO: 2756335 - RNA, 19 nt, Artificial Sequence
  Description of Artificial Sequence: Synthetic oligonucleotide
agacugcuccacaguuggg

SEQ ID NO: 2756336 - RNA, 19 nt, Artificial Sequence
  Description of Artificial Sequence: Synthetic oligonucleotide
ccgggugaccguucgacug

SEQ ID NO: 2756337 - RNA, 19 nt, Artificial Sequence
  Description of Artificial Sequence: Synthetic oligonucleotide
ccucaaugcaaagcagcag

SEQ ID NO: 2756338 - RNA, 19 nt, Artificial Sequence
  Description of Artificial Sequence: Synthetic oligonucleotide
caccaacccugcagaccgg

SEQ ID NO: 2756339 - RNA, 19 nt, Artificial Sequence
  Description of Artificial Sequence: Synthetic oligonucleotide
ccacaguuggggcaucuuc

SEQ ID NO: 2756340 - RNA, 19 nt, Artificial Sequence
  Description of Artificial Sequence: Synthetic oligonucleotide
gggauccccugugacgagg

SEQ ID NO: 2756341 - RNA, 19 nt, Artificial Sequence
  Description of Artificial Sequence: Synthetic oligonucleotide
ggcaggugaagcaguacuc

SEQ ID NO: 2756342 - RNA, 19 nt, Artificial Sequence
  Description of Artificial Sequence: Synthetic oligonucleotide
caguacuccaggacaccaa

SEQ ID NO: 2756343 - RNA, 19 nt, Artificial Sequence
  Description of Artificial Sequence: Synthetic oligonucleotide
aguuggcaggauaccgggu

SEQ ID NO: 2756344 - RNA, 19 nt, Artificial Sequence
  Description of Artificial Sequence: Synthetic oligonucleotide
cagugaggcgcgcgccggg

SEQ ID NO: 2756345 - RNA, 19 nt, Artificial Sequence
  Description of Artificial Sequence: Synthetic oligonucleotide
cuccagguuguaggcgggc

SEQ ID NO: 2756346 - RNA, 19 nt, Artificial Sequence
  Description of Artificial Sequence: Synthetic oligonucleotide
ggcgcgguggggauggccc

SEQ ID NO: 2756347 - RNA, 19 nt, Artificial Sequence
  Description of Artificial Sequence: Synthetic oligonucleotide
caggcaggugaagcaguac

SEQ ID NO: 2756348 - RNA, 19 nt, Artificial Sequence
  Description of Artificial Sequence: Synthetic oligonucleotide
gggguaaggcggcggcggg

SEQ ID NO: 2756349 - RNA, 19 nt, Artificial Sequence
  Description of Artificial Sequence: Synthetic oligonucleotide
gcacucguagucgcccugg

SEQ ID NO: 2756350 - RNA, 19 nt, Artificial Sequence
  Description of Artificial Sequence: Synthetic oligonucleotide
ccuuuaacuaaagacugcu

SEQ ID NO: 2756351 - RNA, 19 nt, Artificial Sequence
  Description of Artificial Sequence: Synthetic oligonucleotide
ggacaccaacccugcagac

SEQ ID NO: 2756352 - RNA, 19 nt, Artificial Sequence
  Description of Artificial Sequence: Synthetic oligonucleotide
aggauaccgggugaccguu

SEQ ID NO: 2756353 - RNA, 19 nt, Artificial Sequence
  Description of Artificial Sequence: Synthetic oligonucleotide
aaccgggugugugucccuu

SEQ ID NO: 2756354 - RNA, 19 nt, Artificial Sequence
  Description of Artificial Sequence: Synthetic oligonucleotide
cacgacgauggaguuggca

SEQ ID NO: 2756355 - RNA, 19 nt, Artificial Sequence
  Description of Artificial Sequence: Synthetic oligonucleotide
gugugucccuuuaacuaaa

SEQ ID NO: 2756356 - RNA, 19 nt, Artificial Sequence
  Description of Artificial Sequence: Synthetic oligonucleotide
ugcgggccgcacucguagu

SEQ ID NO: 2756357 - RNA, 19 nt, Artificial Sequence
  Description of Artificial Sequence: Synthetic oligonucleotide
gcaguacuccaggacacca

SEQ ID NO: 2756358 - RNA, 19 nt, Artificial Sequence
  Description of Artificial Sequence: Synthetic oligonucleotide
guagucgcccuggccggcc

SEQ ID NO: 2756359 - RNA, 19 nt, Artificial Sequence
  Description of Artificial Sequence: Synthetic oligonucleotide
cuuuggcccggcggggaug

SEQ ID NO: 2756360 - RNA, 19 nt, Artificial Sequence
  Description of Artificial Sequence: Synthetic oligonucleotide
gcucggcccagugaggcgc

SEQ ID NO: 2756361 - RNA, 19 nt, Artificial Sequence
  Description of Artificial Sequence: Synthetic oligonucleotide
gcgcuccugcaacaggggc

SEQ ID NO: 2756362 - RNA, 19 nt, Artificial Sequence
  Description of Artificial Sequence: Synthetic oligonucleotide
ccgaccacgacgauggagu

SEQ ID NO: 2756363 - RNA, 19 nt, Artificial Sequence
  Description of Artificial Sequence: Synthetic oligonucleotide
ggccuccagguuguaggcg

SEQ ID NO: 2756364 - RNA, 19 nt, Artificial Sequence
  Description of Artificial Sequence: Synthetic oligonucleotide
caaaaggaaacaggacgau

SEQ ID NO: 2756365 - RNA, 19 nt, Artificial Sequence
  Description of Artificial Sequence: Synthetic oligonucleotide
agcuccggcggugucccga

SEQ ID NO: 2756366 - RNA, 19 nt, Artificial Sequence
  Description of Artificial Sequence: Synthetic oligonucleotide
ggcaggauaccgggugacc

SEQ ID NO: 2756367 - RNA, 19 nt, Artificial Sequence
  Description of Artificial Sequence: Synthetic oligonucleotide
uaggcgggcgggcgcuccu

SEQ ID NO: 2756368 - RNA, 19 nt, Artificial Sequence
  Description of Artificial Sequence: Synthetic oligonucleotide
gcccuggccggccuccagg

SEQ ID NO: 2756369 - RNA, 19 nt, Artificial Sequence
  Description of Artificial Sequence: Synthetic oligonucleotide
ggcgcuccugcaacagggg

SEQ ID NO: 2756370 - RNA, 19 nt, Artificial Sequence
  Description of Artificial Sequence: Synthetic oligonucleotide
cggugucccgagcagcucg

SEQ ID NO: 2756371 - RNA, 19 nt, Artificial Sequence
  Description of Artificial Sequence: Synthetic oligonucleotide
guaggaaaaccgggugugu

SEQ ID NO: 2756372 - RNA, 19 nt, Artificial Sequence
  Description of Artificial Sequence: Synthetic oligonucleotide
gaggcgcgcgccgggcggg

SEQ ID NO: 2756373 - RNA, 19 nt, Artificial Sequence
  Description of Artificial Sequence: Synthetic oligonucleotide
agcagcagaugaacccaaa

SEQ ID NO: 2756374 - RNA, 19 nt, Artificial Sequence
  Description of Artificial Sequence: Synthetic oligonucleotide
ggcccagugaggcgcgcgc

SEQ ID NO: 2756375 - RNA, 19 nt, Artificial Sequence
  Description of Artificial Sequence: Synthetic oligonucleotide
caggauaccgggugaccgu

SEQ ID NO: 2756376 - RNA, 19 nt, Artificial Sequence
  Description of Artificial Sequence: Synthetic oligonucleotide
cccguagccgugcgggccg

SEQ ID NO: 2756377 - RNA, 19 nt, Artificial Sequence
  Description of Artificial Sequence: Synthetic oligonucleotide
ggugaccguucgacugugg

SEQ ID NO: 2756378 - RNA, 19 nt, Artificial Sequence
  Description of Artificial Sequence: Synthetic oligonucleotide
gggccgcacucguagucgc

SEQ ID NO: 2756379 - RNA, 19 nt, Artificial Sequence
  Description of Artificial Sequence: Synthetic oligonucleotide
ggguaaggcggcggcgggg

SEQ ID NO: 2756380 - RNA, 19 nt, Artificial Sequence
  Description of Artificial Sequence: Synthetic oligonucleotide
gccgcacucguagucgccc

SEQ ID NO: 2756381 - RNA, 19 nt, Artificial Sequence
  Description of Artificial Sequence: Synthetic oligonucleotide
ggggauggcggcgggagca

SEQ ID NO: 2756382 - RNA, 19 nt, Artificial Sequence
  Description of Artificial Sequence: Synthetic oligonucleotide
ccaacccugcagaccgggc

SEQ ID NO: 2756383 - RNA, 19 nt, Artificial Sequence
  Description of Artificial Sequence: Synthetic oligonucleotide
cuccggcccggcucgcuuc

SEQ ID NO: 2756384 - RNA, 19 nt, Artificial Sequence
  Description of Artificial Sequence: Synthetic oligonucleotide
guaggcgggcgggcgcucc

SEQ ID NO: 2756385 - RNA, 19 nt, Artificial Sequence
  Description of Artificial Sequence: Synthetic oligonucleotide
gggauggccccguagccgu

SEQ ID NO: 2756386 - RNA, 19 nt, Artificial Sequence
  Description of Artificial Sequence: Synthetic oligonucleotide
cccggcucgcuuccuuugg

SEQ ID NO: 2756387 - RNA, 19 nt, Artificial Sequence
  Description of Artificial Sequence: Synthetic oligonucleotide
accgggugugugucccuuu

SEQ ID NO: 2756388 - RNA, 19 nt, Artificial Sequence
  Description of Artificial Sequence: Synthetic oligonucleotide
gcgcccgccagcuccggcc

SEQ ID NO: 2756389 - RNA, 19 nt, Artificial Sequence
  Description of Artificial Sequence: Synthetic oligonucleotide
gucgcccuggccggccucc

SEQ ID NO: 2756390 - RNA, 19 nt, Artificial Sequence
  Description of Artificial Sequence: Synthetic oligonucleotide
cugugacgagguaggggua

SEQ ID NO: 2756391 - RNA, 19 nt, Artificial Sequence
  Description of Artificial Sequence: Synthetic oligonucleotide
gcuccggcggugucccgag

SEQ ID NO: 2756392 - RNA, 19 nt, Artificial Sequence
  Description of Artificial Sequence: Synthetic oligonucleotide
ggggauccccugugacgag

SEQ ID NO: 2756393 - RNA, 19 nt, Artificial Sequence
  Description of Artificial Sequence: Synthetic oligonucleotide
cgauggccaagaagaugcc

SEQ ID NO: 2756394 - RNA, 19 nt, Artificial Sequence
  Description of Artificial Sequence: Synthetic oligonucleotide
acgauggaguuggcaggau

SEQ ID NO: 2756395 - RNA, 19 nt, Artificial Sequence
  Description of Artificial Sequence: Synthetic oligonucleotide
ccagugaggcgcgcgccgg

SEQ ID NO: 2756396 - RNA, 19 nt, Artificial Sequence
  Description of Artificial Sequence: Synthetic oligonucleotide
caguuggggcaucuucgcu

SEQ ID NO: 2756397 - RNA, 19 nt, Artificial Sequence
  Description of Artificial Sequence: Synthetic oligonucleotide
gggugaccguucgacugug

SEQ ID NO: 2756398 - RNA, 19 nt, Artificial Sequence
  Description of Artificial Sequence: Synthetic oligonucleotide
guucgacuguggaugcuau

SEQ ID NO: 2756399 - RNA, 19 nt, Artificial Sequence
  Description of Artificial Sequence: Synthetic oligonucleotide
caggggcuugugguccaug

SEQ ID NO: 2756400 - RNA, 19 nt, Artificial Sequence
  Description of Artificial Sequence: Synthetic oligonucleotide
cggcucgcuuccuuuggcc

SEQ ID NO: 2756401 - RNA, 19 nt, Artificial Sequence
  Description of Artificial Sequence: Synthetic oligonucleotide
uguaggcgggcgggcgcuc

SEQ ID NO: 2756402 - RNA, 19 nt, Artificial Sequence
  Description of Artificial Sequence: Synthetic oligonucleotide
gugucccgagcagcucggc

SEQ ID NO: 2756403 - RNA, 19 nt, Artificial Sequence
  Description of Artificial Sequence: Synthetic oligonucleotide
gcccggcucgcuuccuuug

SEQ ID NO: 2756404 - RNA, 19 nt, Artificial Sequence
  Description of Artificial Sequence: Synthetic oligonucleotide
gggauggcggcgggagcag

SEQ ID NO: 2756405 - RNA, 19 nt, Artificial Sequence
  Description of Artificial Sequence: Synthetic oligonucleotide
gcagaccgggcagccuccg

SEQ ID NO: 2756406 - RNA, 19 nt, Artificial Sequence
  Description of Artificial Sequence: Synthetic oligonucleotide
cuccggcggugucccgagc

SEQ ID NO: 2756407 - RNA, 19 nt, Artificial Sequence
  Description of Artificial Sequence: Synthetic oligonucleotide
ggggccgcgcgcccgccag

SEQ ID NO: 2756408 - RNA, 19 nt, Artificial Sequence
  Description of Artificial Sequence: Synthetic oligonucleotide
gcaucuucgcuuccucaau

SEQ ID NO: 2756409 - RNA, 19 nt, Artificial Sequence
  Description of Artificial Sequence: Synthetic oligonucleotide
gcgggccgcacucguaguc

SEQ ID NO: 2756410 - RNA, 19 nt, Artificial Sequence
  Description of Artificial Sequence: Synthetic oligonucleotide
ucgcuuccuuuggcccggc

SEQ ID NO: 2756411 - RNA, 19 nt, Artificial Sequence
  Description of Artificial Sequence: Synthetic oligonucleotide
ggcagccuccgaccacgac

SEQ ID NO: 2756412 - RNA, 19 nt, Artificial Sequence
  Description of Artificial Sequence: Synthetic oligonucleotide
ggauaccgggugaccguuc

SEQ ID NO: 2756413 - RNA, 19 nt, Artificial Sequence
  Description of Artificial Sequence: Synthetic oligonucleotide
cgggccgcacucguagucg

SEQ ID NO: 2756414 - RNA, 19 nt, Artificial Sequence
  Description of Artificial Sequence: Synthetic oligonucleotide
gcgcgguggggauggcccc

SEQ ID NO: 2756415 - RNA, 19 nt, Artificial Sequence
  Description of Artificial Sequence: Synthetic oligonucleotide
cagcuccggcggugucccg

SEQ ID NO: 2756416 - RNA, 19 nt, Artificial Sequence
  Description of Artificial Sequence: Synthetic oligonucleotide
ccccguagccgugcgggcc

SEQ ID NO: 2756417 - RNA, 19 nt, Artificial Sequence
  Description of Artificial Sequence: Synthetic oligonucleotide
acaggggcuugugguccau

SEQ ID NO: 2756418 - RNA, 19 nt, Artificial Sequence
  Description of Artificial Sequence: Synthetic oligonucleotide
cgacuguggaugcuauaga

SEQ ID NO: 2756419 - RNA, 19 nt, Artificial Sequence
  Description of Artificial Sequence: Synthetic oligonucleotide
ggcgggcgggcgcuccugc

SEQ ID NO: 2756420 - RNA, 19 nt, Artificial Sequence
  Description of Artificial Sequence: Synthetic oligonucleotide
gcgggcgcuccugcaacag

SEQ ID NO: 2756421 - RNA, 19 nt, Artificial Sequence
  Description of Artificial Sequence: Synthetic oligonucleotide
cagaccgggcagccuccga

SEQ ID NO: 2756422 - RNA, 19 nt, Artificial Sequence
  Description of Artificial Sequence: Synthetic oligonucleotide
cuccugcaacaggggcuug

SEQ ID NO: 2756423 - RNA, 19 nt, Artificial Sequence
  Description of Artificial Sequence: Synthetic oligonucleotide
gcccagugaggcgcgcgcc

SEQ ID NO: 2756424 - RNA, 19 nt, Artificial Sequence
  Description of Artificial Sequence: Synthetic oligonucleotide
ccccugugacgagguaggg

SEQ ID NO: 2756425 - RNA, 19 nt, Artificial Sequence
  Description of Artificial Sequence: Synthetic oligonucleotide
gccccguagccgugcgggc

SEQ ID NO: 2756426 - RNA, 19 nt, Artificial Sequence
  Description of Artificial Sequence: Synthetic oligonucleotide
cccugcagaccgggcagcc

SEQ ID NO: 2756427 - RNA, 19 nt, Artificial Sequence
  Description of Artificial Sequence: Synthetic oligonucleotide
ggccgcacucguagucgcc

SEQ ID NO: 2756428 - RNA, 19 nt, Artificial Sequence
  Description of Artificial Sequence: Synthetic oligonucleotide
cgggcgcuccugcaacagg

SEQ ID NO: 2756429 - RNA, 19 nt, Artificial Sequence
  Description of Artificial Sequence: Synthetic oligonucleotide
gcgcgcgccgggcggggcg

SEQ ID NO: 2756430 - RNA, 19 nt, Artificial Sequence
  Description of Artificial Sequence: Synthetic oligonucleotide
agccuccgaccacgacgau

SEQ ID NO: 2756431 - RNA, 19 nt, Artificial Sequence
  Description of Artificial Sequence: Synthetic oligonucleotide
gccgugcgggccgcacucg

SEQ ID NO: 2756432 - RNA, 19 nt, Artificial Sequence
  Description of Artificial Sequence: Synthetic oligonucleotide
ggauggccccguagccgug

SEQ ID NO: 2756433 - RNA, 19 nt, Artificial Sequence
  Description of Artificial Sequence: Synthetic oligonucleotide
gggcgcgguggggauggcc

SEQ ID NO: 2756434 - RNA, 19 nt, Artificial Sequence
  Description of Artificial Sequence: Synthetic oligonucleotide
cgauggaguuggcaggaua

SEQ ID NO: 2756435 - RNA, 19 nt, Artificial Sequence
  Description of Artificial Sequence: Synthetic oligonucleotide
cuccgaccacgacgaugga

SEQ ID NO: 2756436 - RNA, 19 nt, Artificial Sequence
  Description of Artificial Sequence: Synthetic oligonucleotide
cgcacucguagucgcccug

SEQ ID NO: 2756437 - RNA, 19 nt, Artificial Sequence
  Description of Artificial Sequence: Synthetic oligonucleotide
ccacgacgauggaguuggc

SEQ ID NO: 2756438 - RNA, 19 nt, Artificial Sequence
  Description of Artificial Sequence: Synthetic oligonucleotide
ccaggacaccaacccugca

SEQ ID NO: 2756439 - RNA, 19 nt, Artificial Sequence
  Description of Artificial Sequence: Synthetic oligonucleotide
cguucgacuguggaugcua

SEQ ID NO: 2756440 - RNA, 19 nt, Artificial Sequence
  Description of Artificial Sequence: Synthetic oligonucleotide
ccgggugugugucccuuua

SEQ ID NO: 2756441 - RNA, 19 nt, Artificial Sequence
  Description of Artificial Sequence: Synthetic oligonucleotide
cgcgguggggauggccccg

SEQ ID NO: 2756442 - RNA, 19 nt, Artificial Sequence
  Description of Artificial Sequence: Synthetic oligonucleotide
cggcggugucccgagcagc

SEQ ID NO: 2756443 - RNA, 19 nt, Artificial Sequence
  Description of Artificial Sequence: Synthetic oligonucleotide
gcggugucccgagcagcuc

SEQ ID NO: 2756444 - RNA, 19 nt, Artificial Sequence
  Description of Artificial Sequence: Synthetic oligonucleotide
gggccgcgcgcccgccagc

SEQ ID NO: 2756445 - RNA, 19 nt, Artificial Sequence
  Description of Artificial Sequence: Synthetic oligonucleotide
gcuccacaguuggggcauc

SEQ ID NO: 2756446 - RNA, 19 nt, Artificial Sequence
  Description of Artificial Sequence: Synthetic oligonucleotide
cggcccagugaggcgcgcg

SEQ ID NO: 2756447 - RNA, 19 nt, Artificial Sequence
  Description of Artificial Sequence: Synthetic oligonucleotide
cggcgggagcagcuccggc

SEQ ID NO: 2756448 - RNA, 19 nt, Artificial Sequence
  Description of Artificial Sequence: Synthetic oligonucleotide
ggcccggcucgcuuccuuu

SEQ ID NO: 2756449 - RNA, 19 nt, Artificial Sequence
  Description of Artificial Sequence: Synthetic oligonucleotide
cccuggccggccuccaggu

SEQ ID NO: 2756450 - RNA, 19 nt, Artificial Sequence
  Description of Artificial Sequence: Synthetic oligonucleotide
cgggugaccguucgacugu

SEQ ID NO: 2756451 - RNA, 19 nt, Artificial Sequence
  Description of Artificial Sequence: Synthetic oligonucleotide
gggcagccuccgaccacga

SEQ ID NO: 2756452 - RNA, 19 nt, Artificial Sequence
  Description of Artificial Sequence: Synthetic oligonucleotide
cgggugugugucccuuuaa

SEQ ID NO: 2756453 - RNA, 19 nt, Artificial Sequence
  Description of Artificial Sequence: Synthetic oligonucleotide
ccgcacucguagucgcccu

SEQ ID NO: 2756454 - RNA, 19 nt, Artificial Sequence
  Description of Artificial Sequence: Synthetic oligonucleotide
cgcgcccgccagcuccggc

SEQ ID NO: 2756455 - RNA, 19 nt, Artificial Sequence
  Description of Artificial Sequence: Synthetic oligonucleotide
ccuuuggcccggcggggau

SEQ ID NO: 2756456 - RNA, 19 nt, Artificial Sequence
  Description of Artificial Sequence: Synthetic oligonucleotide
cgugcgggccgcacucgua

SEQ ID NO: 2756457 - RNA, 19 nt, Artificial Sequence
  Description of Artificial Sequence: Synthetic oligonucleotide
ccugcagaccgggcagccu

SEQ ID NO: 2756458 - RNA, 19 nt, Artificial Sequence
  Description of Artificial Sequence: Synthetic oligonucleotide
ggggcgcgguggggauggc

SEQ ID NO: 2756459 - RNA, 19 nt, Artificial Sequence
  Description of Artificial Sequence: Synthetic oligonucleotide
gcgguggggauggccccgu

SEQ ID NO: 2756460 - RNA, 19 nt, Artificial Sequence
  Description of Artificial Sequence: Synthetic oligonucleotide
cgaccacgacgauggaguu

SEQ ID NO: 2756461 - RNA, 19 nt, Artificial Sequence
  Description of Artificial Sequence: Synthetic oligonucleotide
ccgugcgggccgcacucgu

SEQ ID NO: 2756462 - RNA, 19 nt, Artificial Sequence
  Description of Artificial Sequence: Synthetic oligonucleotide
ccguucgacuguggaugcu

SEQ ID NO: 2756463 - RNA, 19 nt, Artificial Sequence
  Description of Artificial Sequence: Synthetic oligonucleotide
ccuggccggccuccagguu

SEQ ID NO: 2756464 - RNA, 19 nt, Artificial Sequence
  Description of Artificial Sequence: Synthetic oligonucleotide
cggggccgcgcgcccgcca

SEQ ID NO: 2756465 - RNA, 19 nt, Artificial Sequence
  Description of Artificial Sequence: Synthetic oligonucleotide
ccggcccggcucgcuuccu

SEQ ID NO: 2756466 - RNA, 19 nt, Artificial Sequence
  Description of Artificial Sequence: Synthetic oligonucleotide
ugaacugcaacuuugaggc

SEQ ID NO: 2756467 - RNA, 19 nt, Artificial Sequence
  Description of Artificial Sequence: Synthetic oligonucleotide
uuugaauugaauaaauaca

SEQ ID NO: 2756468 - RNA, 19 nt, Artificial Sequence
  Description of Artificial Sequence: Synthetic oligonucleotide
aauacaaagcugucucugc

SEQ ID NO: 2756469 - RNA, 19 nt, Artificial Sequence
  Description of Artificial Sequence: Synthetic oligonucleotide
uuuuauagaagcacugucc

SEQ ID NO: 2756470 - RNA, 19 nt, Artificial Sequence
  Description of Artificial Sequence: Synthetic oligonucleotide
agucuuguuauauuccucc

SEQ ID NO: 2756471 - RNA, 19 nt, Artificial Sequence
  Description of Artificial Sequence: Synthetic oligonucleotide
uugaauugaauaaauacaa

SEQ ID NO: 2756472 - RNA, 19 nt, Artificial Sequence
  Description of Artificial Sequence: Synthetic oligonucleotide
uuauauuccuccaggagag

SEQ ID NO: 2756473 - RNA, 19 nt, Artificial Sequence
  Description of Artificial Sequence: Synthetic oligonucleotide
uguuccucugcuaagauga

SEQ ID NO: 2756474 - RNA, 19 nt, Artificial Sequence
  Description of Artificial Sequence: Synthetic oligonucleotide
aucgauauauucaggaucc

SEQ ID NO: 2756475 - RNA, 19 nt, Artificial Sequence
  Description of Artificial Sequence: Synthetic oligonucleotide
ugucauuggaauaaauaca

SEQ ID NO: 2756476 - RNA, 19 nt, Artificial Sequence
  Description of Artificial Sequence: Synthetic oligonucleotide
cuuguuauauuccuccagg

SEQ ID NO: 2756477 - RNA, 19 nt, Artificial Sequence
  Description of Artificial Sequence: Synthetic oligonucleotide
acugucauucuucugcugg

SEQ ID NO: 2756478 - RNA, 19 nt, Artificial Sequence
  Description of Artificial Sequence: Synthetic oligonucleotide
uuuauugucauuggaauaa

SEQ ID NO: 2756479 - RNA, 19 nt, Artificial Sequence
  Description of Artificial Sequence: Synthetic oligonucleotide
auauucaggauccagguau

SEQ ID NO: 2756480 - RNA, 19 nt, Artificial Sequence
  Description of Artificial Sequence: Synthetic oligonucleotide
uccacuuguugcaagagug

SEQ ID NO: 2756481 - RNA, 19 nt, Artificial Sequence
  Description of Artificial Sequence: Synthetic oligonucleotide
uguagucuuguuauauucc

SEQ ID NO: 2756482 - RNA, 19 nt, Artificial Sequence
  Description of Artificial Sequence: Synthetic oligonucleotide
acagcuuuuauagaagcac

SEQ ID NO: 2756483 - RNA, 19 nt, Artificial Sequence
  Description of Artificial Sequence: Synthetic oligonucleotide
aaugcgaucgauauauuca

SEQ ID NO: 2756484 - RNA, 19 nt, Artificial Sequence
  Description of Artificial Sequence: Synthetic oligonucleotide
aaaggaugaacuguuccuc

SEQ ID NO: 2756485 - RNA, 19 nt, Artificial Sequence
  Description of Artificial Sequence: Synthetic oligonucleotide
aauacacugaugggagugc

SEQ ID NO: 2756486 - RNA, 19 nt, Artificial Sequence
  Description of Artificial Sequence: Synthetic oligonucleotide
ugaggcaucagguauggca

SEQ ID NO: 2756487 - RNA, 19 nt, Artificial Sequence
  Description of Artificial Sequence: Synthetic oligonucleotide
ucagguauggcaaugcgau

SEQ ID NO: 2756488 - RNA, 19 nt, Artificial Sequence
  Description of Artificial Sequence: Synthetic oligonucleotide
guuauauuccuccaggaga

SEQ ID NO: 2756489 - RNA, 19 nt, Artificial Sequence
  Description of Artificial Sequence: Synthetic oligonucleotide
auaaauacacugaugggag

SEQ ID NO: 2756490 - RNA, 19 nt, Artificial Sequence
  Description of Artificial Sequence: Synthetic oligonucleotide
auauauucaggauccaggu

SEQ ID NO: 2756491 - RNA, 19 nt, Artificial Sequence
  Description of Artificial Sequence: Synthetic oligonucleotide
aaauacacugaugggagug

SEQ ID NO: 2756492 - RNA, 19 nt, Artificial Sequence
  Description of Artificial Sequence: Synthetic oligonucleotide
caaggcauccacuuguugc

SEQ ID NO: 2756493 - RNA, 19 nt, Artificial Sequence
  Description of Artificial Sequence: Synthetic oligonucleotide
aguuuauugucauuggaau

SEQ ID NO: 2756494 - RNA, 19 nt, Artificial Sequence
  Description of Artificial Sequence: Synthetic oligonucleotide
caacugagcagacagguag

SEQ ID NO: 2756495 - RNA, 19 nt, Artificial Sequence
  Description of Artificial Sequence: Synthetic oligonucleotide
aaaucaugacucuaaggua

SEQ ID NO: 2756496 - RNA, 19 nt, Artificial Sequence
  Description of Artificial Sequence: Synthetic oligonucleotide
agcauuguagucuuguuau

SEQ ID NO: 2756497 - RNA, 19 nt, Artificial Sequence
  Description of Artificial Sequence: Synthetic oligonucleotide
cuggauguggaucugggcc

SEQ ID NO: 2756498 - RNA, 19 nt, Artificial Sequence
  Description of Artificial Sequence: Synthetic oligonucleotide
agguauggcaaugcgaucg

SEQ ID NO: 2756499 - RNA, 19 nt, Artificial Sequence
  Description of Artificial Sequence: Synthetic oligonucleotide
ugcaaaucaugacucuaag

SEQ ID NO: 2756500 - RNA, 19 nt, Artificial Sequence
  Description of Artificial Sequence: Synthetic oligonucleotide
ugaauugaauaaauacaaa

SEQ ID NO: 2756501 - RNA, 19 nt, Artificial Sequence
  Description of Artificial Sequence: Synthetic oligonucleotide
aguaguucaucccacugca

SEQ ID NO: 2756502 - RNA, 19 nt, Artificial Sequence
  Description of Artificial Sequence: Synthetic oligonucleotide
caaaucaugacucuaaggu

SEQ ID NO: 2756503 - RNA, 19 nt, Artificial Sequence
  Description of Artificial Sequence: Synthetic oligonucleotide
cauacacugguccugcugc

SEQ ID NO: 2756504 - RNA, 19 nt, Artificial Sequence
  Description of Artificial Sequence: Synthetic oligonucleotide
aaggcauccacuuguugca

SEQ ID NO: 2756505 - RNA, 19 nt, Artificial Sequence
  Description of Artificial Sequence: Synthetic oligonucleotide
uaagguaaccugaucucug

SEQ ID NO: 2756506 - RNA, 19 nt, Artificial Sequence
  Description of Artificial Sequence: Synthetic oligonucleotide
aggaacagcuuuuauagaa

SEQ ID NO: 2756507 - RNA, 19 nt, Artificial Sequence
  Description of Artificial Sequence: Synthetic oligonucleotide
cuuuuauagaagcacuguc

SEQ ID NO: 2756508 - RNA, 19 nt, Artificial Sequence
  Description of Artificial Sequence: Synthetic oligonucleotide
uuguagucuuguuauauuc

SEQ ID NO: 2756509 - RNA, 19 nt, Artificial Sequence
  Description of Artificial Sequence: Synthetic oligonucleotide
aagaugaacugcaacuuug

SEQ ID NO: 2756510 - RNA, 19 nt, Artificial Sequence
  Description of Artificial Sequence: Synthetic oligonucleotide
ugaucucugaccucagagc

SEQ ID NO: 2756511 - RNA, 19 nt, Artificial Sequence
  Description of Artificial Sequence: Synthetic oligonucleotide
uguggaucugggccaagcg

SEQ ID NO: 2756512 - RNA, 19 nt, Artificial Sequence
  Description of Artificial Sequence: Synthetic oligonucleotide
gcaacuuugaggcaucagg

SEQ ID NO: 2756513 - RNA, 19 nt, Artificial Sequence
  Description of Artificial Sequence: Synthetic oligonucleotide
ucuuugaauugaauaaaua

SEQ ID NO: 2756514 - RNA, 19 nt, Artificial Sequence
  Description of Artificial Sequence: Synthetic oligonucleotide
augcgaucgauauauucag

SEQ ID NO: 2756515 - RNA, 19 nt, Artificial Sequence
  Description of Artificial Sequence: Synthetic oligonucleotide
gaucuccauacacuggucc

SEQ ID NO: 2756516 - RNA, 19 nt, Artificial Sequence
  Description of Artificial Sequence: Synthetic oligonucleotide
aaagcugucucugccucac

SEQ ID NO: 2756517 - RNA, 19 nt, Artificial Sequence
  Description of Artificial Sequence: Synthetic oligonucleotide
gcaacugucauucuucugc

SEQ ID NO: 2756518 - RNA, 19 nt, Artificial Sequence
  Description of Artificial Sequence: Synthetic oligonucleotide
agcccaacugagcagacag

SEQ ID NO: 2756519 - RNA, 19 nt, Artificial Sequence
  Description of Artificial Sequence: Synthetic oligonucleotide
gaguaguucaucccacugc

SEQ ID NO: 2756520 - RNA, 19 nt, Artificial Sequence
  Description of Artificial Sequence: Synthetic oligonucleotide
auuggaauaaauacacuga

SEQ ID NO: 2756521 - RNA, 19 nt, Artificial Sequence
  Description of Artificial Sequence: Synthetic oligonucleotide
ucuaagguaaccugaucuc

SEQ ID NO: 2756522 - RNA, 19 nt, Artificial Sequence
  Description of Artificial Sequence: Synthetic oligonucleotide
uuauagaagcacuguccag

SEQ ID NO: 2756523 - RNA, 19 nt, Artificial Sequence
  Description of Artificial Sequence: Synthetic oligonucleotide
aaggaugaacuguuccucu

SEQ ID NO: 2756524 - RNA, 19 nt, Artificial Sequence
  Description of Artificial Sequence: Synthetic oligonucleotide
uggagagaagcauuguagu

SEQ ID NO: 2756525 - RNA, 19 nt, Artificial Sequence
  Description of Artificial Sequence: Synthetic oligonucleotide
gaauugcuuggagagaagc

SEQ ID NO: 2756526 - RNA, 19 nt, Artificial Sequence
  Description of Artificial Sequence: Synthetic oligonucleotide
ucacugaucuccauacacu

SEQ ID NO: 2756527 - RNA, 19 nt, Artificial Sequence
  Description of Artificial Sequence: Synthetic oligonucleotide
ugcacgaauugcuuggaga

SEQ ID NO: 2756528 - RNA, 19 nt, Artificial Sequence
  Description of Artificial Sequence: Synthetic oligonucleotide
uuugaggcaucagguaugg

SEQ ID NO: 2756529 - RNA, 19 nt, Artificial Sequence
  Description of Artificial Sequence: Synthetic oligonucleotide
uggaucugggccaagcgcu

SEQ ID NO: 2756530 - RNA, 19 nt, Artificial Sequence
  Description of Artificial Sequence: Synthetic oligonucleotide
guagucuuugaauugaaua

SEQ ID NO: 2756531 - RNA, 19 nt, Artificial Sequence
  Description of Artificial Sequence: Synthetic oligonucleotide
cugaucucugaccucagag

SEQ ID NO: 2756532 - RNA, 19 nt, Artificial Sequence
  Description of Artificial Sequence: Synthetic oligonucleotide
acuuugaggcaucagguau

SEQ ID NO: 2756533 - RNA, 19 nt, Artificial Sequence
  Description of Artificial Sequence: Synthetic oligonucleotide
aagcauuguagucuuguua

SEQ ID NO: 2756534 - RNA, 19 nt, Artificial Sequence
  Description of Artificial Sequence: Synthetic oligonucleotide
cucacugaucuccauacac

SEQ ID NO: 2756535 - RNA, 19 nt, Artificial Sequence
  Description of Artificial Sequence: Synthetic oligonucleotide
acagguagucuuugaauug

SEQ ID NO: 2756536 - RNA, 19 nt, Artificial Sequence
  Description of Artificial Sequence: Synthetic oligonucleotide
auggcaaugcgaucgauau

SEQ ID NO: 2756537 - RNA, 19 nt, Artificial Sequence
  Description of Artificial Sequence: Synthetic oligonucleotide
aagguaaccugaucucuga

SEQ ID NO: 2756538 - RNA, 19 nt, Artificial Sequence
  Description of Artificial Sequence: Synthetic oligonucleotide
ugcuaagaugaacugcaac

SEQ ID NO: 2756539 - RNA, 19 nt, Artificial Sequence
  Description of Artificial Sequence: Synthetic oligonucleotide
ugcgaucgauauauucagg

SEQ ID NO: 2756540 - RNA, 19 nt, Artificial Sequence
  Description of Artificial Sequence: Synthetic oligonucleotide
ugagcagacagguagucuu

SEQ ID NO: 2756541 - RNA, 19 nt, Artificial Sequence
  Description of Artificial Sequence: Synthetic oligonucleotide
cacugcacgaauugcuugg

SEQ ID NO: 2756542 - RNA, 19 nt, Artificial Sequence
  Description of Artificial Sequence: Synthetic oligonucleotide
guugcaagagugcugccug

SEQ ID NO: 2756543 - RNA, 19 nt, Artificial Sequence
  Description of Artificial Sequence: Synthetic oligonucleotide
gaagcacuguccagcaugg

SEQ ID NO: 2756544 - RNA, 19 nt, Artificial Sequence
  Description of Artificial Sequence: Synthetic oligonucleotide
ggauccagguauuugauca

SEQ ID NO: 2756545 - RNA, 19 nt, Artificial Sequence
  Description of Artificial Sequence: Synthetic oligonucleotide
caguaagcaacugucauuc

SEQ ID NO: 2756546 - RNA, 19 nt, Artificial Sequence
  Description of Artificial Sequence: Synthetic oligonucleotide
cugucucugccucacaaag

SEQ ID NO: 2756547 - RNA, 19 nt, Artificial Sequence
  Description of Artificial Sequence: Synthetic oligonucleotide
ggaaaggaugaacuguucc

SEQ ID NO: 2756548 - RNA, 19 nt, Artificial Sequence
  Description of Artificial Sequence: Synthetic oligonucleotide
cacugaucuccauacacug

SEQ ID NO: 2756549 - RNA, 19 nt, Artificial Sequence
  Description of Artificial Sequence: Synthetic oligonucleotide
aauugcuuggagagaagca

SEQ ID NO: 2756550 - RNA, 19 nt, Artificial Sequence
  Description of Artificial Sequence: Synthetic oligonucleotide
cucacaaagacaggguggc

SEQ ID NO: 2756551 - RNA, 19 nt, Artificial Sequence
  Description of Artificial Sequence: Synthetic oligonucleotide
caaugcgaucgauauauuc

SEQ ID NO: 2756552 - RNA, 19 nt, Artificial Sequence
  Description of Artificial Sequence: Synthetic oligonucleotide
uggauguggaucugggcca

SEQ ID NO: 2756553 - RNA, 19 nt, Artificial Sequence
  Description of Artificial Sequence: Synthetic oligonucleotide
aagagugcugccugggaaa

SEQ ID NO: 2756554 - RNA, 19 nt, Artificial Sequence
  Description of Artificial Sequence: Synthetic oligonucleotide
uucugcuggcuucacuugc

SEQ ID NO: 2756555 - RNA, 19 nt, Artificial Sequence
  Description of Artificial Sequence: Synthetic oligonucleotide
gaaaggaugaacuguuccu

SEQ ID NO: 2756556 - RNA, 19 nt, Artificial Sequence
  Description of Artificial Sequence: Synthetic oligonucleotide
gaugggagugcaaaucaug

SEQ ID NO: 2756557 - RNA, 19 nt, Artificial Sequence
  Description of Artificial Sequence: Synthetic oligonucleotide
gcaaaucaugacucuaagg

SEQ ID NO: 2756558 - RNA, 19 nt, Artificial Sequence
  Description of Artificial Sequence: Synthetic oligonucleotide
ugaccucagagcccaacug

SEQ ID NO: 2756559 - RNA, 19 nt, Artificial Sequence
  Description of Artificial Sequence: Synthetic oligonucleotide
aguucaucccacugcacga

SEQ ID NO: 2756560 - RNA, 19 nt, Artificial Sequence
  Description of Artificial Sequence: Synthetic oligonucleotide
ugggaaaggaugaacuguu

SEQ ID NO: 2756561 - RNA, 19 nt, Artificial Sequence
  Description of Artificial Sequence: Synthetic oligonucleotide
aacugcaacuuugaggcau

SEQ ID NO: 2756562 - RNA, 19 nt, Artificial Sequence
  Description of Artificial Sequence: Synthetic oligonucleotide
aggauccagguauuugauc

SEQ ID NO: 2756563 - RNA, 19 nt, Artificial Sequence
  Description of Artificial Sequence: Synthetic oligonucleotide
uauauucaggauccaggua

SEQ ID NO: 2756564 - RNA, 19 nt, Artificial Sequence
  Description of Artificial Sequence: Synthetic oligonucleotide
aaagacaggguggcacagg

SEQ ID NO: 2756565 - RNA, 19 nt, Artificial Sequence
  Description of Artificial Sequence: Synthetic oligonucleotide
uacaaagcugucucugccu

SEQ ID NO: 2756566 - RNA, 19 nt, Artificial Sequence
  Description of Artificial Sequence: Synthetic oligonucleotide
aacagcuuuuauagaagca

SEQ ID NO: 2756567 - RNA, 19 nt, Artificial Sequence
  Description of Artificial Sequence: Synthetic oligonucleotide
uauggcaaugcgaucgaua

SEQ ID NO: 2756568 - RNA, 19 nt, Artificial Sequence
  Description of Artificial Sequence: Synthetic oligonucleotide
uauuccuccaggagagccu

SEQ ID NO: 2756569 - RNA, 19 nt, Artificial Sequence
  Description of Artificial Sequence: Synthetic oligonucleotide
uaaauacacugaugggagu

SEQ ID NO: 2756570 - RNA, 19 nt, Artificial Sequence
  Description of Artificial Sequence: Synthetic oligonucleotide
acaaagacaggguggcaca

SEQ ID NO: 2756571 - RNA, 19 nt, Artificial Sequence
  Description of Artificial Sequence: Synthetic oligonucleotide
uccagguauuugaucaggu

SEQ ID NO: 2756572 - RNA, 19 nt, Artificial Sequence
  Description of Artificial Sequence: Synthetic oligonucleotide
acucuaagguaaccugauc

SEQ ID NO: 2756573 - RNA, 19 nt, Artificial Sequence
  Description of Artificial Sequence: Synthetic oligonucleotide
ugcugccugggaaaggaug

SEQ ID NO: 2756574 - RNA, 19 nt, Artificial Sequence
  Description of Artificial Sequence: Synthetic oligonucleotide
caucagguauggcaaugcg

SEQ ID NO: 2756575 - RNA, 19 nt, Artificial Sequence
  Description of Artificial Sequence: Synthetic oligonucleotide
agacagguagucuuugaau

SEQ ID NO: 2756576 - RNA, 19 nt, Artificial Sequence
  Description of Artificial Sequence: Synthetic oligonucleotide
agguaaccugaucucugac

SEQ ID NO: 2756577 - RNA, 19 nt, Artificial Sequence
  Description of Artificial Sequence: Synthetic oligonucleotide
agaagcauuguagucuugu

SEQ ID NO: 2756578 - RNA, 19 nt, Artificial Sequence
  Description of Artificial Sequence: Synthetic oligonucleotide
uagcuggcagaguaguuca

SEQ ID NO: 2756579 - RNA, 19 nt, Artificial Sequence
  Description of Artificial Sequence: Synthetic oligonucleotide
auugcuuggagagaagcau

SEQ ID NO: 2756580 - RNA, 19 nt, Artificial Sequence
  Description of Artificial Sequence: Synthetic oligonucleotide
cugccucacaaagacaggg

SEQ ID NO: 2756581 - RNA, 19 nt, Artificial Sequence
  Description of Artificial Sequence: Synthetic oligonucleotide
ucagagcccaacugagcag

SEQ ID NO: 2756582 - RNA, 19 nt, Artificial Sequence
  Description of Artificial Sequence: Synthetic oligonucleotide
guaaccugaucucugaccu

SEQ ID NO: 2756583 - RNA, 19 nt, Artificial Sequence
  Description of Artificial Sequence: Synthetic oligonucleotide
gguaaccugaucucugacc

SEQ ID NO: 2756584 - RNA, 19 nt, Artificial Sequence
  Description of Artificial Sequence: Synthetic oligonucleotide
auuguagucuuguuauauu

SEQ ID NO: 2756585 - RNA, 19 nt, Artificial Sequence
  Description of Artificial Sequence: Synthetic oligonucleotide
uggcacaguaagcaacugu

SEQ ID NO: 2756586 - RNA, 19 nt, Artificial Sequence
  Description of Artificial Sequence: Synthetic oligonucleotide
agagaagcauuguagucuu

SEQ ID NO: 2756587 - RNA, 19 nt, Artificial Sequence
  Description of Artificial Sequence: Synthetic oligonucleotide
uucaggauccagguauuug

SEQ ID NO: 2756588 - RNA, 19 nt, Artificial Sequence
  Description of Artificial Sequence: Synthetic oligonucleotide
aucuccauacacugguccu

SEQ ID NO: 2756589 - RNA, 19 nt, Artificial Sequence
  Description of Artificial Sequence: Synthetic oligonucleotide
cacaaagacaggguggcac

SEQ ID NO: 2756590 - RNA, 19 nt, Artificial Sequence
  Description of Artificial Sequence: Synthetic oligonucleotide
guuuauugucauuggaaua

SEQ ID NO: 2756591 - RNA, 19 nt, Artificial Sequence
  Description of Artificial Sequence: Synthetic oligonucleotide
uguugcaagagugcugccu

SEQ ID NO: 2756592 - RNA, 19 nt, Artificial Sequence
  Description of Artificial Sequence: Synthetic oligonucleotide
cucugcuaagaugaacugc

SEQ ID NO: 2756593 - RNA, 19 nt, Artificial Sequence
  Description of Artificial Sequence: Synthetic oligonucleotide
cugucauucuucugcuggc

SEQ ID NO: 2756594 - RNA, 19 nt, Artificial Sequence
  Description of Artificial Sequence: Synthetic oligonucleotide
cucuaagguaaccugaucu

SEQ ID NO: 2756595 - RNA, 19 nt, Artificial Sequence
  Description of Artificial Sequence: Synthetic oligonucleotide
acaguaagcaacugucauu

SEQ ID NO: 2756596 - RNA, 19 nt, Artificial Sequence
  Description of Artificial Sequence: Synthetic oligonucleotide
uggccuggcacaguaagca

SEQ ID NO: 2756597 - RNA, 19 nt, Artificial Sequence
  Description of Artificial Sequence: Synthetic oligonucleotide
guggaucugggccaagcgc

SEQ ID NO: 2756598 - RNA, 19 nt, Artificial Sequence
  Description of Artificial Sequence: Synthetic oligonucleotide
auguggaucugggccaagc

SEQ ID NO: 2756599 - RNA, 19 nt, Artificial Sequence
  Description of Artificial Sequence: Synthetic oligonucleotide
gcuaagaugaacugcaacu

SEQ ID NO: 2756600 - RNA, 19 nt, Artificial Sequence
  Description of Artificial Sequence: Synthetic oligonucleotide
uugcaagagugcugccugg

SEQ ID NO: 2756601 - RNA, 19 nt, Artificial Sequence
  Description of Artificial Sequence: Synthetic oligonucleotide
ugcaagagugcugccuggg

SEQ ID NO: 2756602 - RNA, 19 nt, Artificial Sequence
  Description of Artificial Sequence: Synthetic oligonucleotide
cuagcuggcagaguaguuc

SEQ ID NO: 2756603 - RNA, 19 nt, Artificial Sequence
  Description of Artificial Sequence: Synthetic oligonucleotide
gacagguagucuuugaauu

SEQ ID NO: 2756604 - RNA, 19 nt, Artificial Sequence
  Description of Artificial Sequence: Synthetic oligonucleotide
acgaauugcuuggagagaa

SEQ ID NO: 2756605 - RNA, 19 nt, Artificial Sequence
  Description of Artificial Sequence: Synthetic oligonucleotide
uggcagaguaguucauccc

SEQ ID NO: 2756606 - RNA, 19 nt, Artificial Sequence
  Description of Artificial Sequence: Synthetic oligonucleotide
gaccucagagcccaacuga

SEQ ID NO: 2756607 - RNA, 19 nt, Artificial Sequence
  Description of Artificial Sequence: Synthetic oligonucleotide
aucaugacucuaagguaac

SEQ ID NO: 2756608 - RNA, 19 nt, Artificial Sequence
  Description of Artificial Sequence: Synthetic oligonucleotide
ugaugggagugcaaaucau

SEQ ID NO: 2756609 - RNA, 19 nt, Artificial Sequence
  Description of Artificial Sequence: Synthetic oligonucleotide
ucuccauacacugguccug

SEQ ID NO: 2756610 - RNA, 19 nt, Artificial Sequence
  Description of Artificial Sequence: Synthetic oligonucleotide
acugagcagacagguaguc

SEQ ID NO: 2756611 - RNA, 19 nt, Artificial Sequence
  Description of Artificial Sequence: Synthetic oligonucleotide
cuucacuugcuuggcagcc

SEQ ID NO: 2756612 - RNA, 19 nt, Artificial Sequence
  Description of Artificial Sequence: Synthetic oligonucleotide
ccucacaaagacagggugg

SEQ ID NO: 2756613 - RNA, 19 nt, Artificial Sequence
  Description of Artificial Sequence: Synthetic oligonucleotide
ugccucacaaagacagggu

SEQ ID NO: 2756614 - RNA, 19 nt, Artificial Sequence
  Description of Artificial Sequence: Synthetic oligonucleotide
uauucaggauccagguauu

SEQ ID NO: 2756615 - RNA, 19 nt, Artificial Sequence
  Description of Artificial Sequence: Synthetic oligonucleotide
ucaugacucuaagguaacc

SEQ ID NO: 2756616 - RNA, 19 nt, Artificial Sequence
  Description of Artificial Sequence: Synthetic oligonucleotide
uuauugucauuggaauaaa

SEQ ID NO: 2756617 - RNA, 19 nt, Artificial Sequence
  Description of Artificial Sequence: Synthetic oligonucleotide
agcaugggcaccaaggcau

SEQ ID NO: 2756618 - RNA, 19 nt, Artificial Sequence
  Description of Artificial Sequence: Synthetic oligonucleotide
ggcuucacuugcuuggcag

SEQ ID NO: 2756619 - RNA, 19 nt, Artificial Sequence
  Description of Artificial Sequence: Synthetic oligonucleotide
ggaugaacuguuccucugc

SEQ ID NO: 2756620 - RNA, 19 nt, Artificial Sequence
  Description of Artificial Sequence: Synthetic oligonucleotide
ggagagaagcauuguaguc

SEQ ID NO: 2756621 - RNA, 19 nt, Artificial Sequence
  Description of Artificial Sequence: Synthetic oligonucleotide
gcgaucgauauauucagga

SEQ ID NO: 2756622 - RNA, 19 nt, Artificial Sequence
  Description of Artificial Sequence: Synthetic oligonucleotide
ugaucuccauacacugguc

SEQ ID NO: 2756623 - RNA, 19 nt, Artificial Sequence
  Description of Artificial Sequence: Synthetic oligonucleotide
aacugagcagacagguagu

SEQ ID NO: 2756624 - RNA, 19 nt, Artificial Sequence
  Description of Artificial Sequence: Synthetic oligonucleotide
aucagguauggcaaugcga

SEQ ID NO: 2756625 - RNA, 19 nt, Artificial Sequence
  Description of Artificial Sequence: Synthetic oligonucleotide
ugcaacuuugaggcaucag

SEQ ID NO: 2756626 - RNA, 19 nt, Artificial Sequence
  Description of Artificial Sequence: Synthetic oligonucleotide
ggcagaguaguucauccca

SEQ ID NO: 2756627 - RNA, 19 nt, Artificial Sequence
  Description of Artificial Sequence: Synthetic oligonucleotide
caacuuugaggcaucaggu

SEQ ID NO: 2756628 - RNA, 19 nt, Artificial Sequence
  Description of Artificial Sequence: Synthetic oligonucleotide
aguaagcaacugucauucu

SEQ ID NO: 2756629 - RNA, 19 nt, Artificial Sequence
  Description of Artificial Sequence: Synthetic oligonucleotide
ggagugcaaaucaugacuc

SEQ ID NO: 2756630 - RNA, 19 nt, Artificial Sequence
  Description of Artificial Sequence: Synthetic oligonucleotide
ugucauucuucugcuggcu

SEQ ID NO: 2756631 - RNA, 19 nt, Artificial Sequence
  Description of Artificial Sequence: Synthetic oligonucleotide
uacacugaugggagugcaa

SEQ ID NO: 2756632 - RNA, 19 nt, Artificial Sequence
  Description of Artificial Sequence: Synthetic oligonucleotide
agcugucucugccucacaa

SEQ ID NO: 2756633 - RNA, 19 nt, Artificial Sequence
  Description of Artificial Sequence: Synthetic oligonucleotide
acugcaacuuugaggcauc

SEQ ID NO: 2756634 - RNA, 19 nt, Artificial Sequence
  Description of Artificial Sequence: Synthetic oligonucleotide
agguauuugaucaggucuu

SEQ ID NO: 2756635 - RNA, 19 nt, Artificial Sequence
  Description of Artificial Sequence: Synthetic oligonucleotide
agagugcugccugggaaag

SEQ ID NO: 2756636 - RNA, 19 nt, Artificial Sequence
  Description of Artificial Sequence: Synthetic oligonucleotide
ucaucccacugcacgaauu

SEQ ID NO: 2756637 - RNA, 19 nt, Artificial Sequence
  Description of Artificial Sequence: Synthetic oligonucleotide
cuccauacacugguccugc

SEQ ID NO: 2756638 - RNA, 19 nt, Artificial Sequence
  Description of Artificial Sequence: Synthetic oligonucleotide
cauccacuuguugcaagag

SEQ ID NO: 2756639 - RNA, 19 nt, Artificial Sequence
  Description of Artificial Sequence: Synthetic oligonucleotide
agcgcugcaggcgggcagc

SEQ ID NO: 2756640 - RNA, 19 nt, Artificial Sequence
  Description of Artificial Sequence: Synthetic oligonucleotide
cugaucuccauacacuggu

SEQ ID NO: 2756641 - RNA, 19 nt, Artificial Sequence
  Description of Artificial Sequence: Synthetic oligonucleotide
caaagacaggguggcacag

SEQ ID NO: 2756642 - RNA, 19 nt, Artificial Sequence
  Description of Artificial Sequence: Synthetic oligonucleotide
cuuggacuccucacugauc

SEQ ID NO: 2756643 - RNA, 19 nt, Artificial Sequence
  Description of Artificial Sequence: Synthetic oligonucleotide
gggagugcaaaucaugacu

SEQ ID NO: 2756644 - RNA, 19 nt, Artificial Sequence
  Description of Artificial Sequence: Synthetic oligonucleotide
uucaucccacugcacgaau

SEQ ID NO: 2756645 - RNA, 19 nt, Artificial Sequence
  Description of Artificial Sequence: Synthetic oligonucleotide
auacacugaugggagugca

SEQ ID NO: 2756646 - RNA, 19 nt, Artificial Sequence
  Description of Artificial Sequence: Synthetic oligonucleotide
ucgauauauucaggaucca

SEQ ID NO: 2756647 - RNA, 19 nt, Artificial Sequence
  Description of Artificial Sequence: Synthetic oligonucleotide
agacaggguggcacagggc

SEQ ID NO: 2756648 - RNA, 19 nt, Artificial Sequence
  Description of Artificial Sequence: Synthetic oligonucleotide
ggcaaugcgaucgauauau

SEQ ID NO: 2756649 - RNA, 19 nt, Artificial Sequence
  Description of Artificial Sequence: Synthetic oligonucleotide
cagguagucuuugaauuga

SEQ ID NO: 2756650 - RNA, 19 nt, Artificial Sequence
  Description of Artificial Sequence: Synthetic oligonucleotide
uaaccugaucucugaccuc

SEQ ID NO: 2756651 - RNA, 19 nt, Artificial Sequence
  Description of Artificial Sequence: Synthetic oligonucleotide
cugcacgaauugcuuggag

SEQ ID NO: 2756652 - RNA, 19 nt, Artificial Sequence
  Description of Artificial Sequence: Synthetic oligonucleotide
caagagugcugccugggaa

SEQ ID NO: 2756653 - RNA, 19 nt, Artificial Sequence
  Description of Artificial Sequence: Synthetic oligonucleotide
guaagcaacugucauucuu

SEQ ID NO: 2756654 - RNA, 19 nt, Artificial Sequence
  Description of Artificial Sequence: Synthetic oligonucleotide
uuguugcaagagugcugcc

SEQ ID NO: 2756655 - RNA, 19 nt, Artificial Sequence
  Description of Artificial Sequence: Synthetic oligonucleotide
agcagacagguagucuuug

SEQ ID NO: 2756656 - RNA, 19 nt, Artificial Sequence
  Description of Artificial Sequence: Synthetic oligonucleotide
cagacagguagucuuugaa

SEQ ID NO: 2756657 - RNA, 19 nt, Artificial Sequence
  Description of Artificial Sequence: Synthetic oligonucleotide
gugcaaaucaugacucuaa

SEQ ID NO: 2756658 - RNA, 19 nt, Artificial Sequence
  Description of Artificial Sequence: Synthetic oligonucleotide
ggcauccacuuguugcaag

SEQ ID NO: 2756659 - RNA, 19 nt, Artificial Sequence
  Description of Artificial Sequence: Synthetic oligonucleotide
cuaagguaaccugaucucu

SEQ ID NO: 2756660 - RNA, 19 nt, Artificial Sequence
  Description of Artificial Sequence: Synthetic oligonucleotide
gagugcaaaucaugacucu

SEQ ID NO: 2756661 - RNA, 19 nt, Artificial Sequence
  Description of Artificial Sequence: Synthetic oligonucleotide
uggcaaugcgaucgauaua

SEQ ID NO: 2756662 - RNA, 19 nt, Artificial Sequence
  Description of Artificial Sequence: Synthetic oligonucleotide
gaacugcaacuuugaggca

SEQ ID NO: 2756663 - RNA, 19 nt, Artificial Sequence
  Description of Artificial Sequence: Synthetic oligonucleotide
cauuguagucuuguuauau

SEQ ID NO: 2756664 - RNA, 19 nt, Artificial Sequence
  Description of Artificial Sequence: Synthetic oligonucleotide
gucuuugaauugaauaaau

SEQ ID NO: 2756665 - RNA, 19 nt, Artificial Sequence
  Description of Artificial Sequence: Synthetic oligonucleotide
cacaguaagcaacugucau

SEQ ID NO: 2756666 - RNA, 19 nt, Artificial Sequence
  Description of Artificial Sequence: Synthetic oligonucleotide
cagguauggcaaugcgauc

SEQ ID NO: 2756667 - RNA, 19 nt, Artificial Sequence
  Description of Artificial Sequence: Synthetic oligonucleotide
agagcccaacugagcagac

SEQ ID NO: 2756668 - RNA, 19 nt, Artificial Sequence
  Description of Artificial Sequence: Synthetic oligonucleotide
ccuggccuggcacaguaag

SEQ ID NO: 2756669 - RNA, 19 nt, Artificial Sequence
  Description of Artificial Sequence: Synthetic oligonucleotide
aagcugucucugccucaca

SEQ ID NO: 2756670 - RNA, 19 nt, Artificial Sequence
  Description of Artificial Sequence: Synthetic oligonucleotide
cuaagaugaacugcaacuu

SEQ ID NO: 2756671 - RNA, 19 nt, Artificial Sequence
  Description of Artificial Sequence: Synthetic oligonucleotide
gaagcauuguagucuuguu

SEQ ID NO: 2756672 - RNA, 19 nt, Artificial Sequence
  Description of Artificial Sequence: Synthetic oligonucleotide
gagccuuggacuccucacu

SEQ ID NO: 2756673 - RNA, 19 nt, Artificial Sequence
  Description of Artificial Sequence: Synthetic oligonucleotide
acugcacgaauugcuugga

SEQ ID NO: 2756674 - RNA, 19 nt, Artificial Sequence
  Description of Artificial Sequence: Synthetic oligonucleotide
cagagcccaacugagcaga

SEQ ID NO: 2756675 - RNA, 19 nt, Artificial Sequence
  Description of Artificial Sequence: Synthetic oligonucleotide
cagcaugggcaccaaggca

SEQ ID NO: 2756676 - RNA, 19 nt, Artificial Sequence
  Description of Artificial Sequence: Synthetic oligonucleotide
gagaagcauuguagucuug

SEQ ID NO: 2756677 - RNA, 19 nt, Artificial Sequence
  Description of Artificial Sequence: Synthetic oligonucleotide
cugggaaaggaugaacugu

SEQ ID NO: 2756678 - RNA, 19 nt, Artificial Sequence
  Description of Artificial Sequence: Synthetic oligonucleotide
caccaaggcauccacuugu

SEQ ID NO: 2756679 - RNA, 19 nt, Artificial Sequence
  Description of Artificial Sequence: Synthetic oligonucleotide
aggagagccuuggacuccu

SEQ ID NO: 2756680 - RNA, 19 nt, Artificial Sequence
  Description of Artificial Sequence: Synthetic oligonucleotide
gguauggcaaugcgaucga

SEQ ID NO: 2756681 - RNA, 19 nt, Artificial Sequence
  Description of Artificial Sequence: Synthetic oligonucleotide
gacucuaagguaaccugau

SEQ ID NO: 2756682 - RNA, 19 nt, Artificial Sequence
  Description of Artificial Sequence: Synthetic oligonucleotide
guaguucaucccacugcac

SEQ ID NO: 2756683 - RNA, 19 nt, Artificial Sequence
  Description of Artificial Sequence: Synthetic oligonucleotide
caacugucauucuucugcu

SEQ ID NO: 2756684 - RNA, 19 nt, Artificial Sequence
  Description of Artificial Sequence: Synthetic oligonucleotide
gccucuagcuggcagagua

SEQ ID NO: 2756685 - RNA, 19 nt, Artificial Sequence
  Description of Artificial Sequence: Synthetic oligonucleotide
augggcaccaaggcaucca

SEQ ID NO: 2756686 - RNA, 19 nt, Artificial Sequence
  Description of Artificial Sequence: Synthetic oligonucleotide
aggcaucagguauggcaau

SEQ ID NO: 2756687 - RNA, 19 nt, Artificial Sequence
  Description of Artificial Sequence: Synthetic oligonucleotide
ggcaucagguauggcaaug

SEQ ID NO: 2756688 - RNA, 19 nt, Artificial Sequence
  Description of Artificial Sequence: Synthetic oligonucleotide
gauguggaucugggccaag

SEQ ID NO: 2756689 - RNA, 19 nt, Artificial Sequence
  Description of Artificial Sequence: Synthetic oligonucleotide
gguauuugaucaggucuuc

SEQ ID NO: 2756690 - RNA, 19 nt, Artificial Sequence
  Description of Artificial Sequence: Synthetic oligonucleotide
ccauacacugguccugcug

SEQ ID NO: 2756691 - RNA, 19 nt, Artificial Sequence
  Description of Artificial Sequence: Synthetic oligonucleotide
ccacugcacgaauugcuug

SEQ ID NO: 2756692 - RNA, 19 nt, Artificial Sequence
  Description of Artificial Sequence: Synthetic oligonucleotide
uggacuccucacugaucuc

SEQ ID NO: 2756693 - RNA, 19 nt, Artificial Sequence
  Description of Artificial Sequence: Synthetic oligonucleotide
gcagaguaguucaucccac

SEQ ID NO: 2756694 - RNA, 19 nt, Artificial Sequence
  Description of Artificial Sequence: Synthetic oligonucleotide
auucaggauccagguauuu

SEQ ID NO: 2756695 - RNA, 19 nt, Artificial Sequence
  Description of Artificial Sequence: Synthetic oligonucleotide
gcugccugggaaaggauga

SEQ ID NO: 2756696 - RNA, 19 nt, Artificial Sequence
  Description of Artificial Sequence: Synthetic oligonucleotide
uugaggcaucagguauggc

SEQ ID NO: 2756697 - RNA, 19 nt, Artificial Sequence
  Description of Artificial Sequence: Synthetic oligonucleotide
agguagucuuugaauugaa

SEQ ID NO: 2756698 - RNA, 19 nt, Artificial Sequence
  Description of Artificial Sequence: Synthetic oligonucleotide
gcuuuuauagaagcacugu

SEQ ID NO: 2756699 - RNA, 19 nt, Artificial Sequence
  Description of Artificial Sequence: Synthetic oligonucleotide
cacgaauugcuuggagaga

SEQ ID NO: 2756700 - RNA, 19 nt, Artificial Sequence
  Description of Artificial Sequence: Synthetic oligonucleotide
cuggcacaguaagcaacug

SEQ ID NO: 2756701 - RNA, 19 nt, Artificial Sequence
  Description of Artificial Sequence: Synthetic oligonucleotide
ccucuagcuggcagaguag

SEQ ID NO: 2756702 - RNA, 19 nt, Artificial Sequence
  Description of Artificial Sequence: Synthetic oligonucleotide
cacuuguugcaagagugcu

SEQ ID NO: 2756703 - RNA, 19 nt, Artificial Sequence
  Description of Artificial Sequence: Synthetic oligonucleotide
gggccaagcgcugcaggcg

SEQ ID NO: 2756704 - RNA, 19 nt, Artificial Sequence
  Description of Artificial Sequence: Synthetic oligonucleotide
guucaucccacugcacgaa

SEQ ID NO: 2756705 - RNA, 19 nt, Artificial Sequence
  Description of Artificial Sequence: Synthetic oligonucleotide
cugcuaagaugaacugcaa

SEQ ID NO: 2756706 - RNA, 19 nt, Artificial Sequence
  Description of Artificial Sequence: Synthetic oligonucleotide
cagaguaguucaucccacu

SEQ ID NO: 2756707 - RNA, 19 nt, Artificial Sequence
  Description of Artificial Sequence: Synthetic oligonucleotide
gcagacagguagucuuuga

SEQ ID NO: 2756708 - RNA, 19 nt, Artificial Sequence
  Description of Artificial Sequence: Synthetic oligonucleotide
augcucaggaacagcuuuu

SEQ ID NO: 2756709 - RNA, 19 nt, Artificial Sequence
  Description of Artificial Sequence: Synthetic oligonucleotide
gagcccaacugagcagaca

SEQ ID NO: 2756710 - RNA, 19 nt, Artificial Sequence
  Description of Artificial Sequence: Synthetic oligonucleotide
ggcaccaaggcauccacuu

SEQ ID NO: 2756711 - RNA, 19 nt, Artificial Sequence
  Description of Artificial Sequence: Synthetic oligonucleotide
gcaagagugcugccuggga

SEQ ID NO: 2756712 - RNA, 19 nt, Artificial Sequence
  Description of Artificial Sequence: Synthetic oligonucleotide
ccuuucccuggccuggcac

SEQ ID NO: 2756713 - RNA, 19 nt, Artificial Sequence
  Description of Artificial Sequence: Synthetic oligonucleotide
gggaaaggaugaacuguuc

SEQ ID NO: 2756714 - RNA, 19 nt, Artificial Sequence
  Description of Artificial Sequence: Synthetic oligonucleotide
cucuagcuggcagaguagu

SEQ ID NO: 2756715 - RNA, 19 nt, Artificial Sequence
  Description of Artificial Sequence: Synthetic oligonucleotide
ggaucugggccaagcgcug

SEQ ID NO: 2756716 - RNA, 19 nt, Artificial Sequence
  Description of Artificial Sequence: Synthetic oligonucleotide
gcccaacugagcagacagg

SEQ ID NO: 2756717 - RNA, 19 nt, Artificial Sequence
  Description of Artificial Sequence: Synthetic oligonucleotide
accaaggcauccacuuguu

SEQ ID NO: 2756718 - RNA, 19 nt, Artificial Sequence
  Description of Artificial Sequence: Synthetic oligonucleotide
aggcauccacuuguugcaa

SEQ ID NO: 2756719 - RNA, 19 nt, Artificial Sequence
  Description of Artificial Sequence: Synthetic oligonucleotide
gcauuguagucuuguuaua

SEQ ID NO: 2756720 - RNA, 19 nt, Artificial Sequence
  Description of Artificial Sequence: Synthetic oligonucleotide
cacugaugggagugcaaau

SEQ ID NO: 2756721 - RNA, 19 nt, Artificial Sequence
  Description of Artificial Sequence: Synthetic oligonucleotide
ccuggcacaguaagcaacu

SEQ ID NO: 2756722 - RNA, 19 nt, Artificial Sequence
  Description of Artificial Sequence: Synthetic oligonucleotide
cugagcagacagguagucu

SEQ ID NO: 2756723 - RNA, 19 nt, Artificial Sequence
  Description of Artificial Sequence: Synthetic oligonucleotide
gguagucuuugaauugaau

SEQ ID NO: 2756724 - RNA, 19 nt, Artificial Sequence
  Description of Artificial Sequence: Synthetic oligonucleotide
cccaacugagcagacaggu

SEQ ID NO: 2756725 - RNA, 19 nt, Artificial Sequence
  Description of Artificial Sequence: Synthetic oligonucleotide
ggauguggaucugggccaa

SEQ ID NO: 2756726 - RNA, 19 nt, Artificial Sequence
  Description of Artificial Sequence: Synthetic oligonucleotide
ccaacugagcagacaggua

SEQ ID NO: 2756727 - RNA, 19 nt, Artificial Sequence
  Description of Artificial Sequence: Synthetic oligonucleotide
caagcgcugcaggcgggca

SEQ ID NO: 2756728 - RNA, 19 nt, Artificial Sequence
  Description of Artificial Sequence: Synthetic oligonucleotide
ccaagcgcugcaggcgggc

SEQ ID NO: 2756729 - RNA, 19 nt, Artificial Sequence
  Description of Artificial Sequence: Synthetic oligonucleotide
gccaagcgcugcaggcggg

SEQ ID NO: 2756730 - RNA, 19 nt, Artificial Sequence
  Description of Artificial Sequence: Synthetic oligonucleotide
ccucacugaucuccauaca

SEQ ID NO: 2756731 - RNA, 19 nt, Artificial Sequence
  Description of Artificial Sequence: Synthetic oligonucleotide
guauggcaaugcgaucgau

SEQ ID NO: 2756732 - RNA, 19 nt, Artificial Sequence
  Description of Artificial Sequence: Synthetic oligonucleotide
ggguggcacagggcccugg

SEQ ID NO: 2756733 - RNA, 19 nt, Artificial Sequence
  Description of Artificial Sequence: Synthetic oligonucleotide
gcaugggcaccaaggcauc

SEQ ID NO: 2756734 - RNA, 19 nt, Artificial Sequence
  Description of Artificial Sequence: Synthetic oligonucleotide
cgaucgauauauucaggau

SEQ ID NO: 2756735 - RNA, 19 nt, Artificial Sequence
  Description of Artificial Sequence: Synthetic oligonucleotide
ccuuggacuccucacugau

SEQ ID NO: 2756736 - RNA, 19 nt, Artificial Sequence
  Description of Artificial Sequence: Synthetic oligonucleotide
cugcuggcuucacuugcuu

SEQ ID NO: 2756737 - RNA, 19 nt, Artificial Sequence
  Description of Artificial Sequence: Synthetic oligonucleotide
cccacugcacgaauugcuu

SEQ ID NO: 2756738 - RNA, 19 nt, Artificial Sequence
  Description of Artificial Sequence: Synthetic oligonucleotide
cucugaccucagagcccaa

SEQ ID NO: 2756739 - RNA, 19 nt, Artificial Sequence
  Description of Artificial Sequence: Synthetic oligonucleotide
ccccuuucccuggccuggc

SEQ ID NO: 2756740 - RNA, 19 nt, Artificial Sequence
  Description of Artificial Sequence: Synthetic oligonucleotide
ggagagccuuggacuccuc

SEQ ID NO: 2756741 - RNA, 19 nt, Artificial Sequence
  Description of Artificial Sequence: Synthetic oligonucleotide
gggcaccaaggcauccacu

SEQ ID NO: 2756742 - RNA, 19 nt, Artificial Sequence
  Description of Artificial Sequence: Synthetic oligonucleotide
gcaaugcgaucgauauauu

SEQ ID NO: 2756743 - RNA, 19 nt, Artificial Sequence
  Description of Artificial Sequence: Synthetic oligonucleotide
cccuggccuggcacaguaa

SEQ ID NO: 2756744 - RNA, 19 nt, Artificial Sequence
  Description of Artificial Sequence: Synthetic oligonucleotide
cgcugcaggcgggcagcau

SEQ ID NO: 2756745 - RNA, 19 nt, Artificial Sequence
  Description of Artificial Sequence: Synthetic oligonucleotide
aaacgaaaacaccugaagc

SEQ ID NO: 2756746 - RNA, 19 nt, Artificial Sequence
  Description of Artificial Sequence: Synthetic oligonucleotide
uuaacaaacgaaaacaccu

SEQ ID NO: 2756747 - RNA, 19 nt, Artificial Sequence
  Description of Artificial Sequence: Synthetic oligonucleotide
aucauuaacaaacgaaaac

SEQ ID NO: 2756748 - RNA, 19 nt, Artificial Sequence
  Description of Artificial Sequence: Synthetic oligonucleotide
aagagcauggugcuggcgc

SEQ ID NO: 2756749 - RNA, 19 nt, Artificial Sequence
  Description of Artificial Sequence: Synthetic oligonucleotide
gauauugagguacuggucc

SEQ ID NO: 2756750 - RNA, 19 nt, Artificial Sequence
  Description of Artificial Sequence: Synthetic oligonucleotide
aacgaaaacaccugaagca

SEQ ID NO: 2756751 - RNA, 19 nt, Artificial Sequence
  Description of Artificial Sequence: Synthetic oligonucleotide
uugacugacaacaugugag

SEQ ID NO: 2756752 - RNA, 19 nt, Artificial Sequence
  Description of Artificial Sequence: Synthetic oligonucleotide
aaacaccugaagcacuugc

SEQ ID NO: 2756753 - RNA, 19 nt, Artificial Sequence
  Description of Artificial Sequence: Synthetic oligonucleotide
auuaacaaacgaaaacacc

SEQ ID NO: 2756754 - RNA, 19 nt, Artificial Sequence
  Description of Artificial Sequence: Synthetic oligonucleotide
uuugauauugagguacugg

SEQ ID NO: 2756755 - RNA, 19 nt, Artificial Sequence
  Description of Artificial Sequence: Synthetic oligonucleotide
auucuugaguuccacgacc

SEQ ID NO: 2756756 - RNA, 19 nt, Artificial Sequence
  Description of Artificial Sequence: Synthetic oligonucleotide
aaaucauuaacaaacgaaa

SEQ ID NO: 2756757 - RNA, 19 nt, Artificial Sequence
  Description of Artificial Sequence: Synthetic oligonucleotide
uuaggggucaccaauggga

SEQ ID NO: 2756758 - RNA, 19 nt, Artificial Sequence
  Description of Artificial Sequence: Synthetic oligonucleotide
uucuugacugacaacaugu

SEQ ID NO: 2756759 - RNA, 19 nt, Artificial Sequence
  Description of Artificial Sequence: Synthetic oligonucleotide
ucagcugcaucaaagaaaa

SEQ ID NO: 2756760 - RNA, 19 nt, Artificial Sequence
  Description of Artificial Sequence: Synthetic oligonucleotide
cuggacaucacguuagggg

SEQ ID NO: 2756761 - RNA, 19 nt, Artificial Sequence
  Description of Artificial Sequence: Synthetic oligonucleotide
cauuaacaaacgaaaacac

SEQ ID NO: 2756762 - RNA, 19 nt, Artificial Sequence
  Description of Artificial Sequence: Synthetic oligonucleotide
ucauucuugaguuccacga

SEQ ID NO: 2756763 - RNA, 19 nt, Artificial Sequence
  Description of Artificial Sequence: Synthetic oligonucleotide
uugauauugagguacuggu

SEQ ID NO: 2756764 - RNA, 19 nt, Artificial Sequence
  Description of Artificial Sequence: Synthetic oligonucleotide
uguccuuguccucagcugg

SEQ ID NO: 2756765 - RNA, 19 nt, Artificial Sequence
  Description of Artificial Sequence: Synthetic oligonucleotide
uccacagaugcucagguca

SEQ ID NO: 2756766 - RNA, 19 nt, Artificial Sequence
  Description of Artificial Sequence: Synthetic oligonucleotide
aacaaacgaaaacaccuga

SEQ ID NO: 2756767 - RNA, 19 nt, Artificial Sequence
  Description of Artificial Sequence: Synthetic oligonucleotide
ucacuguuucugcugaagg

SEQ ID NO: 2756768 - RNA, 19 nt, Artificial Sequence
  Description of Artificial Sequence: Synthetic oligonucleotide
acuguuucugcugaagggc

SEQ ID NO: 2756769 - RNA, 19 nt, Artificial Sequence
  Description of Artificial Sequence: Synthetic oligonucleotide
aaaggaguagaagagcaug

SEQ ID NO: 2756770 - RNA, 19 nt, Artificial Sequence
  Description of Artificial Sequence: Synthetic oligonucleotide
uggaggguuccacagaugc

SEQ ID NO: 2756771 - RNA, 19 nt, Artificial Sequence
  Description of Artificial Sequence: Synthetic oligonucleotide
augucggugaguuugauau

SEQ ID NO: 2756772 - RNA, 19 nt, Artificial Sequence
  Description of Artificial Sequence: Synthetic oligonucleotide
uaacaaacgaaaacaccug

SEQ ID NO: 2756773 - RNA, 19 nt, Artificial Sequence
  Description of Artificial Sequence: Synthetic oligonucleotide
uagaagagcauggugcugg

SEQ ID NO: 2756774 - RNA, 19 nt, Artificial Sequence
  Description of Artificial Sequence: Synthetic oligonucleotide
ugacugacaacaugugagg

SEQ ID NO: 2756775 - RNA, 19 nt, Artificial Sequence
  Description of Artificial Sequence: Synthetic oligonucleotide
gugaguuugauauugaggu

SEQ ID NO: 2756776 - RNA, 19 nt, Artificial Sequence
  Description of Artificial Sequence: Synthetic oligonucleotide
caaacgaaaacaccugaag

SEQ ID NO: 2756777 - RNA, 19 nt, Artificial Sequence
  Description of Artificial Sequence: Synthetic oligonucleotide
aacaugugaggguacuucu

SEQ ID NO: 2756778 - RNA, 19 nt, Artificial Sequence
  Description of Artificial Sequence: Synthetic oligonucleotide
aacaccugaagcacuugcc

SEQ ID NO: 2756779 - RNA, 19 nt, Artificial Sequence
  Description of Artificial Sequence: Synthetic oligonucleotide
gaguuugauauugagguac

SEQ ID NO: 2756780 - RNA, 19 nt, Artificial Sequence
  Description of Artificial Sequence: Synthetic oligonucleotide
uucagcugcaucaaagaaa

SEQ ID NO: 2756781 - RNA, 19 nt, Artificial Sequence
  Description of Artificial Sequence: Synthetic oligonucleotide
gagguacugguccacagag

SEQ ID NO: 2756782 - RNA, 19 nt, Artificial Sequence
  Description of Artificial Sequence: Synthetic oligonucleotide
acgaaaacaccugaagcac

SEQ ID NO: 2756783 - RNA, 19 nt, Artificial Sequence
  Description of Artificial Sequence: Synthetic oligonucleotide
uggacaucacguuaggggu

SEQ ID NO: 2756784 - RNA, 19 nt, Artificial Sequence
  Description of Artificial Sequence: Synthetic oligonucleotide
ugugaggguacuucucagg

SEQ ID NO: 2756785 - RNA, 19 nt, Artificial Sequence
  Description of Artificial Sequence: Synthetic oligonucleotide
ugguccacagaguggaggg

SEQ ID NO: 2756786 - RNA, 19 nt, Artificial Sequence
  Description of Artificial Sequence: Synthetic oligonucleotide
uccacgaccacauccuugc

SEQ ID NO: 2756787 - RNA, 19 nt, Artificial Sequence
  Description of Artificial Sequence: Synthetic oligonucleotide
gugaggguacuucucaggg

SEQ ID NO: 2756788 - RNA, 19 nt, Artificial Sequence
  Description of Artificial Sequence: Synthetic oligonucleotide
aaugggaacggaacgggag

SEQ ID NO: 2756789 - RNA, 19 nt, Artificial Sequence
  Description of Artificial Sequence: Synthetic oligonucleotide
ugaugaagcaguucuugac

SEQ ID NO: 2756790 - RNA, 19 nt, Artificial Sequence
  Description of Artificial Sequence: Synthetic oligonucleotide
ucaccaaugggaacggaac

SEQ ID NO: 2756791 - RNA, 19 nt, Artificial Sequence
  Description of Artificial Sequence: Synthetic oligonucleotide
gaguuccacgaccacaucc

SEQ ID NO: 2756792 - RNA, 19 nt, Artificial Sequence
  Description of Artificial Sequence: Synthetic oligonucleotide
augaagcaguucuugacug

SEQ ID NO: 2756793 - RNA, 19 nt, Artificial Sequence
  Description of Artificial Sequence: Synthetic oligonucleotide
uccucagcuggacaucacg

SEQ ID NO: 2756794 - RNA, 19 nt, Artificial Sequence
  Description of Artificial Sequence: Synthetic oligonucleotide
uucuugaguuccacgacca

SEQ ID NO: 2756795 - RNA, 19 nt, Artificial Sequence
  Description of Artificial Sequence: Synthetic oligonucleotide
uugaguuccacgaccacau

SEQ ID NO: 2756796 - RNA, 19 nt, Artificial Sequence
  Description of Artificial Sequence: Synthetic oligonucleotide
agggcaucacuguuucugc

SEQ ID NO: 2756797 - RNA, 19 nt, Artificial Sequence
  Description of Artificial Sequence: Synthetic oligonucleotide
cacuguuucugcugaaggg

SEQ ID NO: 2756798 - RNA, 19 nt, Artificial Sequence
  Description of Artificial Sequence: Synthetic oligonucleotide
cacauccuugcccacaagg

SEQ ID NO: 2756799 - RNA, 19 nt, Artificial Sequence
  Description of Artificial Sequence: Synthetic oligonucleotide
ucuugacugacaacaugug

SEQ ID NO: 2756800 - RNA, 19 nt, Artificial Sequence
  Description of Artificial Sequence: Synthetic oligonucleotide
ugauauugagguacugguc

SEQ ID NO: 2756801 - RNA, 19 nt, Artificial Sequence
  Description of Artificial Sequence: Synthetic oligonucleotide
agaguggaggguuccacag

SEQ ID NO: 2756802 - RNA, 19 nt, Artificial Sequence
  Description of Artificial Sequence: Synthetic oligonucleotide
uccgugacgcugaugucgg

SEQ ID NO: 2756803 - RNA, 19 nt, Artificial Sequence
  Description of Artificial Sequence: Synthetic oligonucleotide
gaggguacuucucaggguc

SEQ ID NO: 2756804 - RNA, 19 nt, Artificial Sequence
  Description of Artificial Sequence: Synthetic oligonucleotide
augggaacggaacgggagg

SEQ ID NO: 2756805 - RNA, 19 nt, Artificial Sequence
  Description of Artificial Sequence: Synthetic oligonucleotide
gguacugguccacagagug

SEQ ID NO: 2756806 - RNA, 19 nt, Artificial Sequence
  Description of Artificial Sequence: Synthetic oligonucleotide
gucauucuugaguuccacg

SEQ ID NO: 2756807 - RNA, 19 nt, Artificial Sequence
  Description of Artificial Sequence: Synthetic oligonucleotide
gacugacaacaugugaggg

SEQ ID NO: 2756808 - RNA, 19 nt, Artificial Sequence
  Description of Artificial Sequence: Synthetic oligonucleotide
acugacaacaugugagggu

SEQ ID NO: 2756809 - RNA, 19 nt, Artificial Sequence
  Description of Artificial Sequence: Synthetic oligonucleotide
ggugaguuugauauugagg

SEQ ID NO: 2756810 - RNA, 19 nt, Artificial Sequence
  Description of Artificial Sequence: Synthetic oligonucleotide
ugcacguaccggaccaccg

SEQ ID NO: 2756811 - RNA, 19 nt, Artificial Sequence
  Description of Artificial Sequence: Synthetic oligonucleotide
ugcugaagggcuuccuucc

SEQ ID NO: 2756812 - RNA, 19 nt, Artificial Sequence
  Description of Artificial Sequence: Synthetic oligonucleotide
gagggcaucacuguuucug

SEQ ID NO: 2756813 - RNA, 19 nt, Artificial Sequence
  Description of Artificial Sequence: Synthetic oligonucleotide
accaaugggaacggaacgg

SEQ ID NO: 2756814 - RNA, 19 nt, Artificial Sequence
  Description of Artificial Sequence: Synthetic oligonucleotide
accaccgagccccugauga

SEQ ID NO: 2756815 - RNA, 19 nt, Artificial Sequence
  Description of Artificial Sequence: Synthetic oligonucleotide
uacugguccacagagugga

SEQ ID NO: 2756816 - RNA, 19 nt, Artificial Sequence
  Description of Artificial Sequence: Synthetic oligonucleotide
agaagagcauggugcuggc

SEQ ID NO: 2756817 - RNA, 19 nt, Artificial Sequence
  Description of Artificial Sequence: Synthetic oligonucleotide
agcaguucuugacugacaa

SEQ ID NO: 2756818 - RNA, 19 nt, Artificial Sequence
  Description of Artificial Sequence: Synthetic oligonucleotide
ugcguguccaccucgucug

SEQ ID NO: 2756819 - RNA, 19 nt, Artificial Sequence
  Description of Artificial Sequence: Synthetic oligonucleotide
acgaccacauccuugccca

SEQ ID NO: 2756820 - RNA, 19 nt, Artificial Sequence
  Description of Artificial Sequence: Synthetic oligonucleotide
ucagcuggacaucacguua

SEQ ID NO: 2756821 - RNA, 19 nt, Artificial Sequence
  Description of Artificial Sequence: Synthetic oligonucleotide
guuaggggucaccaauggg

SEQ ID NO: 2756822 - RNA, 19 nt, Artificial Sequence
  Description of Artificial Sequence: Synthetic oligonucleotide
ugagguacugguccacaga

SEQ ID NO: 2756823 - RNA, 19 nt, Artificial Sequence
  Description of Artificial Sequence: Synthetic oligonucleotide
gaugaagcaguucuugacu

SEQ ID NO: 2756824 - RNA, 19 nt, Artificial Sequence
  Description of Artificial Sequence: Synthetic oligonucleotide
gaacggaacgggaggaggg

SEQ ID NO: 2756825 - RNA, 19 nt, Artificial Sequence
  Description of Artificial Sequence: Synthetic oligonucleotide
caggucauucuugaguucc

SEQ ID NO: 2756826 - RNA, 19 nt, Artificial Sequence
  Description of Artificial Sequence: Synthetic oligonucleotide
uucucaggguccgugacgc

SEQ ID NO: 2756827 - RNA, 19 nt, Artificial Sequence
  Description of Artificial Sequence: Synthetic oligonucleotide
caccaaugggaacggaacg

SEQ ID NO: 2756828 - RNA, 19 nt, Artificial Sequence
  Description of Artificial Sequence: Synthetic oligonucleotide
uugagguacugguccacag

SEQ ID NO: 2756829 - RNA, 19 nt, Artificial Sequence
  Description of Artificial Sequence: Synthetic oligonucleotide
caccugaagcacuugccgg

SEQ ID NO: 2756830 - RNA, 19 nt, Artificial Sequence
  Description of Artificial Sequence: Synthetic oligonucleotide
caguucuugacugacaaca

SEQ ID NO: 2756831 - RNA, 19 nt, Artificial Sequence
  Description of Artificial Sequence: Synthetic oligonucleotide
acauccuugcccacaaggg

SEQ ID NO: 2756832 - RNA, 19 nt, Artificial Sequence
  Description of Artificial Sequence: Synthetic oligonucleotide
gaugcucaggucauucuug

SEQ ID NO: 2756833 - RNA, 19 nt, Artificial Sequence
  Description of Artificial Sequence: Synthetic oligonucleotide
acagaugcucaggucauuc

SEQ ID NO: 2756834 - RNA, 19 nt, Artificial Sequence
  Description of Artificial Sequence: Synthetic oligonucleotide
auauugagguacuggucca

SEQ ID NO: 2756835 - RNA, 19 nt, Artificial Sequence
  Description of Artificial Sequence: Synthetic oligonucleotide
uaccggaccaccgagcccc

SEQ ID NO: 2756836 - RNA, 19 nt, Artificial Sequence
  Description of Artificial Sequence: Synthetic oligonucleotide
guucuugacugacaacaug

SEQ ID NO: 2756837 - RNA, 19 nt, Artificial Sequence
  Description of Artificial Sequence: Synthetic oligonucleotide
aucacgcaggcgcagcggg

SEQ ID NO: 2756838 - RNA, 19 nt, Artificial Sequence
  Description of Artificial Sequence: Synthetic oligonucleotide
ugcauccugcagcagcugc

SEQ ID NO: 2756839 - RNA, 19 nt, Artificial Sequence
  Description of Artificial Sequence: Synthetic oligonucleotide
aguggaggguuccacagau

SEQ ID NO: 2756840 - RNA, 19 nt, Artificial Sequence
  Description of Artificial Sequence: Synthetic oligonucleotide
gucggugaguuugauauug

SEQ ID NO: 2756841 - RNA, 19 nt, Artificial Sequence
  Description of Artificial Sequence: Synthetic oligonucleotide
ugaagcaguucuugacuga

SEQ ID NO: 2756842 - RNA, 19 nt, Artificial Sequence
  Description of Artificial Sequence: Synthetic oligonucleotide
guccgugacgcugaugucg

SEQ ID NO: 2756843 - RNA, 19 nt, Artificial Sequence
  Description of Artificial Sequence: Synthetic oligonucleotide
cuuccuggcugcauccugc

SEQ ID NO: 2756844 - RNA, 19 nt, Artificial Sequence
  Description of Artificial Sequence: Synthetic oligonucleotide
acagaggccgggcgggagc

SEQ ID NO: 2756845 - RNA, 19 nt, Artificial Sequence
  Description of Artificial Sequence: Synthetic oligonucleotide
gaagcaguucuugacugac

SEQ ID NO: 2756846 - RNA, 19 nt, Artificial Sequence
  Description of Artificial Sequence: Synthetic oligonucleotide
cauucuugaguuccacgac

SEQ ID NO: 2756847 - RNA, 19 nt, Artificial Sequence
  Description of Artificial Sequence: Synthetic oligonucleotide
gaggguuccacagaugcuc

SEQ ID NO: 2756848 - RNA, 19 nt, Artificial Sequence
  Description of Artificial Sequence: Synthetic oligonucleotide
uuccacgaccacauccuug

SEQ ID NO: 2756849 - RNA, 19 nt, Artificial Sequence
  Description of Artificial Sequence: Synthetic oligonucleotide
uguccaccucgucugccgg

SEQ ID NO: 2756850 - RNA, 19 nt, Artificial Sequence
  Description of Artificial Sequence: Synthetic oligonucleotide
ucugccggcagcugcacgu

SEQ ID NO: 2756851 - RNA, 19 nt, Artificial Sequence
  Description of Artificial Sequence: Synthetic oligonucleotide
uaggggucaccaaugggaa

SEQ ID NO: 2756852 - RNA, 19 nt, Artificial Sequence
  Description of Artificial Sequence: Synthetic oligonucleotide
augugaggguacuucucag

SEQ ID NO: 2756853 - RNA, 19 nt, Artificial Sequence
  Description of Artificial Sequence: Synthetic oligonucleotide
cuugacugacaacauguga

SEQ ID NO: 2756854 - RNA, 19 nt, Artificial Sequence
  Description of Artificial Sequence: Synthetic oligonucleotide
aaaaggaguagaagagcau

SEQ ID NO: 2756855 - RNA, 19 nt, Artificial Sequence
  Description of Artificial Sequence: Synthetic oligonucleotide
cuucucaggguccgugacg

SEQ ID NO: 2756856 - RNA, 19 nt, Artificial Sequence
  Description of Artificial Sequence: Synthetic oligonucleotide
ggggucaccaaugggaacg

SEQ ID NO: 2756857 - RNA, 19 nt, Artificial Sequence
  Description of Artificial Sequence: Synthetic oligonucleotide
ugaguuugauauugaggua

SEQ ID NO: 2756858 - RNA, 19 nt, Artificial Sequence
  Description of Artificial Sequence: Synthetic oligonucleotide
gagagggcaucacuguuuc

SEQ ID NO: 2756859 - RNA, 19 nt, Artificial Sequence
  Description of Artificial Sequence: Synthetic oligonucleotide
aaaacaccugaagcacuug

SEQ ID NO: 2756860 - RNA, 19 nt, Artificial Sequence
  Description of Artificial Sequence: Synthetic oligonucleotide
cagcuggacaucacguuag

SEQ ID NO: 2756861 - RNA, 19 nt, Artificial Sequence
  Description of Artificial Sequence: Synthetic oligonucleotide
aucacguuaggggucacca

SEQ ID NO: 2756862 - RNA, 19 nt, Artificial Sequence
  Description of Artificial Sequence: Synthetic oligonucleotide
ggaguagaagagcauggug

SEQ ID NO: 2756863 - RNA, 19 nt, Artificial Sequence
  Description of Artificial Sequence: Synthetic oligonucleotide
cacgaccacauccuugccc

SEQ ID NO: 2756864 - RNA, 19 nt, Artificial Sequence
  Description of Artificial Sequence: Synthetic oligonucleotide
ggggcugcgggacagaggc

SEQ ID NO: 2756865 - RNA, 19 nt, Artificial Sequence
  Description of Artificial Sequence: Synthetic oligonucleotide
aucacuguuucugcugaag

SEQ ID NO: 2756866 - RNA, 19 nt, Artificial Sequence
  Description of Artificial Sequence: Synthetic oligonucleotide
caugugaggguacuucuca

SEQ ID NO: 2756867 - RNA, 19 nt, Artificial Sequence
  Description of Artificial Sequence: Synthetic oligonucleotide
ugaggguacuucucagggu

SEQ ID NO: 2756868 - RNA, 19 nt, Artificial Sequence
  Description of Artificial Sequence: Synthetic oligonucleotide
uugcccacaagggauuuga

SEQ ID NO: 2756869 - RNA, 19 nt, Artificial Sequence
  Description of Artificial Sequence: Synthetic oligonucleotide
agaugcucaggucauucuu

SEQ ID NO: 2756870 - RNA, 19 nt, Artificial Sequence
  Description of Artificial Sequence: Synthetic oligonucleotide
ucggugaguuugauauuga

SEQ ID NO: 2756871 - RNA, 19 nt, Artificial Sequence
  Description of Artificial Sequence: Synthetic oligonucleotide
aguuccacgaccacauccu

SEQ ID NO: 2756872 - RNA, 19 nt, Artificial Sequence
  Description of Artificial Sequence: Synthetic oligonucleotide
uacuucucaggguccguga

SEQ ID NO: 2756873 - RNA, 19 nt, Artificial Sequence
  Description of Artificial Sequence: Synthetic oligonucleotide
agcuggacaucacguuagg

SEQ ID NO: 2756874 - RNA, 19 nt, Artificial Sequence
  Description of Artificial Sequence: Synthetic oligonucleotide
augcucaggucauucuuga

SEQ ID NO: 2756875 - RNA, 19 nt, Artificial Sequence
  Description of Artificial Sequence: Synthetic oligonucleotide
agcugcacguaccggacca

SEQ ID NO: 2756876 - RNA, 19 nt, Artificial Sequence
  Description of Artificial Sequence: Synthetic oligonucleotide
guguccaccucgucugccg

SEQ ID NO: 2756877 - RNA, 19 nt, Artificial Sequence
  Description of Artificial Sequence: Synthetic oligonucleotide
caacaugugaggguacuuc

SEQ ID NO: 2756878 - RNA, 19 nt, Artificial Sequence
  Description of Artificial Sequence: Synthetic oligonucleotide
ucuugaguuccacgaccac

SEQ ID NO: 2756879 - RNA, 19 nt, Artificial Sequence
  Description of Artificial Sequence: Synthetic oligonucleotide
aggggucaccaaugggaac

SEQ ID NO: 2756880 - RNA, 19 nt, Artificial Sequence
  Description of Artificial Sequence: Synthetic oligonucleotide
cugaugaagcaguucuuga

SEQ ID NO: 2756881 - RNA, 19 nt, Artificial Sequence
  Description of Artificial Sequence: Synthetic oligonucleotide
uguccucagcuggacauca

SEQ ID NO: 2756882 - RNA, 19 nt, Artificial Sequence
  Description of Artificial Sequence: Synthetic oligonucleotide
ugacgcugaugucggugag

SEQ ID NO: 2756883 - RNA, 19 nt, Artificial Sequence
  Description of Artificial Sequence: Synthetic oligonucleotide
acaugugaggguacuucuc

SEQ ID NO: 2756884 - RNA, 19 nt, Artificial Sequence
  Description of Artificial Sequence: Synthetic oligonucleotide
ugcucaggucauucuugag

SEQ ID NO: 2756885 - RNA, 19 nt, Artificial Sequence
  Description of Artificial Sequence: Synthetic oligonucleotide
ugacaacaugugaggguac

SEQ ID NO: 2756886 - RNA, 19 nt, Artificial Sequence
  Description of Artificial Sequence: Synthetic oligonucleotide
acgcgcggcggccugggcc

SEQ ID NO: 2756887 - RNA, 19 nt, Artificial Sequence
  Description of Artificial Sequence: Synthetic oligonucleotide
accgagccccugaugaagc

SEQ ID NO: 2756888 - RNA, 19 nt, Artificial Sequence
  Description of Artificial Sequence: Synthetic oligonucleotide
aguuugauauugagguacu

SEQ ID NO: 2756889 - RNA, 19 nt, Artificial Sequence
  Description of Artificial Sequence: Synthetic oligonucleotide
guguccuuguccucagcug

SEQ ID NO: 2756890 - RNA, 19 nt, Artificial Sequence
  Description of Artificial Sequence: Synthetic oligonucleotide
ucacgcaggcgcagcgggg

SEQ ID NO: 2756891 - RNA, 19 nt, Artificial Sequence
  Description of Artificial Sequence: Synthetic oligonucleotide
acaaacgaaaacaccugaa

SEQ ID NO: 2756892 - RNA, 19 nt, Artificial Sequence
  Description of Artificial Sequence: Synthetic oligonucleotide
uccacagaguggaggguuc

SEQ ID NO: 2756893 - RNA, 19 nt, Artificial Sequence
  Description of Artificial Sequence: Synthetic oligonucleotide
gaagagcauggugcuggcg

SEQ ID NO: 2756894 - RNA, 19 nt, Artificial Sequence
  Description of Artificial Sequence: Synthetic oligonucleotide
uauugagguacugguccac

SEQ ID NO: 2756895 - RNA, 19 nt, Artificial Sequence
  Description of Artificial Sequence: Synthetic oligonucleotide
agcagcugcguguccaccu

SEQ ID NO: 2756896 - RNA, 19 nt, Artificial Sequence
  Description of Artificial Sequence: Synthetic oligonucleotide
aggguacuucucagggucc

SEQ ID NO: 2756897 - RNA, 19 nt, Artificial Sequence
  Description of Artificial Sequence: Synthetic oligonucleotide
cucgucugccggcagcugc

SEQ ID NO: 2756898 - RNA, 19 nt, Artificial Sequence
  Description of Artificial Sequence: Synthetic oligonucleotide
guacugguccacagagugg

SEQ ID NO: 2756899 - RNA, 19 nt, Artificial Sequence
  Description of Artificial Sequence: Synthetic oligonucleotide
cuugaguuccacgaccaca

SEQ ID NO: 2756900 - RNA, 19 nt, Artificial Sequence
  Description of Artificial Sequence: Synthetic oligonucleotide
uggugcuggcgccacgcgc

SEQ ID NO: 2756901 - RNA, 19 nt, Artificial Sequence
  Description of Artificial Sequence: Synthetic oligonucleotide
cccacaagggauuugaaaa

SEQ ID NO: 2756902 - RNA, 19 nt, Artificial Sequence
  Description of Artificial Sequence: Synthetic oligonucleotide
guuugauauugagguacug

SEQ ID NO: 2756903 - RNA, 19 nt, Artificial Sequence
  Description of Artificial Sequence: Synthetic oligonucleotide
gaucacgcaggcgcagcgg

SEQ ID NO: 2756904 - RNA, 19 nt, Artificial Sequence
  Description of Artificial Sequence: Synthetic oligonucleotide
gacaucacguuagggguca

SEQ ID NO: 2756905 - RNA, 19 nt, Artificial Sequence
  Description of Artificial Sequence: Synthetic oligonucleotide
cauccuugcccacaaggga

SEQ ID NO: 2756906 - RNA, 19 nt, Artificial Sequence
  Description of Artificial Sequence: Synthetic oligonucleotide
gaagggcuuccuuccuggc

SEQ ID NO: 2756907 - RNA, 19 nt, Artificial Sequence
  Description of Artificial Sequence: Synthetic oligonucleotide
ucgucugccggcagcugca

SEQ ID NO: 2756908 - RNA, 19 nt, Artificial Sequence
  Description of Artificial Sequence: Synthetic oligonucleotide
cacguaccggaccaccgag

SEQ ID NO: 2756909 - RNA, 19 nt, Artificial Sequence
  Description of Artificial Sequence: Synthetic oligonucleotide
ugggaacggaacgggagga

SEQ ID NO: 2756910 - RNA, 19 nt, Artificial Sequence
  Description of Artificial Sequence: Synthetic oligonucleotide
gugacgcugaugucgguga

SEQ ID NO: 2756911 - RNA, 19 nt, Artificial Sequence
  Description of Artificial Sequence: Synthetic oligonucleotide
cauggugcuggcgccacgc

SEQ ID NO: 2756912 - RNA, 19 nt, Artificial Sequence
  Description of Artificial Sequence: Synthetic oligonucleotide
ggaacggaacgggaggagg

SEQ ID NO: 2756913 - RNA, 19 nt, Artificial Sequence
  Description of Artificial Sequence: Synthetic oligonucleotide
ucaggucauucuugaguuc

SEQ ID NO: 2756914 - RNA, 19 nt, Artificial Sequence
  Description of Artificial Sequence: Synthetic oligonucleotide
gguuccacagaugcucagg

SEQ ID NO: 2756915 - RNA, 19 nt, Artificial Sequence
  Description of Artificial Sequence: Synthetic oligonucleotide
auugagguacugguccaca

SEQ ID NO: 2756916 - RNA, 19 nt, Artificial Sequence
  Description of Artificial Sequence: Synthetic oligonucleotide
gaugucggugaguuugaua

SEQ ID NO: 2756917 - RNA, 19 nt, Artificial Sequence
  Description of Artificial Sequence: Synthetic oligonucleotide
ggcugcauccugcagcagc

SEQ ID NO: 2756918 - RNA, 19 nt, Artificial Sequence
  Description of Artificial Sequence: Synthetic oligonucleotide
accacauccuugcccacaa

SEQ ID NO: 2756919 - RNA, 19 nt, Artificial Sequence
  Description of Artificial Sequence: Synthetic oligonucleotide
cugacaacaugugagggua

SEQ ID NO: 2756920 - RNA, 19 nt, Artificial Sequence
  Description of Artificial Sequence: Synthetic oligonucleotide
uuccacagaugcucagguc

SEQ ID NO: 2756921 - RNA, 19 nt, Artificial Sequence
  Description of Artificial Sequence: Synthetic oligonucleotide
ggcugcgggacagaggccg

SEQ ID NO: 2756922 - RNA, 19 nt, Artificial Sequence
  Description of Artificial Sequence: Synthetic oligonucleotide
ggaucacgcaggcgcagcg

SEQ ID NO: 2756923 - RNA, 19 nt, Artificial Sequence
  Description of Artificial Sequence: Synthetic oligonucleotide
ggugcuggcgccacgcgcg

SEQ ID NO: 2756924 - RNA, 19 nt, Artificial Sequence
  Description of Artificial Sequence: Synthetic oligonucleotide
ucacguuaggggucaccaa

SEQ ID NO: 2756925 - RNA, 19 nt, Artificial Sequence
  Description of Artificial Sequence: Synthetic oligonucleotide
auccuugcccacaagggau

SEQ ID NO: 2756926 - RNA, 19 nt, Artificial Sequence
  Description of Artificial Sequence: Synthetic oligonucleotide
cucaggguccgugacgcug

SEQ ID NO: 2756927 - RNA, 19 nt, Artificial Sequence
  Description of Artificial Sequence: Synthetic oligonucleotide
guagaagagcauggugcug

SEQ ID NO: 2756928 - RNA, 19 nt, Artificial Sequence
  Description of Artificial Sequence: Synthetic oligonucleotide
acguaccggaccaccgagc

SEQ ID NO: 2756929 - RNA, 19 nt, Artificial Sequence
  Description of Artificial Sequence: Synthetic oligonucleotide
auggugcuggcgccacgcg

SEQ ID NO: 2756930 - RNA, 19 nt, Artificial Sequence
  Description of Artificial Sequence: Synthetic oligonucleotide
uuccuggcugcauccugca

SEQ ID NO: 2756931 - RNA, 19 nt, Artificial Sequence
  Description of Artificial Sequence: Synthetic oligonucleotide
acguuaggggucaccaaug

SEQ ID NO: 2756932 - RNA, 19 nt, Artificial Sequence
  Description of Artificial Sequence: Synthetic oligonucleotide
gagcccgagcgcgagcccg

SEQ ID NO: 2756933 - RNA, 19 nt, Artificial Sequence
  Description of Artificial Sequence: Synthetic oligonucleotide
guuccacagaugcucaggu

SEQ ID NO: 2756934 - RNA, 19 nt, Artificial Sequence
  Description of Artificial Sequence: Synthetic oligonucleotide
aguucuugacugacaacau

SEQ ID NO: 2756935 - RNA, 19 nt, Artificial Sequence
  Description of Artificial Sequence: Synthetic oligonucleotide
uccuugcccacaagggauu

SEQ ID NO: 2756936 - RNA, 19 nt, Artificial Sequence
  Description of Artificial Sequence: Synthetic oligonucleotide
gaguggaggguuccacaga

SEQ ID NO: 2756937 - RNA, 19 nt, Artificial Sequence
  Description of Artificial Sequence: Synthetic oligonucleotide
caaugggaacggaacggga

SEQ ID NO: 2756938 - RNA, 19 nt, Artificial Sequence
  Description of Artificial Sequence: Synthetic oligonucleotide
cuuguccucagcuggacau

SEQ ID NO: 2756939 - RNA, 19 nt, Artificial Sequence
  Description of Artificial Sequence: Synthetic oligonucleotide
ccaaugggaacggaacggg

SEQ ID NO: 2756940 - RNA, 19 nt, Artificial Sequence
  Description of Artificial Sequence: Synthetic oligonucleotide
ugaguuccacgaccacauc

SEQ ID NO: 2756941 - RNA, 19 nt, Artificial Sequence
  Description of Artificial Sequence: Synthetic oligonucleotide
agcgcgagcccgcgcgugg

SEQ ID NO: 2756942 - RNA, 19 nt, Artificial Sequence
  Description of Artificial Sequence: Synthetic oligonucleotide
ccugaugaagcaguucuug

SEQ ID NO: 2756943 - RNA, 19 nt, Artificial Sequence
  Description of Artificial Sequence: Synthetic oligonucleotide
ggguccgugacgcugaugu

SEQ ID NO: 2756944 - RNA, 19 nt, Artificial Sequence
  Description of Artificial Sequence: Synthetic oligonucleotide
gaaaacaccugaagcacuu

SEQ ID NO: 2756945 - RNA, 19 nt, Artificial Sequence
  Description of Artificial Sequence: Synthetic oligonucleotide
uccaccucgucugccggca

SEQ ID NO: 2756946 - RNA, 19 nt, Artificial Sequence
  Description of Artificial Sequence: Synthetic oligonucleotide
gcaucacuguuucugcuga

SEQ ID NO: 2756947 - RNA, 19 nt, Artificial Sequence
  Description of Artificial Sequence: Synthetic oligonucleotide
ggcagcugcacguaccgga

SEQ ID NO: 2756948 - RNA, 19 nt, Artificial Sequence
  Description of Artificial Sequence: Synthetic oligonucleotide
caccgagccccugaugaag

SEQ ID NO: 2756949 - RNA, 19 nt, Artificial Sequence
  Description of Artificial Sequence: Synthetic oligonucleotide
caucacguuaggggucacc

SEQ ID NO: 2756950 - RNA, 19 nt, Artificial Sequence
  Description of Artificial Sequence: Synthetic oligonucleotide
gacaacaugugaggguacu

SEQ ID NO: 2756951 - RNA, 19 nt, Artificial Sequence
  Description of Artificial Sequence: Synthetic oligonucleotide
gcuggacaucacguuaggg

SEQ ID NO: 2756952 - RNA, 19 nt, Artificial Sequence
  Description of Artificial Sequence: Synthetic oligonucleotide
ugucggugaguuugauauu

SEQ ID NO: 2756953 - RNA, 19 nt, Artificial Sequence
  Description of Artificial Sequence: Synthetic oligonucleotide
cagcugcguguccaccucg

SEQ ID NO: 2756954 - RNA, 19 nt, Artificial Sequence
  Description of Artificial Sequence: Synthetic oligonucleotide
cgcgacaggaucacgcagg

SEQ ID NO: 2756955 - RNA, 19 nt, Artificial Sequence
  Description of Artificial Sequence: Synthetic oligonucleotide
cugaugucggugaguuuga

SEQ ID NO: 2756956 - RNA, 19 nt, Artificial Sequence
  Description of Artificial Sequence: Synthetic oligonucleotide
acgcugaugucggugaguu

SEQ ID NO: 2756957 - RNA, 19 nt, Artificial Sequence
  Description of Artificial Sequence: Synthetic oligonucleotide
ugcccacaagggauuugaa

SEQ ID NO: 2756958 - RNA, 19 nt, Artificial Sequence
  Description of Artificial Sequence: Synthetic oligonucleotide
ggguacuucucaggguccg

SEQ ID NO: 2756959 - RNA, 19 nt, Artificial Sequence
  Description of Artificial Sequence: Synthetic oligonucleotide
cuguuucugcugaagggcu

SEQ ID NO: 2756960 - RNA, 19 nt, Artificial Sequence
  Description of Artificial Sequence: Synthetic oligonucleotide
guaccggaccaccgagccc

SEQ ID NO: 2756961 - RNA, 19 nt, Artificial Sequence
  Description of Artificial Sequence: Synthetic oligonucleotide
gcucaggucauucuugagu

SEQ ID NO: 2756962 - RNA, 19 nt, Artificial Sequence
  Description of Artificial Sequence: Synthetic oligonucleotide
cugcacguaccggaccacc

SEQ ID NO: 2756963 - RNA, 19 nt, Artificial Sequence
  Description of Artificial Sequence: Synthetic oligonucleotide
uccuuguccucagcuggac

SEQ ID NO: 2756964 - RNA, 19 nt, Artificial Sequence
  Description of Artificial Sequence: Synthetic oligonucleotide
cguuaggggucaccaaugg

SEQ ID NO: 2756965 - RNA, 19 nt, Artificial Sequence
  Description of Artificial Sequence: Synthetic oligonucleotide
gacagaggccgggcgggag

SEQ ID NO: 2756966 - RNA, 19 nt, Artificial Sequence
  Description of Artificial Sequence: Synthetic oligonucleotide
acaggaucacgcaggcgca

SEQ ID NO: 2756967 - RNA, 19 nt, Artificial Sequence
  Description of Artificial Sequence: Synthetic oligonucleotide
acaacaugugaggguacuu

SEQ ID NO: 2756968 - RNA, 19 nt, Artificial Sequence
  Description of Artificial Sequence: Synthetic oligonucleotide
gaccacauccuugcccaca

SEQ ID NO: 2756969 - RNA, 19 nt, Artificial Sequence
  Description of Artificial Sequence: Synthetic oligonucleotide
gucugccggcagcugcacg

SEQ ID NO: 2756970 - RNA, 19 nt, Artificial Sequence
  Description of Artificial Sequence: Synthetic oligonucleotide
cagcugcacguaccggacc

SEQ ID NO: 2756971 - RNA, 19 nt, Artificial Sequence
  Description of Artificial Sequence: Synthetic oligonucleotide
agagggcaucacuguuucu

SEQ ID NO: 2756972 - RNA, 19 nt, Artificial Sequence
  Description of Artificial Sequence: Synthetic oligonucleotide
ugcgggacagaggccgggc

SEQ ID NO: 2756973 - RNA, 19 nt, Artificial Sequence
  Description of Artificial Sequence: Synthetic oligonucleotide
caccucgucugccggcagc

SEQ ID NO: 2756974 - RNA, 19 nt, Artificial Sequence
  Description of Artificial Sequence: Synthetic oligonucleotide
gcgacaggaucacgcaggc

SEQ ID NO: 2756975 - RNA, 19 nt, Artificial Sequence
  Description of Artificial Sequence: Synthetic oligonucleotide
cguaccggaccaccgagcc

SEQ ID NO: 2756976 - RNA, 19 nt, Artificial Sequence
  Description of Artificial Sequence: Synthetic oligonucleotide
gaccaccgagccccugaug

SEQ ID NO: 2756977 - RNA, 19 nt, Artificial Sequence
  Description of Artificial Sequence: Synthetic oligonucleotide
aggguuccacagaugcuca

SEQ ID NO: 2756978 - RNA, 19 nt, Artificial Sequence
  Description of Artificial Sequence: Synthetic oligonucleotide
cuugcccacaagggauuug

SEQ ID NO: 2756979 - RNA, 19 nt, Artificial Sequence
  Description of Artificial Sequence: Synthetic oligonucleotide
cacguuaggggucaccaau

SEQ ID NO: 2756980 - RNA, 19 nt, Artificial Sequence
  Description of Artificial Sequence: Synthetic oligonucleotide
gcuggcgccacgcgcggcg

SEQ ID NO: 2756981 - RNA, 19 nt, Artificial Sequence
  Description of Artificial Sequence: Synthetic oligonucleotide
gguguccuuguccucagcu

SEQ ID NO: 2756982 - RNA, 19 nt, Artificial Sequence
  Description of Artificial Sequence: Synthetic oligonucleotide
gcaguucuugacugacaac

SEQ ID NO: 2756983 - RNA, 19 nt, Artificial Sequence
  Description of Artificial Sequence: Synthetic oligonucleotide
aggucauucuugaguucca

SEQ ID NO: 2756984 - RNA, 19 nt, Artificial Sequence
  Description of Artificial Sequence: Synthetic oligonucleotide
ugccggcagcugcacguac

SEQ ID NO: 2756985 - RNA, 19 nt, Artificial Sequence
  Description of Artificial Sequence: Synthetic oligonucleotide
ggucauucuugaguuccac

SEQ ID NO: 2756986 - RNA, 19 nt, Artificial Sequence
  Description of Artificial Sequence: Synthetic oligonucleotide
cggugaguuugauauugag

SEQ ID NO: 2756987 - RNA, 19 nt, Artificial Sequence
  Description of Artificial Sequence: Synthetic oligonucleotide
cagaggccgggcgggagcc

SEQ ID NO: 2756988 - RNA, 19 nt, Artificial Sequence
  Description of Artificial Sequence: Synthetic oligonucleotide
acaucacguuaggggucac

SEQ ID NO: 2756989 - RNA, 19 nt, Artificial Sequence
  Description of Artificial Sequence: Synthetic oligonucleotide
ucucaggguccgugacgcu

SEQ ID NO: 2756990 - RNA, 19 nt, Artificial Sequence
  Description of Artificial Sequence: Synthetic oligonucleotide
ggguuccacagaugcucag

SEQ ID NO: 2756991 - RNA, 19 nt, Artificial Sequence
  Description of Artificial Sequence: Synthetic oligonucleotide
agguacugguccacagagu

SEQ ID NO: 2756992 - RNA, 19 nt, Artificial Sequence
  Description of Artificial Sequence: Synthetic oligonucleotide
ccgggcgggagcccgagcg

SEQ ID NO: 2756993 - RNA, 19 nt, Artificial Sequence
  Description of Artificial Sequence: Synthetic oligonucleotide
caggaucacgcaggcgcag

SEQ ID NO: 2756994 - RNA, 19 nt, Artificial Sequence
  Description of Artificial Sequence: Synthetic oligonucleotide
gcccacaagggauuugaaa

SEQ ID NO: 2756995 - RNA, 19 nt, Artificial Sequence
  Description of Artificial Sequence: Synthetic oligonucleotide
ccggcagcugcacguaccg

SEQ ID NO: 2756996 - RNA, 19 nt, Artificial Sequence
  Description of Artificial Sequence: Synthetic oligonucleotide
ccugaagcacuugccgggg

SEQ ID NO: 2756997 - RNA, 19 nt, Artificial Sequence
  Description of Artificial Sequence: Synthetic oligonucleotide
gggcgcgacaggaucacgc

SEQ ID NO: 2756998 - RNA, 19 nt, Artificial Sequence
  Description of Artificial Sequence: Synthetic oligonucleotide
gugcuggcgccacgcgcgg

SEQ ID NO: 2756999 - RNA, 19 nt, Artificial Sequence
  Description of Artificial Sequence: Synthetic oligonucleotide
acgcaggcgcagcggggag

SEQ ID NO: 2757000 - RNA, 19 nt, Artificial Sequence
  Description of Artificial Sequence: Synthetic oligonucleotide
agcccgagcgcgagcccgc

SEQ ID NO: 2757001 - RNA, 19 nt, Artificial Sequence
  Description of Artificial Sequence: Synthetic oligonucleotide
uggggcgcgacaggaucac

SEQ ID NO: 2757002 - RNA, 19 nt, Artificial Sequence
  Description of Artificial Sequence: Synthetic oligonucleotide
guggaggguuccacagaug

SEQ ID NO: 2757003 - RNA, 19 nt, Artificial Sequence
  Description of Artificial Sequence: Synthetic oligonucleotide
gcgcgacaggaucacgcag

SEQ ID NO: 2757004 - RNA, 19 nt, Artificial Sequence
  Description of Artificial Sequence: Synthetic oligonucleotide
ggcgcgacaggaucacgca

SEQ ID NO: 2757005 - RNA, 19 nt, Artificial Sequence
  Description of Artificial Sequence: Synthetic oligonucleotide
cugcguguccaccucgucu

SEQ ID NO: 2757006 - RNA, 19 nt, Artificial Sequence
  Description of Artificial Sequence: Synthetic oligonucleotide
gcgggacagaggccgggcg

SEQ ID NO: 2757007 - RNA, 19 nt, Artificial Sequence
  Description of Artificial Sequence: Synthetic oligonucleotide
cagaugcucaggucauucu

SEQ ID NO: 2757008 - RNA, 19 nt, Artificial Sequence
  Description of Artificial Sequence: Synthetic oligonucleotide
ggacaucacguuagggguc

SEQ ID NO: 2757009 - RNA, 19 nt, Artificial Sequence
  Description of Artificial Sequence: Synthetic oligonucleotide
gggaacggaacgggaggag

SEQ ID NO: 2757010 - RNA, 19 nt, Artificial Sequence
  Description of Artificial Sequence: Synthetic oligonucleotide
caucacuguuucugcugaa

SEQ ID NO: 2757011 - RNA, 19 nt, Artificial Sequence
  Description of Artificial Sequence: Synthetic oligonucleotide
gagcauggugcuggcgcca

SEQ ID NO: 2757012 - RNA, 19 nt, Artificial Sequence
  Description of Artificial Sequence: Synthetic oligonucleotide
ugggccgcggcgggacggg

SEQ ID NO: 2757013 - RNA, 19 nt, Artificial Sequence
  Description of Artificial Sequence: Synthetic oligonucleotide
guggggcgcgacaggauca

SEQ ID NO: 2757014 - RNA, 19 nt, Artificial Sequence
  Description of Artificial Sequence: Synthetic oligonucleotide
ccccugaugaagcaguucu

SEQ ID NO: 2757015 - RNA, 19 nt, Artificial Sequence
  Description of Artificial Sequence: Synthetic oligonucleotide
cugggccgcggcgggacgg

SEQ ID NO: 2757016 - RNA, 19 nt, Artificial Sequence
  Description of Artificial Sequence: Synthetic oligonucleotide
agcugcguguccaccucgu

SEQ ID NO: 2757017 - RNA, 19 nt, Artificial Sequence
  Description of Artificial Sequence: Synthetic oligonucleotide
gcacguaccggaccaccga

SEQ ID NO: 2757018 - RNA, 19 nt, Artificial Sequence
  Description of Artificial Sequence: Synthetic oligonucleotide
cucagcuggacaucacguu

SEQ ID NO: 2757019 - RNA, 19 nt, Artificial Sequence
  Description of Artificial Sequence: Synthetic oligonucleotide
cacagaguggaggguucca

SEQ ID NO: 2757020 - RNA, 19 nt, Artificial Sequence
  Description of Artificial Sequence: Synthetic oligonucleotide
gcagcugcacguaccggac

SEQ ID NO: 2757021 - RNA, 19 nt, Artificial Sequence
  Description of Artificial Sequence: Synthetic oligonucleotide
gccgcggcgggacgggccg

SEQ ID NO: 2757022 - RNA, 19 nt, Artificial Sequence
  Description of Artificial Sequence: Synthetic oligonucleotide
gacgcugaugucggugagu

SEQ ID NO: 2757023 - RNA, 19 nt, Artificial Sequence
  Description of Artificial Sequence: Synthetic oligonucleotide
uggcgccacgcgcggcggc

SEQ ID NO: 2757024 - RNA, 19 nt, Artificial Sequence
  Description of Artificial Sequence: Synthetic oligonucleotide
gcagcagcugcguguccac

SEQ ID NO: 2757025 - RNA, 19 nt, Artificial Sequence
  Description of Artificial Sequence: Synthetic oligonucleotide
cacgcaggcgcagcgggga

SEQ ID NO: 2757026 - RNA, 19 nt, Artificial Sequence
  Description of Artificial Sequence: Synthetic oligonucleotide
cugcauccugcagcagcug

SEQ ID NO: 2757027 - RNA, 19 nt, Artificial Sequence
  Description of Artificial Sequence: Synthetic oligonucleotide
gcauggugcuggcgccacg

SEQ ID NO: 2757028 - RNA, 19 nt, Artificial Sequence
  Description of Artificial Sequence: Synthetic oligonucleotide
ccacagaguggaggguucc

SEQ ID NO: 2757029 - RNA, 19 nt, Artificial Sequence
  Description of Artificial Sequence: Synthetic oligonucleotide
gagcgcgagcccgcgcgug

SEQ ID NO: 2757030 - RNA, 19 nt, Artificial Sequence
  Description of Artificial Sequence: Synthetic oligonucleotide
uggcugcauccugcagcag

SEQ ID NO: 2757031 - RNA, 19 nt, Artificial Sequence
  Description of Artificial Sequence: Synthetic oligonucleotide
cgggacagaggccgggcgg

SEQ ID NO: 2757032 - RNA, 19 nt, Artificial Sequence
  Description of Artificial Sequence: Synthetic oligonucleotide
gagcccgcgcguggggcgc

SEQ ID NO: 2757033 - RNA, 19 nt, Artificial Sequence
  Description of Artificial Sequence: Synthetic oligonucleotide
cuggcgccacgcgcggcgg

SEQ ID NO: 2757034 - RNA, 19 nt, Artificial Sequence
  Description of Artificial Sequence: Synthetic oligonucleotide
cgugacgcugaugucggug

SEQ ID NO: 2757035 - RNA, 19 nt, Artificial Sequence
  Description of Artificial Sequence: Synthetic oligonucleotide
guccucagcuggacaucac

SEQ ID NO: 2757036 - RNA, 19 nt, Artificial Sequence
  Description of Artificial Sequence: Synthetic oligonucleotide
guccacagaguggaggguu

SEQ ID NO: 2757037 - RNA, 19 nt, Artificial Sequence
  Description of Artificial Sequence: Synthetic oligonucleotide
cguggggcgcgacaggauc

SEQ ID NO: 2757038 - RNA, 19 nt, Artificial Sequence
  Description of Artificial Sequence: Synthetic oligonucleotide
gguccgugacgcugauguc

SEQ ID NO: 2757039 - RNA, 19 nt, Artificial Sequence
  Description of Artificial Sequence: Synthetic oligonucleotide
ccucagcuggacaucacgu

SEQ ID NO: 2757040 - RNA, 19 nt, Artificial Sequence
  Description of Artificial Sequence: Synthetic oligonucleotide
gccggcagcugcacguacc

SEQ ID NO: 2757041 - RNA, 19 nt, Artificial Sequence
  Description of Artificial Sequence: Synthetic oligonucleotide
ggguguccuuguccucagc

SEQ ID NO: 2757042 - RNA, 19 nt, Artificial Sequence
  Description of Artificial Sequence: Synthetic oligonucleotide
cgcgcggcggccugggccg

SEQ ID NO: 2757043 - RNA, 19 nt, Artificial Sequence
  Description of Artificial Sequence: Synthetic oligonucleotide
aggguccgugacgcugaug

SEQ ID NO: 2757044 - RNA, 19 nt, Artificial Sequence
  Description of Artificial Sequence: Synthetic oligonucleotide
gcguguccaccucgucugc

SEQ ID NO: 2757045 - RNA, 19 nt, Artificial Sequence
  Description of Artificial Sequence: Synthetic oligonucleotide
guuccacgaccacauccuu

SEQ ID NO: 2757046 - RNA, 19 nt, Artificial Sequence
  Description of Artificial Sequence: Synthetic oligonucleotide
ggagcccgagcgcgagccc

SEQ ID NO: 2757047 - RNA, 19 nt, Artificial Sequence
  Description of Artificial Sequence: Synthetic oligonucleotide
gggcaucacuguuucugcu

SEQ ID NO: 2757048 - RNA, 19 nt, Artificial Sequence
  Description of Artificial Sequence: Synthetic oligonucleotide
ccuuguccucagcuggaca

SEQ ID NO: 2757049 - RNA, 19 nt, Artificial Sequence
  Description of Artificial Sequence: Synthetic oligonucleotide
cgaaaacaccugaagcacu

SEQ ID NO: 2757050 - RNA, 19 nt, Artificial Sequence
  Description of Artificial Sequence: Synthetic oligonucleotide
ccacgaccacauccuugcc

SEQ ID NO: 2757051 - RNA, 19 nt, Artificial Sequence
  Description of Artificial Sequence: Synthetic oligonucleotide
ggagagggcaucacuguuu

SEQ ID NO: 2757052 - RNA, 19 nt, Artificial Sequence
  Description of Artificial Sequence: Synthetic oligonucleotide
gcugaagggcuuccuuccu

SEQ ID NO: 2757053 - RNA, 19 nt, Artificial Sequence
  Description of Artificial Sequence: Synthetic oligonucleotide
gcugcguguccaccucguc

SEQ ID NO: 2757054 - RNA, 19 nt, Artificial Sequence
  Description of Artificial Sequence: Synthetic oligonucleotide
cgagccccugaugaagcag

SEQ ID NO: 2757055 - RNA, 19 nt, Artificial Sequence
  Description of Artificial Sequence: Synthetic oligonucleotide
ggggcgcgacaggaucacg

SEQ ID NO: 2757056 - RNA, 19 nt, Artificial Sequence
  Description of Artificial Sequence: Synthetic oligonucleotide
gggagagggcaucacuguu

SEQ ID NO: 2757057 - RNA, 19 nt, Artificial Sequence
  Description of Artificial Sequence: Synthetic oligonucleotide
cgagcccgcgcguggggcg

SEQ ID NO: 2757058 - RNA, 19 nt, Artificial Sequence
  Description of Artificial Sequence: Synthetic oligonucleotide
ggaggguuccacagaugcu

SEQ ID NO: 2757059 - RNA, 19 nt, Artificial Sequence
  Description of Artificial Sequence: Synthetic oligonucleotide
gcgcguggggcgcgacagg

SEQ ID NO: 2757060 - RNA, 19 nt, Artificial Sequence
  Description of Artificial Sequence: Synthetic oligonucleotide
cacgcgcggcggccugggc

SEQ ID NO: 2757061 - RNA, 19 nt, Artificial Sequence
  Description of Artificial Sequence: Synthetic oligonucleotide
gcugcacguaccggaccac

SEQ ID NO: 2757062 - RNA, 19 nt, Artificial Sequence
  Description of Artificial Sequence: Synthetic oligonucleotide
agcccgcgcguggggcgcg

SEQ ID NO: 2757063 - RNA, 19 nt, Artificial Sequence
  Description of Artificial Sequence: Synthetic oligonucleotide
cguguccaccucgucugcc

SEQ ID NO: 2757064 - RNA, 19 nt, Artificial Sequence
  Description of Artificial Sequence: Synthetic oligonucleotide
ggcgccacgcgcggcggcc

SEQ ID NO: 2757065 - RNA, 19 nt, Artificial Sequence
  Description of Artificial Sequence: Synthetic oligonucleotide
gccccugaugaagcaguuc

SEQ ID NO: 2757066 - RNA, 19 nt, Artificial Sequence
  Description of Artificial Sequence: Synthetic oligonucleotide
cgacaggaucacgcaggcg

SEQ ID NO: 2757067 - RNA, 19 nt, Artificial Sequence
  Description of Artificial Sequence: Synthetic oligonucleotide
gcgagcccgcgcguggggc

SEQ ID NO: 2757068 - RNA, 19 nt, Artificial Sequence
  Description of Artificial Sequence: Synthetic oligonucleotide
gcgggagcccgagcgcgag

SEQ ID NO: 2757069 - RNA, 19 nt, Artificial Sequence
  Description of Artificial Sequence: Synthetic oligonucleotide
cgcgcguggggcgcgacag

SEQ ID NO: 2757070 - RNA, 19 nt, Artificial Sequence
  Description of Artificial Sequence: Synthetic oligonucleotide
ccacagaugcucaggucau

SEQ ID NO: 2757071 - RNA, 19 nt, Artificial Sequence
  Description of Artificial Sequence: Synthetic oligonucleotide
gguacuucucaggguccgu

SEQ ID NO: 2757072 - RNA, 19 nt, Artificial Sequence
  Description of Artificial Sequence: Synthetic oligonucleotide
gcgcgagcccgcgcguggg

SEQ ID NO: 2757073 - RNA, 19 nt, Artificial Sequence
  Description of Artificial Sequence: Synthetic oligonucleotide
ccugggccgcggcgggacg

SEQ ID NO: 2757074 - RNA, 19 nt, Artificial Sequence
  Description of Artificial Sequence: Synthetic oligonucleotide
ccgagccccugaugaagca

SEQ ID NO: 2757075 - RNA, 19 nt, Artificial Sequence
  Description of Artificial Sequence: Synthetic oligonucleotide
ccaccucgucugccggcag

SEQ ID NO: 2757076 - RNA, 19 nt, Artificial Sequence
  Description of Artificial Sequence: Synthetic oligonucleotide
gguccacagaguggagggu

SEQ ID NO: 2757077 - RNA, 19 nt, Artificial Sequence
  Description of Artificial Sequence: Synthetic oligonucleotide
ccaccgagccccugaugaa

SEQ ID NO: 2757078 - RNA, 19 nt, Artificial Sequence
  Description of Artificial Sequence: Synthetic oligonucleotide
ggccgcggcgggacgggcc

SEQ ID NO: 2757079 - RNA, 19 nt, Artificial Sequence
  Description of Artificial Sequence: Synthetic oligonucleotide
gccacgcgcggcggccugg

SEQ ID NO: 2757080 - RNA, 19 nt, Artificial Sequence
  Description of Artificial Sequence: Synthetic oligonucleotide
ggacagaggccgggcggga

SEQ ID NO: 2757081 - RNA, 19 nt, Artificial Sequence
  Description of Artificial Sequence: Synthetic oligonucleotide
ggaccaccgagccccugau

SEQ ID NO: 2757082 - RNA, 19 nt, Artificial Sequence
  Description of Artificial Sequence: Synthetic oligonucleotide
accggaccaccgagccccu

SEQ ID NO: 2757083 - RNA, 19 nt, Artificial Sequence
  Description of Artificial Sequence: Synthetic oligonucleotide
gggcugcgggacagaggcc

SEQ ID NO: 2757084 - RNA, 19 nt, Artificial Sequence
  Description of Artificial Sequence: Synthetic oligonucleotide
cgaccacauccuugcccac

SEQ ID NO: 2757085 - RNA, 19 nt, Artificial Sequence
  Description of Artificial Sequence: Synthetic oligonucleotide
cugccggcagcugcacgua

SEQ ID NO: 2757086 - RNA, 19 nt, Artificial Sequence
  Description of Artificial Sequence: Synthetic oligonucleotide
gcccgagcgcgagcccgcg

SEQ ID NO: 2757087 - RNA, 19 nt, Artificial Sequence
  Description of Artificial Sequence: Synthetic oligonucleotide
cgggcgggagcccgagcgc

SEQ ID NO: 2757088 - RNA, 19 nt, Artificial Sequence
  Description of Artificial Sequence: Synthetic oligonucleotide
cacagaugcucaggucauu

SEQ ID NO: 2757089 - RNA, 19 nt, Artificial Sequence
  Description of Artificial Sequence: Synthetic oligonucleotide
ccacgcgcggcggccuggg

SEQ ID NO: 2757090 - RNA, 19 nt, Artificial Sequence
  Description of Artificial Sequence: Synthetic oligonucleotide
ggccgggcgggagcccgag

SEQ ID NO: 2757091 - RNA, 19 nt, Artificial Sequence
  Description of Artificial Sequence: Synthetic oligonucleotide
cccgagcgcgagcccgcgc

SEQ ID NO: 2757092 - RNA, 19 nt, Artificial Sequence
  Description of Artificial Sequence: Synthetic oligonucleotide
cgcaggcgcagcggggagc

SEQ ID NO: 2757093 - RNA, 19 nt, Artificial Sequence
  Description of Artificial Sequence: Synthetic oligonucleotide
cggcagcugcacguaccgg

SEQ ID NO: 2757094 - RNA, 19 nt, Artificial Sequence
  Description of Artificial Sequence: Synthetic oligonucleotide
ggcgggagcccgagcgcga

SEQ ID NO: 2757095 - RNA, 19 nt, Artificial Sequence
  Description of Artificial Sequence: Synthetic oligonucleotide
cgcgagcccgcgcgugggg

SEQ ID NO: 2757096 - RNA, 19 nt, Artificial Sequence
  Description of Artificial Sequence: Synthetic oligonucleotide
ccucgucugccggcagcug

SEQ ID NO: 2757097 - RNA, 19 nt, Artificial Sequence
  Description of Artificial Sequence: Synthetic oligonucleotide
gccgggcgggagcccgagc

SEQ ID NO: 2757098 - RNA, 19 nt, Artificial Sequence
  Description of Artificial Sequence: Synthetic oligonucleotide
aggccgggcgggagcccga

SEQ ID NO: 2757099 - RNA, 19 nt, Artificial Sequence
  Description of Artificial Sequence: Synthetic oligonucleotide
cccugaugaagcaguucuu

SEQ ID NO: 2757100 - RNA, 19 nt, Artificial Sequence
  Description of Artificial Sequence: Synthetic oligonucleotide
gcggcgggacgggccgggg

SEQ ID NO: 2757101 - RNA, 19 nt, Artificial Sequence
  Description of Artificial Sequence: Synthetic oligonucleotide
cgcguggggcgcgacagga

SEQ ID NO: 2757102 - RNA, 19 nt, Artificial Sequence
  Description of Artificial Sequence: Synthetic oligonucleotide
cggccugggccgcggcggg

SEQ ID NO: 2757103 - RNA, 19 nt, Artificial Sequence
  Description of Artificial Sequence: Synthetic oligonucleotide
cgggagcccgagcgcgagc

SEQ ID NO: 2757104 - RNA, 19 nt, Artificial Sequence
  Description of Artificial Sequence: Synthetic oligonucleotide
caggguccgugacgcugau

SEQ ID NO: 2757105 - RNA, 19 nt, Artificial Sequence
  Description of Artificial Sequence: Synthetic oligonucleotide
cgucugccggcagcugcac

SEQ ID NO: 2757106 - RNA, 19 nt, Artificial Sequence
  Description of Artificial Sequence: Synthetic oligonucleotide
gggccgcggcgggacgggc

SEQ ID NO: 2757107 - RNA, 19 nt, Artificial Sequence
  Description of Artificial Sequence: Synthetic oligonucleotide
cgcggcgggacgggccggg

SEQ ID NO: 2757108 - RNA, 19 nt, Artificial Sequence
  Description of Artificial Sequence: Synthetic oligonucleotide
ccggaccaccgagccccug

SEQ ID NO: 2757109 - RNA, 19 nt, Artificial Sequence
  Description of Artificial Sequence: Synthetic oligonucleotide
ccgcgcguggggcgcgaca

SEQ ID NO: 2757110 - RNA, 19 nt, Artificial Sequence
  Description of Artificial Sequence: Synthetic oligonucleotide
ccuugcccacaagggauuu

SEQ ID NO: 2757111 - RNA, 19 nt, Artificial Sequence
  Description of Artificial Sequence: Synthetic oligonucleotide
ccgcggcgggacgggccgg

SEQ ID NO: 2757112 - RNA, 19 nt, Artificial Sequence
  Description of Artificial Sequence: Synthetic oligonucleotide
cgccacgcgcggcggccug

SEQ ID NO: 2757113 - RNA, 19 nt, Artificial Sequence
  Description of Artificial Sequence: Synthetic oligonucleotide
gcguggggcgcgacaggau

SEQ ID NO: 2757114 - RNA, 19 nt, Artificial Sequence
  Description of Artificial Sequence: Synthetic oligonucleotide
ccgugacgcugaugucggu

SEQ ID NO: 2757115 - RNA, 19 nt, Artificial Sequence
  Description of Artificial Sequence: Synthetic oligonucleotide
cccgcgcguggggcgcgac

SEQ ID NO: 2757116 - RNA, 19 nt, Artificial Sequence
  Description of Artificial Sequence: Synthetic oligonucleotide
cgagcgcgagcccgcgcgu

SEQ ID NO: 2757117 - RNA, 19 nt, Artificial Sequence
  Description of Artificial Sequence: Synthetic oligonucleotide
gcgccacgcgcggcggccu

SEQ ID NO: 2757118 - RNA, 19 nt, Artificial Sequence
  Description of Artificial Sequence: Synthetic oligonucleotide
gcccgcgcguggggcgcga

SEQ ID NO: 2757119 - RNA, 19 nt, Artificial Sequence
  Description of Artificial Sequence: Synthetic oligonucleotide
ugaugcuucauuaugagcg

SEQ ID NO: 2757120 - RNA, 19 nt, Artificial Sequence
  Description of Artificial Sequence: Synthetic oligonucleotide
uucauuaugagcgacaggg

SEQ ID NO: 2757121 - RNA, 19 nt, Artificial Sequence
  Description of Artificial Sequence: Synthetic oligonucleotide
aaacuaaaacucaauagcc

SEQ ID NO: 2757122 - RNA, 19 nt, Artificial Sequence
  Description of Artificial Sequence: Synthetic oligonucleotide
ucaauagccaguaauggcc

SEQ ID NO: 2757123 - RNA, 19 nt, Artificial Sequence
  Description of Artificial Sequence: Synthetic oligonucleotide
acaaacuaaaacucaauag

SEQ ID NO: 2757124 - RNA, 19 nt, Artificial Sequence
  Description of Artificial Sequence: Synthetic oligonucleotide
ucaucauugcccaagacca

SEQ ID NO: 2757125 - RNA, 19 nt, Artificial Sequence
  Description of Artificial Sequence: Synthetic oligonucleotide
uucacuuuaauuagcaucu

SEQ ID NO: 2757126 - RNA, 19 nt, Artificial Sequence
  Description of Artificial Sequence: Synthetic oligonucleotide
gaaucuuguaaucagcugc

SEQ ID NO: 2757127 - RNA, 19 nt, Artificial Sequence
  Description of Artificial Sequence: Synthetic oligonucleotide
uuaauuagcaucuuccuuc

SEQ ID NO: 2757128 - RNA, 19 nt, Artificial Sequence
  Description of Artificial Sequence: Synthetic oligonucleotide
acuuuaauuagcaucuucc

SEQ ID NO: 2757129 - RNA, 19 nt, Artificial Sequence
  Description of Artificial Sequence: Synthetic oligonucleotide
aguaauggccaauuugggc

SEQ ID NO: 2757130 - RNA, 19 nt, Artificial Sequence
  Description of Artificial Sequence: Synthetic oligonucleotide
acuaaaacucaauagccag

SEQ ID NO: 2757131 - RNA, 19 nt, Artificial Sequence
  Description of Artificial Sequence: Synthetic oligonucleotide
uucaucauugcccaagacc

SEQ ID NO: 2757132 - RNA, 19 nt, Artificial Sequence
  Description of Artificial Sequence: Synthetic oligonucleotide
uugacaaccaaggacauag

SEQ ID NO: 2757133 - RNA, 19 nt, Artificial Sequence
  Description of Artificial Sequence: Synthetic oligonucleotide
auuuuauugacaaccaagg

SEQ ID NO: 2757134 - RNA, 19 nt, Artificial Sequence
  Description of Artificial Sequence: Synthetic oligonucleotide
aauuugggccaguaacacc

SEQ ID NO: 2757135 - RNA, 19 nt, Artificial Sequence
  Description of Artificial Sequence: Synthetic oligonucleotide
aaggacauagccauaagag

SEQ ID NO: 2757136 - RNA, 19 nt, Artificial Sequence
  Description of Artificial Sequence: Synthetic oligonucleotide
ucuaagagccaacacuagg

SEQ ID NO: 2757137 - RNA, 19 nt, Artificial Sequence
  Description of Artificial Sequence: Synthetic oligonucleotide
guaauggccaauuugggcc

SEQ ID NO: 2757138 - RNA, 19 nt, Artificial Sequence
  Description of Artificial Sequence: Synthetic oligonucleotide
uuugauucgcuccaccuug

SEQ ID NO: 2757139 - RNA, 19 nt, Artificial Sequence
  Description of Artificial Sequence: Synthetic oligonucleotide
aagagccaacacuaggugg

SEQ ID NO: 2757140 - RNA, 19 nt, Artificial Sequence
  Description of Artificial Sequence: Synthetic oligonucleotide
aaacucaauagccaguaau

SEQ ID NO: 2757141 - RNA, 19 nt, Artificial Sequence
  Description of Artificial Sequence: Synthetic oligonucleotide
cuucacuuuaauuagcauc

SEQ ID NO: 2757142 - RNA, 19 nt, Artificial Sequence
  Description of Artificial Sequence: Synthetic oligonucleotide
aguaacaccgcacccgugg

SEQ ID NO: 2757143 - RNA, 19 nt, Artificial Sequence
  Description of Artificial Sequence: Synthetic oligonucleotide
auuagcaucuuccuuccag

SEQ ID NO: 2757144 - RNA, 19 nt, Artificial Sequence
  Description of Artificial Sequence: Synthetic oligonucleotide
auuugggccaguaacaccg

SEQ ID NO: 2757145 - RNA, 19 nt, Artificial Sequence
  Description of Artificial Sequence: Synthetic oligonucleotide
uagaaucuuguaaucagcu

SEQ ID NO: 2757146 - RNA, 19 nt, Artificial Sequence
  Description of Artificial Sequence: Synthetic oligonucleotide
uccucuaagagccaacacu

SEQ ID NO: 2757147 - RNA, 19 nt, Artificial Sequence
  Description of Artificial Sequence: Synthetic oligonucleotide
aacucaauagccaguaaug

SEQ ID NO: 2757148 - RNA, 19 nt, Artificial Sequence
  Description of Artificial Sequence: Synthetic oligonucleotide
aagaguugggcauccgaag

SEQ ID NO: 2757149 - RNA, 19 nt, Artificial Sequence
  Description of Artificial Sequence: Synthetic oligonucleotide
ugugaugcuucauuaugag

SEQ ID NO: 2757150 - RNA, 19 nt, Artificial Sequence
  Description of Artificial Sequence: Synthetic oligonucleotide
agcgucuucacuuuaauua

SEQ ID NO: 2757151 - RNA, 19 nt, Artificial Sequence
  Description of Artificial Sequence: Synthetic oligonucleotide
auuuguuugccacuguaga

SEQ ID NO: 2757152 - RNA, 19 nt, Artificial Sequence
  Description of Artificial Sequence: Synthetic oligonucleotide
uuuaauuagcaucuuccuu

SEQ ID NO: 2757153 - RNA, 19 nt, Artificial Sequence
  Description of Artificial Sequence: Synthetic oligonucleotide
cuagaaucuuguaaucagc

SEQ ID NO: 2757154 - RNA, 19 nt, Artificial Sequence
  Description of Artificial Sequence: Synthetic oligonucleotide
gaccgagccaccuagaauc

SEQ ID NO: 2757155 - RNA, 19 nt, Artificial Sequence
  Description of Artificial Sequence: Synthetic oligonucleotide
agacacacaagaguugggc

SEQ ID NO: 2757156 - RNA, 19 nt, Artificial Sequence
  Description of Artificial Sequence: Synthetic oligonucleotide
agaguugggcauccgaagg

SEQ ID NO: 2757157 - RNA, 19 nt, Artificial Sequence
  Description of Artificial Sequence: Synthetic oligonucleotide
ugaaguggaaccgagguuc

SEQ ID NO: 2757158 - RNA, 19 nt, Artificial Sequence
  Description of Artificial Sequence: Synthetic oligonucleotide
cucaauagccaguaauggc

SEQ ID NO: 2757159 - RNA, 19 nt, Artificial Sequence
  Description of Artificial Sequence: Synthetic oligonucleotide
gacaaccaaggacauagcc

SEQ ID NO: 2757160 - RNA, 19 nt, Artificial Sequence
  Description of Artificial Sequence: Synthetic oligonucleotide
aagcacacaggacugacaa

SEQ ID NO: 2757161 - RNA, 19 nt, Artificial Sequence
  Description of Artificial Sequence: Synthetic oligonucleotide
guagacacacaagaguugg

SEQ ID NO: 2757162 - RNA, 19 nt, Artificial Sequence
  Description of Artificial Sequence: Synthetic oligonucleotide
auucgcuccaccuugucug

SEQ ID NO: 2757163 - RNA, 19 nt, Artificial Sequence
  Description of Artificial Sequence: Synthetic oligonucleotide
ccaguaauggccaauuugg

SEQ ID NO: 2757164 - RNA, 19 nt, Artificial Sequence
  Description of Artificial Sequence: Synthetic oligonucleotide
uaauuagcaucuuccuucc

SEQ ID NO: 2757165 - RNA, 19 nt, Artificial Sequence
  Description of Artificial Sequence: Synthetic oligonucleotide
uaagagccaacacuaggug

SEQ ID NO: 2757166 - RNA, 19 nt, Artificial Sequence
  Description of Artificial Sequence: Synthetic oligonucleotide
aacacuagguggaggaccg

SEQ ID NO: 2757167 - RNA, 19 nt, Artificial Sequence
  Description of Artificial Sequence: Synthetic oligonucleotide
aacuaaaacucaauagcca

SEQ ID NO: 2757168 - RNA, 19 nt, Artificial Sequence
  Description of Artificial Sequence: Synthetic oligonucleotide
cuuguaaucagcugcuguc

SEQ ID NO: 2757169 - RNA, 19 nt, Artificial Sequence
  Description of Artificial Sequence: Synthetic oligonucleotide
acucaauagccaguaaugg

SEQ ID NO: 2757170 - RNA, 19 nt, Artificial Sequence
  Description of Artificial Sequence: Synthetic oligonucleotide
ucuuguaaucagcugcugu

SEQ ID NO: 2757171 - RNA, 19 nt, Artificial Sequence
  Description of Artificial Sequence: Synthetic oligonucleotide
accgagguucaucauugcc

SEQ ID NO: 2757172 - RNA, 19 nt, Artificial Sequence
  Description of Artificial Sequence: Synthetic oligonucleotide
auagccauaagagagggaa

SEQ ID NO: 2757173 - RNA, 19 nt, Artificial Sequence
  Description of Artificial Sequence: Synthetic oligonucleotide
uguuugccacuguagauga

SEQ ID NO: 2757174 - RNA, 19 nt, Artificial Sequence
  Description of Artificial Sequence: Synthetic oligonucleotide
cauuuguuugccacuguag

SEQ ID NO: 2757175 - RNA, 19 nt, Artificial Sequence
  Description of Artificial Sequence: Synthetic oligonucleotide
gacaaacuaaaacucaaua

SEQ ID NO: 2757176 - RNA, 19 nt, Artificial Sequence
  Description of Artificial Sequence: Synthetic oligonucleotide
acgcucuuugauucgcucc

SEQ ID NO: 2757177 - RNA, 19 nt, Artificial Sequence
  Description of Artificial Sequence: Synthetic oligonucleotide
uuguuugccacuguagaug

SEQ ID NO: 2757178 - RNA, 19 nt, Artificial Sequence
  Description of Artificial Sequence: Synthetic oligonucleotide
ucaaucuccuuuccaguca

SEQ ID NO: 2757179 - RNA, 19 nt, Artificial Sequence
  Description of Artificial Sequence: Synthetic oligonucleotide
ucuuugauucgcuccaccu

SEQ ID NO: 2757180 - RNA, 19 nt, Artificial Sequence
  Description of Artificial Sequence: Synthetic oligonucleotide
ggacauagccauaagagag

SEQ ID NO: 2757181 - RNA, 19 nt, Artificial Sequence
  Description of Artificial Sequence: Synthetic oligonucleotide
agaaucuuguaaucagcug

SEQ ID NO: 2757182 - RNA, 19 nt, Artificial Sequence
  Description of Artificial Sequence: Synthetic oligonucleotide
aggacauagccauaagaga

SEQ ID NO: 2757183 - RNA, 19 nt, Artificial Sequence
  Description of Artificial Sequence: Synthetic oligonucleotide
uugggcauccgaagggagg

SEQ ID NO: 2757184 - RNA, 19 nt, Artificial Sequence
  Description of Artificial Sequence: Synthetic oligonucleotide
gaguugggcauccgaaggg

SEQ ID NO: 2757185 - RNA, 19 nt, Artificial Sequence
  Description of Artificial Sequence: Synthetic oligonucleotide
aaucuuguaaucagcugcu

SEQ ID NO: 2757186 - RNA, 19 nt, Artificial Sequence
  Description of Artificial Sequence: Synthetic oligonucleotide
uuucucuuccacacgcucu

SEQ ID NO: 2757187 - RNA, 19 nt, Artificial Sequence
  Description of Artificial Sequence: Synthetic oligonucleotide
uuucaaucuccuuuccagu

SEQ ID NO: 2757188 - RNA, 19 nt, Artificial Sequence
  Description of Artificial Sequence: Synthetic oligonucleotide
uaaaacucaauagccagua

SEQ ID NO: 2757189 - RNA, 19 nt, Artificial Sequence
  Description of Artificial Sequence: Synthetic oligonucleotide
ucauuaugagcgacagggc

SEQ ID NO: 2757190 - RNA, 19 nt, Artificial Sequence
  Description of Artificial Sequence: Synthetic oligonucleotide
acauagccauaagagaggg

SEQ ID NO: 2757191 - RNA, 19 nt, Artificial Sequence
  Description of Artificial Sequence: Synthetic oligonucleotide
aaccgagguucaucauugc

SEQ ID NO: 2757192 - RNA, 19 nt, Artificial Sequence
  Description of Artificial Sequence: Synthetic oligonucleotide
cauaagagagggaagcaca

SEQ ID NO: 2757193 - RNA, 19 nt, Artificial Sequence
  Description of Artificial Sequence: Synthetic oligonucleotide
uuuguuugccacuguagau

SEQ ID NO: 2757194 - RNA, 19 nt, Artificial Sequence
  Description of Artificial Sequence: Synthetic oligonucleotide
uguggguucaaugucaauu

SEQ ID NO: 2757195 - RNA, 19 nt, Artificial Sequence
  Description of Artificial Sequence: Synthetic oligonucleotide
uucaaucuccuuuccaguc

SEQ ID NO: 2757196 - RNA, 19 nt, Artificial Sequence
  Description of Artificial Sequence: Synthetic oligonucleotide
cuagguggaggaccgagcc

SEQ ID NO: 2757197 - RNA, 19 nt, Artificial Sequence
  Description of Artificial Sequence: Synthetic oligonucleotide
uccacacgcucuuugauuc

SEQ ID NO: 2757198 - RNA, 19 nt, Artificial Sequence
  Description of Artificial Sequence: Synthetic oligonucleotide
gacugacaaacuaaaacuc

SEQ ID NO: 2757199 - RNA, 19 nt, Artificial Sequence
  Description of Artificial Sequence: Synthetic oligonucleotide
uagacacacaagaguuggg

SEQ ID NO: 2757200 - RNA, 19 nt, Artificial Sequence
  Description of Artificial Sequence: Synthetic oligonucleotide
ugacaaacuaaaacucaau

SEQ ID NO: 2757201 - RNA, 19 nt, Artificial Sequence
  Description of Artificial Sequence: Synthetic oligonucleotide
gaaccgagguucaucauug

SEQ ID NO: 2757202 - RNA, 19 nt, Artificial Sequence
  Description of Artificial Sequence: Synthetic oligonucleotide
caguaauggccaauuuggg

SEQ ID NO: 2757203 - RNA, 19 nt, Artificial Sequence
  Description of Artificial Sequence: Synthetic oligonucleotide
agugagaggacgugugaug

SEQ ID NO: 2757204 - RNA, 19 nt, Artificial Sequence
  Description of Artificial Sequence: Synthetic oligonucleotide
uuaugagcgacagggcaag

SEQ ID NO: 2757205 - RNA, 19 nt, Artificial Sequence
  Description of Artificial Sequence: Synthetic oligonucleotide
gagggaagcacacaggacu

SEQ ID NO: 2757206 - RNA, 19 nt, Artificial Sequence
  Description of Artificial Sequence: Synthetic oligonucleotide
cauuaugagcgacagggca

SEQ ID NO: 2757207 - RNA, 19 nt, Artificial Sequence
  Description of Artificial Sequence: Synthetic oligonucleotide
ucucccaccaguagacaca

SEQ ID NO: 2757208 - RNA, 19 nt, Artificial Sequence
  Description of Artificial Sequence: Synthetic oligonucleotide
uaauggccaauuugggcca

SEQ ID NO: 2757209 - RNA, 19 nt, Artificial Sequence
  Description of Artificial Sequence: Synthetic oligonucleotide
acaaccaaggacauagcca

SEQ ID NO: 2757210 - RNA, 19 nt, Artificial Sequence
  Description of Artificial Sequence: Synthetic oligonucleotide
aaaacucaauagccaguaa

SEQ ID NO: 2757211 - RNA, 19 nt, Artificial Sequence
  Description of Artificial Sequence: Synthetic oligonucleotide
ccuagaaucuuguaaucag

SEQ ID NO: 2757212 - RNA, 19 nt, Artificial Sequence
  Description of Artificial Sequence: Synthetic oligonucleotide
cuucucaucauucauuugu

SEQ ID NO: 2757213 - RNA, 19 nt, Artificial Sequence
  Description of Artificial Sequence: Synthetic oligonucleotide
acacacaagaguugggcau

SEQ ID NO: 2757214 - RNA, 19 nt, Artificial Sequence
  Description of Artificial Sequence: Synthetic oligonucleotide
gacacacaagaguugggca

SEQ ID NO: 2757215 - RNA, 19 nt, Artificial Sequence
  Description of Artificial Sequence: Synthetic oligonucleotide
ugucuguggguucaauguc

SEQ ID NO: 2757216 - RNA, 19 nt, Artificial Sequence
  Description of Artificial Sequence: Synthetic oligonucleotide
gaugcuucauuaugagcga

SEQ ID NO: 2757217 - RNA, 19 nt, Artificial Sequence
  Description of Artificial Sequence: Synthetic oligonucleotide
ugucccagagagugagagg

SEQ ID NO: 2757218 - RNA, 19 nt, Artificial Sequence
  Description of Artificial Sequence: Synthetic oligonucleotide
acaagaguugggcauccga

SEQ ID NO: 2757219 - RNA, 19 nt, Artificial Sequence
  Description of Artificial Sequence: Synthetic oligonucleotide
uauugacaaccaaggacau

SEQ ID NO: 2757220 - RNA, 19 nt, Artificial Sequence
  Description of Artificial Sequence: Synthetic oligonucleotide
aguggaaccgagguucauc

SEQ ID NO: 2757221 - RNA, 19 nt, Artificial Sequence
  Description of Artificial Sequence: Synthetic oligonucleotide
gugaugcuucauuaugagc

SEQ ID NO: 2757222 - RNA, 19 nt, Artificial Sequence
  Description of Artificial Sequence: Synthetic oligonucleotide
uaacaccgcacccgugggg

SEQ ID NO: 2757223 - RNA, 19 nt, Artificial Sequence
  Description of Artificial Sequence: Synthetic oligonucleotide
ggacugacaaacuaaaacu

SEQ ID NO: 2757224 - RNA, 19 nt, Artificial Sequence
  Description of Artificial Sequence: Synthetic oligonucleotide
caccaguagacacacaaga

SEQ ID NO: 2757225 - RNA, 19 nt, Artificial Sequence
  Description of Artificial Sequence: Synthetic oligonucleotide
cacuuuaauuagcaucuuc

SEQ ID NO: 2757226 - RNA, 19 nt, Artificial Sequence
  Description of Artificial Sequence: Synthetic oligonucleotide
caacacuagguggaggacc

SEQ ID NO: 2757227 - RNA, 19 nt, Artificial Sequence
  Description of Artificial Sequence: Synthetic oligonucleotide
accuagaaucuuguaauca

SEQ ID NO: 2757228 - RNA, 19 nt, Artificial Sequence
  Description of Artificial Sequence: Synthetic oligonucleotide
cugacaaacuaaaacucaa

SEQ ID NO: 2757229 - RNA, 19 nt, Artificial Sequence
  Description of Artificial Sequence: Synthetic oligonucleotide
ucacauucucccaccagua

SEQ ID NO: 2757230 - RNA, 19 nt, Artificial Sequence
  Description of Artificial Sequence: Synthetic oligonucleotide
gugagaggacgugugaugc

SEQ ID NO: 2757231 - RNA, 19 nt, Artificial Sequence
  Description of Artificial Sequence: Synthetic oligonucleotide
uggugucccagagagugag

SEQ ID NO: 2757232 - RNA, 19 nt, Artificial Sequence
  Description of Artificial Sequence: Synthetic oligonucleotide
cuaagagccaacacuaggu

SEQ ID NO: 2757233 - RNA, 19 nt, Artificial Sequence
  Description of Artificial Sequence: Synthetic oligonucleotide
ugccacuguagaugagccg

SEQ ID NO: 2757234 - RNA, 19 nt, Artificial Sequence
  Description of Artificial Sequence: Synthetic oligonucleotide
caaggacauagccauaaga

SEQ ID NO: 2757235 - RNA, 19 nt, Artificial Sequence
  Description of Artificial Sequence: Synthetic oligonucleotide
acuagguggaggaccgagc

SEQ ID NO: 2757236 - RNA, 19 nt, Artificial Sequence
  Description of Artificial Sequence: Synthetic oligonucleotide
acacaagaguugggcaucc

SEQ ID NO: 2757237 - RNA, 19 nt, Artificial Sequence
  Description of Artificial Sequence: Synthetic oligonucleotide
agguucaucauugcccaag

SEQ ID NO: 2757238 - RNA, 19 nt, Artificial Sequence
  Description of Artificial Sequence: Synthetic oligonucleotide
agagccaacacuaggugga

SEQ ID NO: 2757239 - RNA, 19 nt, Artificial Sequence
  Description of Artificial Sequence: Synthetic oligonucleotide
cucuaagagccaacacuag

SEQ ID NO: 2757240 - RNA, 19 nt, Artificial Sequence
  Description of Artificial Sequence: Synthetic oligonucleotide
caauuugggccaguaacac

SEQ ID NO: 2757241 - RNA, 19 nt, Artificial Sequence
  Description of Artificial Sequence: Synthetic oligonucleotide
aauuagcaucuuccuucca

SEQ ID NO: 2757242 - RNA, 19 nt, Artificial Sequence
  Description of Artificial Sequence: Synthetic oligonucleotide
guaacaccgcacccguggg

SEQ ID NO: 2757243 - RNA, 19 nt, Artificial Sequence
  Description of Artificial Sequence: Synthetic oligonucleotide
aacaccgcacccguggggu

SEQ ID NO: 2757244 - RNA, 19 nt, Artificial Sequence
  Description of Artificial Sequence: Synthetic oligonucleotide
guggaaccgagguucauca

SEQ ID NO: 2757245 - RNA, 19 nt, Artificial Sequence
  Description of Artificial Sequence: Synthetic oligonucleotide
gcgucuucacuuuaauuag

SEQ ID NO: 2757246 - RNA, 19 nt, Artificial Sequence
  Description of Artificial Sequence: Synthetic oligonucleotide
gagagugagaggacgugug

SEQ ID NO: 2757247 - RNA, 19 nt, Artificial Sequence
  Description of Artificial Sequence: Synthetic oligonucleotide
ccgagguucaucauugccc

SEQ ID NO: 2757248 - RNA, 19 nt, Artificial Sequence
  Description of Artificial Sequence: Synthetic oligonucleotide
gucccagagagugagagga

SEQ ID NO: 2757249 - RNA, 19 nt, Artificial Sequence
  Description of Artificial Sequence: Synthetic oligonucleotide
cuuuaauuagcaucuuccu

SEQ ID NO: 2757250 - RNA, 19 nt, Artificial Sequence
  Description of Artificial Sequence: Synthetic oligonucleotide
gccaguaauggccaauuug

SEQ ID NO: 2757251 - RNA, 19 nt, Artificial Sequence
  Description of Artificial Sequence: Synthetic oligonucleotide
uucauuuguuugccacugu

SEQ ID NO: 2757252 - RNA, 19 nt, Artificial Sequence
  Description of Artificial Sequence: Synthetic oligonucleotide
aaucuccuuuccagucagc

SEQ ID NO: 2757253 - RNA, 19 nt, Artificial Sequence
  Description of Artificial Sequence: Synthetic oligonucleotide
ugacaaccaaggacauagc

SEQ ID NO: 2757254 - RNA, 19 nt, Artificial Sequence
  Description of Artificial Sequence: Synthetic oligonucleotide
agagugagaggacguguga

SEQ ID NO: 2757255 - RNA, 19 nt, Artificial Sequence
  Description of Artificial Sequence: Synthetic oligonucleotide
gaggugaaguggaaccgag

SEQ ID NO: 2757256 - RNA, 19 nt, Artificial Sequence
  Description of Artificial Sequence: Synthetic oligonucleotide
ugggccaguaacaccgcac

SEQ ID NO: 2757257 - RNA, 19 nt, Artificial Sequence
  Description of Artificial Sequence: Synthetic oligonucleotide
gacgugugaugcuucauua

SEQ ID NO: 2757258 - RNA, 19 nt, Artificial Sequence
  Description of Artificial Sequence: Synthetic oligonucleotide
agguuggggcugcaggcgg

SEQ ID NO: 2757259 - RNA, 19 nt, Artificial Sequence
  Description of Artificial Sequence: Synthetic oligonucleotide
cucuuugauucgcuccacc

SEQ ID NO: 2757260 - RNA, 19 nt, Artificial Sequence
  Description of Artificial Sequence: Synthetic oligonucleotide
agagggaagcacacaggac

SEQ ID NO: 2757261 - RNA, 19 nt, Artificial Sequence
  Description of Artificial Sequence: Synthetic oligonucleotide
caauagccaguaauggcca

SEQ ID NO: 2757262 - RNA, 19 nt, Artificial Sequence
  Description of Artificial Sequence: Synthetic oligonucleotide
auuaugagcgacagggcaa

SEQ ID NO: 2757263 - RNA, 19 nt, Artificial Sequence
  Description of Artificial Sequence: Synthetic oligonucleotide
augcuucauuaugagcgac

SEQ ID NO: 2757264 - RNA, 19 nt, Artificial Sequence
  Description of Artificial Sequence: Synthetic oligonucleotide
uuugggccaguaacaccgc

SEQ ID NO: 2757265 - RNA, 19 nt, Artificial Sequence
  Description of Artificial Sequence: Synthetic oligonucleotide
ucccucuuucucuuccaca

SEQ ID NO: 2757266 - RNA, 19 nt, Artificial Sequence
  Description of Artificial Sequence: Synthetic oligonucleotide
caagaguugggcauccgaa

SEQ ID NO: 2757267 - RNA, 19 nt, Artificial Sequence
  Description of Artificial Sequence: Synthetic oligonucleotide
uugauucgcuccaccuugu

SEQ ID NO: 2757268 - RNA, 19 nt, Artificial Sequence
  Description of Artificial Sequence: Synthetic oligonucleotide
cacaggacugacaaacuaa

SEQ ID NO: 2757269 - RNA, 19 nt, Artificial Sequence
  Description of Artificial Sequence: Synthetic oligonucleotide
gcuucauuaugagcgacag

SEQ ID NO: 2757270 - RNA, 19 nt, Artificial Sequence
  Description of Artificial Sequence: Synthetic oligonucleotide
agagagugagaggacgugu

SEQ ID NO: 2757271 - RNA, 19 nt, Artificial Sequence
  Description of Artificial Sequence: Synthetic oligonucleotide
gugugaugcuucauuauga

SEQ ID NO: 2757272 - RNA, 19 nt, Artificial Sequence
  Description of Artificial Sequence: Synthetic oligonucleotide
accaaggacauagccauaa

SEQ ID NO: 2757273 - RNA, 19 nt, Artificial Sequence
  Description of Artificial Sequence: Synthetic oligonucleotide
uccuuuccagucagcgucu

SEQ ID NO: 2757274 - RNA, 19 nt, Artificial Sequence
  Description of Artificial Sequence: Synthetic oligonucleotide
ugggguccucacauucucc

SEQ ID NO: 2757275 - RNA, 19 nt, Artificial Sequence
  Description of Artificial Sequence: Synthetic oligonucleotide
ugagaggacgugugaugcu

SEQ ID NO: 2757276 - RNA, 19 nt, Artificial Sequence
  Description of Artificial Sequence: Synthetic oligonucleotide
caccuagaaucuuguaauc

SEQ ID NO: 2757277 - RNA, 19 nt, Artificial Sequence
  Description of Artificial Sequence: Synthetic oligonucleotide
ggaggaccgagccaccuag

SEQ ID NO: 2757278 - RNA, 19 nt, Artificial Sequence
  Description of Artificial Sequence: Synthetic oligonucleotide
caggcggcuaaagugcugc

SEQ ID NO: 2757279 - RNA, 19 nt, Artificial Sequence
  Description of Artificial Sequence: Synthetic oligonucleotide
acaggacugacaaacuaaa

SEQ ID NO: 2757280 - RNA, 19 nt, Artificial Sequence
  Description of Artificial Sequence: Synthetic oligonucleotide
gagccgcugcuguuguggg

SEQ ID NO: 2757281 - RNA, 19 nt, Artificial Sequence
  Description of Artificial Sequence: Synthetic oligonucleotide
uagguggaggaccgagcca

SEQ ID NO: 2757282 - RNA, 19 nt, Artificial Sequence
  Description of Artificial Sequence: Synthetic oligonucleotide
aauggccaauuugggccag

SEQ ID NO: 2757283 - RNA, 19 nt, Artificial Sequence
  Description of Artificial Sequence: Synthetic oligonucleotide
gccaguaacaccgcacccg

SEQ ID NO: 2757284 - RNA, 19 nt, Artificial Sequence
  Description of Artificial Sequence: Synthetic oligonucleotide
caguagacacacaagaguu

SEQ ID NO: 2757285 - RNA, 19 nt, Artificial Sequence
  Description of Artificial Sequence: Synthetic oligonucleotide
ggugaaguggaaccgaggu

SEQ ID NO: 2757286 - RNA, 19 nt, Artificial Sequence
  Description of Artificial Sequence: Synthetic oligonucleotide
guucaucauugcccaagac

SEQ ID NO: 2757287 - RNA, 19 nt, Artificial Sequence
  Description of Artificial Sequence: Synthetic oligonucleotide
uugggccaguaacaccgca

SEQ ID NO: 2757288 - RNA, 19 nt, Artificial Sequence
  Description of Artificial Sequence: Synthetic oligonucleotide
agcgacagggcaaggaggu

SEQ ID NO: 2757289 - RNA, 19 nt, Artificial Sequence
  Description of Artificial Sequence: Synthetic oligonucleotide
aguugggcauccgaaggga

SEQ ID NO: 2757290 - RNA, 19 nt, Artificial Sequence
  Description of Artificial Sequence: Synthetic oligonucleotide
gauucgcuccaccuugucu

SEQ ID NO: 2757291 - RNA, 19 nt, Artificial Sequence
  Description of Artificial Sequence: Synthetic oligonucleotide
acgugugaugcuucauuau

SEQ ID NO: 2757292 - RNA, 19 nt, Artificial Sequence
  Description of Artificial Sequence: Synthetic oligonucleotide
agggaagcacacaggacug

SEQ ID NO: 2757293 - RNA, 19 nt, Artificial Sequence
  Description of Artificial Sequence: Synthetic oligonucleotide
guccucacauucucccacc

SEQ ID NO: 2757294 - RNA, 19 nt, Artificial Sequence
  Description of Artificial Sequence: Synthetic oligonucleotide
gccaacacuagguggagga

SEQ ID NO: 2757295 - RNA, 19 nt, Artificial Sequence
  Description of Artificial Sequence: Synthetic oligonucleotide
cuccucuaagagccaacac

SEQ ID NO: 2757296 - RNA, 19 nt, Artificial Sequence
  Description of Artificial Sequence: Synthetic oligonucleotide
cacuagguggaggaccgag

SEQ ID NO: 2757297 - RNA, 19 nt, Artificial Sequence
  Description of Artificial Sequence: Synthetic oligonucleotide
uaugagcgacagggcaagg

SEQ ID NO: 2757298 - RNA, 19 nt, Artificial Sequence
  Description of Artificial Sequence: Synthetic oligonucleotide
gccaccuagaaucuuguaa

SEQ ID NO: 2757299 - RNA, 19 nt, Artificial Sequence
  Description of Artificial Sequence: Synthetic oligonucleotide
aggugaaguggaaccgagg

SEQ ID NO: 2757300 - RNA, 19 nt, Artificial Sequence
  Description of Artificial Sequence: Synthetic oligonucleotide
cacacgcucuuugauucgc

SEQ ID NO: 2757301 - RNA, 19 nt, Artificial Sequence
  Description of Artificial Sequence: Synthetic oligonucleotide
gaggacgugugaugcuuca

SEQ ID NO: 2757302 - RNA, 19 nt, Artificial Sequence
  Description of Artificial Sequence: Synthetic oligonucleotide
gggccaguaacaccgcacc

SEQ ID NO: 2757303 - RNA, 19 nt, Artificial Sequence
  Description of Artificial Sequence: Synthetic oligonucleotide
agaggacgugugaugcuuc

SEQ ID NO: 2757304 - RNA, 19 nt, Artificial Sequence
  Description of Artificial Sequence: Synthetic oligonucleotide
cacacaagaguugggcauc

SEQ ID NO: 2757305 - RNA, 19 nt, Artificial Sequence
  Description of Artificial Sequence: Synthetic oligonucleotide
ccaauuugggccaguaaca

SEQ ID NO: 2757306 - RNA, 19 nt, Artificial Sequence
  Description of Artificial Sequence: Synthetic oligonucleotide
ugauucgcuccaccuuguc

SEQ ID NO: 2757307 - RNA, 19 nt, Artificial Sequence
  Description of Artificial Sequence: Synthetic oligonucleotide
aggaccgagccaccuagaa

SEQ ID NO: 2757308 - RNA, 19 nt, Artificial Sequence
  Description of Artificial Sequence: Synthetic oligonucleotide
cauucauuuguuugccacu

SEQ ID NO: 2757309 - RNA, 19 nt, Artificial Sequence
  Description of Artificial Sequence: Synthetic oligonucleotide
gguccucacauucucccac

SEQ ID NO: 2757310 - RNA, 19 nt, Artificial Sequence
  Description of Artificial Sequence: Synthetic oligonucleotide
guugggcauccgaagggag

SEQ ID NO: 2757311 - RNA, 19 nt, Artificial Sequence
  Description of Artificial Sequence: Synthetic oligonucleotide
cagguuggggcugcaggcg

SEQ ID NO: 2757312 - RNA, 19 nt, Artificial Sequence
  Description of Artificial Sequence: Synthetic oligonucleotide
guaguucuggugucccaga

SEQ ID NO: 2757313 - RNA, 19 nt, Artificial Sequence
  Description of Artificial Sequence: Synthetic oligonucleotide
gggcaaggaggugaagugg

SEQ ID NO: 2757314 - RNA, 19 nt, Artificial Sequence
  Description of Artificial Sequence: Synthetic oligonucleotide
gcggcuaaagugcugcuuc

SEQ ID NO: 2757315 - RNA, 19 nt, Artificial Sequence
  Description of Artificial Sequence: Synthetic oligonucleotide
aucuuguaaucagcugcug

SEQ ID NO: 2757316 - RNA, 19 nt, Artificial Sequence
  Description of Artificial Sequence: Synthetic oligonucleotide
cuguggucgccgcugccgc

SEQ ID NO: 2757317 - RNA, 19 nt, Artificial Sequence
  Description of Artificial Sequence: Synthetic oligonucleotide
cgugugaugcuucauuaug

SEQ ID NO: 2757318 - RNA, 19 nt, Artificial Sequence
  Description of Artificial Sequence: Synthetic oligonucleotide
gaaguggaaccgagguuca

SEQ ID NO: 2757319 - RNA, 19 nt, Artificial Sequence
  Description of Artificial Sequence: Synthetic oligonucleotide
agccaacacuagguggagg

SEQ ID NO: 2757320 - RNA, 19 nt, Artificial Sequence
  Description of Artificial Sequence: Synthetic oligonucleotide
gagccaacacuagguggag

SEQ ID NO: 2757321 - RNA, 19 nt, Artificial Sequence
  Description of Artificial Sequence: Synthetic oligonucleotide
cagagagugagaggacgug

SEQ ID NO: 2757322 - RNA, 19 nt, Artificial Sequence
  Description of Artificial Sequence: Synthetic oligonucleotide
agccgcugcuguugugggg

SEQ ID NO: 2757323 - RNA, 19 nt, Artificial Sequence
  Description of Artificial Sequence: Synthetic oligonucleotide
gugggguccucacauucuc

SEQ ID NO: 2757324 - RNA, 19 nt, Artificial Sequence
  Description of Artificial Sequence: Synthetic oligonucleotide
ccucuaagagccaacacua

SEQ ID NO: 2757325 - RNA, 19 nt, Artificial Sequence
  Description of Artificial Sequence: Synthetic oligonucleotide
auagccaguaauggccaau

SEQ ID NO: 2757326 - RNA, 19 nt, Artificial Sequence
  Description of Artificial Sequence: Synthetic oligonucleotide
ccauaagagagggaagcac

SEQ ID NO: 2757327 - RNA, 19 nt, Artificial Sequence
  Description of Artificial Sequence: Synthetic oligonucleotide
ggggcaguaguucuggugu

SEQ ID NO: 2757328 - RNA, 19 nt, Artificial Sequence
  Description of Artificial Sequence: Synthetic oligonucleotide
ugcuucucccgcugugguc

SEQ ID NO: 2757329 - RNA, 19 nt, Artificial Sequence
  Description of Artificial Sequence: Synthetic oligonucleotide
uggggcugcaggcggcuaa

SEQ ID NO: 2757330 - RNA, 19 nt, Artificial Sequence
  Description of Artificial Sequence: Synthetic oligonucleotide
uggaggaccgagccaccua

SEQ ID NO: 2757331 - RNA, 19 nt, Artificial Sequence
  Description of Artificial Sequence: Synthetic oligonucleotide
ugcccaagaccaccuccuc

SEQ ID NO: 2757332 - RNA, 19 nt, Artificial Sequence
  Description of Artificial Sequence: Synthetic oligonucleotide
cauagccauaagagaggga

SEQ ID NO: 2757333 - RNA, 19 nt, Artificial Sequence
  Description of Artificial Sequence: Synthetic oligonucleotide
cacaagaguugggcauccg

SEQ ID NO: 2757334 - RNA, 19 nt, Artificial Sequence
  Description of Artificial Sequence: Synthetic oligonucleotide
auugacaaccaaggacaua

SEQ ID NO: 2757335 - RNA, 19 nt, Artificial Sequence
  Description of Artificial Sequence: Synthetic oligonucleotide
gaugagccgcugcuguugu

SEQ ID NO: 2757336 - RNA, 19 nt, Artificial Sequence
  Description of Artificial Sequence: Synthetic oligonucleotide
ggcaaggaggugaagugga

SEQ ID NO: 2757337 - RNA, 19 nt, Artificial Sequence
  Description of Artificial Sequence: Synthetic oligonucleotide
gcuguggucgccgcugccg

SEQ ID NO: 2757338 - RNA, 19 nt, Artificial Sequence
  Description of Artificial Sequence: Synthetic oligonucleotide
cauugcccaagaccaccuc

SEQ ID NO: 2757339 - RNA, 19 nt, Artificial Sequence
  Description of Artificial Sequence: Synthetic oligonucleotide
uggaaccgagguucaucau

SEQ ID NO: 2757340 - RNA, 19 nt, Artificial Sequence
  Description of Artificial Sequence: Synthetic oligonucleotide
cuguagaugagccgcugcu

SEQ ID NO: 2757341 - RNA, 19 nt, Artificial Sequence
  Description of Artificial Sequence: Synthetic oligonucleotide
ggcaguaguucuggugucc

SEQ ID NO: 2757342 - RNA, 19 nt, Artificial Sequence
  Description of Artificial Sequence: Synthetic oligonucleotide
gcaguaguucugguguccc

SEQ ID NO: 2757343 - RNA, 19 nt, Artificial Sequence
  Description of Artificial Sequence: Synthetic oligonucleotide
cgagccaccuagaaucuug

SEQ ID NO: 2757344 - RNA, 19 nt, Artificial Sequence
  Description of Artificial Sequence: Synthetic oligonucleotide
ggccaguaacaccgcaccc

SEQ ID NO: 2757345 - RNA, 19 nt, Artificial Sequence
  Description of Artificial Sequence: Synthetic oligonucleotide
caguaacaccgcacccgug

SEQ ID NO: 2757346 - RNA, 19 nt, Artificial Sequence
  Description of Artificial Sequence: Synthetic oligonucleotide
ggggauucccucuuucucu

SEQ ID NO: 2757347 - RNA, 19 nt, Artificial Sequence
  Description of Artificial Sequence: Synthetic oligonucleotide
gcccaagaccaccuccucc

SEQ ID NO: 2757348 - RNA, 19 nt, Artificial Sequence
  Description of Artificial Sequence: Synthetic oligonucleotide
ccaguagacacacaagagu

SEQ ID NO: 2757349 - RNA, 19 nt, Artificial Sequence
  Description of Artificial Sequence: Synthetic oligonucleotide
gacagggcaaggaggugaa

SEQ ID NO: 2757350 - RNA, 19 nt, Artificial Sequence
  Description of Artificial Sequence: Synthetic oligonucleotide
aaguggaaccgagguucau

SEQ ID NO: 2757351 - RNA, 19 nt, Artificial Sequence
  Description of Artificial Sequence: Synthetic oligonucleotide
uguggucgccgcugccgcu

SEQ ID NO: 2757352 - RNA, 19 nt, Artificial Sequence
  Description of Artificial Sequence: Synthetic oligonucleotide
cuuugauucgcuccaccuu

SEQ ID NO: 2757353 - RNA, 19 nt, Artificial Sequence
  Description of Artificial Sequence: Synthetic oligonucleotide
gagugagaggacgugugau

SEQ ID NO: 2757354 - RNA, 19 nt, Artificial Sequence
  Description of Artificial Sequence: Synthetic oligonucleotide
ccaaggacauagccauaag

SEQ ID NO: 2757355 - RNA, 19 nt, Artificial Sequence
  Description of Artificial Sequence: Synthetic oligonucleotide
ccaccuagaaucuuguaau

SEQ ID NO: 2757356 - RNA, 19 nt, Artificial Sequence
  Description of Artificial Sequence: Synthetic oligonucleotide
uggccaauuugggccagua

SEQ ID NO: 2757357 - RNA, 19 nt, Artificial Sequence
  Description of Artificial Sequence: Synthetic oligonucleotide
augagccgcugcuguugug

SEQ ID NO: 2757358 - RNA, 19 nt, Artificial Sequence
  Description of Artificial Sequence: Synthetic oligonucleotide
caguaguucugguguccca

SEQ ID NO: 2757359 - RNA, 19 nt, Artificial Sequence
  Description of Artificial Sequence: Synthetic oligonucleotide
ccacacgcucuuugauucg

SEQ ID NO: 2757360 - RNA, 19 nt, Artificial Sequence
  Description of Artificial Sequence: Synthetic oligonucleotide
caccgcacccguggggucc

SEQ ID NO: 2757361 - RNA, 19 nt, Artificial Sequence
  Description of Artificial Sequence: Synthetic oligonucleotide
gucagcgucuucacuuuaa

SEQ ID NO: 2757362 - RNA, 19 nt, Artificial Sequence
  Description of Artificial Sequence: Synthetic oligonucleotide
accgagccaccuagaaucu

SEQ ID NO: 2757363 - RNA, 19 nt, Artificial Sequence
  Description of Artificial Sequence: Synthetic oligonucleotide
ccucacauucucccaccag

SEQ ID NO: 2757364 - RNA, 19 nt, Artificial Sequence
  Description of Artificial Sequence: Synthetic oligonucleotide
gagguucaucauugcccaa

SEQ ID NO: 2757365 - RNA, 19 nt, Artificial Sequence
  Description of Artificial Sequence: Synthetic oligonucleotide
ggaaccgagguucaucauu

SEQ ID NO: 2757366 - RNA, 19 nt, Artificial Sequence
  Description of Artificial Sequence: Synthetic oligonucleotide
aggcggcuaaagugcugcu

SEQ ID NO: 2757367 - RNA, 19 nt, Artificial Sequence
  Description of Artificial Sequence: Synthetic oligonucleotide
cagggcaaggaggugaagu

SEQ ID NO: 2757368 - RNA, 19 nt, Artificial Sequence
  Description of Artificial Sequence: Synthetic oligonucleotide
cuggugucccagagaguga

SEQ ID NO: 2757369 - RNA, 19 nt, Artificial Sequence
  Description of Artificial Sequence: Synthetic oligonucleotide
gagaggacgugugaugcuu

SEQ ID NO: 2757370 - RNA, 19 nt, Artificial Sequence
  Description of Artificial Sequence: Synthetic oligonucleotide
gccauaagagagggaagca

SEQ ID NO: 2757371 - RNA, 19 nt, Artificial Sequence
  Description of Artificial Sequence: Synthetic oligonucleotide
gugaaguggaaccgagguu

SEQ ID NO: 2757372 - RNA, 19 nt, Artificial Sequence
  Description of Artificial Sequence: Synthetic oligonucleotide
acacgcucuuugauucgcu

SEQ ID NO: 2757373 - RNA, 19 nt, Artificial Sequence
  Description of Artificial Sequence: Synthetic oligonucleotide
ucgcuccaccuugucugug

SEQ ID NO: 2757374 - RNA, 19 nt, Artificial Sequence
  Description of Artificial Sequence: Synthetic oligonucleotide
cuuccacacgcucuuugau

SEQ ID NO: 2757375 - RNA, 19 nt, Artificial Sequence
  Description of Artificial Sequence: Synthetic oligonucleotide
gagccaccuagaaucuugu

SEQ ID NO: 2757376 - RNA, 19 nt, Artificial Sequence
  Description of Artificial Sequence: Synthetic oligonucleotide
aggacgugugaugcuucau

SEQ ID NO: 2757377 - RNA, 19 nt, Artificial Sequence
  Description of Artificial Sequence: Synthetic oligonucleotide
ggcuaaagugcugcuucuc

SEQ ID NO: 2757378 - RNA, 19 nt, Artificial Sequence
  Description of Artificial Sequence: Synthetic oligonucleotide
ggguccucacauucuccca

SEQ ID NO: 2757379 - RNA, 19 nt, Artificial Sequence
  Description of Artificial Sequence: Synthetic oligonucleotide
gggcaguaguucugguguc

SEQ ID NO: 2757380 - RNA, 19 nt, Artificial Sequence
  Description of Artificial Sequence: Synthetic oligonucleotide
ccgugggguccucacauuc

SEQ ID NO: 2757381 - RNA, 19 nt, Artificial Sequence
  Description of Artificial Sequence: Synthetic oligonucleotide
ggauucccucuuucucuuc

SEQ ID NO: 2757382 - RNA, 19 nt, Artificial Sequence
  Description of Artificial Sequence: Synthetic oligonucleotide
gaggaccgagccaccuaga

SEQ ID NO: 2757383 - RNA, 19 nt, Artificial Sequence
  Description of Artificial Sequence: Synthetic oligonucleotide
ccagucagcgucuucacuu

SEQ ID NO: 2757384 - RNA, 19 nt, Artificial Sequence
  Description of Artificial Sequence: Synthetic oligonucleotide
ggacgugugaugcuucauu

SEQ ID NO: 2757385 - RNA, 19 nt, Artificial Sequence
  Description of Artificial Sequence: Synthetic oligonucleotide
ggccaauuugggccaguaa

SEQ ID NO: 2757386 - RNA, 19 nt, Artificial Sequence
  Description of Artificial Sequence: Synthetic oligonucleotide
uucucccgcuguggucgcc

SEQ ID NO: 2757387 - RNA, 19 nt, Artificial Sequence
  Description of Artificial Sequence: Synthetic oligonucleotide
auggccaauuugggccagu

SEQ ID NO: 2757388 - RNA, 19 nt, Artificial Sequence
  Description of Artificial Sequence: Synthetic oligonucleotide
cgcucuuugauucgcucca

SEQ ID NO: 2757389 - RNA, 19 nt, Artificial Sequence
  Description of Artificial Sequence: Synthetic oligonucleotide
acacuagguggaggaccga

SEQ ID NO: 2757390 - RNA, 19 nt, Artificial Sequence
  Description of Artificial Sequence: Synthetic oligonucleotide
ccaccuugucuguggguuc

SEQ ID NO: 2757391 - RNA, 19 nt, Artificial Sequence
  Description of Artificial Sequence: Synthetic oligonucleotide
ccuccucuaagagccaaca

SEQ ID NO: 2757392 - RNA, 19 nt, Artificial Sequence
  Description of Artificial Sequence: Synthetic oligonucleotide
cagcgucuucacuuuaauu

SEQ ID NO: 2757393 - RNA, 19 nt, Artificial Sequence
  Description of Artificial Sequence: Synthetic oligonucleotide
gguggaggaccgagccacc

SEQ ID NO: 2757394 - RNA, 19 nt, Artificial Sequence
  Description of Artificial Sequence: Synthetic oligonucleotide
cagucagcgucuucacuuu

SEQ ID NO: 2757395 - RNA, 19 nt, Artificial Sequence
  Description of Artificial Sequence: Synthetic oligonucleotide
gcacccgugggguccucac

SEQ ID NO: 2757396 - RNA, 19 nt, Artificial Sequence
  Description of Artificial Sequence: Synthetic oligonucleotide
ggaccgagccaccuagaau

SEQ ID NO: 2757397 - RNA, 19 nt, Artificial Sequence
  Description of Artificial Sequence: Synthetic oligonucleotide
ccaguaacaccgcacccgu

SEQ ID NO: 2757398 - RNA, 19 nt, Artificial Sequence
  Description of Artificial Sequence: Synthetic oligonucleotide
gggauucccucuuucucuu

SEQ ID NO: 2757399 - RNA, 19 nt, Artificial Sequence
  Description of Artificial Sequence: Synthetic oligonucleotide
gcaaggaggugaaguggaa

SEQ ID NO: 2757400 - RNA, 19 nt, Artificial Sequence
  Description of Artificial Sequence: Synthetic oligonucleotide
guggaggaccgagccaccu

SEQ ID NO: 2757401 - RNA, 19 nt, Artificial Sequence
  Description of Artificial Sequence: Synthetic oligonucleotide
cgacagggcaaggagguga

SEQ ID NO: 2757402 - RNA, 19 nt, Artificial Sequence
  Description of Artificial Sequence: Synthetic oligonucleotide
accgcacccgugggguccu

SEQ ID NO: 2757403 - RNA, 19 nt, Artificial Sequence
  Description of Artificial Sequence: Synthetic oligonucleotide
cccgcuguggucgccgcug

SEQ ID NO: 2757404 - RNA, 19 nt, Artificial Sequence
  Description of Artificial Sequence: Synthetic oligonucleotide
gcaggcggcuaaagugcug

SEQ ID NO: 2757405 - RNA, 19 nt, Artificial Sequence
  Description of Artificial Sequence: Synthetic oligonucleotide
gcgacagggcaaggaggug

SEQ ID NO: 2757406 - RNA, 19 nt, Artificial Sequence
  Description of Artificial Sequence: Synthetic oligonucleotide
cuguggguucaaugucaau

SEQ ID NO: 2757407 - RNA, 19 nt, Artificial Sequence
  Description of Artificial Sequence: Synthetic oligonucleotide
ccgcuguggucgccgcugc

SEQ ID NO: 2757408 - RNA, 19 nt, Artificial Sequence
  Description of Artificial Sequence: Synthetic oligonucleotide
ggcggcuaaagugcugcuu

SEQ ID NO: 2757409 - RNA, 19 nt, Artificial Sequence
  Description of Artificial Sequence: Synthetic oligonucleotide
cggcuaaagugcugcuucu

SEQ ID NO: 2757410 - RNA, 19 nt, Artificial Sequence
  Description of Artificial Sequence: Synthetic oligonucleotide
cccgugggguccucacauu

SEQ ID NO: 2757411 - RNA, 19 nt, Artificial Sequence
  Description of Artificial Sequence: Synthetic oligonucleotide
ccuuuccagucagcgucuu

SEQ ID NO: 2757412 - RNA, 19 nt, Artificial Sequence
  Description of Artificial Sequence: Synthetic oligonucleotide
ccgagccaccuagaaucuu

SEQ ID NO: 2757413 - RNA, 19 nt, Artificial Sequence
  Description of Artificial Sequence: Synthetic oligonucleotide
ccgcacccgugggguccuc

SEQ ID NO: 2757414 - RNA, 19 nt, Artificial Sequence
  Description of Artificial Sequence: Synthetic oligonucleotide
aucauuaacacucagacau

SEQ ID NO: 2757415 - RNA, 19 nt, Artificial Sequence
  Description of Artificial Sequence: Synthetic oligonucleotide
uugucuaucaccauggaga

SEQ ID NO: 2757416 - RNA, 19 nt, Artificial Sequence
  Description of Artificial Sequence: Synthetic oligonucleotide
ucuuagaacagccaggugu

SEQ ID NO: 2757417 - RNA, 19 nt, Artificial Sequence
  Description of Artificial Sequence: Synthetic oligonucleotide
ucaucuaguaguaagucug

SEQ ID NO: 2757418 - RNA, 19 nt, Artificial Sequence
  Description of Artificial Sequence: Synthetic oligonucleotide
ucuaucaccauggagaacc

SEQ ID NO: 2757419 - RNA, 19 nt, Artificial Sequence
  Description of Artificial Sequence: Synthetic oligonucleotide
aacagccagguguaaaugc

SEQ ID NO: 2757420 - RNA, 19 nt, Artificial Sequence
  Description of Artificial Sequence: Synthetic oligonucleotide
agaaucaucuaguaguaag

SEQ ID NO: 2757421 - RNA, 19 nt, Artificial Sequence
  Description of Artificial Sequence: Synthetic oligonucleotide
uuaacacucagacaugcca

SEQ ID NO: 2757422 - RNA, 19 nt, Artificial Sequence
  Description of Artificial Sequence: Synthetic oligonucleotide
aaucaucuaguaguaaguc

SEQ ID NO: 2757423 - RNA, 19 nt, Artificial Sequence
  Description of Artificial Sequence: Synthetic oligonucleotide
ucaaacaccuccacugagg

SEQ ID NO: 2757424 - RNA, 19 nt, Artificial Sequence
  Description of Artificial Sequence: Synthetic oligonucleotide
agagagacaccaaagaauc

SEQ ID NO: 2757425 - RNA, 19 nt, Artificial Sequence
  Description of Artificial Sequence: Synthetic oligonucleotide
uguaaaugccccaggaacu

SEQ ID NO: 2757426 - RNA, 19 nt, Artificial Sequence
  Description of Artificial Sequence: Synthetic oligonucleotide
cuugccuuugaacagcucc

SEQ ID NO: 2757427 - RNA, 19 nt, Artificial Sequence
  Description of Artificial Sequence: Synthetic oligonucleotide
aaacagcacaccuuucuug

SEQ ID NO: 2757428 - RNA, 19 nt, Artificial Sequence
  Description of Artificial Sequence: Synthetic oligonucleotide
acucagacaugccaacacc

SEQ ID NO: 2757429 - RNA, 19 nt, Artificial Sequence
  Description of Artificial Sequence: Synthetic oligonucleotide
ugggucuuagaacagccag

SEQ ID NO: 2757430 - RNA, 19 nt, Artificial Sequence
  Description of Artificial Sequence: Synthetic oligonucleotide
aacuccaaacagcacaccu

SEQ ID NO: 2757431 - RNA, 19 nt, Artificial Sequence
  Description of Artificial Sequence: Synthetic oligonucleotide
gauggcaucucccaccuug

SEQ ID NO: 2757432 - RNA, 19 nt, Artificial Sequence
  Description of Artificial Sequence: Synthetic oligonucleotide
uacgccauugucuaucacc

SEQ ID NO: 2757433 - RNA, 19 nt, Artificial Sequence
  Description of Artificial Sequence: Synthetic oligonucleotide
ucuaguaguaagucugucu

SEQ ID NO: 2757434 - RNA, 19 nt, Artificial Sequence
  Description of Artificial Sequence: Synthetic oligonucleotide
uugccuuugaacagcuccg

SEQ ID NO: 2757435 - RNA, 19 nt, Artificial Sequence
  Description of Artificial Sequence: Synthetic oligonucleotide
cuugauccgggccauagcc

SEQ ID NO: 2757436 - RNA, 19 nt, Artificial Sequence
  Description of Artificial Sequence: Synthetic oligonucleotide
auugucuaucaccauggag

SEQ ID NO: 2757437 - RNA, 19 nt, Artificial Sequence
  Description of Artificial Sequence: Synthetic oligonucleotide
uggagaaccucuucagccg

SEQ ID NO: 2757438 - RNA, 19 nt, Artificial Sequence
  Description of Artificial Sequence: Synthetic oligonucleotide
ucccaaaggccccaguggg

SEQ ID NO: 2757439 - RNA, 19 nt, Artificial Sequence
  Description of Artificial Sequence: Synthetic oligonucleotide
ucacaaagacaucauuaac

SEQ ID NO: 2757440 - RNA, 19 nt, Artificial Sequence
  Description of Artificial Sequence: Synthetic oligonucleotide
uucagugccuucacuacgc

SEQ ID NO: 2757441 - RNA, 19 nt, Artificial Sequence
  Description of Artificial Sequence: Synthetic oligonucleotide
caaacaccuccacugaggg

SEQ ID NO: 2757442 - RNA, 19 nt, Artificial Sequence
  Description of Artificial Sequence: Synthetic oligonucleotide
agaguugugagaugagugu

SEQ ID NO: 2757443 - RNA, 19 nt, Artificial Sequence
  Description of Artificial Sequence: Synthetic oligonucleotide
aagagagacaccaaagaau

SEQ ID NO: 2757444 - RNA, 19 nt, Artificial Sequence
  Description of Artificial Sequence: Synthetic oligonucleotide
cuuucuugccuuugaacag

SEQ ID NO: 2757445 - RNA, 19 nt, Artificial Sequence
  Description of Artificial Sequence: Synthetic oligonucleotide
accuuucuugccuuugaac

SEQ ID NO: 2757446 - RNA, 19 nt, Artificial Sequence
  Description of Artificial Sequence: Synthetic oligonucleotide
uuucaaacaccuccacuga

SEQ ID NO: 2757447 - RNA, 19 nt, Artificial Sequence
  Description of Artificial Sequence: Synthetic oligonucleotide
uucacuacgccauugucua

SEQ ID NO: 2757448 - RNA, 19 nt, Artificial Sequence
  Description of Artificial Sequence: Synthetic oligonucleotide
gauucccaaagagagacac

SEQ ID NO: 2757449 - RNA, 19 nt, Artificial Sequence
  Description of Artificial Sequence: Synthetic oligonucleotide
aucaucuaguaguaagucu

SEQ ID NO: 2757450 - RNA, 19 nt, Artificial Sequence
  Description of Artificial Sequence: Synthetic oligonucleotide
uaacacucagacaugccaa

SEQ ID NO: 2757451 - RNA, 19 nt, Artificial Sequence
  Description of Artificial Sequence: Synthetic oligonucleotide
ugccuugugggcucgaccc

SEQ ID NO: 2757452 - RNA, 19 nt, Artificial Sequence
  Description of Artificial Sequence: Synthetic oligonucleotide
ucauuaacacucagacaug

SEQ ID NO: 2757453 - RNA, 19 nt, Artificial Sequence
  Description of Artificial Sequence: Synthetic oligonucleotide
agguucaccuucuugccag

SEQ ID NO: 2757454 - RNA, 19 nt, Artificial Sequence
  Description of Artificial Sequence: Synthetic oligonucleotide
ucagacaugccaacaccug

SEQ ID NO: 2757455 - RNA, 19 nt, Artificial Sequence
  Description of Artificial Sequence: Synthetic oligonucleotide
aaacaccuccacugagggg

SEQ ID NO: 2757456 - RNA, 19 nt, Artificial Sequence
  Description of Artificial Sequence: Synthetic oligonucleotide
acagccagguguaaaugcc

SEQ ID NO: 2757457 - RNA, 19 nt, Artificial Sequence
  Description of Artificial Sequence: Synthetic oligonucleotide
acgccucccacccugcugc

SEQ ID NO: 2757458 - RNA, 19 nt, Artificial Sequence
  Description of Artificial Sequence: Synthetic oligonucleotide
guugugagaugaguguugg

SEQ ID NO: 2757459 - RNA, 19 nt, Artificial Sequence
  Description of Artificial Sequence: Synthetic oligonucleotide
ucggcuugcuccacaaacc

SEQ ID NO: 2757460 - RNA, 19 nt, Artificial Sequence
  Description of Artificial Sequence: Synthetic oligonucleotide
uaguaguaagucugucucc

SEQ ID NO: 2757461 - RNA, 19 nt, Artificial Sequence
  Description of Artificial Sequence: Synthetic oligonucleotide
uaguaagucugucuccuuc

SEQ ID NO: 2757462 - RNA, 19 nt, Artificial Sequence
  Description of Artificial Sequence: Synthetic oligonucleotide
ugugccaucuggcuccaca

SEQ ID NO: 2757463 - RNA, 19 nt, Artificial Sequence
  Description of Artificial Sequence: Synthetic oligonucleotide
aguaguaagucugucuccu

SEQ ID NO: 2757464 - RNA, 19 nt, Artificial Sequence
  Description of Artificial Sequence: Synthetic oligonucleotide
aaagaaucaucuaguagua

SEQ ID NO: 2757465 - RNA, 19 nt, Artificial Sequence
  Description of Artificial Sequence: Synthetic oligonucleotide
gucacaaagacaucauuaa

SEQ ID NO: 2757466 - RNA, 19 nt, Artificial Sequence
  Description of Artificial Sequence: Synthetic oligonucleotide
cauggagaaccucuucagc

SEQ ID NO: 2757467 - RNA, 19 nt, Artificial Sequence
  Description of Artificial Sequence: Synthetic oligonucleotide
uccggccagagccucagag

SEQ ID NO: 2757468 - RNA, 19 nt, Artificial Sequence
  Description of Artificial Sequence: Synthetic oligonucleotide
uuugaacagcuccgccagg

SEQ ID NO: 2757469 - RNA, 19 nt, Artificial Sequence
  Description of Artificial Sequence: Synthetic oligonucleotide
ucuucagccggcgauuccc

SEQ ID NO: 2757470 - RNA, 19 nt, Artificial Sequence
  Description of Artificial Sequence: Synthetic oligonucleotide
cagacaugccaacaccugc

SEQ ID NO: 2757471 - RNA, 19 nt, Artificial Sequence
  Description of Artificial Sequence: Synthetic oligonucleotide
ccauugucuaucaccaugg

SEQ ID NO: 2757472 - RNA, 19 nt, Artificial Sequence
  Description of Artificial Sequence: Synthetic oligonucleotide
aaacccaggcagguggguc

SEQ ID NO: 2757473 - RNA, 19 nt, Artificial Sequence
  Description of Artificial Sequence: Synthetic oligonucleotide
agagacaccaaagaaucau

SEQ ID NO: 2757474 - RNA, 19 nt, Artificial Sequence
  Description of Artificial Sequence: Synthetic oligonucleotide
cucggcuugcuccacaaac

SEQ ID NO: 2757475 - RNA, 19 nt, Artificial Sequence
  Description of Artificial Sequence: Synthetic oligonucleotide
ucagucacaaagacaucau

SEQ ID NO: 2757476 - RNA, 19 nt, Artificial Sequence
  Description of Artificial Sequence: Synthetic oligonucleotide
uccacugaggggauggcau

SEQ ID NO: 2757477 - RNA, 19 nt, Artificial Sequence
  Description of Artificial Sequence: Synthetic oligonucleotide
ucagaguugugagaugagu

SEQ ID NO: 2757478 - RNA, 19 nt, Artificial Sequence
  Description of Artificial Sequence: Synthetic oligonucleotide
gacaucauuaacacucaga

SEQ ID NO: 2757479 - RNA, 19 nt, Artificial Sequence
  Description of Artificial Sequence: Synthetic oligonucleotide
agucacaaagacaucauua

SEQ ID NO: 2757480 - RNA, 19 nt, Artificial Sequence
  Description of Artificial Sequence: Synthetic oligonucleotide
cagagccucggcuugcucc

SEQ ID NO: 2757481 - RNA, 19 nt, Artificial Sequence
  Description of Artificial Sequence: Synthetic oligonucleotide
aacccaggcaggugggucu

SEQ ID NO: 2757482 - RNA, 19 nt, Artificial Sequence
  Description of Artificial Sequence: Synthetic oligonucleotide
ugccccaggaacuccaaac

SEQ ID NO: 2757483 - RNA, 19 nt, Artificial Sequence
  Description of Artificial Sequence: Synthetic oligonucleotide
aaccucuucagccggcgau

SEQ ID NO: 2757484 - RNA, 19 nt, Artificial Sequence
  Description of Artificial Sequence: Synthetic oligonucleotide
agguguaaaugccccagga

SEQ ID NO: 2757485 - RNA, 19 nt, Artificial Sequence
  Description of Artificial Sequence: Synthetic oligonucleotide
accaaagaaucaucuagua

SEQ ID NO: 2757486 - RNA, 19 nt, Artificial Sequence
  Description of Artificial Sequence: Synthetic oligonucleotide
uugcuccacaaacccaggc

SEQ ID NO: 2757487 - RNA, 19 nt, Artificial Sequence
  Description of Artificial Sequence: Synthetic oligonucleotide
uuggccuucagagccucgg

SEQ ID NO: 2757488 - RNA, 19 nt, Artificial Sequence
  Description of Artificial Sequence: Synthetic oligonucleotide
uugauccgggccauagcca

SEQ ID NO: 2757489 - RNA, 19 nt, Artificial Sequence
  Description of Artificial Sequence: Synthetic oligonucleotide
agccagguguaaaugcccc

SEQ ID NO: 2757490 - RNA, 19 nt, Artificial Sequence
  Description of Artificial Sequence: Synthetic oligonucleotide
uucaccuucuugccaggcu

SEQ ID NO: 2757491 - RNA, 19 nt, Artificial Sequence
  Description of Artificial Sequence: Synthetic oligonucleotide
cuccacaaacccaggcagg

SEQ ID NO: 2757492 - RNA, 19 nt, Artificial Sequence
  Description of Artificial Sequence: Synthetic oligonucleotide
cacucagacaugccaacac

SEQ ID NO: 2757493 - RNA, 19 nt, Artificial Sequence
  Description of Artificial Sequence: Synthetic oligonucleotide
aggggauggcaucucccac

SEQ ID NO: 2757494 - RNA, 19 nt, Artificial Sequence
  Description of Artificial Sequence: Synthetic oligonucleotide
gcaggugggucuuagaaca

SEQ ID NO: 2757495 - RNA, 19 nt, Artificial Sequence
  Description of Artificial Sequence: Synthetic oligonucleotide
cuuagaacagccaggugua

SEQ ID NO: 2757496 - RNA, 19 nt, Artificial Sequence
  Description of Artificial Sequence: Synthetic oligonucleotide
ccuuucuugccuuugaaca

SEQ ID NO: 2757497 - RNA, 19 nt, Artificial Sequence
  Description of Artificial Sequence: Synthetic oligonucleotide
gaccccacucuucagucac

SEQ ID NO: 2757498 - RNA, 19 nt, Artificial Sequence
  Description of Artificial Sequence: Synthetic oligonucleotide
aucuaguaguaagucuguc

SEQ ID NO: 2757499 - RNA, 19 nt, Artificial Sequence
  Description of Artificial Sequence: Synthetic oligonucleotide
gaaucaucuaguaguaagu

SEQ ID NO: 2757500 - RNA, 19 nt, Artificial Sequence
  Description of Artificial Sequence: Synthetic oligonucleotide
gcuccacaaacccaggcag

SEQ ID NO: 2757501 - RNA, 19 nt, Artificial Sequence
  Description of Artificial Sequence: Synthetic oligonucleotide
caggcucccuuucaaacac

SEQ ID NO: 2757502 - RNA, 19 nt, Artificial Sequence
  Description of Artificial Sequence: Synthetic oligonucleotide
caucauuaacacucagaca

SEQ ID NO: 2757503 - RNA, 19 nt, Artificial Sequence
  Description of Artificial Sequence: Synthetic oligonucleotide
uccacaaacccaggcaggu

SEQ ID NO: 2757504 - RNA, 19 nt, Artificial Sequence
  Description of Artificial Sequence: Synthetic oligonucleotide
aguugugagaugaguguug

SEQ ID NO: 2757505 - RNA, 19 nt, Artificial Sequence
  Description of Artificial Sequence: Synthetic oligonucleotide
cuugcuccacaaacccagg

SEQ ID NO: 2757506 - RNA, 19 nt, Artificial Sequence
  Description of Artificial Sequence: Synthetic oligonucleotide
acuacgccauugucuauca

SEQ ID NO: 2757507 - RNA, 19 nt, Artificial Sequence
  Description of Artificial Sequence: Synthetic oligonucleotide
cagccagguguaaaugccc

SEQ ID NO: 2757508 - RNA, 19 nt, Artificial Sequence
  Description of Artificial Sequence: Synthetic oligonucleotide
ggagaaccucuucagccgg

SEQ ID NO: 2757509 - RNA, 19 nt, Artificial Sequence
  Description of Artificial Sequence: Synthetic oligonucleotide
agugccuucacuacgccau

SEQ ID NO: 2757510 - RNA, 19 nt, Artificial Sequence
  Description of Artificial Sequence: Synthetic oligonucleotide
aagaaucaucuaguaguaa

SEQ ID NO: 2757511 - RNA, 19 nt, Artificial Sequence
  Description of Artificial Sequence: Synthetic oligonucleotide
aggcaggugggucuuagaa

SEQ ID NO: 2757512 - RNA, 19 nt, Artificial Sequence
  Description of Artificial Sequence: Synthetic oligonucleotide
uaaaugccccaggaacucc

SEQ ID NO: 2757513 - RNA, 19 nt, Artificial Sequence
  Description of Artificial Sequence: Synthetic oligonucleotide
aaaugccccaggaacucca

SEQ ID NO: 2757514 - RNA, 19 nt, Artificial Sequence
  Description of Artificial Sequence: Synthetic oligonucleotide
accuccacugaggggaugg

SEQ ID NO: 2757515 - RNA, 19 nt, Artificial Sequence
  Description of Artificial Sequence: Synthetic oligonucleotide
cucagaguugugagaugag

SEQ ID NO: 2757516 - RNA, 19 nt, Artificial Sequence
  Description of Artificial Sequence: Synthetic oligonucleotide
agaaccucuucagccggcg

SEQ ID NO: 2757517 - RNA, 19 nt, Artificial Sequence
  Description of Artificial Sequence: Synthetic oligonucleotide
gaggggauggcaucuccca

SEQ ID NO: 2757518 - RNA, 19 nt, Artificial Sequence
  Description of Artificial Sequence: Synthetic oligonucleotide
cuucacuacgccauugucu

SEQ ID NO: 2757519 - RNA, 19 nt, Artificial Sequence
  Description of Artificial Sequence: Synthetic oligonucleotide
ugugggcucgaccccacuc

SEQ ID NO: 2757520 - RNA, 19 nt, Artificial Sequence
  Description of Artificial Sequence: Synthetic oligonucleotide
agagccucggcuugcucca

SEQ ID NO: 2757521 - RNA, 19 nt, Artificial Sequence
  Description of Artificial Sequence: Synthetic oligonucleotide
gcgauucccaaagagagac

SEQ ID NO: 2757522 - RNA, 19 nt, Artificial Sequence
  Description of Artificial Sequence: Synthetic oligonucleotide
ucgaccccacucuucaguc

SEQ ID NO: 2757523 - RNA, 19 nt, Artificial Sequence
  Description of Artificial Sequence: Synthetic oligonucleotide
guaaaugccccaggaacuc

SEQ ID NO: 2757524 - RNA, 19 nt, Artificial Sequence
  Description of Artificial Sequence: Synthetic oligonucleotide
agccucagaguugugagau

SEQ ID NO: 2757525 - RNA, 19 nt, Artificial Sequence
  Description of Artificial Sequence: Synthetic oligonucleotide
agacaugccaacaccugca

SEQ ID NO: 2757526 - RNA, 19 nt, Artificial Sequence
  Description of Artificial Sequence: Synthetic oligonucleotide
cagccggcgauucccaaag

SEQ ID NO: 2757527 - RNA, 19 nt, Artificial Sequence
  Description of Artificial Sequence: Synthetic oligonucleotide
uacgccucccacccugcug

SEQ ID NO: 2757528 - RNA, 19 nt, Artificial Sequence
  Description of Artificial Sequence: Synthetic oligonucleotide
auccgggccauagccaccg

SEQ ID NO: 2757529 - RNA, 19 nt, Artificial Sequence
  Description of Artificial Sequence: Synthetic oligonucleotide
uccaaacagcacaccuuuc

SEQ ID NO: 2757530 - RNA, 19 nt, Artificial Sequence
  Description of Artificial Sequence: Synthetic oligonucleotide
accuugauccgggccauag

SEQ ID NO: 2757531 - RNA, 19 nt, Artificial Sequence
  Description of Artificial Sequence: Synthetic oligonucleotide
ugccuuugaacagcuccgc

SEQ ID NO: 2757532 - RNA, 19 nt, Artificial Sequence
  Description of Artificial Sequence: Synthetic oligonucleotide
cugaggggauggcaucucc

SEQ ID NO: 2757533 - RNA, 19 nt, Artificial Sequence
  Description of Artificial Sequence: Synthetic oligonucleotide
gucagccaggagccgaacc

SEQ ID NO: 2757534 - RNA, 19 nt, Artificial Sequence
  Description of Artificial Sequence: Synthetic oligonucleotide
gggucuuagaacagccagg

SEQ ID NO: 2757535 - RNA, 19 nt, Artificial Sequence
  Description of Artificial Sequence: Synthetic oligonucleotide
ggugggucuuagaacagcc

SEQ ID NO: 2757536 - RNA, 19 nt, Artificial Sequence
  Description of Artificial Sequence: Synthetic oligonucleotide
ccaggaacuccaaacagca

SEQ ID NO: 2757537 - RNA, 19 nt, Artificial Sequence
  Description of Artificial Sequence: Synthetic oligonucleotide
cacuacgccauugucuauc

SEQ ID NO: 2757538 - RNA, 19 nt, Artificial Sequence
  Description of Artificial Sequence: Synthetic oligonucleotide
accuucuugccaggcuccc

SEQ ID NO: 2757539 - RNA, 19 nt, Artificial Sequence
  Description of Artificial Sequence: Synthetic oligonucleotide
gccugugccaucuggcucc

SEQ ID NO: 2757540 - RNA, 19 nt, Artificial Sequence
  Description of Artificial Sequence: Synthetic oligonucleotide
caccaaagaaucaucuagu

SEQ ID NO: 2757541 - RNA, 19 nt, Artificial Sequence
  Description of Artificial Sequence: Synthetic oligonucleotide
ccauggagaaccucuucag

SEQ ID NO: 2757542 - RNA, 19 nt, Artificial Sequence
  Description of Artificial Sequence: Synthetic oligonucleotide
ggggauggcaucucccacc

SEQ ID NO: 2757543 - RNA, 19 nt, Artificial Sequence
  Description of Artificial Sequence: Synthetic oligonucleotide
ucccaaagagagacaccaa

SEQ ID NO: 2757544 - RNA, 19 nt, Artificial Sequence
  Description of Artificial Sequence: Synthetic oligonucleotide
ucagccggcgauucccaaa

SEQ ID NO: 2757545 - RNA, 19 nt, Artificial Sequence
  Description of Artificial Sequence: Synthetic oligonucleotide
cggcgauucccaaagagag

SEQ ID NO: 2757546 - RNA, 19 nt, Artificial Sequence
  Description of Artificial Sequence: Synthetic oligonucleotide
ucuugccaggcucccuuuc

SEQ ID NO: 2757547 - RNA, 19 nt, Artificial Sequence
  Description of Artificial Sequence: Synthetic oligonucleotide
cucagacaugccaacaccu

SEQ ID NO: 2757548 - RNA, 19 nt, Artificial Sequence
  Description of Artificial Sequence: Synthetic oligonucleotide
uugccaggcucccuuucaa

SEQ ID NO: 2757549 - RNA, 19 nt, Artificial Sequence
  Description of Artificial Sequence: Synthetic oligonucleotide
ugcgguccccgcuacgccu

SEQ ID NO: 2757550 - RNA, 19 nt, Artificial Sequence
  Description of Artificial Sequence: Synthetic oligonucleotide
uagccaccgaggccgcugc

SEQ ID NO: 2757551 - RNA, 19 nt, Artificial Sequence
  Description of Artificial Sequence: Synthetic oligonucleotide
aggagccgaaccuugccuu

SEQ ID NO: 2757552 - RNA, 19 nt, Artificial Sequence
  Description of Artificial Sequence: Synthetic oligonucleotide
cugccuugugggcucgacc

SEQ ID NO: 2757553 - RNA, 19 nt, Artificial Sequence
  Description of Artificial Sequence: Synthetic oligonucleotide
ggcaggugggucuuagaac

SEQ ID NO: 2757554 - RNA, 19 nt, Artificial Sequence
  Description of Artificial Sequence: Synthetic oligonucleotide
gucuuagaacagccaggug

SEQ ID NO: 2757555 - RNA, 19 nt, Artificial Sequence
  Description of Artificial Sequence: Synthetic oligonucleotide
caggugggucuuagaacag

SEQ ID NO: 2757556 - RNA, 19 nt, Artificial Sequence
  Description of Artificial Sequence: Synthetic oligonucleotide
caucucccaccuugauccg

SEQ ID NO: 2757557 - RNA, 19 nt, Artificial Sequence
  Description of Artificial Sequence: Synthetic oligonucleotide
acacucagacaugccaaca

SEQ ID NO: 2757558 - RNA, 19 nt, Artificial Sequence
  Description of Artificial Sequence: Synthetic oligonucleotide
gaagcugcgguccccgcua

SEQ ID NO: 2757559 - RNA, 19 nt, Artificial Sequence
  Description of Artificial Sequence: Synthetic oligonucleotide
gagccucagaguugugaga

SEQ ID NO: 2757560 - RNA, 19 nt, Artificial Sequence
  Description of Artificial Sequence: Synthetic oligonucleotide
gguguaaaugccccaggaa

SEQ ID NO: 2757561 - RNA, 19 nt, Artificial Sequence
  Description of Artificial Sequence: Synthetic oligonucleotide
gccggcgauucccaaagag

SEQ ID NO: 2757562 - RNA, 19 nt, Artificial Sequence
  Description of Artificial Sequence: Synthetic oligonucleotide
agcacaccuuucuugccuu

SEQ ID NO: 2757563 - RNA, 19 nt, Artificial Sequence
  Description of Artificial Sequence: Synthetic oligonucleotide
ugcuucccggccugcuugc

SEQ ID NO: 2757564 - RNA, 19 nt, Artificial Sequence
  Description of Artificial Sequence: Synthetic oligonucleotide
uuagaacagccagguguaa

SEQ ID NO: 2757565 - RNA, 19 nt, Artificial Sequence
  Description of Artificial Sequence: Synthetic oligonucleotide
ccuuugaacagcuccgcca

SEQ ID NO: 2757566 - RNA, 19 nt, Artificial Sequence
  Description of Artificial Sequence: Synthetic oligonucleotide
cuugccaggcucccuuuca

SEQ ID NO: 2757567 - RNA, 19 nt, Artificial Sequence
  Description of Artificial Sequence: Synthetic oligonucleotide
caacaccugcacucccuug

SEQ ID NO: 2757568 - RNA, 19 nt, Artificial Sequence
  Description of Artificial Sequence: Synthetic oligonucleotide
acuccaaacagcacaccuu

SEQ ID NO: 2757569 - RNA, 19 nt, Artificial Sequence
  Description of Artificial Sequence: Synthetic oligonucleotide
cuucagagccucggcuugc

SEQ ID NO: 2757570 - RNA, 19 nt, Artificial Sequence
  Description of Artificial Sequence: Synthetic oligonucleotide
gguucaccuucuugccagg

SEQ ID NO: 2757571 - RNA, 19 nt, Artificial Sequence
  Description of Artificial Sequence: Synthetic oligonucleotide
cucuucagccggcgauucc

SEQ ID NO: 2757572 - RNA, 19 nt, Artificial Sequence
  Description of Artificial Sequence: Synthetic oligonucleotide
ugccaggcucccuuucaaa

SEQ ID NO: 2757573 - RNA, 19 nt, Artificial Sequence
  Description of Artificial Sequence: Synthetic oligonucleotide
cauugucuaucaccaugga

SEQ ID NO: 2757574 - RNA, 19 nt, Artificial Sequence
  Description of Artificial Sequence: Synthetic oligonucleotide
ggcaucucccaccuugauc

SEQ ID NO: 2757575 - RNA, 19 nt, Artificial Sequence
  Description of Artificial Sequence: Synthetic oligonucleotide
uaucaccauggagaaccuc

SEQ ID NO: 2757576 - RNA, 19 nt, Artificial Sequence
  Description of Artificial Sequence: Synthetic oligonucleotide
caccauggagaaccucuuc

SEQ ID NO: 2757577 - RNA, 19 nt, Artificial Sequence
  Description of Artificial Sequence: Synthetic oligonucleotide
cuugugggcucgaccccac

SEQ ID NO: 2757578 - RNA, 19 nt, Artificial Sequence
  Description of Artificial Sequence: Synthetic oligonucleotide
ccgaaccuugccuucugcc

SEQ ID NO: 2757579 - RNA, 19 nt, Artificial Sequence
  Description of Artificial Sequence: Synthetic oligonucleotide
caucuaguaguaagucugu

SEQ ID NO: 2757580 - RNA, 19 nt, Artificial Sequence
  Description of Artificial Sequence: Synthetic oligonucleotide
cccgcuacgccucccaccc

SEQ ID NO: 2757581 - RNA, 19 nt, Artificial Sequence
  Description of Artificial Sequence: Synthetic oligonucleotide
accgaggccgcugcugaag

SEQ ID NO: 2757582 - RNA, 19 nt, Artificial Sequence
  Description of Artificial Sequence: Synthetic oligonucleotide
gaaccucuucagccggcga

SEQ ID NO: 2757583 - RNA, 19 nt, Artificial Sequence
  Description of Artificial Sequence: Synthetic oligonucleotide
ugccaucuggcuccacauu

SEQ ID NO: 2757584 - RNA, 19 nt, Artificial Sequence
  Description of Artificial Sequence: Synthetic oligonucleotide
agccgaaccuugccuucug

SEQ ID NO: 2757585 - RNA, 19 nt, Artificial Sequence
  Description of Artificial Sequence: Synthetic oligonucleotide
gcugaagcugcgguccccg

SEQ ID NO: 2757586 - RNA, 19 nt, Artificial Sequence
  Description of Artificial Sequence: Synthetic oligonucleotide
ccagguguaaaugccccag

SEQ ID NO: 2757587 - RNA, 19 nt, Artificial Sequence
  Description of Artificial Sequence: Synthetic oligonucleotide
cugaagcugcgguccccgc

SEQ ID NO: 2757588 - RNA, 19 nt, Artificial Sequence
  Description of Artificial Sequence: Synthetic oligonucleotide
gccuuugaacagcuccgcc

SEQ ID NO: 2757589 - RNA, 19 nt, Artificial Sequence
  Description of Artificial Sequence: Synthetic oligonucleotide
ggucuuagaacagccaggu

SEQ ID NO: 2757590 - RNA, 19 nt, Artificial Sequence
  Description of Artificial Sequence: Synthetic oligonucleotide
uucagccggcgauucccaa

SEQ ID NO: 2757591 - RNA, 19 nt, Artificial Sequence
  Description of Artificial Sequence: Synthetic oligonucleotide
cuccaaacagcacaccuuu

SEQ ID NO: 2757592 - RNA, 19 nt, Artificial Sequence
  Description of Artificial Sequence: Synthetic oligonucleotide
cauccggccagagccucag

SEQ ID NO: 2757593 - RNA, 19 nt, Artificial Sequence
  Description of Artificial Sequence: Synthetic oligonucleotide
aaugccccaggaacuccaa

SEQ ID NO: 2757594 - RNA, 19 nt, Artificial Sequence
  Description of Artificial Sequence: Synthetic oligonucleotide
ugggcucgaccccacucuu

SEQ ID NO: 2757595 - RNA, 19 nt, Artificial Sequence
  Description of Artificial Sequence: Synthetic oligonucleotide
ucacuacgccauugucuau

SEQ ID NO: 2757596 - RNA, 19 nt, Artificial Sequence
  Description of Artificial Sequence: Synthetic oligonucleotide
agcugcgguccccgcuacg

SEQ ID NO: 2757597 - RNA, 19 nt, Artificial Sequence
  Description of Artificial Sequence: Synthetic oligonucleotide
cuacgccauugucuaucac

SEQ ID NO: 2757598 - RNA, 19 nt, Artificial Sequence
  Description of Artificial Sequence: Synthetic oligonucleotide
cagugccuucacuacgcca

SEQ ID NO: 2757599 - RNA, 19 nt, Artificial Sequence
  Description of Artificial Sequence: Synthetic oligonucleotide
gaguugugagaugaguguu

SEQ ID NO: 2757600 - RNA, 19 nt, Artificial Sequence
  Description of Artificial Sequence: Synthetic oligonucleotide
uucuugccaggcucccuuu

SEQ ID NO: 2757601 - RNA, 19 nt, Artificial Sequence
  Description of Artificial Sequence: Synthetic oligonucleotide
cugcgguccccgcuacgcc

SEQ ID NO: 2757602 - RNA, 19 nt, Artificial Sequence
  Description of Artificial Sequence: Synthetic oligonucleotide
uugugggcucgaccccacu

SEQ ID NO: 2757603 - RNA, 19 nt, Artificial Sequence
  Description of Artificial Sequence: Synthetic oligonucleotide
cuucagccggcgauuccca

SEQ ID NO: 2757604 - RNA, 19 nt, Artificial Sequence
  Description of Artificial Sequence: Synthetic oligonucleotide
aaggccccaguggggucag

SEQ ID NO: 2757605 - RNA, 19 nt, Artificial Sequence
  Description of Artificial Sequence: Synthetic oligonucleotide
gccccaggaacuccaaaca

SEQ ID NO: 2757606 - RNA, 19 nt, Artificial Sequence
  Description of Artificial Sequence: Synthetic oligonucleotide
agccaggagccgaaccuug

SEQ ID NO: 2757607 - RNA, 19 nt, Artificial Sequence
  Description of Artificial Sequence: Synthetic oligonucleotide
gugggucuuagaacagcca

SEQ ID NO: 2757608 - RNA, 19 nt, Artificial Sequence
  Description of Artificial Sequence: Synthetic oligonucleotide
ccuucacuacgccauuguc

SEQ ID NO: 2757609 - RNA, 19 nt, Artificial Sequence
  Description of Artificial Sequence: Synthetic oligonucleotide
ccaggagccgaaccuugcc

SEQ ID NO: 2757610 - RNA, 19 nt, Artificial Sequence
  Description of Artificial Sequence: Synthetic oligonucleotide
uccccgcuacgccucccac

SEQ ID NO: 2757611 - RNA, 19 nt, Artificial Sequence
  Description of Artificial Sequence: Synthetic oligonucleotide
ugcacucccuuggccuuca

SEQ ID NO: 2757612 - RNA, 19 nt, Artificial Sequence
  Description of Artificial Sequence: Synthetic oligonucleotide
aucuggcuccacauucagu

SEQ ID NO: 2757613 - RNA, 19 nt, Artificial Sequence
  Description of Artificial Sequence: Synthetic oligonucleotide
caaacagcacaccuuucuu

SEQ ID NO: 2757614 - RNA, 19 nt, Artificial Sequence
  Description of Artificial Sequence: Synthetic oligonucleotide
ggagccgaaccuugccuuc

SEQ ID NO: 2757615 - RNA, 19 nt, Artificial Sequence
  Description of Artificial Sequence: Synthetic oligonucleotide
ccuugauccgggccauagc

SEQ ID NO: 2757616 - RNA, 19 nt, Artificial Sequence
  Description of Artificial Sequence: Synthetic oligonucleotide
gucuaucaccauggagaac

SEQ ID NO: 2757617 - RNA, 19 nt, Artificial Sequence
  Description of Artificial Sequence: Synthetic oligonucleotide
cggcuugcuccacaaaccc

SEQ ID NO: 2757618 - RNA, 19 nt, Artificial Sequence
  Description of Artificial Sequence: Synthetic oligonucleotide
cccaccuugauccgggcca

SEQ ID NO: 2757619 - RNA, 19 nt, Artificial Sequence
  Description of Artificial Sequence: Synthetic oligonucleotide
ccggcgauucccaaagaga

SEQ ID NO: 2757620 - RNA, 19 nt, Artificial Sequence
  Description of Artificial Sequence: Synthetic oligonucleotide
gcugcgguccccgcuacgc

SEQ ID NO: 2757621 - RNA, 19 nt, Artificial Sequence
  Description of Artificial Sequence: Synthetic oligonucleotide
ccccaguggggucagccag

SEQ ID NO: 2757622 - RNA, 19 nt, Artificial Sequence
  Description of Artificial Sequence: Synthetic oligonucleotide
agccucggcuugcuccaca

SEQ ID NO: 2757623 - RNA, 19 nt, Artificial Sequence
  Description of Artificial Sequence: Synthetic oligonucleotide
cucgaccccacucuucagu

SEQ ID NO: 2757624 - RNA, 19 nt, Artificial Sequence
  Description of Artificial Sequence: Synthetic oligonucleotide
accucuucagccggcgauu

SEQ ID NO: 2757625 - RNA, 19 nt, Artificial Sequence
  Description of Artificial Sequence: Synthetic oligonucleotide
ucccggccugcuugccugc

SEQ ID NO: 2757626 - RNA, 19 nt, Artificial Sequence
  Description of Artificial Sequence: Synthetic oligonucleotide
cacucccuuggccuucaga

SEQ ID NO: 2757627 - RNA, 19 nt, Artificial Sequence
  Description of Artificial Sequence: Synthetic oligonucleotide
gccgaaccuugccuucugc

SEQ ID NO: 2757628 - RNA, 19 nt, Artificial Sequence
  Description of Artificial Sequence: Synthetic oligonucleotide
cuaucaccauggagaaccu

SEQ ID NO: 2757629 - RNA, 19 nt, Artificial Sequence
  Description of Artificial Sequence: Synthetic oligonucleotide
cuccacugaggggauggca

SEQ ID NO: 2757630 - RNA, 19 nt, Artificial Sequence
  Description of Artificial Sequence: Synthetic oligonucleotide
ccucccacccugcugcuuc

SEQ ID NO: 2757631 - RNA, 19 nt, Artificial Sequence
  Description of Artificial Sequence: Synthetic oligonucleotide
agccggcgauucccaaaga

SEQ ID NO: 2757632 - RNA, 19 nt, Artificial Sequence
  Description of Artificial Sequence: Synthetic oligonucleotide
gccucagaguugugagaug

SEQ ID NO: 2757633 - RNA, 19 nt, Artificial Sequence
  Description of Artificial Sequence: Synthetic oligonucleotide
caggagccgaaccuugccu

SEQ ID NO: 2757634 - RNA, 19 nt, Artificial Sequence
  Description of Artificial Sequence: Synthetic oligonucleotide
gccuugugggcucgacccc

SEQ ID NO: 2757635 - RNA, 19 nt, Artificial Sequence
  Description of Artificial Sequence: Synthetic oligonucleotide
ggcgauucccaaagagaga

SEQ ID NO: 2757636 - RNA, 19 nt, Artificial Sequence
  Description of Artificial Sequence: Synthetic oligonucleotide
gccagguguaaaugcccca

SEQ ID NO: 2757637 - RNA, 19 nt, Artificial Sequence
  Description of Artificial Sequence: Synthetic oligonucleotide
ccgaggccgcugcugaagc

SEQ ID NO: 2757638 - RNA, 19 nt, Artificial Sequence
  Description of Artificial Sequence: Synthetic oligonucleotide
ggccccaguggggucagcc

SEQ ID NO: 2757639 - RNA, 19 nt, Artificial Sequence
  Description of Artificial Sequence: Synthetic oligonucleotide
guaguaagucugucuccuu

SEQ ID NO: 2757640 - RNA, 19 nt, Artificial Sequence
  Description of Artificial Sequence: Synthetic oligonucleotide
gcucgaccccacucuucag

SEQ ID NO: 2757641 - RNA, 19 nt, Artificial Sequence
  Description of Artificial Sequence: Synthetic oligonucleotide
uccgggccauagccaccga

SEQ ID NO: 2757642 - RNA, 19 nt, Artificial Sequence
  Description of Artificial Sequence: Synthetic oligonucleotide
ggcuugcuccacaaaccca

SEQ ID NO: 2757643 - RNA, 19 nt, Artificial Sequence
  Description of Artificial Sequence: Synthetic oligonucleotide
guccccgcuacgccuccca

SEQ ID NO: 2757644 - RNA, 19 nt, Artificial Sequence
  Description of Artificial Sequence: Synthetic oligonucleotide
gccaggagccgaaccuugc

SEQ ID NO: 2757645 - RNA, 19 nt, Artificial Sequence
  Description of Artificial Sequence: Synthetic oligonucleotide
gagccgaaccuugccuucu

SEQ ID NO: 2757646 - RNA, 19 nt, Artificial Sequence
  Description of Artificial Sequence: Synthetic oligonucleotide
ccccgcuacgccucccacc

SEQ ID NO: 2757647 - RNA, 19 nt, Artificial Sequence
  Description of Artificial Sequence: Synthetic oligonucleotide
cugcacucccuuggccuuc

SEQ ID NO: 2757648 - RNA, 19 nt, Artificial Sequence
  Description of Artificial Sequence: Synthetic oligonucleotide
ccgggccauagccaccgag

SEQ ID NO: 2757649 - RNA, 19 nt, Artificial Sequence
  Description of Artificial Sequence: Synthetic oligonucleotide
auccggccagagccucaga

SEQ ID NO: 2757650 - RNA, 19 nt, Artificial Sequence
  Description of Artificial Sequence: Synthetic oligonucleotide
gccuucacuacgccauugu

SEQ ID NO: 2757651 - RNA, 19 nt, Artificial Sequence
  Description of Artificial Sequence: Synthetic oligonucleotide
ggccaggcugcaggugagg

SEQ ID NO: 2757652 - RNA, 19 nt, Artificial Sequence
  Description of Artificial Sequence: Synthetic oligonucleotide
ccacaaacccaggcaggug

SEQ ID NO: 2757653 - RNA, 19 nt, Artificial Sequence
  Description of Artificial Sequence: Synthetic oligonucleotide
cgcuacgccucccacccug

SEQ ID NO: 2757654 - RNA, 19 nt, Artificial Sequence
  Description of Artificial Sequence: Synthetic oligonucleotide
gcuacgccucccacccugc

SEQ ID NO: 2757655 - RNA, 19 nt, Artificial Sequence
  Description of Artificial Sequence: Synthetic oligonucleotide
cuucccggccugcuugccu

SEQ ID NO: 2757656 - RNA, 19 nt, Artificial Sequence
  Description of Artificial Sequence: Synthetic oligonucleotide
gccccaguggggucagcca

SEQ ID NO: 2757657 - RNA, 19 nt, Artificial Sequence
  Description of Artificial Sequence: Synthetic oligonucleotide
ccucuucagccggcgauuc

SEQ ID NO: 2757658 - RNA, 19 nt, Artificial Sequence
  Description of Artificial Sequence: Synthetic oligonucleotide
gagccucggcuugcuccac

SEQ ID NO: 2757659 - RNA, 19 nt, Artificial Sequence
  Description of Artificial Sequence: Synthetic oligonucleotide
gccuucagagccucggcuu

SEQ ID NO: 2757660 - RNA, 19 nt, Artificial Sequence
  Description of Artificial Sequence: Synthetic oligonucleotide
cgaaccuugccuucugccu

SEQ ID NO: 2757661 - RNA, 19 nt, Artificial Sequence
  Description of Artificial Sequence: Synthetic oligonucleotide
ccaccgaggccgcugcuga

SEQ ID NO: 2757662 - RNA, 19 nt, Artificial Sequence
  Description of Artificial Sequence: Synthetic oligonucleotide
gcucccuuucaaacaccuc

SEQ ID NO: 2757663 - RNA, 19 nt, Artificial Sequence
  Description of Artificial Sequence: Synthetic oligonucleotide
caggugaggccugugccau

SEQ ID NO: 2757664 - RNA, 19 nt, Artificial Sequence
  Description of Artificial Sequence: Synthetic oligonucleotide
cagcuccgccagguucacc

SEQ ID NO: 2757665 - RNA, 19 nt, Artificial Sequence
  Description of Artificial Sequence: Synthetic oligonucleotide
ccuugugggcucgacccca

SEQ ID NO: 2757666 - RNA, 19 nt, Artificial Sequence
  Description of Artificial Sequence: Synthetic oligonucleotide
gccuucugccuugugggcu

SEQ ID NO: 2757667 - RNA, 19 nt, Artificial Sequence
  Description of Artificial Sequence: Synthetic oligonucleotide
gccaacaccugcacucccu

SEQ ID NO: 2757668 - RNA, 19 nt, Artificial Sequence
  Description of Artificial Sequence: Synthetic oligonucleotide
caccgaggccgcugcugaa

SEQ ID NO: 2757669 - RNA, 19 nt, Artificial Sequence
  Description of Artificial Sequence: Synthetic oligonucleotide
gugccuucacuacgccauu

SEQ ID NO: 2757670 - RNA, 19 nt, Artificial Sequence
  Description of Artificial Sequence: Synthetic oligonucleotide
cuacgccucccacccugcu

SEQ ID NO: 2757671 - RNA, 19 nt, Artificial Sequence
  Description of Artificial Sequence: Synthetic oligonucleotide
ccagagccucagaguugug

SEQ ID NO: 2757672 - RNA, 19 nt, Artificial Sequence
  Description of Artificial Sequence: Synthetic oligonucleotide
gcacucccuuggccuucag

SEQ ID NO: 2757673 - RNA, 19 nt, Artificial Sequence
  Description of Artificial Sequence: Synthetic oligonucleotide
cugugccaucuggcuccac

SEQ ID NO: 2757674 - RNA, 19 nt, Artificial Sequence
  Description of Artificial Sequence: Synthetic oligonucleotide
ccggccagagccucagagu

SEQ ID NO: 2757675 - RNA, 19 nt, Artificial Sequence
  Description of Artificial Sequence: Synthetic oligonucleotide
ccccacucuucagucacaa

SEQ ID NO: 2757676 - RNA, 19 nt, Artificial Sequence
  Description of Artificial Sequence: Synthetic oligonucleotide
cccacucuucagucacaaa

SEQ ID NO: 2757677 - RNA, 19 nt, Artificial Sequence
  Description of Artificial Sequence: Synthetic oligonucleotide
gguccccgcuacgccuccc

SEQ ID NO: 2757678 - RNA, 19 nt, Artificial Sequence
  Description of Artificial Sequence: Synthetic oligonucleotide
gcgguccccgcuacgccuc

SEQ ID NO: 2757679 - RNA, 19 nt, Artificial Sequence
  Description of Artificial Sequence: Synthetic oligonucleotide
cauagccaccgaggccgcu

SEQ ID NO: 2757680 - RNA, 19 nt, Artificial Sequence
  Description of Artificial Sequence: Synthetic oligonucleotide
ccaacaccugcacucccuu

SEQ ID NO: 2757681 - RNA, 19 nt, Artificial Sequence
  Description of Artificial Sequence: Synthetic oligonucleotide
gcacaccuuucuugccuuu

SEQ ID NO: 2757682 - RNA, 19 nt, Artificial Sequence
  Description of Artificial Sequence: Synthetic oligonucleotide
ccucggcuugcuccacaaa

SEQ ID NO: 2757683 - RNA, 19 nt, Artificial Sequence
  Description of Artificial Sequence: Synthetic oligonucleotide
caccuugauccgggccaua

SEQ ID NO: 2757684 - RNA, 19 nt, Artificial Sequence
  Description of Artificial Sequence: Synthetic oligonucleotide
cgguccccgcuacgccucc

SEQ ID NO: 2757685 - RNA, 19 nt, Artificial Sequence
  Description of Artificial Sequence: Synthetic oligonucleotide
ccugugccaucuggcucca

SEQ ID NO: 2757686 - RNA, 19 nt, Artificial Sequence
  Description of Artificial Sequence: Synthetic oligonucleotide
cgaggccgcugcugaagcu

SEQ ID NO: 2757687 - RNA, 19 nt, Artificial Sequence
  Description of Artificial Sequence: Synthetic oligonucleotide
cccaggcaggugggucuua

SEQ ID NO: 2757688 - RNA, 19 nt, Artificial Sequence
  Description of Artificial Sequence: Synthetic oligonucleotide
gccucccacccugcugcuu

SEQ ID NO: 2757689 - RNA, 19 nt, Artificial Sequence
  Description of Artificial Sequence: Synthetic oligonucleotide
ccgcuacgccucccacccu

SEQ ID NO: 2757690 - RNA, 19 nt, Artificial Sequence
  Description of Artificial Sequence: Synthetic oligonucleotide
aaauaacuuuauuuguucc

SEQ ID NO: 2757691 - RNA, 19 nt, Artificial Sequence
  Description of Artificial Sequence: Synthetic oligonucleotide
uguuuugaaagauugucgg

SEQ ID NO: 2757692 - RNA, 19 nt, Artificial Sequence
  Description of Artificial Sequence: Synthetic oligonucleotide
agucuugaagccuagaccg

SEQ ID NO: 2757693 - RNA, 19 nt, Artificial Sequence
  Description of Artificial Sequence: Synthetic oligonucleotide
accuugaguacauugaagc

SEQ ID NO: 2757694 - RNA, 19 nt, Artificial Sequence
  Description of Artificial Sequence: Synthetic oligonucleotide
uguaauggagguaaucccg

SEQ ID NO: 2757695 - RNA, 19 nt, Artificial Sequence
  Description of Artificial Sequence: Synthetic oligonucleotide
aaagcgauuguacuuucgg

SEQ ID NO: 2757696 - RNA, 19 nt, Artificial Sequence
  Description of Artificial Sequence: Synthetic oligonucleotide
uguacaucccugaagcacg

SEQ ID NO: 2757697 - RNA, 19 nt, Artificial Sequence
  Description of Artificial Sequence: Synthetic oligonucleotide
uuuuguaguaccgagggag

SEQ ID NO: 2757698 - RNA, 19 nt, Artificial Sequence
  Description of Artificial Sequence: Synthetic oligonucleotide
uucuuguuuugaaagauug

SEQ ID NO: 2757699 - RNA, 19 nt, Artificial Sequence
  Description of Artificial Sequence: Synthetic oligonucleotide
aaugucgccaaucuguaca

SEQ ID NO: 2757700 - RNA, 19 nt, Artificial Sequence
  Description of Artificial Sequence: Synthetic oligonucleotide
aguacauugaagcgcacgg

SEQ ID NO: 2757701 - RNA, 19 nt, Artificial Sequence
  Description of Artificial Sequence: Synthetic oligonucleotide
uguacuuucggauguaaug

SEQ ID NO: 2757702 - RNA, 19 nt, Artificial Sequence
  Description of Artificial Sequence: Synthetic oligonucleotide
auguaauggagguaauccc

SEQ ID NO: 2757703 - RNA, 19 nt, Artificial Sequence
  Description of Artificial Sequence: Synthetic oligonucleotide
aaagagagcggccgacucc

SEQ ID NO: 2757704 - RNA, 19 nt, Artificial Sequence
  Description of Artificial Sequence: Synthetic oligonucleotide
cauuucuugucuauguagg

SEQ ID NO: 2757705 - RNA, 19 nt, Artificial Sequence
  Description of Artificial Sequence: Synthetic oligonucleotide
aauggagguaaucccgacg

SEQ ID NO: 2757706 - RNA, 19 nt, Artificial Sequence
  Description of Artificial Sequence: Synthetic oligonucleotide
cuuuugguaagcacgcucg

SEQ ID NO: 2757707 - RNA, 19 nt, Artificial Sequence
  Description of Artificial Sequence: Synthetic oligonucleotide
ugaauguccgccaucuucc

SEQ ID NO: 2757708 - RNA, 19 nt, Artificial Sequence
  Description of Artificial Sequence: Synthetic oligonucleotide
gacguuaccagugaagggg

SEQ ID NO: 2757709 - RNA, 19 nt, Artificial Sequence
  Description of Artificial Sequence: Synthetic oligonucleotide
uucuugucuauguaggugc

SEQ ID NO: 2757710 - RNA, 19 nt, Artificial Sequence
  Description of Artificial Sequence: Synthetic oligonucleotide
uguggcgcuucucaaagcg

SEQ ID NO: 2757711 - RNA, 19 nt, Artificial Sequence
  Description of Artificial Sequence: Synthetic oligonucleotide
aaaagagagcggccgacuc

SEQ ID NO: 2757712 - RNA, 19 nt, Artificial Sequence
  Description of Artificial Sequence: Synthetic oligonucleotide
uuuugaaagauugucggcu

SEQ ID NO: 2757713 - RNA, 19 nt, Artificial Sequence
  Description of Artificial Sequence: Synthetic oligonucleotide
uugaguacauugaagcgca

SEQ ID NO: 2757714 - RNA, 19 nt, Artificial Sequence
  Description of Artificial Sequence: Synthetic oligonucleotide
gagacguuaccagugaagg

SEQ ID NO: 2757715 - RNA, 19 nt, Artificial Sequence
  Description of Artificial Sequence: Synthetic oligonucleotide
cuuucggauguaauggagg

SEQ ID NO: 2757716 - RNA, 19 nt, Artificial Sequence
  Description of Artificial Sequence: Synthetic oligonucleotide
guacuuucggauguaaugg

SEQ ID NO: 2757717 - RNA, 19 nt, Artificial Sequence
  Description of Artificial Sequence: Synthetic oligonucleotide
aagagagcggccgacuccc

SEQ ID NO: 2757718 - RNA, 19 nt, Artificial Sequence
  Description of Artificial Sequence: Synthetic oligonucleotide
cuugaguacauugaagcgc

SEQ ID NO: 2757719 - RNA, 19 nt, Artificial Sequence
  Description of Artificial Sequence: Synthetic oligonucleotide
cagggaguuagcuagaguc

SEQ ID NO: 2757720 - RNA, 19 nt, Artificial Sequence
  Description of Artificial Sequence: Synthetic oligonucleotide
gagucuugaagccuagacc

SEQ ID NO: 2757721 - RNA, 19 nt, Artificial Sequence
  Description of Artificial Sequence: Synthetic oligonucleotide
uuuauuuguuccagggagu

SEQ ID NO: 2757722 - RNA, 19 nt, Artificial Sequence
  Description of Artificial Sequence: Synthetic oligonucleotide
uuugaaagauugucggcug

SEQ ID NO: 2757723 - RNA, 19 nt, Artificial Sequence
  Description of Artificial Sequence: Synthetic oligonucleotide
gaugacaaugguccgcugc

SEQ ID NO: 2757724 - RNA, 19 nt, Artificial Sequence
  Description of Artificial Sequence: Synthetic oligonucleotide
uaacuuuauuuguuccagg

SEQ ID NO: 2757725 - RNA, 19 nt, Artificial Sequence
  Description of Artificial Sequence: Synthetic oligonucleotide
cuuguuuugaaagauuguc

SEQ ID NO: 2757726 - RNA, 19 nt, Artificial Sequence
  Description of Artificial Sequence: Synthetic oligonucleotide
gaggaaaagagagcggccg

SEQ ID NO: 2757727 - RNA, 19 nt, Artificial Sequence
  Description of Artificial Sequence: Synthetic oligonucleotide
agugaccuugaguacauug

SEQ ID NO: 2757728 - RNA, 19 nt, Artificial Sequence
  Description of Artificial Sequence: Synthetic oligonucleotide
uggucacaaccccagacag

SEQ ID NO: 2757729 - RNA, 19 nt, Artificial Sequence
  Description of Artificial Sequence: Synthetic oligonucleotide
uuuugguaagcacgcucgg

SEQ ID NO: 2757730 - RNA, 19 nt, Artificial Sequence
  Description of Artificial Sequence: Synthetic oligonucleotide
uuucggauguaauggaggu

SEQ ID NO: 2757731 - RNA, 19 nt, Artificial Sequence
  Description of Artificial Sequence: Synthetic oligonucleotide
agugaaggggcauuucuug

SEQ ID NO: 2757732 - RNA, 19 nt, Artificial Sequence
  Description of Artificial Sequence: Synthetic oligonucleotide
agacauguucuuguggcgc

SEQ ID NO: 2757733 - RNA, 19 nt, Artificial Sequence
  Description of Artificial Sequence: Synthetic oligonucleotide
uuccuugccaguuucuccc

SEQ ID NO: 2757734 - RNA, 19 nt, Artificial Sequence
  Description of Artificial Sequence: Synthetic oligonucleotide
aagaacacgcuucuuguuu

SEQ ID NO: 2757735 - RNA, 19 nt, Artificial Sequence
  Description of Artificial Sequence: Synthetic oligonucleotide
aaugguccgcugcaucuuc

SEQ ID NO: 2757736 - RNA, 19 nt, Artificial Sequence
  Description of Artificial Sequence: Synthetic oligonucleotide
acgcuucuuguuuugaaag

SEQ ID NO: 2757737 - RNA, 19 nt, Artificial Sequence
  Description of Artificial Sequence: Synthetic oligonucleotide
aagcgcacggucuugcuca

SEQ ID NO: 2757738 - RNA, 19 nt, Artificial Sequence
  Description of Artificial Sequence: Synthetic oligonucleotide
uacauugaagcgcacgguc

SEQ ID NO: 2757739 - RNA, 19 nt, Artificial Sequence
  Description of Artificial Sequence: Synthetic oligonucleotide
uuggucacaaccccagaca

SEQ ID NO: 2757740 - RNA, 19 nt, Artificial Sequence
  Description of Artificial Sequence: Synthetic oligonucleotide
ucuuguuuugaaagauugu

SEQ ID NO: 2757741 - RNA, 19 nt, Artificial Sequence
  Description of Artificial Sequence: Synthetic oligonucleotide
ucgauggccuccuugggag

SEQ ID NO: 2757742 - RNA, 19 nt, Artificial Sequence
  Description of Artificial Sequence: Synthetic oligonucleotide
auguccgccaucuucccgg

SEQ ID NO: 2757743 - RNA, 19 nt, Artificial Sequence
  Description of Artificial Sequence: Synthetic oligonucleotide
acaucccugaagcacgggg

SEQ ID NO: 2757744 - RNA, 19 nt, Artificial Sequence
  Description of Artificial Sequence: Synthetic oligonucleotide
guuuugaaagauugucggc

SEQ ID NO: 2757745 - RNA, 19 nt, Artificial Sequence
  Description of Artificial Sequence: Synthetic oligonucleotide
cucucagaacuucugaaac

SEQ ID NO: 2757746 - RNA, 19 nt, Artificial Sequence
  Description of Artificial Sequence: Synthetic oligonucleotide
uuucuugucuauguaggug

SEQ ID NO: 2757747 - RNA, 19 nt, Artificial Sequence
  Description of Artificial Sequence: Synthetic oligonucleotide
ucccacggugacaaugucg

SEQ ID NO: 2757748 - RNA, 19 nt, Artificial Sequence
  Description of Artificial Sequence: Synthetic oligonucleotide
ugaggaaaagagagcggcc

SEQ ID NO: 2757749 - RNA, 19 nt, Artificial Sequence
  Description of Artificial Sequence: Synthetic oligonucleotide
ucggauguaauggagguaa

SEQ ID NO: 2757750 - RNA, 19 nt, Artificial Sequence
  Description of Artificial Sequence: Synthetic oligonucleotide
uuuccuugccaguuucucc

SEQ ID NO: 2757751 - RNA, 19 nt, Artificial Sequence
  Description of Artificial Sequence: Synthetic oligonucleotide
uugguaagcacgcucgguc

SEQ ID NO: 2757752 - RNA, 19 nt, Artificial Sequence
  Description of Artificial Sequence: Synthetic oligonucleotide
aagcgauuguacuuucgga

SEQ ID NO: 2757753 - RNA, 19 nt, Artificial Sequence
  Description of Artificial Sequence: Synthetic oligonucleotide
gaagcacggggacaggugc

SEQ ID NO: 2757754 - RNA, 19 nt, Artificial Sequence
  Description of Artificial Sequence: Synthetic oligonucleotide
uugaaagauugucggcugc

SEQ ID NO: 2757755 - RNA, 19 nt, Artificial Sequence
  Description of Artificial Sequence: Synthetic oligonucleotide
ucucagaacuucugaaacu

SEQ ID NO: 2757756 - RNA, 19 nt, Artificial Sequence
  Description of Artificial Sequence: Synthetic oligonucleotide
uugaagccuagaccgaugu

SEQ ID NO: 2757757 - RNA, 19 nt, Artificial Sequence
  Description of Artificial Sequence: Synthetic oligonucleotide
ucagaacuucugaaacugc

SEQ ID NO: 2757758 - RNA, 19 nt, Artificial Sequence
  Description of Artificial Sequence: Synthetic oligonucleotide
acuuuauuuguuccaggga

SEQ ID NO: 2757759 - RNA, 19 nt, Artificial Sequence
  Description of Artificial Sequence: Synthetic oligonucleotide
uuuguaguaccgagggagu

SEQ ID NO: 2757760 - RNA, 19 nt, Artificial Sequence
  Description of Artificial Sequence: Synthetic oligonucleotide
agcacgcucggucugaaug

SEQ ID NO: 2757761 - RNA, 19 nt, Artificial Sequence
  Description of Artificial Sequence: Synthetic oligonucleotide
acaaccccagacaggaucc

SEQ ID NO: 2757762 - RNA, 19 nt, Artificial Sequence
  Description of Artificial Sequence: Synthetic oligonucleotide
gauggagacguuaccagug

SEQ ID NO: 2757763 - RNA, 19 nt, Artificial Sequence
  Description of Artificial Sequence: Synthetic oligonucleotide
cuuguggcgcuucucaaag

SEQ ID NO: 2757764 - RNA, 19 nt, Artificial Sequence
  Description of Artificial Sequence: Synthetic oligonucleotide
agcgauuguacuuucggau

SEQ ID NO: 2757765 - RNA, 19 nt, Artificial Sequence
  Description of Artificial Sequence: Synthetic oligonucleotide
gcugcuuuugguaagcacg

SEQ ID NO: 2757766 - RNA, 19 nt, Artificial Sequence
  Description of Artificial Sequence: Synthetic oligonucleotide
gaguacauugaagcgcacg

SEQ ID NO: 2757767 - RNA, 19 nt, Artificial Sequence
  Description of Artificial Sequence: Synthetic oligonucleotide
auuucuugucuauguaggu

SEQ ID NO: 2757768 - RNA, 19 nt, Artificial Sequence
  Description of Artificial Sequence: Synthetic oligonucleotide
ugaccuugaguacauugaa

SEQ ID NO: 2757769 - RNA, 19 nt, Artificial Sequence
  Description of Artificial Sequence: Synthetic oligonucleotide
agacguuaccagugaaggg

SEQ ID NO: 2757770 - RNA, 19 nt, Artificial Sequence
  Description of Artificial Sequence: Synthetic oligonucleotide
aagauugucggcugcuuuu

SEQ ID NO: 2757771 - RNA, 19 nt, Artificial Sequence
  Description of Artificial Sequence: Synthetic oligonucleotide
cugcuuuugguaagcacgc

SEQ ID NO: 2757772 - RNA, 19 nt, Artificial Sequence
  Description of Artificial Sequence: Synthetic oligonucleotide
aaagauugucggcugcuuu

SEQ ID NO: 2757773 - RNA, 19 nt, Artificial Sequence
  Description of Artificial Sequence: Synthetic oligonucleotide
acaaugguccgcugcaucu

SEQ ID NO: 2757774 - RNA, 19 nt, Artificial Sequence
  Description of Artificial Sequence: Synthetic oligonucleotide
agggaguuagcuagagucc

SEQ ID NO: 2757775 - RNA, 19 nt, Artificial Sequence
  Description of Artificial Sequence: Synthetic oligonucleotide
ucuugucuauguaggugcc

SEQ ID NO: 2757776 - RNA, 19 nt, Artificial Sequence
  Description of Artificial Sequence: Synthetic oligonucleotide
uacuuucggauguaaugga

SEQ ID NO: 2757777 - RNA, 19 nt, Artificial Sequence
  Description of Artificial Sequence: Synthetic oligonucleotide
ucucaaagcgauuguacuu

SEQ ID NO: 2757778 - RNA, 19 nt, Artificial Sequence
  Description of Artificial Sequence: Synthetic oligonucleotide
cuucuuggugccagcagcc

SEQ ID NO: 2757779 - RNA, 19 nt, Artificial Sequence
  Description of Artificial Sequence: Synthetic oligonucleotide
augacaaugguccgcugca

SEQ ID NO: 2757780 - RNA, 19 nt, Artificial Sequence
  Description of Artificial Sequence: Synthetic oligonucleotide
ucccagaagaacacgcuuc

SEQ ID NO: 2757781 - RNA, 19 nt, Artificial Sequence
  Description of Artificial Sequence: Synthetic oligonucleotide
gcauuucuugucuauguag

SEQ ID NO: 2757782 - RNA, 19 nt, Artificial Sequence
  Description of Artificial Sequence: Synthetic oligonucleotide
ucucccacggugacaaugu

SEQ ID NO: 2757783 - RNA, 19 nt, Artificial Sequence
  Description of Artificial Sequence: Synthetic oligonucleotide
ugacaaugucgccaaucug

SEQ ID NO: 2757784 - RNA, 19 nt, Artificial Sequence
  Description of Artificial Sequence: Synthetic oligonucleotide
caaagcgauuguacuuucg

SEQ ID NO: 2757785 - RNA, 19 nt, Artificial Sequence
  Description of Artificial Sequence: Synthetic oligonucleotide
gacggaugacaaugguccg

SEQ ID NO: 2757786 - RNA, 19 nt, Artificial Sequence
  Description of Artificial Sequence: Synthetic oligonucleotide
gacaaugucgccaaucugu

SEQ ID NO: 2757787 - RNA, 19 nt, Artificial Sequence
  Description of Artificial Sequence: Synthetic oligonucleotide
uuagugaccuugaguacau

SEQ ID NO: 2757788 - RNA, 19 nt, Artificial Sequence
  Description of Artificial Sequence: Synthetic oligonucleotide
cacggucuugcucaggggc

SEQ ID NO: 2757789 - RNA, 19 nt, Artificial Sequence
  Description of Artificial Sequence: Synthetic oligonucleotide
gauugucggcugcuuuugg

SEQ ID NO: 2757790 - RNA, 19 nt, Artificial Sequence
  Description of Artificial Sequence: Synthetic oligonucleotide
uugucuauguaggugcccu

SEQ ID NO: 2757791 - RNA, 19 nt, Artificial Sequence
  Description of Artificial Sequence: Synthetic oligonucleotide
ucggauggagacguuacca

SEQ ID NO: 2757792 - RNA, 19 nt, Artificial Sequence
  Description of Artificial Sequence: Synthetic oligonucleotide
cuagaguccucucagaacu

SEQ ID NO: 2757793 - RNA, 19 nt, Artificial Sequence
  Description of Artificial Sequence: Synthetic oligonucleotide
ucuauguaggugcccucga

SEQ ID NO: 2757794 - RNA, 19 nt, Artificial Sequence
  Description of Artificial Sequence: Synthetic oligonucleotide
cagacauguucuuguggcg

SEQ ID NO: 2757795 - RNA, 19 nt, Artificial Sequence
  Description of Artificial Sequence: Synthetic oligonucleotide
gccugaggaaaagagagcg

SEQ ID NO: 2757796 - RNA, 19 nt, Artificial Sequence
  Description of Artificial Sequence: Synthetic oligonucleotide
agguaaucccgacggauga

SEQ ID NO: 2757797 - RNA, 19 nt, Artificial Sequence
  Description of Artificial Sequence: Synthetic oligonucleotide
ugaaggggcauuucuuguc

SEQ ID NO: 2757798 - RNA, 19 nt, Artificial Sequence
  Description of Artificial Sequence: Synthetic oligonucleotide
ucgccaaucuguacauccc

SEQ ID NO: 2757799 - RNA, 19 nt, Artificial Sequence
  Description of Artificial Sequence: Synthetic oligonucleotide
acggaugacaaugguccgc

SEQ ID NO: 2757800 - RNA, 19 nt, Artificial Sequence
  Description of Artificial Sequence: Synthetic oligonucleotide
gaccuugaguacauugaag

SEQ ID NO: 2757801 - RNA, 19 nt, Artificial Sequence
  Description of Artificial Sequence: Synthetic oligonucleotide
ugaaagauugucggcugcu

SEQ ID NO: 2757802 - RNA, 19 nt, Artificial Sequence
  Description of Artificial Sequence: Synthetic oligonucleotide
acguuaccagugaaggggc

SEQ ID NO: 2757803 - RNA, 19 nt, Artificial Sequence
  Description of Artificial Sequence: Synthetic oligonucleotide
gucuauguaggugcccucg

SEQ ID NO: 2757804 - RNA, 19 nt, Artificial Sequence
  Description of Artificial Sequence: Synthetic oligonucleotide
ucuguacaucccugaagca

SEQ ID NO: 2757805 - RNA, 19 nt, Artificial Sequence
  Description of Artificial Sequence: Synthetic oligonucleotide
cuuagugaccuugaguaca

SEQ ID NO: 2757806 - RNA, 19 nt, Artificial Sequence
  Description of Artificial Sequence: Synthetic oligonucleotide
aucccgacggaugacaaug

SEQ ID NO: 2757807 - RNA, 19 nt, Artificial Sequence
  Description of Artificial Sequence: Synthetic oligonucleotide
aggauccgaccucggaugg

SEQ ID NO: 2757808 - RNA, 19 nt, Artificial Sequence
  Description of Artificial Sequence: Synthetic oligonucleotide
gucacaaccccagacagga

SEQ ID NO: 2757809 - RNA, 19 nt, Artificial Sequence
  Description of Artificial Sequence: Synthetic oligonucleotide
uguuccagggaguuagcua

SEQ ID NO: 2757810 - RNA, 19 nt, Artificial Sequence
  Description of Artificial Sequence: Synthetic oligonucleotide
cgacggaugacaauggucc

SEQ ID NO: 2757811 - RNA, 19 nt, Artificial Sequence
  Description of Artificial Sequence: Synthetic oligonucleotide
cacaaccccagacaggauc

SEQ ID NO: 2757812 - RNA, 19 nt, Artificial Sequence
  Description of Artificial Sequence: Synthetic oligonucleotide
ucccgacggaugacaaugg

SEQ ID NO: 2757813 - RNA, 19 nt, Artificial Sequence
  Description of Artificial Sequence: Synthetic oligonucleotide
gagguaaucccgacggaug

SEQ ID NO: 2757814 - RNA, 19 nt, Artificial Sequence
  Description of Artificial Sequence: Synthetic oligonucleotide
acaggauccgaccucggau

SEQ ID NO: 2757815 - RNA, 19 nt, Artificial Sequence
  Description of Artificial Sequence: Synthetic oligonucleotide
ugguaagcacgcucggucu

SEQ ID NO: 2757816 - RNA, 19 nt, Artificial Sequence
  Description of Artificial Sequence: Synthetic oligonucleotide
uuguacuuucggauguaau

SEQ ID NO: 2757817 - RNA, 19 nt, Artificial Sequence
  Description of Artificial Sequence: Synthetic oligonucleotide
auugucggcugcuuuuggu

SEQ ID NO: 2757818 - RNA, 19 nt, Artificial Sequence
  Description of Artificial Sequence: Synthetic oligonucleotide
agcuagaguccucucagaa

SEQ ID NO: 2757819 - RNA, 19 nt, Artificial Sequence
  Description of Artificial Sequence: Synthetic oligonucleotide
uuauuuguuccagggaguu

SEQ ID NO: 2757820 - RNA, 19 nt, Artificial Sequence
  Description of Artificial Sequence: Synthetic oligonucleotide
gauccgaccucggauggag

SEQ ID NO: 2757821 - RNA, 19 nt, Artificial Sequence
  Description of Artificial Sequence: Synthetic oligonucleotide
guucuuguggcgcuucuca

SEQ ID NO: 2757822 - RNA, 19 nt, Artificial Sequence
  Description of Artificial Sequence: Synthetic oligonucleotide
agagcggccgacucccggg

SEQ ID NO: 2757823 - RNA, 19 nt, Artificial Sequence
  Description of Artificial Sequence: Synthetic oligonucleotide
acuuucggauguaauggag

SEQ ID NO: 2757824 - RNA, 19 nt, Artificial Sequence
  Description of Artificial Sequence: Synthetic oligonucleotide
agccuuagugaccuugagu

SEQ ID NO: 2757825 - RNA, 19 nt, Artificial Sequence
  Description of Artificial Sequence: Synthetic oligonucleotide
ucuuguggcgcuucucaaa

SEQ ID NO: 2757826 - RNA, 19 nt, Artificial Sequence
  Description of Artificial Sequence: Synthetic oligonucleotide
gccuuagugaccuugagua

SEQ ID NO: 2757827 - RNA, 19 nt, Artificial Sequence
  Description of Artificial Sequence: Synthetic oligonucleotide
caggauccgaccucggaug

SEQ ID NO: 2757828 - RNA, 19 nt, Artificial Sequence
  Description of Artificial Sequence: Synthetic oligonucleotide
ggagucuugaagccuagac

SEQ ID NO: 2757829 - RNA, 19 nt, Artificial Sequence
  Description of Artificial Sequence: Synthetic oligonucleotide
uaauggagguaaucccgac

SEQ ID NO: 2757830 - RNA, 19 nt, Artificial Sequence
  Description of Artificial Sequence: Synthetic oligonucleotide
cagacaggauccgaccucg

SEQ ID NO: 2757831 - RNA, 19 nt, Artificial Sequence
  Description of Artificial Sequence: Synthetic oligonucleotide
agaacacgcuucuuguuuu

SEQ ID NO: 2757832 - RNA, 19 nt, Artificial Sequence
  Description of Artificial Sequence: Synthetic oligonucleotide
uaaucccgacggaugacaa

SEQ ID NO: 2757833 - RNA, 19 nt, Artificial Sequence
  Description of Artificial Sequence: Synthetic oligonucleotide
ucaaagcgauuguacuuuc

SEQ ID NO: 2757834 - RNA, 19 nt, Artificial Sequence
  Description of Artificial Sequence: Synthetic oligonucleotide
agaguccucucagaacuuc

SEQ ID NO: 2757835 - RNA, 19 nt, Artificial Sequence
  Description of Artificial Sequence: Synthetic oligonucleotide
cuugaagccuagaccgaug

SEQ ID NO: 2757836 - RNA, 19 nt, Artificial Sequence
  Description of Artificial Sequence: Synthetic oligonucleotide
ugucggcugcuuuugguaa

SEQ ID NO: 2757837 - RNA, 19 nt, Artificial Sequence
  Description of Artificial Sequence: Synthetic oligonucleotide
uuugguaagcacgcucggu

SEQ ID NO: 2757838 - RNA, 19 nt, Artificial Sequence
  Description of Artificial Sequence: Synthetic oligonucleotide
uccgaccucggauggagac

SEQ ID NO: 2757839 - RNA, 19 nt, Artificial Sequence
  Description of Artificial Sequence: Synthetic oligonucleotide
gaacacgcuucuuguuuug

SEQ ID NO: 2757840 - RNA, 19 nt, Artificial Sequence
  Description of Artificial Sequence: Synthetic oligonucleotide
agccugaggaaaagagagc

SEQ ID NO: 2757841 - RNA, 19 nt, Artificial Sequence
  Description of Artificial Sequence: Synthetic oligonucleotide
gaauguccgccaucuuccc

SEQ ID NO: 2757842 - RNA, 19 nt, Artificial Sequence
  Description of Artificial Sequence: Synthetic oligonucleotide
aggaaaagagagcggccga

SEQ ID NO: 2757843 - RNA, 19 nt, Artificial Sequence
  Description of Artificial Sequence: Synthetic oligonucleotide
gacaaugguccgcugcauc

SEQ ID NO: 2757844 - RNA, 19 nt, Artificial Sequence
  Description of Artificial Sequence: Synthetic oligonucleotide
guaggugcccucgauggcc

SEQ ID NO: 2757845 - RNA, 19 nt, Artificial Sequence
  Description of Artificial Sequence: Synthetic oligonucleotide
auggagacguuaccaguga

SEQ ID NO: 2757846 - RNA, 19 nt, Artificial Sequence
  Description of Artificial Sequence: Synthetic oligonucleotide
guuucucccagaagaacac

SEQ ID NO: 2757847 - RNA, 19 nt, Artificial Sequence
  Description of Artificial Sequence: Synthetic oligonucleotide
cucggucugaauguccgcc

SEQ ID NO: 2757848 - RNA, 19 nt, Artificial Sequence
  Description of Artificial Sequence: Synthetic oligonucleotide
uugucggcugcuuuuggua

SEQ ID NO: 2757849 - RNA, 19 nt, Artificial Sequence
  Description of Artificial Sequence: Synthetic oligonucleotide
acggucuugcucaggggcc

SEQ ID NO: 2757850 - RNA, 19 nt, Artificial Sequence
  Description of Artificial Sequence: Synthetic oligonucleotide
aaucccgacggaugacaau

SEQ ID NO: 2757851 - RNA, 19 nt, Artificial Sequence
  Description of Artificial Sequence: Synthetic oligonucleotide
ucuugaagccuagaccgau

SEQ ID NO: 2757852 - RNA, 19 nt, Artificial Sequence
  Description of Artificial Sequence: Synthetic oligonucleotide
ucaggggccugcacucucc

SEQ ID NO: 2757853 - RNA, 19 nt, Artificial Sequence
  Description of Artificial Sequence: Synthetic oligonucleotide
gcgauuguacuuucggaug

SEQ ID NO: 2757854 - RNA, 19 nt, Artificial Sequence
  Description of Artificial Sequence: Synthetic oligonucleotide
cucccgggcuuccuuaugc

SEQ ID NO: 2757855 - RNA, 19 nt, Artificial Sequence
  Description of Artificial Sequence: Synthetic oligonucleotide
gugacaaugucgccaaucu

SEQ ID NO: 2757856 - RNA, 19 nt, Artificial Sequence
  Description of Artificial Sequence: Synthetic oligonucleotide
ugcacucucccacggugac

SEQ ID NO: 2757857 - RNA, 19 nt, Artificial Sequence
  Description of Artificial Sequence: Synthetic oligonucleotide
ucggucugaauguccgcca

SEQ ID NO: 2757858 - RNA, 19 nt, Artificial Sequence
  Description of Artificial Sequence: Synthetic oligonucleotide
uugaagcgcacggucuugc

SEQ ID NO: 2757859 - RNA, 19 nt, Artificial Sequence
  Description of Artificial Sequence: Synthetic oligonucleotide
acauugaagcgcacggucu

SEQ ID NO: 2757860 - RNA, 19 nt, Artificial Sequence
  Description of Artificial Sequence: Synthetic oligonucleotide
aacacgcuucuuguuuuga

SEQ ID NO: 2757861 - RNA, 19 nt, Artificial Sequence
  Description of Artificial Sequence: Synthetic oligonucleotide
uccagggaguuagcuagag

SEQ ID NO: 2757862 - RNA, 19 nt, Artificial Sequence
  Description of Artificial Sequence: Synthetic oligonucleotide
guaauggagguaaucccga

SEQ ID NO: 2757863 - RNA, 19 nt, Artificial Sequence
  Description of Artificial Sequence: Synthetic oligonucleotide
gagagcggccgacucccgg

SEQ ID NO: 2757864 - RNA, 19 nt, Artificial Sequence
  Description of Artificial Sequence: Synthetic oligonucleotide
agauugucggcugcuuuug

SEQ ID NO: 2757865 - RNA, 19 nt, Artificial Sequence
  Description of Artificial Sequence: Synthetic oligonucleotide
ugggagucuugaagccuag

SEQ ID NO: 2757866 - RNA, 19 nt, Artificial Sequence
  Description of Artificial Sequence: Synthetic oligonucleotide
gaagcgcacggucuugcuc

SEQ ID NO: 2757867 - RNA, 19 nt, Artificial Sequence
  Description of Artificial Sequence: Synthetic oligonucleotide
uggagacguuaccagugaa

SEQ ID NO: 2757868 - RNA, 19 nt, Artificial Sequence
  Description of Artificial Sequence: Synthetic oligonucleotide
uguaguaccgagggaguuu

SEQ ID NO: 2757869 - RNA, 19 nt, Artificial Sequence
  Description of Artificial Sequence: Synthetic oligonucleotide
cuugucuauguaggugccc

SEQ ID NO: 2757870 - RNA, 19 nt, Artificial Sequence
  Description of Artificial Sequence: Synthetic oligonucleotide
gugccagcagccuuaguga

SEQ ID NO: 2757871 - RNA, 19 nt, Artificial Sequence
  Description of Artificial Sequence: Synthetic oligonucleotide
uucuuguggcgcuucucaa

SEQ ID NO: 2757872 - RNA, 19 nt, Artificial Sequence
  Description of Artificial Sequence: Synthetic oligonucleotide
gaaggggcauuucuugucu

SEQ ID NO: 2757873 - RNA, 19 nt, Artificial Sequence
  Description of Artificial Sequence: Synthetic oligonucleotide
uuguuccagggaguuagcu

SEQ ID NO: 2757874 - RNA, 19 nt, Artificial Sequence
  Description of Artificial Sequence: Synthetic oligonucleotide
cacggggacaggugcacag

SEQ ID NO: 2757875 - RNA, 19 nt, Artificial Sequence
  Description of Artificial Sequence: Synthetic oligonucleotide
ugcucaggggccugcacuc

SEQ ID NO: 2757876 - RNA, 19 nt, Artificial Sequence
  Description of Artificial Sequence: Synthetic oligonucleotide
agcagccuuagugaccuug

SEQ ID NO: 2757877 - RNA, 19 nt, Artificial Sequence
  Description of Artificial Sequence: Synthetic oligonucleotide
uggagguaaucccgacgga

SEQ ID NO: 2757878 - RNA, 19 nt, Artificial Sequence
  Description of Artificial Sequence: Synthetic oligonucleotide
gaagccuagaccgauguuu

SEQ ID NO: 2757879 - RNA, 19 nt, Artificial Sequence
  Description of Artificial Sequence: Synthetic oligonucleotide
ggagacguuaccagugaag

SEQ ID NO: 2757880 - RNA, 19 nt, Artificial Sequence
  Description of Artificial Sequence: Synthetic oligonucleotide
ggcagccugaggaaaagag

SEQ ID NO: 2757881 - RNA, 19 nt, Artificial Sequence
  Description of Artificial Sequence: Synthetic oligonucleotide
guccgcugcaucuucaucu

SEQ ID NO: 2757882 - RNA, 19 nt, Artificial Sequence
  Description of Artificial Sequence: Synthetic oligonucleotide
uuguggcgcuucucaaagc

SEQ ID NO: 2757883 - RNA, 19 nt, Artificial Sequence
  Description of Artificial Sequence: Synthetic oligonucleotide
gacaggauccgaccucgga

SEQ ID NO: 2757884 - RNA, 19 nt, Artificial Sequence
  Description of Artificial Sequence: Synthetic oligonucleotide
augucgccaaucuguacau

SEQ ID NO: 2757885 - RNA, 19 nt, Artificial Sequence
  Description of Artificial Sequence: Synthetic oligonucleotide
caucccugaagcacgggga

SEQ ID NO: 2757886 - RNA, 19 nt, Artificial Sequence
  Description of Artificial Sequence: Synthetic oligonucleotide
aagccuagaccgauguuuu

SEQ ID NO: 2757887 - RNA, 19 nt, Artificial Sequence
  Description of Artificial Sequence: Synthetic oligonucleotide
guacaucccugaagcacgg

SEQ ID NO: 2757888 - RNA, 19 nt, Artificial Sequence
  Description of Artificial Sequence: Synthetic oligonucleotide
caaugucgccaaucuguac

SEQ ID NO: 2757889 - RNA, 19 nt, Artificial Sequence
  Description of Artificial Sequence: Synthetic oligonucleotide
guaaucccgacggaugaca

SEQ ID NO: 2757890 - RNA, 19 nt, Artificial Sequence
  Description of Artificial Sequence: Synthetic oligonucleotide
gucggcugcuuuugguaag

SEQ ID NO: 2757891 - RNA, 19 nt, Artificial Sequence
  Description of Artificial Sequence: Synthetic oligonucleotide
uaggugcccucgauggccu

SEQ ID NO: 2757892 - RNA, 19 nt, Artificial Sequence
  Description of Artificial Sequence: Synthetic oligonucleotide
acacgcuucuuguuuugaa

SEQ ID NO: 2757893 - RNA, 19 nt, Artificial Sequence
  Description of Artificial Sequence: Synthetic oligonucleotide
cagaacuucugaaacugcu

SEQ ID NO: 2757894 - RNA, 19 nt, Artificial Sequence
  Description of Artificial Sequence: Synthetic oligonucleotide
uuccagggaguuagcuaga

SEQ ID NO: 2757895 - RNA, 19 nt, Artificial Sequence
  Description of Artificial Sequence: Synthetic oligonucleotide
agcacggggacaggugcac

SEQ ID NO: 2757896 - RNA, 19 nt, Artificial Sequence
  Description of Artificial Sequence: Synthetic oligonucleotide
gcuagaguccucucagaac

SEQ ID NO: 2757897 - RNA, 19 nt, Artificial Sequence
  Description of Artificial Sequence: Synthetic oligonucleotide
auugaagcgcacggucuug

SEQ ID NO: 2757898 - RNA, 19 nt, Artificial Sequence
  Description of Artificial Sequence: Synthetic oligonucleotide
ugaguacauugaagcgcac

SEQ ID NO: 2757899 - RNA, 19 nt, Artificial Sequence
  Description of Artificial Sequence: Synthetic oligonucleotide
caguuucucccagaagaac

SEQ ID NO: 2757900 - RNA, 19 nt, Artificial Sequence
  Description of Artificial Sequence: Synthetic oligonucleotide
caucuuggucacaacccca

SEQ ID NO: 2757901 - RNA, 19 nt, Artificial Sequence
  Description of Artificial Sequence: Synthetic oligonucleotide
ccugaggaaaagagagcgg

SEQ ID NO: 2757902 - RNA, 19 nt, Artificial Sequence
  Description of Artificial Sequence: Synthetic oligonucleotide
ugucuauguaggugcccuc

SEQ ID NO: 2757903 - RNA, 19 nt, Artificial Sequence
  Description of Artificial Sequence: Synthetic oligonucleotide
ugaagcgcacggucuugcu

SEQ ID NO: 2757904 - RNA, 19 nt, Artificial Sequence
  Description of Artificial Sequence: Synthetic oligonucleotide
agaacuucugaaacugcuu

SEQ ID NO: 2757905 - RNA, 19 nt, Artificial Sequence
  Description of Artificial Sequence: Synthetic oligonucleotide
aggggcauuucuugucuau

SEQ ID NO: 2757906 - RNA, 19 nt, Artificial Sequence
  Description of Artificial Sequence: Synthetic oligonucleotide
gacauguucuuguggcgcu

SEQ ID NO: 2757907 - RNA, 19 nt, Artificial Sequence
  Description of Artificial Sequence: Synthetic oligonucleotide
ugaagccuagaccgauguu

SEQ ID NO: 2757908 - RNA, 19 nt, Artificial Sequence
  Description of Artificial Sequence: Synthetic oligonucleotide
uauuuguuccagggaguua

SEQ ID NO: 2757909 - RNA, 19 nt, Artificial Sequence
  Description of Artificial Sequence: Synthetic oligonucleotide
gguaagcacgcucggucug

SEQ ID NO: 2757910 - RNA, 19 nt, Artificial Sequence
  Description of Artificial Sequence: Synthetic oligonucleotide
gcuuccuuaugcaccacgc

SEQ ID NO: 2757911 - RNA, 19 nt, Artificial Sequence
  Description of Artificial Sequence: Synthetic oligonucleotide
cuuggugccagcagccuua

SEQ ID NO: 2757912 - RNA, 19 nt, Artificial Sequence
  Description of Artificial Sequence: Synthetic oligonucleotide
uuguaguaccgagggaguu

SEQ ID NO: 2757913 - RNA, 19 nt, Artificial Sequence
  Description of Artificial Sequence: Synthetic oligonucleotide
acgcucggucugaaugucc

SEQ ID NO: 2757914 - RNA, 19 nt, Artificial Sequence
  Description of Artificial Sequence: Synthetic oligonucleotide
cucgauggccuccuuggga

SEQ ID NO: 2757915 - RNA, 19 nt, Artificial Sequence
  Description of Artificial Sequence: Synthetic oligonucleotide
uagaguccucucagaacuu

SEQ ID NO: 2757916 - RNA, 19 nt, Artificial Sequence
  Description of Artificial Sequence: Synthetic oligonucleotide
ccgggcuuccuuaugcacc

SEQ ID NO: 2757917 - RNA, 19 nt, Artificial Sequence
  Description of Artificial Sequence: Synthetic oligonucleotide
cuugccaguuucucccaga

SEQ ID NO: 2757918 - RNA, 19 nt, Artificial Sequence
  Description of Artificial Sequence: Synthetic oligonucleotide
acaaugucgccaaucugua

SEQ ID NO: 2757919 - RNA, 19 nt, Artificial Sequence
  Description of Artificial Sequence: Synthetic oligonucleotide
uccgcugcaucuucaucuu

SEQ ID NO: 2757920 - RNA, 19 nt, Artificial Sequence
  Description of Artificial Sequence: Synthetic oligonucleotide
ggugacaaugucgccaauc

SEQ ID NO: 2757921 - RNA, 19 nt, Artificial Sequence
  Description of Artificial Sequence: Synthetic oligonucleotide
cagccuuagugaccuugag

SEQ ID NO: 2757922 - RNA, 19 nt, Artificial Sequence
  Description of Artificial Sequence: Synthetic oligonucleotide
uucggauguaauggaggua

SEQ ID NO: 2757923 - RNA, 19 nt, Artificial Sequence
  Description of Artificial Sequence: Synthetic oligonucleotide
uucuuggugccagcagccu

SEQ ID NO: 2757924 - RNA, 19 nt, Artificial Sequence
  Description of Artificial Sequence: Synthetic oligonucleotide
ugcuuuugguaagcacgcu

SEQ ID NO: 2757925 - RNA, 19 nt, Artificial Sequence
  Description of Artificial Sequence: Synthetic oligonucleotide
gaguuagcuagaguccucu

SEQ ID NO: 2757926 - RNA, 19 nt, Artificial Sequence
  Description of Artificial Sequence: Synthetic oligonucleotide
ggauguaauggagguaauc

SEQ ID NO: 2757927 - RNA, 19 nt, Artificial Sequence
  Description of Artificial Sequence: Synthetic oligonucleotide
cuugcucaggggccugcac

SEQ ID NO: 2757928 - RNA, 19 nt, Artificial Sequence
  Description of Artificial Sequence: Synthetic oligonucleotide
ggucacaaccccagacagg

SEQ ID NO: 2757929 - RNA, 19 nt, Artificial Sequence
  Description of Artificial Sequence: Synthetic oligonucleotide
gaaaagagagcggccgacu

SEQ ID NO: 2757930 - RNA, 19 nt, Artificial Sequence
  Description of Artificial Sequence: Synthetic oligonucleotide
gucugaauguccgccaucu

SEQ ID NO: 2757931 - RNA, 19 nt, Artificial Sequence
  Description of Artificial Sequence: Synthetic oligonucleotide
ggaaaagagagcggccgac

SEQ ID NO: 2757932 - RNA, 19 nt, Artificial Sequence
  Description of Artificial Sequence: Synthetic oligonucleotide
ccuuagugaccuugaguac

SEQ ID NO: 2757933 - RNA, 19 nt, Artificial Sequence
  Description of Artificial Sequence: Synthetic oligonucleotide
aagcacggggacaggugca

SEQ ID NO: 2757934 - RNA, 19 nt, Artificial Sequence
  Description of Artificial Sequence: Synthetic oligonucleotide
cauguucuuguggcgcuuc

SEQ ID NO: 2757935 - RNA, 19 nt, Artificial Sequence
  Description of Artificial Sequence: Synthetic oligonucleotide
uuggugccagcagccuuag

SEQ ID NO: 2757936 - RNA, 19 nt, Artificial Sequence
  Description of Artificial Sequence: Synthetic oligonucleotide
gauuguacuuucggaugua

SEQ ID NO: 2757937 - RNA, 19 nt, Artificial Sequence
  Description of Artificial Sequence: Synthetic oligonucleotide
ggggccugcacucucccac

SEQ ID NO: 2757938 - RNA, 19 nt, Artificial Sequence
  Description of Artificial Sequence: Synthetic oligonucleotide
ccucggauggagacguuac

SEQ ID NO: 2757939 - RNA, 19 nt, Artificial Sequence
  Description of Artificial Sequence: Synthetic oligonucleotide
ugacaaugguccgcugcau

SEQ ID NO: 2757940 - RNA, 19 nt, Artificial Sequence
  Description of Artificial Sequence: Synthetic oligonucleotide
ccugcacucucccacggug

SEQ ID NO: 2757941 - RNA, 19 nt, Artificial Sequence
  Description of Artificial Sequence: Synthetic oligonucleotide
acucccgggcuuccuuaug

SEQ ID NO: 2757942 - RNA, 19 nt, Artificial Sequence
  Description of Artificial Sequence: Synthetic oligonucleotide
ugguccgcugcaucuucau

SEQ ID NO: 2757943 - RNA, 19 nt, Artificial Sequence
  Description of Artificial Sequence: Synthetic oligonucleotide
agcgcacggucuugcucag

SEQ ID NO: 2757944 - RNA, 19 nt, Artificial Sequence
  Description of Artificial Sequence: Synthetic oligonucleotide
gagcggccgacucccgggc

SEQ ID NO: 2757945 - RNA, 19 nt, Artificial Sequence
  Description of Artificial Sequence: Synthetic oligonucleotide
gggacaggugcacagacau

SEQ ID NO: 2757946 - RNA, 19 nt, Artificial Sequence
  Description of Artificial Sequence: Synthetic oligonucleotide
ccgacggaugacaaugguc

SEQ ID NO: 2757947 - RNA, 19 nt, Artificial Sequence
  Description of Artificial Sequence: Synthetic oligonucleotide
caaccccagacaggauccg

SEQ ID NO: 2757948 - RNA, 19 nt, Artificial Sequence
  Description of Artificial Sequence: Synthetic oligonucleotide
ucacaaccccagacaggau

SEQ ID NO: 2757949 - RNA, 19 nt, Artificial Sequence
  Description of Artificial Sequence: Synthetic oligonucleotide
cgcacggucuugcucaggg

SEQ ID NO: 2757950 - RNA, 19 nt, Artificial Sequence
  Description of Artificial Sequence: Synthetic oligonucleotide
ccaaucuguacaucccuga

SEQ ID NO: 2757951 - RNA, 19 nt, Artificial Sequence
  Description of Artificial Sequence: Synthetic oligonucleotide
guaagcacgcucggucuga

SEQ ID NO: 2757952 - RNA, 19 nt, Artificial Sequence
  Description of Artificial Sequence: Synthetic oligonucleotide
cugcacucucccacgguga

SEQ ID NO: 2757953 - RNA, 19 nt, Artificial Sequence
  Description of Artificial Sequence: Synthetic oligonucleotide
aagcacgcucggucugaau

SEQ ID NO: 2757954 - RNA, 19 nt, Artificial Sequence
  Description of Artificial Sequence: Synthetic oligonucleotide
cgcucggucugaauguccg

SEQ ID NO: 2757955 - RNA, 19 nt, Artificial Sequence
  Description of Artificial Sequence: Synthetic oligonucleotide
cggauggagacguuaccag

SEQ ID NO: 2757956 - RNA, 19 nt, Artificial Sequence
  Description of Artificial Sequence: Synthetic oligonucleotide
cucaaagcgauuguacuuu

SEQ ID NO: 2757957 - RNA, 19 nt, Artificial Sequence
  Description of Artificial Sequence: Synthetic oligonucleotide
uaccagugaaggggcauuu

SEQ ID NO: 2757958 - RNA, 19 nt, Artificial Sequence
  Description of Artificial Sequence: Synthetic oligonucleotide
cucaggggccugcacucuc

SEQ ID NO: 2757959 - RNA, 19 nt, Artificial Sequence
  Description of Artificial Sequence: Synthetic oligonucleotide
uaagcacgcucggucugaa

SEQ ID NO: 2757960 - RNA, 19 nt, Artificial Sequence
  Description of Artificial Sequence: Synthetic oligonucleotide
ggauggagacguuaccagu

SEQ ID NO: 2757961 - RNA, 19 nt, Artificial Sequence
  Description of Artificial Sequence: Synthetic oligonucleotide
caggggccugcacucuccc

SEQ ID NO: 2757962 - RNA, 19 nt, Artificial Sequence
  Description of Artificial Sequence: Synthetic oligonucleotide
gggcauuucuugucuaugu

SEQ ID NO: 2757963 - RNA, 19 nt, Artificial Sequence
  Description of Artificial Sequence: Synthetic oligonucleotide
gucuugaagccuagaccga

SEQ ID NO: 2757964 - RNA, 19 nt, Artificial Sequence
  Description of Artificial Sequence: Synthetic oligonucleotide
agacaggauccgaccucgg

SEQ ID NO: 2757965 - RNA, 19 nt, Artificial Sequence
  Description of Artificial Sequence: Synthetic oligonucleotide
gcagccugaggaaaagaga

SEQ ID NO: 2757966 - RNA, 19 nt, Artificial Sequence
  Description of Artificial Sequence: Synthetic oligonucleotide
gcacggucuugcucagggg

SEQ ID NO: 2757967 - RNA, 19 nt, Artificial Sequence
  Description of Artificial Sequence: Synthetic oligonucleotide
ugucgccaaucuguacauc

SEQ ID NO: 2757968 - RNA, 19 nt, Artificial Sequence
  Description of Artificial Sequence: Synthetic oligonucleotide
ccccagacaggauccgacc

SEQ ID NO: 2757969 - RNA, 19 nt, Artificial Sequence
  Description of Artificial Sequence: Synthetic oligonucleotide
guacauugaagcgcacggu

SEQ ID NO: 2757970 - RNA, 19 nt, Artificial Sequence
  Description of Artificial Sequence: Synthetic oligonucleotide
ccucucagaacuucugaaa

SEQ ID NO: 2757971 - RNA, 19 nt, Artificial Sequence
  Description of Artificial Sequence: Synthetic oligonucleotide
gguaaucccgacggaugac

SEQ ID NO: 2757972 - RNA, 19 nt, Artificial Sequence
  Description of Artificial Sequence: Synthetic oligonucleotide
accucggauggagacguua

SEQ ID NO: 2757973 - RNA, 19 nt, Artificial Sequence
  Description of Artificial Sequence: Synthetic oligonucleotide
ggccugcacucucccacgg

SEQ ID NO: 2757974 - RNA, 19 nt, Artificial Sequence
  Description of Artificial Sequence: Synthetic oligonucleotide
ccagacaggauccgaccuc

SEQ ID NO: 2757975 - RNA, 19 nt, Artificial Sequence
  Description of Artificial Sequence: Synthetic oligonucleotide
cacgcucggucugaauguc

SEQ ID NO: 2757976 - RNA, 19 nt, Artificial Sequence
  Description of Artificial Sequence: Synthetic oligonucleotide
cuugggagucuugaagccu

SEQ ID NO: 2757977 - RNA, 19 nt, Artificial Sequence
  Description of Artificial Sequence: Synthetic oligonucleotide
cucccacggugacaauguc

SEQ ID NO: 2757978 - RNA, 19 nt, Artificial Sequence
  Description of Artificial Sequence: Synthetic oligonucleotide
ggaugacaaugguccgcug

SEQ ID NO: 2757979 - RNA, 19 nt, Artificial Sequence
  Description of Artificial Sequence: Synthetic oligonucleotide
guaguaccgagggaguuuu

SEQ ID NO: 2757980 - RNA, 19 nt, Artificial Sequence
  Description of Artificial Sequence: Synthetic oligonucleotide
ccaguuucucccagaagaa

SEQ ID NO: 2757981 - RNA, 19 nt, Artificial Sequence
  Description of Artificial Sequence: Synthetic oligonucleotide
guuaccagugaaggggcau

SEQ ID NO: 2757982 - RNA, 19 nt, Artificial Sequence
  Description of Artificial Sequence: Synthetic oligonucleotide
cauugaagcgcacggucuu

SEQ ID NO: 2757983 - RNA, 19 nt, Artificial Sequence
  Description of Artificial Sequence: Synthetic oligonucleotide
ucccggcagccugaggaaa

SEQ ID NO: 2757984 - RNA, 19 nt, Artificial Sequence
  Description of Artificial Sequence: Synthetic oligonucleotide
gucuugcucaggggccugc

SEQ ID NO: 2757985 - RNA, 19 nt, Artificial Sequence
  Description of Artificial Sequence: Synthetic oligonucleotide
guggcgcuucucaaagcga

SEQ ID NO: 2757986 - RNA, 19 nt, Artificial Sequence
  Description of Artificial Sequence: Synthetic oligonucleotide
gggaguuagcuagaguccu

SEQ ID NO: 2757987 - RNA, 19 nt, Artificial Sequence
  Description of Artificial Sequence: Synthetic oligonucleotide
augguccgcugcaucuuca

SEQ ID NO: 2757988 - RNA, 19 nt, Artificial Sequence
  Description of Artificial Sequence: Synthetic oligonucleotide
gcucggucugaauguccgc

SEQ ID NO: 2757989 - RNA, 19 nt, Artificial Sequence
  Description of Artificial Sequence: Synthetic oligonucleotide
agagagcggccgacucccg

SEQ ID NO: 2757990 - RNA, 19 nt, Artificial Sequence
  Description of Artificial Sequence: Synthetic oligonucleotide
ggaguuagcuagaguccuc

SEQ ID NO: 2757991 - RNA, 19 nt, Artificial Sequence
  Description of Artificial Sequence: Synthetic oligonucleotide
cuauguaggugcccucgau

SEQ ID NO: 2757992 - RNA, 19 nt, Artificial Sequence
  Description of Artificial Sequence: Synthetic oligonucleotide
gguccgcugcaucuucauc

SEQ ID NO: 2757993 - RNA, 19 nt, Artificial Sequence
  Description of Artificial Sequence: Synthetic oligonucleotide
ggugcccucgauggccucc

SEQ ID NO: 2757994 - RNA, 19 nt, Artificial Sequence
  Description of Artificial Sequence: Synthetic oligonucleotide
ggagguaaucccgacggau

SEQ ID NO: 2757995 - RNA, 19 nt, Artificial Sequence
  Description of Artificial Sequence: Synthetic oligonucleotide
ccgaccucggauggagacg

SEQ ID NO: 2757996 - RNA, 19 nt, Artificial Sequence
  Description of Artificial Sequence: Synthetic oligonucleotide
agcggccgacucccgggcu

SEQ ID NO: 2757997 - RNA, 19 nt, Artificial Sequence
  Description of Artificial Sequence: Synthetic oligonucleotide
ggacaggugcacagacaug

SEQ ID NO: 2757998 - RNA, 19 nt, Artificial Sequence
  Description of Artificial Sequence: Synthetic oligonucleotide
gcccucgauggccuccuug

SEQ ID NO: 2757999 - RNA, 19 nt, Artificial Sequence
  Description of Artificial Sequence: Synthetic oligonucleotide
cugaagcacggggacaggu

SEQ ID NO: 2758000 - RNA, 19 nt, Artificial Sequence
  Description of Artificial Sequence: Synthetic oligonucleotide
gcacgcucggucugaaugu

SEQ ID NO: 2758001 - RNA, 19 nt, Artificial Sequence
  Description of Artificial Sequence: Synthetic oligonucleotide
acaggugcacagacauguu

SEQ ID NO: 2758002 - RNA, 19 nt, Artificial Sequence
  Description of Artificial Sequence: Synthetic oligonucleotide
uagugaccuugaguacauu

SEQ ID NO: 2758003 - RNA, 19 nt, Artificial Sequence
  Description of Artificial Sequence: Synthetic oligonucleotide
gacucccgggcuuccuuau

SEQ ID NO: 2758004 - RNA, 19 nt, Artificial Sequence
  Description of Artificial Sequence: Synthetic oligonucleotide
cgauuguacuuucggaugu

SEQ ID NO: 2758005 - RNA, 19 nt, Artificial Sequence
  Description of Artificial Sequence: Synthetic oligonucleotide
ggugcacagacauguucuu

SEQ ID NO: 2758006 - RNA, 19 nt, Artificial Sequence
  Description of Artificial Sequence: Synthetic oligonucleotide
cgggcuuccuuaugcacca

SEQ ID NO: 2758007 - RNA, 19 nt, Artificial Sequence
  Description of Artificial Sequence: Synthetic oligonucleotide
ggucuugcucaggggccug

SEQ ID NO: 2758008 - RNA, 19 nt, Artificial Sequence
  Description of Artificial Sequence: Synthetic oligonucleotide
ccggcagccugaggaaaag

SEQ ID NO: 2758009 - RNA, 19 nt, Artificial Sequence
  Description of Artificial Sequence: Synthetic oligonucleotide
gggagucuugaagccuaga

SEQ ID NO: 2758010 - RNA, 19 nt, Artificial Sequence
  Description of Artificial Sequence: Synthetic oligonucleotide
ggauccgaccucggaugga

SEQ ID NO: 2758011 - RNA, 19 nt, Artificial Sequence
  Description of Artificial Sequence: Synthetic oligonucleotide
ccgcugcaucuucaucuug

SEQ ID NO: 2758012 - RNA, 19 nt, Artificial Sequence
  Description of Artificial Sequence: Synthetic oligonucleotide
cccagacaggauccgaccu

SEQ ID NO: 2758013 - RNA, 19 nt, Artificial Sequence
  Description of Artificial Sequence: Synthetic oligonucleotide
guccgccaucuucccggca

SEQ ID NO: 2758014 - RNA, 19 nt, Artificial Sequence
  Description of Artificial Sequence: Synthetic oligonucleotide
cguuaccagugaaggggca

SEQ ID NO: 2758015 - RNA, 19 nt, Artificial Sequence
  Description of Artificial Sequence: Synthetic oligonucleotide
caaugguccgcugcaucuu

SEQ ID NO: 2758016 - RNA, 19 nt, Artificial Sequence
  Description of Artificial Sequence: Synthetic oligonucleotide
cccggcagccugaggaaaa

SEQ ID NO: 2758017 - RNA, 19 nt, Artificial Sequence
  Description of Artificial Sequence: Synthetic oligonucleotide
gcacucucccacggugaca

SEQ ID NO: 2758018 - RNA, 19 nt, Artificial Sequence
  Description of Artificial Sequence: Synthetic oligonucleotide
gcgcacggucuugcucagg

SEQ ID NO: 2758019 - RNA, 19 nt, Artificial Sequence
  Description of Artificial Sequence: Synthetic oligonucleotide
ccagggaguuagcuagagu

SEQ ID NO: 2758020 - RNA, 19 nt, Artificial Sequence
  Description of Artificial Sequence: Synthetic oligonucleotide
gcacggggacaggugcaca

SEQ ID NO: 2758021 - RNA, 19 nt, Artificial Sequence
  Description of Artificial Sequence: Synthetic oligonucleotide
cgccaaucuguacaucccu

SEQ ID NO: 2758022 - RNA, 19 nt, Artificial Sequence
  Description of Artificial Sequence: Synthetic oligonucleotide
gggcuuccuuaugcaccac

SEQ ID NO: 2758023 - RNA, 19 nt, Artificial Sequence
  Description of Artificial Sequence: Synthetic oligonucleotide
cgaccucggauggagacgu

SEQ ID NO: 2758024 - RNA, 19 nt, Artificial Sequence
  Description of Artificial Sequence: Synthetic oligonucleotide
cccgacggaugacaauggu

SEQ ID NO: 2758025 - RNA, 19 nt, Artificial Sequence
  Description of Artificial Sequence: Synthetic oligonucleotide
gccugcacucucccacggu

SEQ ID NO: 2758026 - RNA, 19 nt, Artificial Sequence
  Description of Artificial Sequence: Synthetic oligonucleotide
ggccgacucccgggcuucc

SEQ ID NO: 2758027 - RNA, 19 nt, Artificial Sequence
  Description of Artificial Sequence: Synthetic oligonucleotide
ggcgcuucucaaagcgauu

SEQ ID NO: 2758028 - RNA, 19 nt, Artificial Sequence
  Description of Artificial Sequence: Synthetic oligonucleotide
cgacucccgggcuuccuua

SEQ ID NO: 2758029 - RNA, 19 nt, Artificial Sequence
  Description of Artificial Sequence: Synthetic oligonucleotide
gcucaggggccugcacucu

SEQ ID NO: 2758030 - RNA, 19 nt, Artificial Sequence
  Description of Artificial Sequence: Synthetic oligonucleotide
gaccucggauggagacguu

SEQ ID NO: 2758031 - RNA, 19 nt, Artificial Sequence
  Description of Artificial Sequence: Synthetic oligonucleotide
gcggccgacucccgggcuu

SEQ ID NO: 2758032 - RNA, 19 nt, Artificial Sequence
  Description of Artificial Sequence: Synthetic oligonucleotide
cggauguaauggagguaau

SEQ ID NO: 2758033 - RNA, 19 nt, Artificial Sequence
  Description of Artificial Sequence: Synthetic oligonucleotide
cggcugcuuuugguaagca

SEQ ID NO: 2758034 - RNA, 19 nt, Artificial Sequence
  Description of Artificial Sequence: Synthetic oligonucleotide
cggccgacucccgggcuuc

SEQ ID NO: 2758035 - RNA, 19 nt, Artificial Sequence
  Description of Artificial Sequence: Synthetic oligonucleotide
cggucuugcucaggggccu

SEQ ID NO: 2758036 - RNA, 19 nt, Artificial Sequence
  Description of Artificial Sequence: Synthetic oligonucleotide
ucaauuuuccuuuuggaca

SEQ ID NO: 2758037 - RNA, 19 nt, Artificial Sequence
  Description of Artificial Sequence: Synthetic oligonucleotide
uaugacuucaucaauuuuc

SEQ ID NO: 2758038 - RNA, 19 nt, Artificial Sequence
  Description of Artificial Sequence: Synthetic oligonucleotide
ucaucaauuuuccuuuugg

SEQ ID NO: 2758039 - RNA, 19 nt, Artificial Sequence
  Description of Artificial Sequence: Synthetic oligonucleotide
uuuccuuuuggacacggcu

SEQ ID NO: 2758040 - RNA, 19 nt, Artificial Sequence
  Description of Artificial Sequence: Synthetic oligonucleotide
augacuucaucaauuuucc

SEQ ID NO: 2758041 - RNA, 19 nt, Artificial Sequence
  Description of Artificial Sequence: Synthetic oligonucleotide
caauuuuccuuuuggacac

SEQ ID NO: 2758042 - RNA, 19 nt, Artificial Sequence
  Description of Artificial Sequence: Synthetic oligonucleotide
uuggacacggcucugcaca

SEQ ID NO: 2758043 - RNA, 19 nt, Artificial Sequence
  Description of Artificial Sequence: Synthetic oligonucleotide
uccggguacaggaucauga

SEQ ID NO: 2758044 - RNA, 19 nt, Artificial Sequence
  Description of Artificial Sequence: Synthetic oligonucleotide
uucaucaauuuuccuuuug

SEQ ID NO: 2758045 - RNA, 19 nt, Artificial Sequence
  Description of Artificial Sequence: Synthetic oligonucleotide
uuucggcuguccaucaggc

SEQ ID NO: 2758046 - RNA, 19 nt, Artificial Sequence
  Description of Artificial Sequence: Synthetic oligonucleotide
uccuuuuggacacggcucu

SEQ ID NO: 2758047 - RNA, 19 nt, Artificial Sequence
  Description of Artificial Sequence: Synthetic oligonucleotide
cuuucggcuguccaucagg

SEQ ID NO: 2758048 - RNA, 19 nt, Artificial Sequence
  Description of Artificial Sequence: Synthetic oligonucleotide
gacacggcucugcacaucc

SEQ ID NO: 2758049 - RNA, 19 nt, Artificial Sequence
  Description of Artificial Sequence: Synthetic oligonucleotide
uuccuuuuggacacggcuc

SEQ ID NO: 2758050 - RNA, 19 nt, Artificial Sequence
  Description of Artificial Sequence: Synthetic oligonucleotide
aggaagagcuccauggcgg

SEQ ID NO: 2758051 - RNA, 19 nt, Artificial Sequence
  Description of Artificial Sequence: Synthetic oligonucleotide
auuuuccuuuuggacacgg

SEQ ID NO: 2758052 - RNA, 19 nt, Artificial Sequence
  Description of Artificial Sequence: Synthetic oligonucleotide
ucaccauccccgcaugaac

SEQ ID NO: 2758053 - RNA, 19 nt, Artificial Sequence
  Description of Artificial Sequence: Synthetic oligonucleotide
caucaauuuuccuuuugga

SEQ ID NO: 2758054 - RNA, 19 nt, Artificial Sequence
  Description of Artificial Sequence: Synthetic oligonucleotide
gacuucaucaauuuuccuu

SEQ ID NO: 2758055 - RNA, 19 nt, Artificial Sequence
  Description of Artificial Sequence: Synthetic oligonucleotide
cuggacaccgcuccugccc

SEQ ID NO: 2758056 - RNA, 19 nt, Artificial Sequence
  Description of Artificial Sequence: Synthetic oligonucleotide
ggguacaggaucaugagca

SEQ ID NO: 2758057 - RNA, 19 nt, Artificial Sequence
  Description of Artificial Sequence: Synthetic oligonucleotide
uuuggacacggcucugcac

SEQ ID NO: 2758058 - RNA, 19 nt, Artificial Sequence
  Description of Artificial Sequence: Synthetic oligonucleotide
cacggcucugcacauccgg

SEQ ID NO: 2758059 - RNA, 19 nt, Artificial Sequence
  Description of Artificial Sequence: Synthetic oligonucleotide
uggacaccgcuccugcccu

SEQ ID NO: 2758060 - RNA, 19 nt, Artificial Sequence
  Description of Artificial Sequence: Synthetic oligonucleotide
guacaggaucaugagcagc

SEQ ID NO: 2758061 - RNA, 19 nt, Artificial Sequence
  Description of Artificial Sequence: Synthetic oligonucleotide
cucuggacaccgcuccugc

SEQ ID NO: 2758062 - RNA, 19 nt, Artificial Sequence
  Description of Artificial Sequence: Synthetic oligonucleotide
ugggcuuucggcuguccau

SEQ ID NO: 2758063 - RNA, 19 nt, Artificial Sequence
  Description of Artificial Sequence: Synthetic oligonucleotide
ucaugagcagcagggccca

SEQ ID NO: 2758064 - RNA, 19 nt, Artificial Sequence
  Description of Artificial Sequence: Synthetic oligonucleotide
ucuggacaccgcuccugcc

SEQ ID NO: 2758065 - RNA, 19 nt, Artificial Sequence
  Description of Artificial Sequence: Synthetic oligonucleotide
ucucuggacaccgcuccug

SEQ ID NO: 2758066 - RNA, 19 nt, Artificial Sequence
  Description of Artificial Sequence: Synthetic oligonucleotide
ccccaauggaagaggaggg

SEQ ID NO: 2758067 - RNA, 19 nt, Artificial Sequence
  Description of Artificial Sequence: Synthetic oligonucleotide
uucggcuguccaucaggca

SEQ ID NO: 2758068 - RNA, 19 nt, Artificial Sequence
  Description of Artificial Sequence: Synthetic oligonucleotide
ccaauggaagaggaggggc

SEQ ID NO: 2758069 - RNA, 19 nt, Artificial Sequence
  Description of Artificial Sequence: Synthetic oligonucleotide
acggcucugcacauccggg

SEQ ID NO: 2758070 - RNA, 19 nt, Artificial Sequence
  Description of Artificial Sequence: Synthetic oligonucleotide
caauggaagaggaggggcu

SEQ ID NO: 2758071 - RNA, 19 nt, Artificial Sequence
  Description of Artificial Sequence: Synthetic oligonucleotide
cuccauggcgggccagggg

SEQ ID NO: 2758072 - RNA, 19 nt, Artificial Sequence
  Description of Artificial Sequence: Synthetic oligonucleotide
aggucaccauccccgcaug

SEQ ID NO: 2758073 - RNA, 19 nt, Artificial Sequence
  Description of Artificial Sequence: Synthetic oligonucleotide
cagccacaagacuaguuua

SEQ ID NO: 2758074 - RNA, 19 nt, Artificial Sequence
  Description of Artificial Sequence: Synthetic oligonucleotide
uggacacggcucugcacau

SEQ ID NO: 2758075 - RNA, 19 nt, Artificial Sequence
  Description of Artificial Sequence: Synthetic oligonucleotide
ccggguacaggaucaugag

SEQ ID NO: 2758076 - RNA, 19 nt, Artificial Sequence
  Description of Artificial Sequence: Synthetic oligonucleotide
auggcgggccaggggcucc

SEQ ID NO: 2758077 - RNA, 19 nt, Artificial Sequence
  Description of Artificial Sequence: Synthetic oligonucleotide
cccaauggaagaggagggg

SEQ ID NO: 2758078 - RNA, 19 nt, Artificial Sequence
  Description of Artificial Sequence: Synthetic oligonucleotide
auccggguacaggaucaug

SEQ ID NO: 2758079 - RNA, 19 nt, Artificial Sequence
  Description of Artificial Sequence: Synthetic oligonucleotide
gcagccacaagacuaguuu

SEQ ID NO: 2758080 - RNA, 19 nt, Artificial Sequence
  Description of Artificial Sequence: Synthetic oligonucleotide
cugggcuuucggcugucca

SEQ ID NO: 2758081 - RNA, 19 nt, Artificial Sequence
  Description of Artificial Sequence: Synthetic oligonucleotide
gucaccauccccgcaugaa

SEQ ID NO: 2758082 - RNA, 19 nt, Artificial Sequence
  Description of Artificial Sequence: Synthetic oligonucleotide
gcuuucggcuguccaucag

SEQ ID NO: 2758083 - RNA, 19 nt, Artificial Sequence
  Description of Artificial Sequence: Synthetic oligonucleotide
cuaugacuucaucaauuuu

SEQ ID NO: 2758084 - RNA, 19 nt, Artificial Sequence
  Description of Artificial Sequence: Synthetic oligonucleotide
acacggcucugcacauccg

SEQ ID NO: 2758085 - RNA, 19 nt, Artificial Sequence
  Description of Artificial Sequence: Synthetic oligonucleotide
cggguacaggaucaugagc

SEQ ID NO: 2758086 - RNA, 19 nt, Artificial Sequence
  Description of Artificial Sequence: Synthetic oligonucleotide
caccgcuccugcccuauga

SEQ ID NO: 2758087 - RNA, 19 nt, Artificial Sequence
  Description of Artificial Sequence: Synthetic oligonucleotide
acaccgcuccugcccuaug

SEQ ID NO: 2758088 - RNA, 19 nt, Artificial Sequence
  Description of Artificial Sequence: Synthetic oligonucleotide
ggcuuucggcuguccauca

SEQ ID NO: 2758089 - RNA, 19 nt, Artificial Sequence
  Description of Artificial Sequence: Synthetic oligonucleotide
ccuaugacuucaucaauuu

SEQ ID NO: 2758090 - RNA, 19 nt, Artificial Sequence
  Description of Artificial Sequence: Synthetic oligonucleotide
cuucaucaauuuuccuuuu

SEQ ID NO: 2758091 - RNA, 19 nt, Artificial Sequence
  Description of Artificial Sequence: Synthetic oligonucleotide
gggcuuucggcuguccauc

SEQ ID NO: 2758092 - RNA, 19 nt, Artificial Sequence
  Description of Artificial Sequence: Synthetic oligonucleotide
gcuccauggcgggccaggg

SEQ ID NO: 2758093 - RNA, 19 nt, Artificial Sequence
  Description of Artificial Sequence: Synthetic oligonucleotide
ggucaccauccccgcauga

SEQ ID NO: 2758094 - RNA, 19 nt, Artificial Sequence
  Description of Artificial Sequence: Synthetic oligonucleotide
cauggcgggccaggggcuc

SEQ ID NO: 2758095 - RNA, 19 nt, Artificial Sequence
  Description of Artificial Sequence: Synthetic oligonucleotide
caugagcagcagggcccag

SEQ ID NO: 2758096 - RNA, 19 nt, Artificial Sequence
  Description of Artificial Sequence: Synthetic oligonucleotide
uggcgggccaggggcuccc

SEQ ID NO: 2758097 - RNA, 19 nt, Artificial Sequence
  Description of Artificial Sequence: Synthetic oligonucleotide
ccuuuuggacacggcucug

SEQ ID NO: 2758098 - RNA, 19 nt, Artificial Sequence
  Description of Artificial Sequence: Synthetic oligonucleotide
gacaccgcuccugcccuau

SEQ ID NO: 2758099 - RNA, 19 nt, Artificial Sequence
  Description of Artificial Sequence: Synthetic oligonucleotide
ggacacggcucugcacauc

SEQ ID NO: 2758100 - RNA, 19 nt, Artificial Sequence
  Description of Artificial Sequence: Synthetic oligonucleotide
ggacaccgcuccugcccua

SEQ ID NO: 2758101 - RNA, 19 nt, Artificial Sequence
  Description of Artificial Sequence: Synthetic oligonucleotide
ccauggcgggccaggggcu

SEQ ID NO: 2758102 - RNA, 19 nt, Artificial Sequence
  Description of Artificial Sequence: Synthetic oligonucleotide
aaaagcaucauccuuagcu

SEQ ID NO: 2758103 - RNA, 19 nt, Artificial Sequence
  Description of Artificial Sequence: Synthetic oligonucleotide
agaaguaggaaauaguggg

SEQ ID NO: 2758104 - RNA, 19 nt, Artificial Sequence
  Description of Artificial Sequence: Synthetic oligonucleotide
aacugguugauagagacgc

SEQ ID NO: 2758105 - RNA, 19 nt, Artificial Sequence
  Description of Artificial Sequence: Synthetic oligonucleotide
aaugccuucuuugaugucc

SEQ ID NO: 2758106 - RNA, 19 nt, Artificial Sequence
  Description of Artificial Sequence: Synthetic oligonucleotide
uuagcuuugacacaggcaa

SEQ ID NO: 2758107 - RNA, 19 nt, Artificial Sequence
  Description of Artificial Sequence: Synthetic oligonucleotide
agaacugguugauagagac

SEQ ID NO: 2758108 - RNA, 19 nt, Artificial Sequence
  Description of Artificial Sequence: Synthetic oligonucleotide
ucauauaugugcuucaaac

SEQ ID NO: 2758109 - RNA, 19 nt, Artificial Sequence
  Description of Artificial Sequence: Synthetic oligonucleotide
caagaugggaccuaguggg

SEQ ID NO: 2758110 - RNA, 19 nt, Artificial Sequence
  Description of Artificial Sequence: Synthetic oligonucleotide
uuucugugcagccaaaacc

SEQ ID NO: 2758111 - RNA, 19 nt, Artificial Sequence
  Description of Artificial Sequence: Synthetic oligonucleotide
cuuugguucagcuuucucg

SEQ ID NO: 2758112 - RNA, 19 nt, Artificial Sequence
  Description of Artificial Sequence: Synthetic oligonucleotide
ucuuucaccacacgaaugc

SEQ ID NO: 2758113 - RNA, 19 nt, Artificial Sequence
  Description of Artificial Sequence: Synthetic oligonucleotide
caagaaguaggaaauagug

SEQ ID NO: 2758114 - RNA, 19 nt, Artificial Sequence
  Description of Artificial Sequence: Synthetic oligonucleotide
uuugucuucucguugaacu

SEQ ID NO: 2758115 - RNA, 19 nt, Artificial Sequence
  Description of Artificial Sequence: Synthetic oligonucleotide
aaucccagaguguggaagg

SEQ ID NO: 2758116 - RNA, 19 nt, Artificial Sequence
  Description of Artificial Sequence: Synthetic oligonucleotide
aaugauggaacggacaaca

SEQ ID NO: 2758117 - RNA, 19 nt, Artificial Sequence
  Description of Artificial Sequence: Synthetic oligonucleotide
aaaucugccucuuucugug

SEQ ID NO: 2758118 - RNA, 19 nt, Artificial Sequence
  Description of Artificial Sequence: Synthetic oligonucleotide
aaaaucuuuguaggcaggg

SEQ ID NO: 2758119 - RNA, 19 nt, Artificial Sequence
  Description of Artificial Sequence: Synthetic oligonucleotide
uucugugcagccaaaacca

SEQ ID NO: 2758120 - RNA, 19 nt, Artificial Sequence
  Description of Artificial Sequence: Synthetic oligonucleotide
aucacuucuuggcagcugc

SEQ ID NO: 2758121 - RNA, 19 nt, Artificial Sequence
  Description of Artificial Sequence: Synthetic oligonucleotide
aauaguggguugcccaauc

SEQ ID NO: 2758122 - RNA, 19 nt, Artificial Sequence
  Description of Artificial Sequence: Synthetic oligonucleotide
ugugcuucaaacucaccag

SEQ ID NO: 2758123 - RNA, 19 nt, Artificial Sequence
  Description of Artificial Sequence: Synthetic oligonucleotide
uugcagaacugguugauag

SEQ ID NO: 2758124 - RNA, 19 nt, Artificial Sequence
  Description of Artificial Sequence: Synthetic oligonucleotide
ucaagaaguaggaaauagu

SEQ ID NO: 2758125 - RNA, 19 nt, Artificial Sequence
  Description of Artificial Sequence: Synthetic oligonucleotide
aacucaccaggccugcuac

SEQ ID NO: 2758126 - RNA, 19 nt, Artificial Sequence
  Description of Artificial Sequence: Synthetic oligonucleotide
aagacaggggcacaucuug

SEQ ID NO: 2758127 - RNA, 19 nt, Artificial Sequence
  Description of Artificial Sequence: Synthetic oligonucleotide
ucaaaaucccagagugugg

SEQ ID NO: 2758128 - RNA, 19 nt, Artificial Sequence
  Description of Artificial Sequence: Synthetic oligonucleotide
ucuuucaaaaucccagagu

SEQ ID NO: 2758129 - RNA, 19 nt, Artificial Sequence
  Description of Artificial Sequence: Synthetic oligonucleotide
ucucguugaacucuuugca

SEQ ID NO: 2758130 - RNA, 19 nt, Artificial Sequence
  Description of Artificial Sequence: Synthetic oligonucleotide
augugcuucaaacucacca

SEQ ID NO: 2758131 - RNA, 19 nt, Artificial Sequence
  Description of Artificial Sequence: Synthetic oligonucleotide
uggaacggacaacagaaga

SEQ ID NO: 2758132 - RNA, 19 nt, Artificial Sequence
  Description of Artificial Sequence: Synthetic oligonucleotide
aaaaccacggcucguuccu

SEQ ID NO: 2758133 - RNA, 19 nt, Artificial Sequence
  Description of Artificial Sequence: Synthetic oligonucleotide
uucaaacucaccaggccug

SEQ ID NO: 2758134 - RNA, 19 nt, Artificial Sequence
  Description of Artificial Sequence: Synthetic oligonucleotide
ugcacugaggucuuucacc

SEQ ID NO: 2758135 - RNA, 19 nt, Artificial Sequence
  Description of Artificial Sequence: Synthetic oligonucleotide
aaaucccagaguguggaag

SEQ ID NO: 2758136 - RNA, 19 nt, Artificial Sequence
  Description of Artificial Sequence: Synthetic oligonucleotide
uuucaccacacgaaugccc

SEQ ID NO: 2758137 - RNA, 19 nt, Artificial Sequence
  Description of Artificial Sequence: Synthetic oligonucleotide
aaaucuuuguaggcagggg

SEQ ID NO: 2758138 - RNA, 19 nt, Artificial Sequence
  Description of Artificial Sequence: Synthetic oligonucleotide
agcucaaauguccugucag

SEQ ID NO: 2758139 - RNA, 19 nt, Artificial Sequence
  Description of Artificial Sequence: Synthetic oligonucleotide
ugauggaacggacaacaga

SEQ ID NO: 2758140 - RNA, 19 nt, Artificial Sequence
  Description of Artificial Sequence: Synthetic oligonucleotide
auagagacgccucgcugcc

SEQ ID NO: 2758141 - RNA, 19 nt, Artificial Sequence
  Description of Artificial Sequence: Synthetic oligonucleotide
ucuuaagcucaaauguccu

SEQ ID NO: 2758142 - RNA, 19 nt, Artificial Sequence
  Description of Artificial Sequence: Synthetic oligonucleotide
gauggaacggacaacagaa

SEQ ID NO: 2758143 - RNA, 19 nt, Artificial Sequence
  Description of Artificial Sequence: Synthetic oligonucleotide
uucaccacacgaaugccca

SEQ ID NO: 2758144 - RNA, 19 nt, Artificial Sequence
  Description of Artificial Sequence: Synthetic oligonucleotide
ucguugaacucuuugcaga

SEQ ID NO: 2758145 - RNA, 19 nt, Artificial Sequence
  Description of Artificial Sequence: Synthetic oligonucleotide
uguccugucaggcuucaca

SEQ ID NO: 2758146 - RNA, 19 nt, Artificial Sequence
  Description of Artificial Sequence: Synthetic oligonucleotide
ugcuucaaacucaccaggc

SEQ ID NO: 2758147 - RNA, 19 nt, Artificial Sequence
  Description of Artificial Sequence: Synthetic oligonucleotide
gauguccuuugucuucucg

SEQ ID NO: 2758148 - RNA, 19 nt, Artificial Sequence
  Description of Artificial Sequence: Synthetic oligonucleotide
uugcccaaucuuaagcuca

SEQ ID NO: 2758149 - RNA, 19 nt, Artificial Sequence
  Description of Artificial Sequence: Synthetic oligonucleotide
ucgguaggcucucuucucg

SEQ ID NO: 2758150 - RNA, 19 nt, Artificial Sequence
  Description of Artificial Sequence: Synthetic oligonucleotide
aguaggaaauaguggguug

SEQ ID NO: 2758151 - RNA, 19 nt, Artificial Sequence
  Description of Artificial Sequence: Synthetic oligonucleotide
uuucaaaaucccagagugu

SEQ ID NO: 2758152 - RNA, 19 nt, Artificial Sequence
  Description of Artificial Sequence: Synthetic oligonucleotide
aggccugcuaccucuuucc

SEQ ID NO: 2758153 - RNA, 19 nt, Artificial Sequence
  Description of Artificial Sequence: Synthetic oligonucleotide
ugauagagacgccucgcug

SEQ ID NO: 2758154 - RNA, 19 nt, Artificial Sequence
  Description of Artificial Sequence: Synthetic oligonucleotide
uuugauguccuuugucuuc

SEQ ID NO: 2758155 - RNA, 19 nt, Artificial Sequence
  Description of Artificial Sequence: Synthetic oligonucleotide
ucuugcagggcaaaagcau

SEQ ID NO: 2758156 - RNA, 19 nt, Artificial Sequence
  Description of Artificial Sequence: Synthetic oligonucleotide
caaucuuaagcucaaaugu

SEQ ID NO: 2758157 - RNA, 19 nt, Artificial Sequence
  Description of Artificial Sequence: Synthetic oligonucleotide
ucaaauguccugucaggcu

SEQ ID NO: 2758158 - RNA, 19 nt, Artificial Sequence
  Description of Artificial Sequence: Synthetic oligonucleotide
aaucccagcugcugccuuc

SEQ ID NO: 2758159 - RNA, 19 nt, Artificial Sequence
  Description of Artificial Sequence: Synthetic oligonucleotide
agaagacaggggcacaucu

SEQ ID NO: 2758160 - RNA, 19 nt, Artificial Sequence
  Description of Artificial Sequence: Synthetic oligonucleotide
aguguggaaggcugggauc

SEQ ID NO: 2758161 - RNA, 19 nt, Artificial Sequence
  Description of Artificial Sequence: Synthetic oligonucleotide
auccuuagcuuugacacag

SEQ ID NO: 2758162 - RNA, 19 nt, Artificial Sequence
  Description of Artificial Sequence: Synthetic oligonucleotide
auaugugcuucaaacucac

SEQ ID NO: 2758163 - RNA, 19 nt, Artificial Sequence
  Description of Artificial Sequence: Synthetic oligonucleotide
cucguugaacucuuugcag

SEQ ID NO: 2758164 - RNA, 19 nt, Artificial Sequence
  Description of Artificial Sequence: Synthetic oligonucleotide
gugcuucaaacucaccagg

SEQ ID NO: 2758165 - RNA, 19 nt, Artificial Sequence
  Description of Artificial Sequence: Synthetic oligonucleotide
caaaaccacggcucguucc

SEQ ID NO: 2758166 - RNA, 19 nt, Artificial Sequence
  Description of Artificial Sequence: Synthetic oligonucleotide
uuuguaggcaggggaaugc

SEQ ID NO: 2758167 - RNA, 19 nt, Artificial Sequence
  Description of Artificial Sequence: Synthetic oligonucleotide
aacggacaacagaagacag

SEQ ID NO: 2758168 - RNA, 19 nt, Artificial Sequence
  Description of Artificial Sequence: Synthetic oligonucleotide
aggggcacaucuugcaggg

SEQ ID NO: 2758169 - RNA, 19 nt, Artificial Sequence
  Description of Artificial Sequence: Synthetic oligonucleotide
aggaaauaguggguugccc

SEQ ID NO: 2758170 - RNA, 19 nt, Artificial Sequence
  Description of Artificial Sequence: Synthetic oligonucleotide
ucuuugcagaacugguuga

SEQ ID NO: 2758171 - RNA, 19 nt, Artificial Sequence
  Description of Artificial Sequence: Synthetic oligonucleotide
ccaaucuuaagcucaaaug

SEQ ID NO: 2758172 - RNA, 19 nt, Artificial Sequence
  Description of Artificial Sequence: Synthetic oligonucleotide
cucaaauguccugucaggc

SEQ ID NO: 2758173 - RNA, 19 nt, Artificial Sequence
  Description of Artificial Sequence: Synthetic oligonucleotide
uugauagagacgccucgcu

SEQ ID NO: 2758174 - RNA, 19 nt, Artificial Sequence
  Description of Artificial Sequence: Synthetic oligonucleotide
uugcagggcaaaagcauca

SEQ ID NO: 2758175 - RNA, 19 nt, Artificial Sequence
  Description of Artificial Sequence: Synthetic oligonucleotide
ucucgguaggcucucuucu

SEQ ID NO: 2758176 - RNA, 19 nt, Artificial Sequence
  Description of Artificial Sequence: Synthetic oligonucleotide
gcugccuucaagaaguagg

SEQ ID NO: 2758177 - RNA, 19 nt, Artificial Sequence
  Description of Artificial Sequence: Synthetic oligonucleotide
agcuuugacacaggcaauc

SEQ ID NO: 2758178 - RNA, 19 nt, Artificial Sequence
  Description of Artificial Sequence: Synthetic oligonucleotide
gacacaggcaaucucauau

SEQ ID NO: 2758179 - RNA, 19 nt, Artificial Sequence
  Description of Artificial Sequence: Synthetic oligonucleotide
ugccaaaucugccucuuuc

SEQ ID NO: 2758180 - RNA, 19 nt, Artificial Sequence
  Description of Artificial Sequence: Synthetic oligonucleotide
gaggucuuucaccacacga

SEQ ID NO: 2758181 - RNA, 19 nt, Artificial Sequence
  Description of Artificial Sequence: Synthetic oligonucleotide
guaggaaauaguggguugc

SEQ ID NO: 2758182 - RNA, 19 nt, Artificial Sequence
  Description of Artificial Sequence: Synthetic oligonucleotide
aagcucaaauguccuguca

SEQ ID NO: 2758183 - RNA, 19 nt, Artificial Sequence
  Description of Artificial Sequence: Synthetic oligonucleotide
caggcaaucucauauaugu

SEQ ID NO: 2758184 - RNA, 19 nt, Artificial Sequence
  Description of Artificial Sequence: Synthetic oligonucleotide
gaacggacaacagaagaca

SEQ ID NO: 2758185 - RNA, 19 nt, Artificial Sequence
  Description of Artificial Sequence: Synthetic oligonucleotide
aaccacggcucguuccuuc

SEQ ID NO: 2758186 - RNA, 19 nt, Artificial Sequence
  Description of Artificial Sequence: Synthetic oligonucleotide
ugaggucuuucaccacacg

SEQ ID NO: 2758187 - RNA, 19 nt, Artificial Sequence
  Description of Artificial Sequence: Synthetic oligonucleotide
ucugcacugaggucuuuca

SEQ ID NO: 2758188 - RNA, 19 nt, Artificial Sequence
  Description of Artificial Sequence: Synthetic oligonucleotide
gguugauagagacgccucg

SEQ ID NO: 2758189 - RNA, 19 nt, Artificial Sequence
  Description of Artificial Sequence: Synthetic oligonucleotide
acaucuugcagggcaaaag

SEQ ID NO: 2758190 - RNA, 19 nt, Artificial Sequence
  Description of Artificial Sequence: Synthetic oligonucleotide
gaaauaguggguugcccaa

SEQ ID NO: 2758191 - RNA, 19 nt, Artificial Sequence
  Description of Artificial Sequence: Synthetic oligonucleotide
accacacgaaugcccaggg

SEQ ID NO: 2758192 - RNA, 19 nt, Artificial Sequence
  Description of Artificial Sequence: Synthetic oligonucleotide
ucagcuuucucgguaggcu

SEQ ID NO: 2758193 - RNA, 19 nt, Artificial Sequence
  Description of Artificial Sequence: Synthetic oligonucleotide
cuucuuucaaaaucccaga

SEQ ID NO: 2758194 - RNA, 19 nt, Artificial Sequence
  Description of Artificial Sequence: Synthetic oligonucleotide
gcugggaucacuucuuggc

SEQ ID NO: 2758195 - RNA, 19 nt, Artificial Sequence
  Description of Artificial Sequence: Synthetic oligonucleotide
cuucucguugaacucuuug

SEQ ID NO: 2758196 - RNA, 19 nt, Artificial Sequence
  Description of Artificial Sequence: Synthetic oligonucleotide
uguaggcaggggaaugccu

SEQ ID NO: 2758197 - RNA, 19 nt, Artificial Sequence
  Description of Artificial Sequence: Synthetic oligonucleotide
ggaaauaguggguugccca

SEQ ID NO: 2758198 - RNA, 19 nt, Artificial Sequence
  Description of Artificial Sequence: Synthetic oligonucleotide
agcugcugccuucaagaag

SEQ ID NO: 2758199 - RNA, 19 nt, Artificial Sequence
  Description of Artificial Sequence: Synthetic oligonucleotide
acacgaaugcccagggaac

SEQ ID NO: 2758200 - RNA, 19 nt, Artificial Sequence
  Description of Artificial Sequence: Synthetic oligonucleotide
aggggaaugccuucuuuga

SEQ ID NO: 2758201 - RNA, 19 nt, Artificial Sequence
  Description of Artificial Sequence: Synthetic oligonucleotide
cauauaugugcuucaaacu

SEQ ID NO: 2758202 - RNA, 19 nt, Artificial Sequence
  Description of Artificial Sequence: Synthetic oligonucleotide
ugguugauagagacgccuc

SEQ ID NO: 2758203 - RNA, 19 nt, Artificial Sequence
  Description of Artificial Sequence: Synthetic oligonucleotide
uucucaaucccagcugcug

SEQ ID NO: 2758204 - RNA, 19 nt, Artificial Sequence
  Description of Artificial Sequence: Synthetic oligonucleotide
uucccuguuugucgggccc

SEQ ID NO: 2758205 - RNA, 19 nt, Artificial Sequence
  Description of Artificial Sequence: Synthetic oligonucleotide
uaggaaauaguggguugcc

SEQ ID NO: 2758206 - RNA, 19 nt, Artificial Sequence
  Description of Artificial Sequence: Synthetic oligonucleotide
ugccugggcugccaaaucu

SEQ ID NO: 2758207 - RNA, 19 nt, Artificial Sequence
  Description of Artificial Sequence: Synthetic oligonucleotide
aagaugggaccuagugggg

SEQ ID NO: 2758208 - RNA, 19 nt, Artificial Sequence
  Description of Artificial Sequence: Synthetic oligonucleotide
ccaagaugggaccuagugg

SEQ ID NO: 2758209 - RNA, 19 nt, Artificial Sequence
  Description of Artificial Sequence: Synthetic oligonucleotide
uugucuucucguugaacuc

SEQ ID NO: 2758210 - RNA, 19 nt, Artificial Sequence
  Description of Artificial Sequence: Synthetic oligonucleotide
uaugugcuucaaacucacc

SEQ ID NO: 2758211 - RNA, 19 nt, Artificial Sequence
  Description of Artificial Sequence: Synthetic oligonucleotide
aaaaucccagaguguggaa

SEQ ID NO: 2758212 - RNA, 19 nt, Artificial Sequence
  Description of Artificial Sequence: Synthetic oligonucleotide
cagagccaaugauggaacg

SEQ ID NO: 2758213 - RNA, 19 nt, Artificial Sequence
  Description of Artificial Sequence: Synthetic oligonucleotide
uugacacaggcaaucucau

SEQ ID NO: 2758214 - RNA, 19 nt, Artificial Sequence
  Description of Artificial Sequence: Synthetic oligonucleotide
aacgggcagagccaaugau

SEQ ID NO: 2758215 - RNA, 19 nt, Artificial Sequence
  Description of Artificial Sequence: Synthetic oligonucleotide
cuaccucuuucccuguuug

SEQ ID NO: 2758216 - RNA, 19 nt, Artificial Sequence
  Description of Artificial Sequence: Synthetic oligonucleotide
gggaaugccuucuuugaug

SEQ ID NO: 2758217 - RNA, 19 nt, Artificial Sequence
  Description of Artificial Sequence: Synthetic oligonucleotide
acucaccaggccugcuacc

SEQ ID NO: 2758218 - RNA, 19 nt, Artificial Sequence
  Description of Artificial Sequence: Synthetic oligonucleotide
ucugugcagccaaaaccac

SEQ ID NO: 2758219 - RNA, 19 nt, Artificial Sequence
  Description of Artificial Sequence: Synthetic oligonucleotide
uggguugcccaaucuuaag

SEQ ID NO: 2758220 - RNA, 19 nt, Artificial Sequence
  Description of Artificial Sequence: Synthetic oligonucleotide
uaagcucaaauguccuguc

SEQ ID NO: 2758221 - RNA, 19 nt, Artificial Sequence
  Description of Artificial Sequence: Synthetic oligonucleotide
gcucaaauguccugucagg

SEQ ID NO: 2758222 - RNA, 19 nt, Artificial Sequence
  Description of Artificial Sequence: Synthetic oligonucleotide
gguucagcuuucucgguag

SEQ ID NO: 2758223 - RNA, 19 nt, Artificial Sequence
  Description of Artificial Sequence: Synthetic oligonucleotide
ccucgcugccccaagaugg

SEQ ID NO: 2758224 - RNA, 19 nt, Artificial Sequence
  Description of Artificial Sequence: Synthetic oligonucleotide
uccuuagcuuugacacagg

SEQ ID NO: 2758225 - RNA, 19 nt, Artificial Sequence
  Description of Artificial Sequence: Synthetic oligonucleotide
ccagggaacgggcagagcc

SEQ ID NO: 2758226 - RNA, 19 nt, Artificial Sequence
  Description of Artificial Sequence: Synthetic oligonucleotide
uucagcuuucucgguaggc

SEQ ID NO: 2758227 - RNA, 19 nt, Artificial Sequence
  Description of Artificial Sequence: Synthetic oligonucleotide
auaguggguugcccaaucu

SEQ ID NO: 2758228 - RNA, 19 nt, Artificial Sequence
  Description of Artificial Sequence: Synthetic oligonucleotide
cacacgaaugcccagggaa

SEQ ID NO: 2758229 - RNA, 19 nt, Artificial Sequence
  Description of Artificial Sequence: Synthetic oligonucleotide
cuuugacacaggcaaucuc

SEQ ID NO: 2758230 - RNA, 19 nt, Artificial Sequence
  Description of Artificial Sequence: Synthetic oligonucleotide
uuucccuguuugucgggcc

SEQ ID NO: 2758231 - RNA, 19 nt, Artificial Sequence
  Description of Artificial Sequence: Synthetic oligonucleotide
cagccaaaaccacggcucg

SEQ ID NO: 2758232 - RNA, 19 nt, Artificial Sequence
  Description of Artificial Sequence: Synthetic oligonucleotide
cacgaaugcccagggaacg

SEQ ID NO: 2758233 - RNA, 19 nt, Artificial Sequence
  Description of Artificial Sequence: Synthetic oligonucleotide
gagccaaugauggaacgga

SEQ ID NO: 2758234 - RNA, 19 nt, Artificial Sequence
  Description of Artificial Sequence: Synthetic oligonucleotide
ucucauauaugugcuucaa

SEQ ID NO: 2758235 - RNA, 19 nt, Artificial Sequence
  Description of Artificial Sequence: Synthetic oligonucleotide
caaaaucccagagugugga

SEQ ID NO: 2758236 - RNA, 19 nt, Artificial Sequence
  Description of Artificial Sequence: Synthetic oligonucleotide
ugguucagcuuucucggua

SEQ ID NO: 2758237 - RNA, 19 nt, Artificial Sequence
  Description of Artificial Sequence: Synthetic oligonucleotide
acggacaacagaagacagg

SEQ ID NO: 2758238 - RNA, 19 nt, Artificial Sequence
  Description of Artificial Sequence: Synthetic oligonucleotide
ucaaacucaccaggccugc

SEQ ID NO: 2758239 - RNA, 19 nt, Artificial Sequence
  Description of Artificial Sequence: Synthetic oligonucleotide
gaaggcugggaucacuucu

SEQ ID NO: 2758240 - RNA, 19 nt, Artificial Sequence
  Description of Artificial Sequence: Synthetic oligonucleotide
gacaggggcacaucuugca

SEQ ID NO: 2758241 - RNA, 19 nt, Artificial Sequence
  Description of Artificial Sequence: Synthetic oligonucleotide
gcauagcuuggccugcucg

SEQ ID NO: 2758242 - RNA, 19 nt, Artificial Sequence
  Description of Artificial Sequence: Synthetic oligonucleotide
cuuuguaggcaggggaaug

SEQ ID NO: 2758243 - RNA, 19 nt, Artificial Sequence
  Description of Artificial Sequence: Synthetic oligonucleotide
cacggcucguuccuucugg

SEQ ID NO: 2758244 - RNA, 19 nt, Artificial Sequence
  Description of Artificial Sequence: Synthetic oligonucleotide
ggguugcccaaucuuaagc

SEQ ID NO: 2758245 - RNA, 19 nt, Artificial Sequence
  Description of Artificial Sequence: Synthetic oligonucleotide
cugccuucaagaaguagga

SEQ ID NO: 2758246 - RNA, 19 nt, Artificial Sequence
  Description of Artificial Sequence: Synthetic oligonucleotide
ccucuuucccuguuugucg

SEQ ID NO: 2758247 - RNA, 19 nt, Artificial Sequence
  Description of Artificial Sequence: Synthetic oligonucleotide
uuguaggcaggggaaugcc

SEQ ID NO: 2758248 - RNA, 19 nt, Artificial Sequence
  Description of Artificial Sequence: Synthetic oligonucleotide
uaguggguugcccaaucuu

SEQ ID NO: 2758249 - RNA, 19 nt, Artificial Sequence
  Description of Artificial Sequence: Synthetic oligonucleotide
acugguugauagagacgcc

SEQ ID NO: 2758250 - RNA, 19 nt, Artificial Sequence
  Description of Artificial Sequence: Synthetic oligonucleotide
ggaacggacaacagaagac

SEQ ID NO: 2758251 - RNA, 19 nt, Artificial Sequence
  Description of Artificial Sequence: Synthetic oligonucleotide
aaauaguggguugcccaau

SEQ ID NO: 2758252 - RNA, 19 nt, Artificial Sequence
  Description of Artificial Sequence: Synthetic oligonucleotide
ccugcuaccucuuucccug

SEQ ID NO: 2758253 - RNA, 19 nt, Artificial Sequence
  Description of Artificial Sequence: Synthetic oligonucleotide
cuucaaacucaccaggccu

SEQ ID NO: 2758254 - RNA, 19 nt, Artificial Sequence
  Description of Artificial Sequence: Synthetic oligonucleotide
agcaucauccuuagcuuug

SEQ ID NO: 2758255 - RNA, 19 nt, Artificial Sequence
  Description of Artificial Sequence: Synthetic oligonucleotide
cucgcugccccaagauggg

SEQ ID NO: 2758256 - RNA, 19 nt, Artificial Sequence
  Description of Artificial Sequence: Synthetic oligonucleotide
cuuucccuguuugucgggc

SEQ ID NO: 2758257 - RNA, 19 nt, Artificial Sequence
  Description of Artificial Sequence: Synthetic oligonucleotide
gccuucaagaaguaggaaa

SEQ ID NO: 2758258 - RNA, 19 nt, Artificial Sequence
  Description of Artificial Sequence: Synthetic oligonucleotide
cggacaacagaagacaggg

SEQ ID NO: 2758259 - RNA, 19 nt, Artificial Sequence
  Description of Artificial Sequence: Synthetic oligonucleotide
aaugcccagggaacgggca

SEQ ID NO: 2758260 - RNA, 19 nt, Artificial Sequence
  Description of Artificial Sequence: Synthetic oligonucleotide
gucuuucaccacacgaaug

SEQ ID NO: 2758261 - RNA, 19 nt, Artificial Sequence
  Description of Artificial Sequence: Synthetic oligonucleotide
ugcccaaucuuaagcucaa

SEQ ID NO: 2758262 - RNA, 19 nt, Artificial Sequence
  Description of Artificial Sequence: Synthetic oligonucleotide
ccuucuggaaagcugccag

SEQ ID NO: 2758263 - RNA, 19 nt, Artificial Sequence
  Description of Artificial Sequence: Synthetic oligonucleotide
caaaagcaucauccuuagc

SEQ ID NO: 2758264 - RNA, 19 nt, Artificial Sequence
  Description of Artificial Sequence: Synthetic oligonucleotide
acgaaugcccagggaacgg

SEQ ID NO: 2758265 - RNA, 19 nt, Artificial Sequence
  Description of Artificial Sequence: Synthetic oligonucleotide
acaggcaaucucauauaug

SEQ ID NO: 2758266 - RNA, 19 nt, Artificial Sequence
  Description of Artificial Sequence: Synthetic oligonucleotide
uucucggcucuucuuucaa

SEQ ID NO: 2758267 - RNA, 19 nt, Artificial Sequence
  Description of Artificial Sequence: Synthetic oligonucleotide
ucaccacacgaaugcccag

SEQ ID NO: 2758268 - RNA, 19 nt, Artificial Sequence
  Description of Artificial Sequence: Synthetic oligonucleotide
caccacacgaaugcccagg

SEQ ID NO: 2758269 - RNA, 19 nt, Artificial Sequence
  Description of Artificial Sequence: Synthetic oligonucleotide
aggucuuucaccacacgaa

SEQ ID NO: 2758270 - RNA, 19 nt, Artificial Sequence
  Description of Artificial Sequence: Synthetic oligonucleotide
gaaugcccagggaacgggc

SEQ ID NO: 2758271 - RNA, 19 nt, Artificial Sequence
  Description of Artificial Sequence: Synthetic oligonucleotide
gaacgggcagagccaauga

SEQ ID NO: 2758272 - RNA, 19 nt, Artificial Sequence
  Description of Artificial Sequence: Synthetic oligonucleotide
guccugucaggcuucacaa

SEQ ID NO: 2758273 - RNA, 19 nt, Artificial Sequence
  Description of Artificial Sequence: Synthetic oligonucleotide
aauguccugucaggcuuca

SEQ ID NO: 2758274 - RNA, 19 nt, Artificial Sequence
  Description of Artificial Sequence: Synthetic oligonucleotide
ugcugccuucaagaaguag

SEQ ID NO: 2758275 - RNA, 19 nt, Artificial Sequence
  Description of Artificial Sequence: Synthetic oligonucleotide
caaugauggaacggacaac

SEQ ID NO: 2758276 - RNA, 19 nt, Artificial Sequence
  Description of Artificial Sequence: Synthetic oligonucleotide
cucggcucuucuuucaaaa

SEQ ID NO: 2758277 - RNA, 19 nt, Artificial Sequence
  Description of Artificial Sequence: Synthetic oligonucleotide
ccuuagcuuugacacaggc

SEQ ID NO: 2758278 - RNA, 19 nt, Artificial Sequence
  Description of Artificial Sequence: Synthetic oligonucleotide
cuggaaagcugccaguucu

SEQ ID NO: 2758279 - RNA, 19 nt, Artificial Sequence
  Description of Artificial Sequence: Synthetic oligonucleotide
uggaaagcugccaguucuu

SEQ ID NO: 2758280 - RNA, 19 nt, Artificial Sequence
  Description of Artificial Sequence: Synthetic oligonucleotide
gaucacuucuuggcagcug

SEQ ID NO: 2758281 - RNA, 19 nt, Artificial Sequence
  Description of Artificial Sequence: Synthetic oligonucleotide
cccaagaugggaccuagug

SEQ ID NO: 2758282 - RNA, 19 nt, Artificial Sequence
  Description of Artificial Sequence: Synthetic oligonucleotide
augauggaacggacaacag

SEQ ID NO: 2758283 - RNA, 19 nt, Artificial Sequence
  Description of Artificial Sequence: Synthetic oligonucleotide
uuucucgguaggcucucuu

SEQ ID NO: 2758284 - RNA, 19 nt, Artificial Sequence
  Description of Artificial Sequence: Synthetic oligonucleotide
aguggguugcccaaucuua

SEQ ID NO: 2758285 - RNA, 19 nt, Artificial Sequence
  Description of Artificial Sequence: Synthetic oligonucleotide
auggaacggacaacagaag

SEQ ID NO: 2758286 - RNA, 19 nt, Artificial Sequence
  Description of Artificial Sequence: Synthetic oligonucleotide
cugggaucacuucuuggca

SEQ ID NO: 2758287 - RNA, 19 nt, Artificial Sequence
  Description of Artificial Sequence: Synthetic oligonucleotide
ggcaaaagcaucauccuua

SEQ ID NO: 2758288 - RNA, 19 nt, Artificial Sequence
  Description of Artificial Sequence: Synthetic oligonucleotide
caaaucugccucuuucugu

SEQ ID NO: 2758289 - RNA, 19 nt, Artificial Sequence
  Description of Artificial Sequence: Synthetic oligonucleotide
cucauauaugugcuucaaa

SEQ ID NO: 2758290 - RNA, 19 nt, Artificial Sequence
  Description of Artificial Sequence: Synthetic oligonucleotide
ggcugggaucacuucuugg

SEQ ID NO: 2758291 - RNA, 19 nt, Artificial Sequence
  Description of Artificial Sequence: Synthetic oligonucleotide
ucucggcucuucuuucaaa

SEQ ID NO: 2758292 - RNA, 19 nt, Artificial Sequence
  Description of Artificial Sequence: Synthetic oligonucleotide
acagaagacaggggcacau

SEQ ID NO: 2758293 - RNA, 19 nt, Artificial Sequence
  Description of Artificial Sequence: Synthetic oligonucleotide
cauccuuagcuuugacaca

SEQ ID NO: 2758294 - RNA, 19 nt, Artificial Sequence
  Description of Artificial Sequence: Synthetic oligonucleotide
cucgguaggcucucuucuc

SEQ ID NO: 2758295 - RNA, 19 nt, Artificial Sequence
  Description of Artificial Sequence: Synthetic oligonucleotide
ucaaucccagcugcugccu

SEQ ID NO: 2758296 - RNA, 19 nt, Artificial Sequence
  Description of Artificial Sequence: Synthetic oligonucleotide
ccaggcauagcuuggccug

SEQ ID NO: 2758297 - RNA, 19 nt, Artificial Sequence
  Description of Artificial Sequence: Synthetic oligonucleotide
ugacacaggcaaucucaua

SEQ ID NO: 2758298 - RNA, 19 nt, Artificial Sequence
  Description of Artificial Sequence: Synthetic oligonucleotide
gguugcccaaucuuaagcu

SEQ ID NO: 2758299 - RNA, 19 nt, Artificial Sequence
  Description of Artificial Sequence: Synthetic oligonucleotide
uaggcaggggaaugccuuc

SEQ ID NO: 2758300 - RNA, 19 nt, Artificial Sequence
  Description of Artificial Sequence: Synthetic oligonucleotide
aaggcugggaucacuucuu

SEQ ID NO: 2758301 - RNA, 19 nt, Artificial Sequence
  Description of Artificial Sequence: Synthetic oligonucleotide
uccugucaggcuucacaaa

SEQ ID NO: 2758302 - RNA, 19 nt, Artificial Sequence
  Description of Artificial Sequence: Synthetic oligonucleotide
aggcugggaucacuucuug

SEQ ID NO: 2758303 - RNA, 19 nt, Artificial Sequence
  Description of Artificial Sequence: Synthetic oligonucleotide
ccaaugauggaacggacaa

SEQ ID NO: 2758304 - RNA, 19 nt, Artificial Sequence
  Description of Artificial Sequence: Synthetic oligonucleotide
gcagccaaaaccacggcuc

SEQ ID NO: 2758305 - RNA, 19 nt, Artificial Sequence
  Description of Artificial Sequence: Synthetic oligonucleotide
guucuucugcacugagguc

SEQ ID NO: 2758306 - RNA, 19 nt, Artificial Sequence
  Description of Artificial Sequence: Synthetic oligonucleotide
gggcacaucuugcagggca

SEQ ID NO: 2758307 - RNA, 19 nt, Artificial Sequence
  Description of Artificial Sequence: Synthetic oligonucleotide
gguaggcucucuucucggc

SEQ ID NO: 2758308 - RNA, 19 nt, Artificial Sequence
  Description of Artificial Sequence: Synthetic oligonucleotide
ggaacgggcagagccaaug

SEQ ID NO: 2758309 - RNA, 19 nt, Artificial Sequence
  Description of Artificial Sequence: Synthetic oligonucleotide
caaauguccugucaggcuu

SEQ ID NO: 2758310 - RNA, 19 nt, Artificial Sequence
  Description of Artificial Sequence: Synthetic oligonucleotide
ggggcccaggcauagcuug

SEQ ID NO: 2758311 - RNA, 19 nt, Artificial Sequence
  Description of Artificial Sequence: Synthetic oligonucleotide
cuucucggcucuucuuuca

SEQ ID NO: 2758312 - RNA, 19 nt, Artificial Sequence
  Description of Artificial Sequence: Synthetic oligonucleotide
caggccugcuaccucuuuc

SEQ ID NO: 2758313 - RNA, 19 nt, Artificial Sequence
  Description of Artificial Sequence: Synthetic oligonucleotide
cucguuccuucuggaaagc

SEQ ID NO: 2758314 - RNA, 19 nt, Artificial Sequence
  Description of Artificial Sequence: Synthetic oligonucleotide
ggcagagccaaugauggaa

SEQ ID NO: 2758315 - RNA, 19 nt, Artificial Sequence
  Description of Artificial Sequence: Synthetic oligonucleotide
ucccuguuugucgggcccc

SEQ ID NO: 2758316 - RNA, 19 nt, Artificial Sequence
  Description of Artificial Sequence: Synthetic oligonucleotide
ggcucguuccuucuggaaa

SEQ ID NO: 2758317 - RNA, 19 nt, Artificial Sequence
  Description of Artificial Sequence: Synthetic oligonucleotide
aggcucucuucucggcucu

SEQ ID NO: 2758318 - RNA, 19 nt, Artificial Sequence
  Description of Artificial Sequence: Synthetic oligonucleotide
gacgccucgcugccccaag

SEQ ID NO: 2758319 - RNA, 19 nt, Artificial Sequence
  Description of Artificial Sequence: Synthetic oligonucleotide
cagggaacgggcagagcca

SEQ ID NO: 2758320 - RNA, 19 nt, Artificial Sequence
  Description of Artificial Sequence: Synthetic oligonucleotide
cacugaggucuuucaccac

SEQ ID NO: 2758321 - RNA, 19 nt, Artificial Sequence
  Description of Artificial Sequence: Synthetic oligonucleotide
acggcucguuccuucugga

SEQ ID NO: 2758322 - RNA, 19 nt, Artificial Sequence
  Description of Artificial Sequence: Synthetic oligonucleotide
guaggcucucuucucggcu

SEQ ID NO: 2758323 - RNA, 19 nt, Artificial Sequence
  Description of Artificial Sequence: Synthetic oligonucleotide
gcagagccaaugauggaac

SEQ ID NO: 2758324 - RNA, 19 nt, Artificial Sequence
  Description of Artificial Sequence: Synthetic oligonucleotide
cuucaagaaguaggaaaua

SEQ ID NO: 2758325 - RNA, 19 nt, Artificial Sequence
  Description of Artificial Sequence: Synthetic oligonucleotide
ccugucaggcuucacaaaa

SEQ ID NO: 2758326 - RNA, 19 nt, Artificial Sequence
  Description of Artificial Sequence: Synthetic oligonucleotide
ugcccagggaacgggcaga

SEQ ID NO: 2758327 - RNA, 19 nt, Artificial Sequence
  Description of Artificial Sequence: Synthetic oligonucleotide
ugcuaccucuuucccuguu

SEQ ID NO: 2758328 - RNA, 19 nt, Artificial Sequence
  Description of Artificial Sequence: Synthetic oligonucleotide
cugguugauagagacgccu

SEQ ID NO: 2758329 - RNA, 19 nt, Artificial Sequence
  Description of Artificial Sequence: Synthetic oligonucleotide
guggguugcccaaucuuaa

SEQ ID NO: 2758330 - RNA, 19 nt, Artificial Sequence
  Description of Artificial Sequence: Synthetic oligonucleotide
ggaaggcugggaucacuuc

SEQ ID NO: 2758331 - RNA, 19 nt, Artificial Sequence
  Description of Artificial Sequence: Synthetic oligonucleotide
cagaagacaggggcacauc

SEQ ID NO: 2758332 - RNA, 19 nt, Artificial Sequence
  Description of Artificial Sequence: Synthetic oligonucleotide
gccaaugauggaacggaca

SEQ ID NO: 2758333 - RNA, 19 nt, Artificial Sequence
  Description of Artificial Sequence: Synthetic oligonucleotide
agggaacgggcagagccaa

SEQ ID NO: 2758334 - RNA, 19 nt, Artificial Sequence
  Description of Artificial Sequence: Synthetic oligonucleotide
aggcaggggaaugccuucu

SEQ ID NO: 2758335 - RNA, 19 nt, Artificial Sequence
  Description of Artificial Sequence: Synthetic oligonucleotide
auguccugucaggcuucac

SEQ ID NO: 2758336 - RNA, 19 nt, Artificial Sequence
  Description of Artificial Sequence: Synthetic oligonucleotide
agccaaaaccacggcucgu

SEQ ID NO: 2758337 - RNA, 19 nt, Artificial Sequence
  Description of Artificial Sequence: Synthetic oligonucleotide
cuucucaaucccagcugcu

SEQ ID NO: 2758338 - RNA, 19 nt, Artificial Sequence
  Description of Artificial Sequence: Synthetic oligonucleotide
gccucgcugccccaagaug

SEQ ID NO: 2758339 - RNA, 19 nt, Artificial Sequence
  Description of Artificial Sequence: Synthetic oligonucleotide
gggcugccaaaucugccuc

SEQ ID NO: 2758340 - RNA, 19 nt, Artificial Sequence
  Description of Artificial Sequence: Synthetic oligonucleotide
ccaaaaccacggcucguuc

SEQ ID NO: 2758341 - RNA, 19 nt, Artificial Sequence
  Description of Artificial Sequence: Synthetic oligonucleotide
acgccucgcugccccaaga

SEQ ID NO: 2758342 - RNA, 19 nt, Artificial Sequence
  Description of Artificial Sequence: Synthetic oligonucleotide
cucuuucugugcagccaaa

SEQ ID NO: 2758343 - RNA, 19 nt, Artificial Sequence
  Description of Artificial Sequence: Synthetic oligonucleotide
guaggcaggggaaugccuu

SEQ ID NO: 2758344 - RNA, 19 nt, Artificial Sequence
  Description of Artificial Sequence: Synthetic oligonucleotide
cuuugcagaacugguugau

SEQ ID NO: 2758345 - RNA, 19 nt, Artificial Sequence
  Description of Artificial Sequence: Synthetic oligonucleotide
gcccaggcauagcuuggcc

SEQ ID NO: 2758346 - RNA, 19 nt, Artificial Sequence
  Description of Artificial Sequence: Synthetic oligonucleotide
cgaaugcccagggaacggg

SEQ ID NO: 2758347 - RNA, 19 nt, Artificial Sequence
  Description of Artificial Sequence: Synthetic oligonucleotide
cgguaggcucucuucucgg

SEQ ID NO: 2758348 - RNA, 19 nt, Artificial Sequence
  Description of Artificial Sequence: Synthetic oligonucleotide
gcaucauccuuagcuuuga

SEQ ID NO: 2758349 - RNA, 19 nt, Artificial Sequence
  Description of Artificial Sequence: Synthetic oligonucleotide
ugccuucuuugauguccuu

SEQ ID NO: 2758350 - RNA, 19 nt, Artificial Sequence
  Description of Artificial Sequence: Synthetic oligonucleotide
gggcccaggcauagcuugg

SEQ ID NO: 2758351 - RNA, 19 nt, Artificial Sequence
  Description of Artificial Sequence: Synthetic oligonucleotide
gagacgccucgcugcccca

SEQ ID NO: 2758352 - RNA, 19 nt, Artificial Sequence
  Description of Artificial Sequence: Synthetic oligonucleotide
cccaaucuuaagcucaaau

SEQ ID NO: 2758353 - RNA, 19 nt, Artificial Sequence
  Description of Artificial Sequence: Synthetic oligonucleotide
ggcccaggcauagcuuggc

SEQ ID NO: 2758354 - RNA, 19 nt, Artificial Sequence
  Description of Artificial Sequence: Synthetic oligonucleotide
gcuuugacacaggcaaucu

SEQ ID NO: 2758355 - RNA, 19 nt, Artificial Sequence
  Description of Artificial Sequence: Synthetic oligonucleotide
cgcugccccaagaugggac

SEQ ID NO: 2758356 - RNA, 19 nt, Artificial Sequence
  Description of Artificial Sequence: Synthetic oligonucleotide
ggcacaucuugcagggcaa

SEQ ID NO: 2758357 - RNA, 19 nt, Artificial Sequence
  Description of Artificial Sequence: Synthetic oligonucleotide
agacgccucgcugccccaa

SEQ ID NO: 2758358 - RNA, 19 nt, Artificial Sequence
  Description of Artificial Sequence: Synthetic oligonucleotide
gcuaccucuuucccuguuu

SEQ ID NO: 2758359 - RNA, 19 nt, Artificial Sequence
  Description of Artificial Sequence: Synthetic oligonucleotide
cccaggcauagcuuggccu

SEQ ID NO: 2758360 - RNA, 19 nt, Artificial Sequence
  Description of Artificial Sequence: Synthetic oligonucleotide
ggcugccaaaucugccucu

SEQ ID NO: 2758361 - RNA, 19 nt, Artificial Sequence
  Description of Artificial Sequence: Synthetic oligonucleotide
ccacggcucguuccuucug

SEQ ID NO: 2758362 - RNA, 19 nt, Artificial Sequence
  Description of Artificial Sequence: Synthetic oligonucleotide
caaacucaccaggccugcu

SEQ ID NO: 2758363 - RNA, 19 nt, Artificial Sequence
  Description of Artificial Sequence: Synthetic oligonucleotide
gccaaaaccacggcucguu

SEQ ID NO: 2758364 - RNA, 19 nt, Artificial Sequence
  Description of Artificial Sequence: Synthetic oligonucleotide
ccacacgaaugcccaggga

SEQ ID NO: 2758365 - RNA, 19 nt, Artificial Sequence
  Description of Artificial Sequence: Synthetic oligonucleotide
cugcuaccucuuucccugu

SEQ ID NO: 2758366 - RNA, 19 nt, Artificial Sequence
  Description of Artificial Sequence: Synthetic oligonucleotide
caaucccagcugcugccuu

SEQ ID NO: 2758367 - RNA, 19 nt, Artificial Sequence
  Description of Artificial Sequence: Synthetic oligonucleotide
cugccccaagaugggaccu

SEQ ID NO: 2758368 - RNA, 19 nt, Artificial Sequence
  Description of Artificial Sequence: Synthetic oligonucleotide
cccagggaacgggcagagc

SEQ ID NO: 2758369 - RNA, 19 nt, Artificial Sequence
  Description of Artificial Sequence: Synthetic oligonucleotide
ggcaggggaaugccuucuu

SEQ ID NO: 2758370 - RNA, 19 nt, Artificial Sequence
  Description of Artificial Sequence: Synthetic oligonucleotide
gcccaaucuuaagcucaaa

SEQ ID NO: 2758371 - RNA, 19 nt, Artificial Sequence
  Description of Artificial Sequence: Synthetic oligonucleotide
cggcucguuccuucuggaa

SEQ ID NO: 2758372 - RNA, 19 nt, Artificial Sequence
  Description of Artificial Sequence: Synthetic oligonucleotide
ccccaagaugggaccuagu

SEQ ID NO: 2758373 - RNA, 19 nt, Artificial Sequence
  Description of Artificial Sequence: Synthetic oligonucleotide
cuucugcacugaggucuuu

SEQ ID NO: 2758374 - RNA, 19 nt, Artificial Sequence
  Description of Artificial Sequence: Synthetic oligonucleotide
gggaacgggcagagccaau

SEQ ID NO: 2758375 - RNA, 19 nt, Artificial Sequence
  Description of Artificial Sequence: Synthetic oligonucleotide
ccaggccugcuaccucuuu

SEQ ID NO: 2758376 - RNA, 19 nt, Artificial Sequence
  Description of Artificial Sequence: Synthetic oligonucleotide
cgccucgcugccccaagau

SEQ ID NO: 2758377 - RNA, 19 nt, Artificial Sequence
  Description of Artificial Sequence: Synthetic oligonucleotide
gauacaaauacuuaucuag

SEQ ID NO: 2758378 - RNA, 19 nt, Artificial Sequence
  Description of Artificial Sequence: Synthetic oligonucleotide
cucuauauaauauugauug

SEQ ID NO: 2758379 - RNA, 19 nt, Artificial Sequence
  Description of Artificial Sequence: Synthetic oligonucleotide
aucuucuuuagcuaaagcc

SEQ ID NO: 2758380 - RNA, 19 nt, Artificial Sequence
  Description of Artificial Sequence: Synthetic oligonucleotide
uauaauauugauugaacag

SEQ ID NO: 2758381 - RNA, 19 nt, Artificial Sequence
  Description of Artificial Sequence: Synthetic oligonucleotide
auauugauugaacagcugc

SEQ ID NO: 2758382 - RNA, 19 nt, Artificial Sequence
  Description of Artificial Sequence: Synthetic oligonucleotide
auaauauugauugaacagc

SEQ ID NO: 2758383 - RNA, 19 nt, Artificial Sequence
  Description of Artificial Sequence: Synthetic oligonucleotide
auccuugucauauuguugc

SEQ ID NO: 2758384 - RNA, 19 nt, Artificial Sequence
  Description of Artificial Sequence: Synthetic oligonucleotide
uuuuggaucauaaugcucu

SEQ ID NO: 2758385 - RNA, 19 nt, Artificial Sequence
  Description of Artificial Sequence: Synthetic oligonucleotide
uuucuucuuauuuacaugc

SEQ ID NO: 2758386 - RNA, 19 nt, Artificial Sequence
  Description of Artificial Sequence: Synthetic oligonucleotide
uuuucucuauauaauauug

SEQ ID NO: 2758387 - RNA, 19 nt, Artificial Sequence
  Description of Artificial Sequence: Synthetic oligonucleotide
aucaauaucuucuuuagcu

SEQ ID NO: 2758388 - RNA, 19 nt, Artificial Sequence
  Description of Artificial Sequence: Synthetic oligonucleotide
aguuuucuaauucuugucg

SEQ ID NO: 2758389 - RNA, 19 nt, Artificial Sequence
  Description of Artificial Sequence: Synthetic oligonucleotide
uaagaagucgugaugauac

SEQ ID NO: 2758390 - RNA, 19 nt, Artificial Sequence
  Description of Artificial Sequence: Synthetic oligonucleotide
caaauacuuaucuaguucc

SEQ ID NO: 2758391 - RNA, 19 nt, Artificial Sequence
  Description of Artificial Sequence: Synthetic oligonucleotide
cauaaugcucuauaaaugc

SEQ ID NO: 2758392 - RNA, 19 nt, Artificial Sequence
  Description of Artificial Sequence: Synthetic oligonucleotide
aaaguuuucuaauucuugu

SEQ ID NO: 2758393 - RNA, 19 nt, Artificial Sequence
  Description of Artificial Sequence: Synthetic oligonucleotide
aagaaagcgacugugguuc

SEQ ID NO: 2758394 - RNA, 19 nt, Artificial Sequence
  Description of Artificial Sequence: Synthetic oligonucleotide
ucuucuuuagcuaaagccu

SEQ ID NO: 2758395 - RNA, 19 nt, Artificial Sequence
  Description of Artificial Sequence: Synthetic oligonucleotide
uaaaagaaagcgacugugg

SEQ ID NO: 2758396 - RNA, 19 nt, Artificial Sequence
  Description of Artificial Sequence: Synthetic oligonucleotide
acaaauacuuaucuaguuc

SEQ ID NO: 2758397 - RNA, 19 nt, Artificial Sequence
  Description of Artificial Sequence: Synthetic oligonucleotide
uauauaauauugauugaac

SEQ ID NO: 2758398 - RNA, 19 nt, Artificial Sequence
  Description of Artificial Sequence: Synthetic oligonucleotide
uaaccuucagaaaauuggg

SEQ ID NO: 2758399 - RNA, 19 nt, Artificial Sequence
  Description of Artificial Sequence: Synthetic oligonucleotide
uuuuaaucuucuuauguga

SEQ ID NO: 2758400 - RNA, 19 nt, Artificial Sequence
  Description of Artificial Sequence: Synthetic oligonucleotide
uauacaacaucucuuuucu

SEQ ID NO: 2758401 - RNA, 19 nt, Artificial Sequence
  Description of Artificial Sequence: Synthetic oligonucleotide
uauaaaugcaguuuucuuc

SEQ ID NO: 2758402 - RNA, 19 nt, Artificial Sequence
  Description of Artificial Sequence: Synthetic oligonucleotide
aaggaucauacucuuuugg

SEQ ID NO: 2758403 - RNA, 19 nt, Artificial Sequence
  Description of Artificial Sequence: Synthetic oligonucleotide
ucuucuugcauguaagaag

SEQ ID NO: 2758404 - RNA, 19 nt, Artificial Sequence
  Description of Artificial Sequence: Synthetic oligonucleotide
ucauaaugcucuauaaaug

SEQ ID NO: 2758405 - RNA, 19 nt, Artificial Sequence
  Description of Artificial Sequence: Synthetic oligonucleotide
aagaguucucuuuucauca

SEQ ID NO: 2758406 - RNA, 19 nt, Artificial Sequence
  Description of Artificial Sequence: Synthetic oligonucleotide
aaaauugggguccuucuug

SEQ ID NO: 2758407 - RNA, 19 nt, Artificial Sequence
  Description of Artificial Sequence: Synthetic oligonucleotide
aaguuuucuaauucuuguc

SEQ ID NO: 2758408 - RNA, 19 nt, Artificial Sequence
  Description of Artificial Sequence: Synthetic oligonucleotide
auauaauauugauugaaca

SEQ ID NO: 2758409 - RNA, 19 nt, Artificial Sequence
  Description of Artificial Sequence: Synthetic oligonucleotide
uuuucaaaggaucacgaaa

SEQ ID NO: 2758410 - RNA, 19 nt, Artificial Sequence
  Description of Artificial Sequence: Synthetic oligonucleotide
uagaggaucugccacaugc

SEQ ID NO: 2758411 - RNA, 19 nt, Artificial Sequence
  Description of Artificial Sequence: Synthetic oligonucleotide
aaaagaaagcgacuguggu

SEQ ID NO: 2758412 - RNA, 19 nt, Artificial Sequence
  Description of Artificial Sequence: Synthetic oligonucleotide
uaauauugauugaacagcu

SEQ ID NO: 2758413 - RNA, 19 nt, Artificial Sequence
  Description of Artificial Sequence: Synthetic oligonucleotide
auaaaugcaguuuucuucu

SEQ ID NO: 2758414 - RNA, 19 nt, Artificial Sequence
  Description of Artificial Sequence: Synthetic oligonucleotide
uuauuuacaugccucaaaa

SEQ ID NO: 2758415 - RNA, 19 nt, Artificial Sequence
  Description of Artificial Sequence: Synthetic oligonucleotide
ucuuaugugaacaaacuuu

SEQ ID NO: 2758416 - RNA, 19 nt, Artificial Sequence
  Description of Artificial Sequence: Synthetic oligonucleotide
uuuucuucuugcauguaag

SEQ ID NO: 2758417 - RNA, 19 nt, Artificial Sequence
  Description of Artificial Sequence: Synthetic oligonucleotide
aucauaaugcucuauaaau

SEQ ID NO: 2758418 - RNA, 19 nt, Artificial Sequence
  Description of Artificial Sequence: Synthetic oligonucleotide
uuagcuaaagccuccauaa

SEQ ID NO: 2758419 - RNA, 19 nt, Artificial Sequence
  Description of Artificial Sequence: Synthetic oligonucleotide
uuucaaaggaucacgaaau

SEQ ID NO: 2758420 - RNA, 19 nt, Artificial Sequence
  Description of Artificial Sequence: Synthetic oligonucleotide
ucuucuuaugugaacaaac

SEQ ID NO: 2758421 - RNA, 19 nt, Artificial Sequence
  Description of Artificial Sequence: Synthetic oligonucleotide
gucgugaugauacaaauac

SEQ ID NO: 2758422 - RNA, 19 nt, Artificial Sequence
  Description of Artificial Sequence: Synthetic oligonucleotide
ugauugaacagcugcauca

SEQ ID NO: 2758423 - RNA, 19 nt, Artificial Sequence
  Description of Artificial Sequence: Synthetic oligonucleotide
auugggguccuucuugucc

SEQ ID NO: 2758424 - RNA, 19 nt, Artificial Sequence
  Description of Artificial Sequence: Synthetic oligonucleotide
aggaucacgaaaugguggc

SEQ ID NO: 2758425 - RNA, 19 nt, Artificial Sequence
  Description of Artificial Sequence: Synthetic oligonucleotide
uggucaccaacuaacagag

SEQ ID NO: 2758426 - RNA, 19 nt, Artificial Sequence
  Description of Artificial Sequence: Synthetic oligonucleotide
auacuuaucuaguuccuuc

SEQ ID NO: 2758427 - RNA, 19 nt, Artificial Sequence
  Description of Artificial Sequence: Synthetic oligonucleotide
ucaaaggaucacgaaaugg

SEQ ID NO: 2758428 - RNA, 19 nt, Artificial Sequence
  Description of Artificial Sequence: Synthetic oligonucleotide
cuccauaaaagaaagcgac

SEQ ID NO: 2758429 - RNA, 19 nt, Artificial Sequence
  Description of Artificial Sequence: Synthetic oligonucleotide
ucuugcauguaagaagucg

SEQ ID NO: 2758430 - RNA, 19 nt, Artificial Sequence
  Description of Artificial Sequence: Synthetic oligonucleotide
ugaugauacaaauacuuau

SEQ ID NO: 2758431 - RNA, 19 nt, Artificial Sequence
  Description of Artificial Sequence: Synthetic oligonucleotide
uuuuauacaacaucucuuu

SEQ ID NO: 2758432 - RNA, 19 nt, Artificial Sequence
  Description of Artificial Sequence: Synthetic oligonucleotide
auuguggucaccaacuaac

SEQ ID NO: 2758433 - RNA, 19 nt, Artificial Sequence
  Description of Artificial Sequence: Synthetic oligonucleotide
uucauuguggucaccaacu

SEQ ID NO: 2758434 - RNA, 19 nt, Artificial Sequence
  Description of Artificial Sequence: Synthetic oligonucleotide
ucuaguuccuucauuacau

SEQ ID NO: 2758435 - RNA, 19 nt, Artificial Sequence
  Description of Artificial Sequence: Synthetic oligonucleotide
ugugaagagugccagguac

SEQ ID NO: 2758436 - RNA, 19 nt, Artificial Sequence
  Description of Artificial Sequence: Synthetic oligonucleotide
uuaucuaguuccuucauua

SEQ ID NO: 2758437 - RNA, 19 nt, Artificial Sequence
  Description of Artificial Sequence: Synthetic oligonucleotide
uauugauugaacagcugca

SEQ ID NO: 2758438 - RNA, 19 nt, Artificial Sequence
  Description of Artificial Sequence: Synthetic oligonucleotide
uuucucuauauaauauuga

SEQ ID NO: 2758439 - RNA, 19 nt, Artificial Sequence
  Description of Artificial Sequence: Synthetic oligonucleotide
augauacaaauacuuaucu

SEQ ID NO: 2758440 - RNA, 19 nt, Artificial Sequence
  Description of Artificial Sequence: Synthetic oligonucleotide
uuuucuucuuauuuacaug

SEQ ID NO: 2758441 - RNA, 19 nt, Artificial Sequence
  Description of Artificial Sequence: Synthetic oligonucleotide
aaaaguuuucuaauucuug

SEQ ID NO: 2758442 - RNA, 19 nt, Artificial Sequence
  Description of Artificial Sequence: Synthetic oligonucleotide
uuuaaucuucuuaugugaa

SEQ ID NO: 2758443 - RNA, 19 nt, Artificial Sequence
  Description of Artificial Sequence: Synthetic oligonucleotide
uaauuuucucuauauaaua

SEQ ID NO: 2758444 - RNA, 19 nt, Artificial Sequence
  Description of Artificial Sequence: Synthetic oligonucleotide
uaaucuucuuaugugaaca

SEQ ID NO: 2758445 - RNA, 19 nt, Artificial Sequence
  Description of Artificial Sequence: Synthetic oligonucleotide
acaucucuuuucuucuugc

SEQ ID NO: 2758446 - RNA, 19 nt, Artificial Sequence
  Description of Artificial Sequence: Synthetic oligonucleotide
aaggaucacgaaauggugg

SEQ ID NO: 2758447 - RNA, 19 nt, Artificial Sequence
  Description of Artificial Sequence: Synthetic oligonucleotide
aaaggaucauacucuuuug

SEQ ID NO: 2758448 - RNA, 19 nt, Artificial Sequence
  Description of Artificial Sequence: Synthetic oligonucleotide
aaugcaguuuucuucuuau

SEQ ID NO: 2758449 - RNA, 19 nt, Artificial Sequence
  Description of Artificial Sequence: Synthetic oligonucleotide
caugauaaccuucagaaaa

SEQ ID NO: 2758450 - RNA, 19 nt, Artificial Sequence
  Description of Artificial Sequence: Synthetic oligonucleotide
auucuuuggagcucuugcg

SEQ ID NO: 2758451 - RNA, 19 nt, Artificial Sequence
  Description of Artificial Sequence: Synthetic oligonucleotide
uacauaauuuucucuauau

SEQ ID NO: 2758452 - RNA, 19 nt, Artificial Sequence
  Description of Artificial Sequence: Synthetic oligonucleotide
auaaaagaaagcgacugug

SEQ ID NO: 2758453 - RNA, 19 nt, Artificial Sequence
  Description of Artificial Sequence: Synthetic oligonucleotide
aagaagaguucucuuuuca

SEQ ID NO: 2758454 - RNA, 19 nt, Artificial Sequence
  Description of Artificial Sequence: Synthetic oligonucleotide
aaagccggaccucugucuc

SEQ ID NO: 2758455 - RNA, 19 nt, Artificial Sequence
  Description of Artificial Sequence: Synthetic oligonucleotide
uucucuauauaauauugau

SEQ ID NO: 2758456 - RNA, 19 nt, Artificial Sequence
  Description of Artificial Sequence: Synthetic oligonucleotide
ucuucuuauuuacaugccu

SEQ ID NO: 2758457 - RNA, 19 nt, Artificial Sequence
  Description of Artificial Sequence: Synthetic oligonucleotide
aagagugccagguaccgga

SEQ ID NO: 2758458 - RNA, 19 nt, Artificial Sequence
  Description of Artificial Sequence: Synthetic oligonucleotide
aauuuucucuauauaauau

SEQ ID NO: 2758459 - RNA, 19 nt, Artificial Sequence
  Description of Artificial Sequence: Synthetic oligonucleotide
uaacagagucccuagaaaa

SEQ ID NO: 2758460 - RNA, 19 nt, Artificial Sequence
  Description of Artificial Sequence: Synthetic oligonucleotide
acagagucccuagaaaagc

SEQ ID NO: 2758461 - RNA, 19 nt, Artificial Sequence
  Description of Artificial Sequence: Synthetic oligonucleotide
aauucuugucgucuccucu

SEQ ID NO: 2758462 - RNA, 19 nt, Artificial Sequence
  Description of Artificial Sequence: Synthetic oligonucleotide
ucuauaaaugcaguuuucu

SEQ ID NO: 2758463 - RNA, 19 nt, Artificial Sequence
  Description of Artificial Sequence: Synthetic oligonucleotide
aaugguggcaugauaaccu

SEQ ID NO: 2758464 - RNA, 19 nt, Artificial Sequence
  Description of Artificial Sequence: Synthetic oligonucleotide
ucuauauaauauugauuga

SEQ ID NO: 2758465 - RNA, 19 nt, Artificial Sequence
  Description of Artificial Sequence: Synthetic oligonucleotide
uuuucuguagaggaucugc

SEQ ID NO: 2758466 - RNA, 19 nt, Artificial Sequence
  Description of Artificial Sequence: Synthetic oligonucleotide
uaaagccuccauaaaagaa

SEQ ID NO: 2758467 - RNA, 19 nt, Artificial Sequence
  Description of Artificial Sequence: Synthetic oligonucleotide
uucauuacauaauuuucuc

SEQ ID NO: 2758468 - RNA, 19 nt, Artificial Sequence
  Description of Artificial Sequence: Synthetic oligonucleotide
ucuguagaggaucugccac

SEQ ID NO: 2758469 - RNA, 19 nt, Artificial Sequence
  Description of Artificial Sequence: Synthetic oligonucleotide
uuucuguagaggaucugcc

SEQ ID NO: 2758470 - RNA, 19 nt, Artificial Sequence
  Description of Artificial Sequence: Synthetic oligonucleotide
uucuuauuuacaugccuca

SEQ ID NO: 2758471 - RNA, 19 nt, Artificial Sequence
  Description of Artificial Sequence: Synthetic oligonucleotide
gaugauacaaauacuuauc

SEQ ID NO: 2758472 - RNA, 19 nt, Artificial Sequence
  Description of Artificial Sequence: Synthetic oligonucleotide
uucuuuggagcucuugcgc

SEQ ID NO: 2758473 - RNA, 19 nt, Artificial Sequence
  Description of Artificial Sequence: Synthetic oligonucleotide
ucuaauucuugucgucucc

SEQ ID NO: 2758474 - RNA, 19 nt, Artificial Sequence
  Description of Artificial Sequence: Synthetic oligonucleotide
ucauuacauaauuuucucu

SEQ ID NO: 2758475 - RNA, 19 nt, Artificial Sequence
  Description of Artificial Sequence: Synthetic oligonucleotide
aucugccacaugcucaacc

SEQ ID NO: 2758476 - RNA, 19 nt, Artificial Sequence
  Description of Artificial Sequence: Synthetic oligonucleotide
ucuuuuggaucauaaugcu

SEQ ID NO: 2758477 - RNA, 19 nt, Artificial Sequence
  Description of Artificial Sequence: Synthetic oligonucleotide
accuucagaaaauuggggu

SEQ ID NO: 2758478 - RNA, 19 nt, Artificial Sequence
  Description of Artificial Sequence: Synthetic oligonucleotide
uguggucaccaacuaacag

SEQ ID NO: 2758479 - RNA, 19 nt, Artificial Sequence
  Description of Artificial Sequence: Synthetic oligonucleotide
gucaccaacuaacagaguc

SEQ ID NO: 2758480 - RNA, 19 nt, Artificial Sequence
  Description of Artificial Sequence: Synthetic oligonucleotide
cuucuuauuuacaugccuc

SEQ ID NO: 2758481 - RNA, 19 nt, Artificial Sequence
  Description of Artificial Sequence: Synthetic oligonucleotide
uccuucauuacauaauuuu

SEQ ID NO: 2758482 - RNA, 19 nt, Artificial Sequence
  Description of Artificial Sequence: Synthetic oligonucleotide
uuucauuguggucaccaac

SEQ ID NO: 2758483 - RNA, 19 nt, Artificial Sequence
  Description of Artificial Sequence: Synthetic oligonucleotide
aaauugggguccuucuugu

SEQ ID NO: 2758484 - RNA, 19 nt, Artificial Sequence
  Description of Artificial Sequence: Synthetic oligonucleotide
ugcaguuuucuucuuauuu

SEQ ID NO: 2758485 - RNA, 19 nt, Artificial Sequence
  Description of Artificial Sequence: Synthetic oligonucleotide
aaagccuccauaaaagaaa

SEQ ID NO: 2758486 - RNA, 19 nt, Artificial Sequence
  Description of Artificial Sequence: Synthetic oligonucleotide
uuaaucuucuuaugugaac

SEQ ID NO: 2758487 - RNA, 19 nt, Artificial Sequence
  Description of Artificial Sequence: Synthetic oligonucleotide
ugaagaagaguucucuuuu

SEQ ID NO: 2758488 - RNA, 19 nt, Artificial Sequence
  Description of Artificial Sequence: Synthetic oligonucleotide
ucucuauauaauauugauu

SEQ ID NO: 2758489 - RNA, 19 nt, Artificial Sequence
  Description of Artificial Sequence: Synthetic oligonucleotide
aaagaaagcgacugugguu

SEQ ID NO: 2758490 - RNA, 19 nt, Artificial Sequence
  Description of Artificial Sequence: Synthetic oligonucleotide
ucugccacaugcucaaccc

SEQ ID NO: 2758491 - RNA, 19 nt, Artificial Sequence
  Description of Artificial Sequence: Synthetic oligonucleotide
ucuuuggagcucuugcgcc

SEQ ID NO: 2758492 - RNA, 19 nt, Artificial Sequence
  Description of Artificial Sequence: Synthetic oligonucleotide
uaucuucuuuagcuaaagc

SEQ ID NO: 2758493 - RNA, 19 nt, Artificial Sequence
  Description of Artificial Sequence: Synthetic oligonucleotide
uccauaaaagaaagcgacu

SEQ ID NO: 2758494 - RNA, 19 nt, Artificial Sequence
  Description of Artificial Sequence: Synthetic oligonucleotide
acaacaucucuuuucuucu

SEQ ID NO: 2758495 - RNA, 19 nt, Artificial Sequence
  Description of Artificial Sequence: Synthetic oligonucleotide
aagucgugaugauacaaau

SEQ ID NO: 2758496 - RNA, 19 nt, Artificial Sequence
  Description of Artificial Sequence: Synthetic oligonucleotide
agcgacugugguuccagcc

SEQ ID NO: 2758497 - RNA, 19 nt, Artificial Sequence
  Description of Artificial Sequence: Synthetic oligonucleotide
aaaggaucacgaaauggug

SEQ ID NO: 2758498 - RNA, 19 nt, Artificial Sequence
  Description of Artificial Sequence: Synthetic oligonucleotide
auuuucucuauauaauauu

SEQ ID NO: 2758499 - RNA, 19 nt, Artificial Sequence
  Description of Artificial Sequence: Synthetic oligonucleotide
aaccuucagaaaauugggg

SEQ ID NO: 2758500 - RNA, 19 nt, Artificial Sequence
  Description of Artificial Sequence: Synthetic oligonucleotide
uucaaaggaucacgaaaug

SEQ ID NO: 2758501 - RNA, 19 nt, Artificial Sequence
  Description of Artificial Sequence: Synthetic oligonucleotide
cuucagaaaauuggggucc

SEQ ID NO: 2758502 - RNA, 19 nt, Artificial Sequence
  Description of Artificial Sequence: Synthetic oligonucleotide
aaaagccggaccucugucu

SEQ ID NO: 2758503 - RNA, 19 nt, Artificial Sequence
  Description of Artificial Sequence: Synthetic oligonucleotide
agaaaauugggguccuucu

SEQ ID NO: 2758504 - RNA, 19 nt, Artificial Sequence
  Description of Artificial Sequence: Synthetic oligonucleotide
uacuuaucuaguuccuuca

SEQ ID NO: 2758505 - RNA, 19 nt, Artificial Sequence
  Description of Artificial Sequence: Synthetic oligonucleotide
ugaacagcugcaucaauau

SEQ ID NO: 2758506 - RNA, 19 nt, Artificial Sequence
  Description of Artificial Sequence: Synthetic oligonucleotide
ucaauaucuucuuuagcua

SEQ ID NO: 2758507 - RNA, 19 nt, Artificial Sequence
  Description of Artificial Sequence: Synthetic oligonucleotide
cauuacauaauuuucucua

SEQ ID NO: 2758508 - RNA, 19 nt, Artificial Sequence
  Description of Artificial Sequence: Synthetic oligonucleotide
uugaacagcugcaucaaua

SEQ ID NO: 2758509 - RNA, 19 nt, Artificial Sequence
  Description of Artificial Sequence: Synthetic oligonucleotide
uaccggaucaucuugguuu

SEQ ID NO: 2758510 - RNA, 19 nt, Artificial Sequence
  Description of Artificial Sequence: Synthetic oligonucleotide
uucuucuuauuuacaugcc

SEQ ID NO: 2758511 - RNA, 19 nt, Artificial Sequence
  Description of Artificial Sequence: Synthetic oligonucleotide
ugugguuccagccauucuu

SEQ ID NO: 2758512 - RNA, 19 nt, Artificial Sequence
  Description of Artificial Sequence: Synthetic oligonucleotide
auguaagaagucgugauga

SEQ ID NO: 2758513 - RNA, 19 nt, Artificial Sequence
  Description of Artificial Sequence: Synthetic oligonucleotide
uucuuaugugaacaaacuu

SEQ ID NO: 2758514 - RNA, 19 nt, Artificial Sequence
  Description of Artificial Sequence: Synthetic oligonucleotide
uuucuaauucuugucgucu

SEQ ID NO: 2758515 - RNA, 19 nt, Artificial Sequence
  Description of Artificial Sequence: Synthetic oligonucleotide
ugaagagugccagguaccg

SEQ ID NO: 2758516 - RNA, 19 nt, Artificial Sequence
  Description of Artificial Sequence: Synthetic oligonucleotide
gaucauaaugcucuauaaa

SEQ ID NO: 2758517 - RNA, 19 nt, Artificial Sequence
  Description of Artificial Sequence: Synthetic oligonucleotide
uuacauaauuuucucuaua

SEQ ID NO: 2758518 - RNA, 19 nt, Artificial Sequence
  Description of Artificial Sequence: Synthetic oligonucleotide
gccuccauaaaagaaagcg

SEQ ID NO: 2758519 - RNA, 19 nt, Artificial Sequence
  Description of Artificial Sequence: Synthetic oligonucleotide
caguuuucuucuuauuuac

SEQ ID NO: 2758520 - RNA, 19 nt, Artificial Sequence
  Description of Artificial Sequence: Synthetic oligonucleotide
uucuuuagcuaaagccucc

SEQ ID NO: 2758521 - RNA, 19 nt, Artificial Sequence
  Description of Artificial Sequence: Synthetic oligonucleotide
uggaucauaaugcucuaua

SEQ ID NO: 2758522 - RNA, 19 nt, Artificial Sequence
  Description of Artificial Sequence: Synthetic oligonucleotide
cuucuuuagcuaaagccuc

SEQ ID NO: 2758523 - RNA, 19 nt, Artificial Sequence
  Description of Artificial Sequence: Synthetic oligonucleotide
ggcaugauaaccuucagaa

SEQ ID NO: 2758524 - RNA, 19 nt, Artificial Sequence
  Description of Artificial Sequence: Synthetic oligonucleotide
aggaucauacucuuuugga

SEQ ID NO: 2758525 - RNA, 19 nt, Artificial Sequence
  Description of Artificial Sequence: Synthetic oligonucleotide
acuaacagagucccuagaa

SEQ ID NO: 2758526 - RNA, 19 nt, Artificial Sequence
  Description of Artificial Sequence: Synthetic oligonucleotide
agcuaaagccuccauaaaa

SEQ ID NO: 2758527 - RNA, 19 nt, Artificial Sequence
  Description of Artificial Sequence: Synthetic oligonucleotide
auaauuuucucuauauaau

SEQ ID NO: 2758528 - RNA, 19 nt, Artificial Sequence
  Description of Artificial Sequence: Synthetic oligonucleotide
uuuucuaauucuugucguc

SEQ ID NO: 2758529 - RNA, 19 nt, Artificial Sequence
  Description of Artificial Sequence: Synthetic oligonucleotide
aagccuccauaaaagaaag

SEQ ID NO: 2758530 - RNA, 19 nt, Artificial Sequence
  Description of Artificial Sequence: Synthetic oligonucleotide
aucuaguuccuucauuaca

SEQ ID NO: 2758531 - RNA, 19 nt, Artificial Sequence
  Description of Artificial Sequence: Synthetic oligonucleotide
ugauacaaauacuuaucua

SEQ ID NO: 2758532 - RNA, 19 nt, Artificial Sequence
  Description of Artificial Sequence: Synthetic oligonucleotide
aaugcucuauaaaugcagu

SEQ ID NO: 2758533 - RNA, 19 nt, Artificial Sequence
  Description of Artificial Sequence: Synthetic oligonucleotide
uacaaauacuuaucuaguu

SEQ ID NO: 2758534 - RNA, 19 nt, Artificial Sequence
  Description of Artificial Sequence: Synthetic oligonucleotide
gaaaugguggcaugauaac

SEQ ID NO: 2758535 - RNA, 19 nt, Artificial Sequence
  Description of Artificial Sequence: Synthetic oligonucleotide
aauauugauugaacagcug

SEQ ID NO: 2758536 - RNA, 19 nt, Artificial Sequence
  Description of Artificial Sequence: Synthetic oligonucleotide
aauugggguccuucuuguc

SEQ ID NO: 2758537 - RNA, 19 nt, Artificial Sequence
  Description of Artificial Sequence: Synthetic oligonucleotide
uuucuucuugcauguaaga

SEQ ID NO: 2758538 - RNA, 19 nt, Artificial Sequence
  Description of Artificial Sequence: Synthetic oligonucleotide
cauguaagaagucgugaug

SEQ ID NO: 2758539 - RNA, 19 nt, Artificial Sequence
  Description of Artificial Sequence: Synthetic oligonucleotide
uugcauguaagaagucgug

SEQ ID NO: 2758540 - RNA, 19 nt, Artificial Sequence
  Description of Artificial Sequence: Synthetic oligonucleotide
cuauauaauauugauugaa

SEQ ID NO: 2758541 - RNA, 19 nt, Artificial Sequence
  Description of Artificial Sequence: Synthetic oligonucleotide
uuuauacaacaucucuuuu

SEQ ID NO: 2758542 - RNA, 19 nt, Artificial Sequence
  Description of Artificial Sequence: Synthetic oligonucleotide
aaaugcaguuuucuucuua

SEQ ID NO: 2758543 - RNA, 19 nt, Artificial Sequence
  Description of Artificial Sequence: Synthetic oligonucleotide
uugauugaacagcugcauc

SEQ ID NO: 2758544 - RNA, 19 nt, Artificial Sequence
  Description of Artificial Sequence: Synthetic oligonucleotide
aaauacuuaucuaguuccu

SEQ ID NO: 2758545 - RNA, 19 nt, Artificial Sequence
  Description of Artificial Sequence: Synthetic oligonucleotide
agugccagguaccggauca

SEQ ID NO: 2758546 - RNA, 19 nt, Artificial Sequence
  Description of Artificial Sequence: Synthetic oligonucleotide
aagccggaccucugucucc

SEQ ID NO: 2758547 - RNA, 19 nt, Artificial Sequence
  Description of Artificial Sequence: Synthetic oligonucleotide
uucuguagaggaucugcca

SEQ ID NO: 2758548 - RNA, 19 nt, Artificial Sequence
  Description of Artificial Sequence: Synthetic oligonucleotide
cagagucccuagaaaagcc

SEQ ID NO: 2758549 - RNA, 19 nt, Artificial Sequence
  Description of Artificial Sequence: Synthetic oligonucleotide
uaguuccuucauuacauaa

SEQ ID NO: 2758550 - RNA, 19 nt, Artificial Sequence
  Description of Artificial Sequence: Synthetic oligonucleotide
cuucauuacauaauuuucu

SEQ ID NO: 2758551 - RNA, 19 nt, Artificial Sequence
  Description of Artificial Sequence: Synthetic oligonucleotide
ucauccuugucauauuguu

SEQ ID NO: 2758552 - RNA, 19 nt, Artificial Sequence
  Description of Artificial Sequence: Synthetic oligonucleotide
cuuuuggaucauaaugcuc

SEQ ID NO: 2758553 - RNA, 19 nt, Artificial Sequence
  Description of Artificial Sequence: Synthetic oligonucleotide
auacaaauacuuaucuagu

SEQ ID NO: 2758554 - RNA, 19 nt, Artificial Sequence
  Description of Artificial Sequence: Synthetic oligonucleotide
aacuaacagagucccuaga

SEQ ID NO: 2758555 - RNA, 19 nt, Artificial Sequence
  Description of Artificial Sequence: Synthetic oligonucleotide
uucucuuuucaucauccuu

SEQ ID NO: 2758556 - RNA, 19 nt, Artificial Sequence
  Description of Artificial Sequence: Synthetic oligonucleotide
aagcgacugugguuccagc

SEQ ID NO: 2758557 - RNA, 19 nt, Artificial Sequence
  Description of Artificial Sequence: Synthetic oligonucleotide
aaagcgacugugguuccag

SEQ ID NO: 2758558 - RNA, 19 nt, Artificial Sequence
  Description of Artificial Sequence: Synthetic oligonucleotide
gagucccuagaaaagccgg

SEQ ID NO: 2758559 - RNA, 19 nt, Artificial Sequence
  Description of Artificial Sequence: Synthetic oligonucleotide
agaaagcgacugugguucc

SEQ ID NO: 2758560 - RNA, 19 nt, Artificial Sequence
  Description of Artificial Sequence: Synthetic oligonucleotide
agcugcaucaauaucuucu

SEQ ID NO: 2758561 - RNA, 19 nt, Artificial Sequence
  Description of Artificial Sequence: Synthetic oligonucleotide
ucgugaugauacaaauacu

SEQ ID NO: 2758562 - RNA, 19 nt, Artificial Sequence
  Description of Artificial Sequence: Synthetic oligonucleotide
acauaauuuucucuauaua

SEQ ID NO: 2758563 - RNA, 19 nt, Artificial Sequence
  Description of Artificial Sequence: Synthetic oligonucleotide
cauccuugucauauuguug

SEQ ID NO: 2758564 - RNA, 19 nt, Artificial Sequence
  Description of Artificial Sequence: Synthetic oligonucleotide
ucccuagaaaagccggacc

SEQ ID NO: 2758565 - RNA, 19 nt, Artificial Sequence
  Description of Artificial Sequence: Synthetic oligonucleotide
aagaagucgugaugauaca

SEQ ID NO: 2758566 - RNA, 19 nt, Artificial Sequence
  Description of Artificial Sequence: Synthetic oligonucleotide
cuugcgccugugaagagug

SEQ ID NO: 2758567 - RNA, 19 nt, Artificial Sequence
  Description of Artificial Sequence: Synthetic oligonucleotide
accggaucaucuugguuuc

SEQ ID NO: 2758568 - RNA, 19 nt, Artificial Sequence
  Description of Artificial Sequence: Synthetic oligonucleotide
uuguggucaccaacuaaca

SEQ ID NO: 2758569 - RNA, 19 nt, Artificial Sequence
  Description of Artificial Sequence: Synthetic oligonucleotide
ugcauguaagaagucguga

SEQ ID NO: 2758570 - RNA, 19 nt, Artificial Sequence
  Description of Artificial Sequence: Synthetic oligonucleotide
uucuucuugcauguaagaa

SEQ ID NO: 2758571 - RNA, 19 nt, Artificial Sequence
  Description of Artificial Sequence: Synthetic oligonucleotide
agaagaguucucuuuucau

SEQ ID NO: 2758572 - RNA, 19 nt, Artificial Sequence
  Description of Artificial Sequence: Synthetic oligonucleotide
aauacuuaucuaguuccuu

SEQ ID NO: 2758573 - RNA, 19 nt, Artificial Sequence
  Description of Artificial Sequence: Synthetic oligonucleotide
caacuaacagagucccuag

SEQ ID NO: 2758574 - RNA, 19 nt, Artificial Sequence
  Description of Artificial Sequence: Synthetic oligonucleotide
uucuaauucuugucgucuc

SEQ ID NO: 2758575 - RNA, 19 nt, Artificial Sequence
  Description of Artificial Sequence: Synthetic oligonucleotide
agaaaagccggaccucugu

SEQ ID NO: 2758576 - RNA, 19 nt, Artificial Sequence
  Description of Artificial Sequence: Synthetic oligonucleotide
caaaggaucacgaaauggu

SEQ ID NO: 2758577 - RNA, 19 nt, Artificial Sequence
  Description of Artificial Sequence: Synthetic oligonucleotide
uccuucuuguccauauaaa

SEQ ID NO: 2758578 - RNA, 19 nt, Artificial Sequence
  Description of Artificial Sequence: Synthetic oligonucleotide
ugcucuauaaaugcaguuu

SEQ ID NO: 2758579 - RNA, 19 nt, Artificial Sequence
  Description of Artificial Sequence: Synthetic oligonucleotide
aauaucuucuuuagcuaaa

SEQ ID NO: 2758580 - RNA, 19 nt, Artificial Sequence
  Description of Artificial Sequence: Synthetic oligonucleotide
uugggguccuucuugucca

SEQ ID NO: 2758581 - RNA, 19 nt, Artificial Sequence
  Description of Artificial Sequence: Synthetic oligonucleotide
caauaucuucuuuagcuaa

SEQ ID NO: 2758582 - RNA, 19 nt, Artificial Sequence
  Description of Artificial Sequence: Synthetic oligonucleotide
cuucuugcauguaagaagu

SEQ ID NO: 2758583 - RNA, 19 nt, Artificial Sequence
  Description of Artificial Sequence: Synthetic oligonucleotide
agucucacacugaagaaga

SEQ ID NO: 2758584 - RNA, 19 nt, Artificial Sequence
  Description of Artificial Sequence: Synthetic oligonucleotide
cucuauaaaugcaguuuuc

SEQ ID NO: 2758585 - RNA, 19 nt, Artificial Sequence
  Description of Artificial Sequence: Synthetic oligonucleotide
ucucacacugaagaagagu

SEQ ID NO: 2758586 - RNA, 19 nt, Artificial Sequence
  Description of Artificial Sequence: Synthetic oligonucleotide
caccaacuaacagaguccc

SEQ ID NO: 2758587 - RNA, 19 nt, Artificial Sequence
  Description of Artificial Sequence: Synthetic oligonucleotide
agcucuugcgccugugaag

SEQ ID NO: 2758588 - RNA, 19 nt, Artificial Sequence
  Description of Artificial Sequence: Synthetic oligonucleotide
agagucccuagaaaagccg

SEQ ID NO: 2758589 - RNA, 19 nt, Artificial Sequence
  Description of Artificial Sequence: Synthetic oligonucleotide
uccagccauucuuuggagc

SEQ ID NO: 2758590 - RNA, 19 nt, Artificial Sequence
  Description of Artificial Sequence: Synthetic oligonucleotide
guuuucuucuuauuuacau

SEQ ID NO: 2758591 - RNA, 19 nt, Artificial Sequence
  Description of Artificial Sequence: Synthetic oligonucleotide
uuuucauuguggucaccaa

SEQ ID NO: 2758592 - RNA, 19 nt, Artificial Sequence
  Description of Artificial Sequence: Synthetic oligonucleotide
auaaugcucuauaaaugca

SEQ ID NO: 2758593 - RNA, 19 nt, Artificial Sequence
  Description of Artificial Sequence: Synthetic oligonucleotide
ucacacugaagaagaguuc

SEQ ID NO: 2758594 - RNA, 19 nt, Artificial Sequence
  Description of Artificial Sequence: Synthetic oligonucleotide
uguaagaagucgugaugau

SEQ ID NO: 2758595 - RNA, 19 nt, Artificial Sequence
  Description of Artificial Sequence: Synthetic oligonucleotide
uagaaaagccggaccucug

SEQ ID NO: 2758596 - RNA, 19 nt, Artificial Sequence
  Description of Artificial Sequence: Synthetic oligonucleotide
ccuucauuacauaauuuuc

SEQ ID NO: 2758597 - RNA, 19 nt, Artificial Sequence
  Description of Artificial Sequence: Synthetic oligonucleotide
cagucucacacugaagaag

SEQ ID NO: 2758598 - RNA, 19 nt, Artificial Sequence
  Description of Artificial Sequence: Synthetic oligonucleotide
ccauaaaagaaagcgacug

SEQ ID NO: 2758599 - RNA, 19 nt, Artificial Sequence
  Description of Artificial Sequence: Synthetic oligonucleotide
auugauugaacagcugcau

SEQ ID NO: 2758600 - RNA, 19 nt, Artificial Sequence
  Description of Artificial Sequence: Synthetic oligonucleotide
ucuuauuuacaugccucaa

SEQ ID NO: 2758601 - RNA, 19 nt, Artificial Sequence
  Description of Artificial Sequence: Synthetic oligonucleotide
cuuauuuacaugccucaaa

SEQ ID NO: 2758602 - RNA, 19 nt, Artificial Sequence
  Description of Artificial Sequence: Synthetic oligonucleotide
gguuccagccauucuuugg

SEQ ID NO: 2758603 - RNA, 19 nt, Artificial Sequence
  Description of Artificial Sequence: Synthetic oligonucleotide
gaaaagccggaccucuguc

SEQ ID NO: 2758604 - RNA, 19 nt, Artificial Sequence
  Description of Artificial Sequence: Synthetic oligonucleotide
aucacgaaaugguggcaug

SEQ ID NO: 2758605 - RNA, 19 nt, Artificial Sequence
  Description of Artificial Sequence: Synthetic oligonucleotide
acugaagaagaguucucuu

SEQ ID NO: 2758606 - RNA, 19 nt, Artificial Sequence
  Description of Artificial Sequence: Synthetic oligonucleotide
cuuuucuucuugcauguaa

SEQ ID NO: 2758607 - RNA, 19 nt, Artificial Sequence
  Description of Artificial Sequence: Synthetic oligonucleotide
ucuuuagcuaaagccucca

SEQ ID NO: 2758608 - RNA, 19 nt, Artificial Sequence
  Description of Artificial Sequence: Synthetic oligonucleotide
ugccacaugcucaacccau

SEQ ID NO: 2758609 - RNA, 19 nt, Artificial Sequence
  Description of Artificial Sequence: Synthetic oligonucleotide
ucacgaaaugguggcauga

SEQ ID NO: 2758610 - RNA, 19 nt, Artificial Sequence
  Description of Artificial Sequence: Synthetic oligonucleotide
cuuaugugaacaaacuuuu

SEQ ID NO: 2758611 - RNA, 19 nt, Artificial Sequence
  Description of Artificial Sequence: Synthetic oligonucleotide
guuuucuaauucuugucgu

SEQ ID NO: 2758612 - RNA, 19 nt, Artificial Sequence
  Description of Artificial Sequence: Synthetic oligonucleotide
acugugguuccagccauuc

SEQ ID NO: 2758613 - RNA, 19 nt, Artificial Sequence
  Description of Artificial Sequence: Synthetic oligonucleotide
uaauucuugucgucuccuc

SEQ ID NO: 2758614 - RNA, 19 nt, Artificial Sequence
  Description of Artificial Sequence: Synthetic oligonucleotide
uuccuucauuacauaauuu

SEQ ID NO: 2758615 - RNA, 19 nt, Artificial Sequence
  Description of Artificial Sequence: Synthetic oligonucleotide
gaggaucugccacaugcuc

SEQ ID NO: 2758616 - RNA, 19 nt, Artificial Sequence
  Description of Artificial Sequence: Synthetic oligonucleotide
ucauuguggucaccaacua

SEQ ID NO: 2758617 - RNA, 19 nt, Artificial Sequence
  Description of Artificial Sequence: Synthetic oligonucleotide
uuccagccauucuuuggag

SEQ ID NO: 2758618 - RNA, 19 nt, Artificial Sequence
  Description of Artificial Sequence: Synthetic oligonucleotide
cuucuuaugugaacaaacu

SEQ ID NO: 2758619 - RNA, 19 nt, Artificial Sequence
  Description of Artificial Sequence: Synthetic oligonucleotide
acuuaucuaguuccuucau

SEQ ID NO: 2758620 - RNA, 19 nt, Artificial Sequence
  Description of Artificial Sequence: Synthetic oligonucleotide
gaagucgugaugauacaaa

SEQ ID NO: 2758621 - RNA, 19 nt, Artificial Sequence
  Description of Artificial Sequence: Synthetic oligonucleotide
cuugcauguaagaagucgu

SEQ ID NO: 2758622 - RNA, 19 nt, Artificial Sequence
  Description of Artificial Sequence: Synthetic oligonucleotide
auucuugucgucuccucuu

SEQ ID NO: 2758623 - RNA, 19 nt, Artificial Sequence
  Description of Artificial Sequence: Synthetic oligonucleotide
gaagagugccagguaccgg

SEQ ID NO: 2758624 - RNA, 19 nt, Artificial Sequence
  Description of Artificial Sequence: Synthetic oligonucleotide
cuaacagagucccuagaaa

SEQ ID NO: 2758625 - RNA, 19 nt, Artificial Sequence
  Description of Artificial Sequence: Synthetic oligonucleotide
aguuccuucauuacauaau

SEQ ID NO: 2758626 - RNA, 19 nt, Artificial Sequence
  Description of Artificial Sequence: Synthetic oligonucleotide
uuuggaucauaaugcucua

SEQ ID NO: 2758627 - RNA, 19 nt, Artificial Sequence
  Description of Artificial Sequence: Synthetic oligonucleotide
augauaaccuucagaaaau

SEQ ID NO: 2758628 - RNA, 19 nt, Artificial Sequence
  Description of Artificial Sequence: Synthetic oligonucleotide
ugcgccugugaagagugcc

SEQ ID NO: 2758629 - RNA, 19 nt, Artificial Sequence
  Description of Artificial Sequence: Synthetic oligonucleotide
agaagucgugaugauacaa

SEQ ID NO: 2758630 - RNA, 19 nt, Artificial Sequence
  Description of Artificial Sequence: Synthetic oligonucleotide
uagcuaaagccuccauaaa

SEQ ID NO: 2758631 - RNA, 19 nt, Artificial Sequence
  Description of Artificial Sequence: Synthetic oligonucleotide
guccuucuuguccauauaa

SEQ ID NO: 2758632 - RNA, 19 nt, Artificial Sequence
  Description of Artificial Sequence: Synthetic oligonucleotide
ccuucagaaaauugggguc

SEQ ID NO: 2758633 - RNA, 19 nt, Artificial Sequence
  Description of Artificial Sequence: Synthetic oligonucleotide
cucacacugaagaagaguu

SEQ ID NO: 2758634 - RNA, 19 nt, Artificial Sequence
  Description of Artificial Sequence: Synthetic oligonucleotide
aguuuucuucuuauuuaca

SEQ ID NO: 2758635 - RNA, 19 nt, Artificial Sequence
  Description of Artificial Sequence: Synthetic oligonucleotide
gugaagagugccagguacc

SEQ ID NO: 2758636 - RNA, 19 nt, Artificial Sequence
  Description of Artificial Sequence: Synthetic oligonucleotide
auugaacagcugcaucaau

SEQ ID NO: 2758637 - RNA, 19 nt, Artificial Sequence
  Description of Artificial Sequence: Synthetic oligonucleotide
uccuugucauauuguugcu

SEQ ID NO: 2758638 - RNA, 19 nt, Artificial Sequence
  Description of Artificial Sequence: Synthetic oligonucleotide
uucagaaaauugggguccu

SEQ ID NO: 2758639 - RNA, 19 nt, Artificial Sequence
  Description of Artificial Sequence: Synthetic oligonucleotide
cagguaccggaucaucuug

SEQ ID NO: 2758640 - RNA, 19 nt, Artificial Sequence
  Description of Artificial Sequence: Synthetic oligonucleotide
ggaucauaaugcucuauaa

SEQ ID NO: 2758641 - RNA, 19 nt, Artificial Sequence
  Description of Artificial Sequence: Synthetic oligonucleotide
agguaccggaucaucuugg

SEQ ID NO: 2758642 - RNA, 19 nt, Artificial Sequence
  Description of Artificial Sequence: Synthetic oligonucleotide
agaguucucuuuucaucau

SEQ ID NO: 2758643 - RNA, 19 nt, Artificial Sequence
  Description of Artificial Sequence: Synthetic oligonucleotide
ucuugcgccugugaagagu

SEQ ID NO: 2758644 - RNA, 19 nt, Artificial Sequence
  Description of Artificial Sequence: Synthetic oligonucleotide
gauugaacagcugcaucaa

SEQ ID NO: 2758645 - RNA, 19 nt, Artificial Sequence
  Description of Artificial Sequence: Synthetic oligonucleotide
ugguuccagccauucuuug

SEQ ID NO: 2758646 - RNA, 19 nt, Artificial Sequence
  Description of Artificial Sequence: Synthetic oligonucleotide
uucuugcauguaagaaguc

SEQ ID NO: 2758647 - RNA, 19 nt, Artificial Sequence
  Description of Artificial Sequence: Synthetic oligonucleotide
agccuccauaaaagaaagc

SEQ ID NO: 2758648 - RNA, 19 nt, Artificial Sequence
  Description of Artificial Sequence: Synthetic oligonucleotide
cauaaaagaaagcgacugu

SEQ ID NO: 2758649 - RNA, 19 nt, Artificial Sequence
  Description of Artificial Sequence: Synthetic oligonucleotide
acacugaagaagaguucuc

SEQ ID NO: 2758650 - RNA, 19 nt, Artificial Sequence
  Description of Artificial Sequence: Synthetic oligonucleotide
guuccuucauuacauaauu

SEQ ID NO: 2758651 - RNA, 19 nt, Artificial Sequence
  Description of Artificial Sequence: Synthetic oligonucleotide
uuuggagcucuugcgccug

SEQ ID NO: 2758652 - RNA, 19 nt, Artificial Sequence
  Description of Artificial Sequence: Synthetic oligonucleotide
ugguggcaugauaaccuuc

SEQ ID NO: 2758653 - RNA, 19 nt, Artificial Sequence
  Description of Artificial Sequence: Synthetic oligonucleotide
aggaucugccacaugcuca

SEQ ID NO: 2758654 - RNA, 19 nt, Artificial Sequence
  Description of Artificial Sequence: Synthetic oligonucleotide
aucuucuuaugugaacaaa

SEQ ID NO: 2758655 - RNA, 19 nt, Artificial Sequence
  Description of Artificial Sequence: Synthetic oligonucleotide
cuugucauauuguugcuuu

SEQ ID NO: 2758656 - RNA, 19 nt, Artificial Sequence
  Description of Artificial Sequence: Synthetic oligonucleotide
acgaaaugguggcaugaua

SEQ ID NO: 2758657 - RNA, 19 nt, Artificial Sequence
  Description of Artificial Sequence: Synthetic oligonucleotide
gcaguuuucuucuuauuua

SEQ ID NO: 2758658 - RNA, 19 nt, Artificial Sequence
  Description of Artificial Sequence: Synthetic oligonucleotide
gugaugauacaaauacuua

SEQ ID NO: 2758659 - RNA, 19 nt, Artificial Sequence
  Description of Artificial Sequence: Synthetic oligonucleotide
uucuugucgucuccucuuu

SEQ ID NO: 2758660 - RNA, 19 nt, Artificial Sequence
  Description of Artificial Sequence: Synthetic oligonucleotide
aucauccuugucauauugu

SEQ ID NO: 2758661 - RNA, 19 nt, Artificial Sequence
  Description of Artificial Sequence: Synthetic oligonucleotide
caucucuuuucuucuugca

SEQ ID NO: 2758662 - RNA, 19 nt, Artificial Sequence
  Description of Artificial Sequence: Synthetic oligonucleotide
guggcaugauaaccuucag

SEQ ID NO: 2758663 - RNA, 19 nt, Artificial Sequence
  Description of Artificial Sequence: Synthetic oligonucleotide
uaaaugcaguuuucuucuu

SEQ ID NO: 2758664 - RNA, 19 nt, Artificial Sequence
  Description of Artificial Sequence: Synthetic oligonucleotide
gguggcaugauaaccuuca

SEQ ID NO: 2758665 - RNA, 19 nt, Artificial Sequence
  Description of Artificial Sequence: Synthetic oligonucleotide
uugucauauuguugcuuuu

SEQ ID NO: 2758666 - RNA, 19 nt, Artificial Sequence
  Description of Artificial Sequence: Synthetic oligonucleotide
gaaaauugggguccuucuu

SEQ ID NO: 2758667 - RNA, 19 nt, Artificial Sequence
  Description of Artificial Sequence: Synthetic oligonucleotide
cacacugaagaagaguucu

SEQ ID NO: 2758668 - RNA, 19 nt, Artificial Sequence
  Description of Artificial Sequence: Synthetic oligonucleotide
agccauucuuuggagcucu

SEQ ID NO: 2758669 - RNA, 19 nt, Artificial Sequence
  Description of Artificial Sequence: Synthetic oligonucleotide
guaagaagucgugaugaua

SEQ ID NO: 2758670 - RNA, 19 nt, Artificial Sequence
  Description of Artificial Sequence: Synthetic oligonucleotide
uuggaucauaaugcucuau

SEQ ID NO: 2758671 - RNA, 19 nt, Artificial Sequence
  Description of Artificial Sequence: Synthetic oligonucleotide
gagcucuugcgccugugaa

SEQ ID NO: 2758672 - RNA, 19 nt, Artificial Sequence
  Description of Artificial Sequence: Synthetic oligonucleotide
augguggcaugauaaccuu

SEQ ID NO: 2758673 - RNA, 19 nt, Artificial Sequence
  Description of Artificial Sequence: Synthetic oligonucleotide
ccuccauaaaagaaagcga

SEQ ID NO: 2758674 - RNA, 19 nt, Artificial Sequence
  Description of Artificial Sequence: Synthetic oligonucleotide
auacaacaucucuuuucuu

SEQ ID NO: 2758675 - RNA, 19 nt, Artificial Sequence
  Description of Artificial Sequence: Synthetic oligonucleotide
cgaaaugguggcaugauaa

SEQ ID NO: 2758676 - RNA, 19 nt, Artificial Sequence
  Description of Artificial Sequence: Synthetic oligonucleotide
cauuguggucaccaacuaa

SEQ ID NO: 2758677 - RNA, 19 nt, Artificial Sequence
  Description of Artificial Sequence: Synthetic oligonucleotide
ucuugucgucuccucuuuu

SEQ ID NO: 2758678 - RNA, 19 nt, Artificial Sequence
  Description of Artificial Sequence: Synthetic oligonucleotide
ccuucuuguccauauaaaa

SEQ ID NO: 2758679 - RNA, 19 nt, Artificial Sequence
  Description of Artificial Sequence: Synthetic oligonucleotide
agaggaucugccacaugcu

SEQ ID NO: 2758680 - RNA, 19 nt, Artificial Sequence
  Description of Artificial Sequence: Synthetic oligonucleotide
gucccuagaaaagccggac

SEQ ID NO: 2758681 - RNA, 19 nt, Artificial Sequence
  Description of Artificial Sequence: Synthetic oligonucleotide
cugaagaagaguucucuuu

SEQ ID NO: 2758682 - RNA, 19 nt, Artificial Sequence
  Description of Artificial Sequence: Synthetic oligonucleotide
ggaucauacucuuuuggau

SEQ ID NO: 2758683 - RNA, 19 nt, Artificial Sequence
  Description of Artificial Sequence: Synthetic oligonucleotide
gucucacacugaagaagag

SEQ ID NO: 2758684 - RNA, 19 nt, Artificial Sequence
  Description of Artificial Sequence: Synthetic oligonucleotide
agucgugaugauacaaaua

SEQ ID NO: 2758685 - RNA, 19 nt, Artificial Sequence
  Description of Artificial Sequence: Synthetic oligonucleotide
gaucacgaaaugguggcau

SEQ ID NO: 2758686 - RNA, 19 nt, Artificial Sequence
  Description of Artificial Sequence: Synthetic oligonucleotide
augcaguuuucuucuuauu

SEQ ID NO: 2758687 - RNA, 19 nt, Artificial Sequence
  Description of Artificial Sequence: Synthetic oligonucleotide
agucccuagaaaagccgga

SEQ ID NO: 2758688 - RNA, 19 nt, Artificial Sequence
  Description of Artificial Sequence: Synthetic oligonucleotide
cuagaaaagccggaccucu

SEQ ID NO: 2758689 - RNA, 19 nt, Artificial Sequence
  Description of Artificial Sequence: Synthetic oligonucleotide
ggaucugccacaugcucaa

SEQ ID NO: 2758690 - RNA, 19 nt, Artificial Sequence
  Description of Artificial Sequence: Synthetic oligonucleotide
uugcgccugugaagagugc

SEQ ID NO: 2758691 - RNA, 19 nt, Artificial Sequence
  Description of Artificial Sequence: Synthetic oligonucleotide
cuaguuccuucauuacaua

SEQ ID NO: 2758692 - RNA, 19 nt, Artificial Sequence
  Description of Artificial Sequence: Synthetic oligonucleotide
gcucuugcgccugugaaga

SEQ ID NO: 2758693 - RNA, 19 nt, Artificial Sequence
  Description of Artificial Sequence: Synthetic oligonucleotide
gaaagcgacugugguucca

SEQ ID NO: 2758694 - RNA, 19 nt, Artificial Sequence
  Description of Artificial Sequence: Synthetic oligonucleotide
gcucuauaaaugcaguuuu

SEQ ID NO: 2758695 - RNA, 19 nt, Artificial Sequence
  Description of Artificial Sequence: Synthetic oligonucleotide
cucuugcgccugugaagag

SEQ ID NO: 2758696 - RNA, 19 nt, Artificial Sequence
  Description of Artificial Sequence: Synthetic oligonucleotide
gagugccagguaccggauc

SEQ ID NO: 2758697 - RNA, 19 nt, Artificial Sequence
  Description of Artificial Sequence: Synthetic oligonucleotide
uuggagcucuugcgccugu

SEQ ID NO: 2758698 - RNA, 19 nt, Artificial Sequence
  Description of Artificial Sequence: Synthetic oligonucleotide
gcgacugugguuccagcca

SEQ ID NO: 2758699 - RNA, 19 nt, Artificial Sequence
  Description of Artificial Sequence: Synthetic oligonucleotide
cuaauucuugucgucuccu

SEQ ID NO: 2758700 - RNA, 19 nt, Artificial Sequence
  Description of Artificial Sequence: Synthetic oligonucleotide
cacugaagaagaguucucu

SEQ ID NO: 2758701 - RNA, 19 nt, Artificial Sequence
  Description of Artificial Sequence: Synthetic oligonucleotide
gccugugaagagugccagg

SEQ ID NO: 2758702 - RNA, 19 nt, Artificial Sequence
  Description of Artificial Sequence: Synthetic oligonucleotide
cuuuggagcucuugcgccu

SEQ ID NO: 2758703 - RNA, 19 nt, Artificial Sequence
  Description of Artificial Sequence: Synthetic oligonucleotide
cgugaugauacaaauacuu

SEQ ID NO: 2758704 - RNA, 19 nt, Artificial Sequence
  Description of Artificial Sequence: Synthetic oligonucleotide
ugccagguaccggaucauc

SEQ ID NO: 2758705 - RNA, 19 nt, Artificial Sequence
  Description of Artificial Sequence: Synthetic oligonucleotide
ucagaaaauugggguccuu

SEQ ID NO: 2758706 - RNA, 19 nt, Artificial Sequence
  Description of Artificial Sequence: Synthetic oligonucleotide
cugccacaugcucaaccca

SEQ ID NO: 2758707 - RNA, 19 nt, Artificial Sequence
  Description of Artificial Sequence: Synthetic oligonucleotide
agccggaccucugucuccu

SEQ ID NO: 2758708 - RNA, 19 nt, Artificial Sequence
  Description of Artificial Sequence: Synthetic oligonucleotide
uggagcucuugcgccugug

SEQ ID NO: 2758709 - RNA, 19 nt, Artificial Sequence
  Description of Artificial Sequence: Synthetic oligonucleotide
ccuagaaaagccggaccuc

SEQ ID NO: 2758710 - RNA, 19 nt, Artificial Sequence
  Description of Artificial Sequence: Synthetic oligonucleotide
ccagccauucuuuggagcu

SEQ ID NO: 2758711 - RNA, 19 nt, Artificial Sequence
  Description of Artificial Sequence: Synthetic oligonucleotide
ggagcucuugcgccuguga

SEQ ID NO: 2758712 - RNA, 19 nt, Artificial Sequence
  Description of Artificial Sequence: Synthetic oligonucleotide
cccuagaaaagccggaccu

SEQ ID NO: 2758713 - RNA, 19 nt, Artificial Sequence
  Description of Artificial Sequence: Synthetic oligonucleotide
ugggguccuucuuguccau

SEQ ID NO: 2758714 - RNA, 19 nt, Artificial Sequence
  Description of Artificial Sequence: Synthetic oligonucleotide
cuuuagcuaaagccuccau

SEQ ID NO: 2758715 - RNA, 19 nt, Artificial Sequence
  Description of Artificial Sequence: Synthetic oligonucleotide
ggaucacgaaaugguggca

SEQ ID NO: 2758716 - RNA, 19 nt, Artificial Sequence
  Description of Artificial Sequence: Synthetic oligonucleotide
ccauucuuuggagcucuug

SEQ ID NO: 2758717 - RNA, 19 nt, Artificial Sequence
  Description of Artificial Sequence: Synthetic oligonucleotide
gguaccggaucaucuuggu

SEQ ID NO: 2758718 - RNA, 19 nt, Artificial Sequence
  Description of Artificial Sequence: Synthetic oligonucleotide
guaccggaucaucuugguu

SEQ ID NO: 2758719 - RNA, 19 nt, Artificial Sequence
  Description of Artificial Sequence: Synthetic oligonucleotide
cacaugcucaacccauuuu

SEQ ID NO: 2758720 - RNA, 19 nt, Artificial Sequence
  Description of Artificial Sequence: Synthetic oligonucleotide
ggaucaucuugguuuccau

SEQ ID NO: 2758721 - RNA, 19 nt, Artificial Sequence
  Description of Artificial Sequence: Synthetic oligonucleotide
ggguccuucuuguccauau

SEQ ID NO: 2758722 - RNA, 19 nt, Artificial Sequence
  Description of Artificial Sequence: Synthetic oligonucleotide
ccugugaagagugccaggu

SEQ ID NO: 2758723 - RNA, 19 nt, Artificial Sequence
  Description of Artificial Sequence: Synthetic oligonucleotide
gguccuucuuguccauaua

SEQ ID NO: 2758724 - RNA, 19 nt, Artificial Sequence
  Description of Artificial Sequence: Synthetic oligonucleotide
gugguuccagccauucuuu

SEQ ID NO: 2758725 - RNA, 19 nt, Artificial Sequence
  Description of Artificial Sequence: Synthetic oligonucleotide
cugugguuccagccauucu

SEQ ID NO: 2758726 - RNA, 19 nt, Artificial Sequence
  Description of Artificial Sequence: Synthetic oligonucleotide
cacgaaaugguggcaugau

SEQ ID NO: 2758727 - RNA, 19 nt, Artificial Sequence
  Description of Artificial Sequence: Synthetic oligonucleotide
gccagguaccggaucaucu

SEQ ID NO: 2758728 - RNA, 19 nt, Artificial Sequence
  Description of Artificial Sequence: Synthetic oligonucleotide
cgccugugaagagugccag

SEQ ID NO: 2758729 - RNA, 19 nt, Artificial Sequence
  Description of Artificial Sequence: Synthetic oligonucleotide
gcgccugugaagagugcca

SEQ ID NO: 2758730 - RNA, 19 nt, Artificial Sequence
  Description of Artificial Sequence: Synthetic oligonucleotide
ccggaucaucuugguuucc

SEQ ID NO: 2758731 - RNA, 19 nt, Artificial Sequence
  Description of Artificial Sequence: Synthetic oligonucleotide
ccagguaccggaucaucuu

SEQ ID NO: 2758732 - RNA, 19 nt, Artificial Sequence
  Description of Artificial Sequence: Synthetic oligonucleotide
gacugugguuccagccauu

SEQ ID NO: 2758733 - RNA, 19 nt, Artificial Sequence
  Description of Artificial Sequence: Synthetic oligonucleotide
gccggaccucugucuccug

SEQ ID NO: 2758734 - RNA, 19 nt, Artificial Sequence
  Description of Artificial Sequence: Synthetic oligonucleotide
ccuugucauauuguugcuu

SEQ ID NO: 2758735 - RNA, 19 nt, Artificial Sequence
  Description of Artificial Sequence: Synthetic oligonucleotide
ccacaugcucaacccauuu

SEQ ID NO: 2758736 - RNA, 19 nt, Artificial Sequence
  Description of Artificial Sequence: Synthetic oligonucleotide
ggucaccaacuaacagagu

SEQ ID NO: 2758737 - RNA, 19 nt, Artificial Sequence
  Description of Artificial Sequence: Synthetic oligonucleotide
gugccagguaccggaucau

SEQ ID NO: 2758738 - RNA, 19 nt, Artificial Sequence
  Description of Artificial Sequence: Synthetic oligonucleotide
gggguccuucuuguccaua

SEQ ID NO: 2758739 - RNA, 19 nt, Artificial Sequence
  Description of Artificial Sequence: Synthetic oligonucleotide
gccacaugcucaacccauu

SEQ ID NO: 2758740 - RNA, 19 nt, Artificial Sequence
  Description of Artificial Sequence: Synthetic oligonucleotide
cgacugugguuccagccau

SEQ ID NO: 2758741 - RNA, 19 nt, Artificial Sequence
  Description of Artificial Sequence: Synthetic oligonucleotide
gccauucuuuggagcucuu

SEQ ID NO: 2758742 - RNA, 19 nt, Artificial Sequence
  Description of Artificial Sequence: Synthetic oligonucleotide
aagacauugaagcuaaugc

SEQ ID NO: 2758743 - RNA, 19 nt, Artificial Sequence
  Description of Artificial Sequence: Synthetic oligonucleotide
auuauugauggcuuggucc

SEQ ID NO: 2758744 - RNA, 19 nt, Artificial Sequence
  Description of Artificial Sequence: Synthetic oligonucleotide
aacucuuucguuuugccac

SEQ ID NO: 2758745 - RNA, 19 nt, Artificial Sequence
  Description of Artificial Sequence: Synthetic oligonucleotide
uuaugaaccaucaagacau

SEQ ID NO: 2758746 - RNA, 19 nt, Artificial Sequence
  Description of Artificial Sequence: Synthetic oligonucleotide
ugcuaaucuguccagaacg

SEQ ID NO: 2758747 - RNA, 19 nt, Artificial Sequence
  Description of Artificial Sequence: Synthetic oligonucleotide
accaaugaacuucugaggc

SEQ ID NO: 2758748 - RNA, 19 nt, Artificial Sequence
  Description of Artificial Sequence: Synthetic oligonucleotide
uguaguugacaucaaagca

SEQ ID NO: 2758749 - RNA, 19 nt, Artificial Sequence
  Description of Artificial Sequence: Synthetic oligonucleotide
uucucguacauguagcugg

SEQ ID NO: 2758750 - RNA, 19 nt, Artificial Sequence
  Description of Artificial Sequence: Synthetic oligonucleotide
ucagaauucugaagaaacg

SEQ ID NO: 2758751 - RNA, 19 nt, Artificial Sequence
  Description of Artificial Sequence: Synthetic oligonucleotide
ucaccaaugaacuucugag

SEQ ID NO: 2758752 - RNA, 19 nt, Artificial Sequence
  Description of Artificial Sequence: Synthetic oligonucleotide
aaacgugcggcaucgcucc

SEQ ID NO: 2758753 - RNA, 19 nt, Artificial Sequence
  Description of Artificial Sequence: Synthetic oligonucleotide
ucgcuuaugaaccaucaag

SEQ ID NO: 2758754 - RNA, 19 nt, Artificial Sequence
  Description of Artificial Sequence: Synthetic oligonucleotide
ucugaguaaaagaugcccc

SEQ ID NO: 2758755 - RNA, 19 nt, Artificial Sequence
  Description of Artificial Sequence: Synthetic oligonucleotide
uuguaguugacaucaaagc

SEQ ID NO: 2758756 - RNA, 19 nt, Artificial Sequence
  Description of Artificial Sequence: Synthetic oligonucleotide
aaucuguccagaacgagcg

SEQ ID NO: 2758757 - RNA, 19 nt, Artificial Sequence
  Description of Artificial Sequence: Synthetic oligonucleotide
gaggcauugaacucuuucg

SEQ ID NO: 2758758 - RNA, 19 nt, Artificial Sequence
  Description of Artificial Sequence: Synthetic oligonucleotide
uugacaucaaagcagugac

SEQ ID NO: 2758759 - RNA, 19 nt, Artificial Sequence
  Description of Artificial Sequence: Synthetic oligonucleotide
cuuaauguggcggaggagg

SEQ ID NO: 2758760 - RNA, 19 nt, Artificial Sequence
  Description of Artificial Sequence: Synthetic oligonucleotide
aauucugaagaaacgugcg

SEQ ID NO: 2758761 - RNA, 19 nt, Artificial Sequence
  Description of Artificial Sequence: Synthetic oligonucleotide
agcuaaugcacggauaacc

SEQ ID NO: 2758762 - RNA, 19 nt, Artificial Sequence
  Description of Artificial Sequence: Synthetic oligonucleotide
uaaaagaugccccgcacug

SEQ ID NO: 2758763 - RNA, 19 nt, Artificial Sequence
  Description of Artificial Sequence: Synthetic oligonucleotide
agaacgagcgcucuuucac

SEQ ID NO: 2758764 - RNA, 19 nt, Artificial Sequence
  Description of Artificial Sequence: Synthetic oligonucleotide
cuugccuccacacuugugg

SEQ ID NO: 2758765 - RNA, 19 nt, Artificial Sequence
  Description of Artificial Sequence: Synthetic oligonucleotide
uaaucuguccagaacgagc

SEQ ID NO: 2758766 - RNA, 19 nt, Artificial Sequence
  Description of Artificial Sequence: Synthetic oligonucleotide
ucuuucacuucccaucucc

SEQ ID NO: 2758767 - RNA, 19 nt, Artificial Sequence
  Description of Artificial Sequence: Synthetic oligonucleotide
uuauugauggcuuggucca

SEQ ID NO: 2758768 - RNA, 19 nt, Artificial Sequence
  Description of Artificial Sequence: Synthetic oligonucleotide
aauucacacuuguagggcu

SEQ ID NO: 2758769 - RNA, 19 nt, Artificial Sequence
  Description of Artificial Sequence: Synthetic oligonucleotide
uguggcuucgcuuaugaac

SEQ ID NO: 2758770 - RNA, 19 nt, Artificial Sequence
  Description of Artificial Sequence: Synthetic oligonucleotide
gaauucugaagaaacgugc

SEQ ID NO: 2758771 - RNA, 19 nt, Artificial Sequence
  Description of Artificial Sequence: Synthetic oligonucleotide
guaguugacaucaaagcag

SEQ ID NO: 2758772 - RNA, 19 nt, Artificial Sequence
  Description of Artificial Sequence: Synthetic oligonucleotide
ugcauuaucucacucuccu

SEQ ID NO: 2758773 - RNA, 19 nt, Artificial Sequence
  Description of Artificial Sequence: Synthetic oligonucleotide
uuugaugugucuugccucc

SEQ ID NO: 2758774 - RNA, 19 nt, Artificial Sequence
  Description of Artificial Sequence: Synthetic oligonucleotide
aguaaaagaugccccgcac

SEQ ID NO: 2758775 - RNA, 19 nt, Artificial Sequence
  Description of Artificial Sequence: Synthetic oligonucleotide
agacauugaagcuaaugca

SEQ ID NO: 2758776 - RNA, 19 nt, Artificial Sequence
  Description of Artificial Sequence: Synthetic oligonucleotide
ugugugcagcuuaaugugg

SEQ ID NO: 2758777 - RNA, 19 nt, Artificial Sequence
  Description of Artificial Sequence: Synthetic oligonucleotide
ugcguaguugcagaggugg

SEQ ID NO: 2758778 - RNA, 19 nt, Artificial Sequence
  Description of Artificial Sequence: Synthetic oligonucleotide
agcagugacgcuucucacc

SEQ ID NO: 2758779 - RNA, 19 nt, Artificial Sequence
  Description of Artificial Sequence: Synthetic oligonucleotide
uucugaguaaaagaugccc

SEQ ID NO: 2758780 - RNA, 19 nt, Artificial Sequence
  Description of Artificial Sequence: Synthetic oligonucleotide
cacugauuacacuggaacg

SEQ ID NO: 2758781 - RNA, 19 nt, Artificial Sequence
  Description of Artificial Sequence: Synthetic oligonucleotide
auucugaagaaacgugcgg

SEQ ID NO: 2758782 - RNA, 19 nt, Artificial Sequence
  Description of Artificial Sequence: Synthetic oligonucleotide
cugaguaaaagaugccccg

SEQ ID NO: 2758783 - RNA, 19 nt, Artificial Sequence
  Description of Artificial Sequence: Synthetic oligonucleotide
ucugcauuaucucacucuc

SEQ ID NO: 2758784 - RNA, 19 nt, Artificial Sequence
  Description of Artificial Sequence: Synthetic oligonucleotide
cuuucguuuugccacauug

SEQ ID NO: 2758785 - RNA, 19 nt, Artificial Sequence
  Description of Artificial Sequence: Synthetic oligonucleotide
uucguuuugccacauugcu

SEQ ID NO: 2758786 - RNA, 19 nt, Artificial Sequence
  Description of Artificial Sequence: Synthetic oligonucleotide
gauuacacuggaacgggcg

SEQ ID NO: 2758787 - RNA, 19 nt, Artificial Sequence
  Description of Artificial Sequence: Synthetic oligonucleotide
uuucguuuugccacauugc

SEQ ID NO: 2758788 - RNA, 19 nt, Artificial Sequence
  Description of Artificial Sequence: Synthetic oligonucleotide
gaagaaacgugcggcaucg

SEQ ID NO: 2758789 - RNA, 19 nt, Artificial Sequence
  Description of Artificial Sequence: Synthetic oligonucleotide
ugguccaucauucgggucu

SEQ ID NO: 2758790 - RNA, 19 nt, Artificial Sequence
  Description of Artificial Sequence: Synthetic oligonucleotide
cauugaagcuaaugcacgg

SEQ ID NO: 2758791 - RNA, 19 nt, Artificial Sequence
  Description of Artificial Sequence: Synthetic oligonucleotide
uaguugacaucaaagcagu

SEQ ID NO: 2758792 - RNA, 19 nt, Artificial Sequence
  Description of Artificial Sequence: Synthetic oligonucleotide
gacauugaagcuaaugcac

SEQ ID NO: 2758793 - RNA, 19 nt, Artificial Sequence
  Description of Artificial Sequence: Synthetic oligonucleotide
gaagcuaaugcacggauaa

SEQ ID NO: 2758794 - RNA, 19 nt, Artificial Sequence
  Description of Artificial Sequence: Synthetic oligonucleotide
uaccuuucugaguaaaaga

SEQ ID NO: 2758795 - RNA, 19 nt, Artificial Sequence
  Description of Artificial Sequence: Synthetic oligonucleotide
cauuaucucacucuccuuc

SEQ ID NO: 2758796 - RNA, 19 nt, Artificial Sequence
  Description of Artificial Sequence: Synthetic oligonucleotide
aacuucugaggcauugaac

SEQ ID NO: 2758797 - RNA, 19 nt, Artificial Sequence
  Description of Artificial Sequence: Synthetic oligonucleotide
uuucugaguaaaagaugcc

SEQ ID NO: 2758798 - RNA, 19 nt, Artificial Sequence
  Description of Artificial Sequence: Synthetic oligonucleotide
cuuaugaaccaucaagaca

SEQ ID NO: 2758799 - RNA, 19 nt, Artificial Sequence
  Description of Artificial Sequence: Synthetic oligonucleotide
gagguuaccuuucugagua

SEQ ID NO: 2758800 - RNA, 19 nt, Artificial Sequence
  Description of Artificial Sequence: Synthetic oligonucleotide
ucugaagaaacgugcggca

SEQ ID NO: 2758801 - RNA, 19 nt, Artificial Sequence
  Description of Artificial Sequence: Synthetic oligonucleotide
ugaggcauugaacucuuuc

SEQ ID NO: 2758802 - RNA, 19 nt, Artificial Sequence
  Description of Artificial Sequence: Synthetic oligonucleotide
acauugaagcuaaugcacg

SEQ ID NO: 2758803 - RNA, 19 nt, Artificial Sequence
  Description of Artificial Sequence: Synthetic oligonucleotide
aaagaugccccgcacugau

SEQ ID NO: 2758804 - RNA, 19 nt, Artificial Sequence
  Description of Artificial Sequence: Synthetic oligonucleotide
cuaaugcacggauaacccc

SEQ ID NO: 2758805 - RNA, 19 nt, Artificial Sequence
  Description of Artificial Sequence: Synthetic oligonucleotide
ucucguacauguagcuggg

SEQ ID NO: 2758806 - RNA, 19 nt, Artificial Sequence
  Description of Artificial Sequence: Synthetic oligonucleotide
caccaaugaacuucugagg

SEQ ID NO: 2758807 - RNA, 19 nt, Artificial Sequence
  Description of Artificial Sequence: Synthetic oligonucleotide
aagcagugacgcuucucac

SEQ ID NO: 2758808 - RNA, 19 nt, Artificial Sequence
  Description of Artificial Sequence: Synthetic oligonucleotide
ugaacucuuucguuuugcc

SEQ ID NO: 2758809 - RNA, 19 nt, Artificial Sequence
  Description of Artificial Sequence: Synthetic oligonucleotide
aggagguuaccuuucugag

SEQ ID NO: 2758810 - RNA, 19 nt, Artificial Sequence
  Description of Artificial Sequence: Synthetic oligonucleotide
uccuucucguacauguagc

SEQ ID NO: 2758811 - RNA, 19 nt, Artificial Sequence
  Description of Artificial Sequence: Synthetic oligonucleotide
augugucuugccuccacac

SEQ ID NO: 2758812 - RNA, 19 nt, Artificial Sequence
  Description of Artificial Sequence: Synthetic oligonucleotide
gaauucacacuuguagggc

SEQ ID NO: 2758813 - RNA, 19 nt, Artificial Sequence
  Description of Artificial Sequence: Synthetic oligonucleotide
cuuguagcuccuuccacag

SEQ ID NO: 2758814 - RNA, 19 nt, Artificial Sequence
  Description of Artificial Sequence: Synthetic oligonucleotide
gaggagguuaccuuucuga

SEQ ID NO: 2758815 - RNA, 19 nt, Artificial Sequence
  Description of Artificial Sequence: Synthetic oligonucleotide
uucucaccaaugaacuucu

SEQ ID NO: 2758816 - RNA, 19 nt, Artificial Sequence
  Description of Artificial Sequence: Synthetic oligonucleotide
acagagugcguccucaggu

SEQ ID NO: 2758817 - RNA, 19 nt, Artificial Sequence
  Description of Artificial Sequence: Synthetic oligonucleotide
ugugcagcuuaauguggcg

SEQ ID NO: 2758818 - RNA, 19 nt, Artificial Sequence
  Description of Artificial Sequence: Synthetic oligonucleotide
guacauguagcugggauug

SEQ ID NO: 2758819 - RNA, 19 nt, Artificial Sequence
  Description of Artificial Sequence: Synthetic oligonucleotide
guggcuucgcuuaugaacc

SEQ ID NO: 2758820 - RNA, 19 nt, Artificial Sequence
  Description of Artificial Sequence: Synthetic oligonucleotide
auuaucucacucuccuucu

SEQ ID NO: 2758821 - RNA, 19 nt, Artificial Sequence
  Description of Artificial Sequence: Synthetic oligonucleotide
agaauucugaagaaacgug

SEQ ID NO: 2758822 - RNA, 19 nt, Artificial Sequence
  Description of Artificial Sequence: Synthetic oligonucleotide
agcgcaucucuccuuuggc

SEQ ID NO: 2758823 - RNA, 19 nt, Artificial Sequence
  Description of Artificial Sequence: Synthetic oligonucleotide
cauguagcugggauuguag

SEQ ID NO: 2758824 - RNA, 19 nt, Artificial Sequence
  Description of Artificial Sequence: Synthetic oligonucleotide
uugaagcuaaugcacggau

SEQ ID NO: 2758825 - RNA, 19 nt, Artificial Sequence
  Description of Artificial Sequence: Synthetic oligonucleotide
uuuggcaugcguaguugca

SEQ ID NO: 2758826 - RNA, 19 nt, Artificial Sequence
  Description of Artificial Sequence: Synthetic oligonucleotide
ugacgcuucucaccaauga

SEQ ID NO: 2758827 - RNA, 19 nt, Artificial Sequence
  Description of Artificial Sequence: Synthetic oligonucleotide
uccgcuuugaugugucuug

SEQ ID NO: 2758828 - RNA, 19 nt, Artificial Sequence
  Description of Artificial Sequence: Synthetic oligonucleotide
uuaauguggcggaggaggu

SEQ ID NO: 2758829 - RNA, 19 nt, Artificial Sequence
  Description of Artificial Sequence: Synthetic oligonucleotide
ugauuacacuggaacgggc

SEQ ID NO: 2758830 - RNA, 19 nt, Artificial Sequence
  Description of Artificial Sequence: Synthetic oligonucleotide
uuucacuucccaucuccgc

SEQ ID NO: 2758831 - RNA, 19 nt, Artificial Sequence
  Description of Artificial Sequence: Synthetic oligonucleotide
ugaagaaacgugcggcauc

SEQ ID NO: 2758832 - RNA, 19 nt, Artificial Sequence
  Description of Artificial Sequence: Synthetic oligonucleotide
cuucucaccaaugaacuuc

SEQ ID NO: 2758833 - RNA, 19 nt, Artificial Sequence
  Description of Artificial Sequence: Synthetic oligonucleotide
guagcugggauuguaguug

SEQ ID NO: 2758834 - RNA, 19 nt, Artificial Sequence
  Description of Artificial Sequence: Synthetic oligonucleotide
ugcagcuuaauguggcgga

SEQ ID NO: 2758835 - RNA, 19 nt, Artificial Sequence
  Description of Artificial Sequence: Synthetic oligonucleotide
ugaguaaaagaugccccgc

SEQ ID NO: 2758836 - RNA, 19 nt, Artificial Sequence
  Description of Artificial Sequence: Synthetic oligonucleotide
cugauuacacuggaacggg

SEQ ID NO: 2758837 - RNA, 19 nt, Artificial Sequence
  Description of Artificial Sequence: Synthetic oligonucleotide
ucguacauguagcugggau

SEQ ID NO: 2758838 - RNA, 19 nt, Artificial Sequence
  Description of Artificial Sequence: Synthetic oligonucleotide
aggcauugaacucuuucgu

SEQ ID NO: 2758839 - RNA, 19 nt, Artificial Sequence
  Description of Artificial Sequence: Synthetic oligonucleotide
auuacacuggaacgggcgu

SEQ ID NO: 2758840 - RNA, 19 nt, Artificial Sequence
  Description of Artificial Sequence: Synthetic oligonucleotide
gauggcauuauugauggcu

SEQ ID NO: 2758841 - RNA, 19 nt, Artificial Sequence
  Description of Artificial Sequence: Synthetic oligonucleotide
acgcuucucaccaaugaac

SEQ ID NO: 2758842 - RNA, 19 nt, Artificial Sequence
  Description of Artificial Sequence: Synthetic oligonucleotide
uugcuaaucuguccagaac

SEQ ID NO: 2758843 - RNA, 19 nt, Artificial Sequence
  Description of Artificial Sequence: Synthetic oligonucleotide
caagacauugaagcuaaug

SEQ ID NO: 2758844 - RNA, 19 nt, Artificial Sequence
  Description of Artificial Sequence: Synthetic oligonucleotide
aagcuaaugcacggauaac

SEQ ID NO: 2758845 - RNA, 19 nt, Artificial Sequence
  Description of Artificial Sequence: Synthetic oligonucleotide
cacauugcuugcuaaucug

SEQ ID NO: 2758846 - RNA, 19 nt, Artificial Sequence
  Description of Artificial Sequence: Synthetic oligonucleotide
uucuccacagagugcgucc

SEQ ID NO: 2758847 - RNA, 19 nt, Artificial Sequence
  Description of Artificial Sequence: Synthetic oligonucleotide
agcuuaauguggcggagga

SEQ ID NO: 2758848 - RNA, 19 nt, Artificial Sequence
  Description of Artificial Sequence: Synthetic oligonucleotide
ugucuugccuccacacuug

SEQ ID NO: 2758849 - RNA, 19 nt, Artificial Sequence
  Description of Artificial Sequence: Synthetic oligonucleotide
gagcgcaucucuccuuugg

SEQ ID NO: 2758850 - RNA, 19 nt, Artificial Sequence
  Description of Artificial Sequence: Synthetic oligonucleotide
gaacucuuucguuuugcca

SEQ ID NO: 2758851 - RNA, 19 nt, Artificial Sequence
  Description of Artificial Sequence: Synthetic oligonucleotide
auugaacucuuucguuuug

SEQ ID NO: 2758852 - RNA, 19 nt, Artificial Sequence
  Description of Artificial Sequence: Synthetic oligonucleotide
uccuccagggaacuucucu

SEQ ID NO: 2758853 - RNA, 19 nt, Artificial Sequence
  Description of Artificial Sequence: Synthetic oligonucleotide
cuccuucucguacauguag

SEQ ID NO: 2758854 - RNA, 19 nt, Artificial Sequence
  Description of Artificial Sequence: Synthetic oligonucleotide
ugugucuugccuccacacu

SEQ ID NO: 2758855 - RNA, 19 nt, Artificial Sequence
  Description of Artificial Sequence: Synthetic oligonucleotide
agaaacgugcggcaucgcu

SEQ ID NO: 2758856 - RNA, 19 nt, Artificial Sequence
  Description of Artificial Sequence: Synthetic oligonucleotide
uugaacucuuucguuuugc

SEQ ID NO: 2758857 - RNA, 19 nt, Artificial Sequence
  Description of Artificial Sequence: Synthetic oligonucleotide
ugcggcaucgcuccuugug

SEQ ID NO: 2758858 - RNA, 19 nt, Artificial Sequence
  Description of Artificial Sequence: Synthetic oligonucleotide
gaguaaaagaugccccgca

SEQ ID NO: 2758859 - RNA, 19 nt, Artificial Sequence
  Description of Artificial Sequence: Synthetic oligonucleotide
ugaagcuaaugcacggaua

SEQ ID NO: 2758860 - RNA, 19 nt, Artificial Sequence
  Description of Artificial Sequence: Synthetic oligonucleotide
ucgggucugcauuaucuca

SEQ ID NO: 2758861 - RNA, 19 nt, Artificial Sequence
  Description of Artificial Sequence: Synthetic oligonucleotide
gggauuguaguugacauca

SEQ ID NO: 2758862 - RNA, 19 nt, Artificial Sequence
  Description of Artificial Sequence: Synthetic oligonucleotide
accuuucugaguaaaagau

SEQ ID NO: 2758863 - RNA, 19 nt, Artificial Sequence
  Description of Artificial Sequence: Synthetic oligonucleotide
aauguggcggaggagguua

SEQ ID NO: 2758864 - RNA, 19 nt, Artificial Sequence
  Description of Artificial Sequence: Synthetic oligonucleotide
uuggcaugcguaguugcag

SEQ ID NO: 2758865 - RNA, 19 nt, Artificial Sequence
  Description of Artificial Sequence: Synthetic oligonucleotide
cucacucuccuucucguac

SEQ ID NO: 2758866 - RNA, 19 nt, Artificial Sequence
  Description of Artificial Sequence: Synthetic oligonucleotide
gcacugauuacacuggaac

SEQ ID NO: 2758867 - RNA, 19 nt, Artificial Sequence
  Description of Artificial Sequence: Synthetic oligonucleotide
cagggaacuucucugcuug

SEQ ID NO: 2758868 - RNA, 19 nt, Artificial Sequence
  Description of Artificial Sequence: Synthetic oligonucleotide
ggaacuucucugcuuguag

SEQ ID NO: 2758869 - RNA, 19 nt, Artificial Sequence
  Description of Artificial Sequence: Synthetic oligonucleotide
aucuguccagaacgagcgc

SEQ ID NO: 2758870 - RNA, 19 nt, Artificial Sequence
  Description of Artificial Sequence: Synthetic oligonucleotide
aaaagaugccccgcacuga

SEQ ID NO: 2758871 - RNA, 19 nt, Artificial Sequence
  Description of Artificial Sequence: Synthetic oligonucleotide
ugcuugcuaaucuguccag

SEQ ID NO: 2758872 - RNA, 19 nt, Artificial Sequence
  Description of Artificial Sequence: Synthetic oligonucleotide
ucacucuccuucucguaca

SEQ ID NO: 2758873 - RNA, 19 nt, Artificial Sequence
  Description of Artificial Sequence: Synthetic oligonucleotide
aacgagcgcucuuucacuu

SEQ ID NO: 2758874 - RNA, 19 nt, Artificial Sequence
  Description of Artificial Sequence: Synthetic oligonucleotide
accaguguggcuucgcuua

SEQ ID NO: 2758875 - RNA, 19 nt, Artificial Sequence
  Description of Artificial Sequence: Synthetic oligonucleotide
aucaagacauugaagcuaa

SEQ ID NO: 2758876 - RNA, 19 nt, Artificial Sequence
  Description of Artificial Sequence: Synthetic oligonucleotide
auucgggucugcauuaucu

SEQ ID NO: 2758877 - RNA, 19 nt, Artificial Sequence
  Description of Artificial Sequence: Synthetic oligonucleotide
cuccagggaacuucucugc

SEQ ID NO: 2758878 - RNA, 19 nt, Artificial Sequence
  Description of Artificial Sequence: Synthetic oligonucleotide
cuaaucuguccagaacgag

SEQ ID NO: 2758879 - RNA, 19 nt, Artificial Sequence
  Description of Artificial Sequence: Synthetic oligonucleotide
gcuuaugaaccaucaagac

SEQ ID NO: 2758880 - RNA, 19 nt, Artificial Sequence
  Description of Artificial Sequence: Synthetic oligonucleotide
uucgcuuaugaaccaucaa

SEQ ID NO: 2758881 - RNA, 19 nt, Artificial Sequence
  Description of Artificial Sequence: Synthetic oligonucleotide
gaaacgugcggcaucgcuc

SEQ ID NO: 2758882 - RNA, 19 nt, Artificial Sequence
  Description of Artificial Sequence: Synthetic oligonucleotide
agaugccccgcacugauua

SEQ ID NO: 2758883 - RNA, 19 nt, Artificial Sequence
  Description of Artificial Sequence: Synthetic oligonucleotide
uggcauuauugauggcuug

SEQ ID NO: 2758884 - RNA, 19 nt, Artificial Sequence
  Description of Artificial Sequence: Synthetic oligonucleotide
uugccuccacacuuguggc

SEQ ID NO: 2758885 - RNA, 19 nt, Artificial Sequence
  Description of Artificial Sequence: Synthetic oligonucleotide
cugcauuaucucacucucc

SEQ ID NO: 2758886 - RNA, 19 nt, Artificial Sequence
  Description of Artificial Sequence: Synthetic oligonucleotide
auugaagcuaaugcacgga

SEQ ID NO: 2758887 - RNA, 19 nt, Artificial Sequence
  Description of Artificial Sequence: Synthetic oligonucleotide
ugaacuucugaggcauuga

SEQ ID NO: 2758888 - RNA, 19 nt, Artificial Sequence
  Description of Artificial Sequence: Synthetic oligonucleotide
gaugugucuugccuccaca

SEQ ID NO: 2758889 - RNA, 19 nt, Artificial Sequence
  Description of Artificial Sequence: Synthetic oligonucleotide
ugaugugucuugccuccac

SEQ ID NO: 2758890 - RNA, 19 nt, Artificial Sequence
  Description of Artificial Sequence: Synthetic oligonucleotide
ucccaucuccgcuuugaug

SEQ ID NO: 2758891 - RNA, 19 nt, Artificial Sequence
  Description of Artificial Sequence: Synthetic oligonucleotide
uugcagagguggcacuuga

SEQ ID NO: 2758892 - RNA, 19 nt, Artificial Sequence
  Description of Artificial Sequence: Synthetic oligonucleotide
ugggauuguaguugacauc

SEQ ID NO: 2758893 - RNA, 19 nt, Artificial Sequence
  Description of Artificial Sequence: Synthetic oligonucleotide
augaaccaucaagacauug

SEQ ID NO: 2758894 - RNA, 19 nt, Artificial Sequence
  Description of Artificial Sequence: Synthetic oligonucleotide
cuucgcuuaugaaccauca

SEQ ID NO: 2758895 - RNA, 19 nt, Artificial Sequence
  Description of Artificial Sequence: Synthetic oligonucleotide
agugacgcuucucaccaau

SEQ ID NO: 2758896 - RNA, 19 nt, Artificial Sequence
  Description of Artificial Sequence: Synthetic oligonucleotide
uagcugggauuguaguuga

SEQ ID NO: 2758897 - RNA, 19 nt, Artificial Sequence
  Description of Artificial Sequence: Synthetic oligonucleotide
aagaaacgugcggcaucgc

SEQ ID NO: 2758898 - RNA, 19 nt, Artificial Sequence
  Description of Artificial Sequence: Synthetic oligonucleotide
uugugcuccuccagggaac

SEQ ID NO: 2758899 - RNA, 19 nt, Artificial Sequence
  Description of Artificial Sequence: Synthetic oligonucleotide
ggcuugguccaucauucgg

SEQ ID NO: 2758900 - RNA, 19 nt, Artificial Sequence
  Description of Artificial Sequence: Synthetic oligonucleotide
gcuugguccaucauucggg

SEQ ID NO: 2758901 - RNA, 19 nt, Artificial Sequence
  Description of Artificial Sequence: Synthetic oligonucleotide
ucguuuugccacauugcuu

SEQ ID NO: 2758902 - RNA, 19 nt, Artificial Sequence
  Description of Artificial Sequence: Synthetic oligonucleotide
gcuaaugcacggauaaccc

SEQ ID NO: 2758903 - RNA, 19 nt, Artificial Sequence
  Description of Artificial Sequence: Synthetic oligonucleotide
uggcaugcguaguugcaga

SEQ ID NO: 2758904 - RNA, 19 nt, Artificial Sequence
  Description of Artificial Sequence: Synthetic oligonucleotide
uggcuugguccaucauucg

SEQ ID NO: 2758905 - RNA, 19 nt, Artificial Sequence
  Description of Artificial Sequence: Synthetic oligonucleotide
uucgggucugcauuaucuc

SEQ ID NO: 2758906 - RNA, 19 nt, Artificial Sequence
  Description of Artificial Sequence: Synthetic oligonucleotide
agagugcguccucaggugu

SEQ ID NO: 2758907 - RNA, 19 nt, Artificial Sequence
  Description of Artificial Sequence: Synthetic oligonucleotide
acucuuucguuuugccaca

SEQ ID NO: 2758908 - RNA, 19 nt, Artificial Sequence
  Description of Artificial Sequence: Synthetic oligonucleotide
gugcagcuuaauguggcgg

SEQ ID NO: 2758909 - RNA, 19 nt, Artificial Sequence
  Description of Artificial Sequence: Synthetic oligonucleotide
ucugaggcauugaacucuu

SEQ ID NO: 2758910 - RNA, 19 nt, Artificial Sequence
  Description of Artificial Sequence: Synthetic oligonucleotide
cacagagugcguccucagg

SEQ ID NO: 2758911 - RNA, 19 nt, Artificial Sequence
  Description of Artificial Sequence: Synthetic oligonucleotide
uccuuuggcaugcguaguu

SEQ ID NO: 2758912 - RNA, 19 nt, Artificial Sequence
  Description of Artificial Sequence: Synthetic oligonucleotide
aggucagaauucugaagaa

SEQ ID NO: 2758913 - RNA, 19 nt, Artificial Sequence
  Description of Artificial Sequence: Synthetic oligonucleotide
gacgcuucucaccaaugaa

SEQ ID NO: 2758914 - RNA, 19 nt, Artificial Sequence
  Description of Artificial Sequence: Synthetic oligonucleotide
acgggcguucaccagugug

SEQ ID NO: 2758915 - RNA, 19 nt, Artificial Sequence
  Description of Artificial Sequence: Synthetic oligonucleotide
ucuugccuccacacuugug

SEQ ID NO: 2758916 - RNA, 19 nt, Artificial Sequence
  Description of Artificial Sequence: Synthetic oligonucleotide
ugcguccucaggugucccg

SEQ ID NO: 2758917 - RNA, 19 nt, Artificial Sequence
  Description of Artificial Sequence: Synthetic oligonucleotide
uccacagagugcguccuca

SEQ ID NO: 2758918 - RNA, 19 nt, Artificial Sequence
  Description of Artificial Sequence: Synthetic oligonucleotide
acauugcuugcuaaucugu

SEQ ID NO: 2758919 - RNA, 19 nt, Artificial Sequence
  Description of Artificial Sequence: Synthetic oligonucleotide
guaaaagaugccccgcacu

SEQ ID NO: 2758920 - RNA, 19 nt, Artificial Sequence
  Description of Artificial Sequence: Synthetic oligonucleotide
caucucuccuuuggcaugc

SEQ ID NO: 2758921 - RNA, 19 nt, Artificial Sequence
  Description of Artificial Sequence: Synthetic oligonucleotide
cagagugcguccucaggug

SEQ ID NO: 2758922 - RNA, 19 nt, Artificial Sequence
  Description of Artificial Sequence: Synthetic oligonucleotide
gugugcagcuuaauguggc

SEQ ID NO: 2758923 - RNA, 19 nt, Artificial Sequence
  Description of Artificial Sequence: Synthetic oligonucleotide
cuucucguacauguagcug

SEQ ID NO: 2758924 - RNA, 19 nt, Artificial Sequence
  Description of Artificial Sequence: Synthetic oligonucleotide
acgagcgcucuuucacuuc

SEQ ID NO: 2758925 - RNA, 19 nt, Artificial Sequence
  Description of Artificial Sequence: Synthetic oligonucleotide
gauggcuugguccaucauu

SEQ ID NO: 2758926 - RNA, 19 nt, Artificial Sequence
  Description of Artificial Sequence: Synthetic oligonucleotide
ugccacauugcuugcuaau

SEQ ID NO: 2758927 - RNA, 19 nt, Artificial Sequence
  Description of Artificial Sequence: Synthetic oligonucleotide
caucaagacauugaagcua

SEQ ID NO: 2758928 - RNA, 19 nt, Artificial Sequence
  Description of Artificial Sequence: Synthetic oligonucleotide
ugccccgcacugauuacac

SEQ ID NO: 2758929 - RNA, 19 nt, Artificial Sequence
  Description of Artificial Sequence: Synthetic oligonucleotide
caugcguaguugcagaggu

SEQ ID NO: 2758930 - RNA, 19 nt, Artificial Sequence
  Description of Artificial Sequence: Synthetic oligonucleotide
gucugcauuaucucacucu

SEQ ID NO: 2758931 - RNA, 19 nt, Artificial Sequence
  Description of Artificial Sequence: Synthetic oligonucleotide
cagcuuaauguggcggagg

SEQ ID NO: 2758932 - RNA, 19 nt, Artificial Sequence
  Description of Artificial Sequence: Synthetic oligonucleotide
gcagugacgcuucucacca

SEQ ID NO: 2758933 - RNA, 19 nt, Artificial Sequence
  Description of Artificial Sequence: Synthetic oligonucleotide
cagaauucugaagaaacgu

SEQ ID NO: 2758934 - RNA, 19 nt, Artificial Sequence
  Description of Artificial Sequence: Synthetic oligonucleotide
gcuuguagcuccuuccaca

SEQ ID NO: 2758935 - RNA, 19 nt, Artificial Sequence
  Description of Artificial Sequence: Synthetic oligonucleotide
uccagaacgagcgcucuuu

SEQ ID NO: 2758936 - RNA, 19 nt, Artificial Sequence
  Description of Artificial Sequence: Synthetic oligonucleotide
uacacuggaacgggcguuc

SEQ ID NO: 2758937 - RNA, 19 nt, Artificial Sequence
  Description of Artificial Sequence: Synthetic oligonucleotide
ugauggcauuauugauggc

SEQ ID NO: 2758938 - RNA, 19 nt, Artificial Sequence
  Description of Artificial Sequence: Synthetic oligonucleotide
ucucuccuuuggcaugcgu

SEQ ID NO: 2758939 - RNA, 19 nt, Artificial Sequence
  Description of Artificial Sequence: Synthetic oligonucleotide
ucacuucccaucuccgcuu

SEQ ID NO: 2758940 - RNA, 19 nt, Artificial Sequence
  Description of Artificial Sequence: Synthetic oligonucleotide
agcgcucuuucacuuccca

SEQ ID NO: 2758941 - RNA, 19 nt, Artificial Sequence
  Description of Artificial Sequence: Synthetic oligonucleotide
ugugcuccuccagggaacu

SEQ ID NO: 2758942 - RNA, 19 nt, Artificial Sequence
  Description of Artificial Sequence: Synthetic oligonucleotide
ugcagagguggcacuugaa

SEQ ID NO: 2758943 - RNA, 19 nt, Artificial Sequence
  Description of Artificial Sequence: Synthetic oligonucleotide
cucugcuuguagcuccuuc

SEQ ID NO: 2758944 - RNA, 19 nt, Artificial Sequence
  Description of Artificial Sequence: Synthetic oligonucleotide
aucuccgcuuugauguguc

SEQ ID NO: 2758945 - RNA, 19 nt, Artificial Sequence
  Description of Artificial Sequence: Synthetic oligonucleotide
uaguugcagagguggcacu

SEQ ID NO: 2758946 - RNA, 19 nt, Artificial Sequence
  Description of Artificial Sequence: Synthetic oligonucleotide
auggcauuauugauggcuu

SEQ ID NO: 2758947 - RNA, 19 nt, Artificial Sequence
  Description of Artificial Sequence: Synthetic oligonucleotide
cugggauuguaguugacau

SEQ ID NO: 2758948 - RNA, 19 nt, Artificial Sequence
  Description of Artificial Sequence: Synthetic oligonucleotide
ugagcgcaucucuccuuug

SEQ ID NO: 2758949 - RNA, 19 nt, Artificial Sequence
  Description of Artificial Sequence: Synthetic oligonucleotide
gaugccccgcacugauuac

SEQ ID NO: 2758950 - RNA, 19 nt, Artificial Sequence
  Description of Artificial Sequence: Synthetic oligonucleotide
ggcaugcguaguugcagag

SEQ ID NO: 2758951 - RNA, 19 nt, Artificial Sequence
  Description of Artificial Sequence: Synthetic oligonucleotide
cuggaacgggcguucacca

SEQ ID NO: 2758952 - RNA, 19 nt, Artificial Sequence
  Description of Artificial Sequence: Synthetic oligonucleotide
uguccagaacgagcgcucu

SEQ ID NO: 2758953 - RNA, 19 nt, Artificial Sequence
  Description of Artificial Sequence: Synthetic oligonucleotide
ucucacucuccuucucgua

SEQ ID NO: 2758954 - RNA, 19 nt, Artificial Sequence
  Description of Artificial Sequence: Synthetic oligonucleotide
gaacgagcgcucuuucacu

SEQ ID NO: 2758955 - RNA, 19 nt, Artificial Sequence
  Description of Artificial Sequence: Synthetic oligonucleotide
uccccugugugcagcuuaa

SEQ ID NO: 2758956 - RNA, 19 nt, Artificial Sequence
  Description of Artificial Sequence: Synthetic oligonucleotide
uuacacuggaacgggcguu

SEQ ID NO: 2758957 - RNA, 19 nt, Artificial Sequence
  Description of Artificial Sequence: Synthetic oligonucleotide
cuccuuccacagaauucac

SEQ ID NO: 2758958 - RNA, 19 nt, Artificial Sequence
  Description of Artificial Sequence: Synthetic oligonucleotide
cccgcacugauuacacugg

SEQ ID NO: 2758959 - RNA, 19 nt, Artificial Sequence
  Description of Artificial Sequence: Synthetic oligonucleotide
guugcagagguggcacuug

SEQ ID NO: 2758960 - RNA, 19 nt, Artificial Sequence
  Description of Artificial Sequence: Synthetic oligonucleotide
cgcuuaugaaccaucaaga

SEQ ID NO: 2758961 - RNA, 19 nt, Artificial Sequence
  Description of Artificial Sequence: Synthetic oligonucleotide
ucuuucguuuugccacauu

SEQ ID NO: 2758962 - RNA, 19 nt, Artificial Sequence
  Description of Artificial Sequence: Synthetic oligonucleotide
ucccgugagcgcaucucuc

SEQ ID NO: 2758963 - RNA, 19 nt, Artificial Sequence
  Description of Artificial Sequence: Synthetic oligonucleotide
uugguccaucauucggguc

SEQ ID NO: 2758964 - RNA, 19 nt, Artificial Sequence
  Description of Artificial Sequence: Synthetic oligonucleotide
cccaucuccgcuuugaugu

SEQ ID NO: 2758965 - RNA, 19 nt, Artificial Sequence
  Description of Artificial Sequence: Synthetic oligonucleotide
ucuccgcuuugaugugucu

SEQ ID NO: 2758966 - RNA, 19 nt, Artificial Sequence
  Description of Artificial Sequence: Synthetic oligonucleotide
ugauggcuugguccaucau

SEQ ID NO: 2758967 - RNA, 19 nt, Artificial Sequence
  Description of Artificial Sequence: Synthetic oligonucleotide
uugaugugucuugccucca

SEQ ID NO: 2758968 - RNA, 19 nt, Artificial Sequence
  Description of Artificial Sequence: Synthetic oligonucleotide
cagaacgagcgcucuuuca

SEQ ID NO: 2758969 - RNA, 19 nt, Artificial Sequence
  Description of Artificial Sequence: Synthetic oligonucleotide
gcggcaucgcuccuugugc

SEQ ID NO: 2758970 - RNA, 19 nt, Artificial Sequence
  Description of Artificial Sequence: Synthetic oligonucleotide
gcaugcguaguugcagagg

SEQ ID NO: 2758971 - RNA, 19 nt, Artificial Sequence
  Description of Artificial Sequence: Synthetic oligonucleotide
ggaggagguuaccuuucug

SEQ ID NO: 2758972 - RNA, 19 nt, Artificial Sequence
  Description of Artificial Sequence: Synthetic oligonucleotide
gcuuugaugugucuugccu

SEQ ID NO: 2758973 - RNA, 19 nt, Artificial Sequence
  Description of Artificial Sequence: Synthetic oligonucleotide
caaugaacuucugaggcau

SEQ ID NO: 2758974 - RNA, 19 nt, Artificial Sequence
  Description of Artificial Sequence: Synthetic oligonucleotide
cgggcguucaccagugugg

SEQ ID NO: 2758975 - RNA, 19 nt, Artificial Sequence
  Description of Artificial Sequence: Synthetic oligonucleotide
uacauguagcugggauugu

SEQ ID NO: 2758976 - RNA, 19 nt, Artificial Sequence
  Description of Artificial Sequence: Synthetic oligonucleotide
cauugaacucuuucguuuu

SEQ ID NO: 2758977 - RNA, 19 nt, Artificial Sequence
  Description of Artificial Sequence: Synthetic oligonucleotide
uguggcggaggagguuacc

SEQ ID NO: 2758978 - RNA, 19 nt, Artificial Sequence
  Description of Artificial Sequence: Synthetic oligonucleotide
gcuaaucuguccagaacga

SEQ ID NO: 2758979 - RNA, 19 nt, Artificial Sequence
  Description of Artificial Sequence: Synthetic oligonucleotide
gugucuugccuccacacuu

SEQ ID NO: 2758980 - RNA, 19 nt, Artificial Sequence
  Description of Artificial Sequence: Synthetic oligonucleotide
gugacgcuucucaccaaug

SEQ ID NO: 2758981 - RNA, 19 nt, Artificial Sequence
  Description of Artificial Sequence: Synthetic oligonucleotide
cuugguccaucauucgggu

SEQ ID NO: 2758982 - RNA, 19 nt, Artificial Sequence
  Description of Artificial Sequence: Synthetic oligonucleotide
uggcggaggagguuaccuu

SEQ ID NO: 2758983 - RNA, 19 nt, Artificial Sequence
  Description of Artificial Sequence: Synthetic oligonucleotide
cgcucuuucacuucccauc

SEQ ID NO: 2758984 - RNA, 19 nt, Artificial Sequence
  Description of Artificial Sequence: Synthetic oligonucleotide
acuucccaucuccgcuuug

SEQ ID NO: 2758985 - RNA, 19 nt, Artificial Sequence
  Description of Artificial Sequence: Synthetic oligonucleotide
agauagcugauggcauuau

SEQ ID NO: 2758986 - RNA, 19 nt, Artificial Sequence
  Description of Artificial Sequence: Synthetic oligonucleotide
ccaaugaacuucugaggca

SEQ ID NO: 2758987 - RNA, 19 nt, Artificial Sequence
  Description of Artificial Sequence: Synthetic oligonucleotide
cccugugugcagcuuaaug

SEQ ID NO: 2758988 - RNA, 19 nt, Artificial Sequence
  Description of Artificial Sequence: Synthetic oligonucleotide
aacgugcggcaucgcuccu

SEQ ID NO: 2758989 - RNA, 19 nt, Artificial Sequence
  Description of Artificial Sequence: Synthetic oligonucleotide
ccacacuuguggcaucccc

SEQ ID NO: 2758990 - RNA, 19 nt, Artificial Sequence
  Description of Artificial Sequence: Synthetic oligonucleotide
cccgugagcgcaucucucc

SEQ ID NO: 2758991 - RNA, 19 nt, Artificial Sequence
  Description of Artificial Sequence: Synthetic oligonucleotide
auguggcggaggagguuac

SEQ ID NO: 2758992 - RNA, 19 nt, Artificial Sequence
  Description of Artificial Sequence: Synthetic oligonucleotide
guucaccaguguggcuucg

SEQ ID NO: 2758993 - RNA, 19 nt, Artificial Sequence
  Description of Artificial Sequence: Synthetic oligonucleotide
augccccgcacugauuaca

SEQ ID NO: 2758994 - RNA, 19 nt, Artificial Sequence
  Description of Artificial Sequence: Synthetic oligonucleotide
agguuaccuuucugaguaa

SEQ ID NO: 2758995 - RNA, 19 nt, Artificial Sequence
  Description of Artificial Sequence: Synthetic oligonucleotide
gagugcguccucagguguc

SEQ ID NO: 2758996 - RNA, 19 nt, Artificial Sequence
  Description of Artificial Sequence: Synthetic oligonucleotide
ggucugcauuaucucacuc

SEQ ID NO: 2758997 - RNA, 19 nt, Artificial Sequence
  Description of Artificial Sequence: Synthetic oligonucleotide
gcagcuuaauguggcggag

SEQ ID NO: 2758998 - RNA, 19 nt, Artificial Sequence
  Description of Artificial Sequence: Synthetic oligonucleotide
gcucuuucacuucccaucu

SEQ ID NO: 2758999 - RNA, 19 nt, Artificial Sequence
  Description of Artificial Sequence: Synthetic oligonucleotide
ggagguuaccuuucugagu

SEQ ID NO: 2759000 - RNA, 19 nt, Artificial Sequence
  Description of Artificial Sequence: Synthetic oligonucleotide
gcuuaauguggcggaggag

SEQ ID NO: 2759001 - RNA, 19 nt, Artificial Sequence
  Description of Artificial Sequence: Synthetic oligonucleotide
caggugucccgugagcgca

SEQ ID NO: 2759002 - RNA, 19 nt, Artificial Sequence
  Description of Artificial Sequence: Synthetic oligonucleotide
gagcgcucuuucacuuccc

SEQ ID NO: 2759003 - RNA, 19 nt, Artificial Sequence
  Description of Artificial Sequence: Synthetic oligonucleotide
cgagcgcucuuucacuucc

SEQ ID NO: 2759004 - RNA, 19 nt, Artificial Sequence
  Description of Artificial Sequence: Synthetic oligonucleotide
guccucaggugucccguga

SEQ ID NO: 2759005 - RNA, 19 nt, Artificial Sequence
  Description of Artificial Sequence: Synthetic oligonucleotide
gguuaccuuucugaguaaa

SEQ ID NO: 2759006 - RNA, 19 nt, Artificial Sequence
  Description of Artificial Sequence: Synthetic oligonucleotide
cgggucugcauuaucucac

SEQ ID NO: 2759007 - RNA, 19 nt, Artificial Sequence
  Description of Artificial Sequence: Synthetic oligonucleotide
gcgcaucucuccuuuggca

SEQ ID NO: 2759008 - RNA, 19 nt, Artificial Sequence
  Description of Artificial Sequence: Synthetic oligonucleotide
gggcguucaccaguguggc

SEQ ID NO: 2759009 - RNA, 19 nt, Artificial Sequence
  Description of Artificial Sequence: Synthetic oligonucleotide
gcuucgcuuaugaaccauc

SEQ ID NO: 2759010 - RNA, 19 nt, Artificial Sequence
  Description of Artificial Sequence: Synthetic oligonucleotide
gguccaucauucgggucug

SEQ ID NO: 2759011 - RNA, 19 nt, Artificial Sequence
  Description of Artificial Sequence: Synthetic oligonucleotide
ccaucaagacauugaagcu

SEQ ID NO: 2759012 - RNA, 19 nt, Artificial Sequence
  Description of Artificial Sequence: Synthetic oligonucleotide
cuccacagagugcguccuc

SEQ ID NO: 2759013 - RNA, 19 nt, Artificial Sequence
  Description of Artificial Sequence: Synthetic oligonucleotide
gcuugcuaaucuguccaga

SEQ ID NO: 2759014 - RNA, 19 nt, Artificial Sequence
  Description of Artificial Sequence: Synthetic oligonucleotide
ggcauugaacucuuucguu

SEQ ID NO: 2759015 - RNA, 19 nt, Artificial Sequence
  Description of Artificial Sequence: Synthetic oligonucleotide
gucccgugagcgcaucucu

SEQ ID NO: 2759016 - RNA, 19 nt, Artificial Sequence
  Description of Artificial Sequence: Synthetic oligonucleotide
guguggcuucgcuuaugaa

SEQ ID NO: 2759017 - RNA, 19 nt, Artificial Sequence
  Description of Artificial Sequence: Synthetic oligonucleotide
ggcaucgcuccuugugcuc

SEQ ID NO: 2759018 - RNA, 19 nt, Artificial Sequence
  Description of Artificial Sequence: Synthetic oligonucleotide
gugagcgcaucucuccuuu

SEQ ID NO: 2759019 - RNA, 19 nt, Artificial Sequence
  Description of Artificial Sequence: Synthetic oligonucleotide
ccagaacgagcgcucuuuc

SEQ ID NO: 2759020 - RNA, 19 nt, Artificial Sequence
  Description of Artificial Sequence: Synthetic oligonucleotide
cccaggucagaauucugaa

SEQ ID NO: 2759021 - RNA, 19 nt, Artificial Sequence
  Description of Artificial Sequence: Synthetic oligonucleotide
ccaucuccgcuuugaugug

SEQ ID NO: 2759022 - RNA, 19 nt, Artificial Sequence
  Description of Artificial Sequence: Synthetic oligonucleotide
cugaagaaacgugcggcau

SEQ ID NO: 2759023 - RNA, 19 nt, Artificial Sequence
  Description of Artificial Sequence: Synthetic oligonucleotide
ccgcuuugaugugucuugc

SEQ ID NO: 2759024 - RNA, 19 nt, Artificial Sequence
  Description of Artificial Sequence: Synthetic oligonucleotide
gcguaguugcagagguggc

SEQ ID NO: 2759025 - RNA, 19 nt, Artificial Sequence
  Description of Artificial Sequence: Synthetic oligonucleotide
ccuucucguacauguagcu

SEQ ID NO: 2759026 - RNA, 19 nt, Artificial Sequence
  Description of Artificial Sequence: Synthetic oligonucleotide
cgcuucucaccaaugaacu

SEQ ID NO: 2759027 - RNA, 19 nt, Artificial Sequence
  Description of Artificial Sequence: Synthetic oligonucleotide
cucguacauguagcuggga

SEQ ID NO: 2759028 - RNA, 19 nt, Artificial Sequence
  Description of Artificial Sequence: Synthetic oligonucleotide
gggucugcauuaucucacu

SEQ ID NO: 2759029 - RNA, 19 nt, Artificial Sequence
  Description of Artificial Sequence: Synthetic oligonucleotide
ggcggaggagguuaccuuu

SEQ ID NO: 2759030 - RNA, 19 nt, Artificial Sequence
  Description of Artificial Sequence: Synthetic oligonucleotide
ggauuguaguugacaucaa

SEQ ID NO: 2759031 - RNA, 19 nt, Artificial Sequence
  Description of Artificial Sequence: Synthetic oligonucleotide
agguggcacuugaaagguu

SEQ ID NO: 2759032 - RNA, 19 nt, Artificial Sequence
  Description of Artificial Sequence: Synthetic oligonucleotide
cgugcggcaucgcuccuug

SEQ ID NO: 2759033 - RNA, 19 nt, Artificial Sequence
  Description of Artificial Sequence: Synthetic oligonucleotide
gcggaggagguuaccuuuc

SEQ ID NO: 2759034 - RNA, 19 nt, Artificial Sequence
  Description of Artificial Sequence: Synthetic oligonucleotide
cguaguugcagagguggca

SEQ ID NO: 2759035 - RNA, 19 nt, Artificial Sequence
  Description of Artificial Sequence: Synthetic oligonucleotide
gcguucaccaguguggcuu

SEQ ID NO: 2759036 - RNA, 19 nt, Artificial Sequence
  Description of Artificial Sequence: Synthetic oligonucleotide
caucuccgcuuugaugugu

SEQ ID NO: 2759037 - RNA, 19 nt, Artificial Sequence
  Description of Artificial Sequence: Synthetic oligonucleotide
acgugcggcaucgcuccuu

SEQ ID NO: 2759038 - RNA, 19 nt, Artificial Sequence
  Description of Artificial Sequence: Synthetic oligonucleotide
cagugacgcuucucaccaa

SEQ ID NO: 2759039 - RNA, 19 nt, Artificial Sequence
  Description of Artificial Sequence: Synthetic oligonucleotide
guagcuccuuccacagaau

SEQ ID NO: 2759040 - RNA, 19 nt, Artificial Sequence
  Description of Artificial Sequence: Synthetic oligonucleotide
ccaucauucgggucugcau

SEQ ID NO: 2759041 - RNA, 19 nt, Artificial Sequence
  Description of Artificial Sequence: Synthetic oligonucleotide
cuccgcuuugaugugucuu

SEQ ID NO: 2759042 - RNA, 19 nt, Artificial Sequence
  Description of Artificial Sequence: Synthetic oligonucleotide
gcauuaucucacucuccuu

SEQ ID NO: 2759043 - RNA, 19 nt, Artificial Sequence
  Description of Artificial Sequence: Synthetic oligonucleotide
cguacauguagcugggauu

SEQ ID NO: 2759044 - RNA, 19 nt, Artificial Sequence
  Description of Artificial Sequence: Synthetic oligonucleotide
ccgcacugauuacacugga

SEQ ID NO: 2759045 - RNA, 19 nt, Artificial Sequence
  Description of Artificial Sequence: Synthetic oligonucleotide
cgcacugauuacacuggaa

SEQ ID NO: 2759046 - RNA, 19 nt, Artificial Sequence
  Description of Artificial Sequence: Synthetic oligonucleotide
guccagaacgagcgcucuu

SEQ ID NO: 2759047 - RNA, 19 nt, Artificial Sequence
  Description of Artificial Sequence: Synthetic oligonucleotide
ggugucccgugagcgcauc

SEQ ID NO: 2759048 - RNA, 19 nt, Artificial Sequence
  Description of Artificial Sequence: Synthetic oligonucleotide
cucuuucguuuugccacau

SEQ ID NO: 2759049 - RNA, 19 nt, Artificial Sequence
  Description of Artificial Sequence: Synthetic oligonucleotide
cacuucccaucuccgcuuu

SEQ ID NO: 2759050 - RNA, 19 nt, Artificial Sequence
  Description of Artificial Sequence: Synthetic oligonucleotide
gcgcucuuucacuucccau

SEQ ID NO: 2759051 - RNA, 19 nt, Artificial Sequence
  Description of Artificial Sequence: Synthetic oligonucleotide
ggcguucaccaguguggcu

SEQ ID NO: 2759052 - RNA, 19 nt, Artificial Sequence
  Description of Artificial Sequence: Synthetic oligonucleotide
ggcuucgcuuaugaaccau

SEQ ID NO: 2759053 - RNA, 19 nt, Artificial Sequence
  Description of Artificial Sequence: Synthetic oligonucleotide
ccagggaacuucucugcuu

SEQ ID NO: 2759054 - RNA, 19 nt, Artificial Sequence
  Description of Artificial Sequence: Synthetic oligonucleotide
cugaggcauugaacucuuu

SEQ ID NO: 2759055 - RNA, 19 nt, Artificial Sequence
  Description of Artificial Sequence: Synthetic oligonucleotide
ccgugagcgcaucucuccu

SEQ ID NO: 2759056 - RNA, 19 nt, Artificial Sequence
  Description of Artificial Sequence: Synthetic oligonucleotide
gugcggcaucgcuccuugu

SEQ ID NO: 2759057 - RNA, 19 nt, Artificial Sequence
  Description of Artificial Sequence: Synthetic oligonucleotide
gccccgcacugauuacacu

SEQ ID NO: 2759058 - RNA, 19 nt, Artificial Sequence
  Description of Artificial Sequence: Synthetic oligonucleotide
cggcaucgcuccuugugcu

SEQ ID NO: 2759059 - RNA, 19 nt, Artificial Sequence
  Description of Artificial Sequence: Synthetic oligonucleotide
cggaggagguuaccuuucu

SEQ ID NO: 2759060 - RNA, 19 nt, Artificial Sequence
  Description of Artificial Sequence: Synthetic oligonucleotide
cgugagcgcaucucuccuu

SEQ ID NO: 2759061 - RNA, 19 nt, Artificial Sequence
  Description of Artificial Sequence: Synthetic oligonucleotide
ccccugugugcagcuuaau

SEQ ID NO: 2759062 - RNA, 19 nt, Artificial Sequence
  Description of Artificial Sequence: Synthetic oligonucleotide
uugaauaaaauuuauuugc

SEQ ID NO: 2759063 - RNA, 19 nt, Artificial Sequence
  Description of Artificial Sequence: Synthetic oligonucleotide
aaauuuauuugccaggaag

SEQ ID NO: 2759064 - RNA, 19 nt, Artificial Sequence
  Description of Artificial Sequence: Synthetic oligonucleotide
ugaucuugcgacaugaugg

SEQ ID NO: 2759065 - RNA, 19 nt, Artificial Sequence
  Description of Artificial Sequence: Synthetic oligonucleotide
aauuuauuugccaggaagg

SEQ ID NO: 2759066 - RNA, 19 nt, Artificial Sequence
  Description of Artificial Sequence: Synthetic oligonucleotide
aucaauguguuccugaauc

SEQ ID NO: 2759067 - RNA, 19 nt, Artificial Sequence
  Description of Artificial Sequence: Synthetic oligonucleotide
uuuuccguaauucauacuc

SEQ ID NO: 2759068 - RNA, 19 nt, Artificial Sequence
  Description of Artificial Sequence: Synthetic oligonucleotide
uuauuugccaggaaggaug

SEQ ID NO: 2759069 - RNA, 19 nt, Artificial Sequence
  Description of Artificial Sequence: Synthetic oligonucleotide
accacauagaaguccaggc

SEQ ID NO: 2759070 - RNA, 19 nt, Artificial Sequence
  Description of Artificial Sequence: Synthetic oligonucleotide
uuuauuggccuuuugaaua

SEQ ID NO: 2759071 - RNA, 19 nt, Artificial Sequence
  Description of Artificial Sequence: Synthetic oligonucleotide
augccaaaggaccugacgg

SEQ ID NO: 2759072 - RNA, 19 nt, Artificial Sequence
  Description of Artificial Sequence: Synthetic oligonucleotide
uucaccuugaucuugcgac

SEQ ID NO: 2759073 - RNA, 19 nt, Artificial Sequence
  Description of Artificial Sequence: Synthetic oligonucleotide
aaaacaccggugucuggcc

SEQ ID NO: 2759074 - RNA, 19 nt, Artificial Sequence
  Description of Artificial Sequence: Synthetic oligonucleotide
aaagccaaaguuuccggug

SEQ ID NO: 2759075 - RNA, 19 nt, Artificial Sequence
  Description of Artificial Sequence: Synthetic oligonucleotide
aaugcagccuguccugcgc

SEQ ID NO: 2759076 - RNA, 19 nt, Artificial Sequence
  Description of Artificial Sequence: Synthetic oligonucleotide
uugucugcgaugcugaaac

SEQ ID NO: 2759077 - RNA, 19 nt, Artificial Sequence
  Description of Artificial Sequence: Synthetic oligonucleotide
ucauacuucugcuggaacc

SEQ ID NO: 2759078 - RNA, 19 nt, Artificial Sequence
  Description of Artificial Sequence: Synthetic oligonucleotide
aauucauacucccgcaccu

SEQ ID NO: 2759079 - RNA, 19 nt, Artificial Sequence
  Description of Artificial Sequence: Synthetic oligonucleotide
uguuccugaaucccaaagc

SEQ ID NO: 2759080 - RNA, 19 nt, Artificial Sequence
  Description of Artificial Sequence: Synthetic oligonucleotide
uaauucauacucccgcacc

SEQ ID NO: 2759081 - RNA, 19 nt, Artificial Sequence
  Description of Artificial Sequence: Synthetic oligonucleotide
uugccaggaaggaugaucc

SEQ ID NO: 2759082 - RNA, 19 nt, Artificial Sequence
  Description of Artificial Sequence: Synthetic oligonucleotide
aaaguuuccggugucugag

SEQ ID NO: 2759083 - RNA, 19 nt, Artificial Sequence
  Description of Artificial Sequence: Synthetic oligonucleotide
guuccugaaucccaaagcc

SEQ ID NO: 2759084 - RNA, 19 nt, Artificial Sequence
  Description of Artificial Sequence: Synthetic oligonucleotide
gaugccaaaggaccugacg

SEQ ID NO: 2759085 - RNA, 19 nt, Artificial Sequence
  Description of Artificial Sequence: Synthetic oligonucleotide
aaacaccggugucuggccc

SEQ ID NO: 2759086 - RNA, 19 nt, Artificial Sequence
  Description of Artificial Sequence: Synthetic oligonucleotide
uugaucuugcgacaugaug

SEQ ID NO: 2759087 - RNA, 19 nt, Artificial Sequence
  Description of Artificial Sequence: Synthetic oligonucleotide
uuuccguaauucauacucc

SEQ ID NO: 2759088 - RNA, 19 nt, Artificial Sequence
  Description of Artificial Sequence: Synthetic oligonucleotide
cucgggucauacuugaugc

SEQ ID NO: 2759089 - RNA, 19 nt, Artificial Sequence
  Description of Artificial Sequence: Synthetic oligonucleotide
uguguuuggccccaaugca

SEQ ID NO: 2759090 - RNA, 19 nt, Artificial Sequence
  Description of Artificial Sequence: Synthetic oligonucleotide
uccguaauucauacucccg

SEQ ID NO: 2759091 - RNA, 19 nt, Artificial Sequence
  Description of Artificial Sequence: Synthetic oligonucleotide
ucaauguguuccugaaucc

SEQ ID NO: 2759092 - RNA, 19 nt, Artificial Sequence
  Description of Artificial Sequence: Synthetic oligonucleotide
cuccugaugccaaaggacc

SEQ ID NO: 2759093 - RNA, 19 nt, Artificial Sequence
  Description of Artificial Sequence: Synthetic oligonucleotide
cuugcggaugcgaaguucc

SEQ ID NO: 2759094 - RNA, 19 nt, Artificial Sequence
  Description of Artificial Sequence: Synthetic oligonucleotide
cugauucuguguuuggccc

SEQ ID NO: 2759095 - RNA, 19 nt, Artificial Sequence
  Description of Artificial Sequence: Synthetic oligonucleotide
cuuuucaccuugaucuugc

SEQ ID NO: 2759096 - RNA, 19 nt, Artificial Sequence
  Description of Artificial Sequence: Synthetic oligonucleotide
uccugaaucccaaagccaa

SEQ ID NO: 2759097 - RNA, 19 nt, Artificial Sequence
  Description of Artificial Sequence: Synthetic oligonucleotide
gaaaacaccggugucuggc

SEQ ID NO: 2759098 - RNA, 19 nt, Artificial Sequence
  Description of Artificial Sequence: Synthetic oligonucleotide
ucuccugaugccaaaggac

SEQ ID NO: 2759099 - RNA, 19 nt, Artificial Sequence
  Description of Artificial Sequence: Synthetic oligonucleotide
uuugcugauucuguguuug

SEQ ID NO: 2759100 - RNA, 19 nt, Artificial Sequence
  Description of Artificial Sequence: Synthetic oligonucleotide
gaccugacgguguaucugg

SEQ ID NO: 2759101 - RNA, 19 nt, Artificial Sequence
  Description of Artificial Sequence: Synthetic oligonucleotide
uguuuggccccaaugcagc

SEQ ID NO: 2759102 - RNA, 19 nt, Artificial Sequence
  Description of Artificial Sequence: Synthetic oligonucleotide
acagauauugaggcagagc

SEQ ID NO: 2759103 - RNA, 19 nt, Artificial Sequence
  Description of Artificial Sequence: Synthetic oligonucleotide
uuccguaauucauacuccc

SEQ ID NO: 2759104 - RNA, 19 nt, Artificial Sequence
  Description of Artificial Sequence: Synthetic oligonucleotide
uucuccugaugccaaagga

SEQ ID NO: 2759105 - RNA, 19 nt, Artificial Sequence
  Description of Artificial Sequence: Synthetic oligonucleotide
acggcaaucuuuucauuuc

SEQ ID NO: 2759106 - RNA, 19 nt, Artificial Sequence
  Description of Artificial Sequence: Synthetic oligonucleotide
aagccaaaguuuccggugu

SEQ ID NO: 2759107 - RNA, 19 nt, Artificial Sequence
  Description of Artificial Sequence: Synthetic oligonucleotide
uuuccggugucugagaagu

SEQ ID NO: 2759108 - RNA, 19 nt, Artificial Sequence
  Description of Artificial Sequence: Synthetic oligonucleotide
uauuugccaggaaggauga

SEQ ID NO: 2759109 - RNA, 19 nt, Artificial Sequence
  Description of Artificial Sequence: Synthetic oligonucleotide
aacaccggugucuggcccg

SEQ ID NO: 2759110 - RNA, 19 nt, Artificial Sequence
  Description of Artificial Sequence: Synthetic oligonucleotide
uguaucuggcuuuggaaaa

SEQ ID NO: 2759111 - RNA, 19 nt, Artificial Sequence
  Description of Artificial Sequence: Synthetic oligonucleotide
ccauagaucccaaugcucg

SEQ ID NO: 2759112 - RNA, 19 nt, Artificial Sequence
  Description of Artificial Sequence: Synthetic oligonucleotide
aaucccaaagccaaaguuu

SEQ ID NO: 2759113 - RNA, 19 nt, Artificial Sequence
  Description of Artificial Sequence: Synthetic oligonucleotide
cuccccaacacagauauug

SEQ ID NO: 2759114 - RNA, 19 nt, Artificial Sequence
  Description of Artificial Sequence: Synthetic oligonucleotide
uggcuuuggaaaacaccgg

SEQ ID NO: 2759115 - RNA, 19 nt, Artificial Sequence
  Description of Artificial Sequence: Synthetic oligonucleotide
uucuugucugcgaugcuga

SEQ ID NO: 2759116 - RNA, 19 nt, Artificial Sequence
  Description of Artificial Sequence: Synthetic oligonucleotide
uggccuuuugaauaaaauu

SEQ ID NO: 2759117 - RNA, 19 nt, Artificial Sequence
  Description of Artificial Sequence: Synthetic oligonucleotide
uuauuggccuuuugaauaa

SEQ ID NO: 2759118 - RNA, 19 nt, Artificial Sequence
  Description of Artificial Sequence: Synthetic oligonucleotide
ucuuugcugauucuguguu

SEQ ID NO: 2759119 - RNA, 19 nt, Artificial Sequence
  Description of Artificial Sequence: Synthetic oligonucleotide
accuggccuacccagcacc

SEQ ID NO: 2759120 - RNA, 19 nt, Artificial Sequence
  Description of Artificial Sequence: Synthetic oligonucleotide
uuccugaaucccaaagcca

SEQ ID NO: 2759121 - RNA, 19 nt, Artificial Sequence
  Description of Artificial Sequence: Synthetic oligonucleotide
aauguguuccugaauccca

SEQ ID NO: 2759122 - RNA, 19 nt, Artificial Sequence
  Description of Artificial Sequence: Synthetic oligonucleotide
uauugaggcagagcuugcg

SEQ ID NO: 2759123 - RNA, 19 nt, Artificial Sequence
  Description of Artificial Sequence: Synthetic oligonucleotide
uugaugcccagaucaaugu

SEQ ID NO: 2759124 - RNA, 19 nt, Artificial Sequence
  Description of Artificial Sequence: Synthetic oligonucleotide
aaggaccugacgguguauc

SEQ ID NO: 2759125 - RNA, 19 nt, Artificial Sequence
  Description of Artificial Sequence: Synthetic oligonucleotide
uguccugcgcuucuugucu

SEQ ID NO: 2759126 - RNA, 19 nt, Artificial Sequence
  Description of Artificial Sequence: Synthetic oligonucleotide
cagauauugaggcagagcu

SEQ ID NO: 2759127 - RNA, 19 nt, Artificial Sequence
  Description of Artificial Sequence: Synthetic oligonucleotide
gaugcgaaguucccgcaug

SEQ ID NO: 2759128 - RNA, 19 nt, Artificial Sequence
  Description of Artificial Sequence: Synthetic oligonucleotide
auuuauuugccaggaagga

SEQ ID NO: 2759129 - RNA, 19 nt, Artificial Sequence
  Description of Artificial Sequence: Synthetic oligonucleotide
aaaccuggccuacccagca

SEQ ID NO: 2759130 - RNA, 19 nt, Artificial Sequence
  Description of Artificial Sequence: Synthetic oligonucleotide
uuucaccuugaucuugcga

SEQ ID NO: 2759131 - RNA, 19 nt, Artificial Sequence
  Description of Artificial Sequence: Synthetic oligonucleotide
ugauucuguguuuggcccc

SEQ ID NO: 2759132 - RNA, 19 nt, Artificial Sequence
  Description of Artificial Sequence: Synthetic oligonucleotide
uacucccgcaccuucagac

SEQ ID NO: 2759133 - RNA, 19 nt, Artificial Sequence
  Description of Artificial Sequence: Synthetic oligonucleotide
uuugccaggaaggaugauc

SEQ ID NO: 2759134 - RNA, 19 nt, Artificial Sequence
  Description of Artificial Sequence: Synthetic oligonucleotide
ugaugcccagaucaaugug

SEQ ID NO: 2759135 - RNA, 19 nt, Artificial Sequence
  Description of Artificial Sequence: Synthetic oligonucleotide
uuuucaccuugaucuugcg

SEQ ID NO: 2759136 - RNA, 19 nt, Artificial Sequence
  Description of Artificial Sequence: Synthetic oligonucleotide
cacauagaaguccaggcca

SEQ ID NO: 2759137 - RNA, 19 nt, Artificial Sequence
  Description of Artificial Sequence: Synthetic oligonucleotide
uugaggcagagcuugcgga

SEQ ID NO: 2759138 - RNA, 19 nt, Artificial Sequence
  Description of Artificial Sequence: Synthetic oligonucleotide
auagaaguccaggccauag

SEQ ID NO: 2759139 - RNA, 19 nt, Artificial Sequence
  Description of Artificial Sequence: Synthetic oligonucleotide
uuuauuugccaggaaggau

SEQ ID NO: 2759140 - RNA, 19 nt, Artificial Sequence
  Description of Artificial Sequence: Synthetic oligonucleotide
aaugcucgggucauacuug

SEQ ID NO: 2759141 - RNA, 19 nt, Artificial Sequence
  Description of Artificial Sequence: Synthetic oligonucleotide
acucccgcaccuucagacc

SEQ ID NO: 2759142 - RNA, 19 nt, Artificial Sequence
  Description of Artificial Sequence: Synthetic oligonucleotide
aggaaggaugaucccauca

SEQ ID NO: 2759143 - RNA, 19 nt, Artificial Sequence
  Description of Artificial Sequence: Synthetic oligonucleotide
gaugcugaaaccuggccua

SEQ ID NO: 2759144 - RNA, 19 nt, Artificial Sequence
  Description of Artificial Sequence: Synthetic oligonucleotide
acuucugcuggaaccagcg

SEQ ID NO: 2759145 - RNA, 19 nt, Artificial Sequence
  Description of Artificial Sequence: Synthetic oligonucleotide
uccacggacagugcagugg

SEQ ID NO: 2759146 - RNA, 19 nt, Artificial Sequence
  Description of Artificial Sequence: Synthetic oligonucleotide
guaauucauacucccgcac

SEQ ID NO: 2759147 - RNA, 19 nt, Artificial Sequence
  Description of Artificial Sequence: Synthetic oligonucleotide
uggaaaacaccggugucug

SEQ ID NO: 2759148 - RNA, 19 nt, Artificial Sequence
  Description of Artificial Sequence: Synthetic oligonucleotide
guguuccugaaucccaaag

SEQ ID NO: 2759149 - RNA, 19 nt, Artificial Sequence
  Description of Artificial Sequence: Synthetic oligonucleotide
gaucuugcgacaugaugga

SEQ ID NO: 2759150 - RNA, 19 nt, Artificial Sequence
  Description of Artificial Sequence: Synthetic oligonucleotide
uagaaguccaggccauaga

SEQ ID NO: 2759151 - RNA, 19 nt, Artificial Sequence
  Description of Artificial Sequence: Synthetic oligonucleotide
gaucccaaugcucggguca

SEQ ID NO: 2759152 - RNA, 19 nt, Artificial Sequence
  Description of Artificial Sequence: Synthetic oligonucleotide
uggacggcaaucuuuucau

SEQ ID NO: 2759153 - RNA, 19 nt, Artificial Sequence
  Description of Artificial Sequence: Synthetic oligonucleotide
ucauacucccgcaccuuca

SEQ ID NO: 2759154 - RNA, 19 nt, Artificial Sequence
  Description of Artificial Sequence: Synthetic oligonucleotide
uucugccuuggcuccacgg

SEQ ID NO: 2759155 - RNA, 19 nt, Artificial Sequence
  Description of Artificial Sequence: Synthetic oligonucleotide
augcgaaguucccgcaugg

SEQ ID NO: 2759156 - RNA, 19 nt, Artificial Sequence
  Description of Artificial Sequence: Synthetic oligonucleotide
uucauacucccgcaccuuc

SEQ ID NO: 2759157 - RNA, 19 nt, Artificial Sequence
  Description of Artificial Sequence: Synthetic oligonucleotide
uccugaugccaaaggaccu

SEQ ID NO: 2759158 - RNA, 19 nt, Artificial Sequence
  Description of Artificial Sequence: Synthetic oligonucleotide
ugcgaugcugaaaccuggc

SEQ ID NO: 2759159 - RNA, 19 nt, Artificial Sequence
  Description of Artificial Sequence: Synthetic oligonucleotide
acggacagugcaguggacg

SEQ ID NO: 2759160 - RNA, 19 nt, Artificial Sequence
  Description of Artificial Sequence: Synthetic oligonucleotide
cugaaucccaaagccaaag

SEQ ID NO: 2759161 - RNA, 19 nt, Artificial Sequence
  Description of Artificial Sequence: Synthetic oligonucleotide
guguaucuggcuuuggaaa

SEQ ID NO: 2759162 - RNA, 19 nt, Artificial Sequence
  Description of Artificial Sequence: Synthetic oligonucleotide
accuuggccgcccugguca

SEQ ID NO: 2759163 - RNA, 19 nt, Artificial Sequence
  Description of Artificial Sequence: Synthetic oligonucleotide
uccccaacacagauauuga

SEQ ID NO: 2759164 - RNA, 19 nt, Artificial Sequence
  Description of Artificial Sequence: Synthetic oligonucleotide
gcugauucuguguuuggcc

SEQ ID NO: 2759165 - RNA, 19 nt, Artificial Sequence
  Description of Artificial Sequence: Synthetic oligonucleotide
uagaucccaaugcucgggu

SEQ ID NO: 2759166 - RNA, 19 nt, Artificial Sequence
  Description of Artificial Sequence: Synthetic oligonucleotide
cugcgaugcugaaaccugg

SEQ ID NO: 2759167 - RNA, 19 nt, Artificial Sequence
  Description of Artificial Sequence: Synthetic oligonucleotide
ucccaaagccaaaguuucc

SEQ ID NO: 2759168 - RNA, 19 nt, Artificial Sequence
  Description of Artificial Sequence: Synthetic oligonucleotide
aucccaucauacuucugcu

SEQ ID NO: 2759169 - RNA, 19 nt, Artificial Sequence
  Description of Artificial Sequence: Synthetic oligonucleotide
ucaccuugaucuugcgaca

SEQ ID NO: 2759170 - RNA, 19 nt, Artificial Sequence
  Description of Artificial Sequence: Synthetic oligonucleotide
agccuaucuccgcucuccc

SEQ ID NO: 2759171 - RNA, 19 nt, Artificial Sequence
  Description of Artificial Sequence: Synthetic oligonucleotide
auuucuccugaugccaaag

SEQ ID NO: 2759172 - RNA, 19 nt, Artificial Sequence
  Description of Artificial Sequence: Synthetic oligonucleotide
ugcggaugcgaaguucccg

SEQ ID NO: 2759173 - RNA, 19 nt, Artificial Sequence
  Description of Artificial Sequence: Synthetic oligonucleotide
ugccaaaggaccugacggu

SEQ ID NO: 2759174 - RNA, 19 nt, Artificial Sequence
  Description of Artificial Sequence: Synthetic oligonucleotide
uggucagccuaucuccgcu

SEQ ID NO: 2759175 - RNA, 19 nt, Artificial Sequence
  Description of Artificial Sequence: Synthetic oligonucleotide
ugcgcuucuugucugcgau

SEQ ID NO: 2759176 - RNA, 19 nt, Artificial Sequence
  Description of Artificial Sequence: Synthetic oligonucleotide
ucccaucauacuucugcug

SEQ ID NO: 2759177 - RNA, 19 nt, Artificial Sequence
  Description of Artificial Sequence: Synthetic oligonucleotide
auauugaggcagagcuugc

SEQ ID NO: 2759178 - RNA, 19 nt, Artificial Sequence
  Description of Artificial Sequence: Synthetic oligonucleotide
uacuugaugcccagaucaa

SEQ ID NO: 2759179 - RNA, 19 nt, Artificial Sequence
  Description of Artificial Sequence: Synthetic oligonucleotide
uaucuggcuuuggaaaaca

SEQ ID NO: 2759180 - RNA, 19 nt, Artificial Sequence
  Description of Artificial Sequence: Synthetic oligonucleotide
aaguuuccggugucugaga

SEQ ID NO: 2759181 - RNA, 19 nt, Artificial Sequence
  Description of Artificial Sequence: Synthetic oligonucleotide
cuuuggaaaacaccggugu

SEQ ID NO: 2759182 - RNA, 19 nt, Artificial Sequence
  Description of Artificial Sequence: Synthetic oligonucleotide
aguuuccggugucugagaa

SEQ ID NO: 2759183 - RNA, 19 nt, Artificial Sequence
  Description of Artificial Sequence: Synthetic oligonucleotide
guggacggcaaucuuuuca

SEQ ID NO: 2759184 - RNA, 19 nt, Artificial Sequence
  Description of Artificial Sequence: Synthetic oligonucleotide
uggaaccagcgcauggccu

SEQ ID NO: 2759185 - RNA, 19 nt, Artificial Sequence
  Description of Artificial Sequence: Synthetic oligonucleotide
gaaggaugaucccaucaua

SEQ ID NO: 2759186 - RNA, 19 nt, Artificial Sequence
  Description of Artificial Sequence: Synthetic oligonucleotide
cauacucccgcaccuucag

SEQ ID NO: 2759187 - RNA, 19 nt, Artificial Sequence
  Description of Artificial Sequence: Synthetic oligonucleotide
ccguaauucauacucccgc

SEQ ID NO: 2759188 - RNA, 19 nt, Artificial Sequence
  Description of Artificial Sequence: Synthetic oligonucleotide
guguuuggccccaaugcag

SEQ ID NO: 2759189 - RNA, 19 nt, Artificial Sequence
  Description of Artificial Sequence: Synthetic oligonucleotide
ugucuggcccgugagcugc

SEQ ID NO: 2759190 - RNA, 19 nt, Artificial Sequence
  Description of Artificial Sequence: Synthetic oligonucleotide
cuggaaccagcgcauggcc

SEQ ID NO: 2759191 - RNA, 19 nt, Artificial Sequence
  Description of Artificial Sequence: Synthetic oligonucleotide
agccaaaguuuccgguguc

SEQ ID NO: 2759192 - RNA, 19 nt, Artificial Sequence
  Description of Artificial Sequence: Synthetic oligonucleotide
gcccagaucaauguguucc

SEQ ID NO: 2759193 - RNA, 19 nt, Artificial Sequence
  Description of Artificial Sequence: Synthetic oligonucleotide
guuuccggugucugagaag

SEQ ID NO: 2759194 - RNA, 19 nt, Artificial Sequence
  Description of Artificial Sequence: Synthetic oligonucleotide
agcugcuccaacaccuugg

SEQ ID NO: 2759195 - RNA, 19 nt, Artificial Sequence
  Description of Artificial Sequence: Synthetic oligonucleotide
cagaucaauguguuccuga

SEQ ID NO: 2759196 - RNA, 19 nt, Artificial Sequence
  Description of Artificial Sequence: Synthetic oligonucleotide
gaaaccuggccuacccagc

SEQ ID NO: 2759197 - RNA, 19 nt, Artificial Sequence
  Description of Artificial Sequence: Synthetic oligonucleotide
aguggacggcaaucuuuuc

SEQ ID NO: 2759198 - RNA, 19 nt, Artificial Sequence
  Description of Artificial Sequence: Synthetic oligonucleotide
ucuccgcucuccccaacac

SEQ ID NO: 2759199 - RNA, 19 nt, Artificial Sequence
  Description of Artificial Sequence: Synthetic oligonucleotide
caaaguuuccggugucuga

SEQ ID NO: 2759200 - RNA, 19 nt, Artificial Sequence
  Description of Artificial Sequence: Synthetic oligonucleotide
augcucgggucauacuuga

SEQ ID NO: 2759201 - RNA, 19 nt, Artificial Sequence
  Description of Artificial Sequence: Synthetic oligonucleotide
guuuggccccaaugcagcc

SEQ ID NO: 2759202 - RNA, 19 nt, Artificial Sequence
  Description of Artificial Sequence: Synthetic oligonucleotide
gacggcaaucuuuucauuu

SEQ ID NO: 2759203 - RNA, 19 nt, Artificial Sequence
  Description of Artificial Sequence: Synthetic oligonucleotide
ucccgcaugggguucuccu

SEQ ID NO: 2759204 - RNA, 19 nt, Artificial Sequence
  Description of Artificial Sequence: Synthetic oligonucleotide
gcucgggucauacuugaug

SEQ ID NO: 2759205 - RNA, 19 nt, Artificial Sequence
  Description of Artificial Sequence: Synthetic oligonucleotide
aggaccugacgguguaucu

SEQ ID NO: 2759206 - RNA, 19 nt, Artificial Sequence
  Description of Artificial Sequence: Synthetic oligonucleotide
cccaaagccaaaguuuccg

SEQ ID NO: 2759207 - RNA, 19 nt, Artificial Sequence
  Description of Artificial Sequence: Synthetic oligonucleotide
guaucuggcuuuggaaaac

SEQ ID NO: 2759208 - RNA, 19 nt, Artificial Sequence
  Description of Artificial Sequence: Synthetic oligonucleotide
cuggucagccuaucuccgc

SEQ ID NO: 2759209 - RNA, 19 nt, Artificial Sequence
  Description of Artificial Sequence: Synthetic oligonucleotide
gguguaucuggcuuuggaa

SEQ ID NO: 2759210 - RNA, 19 nt, Artificial Sequence
  Description of Artificial Sequence: Synthetic oligonucleotide
aaguucccgcaugggguuc

SEQ ID NO: 2759211 - RNA, 19 nt, Artificial Sequence
  Description of Artificial Sequence: Synthetic oligonucleotide
ugaugccaaaggaccugac

SEQ ID NO: 2759212 - RNA, 19 nt, Artificial Sequence
  Description of Artificial Sequence: Synthetic oligonucleotide
uccggugucugagaaguua

SEQ ID NO: 2759213 - RNA, 19 nt, Artificial Sequence
  Description of Artificial Sequence: Synthetic oligonucleotide
aguccaggccauagauccc

SEQ ID NO: 2759214 - RNA, 19 nt, Artificial Sequence
  Description of Artificial Sequence: Synthetic oligonucleotide
gauucuguguuuggcccca

SEQ ID NO: 2759215 - RNA, 19 nt, Artificial Sequence
  Description of Artificial Sequence: Synthetic oligonucleotide
gacgguguaucuggcuuug

SEQ ID NO: 2759216 - RNA, 19 nt, Artificial Sequence
  Description of Artificial Sequence: Synthetic oligonucleotide
cugccuuggcuccacggac

SEQ ID NO: 2759217 - RNA, 19 nt, Artificial Sequence
  Description of Artificial Sequence: Synthetic oligonucleotide
cacagauauugaggcagag

SEQ ID NO: 2759218 - RNA, 19 nt, Artificial Sequence
  Description of Artificial Sequence: Synthetic oligonucleotide
gaccuuucuccagaauuuc

SEQ ID NO: 2759219 - RNA, 19 nt, Artificial Sequence
  Description of Artificial Sequence: Synthetic oligonucleotide
cagccuaucuccgcucucc

SEQ ID NO: 2759220 - RNA, 19 nt, Artificial Sequence
  Description of Artificial Sequence: Synthetic oligonucleotide
accuugaucuugcgacaug

SEQ ID NO: 2759221 - RNA, 19 nt, Artificial Sequence
  Description of Artificial Sequence: Synthetic oligonucleotide
cccuggucagccuaucucc

SEQ ID NO: 2759222 - RNA, 19 nt, Artificial Sequence
  Description of Artificial Sequence: Synthetic oligonucleotide
caacacagauauugaggca

SEQ ID NO: 2759223 - RNA, 19 nt, Artificial Sequence
  Description of Artificial Sequence: Synthetic oligonucleotide
uccuuuucaccuugaucuu

SEQ ID NO: 2759224 - RNA, 19 nt, Artificial Sequence
  Description of Artificial Sequence: Synthetic oligonucleotide
ugacgguguaucuggcuuu

SEQ ID NO: 2759225 - RNA, 19 nt, Artificial Sequence
  Description of Artificial Sequence: Synthetic oligonucleotide
uuggccgcccuggucagcc

SEQ ID NO: 2759226 - RNA, 19 nt, Artificial Sequence
  Description of Artificial Sequence: Synthetic oligonucleotide
uuuggccccaaugcagccu

SEQ ID NO: 2759227 - RNA, 19 nt, Artificial Sequence
  Description of Artificial Sequence: Synthetic oligonucleotide
aucuccgcucuccccaaca

SEQ ID NO: 2759228 - RNA, 19 nt, Artificial Sequence
  Description of Artificial Sequence: Synthetic oligonucleotide
uuggcuccacggacagugc

SEQ ID NO: 2759229 - RNA, 19 nt, Artificial Sequence
  Description of Artificial Sequence: Synthetic oligonucleotide
ggaaaacaccggugucugg

SEQ ID NO: 2759230 - RNA, 19 nt, Artificial Sequence
  Description of Artificial Sequence: Synthetic oligonucleotide
gcggaugcgaaguucccgc

SEQ ID NO: 2759231 - RNA, 19 nt, Artificial Sequence
  Description of Artificial Sequence: Synthetic oligonucleotide
cuguccugcgcuucuuguc

SEQ ID NO: 2759232 - RNA, 19 nt, Artificial Sequence
  Description of Artificial Sequence: Synthetic oligonucleotide
ggccuuuugaauaaaauuu

SEQ ID NO: 2759233 - RNA, 19 nt, Artificial Sequence
  Description of Artificial Sequence: Synthetic oligonucleotide
ggaaccagcgcauggccuc

SEQ ID NO: 2759234 - RNA, 19 nt, Artificial Sequence
  Description of Artificial Sequence: Synthetic oligonucleotide
acuugaugcccagaucaau

SEQ ID NO: 2759235 - RNA, 19 nt, Artificial Sequence
  Description of Artificial Sequence: Synthetic oligonucleotide
uggcccgugagcugcucca

SEQ ID NO: 2759236 - RNA, 19 nt, Artificial Sequence
  Description of Artificial Sequence: Synthetic oligonucleotide
auuggccuuuugaauaaaa

SEQ ID NO: 2759237 - RNA, 19 nt, Artificial Sequence
  Description of Artificial Sequence: Synthetic oligonucleotide
ugcaguggacggcaaucuu

SEQ ID NO: 2759238 - RNA, 19 nt, Artificial Sequence
  Description of Artificial Sequence: Synthetic oligonucleotide
gcuuuggaaaacaccggug

SEQ ID NO: 2759239 - RNA, 19 nt, Artificial Sequence
  Description of Artificial Sequence: Synthetic oligonucleotide
ucagccuaucuccgcucuc

SEQ ID NO: 2759240 - RNA, 19 nt, Artificial Sequence
  Description of Artificial Sequence: Synthetic oligonucleotide
accugacgguguaucuggc

SEQ ID NO: 2759241 - RNA, 19 nt, Artificial Sequence
  Description of Artificial Sequence: Synthetic oligonucleotide
uauuggccuuuugaauaaa

SEQ ID NO: 2759242 - RNA, 19 nt, Artificial Sequence
  Description of Artificial Sequence: Synthetic oligonucleotide
ccuggucagccuaucuccg

SEQ ID NO: 2759243 - RNA, 19 nt, Artificial Sequence
  Description of Artificial Sequence: Synthetic oligonucleotide
gugucugagaaguuauuuu

SEQ ID NO: 2759244 - RNA, 19 nt, Artificial Sequence
  Description of Artificial Sequence: Synthetic oligonucleotide
ccccaacacagauauugag

SEQ ID NO: 2759245 - RNA, 19 nt, Artificial Sequence
  Description of Artificial Sequence: Synthetic oligonucleotide
gaucaauguguuccugaau

SEQ ID NO: 2759246 - RNA, 19 nt, Artificial Sequence
  Description of Artificial Sequence: Synthetic oligonucleotide
gaaccagcgcauggccucc

SEQ ID NO: 2759247 - RNA, 19 nt, Artificial Sequence
  Description of Artificial Sequence: Synthetic oligonucleotide
acacagauauugaggcaga

SEQ ID NO: 2759248 - RNA, 19 nt, Artificial Sequence
  Description of Artificial Sequence: Synthetic oligonucleotide
aaaggaccugacgguguau

SEQ ID NO: 2759249 - RNA, 19 nt, Artificial Sequence
  Description of Artificial Sequence: Synthetic oligonucleotide
auacucccgcaccuucaga

SEQ ID NO: 2759250 - RNA, 19 nt, Artificial Sequence
  Description of Artificial Sequence: Synthetic oligonucleotide
augcagccuguccugcgcu

SEQ ID NO: 2759251 - RNA, 19 nt, Artificial Sequence
  Description of Artificial Sequence: Synthetic oligonucleotide
uucuguguuuggccccaau

SEQ ID NO: 2759252 - RNA, 19 nt, Artificial Sequence
  Description of Artificial Sequence: Synthetic oligonucleotide
agauauugaggcagagcuu

SEQ ID NO: 2759253 - RNA, 19 nt, Artificial Sequence
  Description of Artificial Sequence: Synthetic oligonucleotide
cucuuugcugauucugugu

SEQ ID NO: 2759254 - RNA, 19 nt, Artificial Sequence
  Description of Artificial Sequence: Synthetic oligonucleotide
caaugcucgggucauacuu

SEQ ID NO: 2759255 - RNA, 19 nt, Artificial Sequence
  Description of Artificial Sequence: Synthetic oligonucleotide
ugcccagaucaauguguuc

SEQ ID NO: 2759256 - RNA, 19 nt, Artificial Sequence
  Description of Artificial Sequence: Synthetic oligonucleotide
ccucuuugcugauucugug

SEQ ID NO: 2759257 - RNA, 19 nt, Artificial Sequence
  Description of Artificial Sequence: Synthetic oligonucleotide
uaucuccgcucuccccaac

SEQ ID NO: 2759258 - RNA, 19 nt, Artificial Sequence
  Description of Artificial Sequence: Synthetic oligonucleotide
accggugucuggcccguga

SEQ ID NO: 2759259 - RNA, 19 nt, Artificial Sequence
  Description of Artificial Sequence: Synthetic oligonucleotide
gcgaugcugaaaccuggcc

SEQ ID NO: 2759260 - RNA, 19 nt, Artificial Sequence
  Description of Artificial Sequence: Synthetic oligonucleotide
cagagcuugcggaugcgaa

SEQ ID NO: 2759261 - RNA, 19 nt, Artificial Sequence
  Description of Artificial Sequence: Synthetic oligonucleotide
cugaaaccuggccuaccca

SEQ ID NO: 2759262 - RNA, 19 nt, Artificial Sequence
  Description of Artificial Sequence: Synthetic oligonucleotide
auguguuccugaaucccaa

SEQ ID NO: 2759263 - RNA, 19 nt, Artificial Sequence
  Description of Artificial Sequence: Synthetic oligonucleotide
gaaguucccgcaugggguu

SEQ ID NO: 2759264 - RNA, 19 nt, Artificial Sequence
  Description of Artificial Sequence: Synthetic oligonucleotide
ggcuuuggaaaacaccggu

SEQ ID NO: 2759265 - RNA, 19 nt, Artificial Sequence
  Description of Artificial Sequence: Synthetic oligonucleotide
cuggcccgugagcugcucc

SEQ ID NO: 2759266 - RNA, 19 nt, Artificial Sequence
  Description of Artificial Sequence: Synthetic oligonucleotide
guccugcgcuucuugucug

SEQ ID NO: 2759267 - RNA, 19 nt, Artificial Sequence
  Description of Artificial Sequence: Synthetic oligonucleotide
gagcuugcggaugcgaagu

SEQ ID NO: 2759268 - RNA, 19 nt, Artificial Sequence
  Description of Artificial Sequence: Synthetic oligonucleotide
ggaccugacgguguaucug

SEQ ID NO: 2759269 - RNA, 19 nt, Artificial Sequence
  Description of Artificial Sequence: Synthetic oligonucleotide
gccaaaggaccugacggug

SEQ ID NO: 2759270 - RNA, 19 nt, Artificial Sequence
  Description of Artificial Sequence: Synthetic oligonucleotide
ccuaucuccgcucucccca

SEQ ID NO: 2759271 - RNA, 19 nt, Artificial Sequence
  Description of Artificial Sequence: Synthetic oligonucleotide
cauuucuccugaugccaaa

SEQ ID NO: 2759272 - RNA, 19 nt, Artificial Sequence
  Description of Artificial Sequence: Synthetic oligonucleotide
auucauacucccgcaccuu

SEQ ID NO: 2759273 - RNA, 19 nt, Artificial Sequence
  Description of Artificial Sequence: Synthetic oligonucleotide
gugucuggcccgugagcug

SEQ ID NO: 2759274 - RNA, 19 nt, Artificial Sequence
  Description of Artificial Sequence: Synthetic oligonucleotide
caaaggaccugacggugua

SEQ ID NO: 2759275 - RNA, 19 nt, Artificial Sequence
  Description of Artificial Sequence: Synthetic oligonucleotide
cccaaugcagccuguccug

SEQ ID NO: 2759276 - RNA, 19 nt, Artificial Sequence
  Description of Artificial Sequence: Synthetic oligonucleotide
cugaugccaaaggaccuga

SEQ ID NO: 2759277 - RNA, 19 nt, Artificial Sequence
  Description of Artificial Sequence: Synthetic oligonucleotide
gggguucuccuuuucaccu

SEQ ID NO: 2759278 - RNA, 19 nt, Artificial Sequence
  Description of Artificial Sequence: Synthetic oligonucleotide
ugcucgggucauacuugau

SEQ ID NO: 2759279 - RNA, 19 nt, Artificial Sequence
  Description of Artificial Sequence: Synthetic oligonucleotide
acgguguaucuggcuuugg

SEQ ID NO: 2759280 - RNA, 19 nt, Artificial Sequence
  Description of Artificial Sequence: Synthetic oligonucleotide
cguaauucauacucccgca

SEQ ID NO: 2759281 - RNA, 19 nt, Artificial Sequence
  Description of Artificial Sequence: Synthetic oligonucleotide
gccauagaucccaaugcuc

SEQ ID NO: 2759282 - RNA, 19 nt, Artificial Sequence
  Description of Artificial Sequence: Synthetic oligonucleotide
augcccagaucaauguguu

SEQ ID NO: 2759283 - RNA, 19 nt, Artificial Sequence
  Description of Artificial Sequence: Synthetic oligonucleotide
aguucccgcaugggguucu

SEQ ID NO: 2759284 - RNA, 19 nt, Artificial Sequence
  Description of Artificial Sequence: Synthetic oligonucleotide
ggccauagaucccaaugcu

SEQ ID NO: 2759285 - RNA, 19 nt, Artificial Sequence
  Description of Artificial Sequence: Synthetic oligonucleotide
gccaggaaggaugauccca

SEQ ID NO: 2759286 - RNA, 19 nt, Artificial Sequence
  Description of Artificial Sequence: Synthetic oligonucleotide
cuugucugcgaugcugaaa

SEQ ID NO: 2759287 - RNA, 19 nt, Artificial Sequence
  Description of Artificial Sequence: Synthetic oligonucleotide
ccuugaucuugcgacauga

SEQ ID NO: 2759288 - RNA, 19 nt, Artificial Sequence
  Description of Artificial Sequence: Synthetic oligonucleotide
gccccaaugcagccugucc

SEQ ID NO: 2759289 - RNA, 19 nt, Artificial Sequence
  Description of Artificial Sequence: Synthetic oligonucleotide
cgggucauacuugaugccc

SEQ ID NO: 2759290 - RNA, 19 nt, Artificial Sequence
  Description of Artificial Sequence: Synthetic oligonucleotide
cacggacagugcaguggac

SEQ ID NO: 2759291 - RNA, 19 nt, Artificial Sequence
  Description of Artificial Sequence: Synthetic oligonucleotide
cugacgguguaucuggcuu

SEQ ID NO: 2759292 - RNA, 19 nt, Artificial Sequence
  Description of Artificial Sequence: Synthetic oligonucleotide
agcuugcggaugcgaaguu

SEQ ID NO: 2759293 - RNA, 19 nt, Artificial Sequence
  Description of Artificial Sequence: Synthetic oligonucleotide
gucagccuaucuccgcucu

SEQ ID NO: 2759294 - RNA, 19 nt, Artificial Sequence
  Description of Artificial Sequence: Synthetic oligonucleotide
ggugucuggcccgugagcu

SEQ ID NO: 2759295 - RNA, 19 nt, Artificial Sequence
  Description of Artificial Sequence: Synthetic oligonucleotide
ugcagccuguccugcgcuu

SEQ ID NO: 2759296 - RNA, 19 nt, Artificial Sequence
  Description of Artificial Sequence: Synthetic oligonucleotide
gccuaucuccgcucucccc

SEQ ID NO: 2759297 - RNA, 19 nt, Artificial Sequence
  Description of Artificial Sequence: Synthetic oligonucleotide
cuccgcucuccccaacaca

SEQ ID NO: 2759298 - RNA, 19 nt, Artificial Sequence
  Description of Artificial Sequence: Synthetic oligonucleotide
cuaucuccgcucuccccaa

SEQ ID NO: 2759299 - RNA, 19 nt, Artificial Sequence
  Description of Artificial Sequence: Synthetic oligonucleotide
gcccuggucagccuaucuc

SEQ ID NO: 2759300 - RNA, 19 nt, Artificial Sequence
  Description of Artificial Sequence: Synthetic oligonucleotide
cccaaugcucgggucauac

SEQ ID NO: 2759301 - RNA, 19 nt, Artificial Sequence
  Description of Artificial Sequence: Synthetic oligonucleotide
uuccggugucugagaaguu

SEQ ID NO: 2759302 - RNA, 19 nt, Artificial Sequence
  Description of Artificial Sequence: Synthetic oligonucleotide
caguggacggcaaucuuuu

SEQ ID NO: 2759303 - RNA, 19 nt, Artificial Sequence
  Description of Artificial Sequence: Synthetic oligonucleotide
ggacagugcaguggacggc

SEQ ID NO: 2759304 - RNA, 19 nt, Artificial Sequence
  Description of Artificial Sequence: Synthetic oligonucleotide
cuugaucuugcgacaugau

SEQ ID NO: 2759305 - RNA, 19 nt, Artificial Sequence
  Description of Artificial Sequence: Synthetic oligonucleotide
ucuccccaacacagauauu

SEQ ID NO: 2759306 - RNA, 19 nt, Artificial Sequence
  Description of Artificial Sequence: Synthetic oligonucleotide
ggucagccuaucuccgcuc

SEQ ID NO: 2759307 - RNA, 19 nt, Artificial Sequence
  Description of Artificial Sequence: Synthetic oligonucleotide
cucccgcaccuucagaccu

SEQ ID NO: 2759308 - RNA, 19 nt, Artificial Sequence
  Description of Artificial Sequence: Synthetic oligonucleotide
aaccagcgcauggccuccu

SEQ ID NO: 2759309 - RNA, 19 nt, Artificial Sequence
  Description of Artificial Sequence: Synthetic oligonucleotide
ggugucugagaaguuauuu

SEQ ID NO: 2759310 - RNA, 19 nt, Artificial Sequence
  Description of Artificial Sequence: Synthetic oligonucleotide
cugcgcuucuugucugcga

SEQ ID NO: 2759311 - RNA, 19 nt, Artificial Sequence
  Description of Artificial Sequence: Synthetic oligonucleotide
cuggccuacccagcaccac

SEQ ID NO: 2759312 - RNA, 19 nt, Artificial Sequence
  Description of Artificial Sequence: Synthetic oligonucleotide
caccuuggccgcccugguc

SEQ ID NO: 2759313 - RNA, 19 nt, Artificial Sequence
  Description of Artificial Sequence: Synthetic oligonucleotide
gcuugcggaugcgaaguuc

SEQ ID NO: 2759314 - RNA, 19 nt, Artificial Sequence
  Description of Artificial Sequence: Synthetic oligonucleotide
gccuguccugcgcuucuug

SEQ ID NO: 2759315 - RNA, 19 nt, Artificial Sequence
  Description of Artificial Sequence: Synthetic oligonucleotide
acaccggugucuggcccgu

SEQ ID NO: 2759316 - RNA, 19 nt, Artificial Sequence
  Description of Artificial Sequence: Synthetic oligonucleotide
cgaaguucccgcauggggu

SEQ ID NO: 2759317 - RNA, 19 nt, Artificial Sequence
  Description of Artificial Sequence: Synthetic oligonucleotide
gcgcuucuugucugcgaug

SEQ ID NO: 2759318 - RNA, 19 nt, Artificial Sequence
  Description of Artificial Sequence: Synthetic oligonucleotide
cuuggccgcccuggucagc

SEQ ID NO: 2759319 - RNA, 19 nt, Artificial Sequence
  Description of Artificial Sequence: Synthetic oligonucleotide
ccggugucuggcccgugag

SEQ ID NO: 2759320 - RNA, 19 nt, Artificial Sequence
  Description of Artificial Sequence: Synthetic oligonucleotide
gcaccacauagaaguccag

SEQ ID NO: 2759321 - RNA, 19 nt, Artificial Sequence
  Description of Artificial Sequence: Synthetic oligonucleotide
gcaugggguucuccuuuuc

SEQ ID NO: 2759322 - RNA, 19 nt, Artificial Sequence
  Description of Artificial Sequence: Synthetic oligonucleotide
cgaugcugaaaccuggccu

SEQ ID NO: 2759323 - RNA, 19 nt, Artificial Sequence
  Description of Artificial Sequence: Synthetic oligonucleotide
gcagagcuugcggaugcga

SEQ ID NO: 2759324 - RNA, 19 nt, Artificial Sequence
  Description of Artificial Sequence: Synthetic oligonucleotide
ccuuggccgcccuggucag

SEQ ID NO: 2759325 - RNA, 19 nt, Artificial Sequence
  Description of Artificial Sequence: Synthetic oligonucleotide
ccaggaaggaugaucccau

SEQ ID NO: 2759326 - RNA, 19 nt, Artificial Sequence
  Description of Artificial Sequence: Synthetic oligonucleotide
acagugcaguggacggcaa

SEQ ID NO: 2759327 - RNA, 19 nt, Artificial Sequence
  Description of Artificial Sequence: Synthetic oligonucleotide
auucuguguuuggccccaa

SEQ ID NO: 2759328 - RNA, 19 nt, Artificial Sequence
  Description of Artificial Sequence: Synthetic oligonucleotide
ccaaaggaccugacggugu

SEQ ID NO: 2759329 - RNA, 19 nt, Artificial Sequence
  Description of Artificial Sequence: Synthetic oligonucleotide
ggaugcgaaguucccgcau

SEQ ID NO: 2759330 - RNA, 19 nt, Artificial Sequence
  Description of Artificial Sequence: Synthetic oligonucleotide
ccuggccuacccagcacca

SEQ ID NO: 2759331 - RNA, 19 nt, Artificial Sequence
  Description of Artificial Sequence: Synthetic oligonucleotide
ccccaaugcagccuguccu

SEQ ID NO: 2759332 - RNA, 19 nt, Artificial Sequence
  Description of Artificial Sequence: Synthetic oligonucleotide
cgguguaucuggcuuugga

SEQ ID NO: 2759333 - RNA, 19 nt, Artificial Sequence
  Description of Artificial Sequence: Synthetic oligonucleotide
gcccgugagcugcuccaac

SEQ ID NO: 2759334 - RNA, 19 nt, Artificial Sequence
  Description of Artificial Sequence: Synthetic oligonucleotide
caccuugaucuugcgacau

SEQ ID NO: 2759335 - RNA, 19 nt, Artificial Sequence
  Description of Artificial Sequence: Synthetic oligonucleotide
cccagaucaauguguuccu

SEQ ID NO: 2759336 - RNA, 19 nt, Artificial Sequence
  Description of Artificial Sequence: Synthetic oligonucleotide
gcagccuguccugcgcuuc

SEQ ID NO: 2759337 - RNA, 19 nt, Artificial Sequence
  Description of Artificial Sequence: Synthetic oligonucleotide
gccaaaguuuccggugucu

SEQ ID NO: 2759338 - RNA, 19 nt, Artificial Sequence
  Description of Artificial Sequence: Synthetic oligonucleotide
cagcgcauggccuccucuu

SEQ ID NO: 2759339 - RNA, 19 nt, Artificial Sequence
  Description of Artificial Sequence: Synthetic oligonucleotide
cggugucuggcccgugagc

SEQ ID NO: 2759340 - RNA, 19 nt, Artificial Sequence
  Description of Artificial Sequence: Synthetic oligonucleotide
ccggugucugagaaguuau

SEQ ID NO: 2759341 - RNA, 19 nt, Artificial Sequence
  Description of Artificial Sequence: Synthetic oligonucleotide
guucccgcaugggguucuc

SEQ ID NO: 2759342 - RNA, 19 nt, Artificial Sequence
  Description of Artificial Sequence: Synthetic oligonucleotide
ccugacgguguaucuggcu

SEQ ID NO: 2759343 - RNA, 19 nt, Artificial Sequence
  Description of Artificial Sequence: Synthetic oligonucleotide
ccuguccugcgcuucuugu

SEQ ID NO: 2759344 - RNA, 19 nt, Artificial Sequence
  Description of Artificial Sequence: Synthetic oligonucleotide
ggguucuccuuuucaccuu

SEQ ID NO: 2759345 - RNA, 19 nt, Artificial Sequence
  Description of Artificial Sequence: Synthetic oligonucleotide
ggacggcaaucuuuucauu

SEQ ID NO: 2759346 - RNA, 19 nt, Artificial Sequence
  Description of Artificial Sequence: Synthetic oligonucleotide
ccaaugcucgggucauacu

SEQ ID NO: 2759347 - RNA, 19 nt, Artificial Sequence
  Description of Artificial Sequence: Synthetic oligonucleotide
cggcaaucuuuucauuucu

SEQ ID NO: 2759348 - RNA, 19 nt, Artificial Sequence
  Description of Artificial Sequence: Synthetic oligonucleotide
cggaugcgaaguucccgca

SEQ ID NO: 2759349 - RNA, 19 nt, Artificial Sequence
  Description of Artificial Sequence: Synthetic oligonucleotide
ggccgcccuggucagccua

SEQ ID NO: 2759350 - RNA, 19 nt, Artificial Sequence
  Description of Artificial Sequence: Synthetic oligonucleotide
gccuacccagcaccacaua

SEQ ID NO: 2759351 - RNA, 19 nt, Artificial Sequence
  Description of Artificial Sequence: Synthetic oligonucleotide
ccgcucuccccaacacaga

SEQ ID NO: 2759352 - RNA, 19 nt, Artificial Sequence
  Description of Artificial Sequence: Synthetic oligonucleotide
caccggugucuggcccgug

SEQ ID NO: 2759353 - RNA, 19 nt, Artificial Sequence
  Description of Artificial Sequence: Synthetic oligonucleotide
ccagcgcauggccuccucu

SEQ ID NO: 2759354 - RNA, 19 nt, Artificial Sequence
  Description of Artificial Sequence: Synthetic oligonucleotide
ggcccgugagcugcuccaa

SEQ ID NO: 2759355 - RNA, 19 nt, Artificial Sequence
  Description of Artificial Sequence: Synthetic oligonucleotide
ccgcaccuucagaccuuuc

SEQ ID NO: 2759356 - RNA, 19 nt, Artificial Sequence
  Description of Artificial Sequence: Synthetic oligonucleotide
cgcucuccccaacacagau

SEQ ID NO: 2759357 - RNA, 19 nt, Artificial Sequence
  Description of Artificial Sequence: Synthetic oligonucleotide
ccgcaugggguucuccuuu

SEQ ID NO: 2759358 - RNA, 19 nt, Artificial Sequence
  Description of Artificial Sequence: Synthetic oligonucleotide
cccgcaugggguucuccuu

SEQ ID NO: 2759359 - RNA, 19 nt, Artificial Sequence
  Description of Artificial Sequence: Synthetic oligonucleotide
ccgcccuggucagccuauc

SEQ ID NO: 2759360 - RNA, 19 nt, Artificial Sequence
  Description of Artificial Sequence: Synthetic oligonucleotide
gccgcccuggucagccuau

SEQ ID NO: 2759361 - RNA, 19 nt, Artificial Sequence
  Description of Artificial Sequence: Synthetic oligonucleotide
cgcaugggguucuccuuuu

SEQ ID NO: 2759362 - RNA, 19 nt, Artificial Sequence
  Description of Artificial Sequence: Synthetic oligonucleotide
cgcccuggucagccuaucu

SEQ ID NO: 2759363 - RNA, 19 nt, Artificial Sequence
  Description of Artificial Sequence: Synthetic oligonucleotide
ggccuccucuuugcugauu

SEQ ID NO: 2759364 - RNA, 19 nt, Artificial Sequence
  Description of Artificial Sequence: Synthetic oligonucleotide
cccgcaccuucagaccuuu

SEQ ID NO: 2759365 - RNA, 19 nt, Artificial Sequence
  Description of Artificial Sequence: Synthetic oligonucleotide
aaaguugugugucauuucc

SEQ ID NO: 2759366 - RNA, 19 nt, Artificial Sequence
  Description of Artificial Sequence: Synthetic oligonucleotide
uauaacuucaggcggagcg

SEQ ID NO: 2759367 - RNA, 19 nt, Artificial Sequence
  Description of Artificial Sequence: Synthetic oligonucleotide
aggcuaaugguacagaacc

SEQ ID NO: 2759368 - RNA, 19 nt, Artificial Sequence
  Description of Artificial Sequence: Synthetic oligonucleotide
aagacaucuuuccaugacc

SEQ ID NO: 2759369 - RNA, 19 nt, Artificial Sequence
  Description of Artificial Sequence: Synthetic oligonucleotide
acugguauaacuucaggcg

SEQ ID NO: 2759370 - RNA, 19 nt, Artificial Sequence
  Description of Artificial Sequence: Synthetic oligonucleotide
aacaacaacaacaacaaca

SEQ ID NO: 2759371 - RNA, 19 nt, Artificial Sequence
  Description of Artificial Sequence: Synthetic oligonucleotide
aacugauuccuuuugaacu

SEQ ID NO: 2759372 - RNA, 19 nt, Artificial Sequence
  Description of Artificial Sequence: Synthetic oligonucleotide
auuugaaccugucuguggc

SEQ ID NO: 2759373 - RNA, 19 nt, Artificial Sequence
  Description of Artificial Sequence: Synthetic oligonucleotide
uuuacuccaagucaggaca

SEQ ID NO: 2759374 - RNA, 19 nt, Artificial Sequence
  Description of Artificial Sequence: Synthetic oligonucleotide
uuuuguuuacugaacaaca

SEQ ID NO: 2759375 - RNA, 19 nt, Artificial Sequence
  Description of Artificial Sequence: Synthetic oligonucleotide
uucuaguuccaucagacug

SEQ ID NO: 2759376 - RNA, 19 nt, Artificial Sequence
  Description of Artificial Sequence: Synthetic oligonucleotide
ucuaguuccaucagacugg

SEQ ID NO: 2759377 - RNA, 19 nt, Artificial Sequence
  Description of Artificial Sequence: Synthetic oligonucleotide
ugaacaacaacaacaacaa

SEQ ID NO: 2759378 - RNA, 19 nt, Artificial Sequence
  Description of Artificial Sequence: Synthetic oligonucleotide
aacaacaacaacaacaaaa

SEQ ID NO: 2759379 - RNA, 19 nt, Artificial Sequence
  Description of Artificial Sequence: Synthetic oligonucleotide
aacaacaaaaguugugugu

SEQ ID NO: 2759380 - RNA, 19 nt, Artificial Sequence
  Description of Artificial Sequence: Synthetic oligonucleotide
ggugcagugaauuugaacc

SEQ ID NO: 2759381 - RNA, 19 nt, Artificial Sequence
  Description of Artificial Sequence: Synthetic oligonucleotide
auauucucuccucauuucc

SEQ ID NO: 2759382 - RNA, 19 nt, Artificial Sequence
  Description of Artificial Sequence: Synthetic oligonucleotide
aauuugaaccugucugugg

SEQ ID NO: 2759383 - RNA, 19 nt, Artificial Sequence
  Description of Artificial Sequence: Synthetic oligonucleotide
auuccuuuugaacucacuc

SEQ ID NO: 2759384 - RNA, 19 nt, Artificial Sequence
  Description of Artificial Sequence: Synthetic oligonucleotide
uugaaagaggaucucaugu

SEQ ID NO: 2759385 - RNA, 19 nt, Artificial Sequence
  Description of Artificial Sequence: Synthetic oligonucleotide
gugaauuugaaccugucug

SEQ ID NO: 2759386 - RNA, 19 nt, Artificial Sequence
  Description of Artificial Sequence: Synthetic oligonucleotide
acaacaacaacaaaaguug

SEQ ID NO: 2759387 - RNA, 19 nt, Artificial Sequence
  Description of Artificial Sequence: Synthetic oligonucleotide
ucucaugucugucuggucc

SEQ ID NO: 2759388 - RNA, 19 nt, Artificial Sequence
  Description of Artificial Sequence: Synthetic oligonucleotide
uccuuuugaacucacuccc

SEQ ID NO: 2759389 - RNA, 19 nt, Artificial Sequence
  Description of Artificial Sequence: Synthetic oligonucleotide
aaaaguugugugucauuuc

SEQ ID NO: 2759390 - RNA, 19 nt, Artificial Sequence
  Description of Artificial Sequence: Synthetic oligonucleotide
uugugugucauuuccagug

SEQ ID NO: 2759391 - RNA, 19 nt, Artificial Sequence
  Description of Artificial Sequence: Synthetic oligonucleotide
ucacuuucagccuuguuug

SEQ ID NO: 2759392 - RNA, 19 nt, Artificial Sequence
  Description of Artificial Sequence: Synthetic oligonucleotide
aguuccaucagacugguau

SEQ ID NO: 2759393 - RNA, 19 nt, Artificial Sequence
  Description of Artificial Sequence: Synthetic oligonucleotide
gacugguauaacuucaggc

SEQ ID NO: 2759394 - RNA, 19 nt, Artificial Sequence
  Description of Artificial Sequence: Synthetic oligonucleotide
ggacaaacaagucaguagg

SEQ ID NO: 2759395 - RNA, 19 nt, Artificial Sequence
  Description of Artificial Sequence: Synthetic oligonucleotide
acaacaaaaguuguguguc

SEQ ID NO: 2759396 - RNA, 19 nt, Artificial Sequence
  Description of Artificial Sequence: Synthetic oligonucleotide
uuugaacucacucccuaag

SEQ ID NO: 2759397 - RNA, 19 nt, Artificial Sequence
  Description of Artificial Sequence: Synthetic oligonucleotide
acugauuccuuuugaacuc

SEQ ID NO: 2759398 - RNA, 19 nt, Artificial Sequence
  Description of Artificial Sequence: Synthetic oligonucleotide
uaaagauucuucugugaag

SEQ ID NO: 2759399 - RNA, 19 nt, Artificial Sequence
  Description of Artificial Sequence: Synthetic oligonucleotide
gaaguucccuucuaguucc

SEQ ID NO: 2759400 - RNA, 19 nt, Artificial Sequence
  Description of Artificial Sequence: Synthetic oligonucleotide
uacagaacccuccaaagaa

SEQ ID NO: 2759401 - RNA, 19 nt, Artificial Sequence
  Description of Artificial Sequence: Synthetic oligonucleotide
auacacugcauuugaaguc

SEQ ID NO: 2759402 - RNA, 19 nt, Artificial Sequence
  Description of Artificial Sequence: Synthetic oligonucleotide
ugcacugcuugaaagagga

SEQ ID NO: 2759403 - RNA, 19 nt, Artificial Sequence
  Description of Artificial Sequence: Synthetic oligonucleotide
aagccaccagagcagaaac

SEQ ID NO: 2759404 - RNA, 19 nt, Artificial Sequence
  Description of Artificial Sequence: Synthetic oligonucleotide
gauucuucugugaaguucc

SEQ ID NO: 2759405 - RNA, 19 nt, Artificial Sequence
  Description of Artificial Sequence: Synthetic oligonucleotide
aggacaaacaagucaguag

SEQ ID NO: 2759406 - RNA, 19 nt, Artificial Sequence
  Description of Artificial Sequence: Synthetic oligonucleotide
ugaauuugaaccugucugu

SEQ ID NO: 2759407 - RNA, 19 nt, Artificial Sequence
  Description of Artificial Sequence: Synthetic oligonucleotide
uuccuuuugaacucacucc

SEQ ID NO: 2759408 - RNA, 19 nt, Artificial Sequence
  Description of Artificial Sequence: Synthetic oligonucleotide
agagcagaaacauuucugu

SEQ ID NO: 2759409 - RNA, 19 nt, Artificial Sequence
  Description of Artificial Sequence: Synthetic oligonucleotide
ucauuuccaguggagaagg

SEQ ID NO: 2759410 - RNA, 19 nt, Artificial Sequence
  Description of Artificial Sequence: Synthetic oligonucleotide
uuguuuacugaacaacaac

SEQ ID NO: 2759411 - RNA, 19 nt, Artificial Sequence
  Description of Artificial Sequence: Synthetic oligonucleotide
aucagacugguauaacuuc

SEQ ID NO: 2759412 - RNA, 19 nt, Artificial Sequence
  Description of Artificial Sequence: Synthetic oligonucleotide
ugaacucacucccuaagac

SEQ ID NO: 2759413 - RNA, 19 nt, Artificial Sequence
  Description of Artificial Sequence: Synthetic oligonucleotide
uuuguuuacugaacaacaa

SEQ ID NO: 2759414 - RNA, 19 nt, Artificial Sequence
  Description of Artificial Sequence: Synthetic oligonucleotide
ugugugucauuuccagugg

SEQ ID NO: 2759415 - RNA, 19 nt, Artificial Sequence
  Description of Artificial Sequence: Synthetic oligonucleotide
acaacaacaaaaguugugu

SEQ ID NO: 2759416 - RNA, 19 nt, Artificial Sequence
  Description of Artificial Sequence: Synthetic oligonucleotide
cugguauaacuucaggcgg

SEQ ID NO: 2759417 - RNA, 19 nt, Artificial Sequence
  Description of Artificial Sequence: Synthetic oligonucleotide
agacaucuuuccaugaccc

SEQ ID NO: 2759418 - RNA, 19 nt, Artificial Sequence
  Description of Artificial Sequence: Synthetic oligonucleotide
uguaaagauucuucuguga

SEQ ID NO: 2759419 - RNA, 19 nt, Artificial Sequence
  Description of Artificial Sequence: Synthetic oligonucleotide
aguugugugucauuuccag

SEQ ID NO: 2759420 - RNA, 19 nt, Artificial Sequence
  Description of Artificial Sequence: Synthetic oligonucleotide
uaaugguacagaacccucc

SEQ ID NO: 2759421 - RNA, 19 nt, Artificial Sequence
  Description of Artificial Sequence: Synthetic oligonucleotide
gucaggacaaacaagucag

SEQ ID NO: 2759422 - RNA, 19 nt, Artificial Sequence
  Description of Artificial Sequence: Synthetic oligonucleotide
uccaagucaggacaaacaa

SEQ ID NO: 2759423 - RNA, 19 nt, Artificial Sequence
  Description of Artificial Sequence: Synthetic oligonucleotide
agucaggacaaacaaguca

SEQ ID NO: 2759424 - RNA, 19 nt, Artificial Sequence
  Description of Artificial Sequence: Synthetic oligonucleotide
ucagacugguauaacuuca

SEQ ID NO: 2759425 - RNA, 19 nt, Artificial Sequence
  Description of Artificial Sequence: Synthetic oligonucleotide
aacggagaagaccagggaa

SEQ ID NO: 2759426 - RNA, 19 nt, Artificial Sequence
  Description of Artificial Sequence: Synthetic oligonucleotide
aacaagucaguaggggaac

SEQ ID NO: 2759427 - RNA, 19 nt, Artificial Sequence
  Description of Artificial Sequence: Synthetic oligonucleotide
ugauauucucuccucauuu

SEQ ID NO: 2759428 - RNA, 19 nt, Artificial Sequence
  Description of Artificial Sequence: Synthetic oligonucleotide
ccuuucgucacuuucagcc

SEQ ID NO: 2759429 - RNA, 19 nt, Artificial Sequence
  Description of Artificial Sequence: Synthetic oligonucleotide
uuugaagucuguucuggga

SEQ ID NO: 2759430 - RNA, 19 nt, Artificial Sequence
  Description of Artificial Sequence: Synthetic oligonucleotide
auuugaagucuguucuggg

SEQ ID NO: 2759431 - RNA, 19 nt, Artificial Sequence
  Description of Artificial Sequence: Synthetic oligonucleotide
acaaacaagucaguagggg

SEQ ID NO: 2759432 - RNA, 19 nt, Artificial Sequence
  Description of Artificial Sequence: Synthetic oligonucleotide
ugugucauuuccaguggag

SEQ ID NO: 2759433 - RNA, 19 nt, Artificial Sequence
  Description of Artificial Sequence: Synthetic oligonucleotide
uggagaaggcuaaugguac

SEQ ID NO: 2759434 - RNA, 19 nt, Artificial Sequence
  Description of Artificial Sequence: Synthetic oligonucleotide
uuuuacuccaagucaggac

SEQ ID NO: 2759435 - RNA, 19 nt, Artificial Sequence
  Description of Artificial Sequence: Synthetic oligonucleotide
cuuuccaugacccacugca

SEQ ID NO: 2759436 - RNA, 19 nt, Artificial Sequence
  Description of Artificial Sequence: Synthetic oligonucleotide
aacaacaacaaaaguugug

SEQ ID NO: 2759437 - RNA, 19 nt, Artificial Sequence
  Description of Artificial Sequence: Synthetic oligonucleotide
uucuguuuguaguggcugg

SEQ ID NO: 2759438 - RNA, 19 nt, Artificial Sequence
  Description of Artificial Sequence: Synthetic oligonucleotide
aaggcuaaugguacagaac

SEQ ID NO: 2759439 - RNA, 19 nt, Artificial Sequence
  Description of Artificial Sequence: Synthetic oligonucleotide
uaagacaucuuuccaugac

SEQ ID NO: 2759440 - RNA, 19 nt, Artificial Sequence
  Description of Artificial Sequence: Synthetic oligonucleotide
aagcauacacugcauuuga

SEQ ID NO: 2759441 - RNA, 19 nt, Artificial Sequence
  Description of Artificial Sequence: Synthetic oligonucleotide
cucccuaagacaucuuucc

SEQ ID NO: 2759442 - RNA, 19 nt, Artificial Sequence
  Description of Artificial Sequence: Synthetic oligonucleotide
acaucuuuccaugacccac

SEQ ID NO: 2759443 - RNA, 19 nt, Artificial Sequence
  Description of Artificial Sequence: Synthetic oligonucleotide
agugaauuugaaccugucu

SEQ ID NO: 2759444 - RNA, 19 nt, Artificial Sequence
  Description of Artificial Sequence: Synthetic oligonucleotide
uguuuguaguggcuggggc

SEQ ID NO: 2759445 - RNA, 19 nt, Artificial Sequence
  Description of Artificial Sequence: Synthetic oligonucleotide
caguggagaaggcuaaugg

SEQ ID NO: 2759446 - RNA, 19 nt, Artificial Sequence
  Description of Artificial Sequence: Synthetic oligonucleotide
caaagaagcauacacugca

SEQ ID NO: 2759447 - RNA, 19 nt, Artificial Sequence
  Description of Artificial Sequence: Synthetic oligonucleotide
aagaggaucucaugucugu

SEQ ID NO: 2759448 - RNA, 19 nt, Artificial Sequence
  Description of Artificial Sequence: Synthetic oligonucleotide
auaacuucaggcggagcgc

SEQ ID NO: 2759449 - RNA, 19 nt, Artificial Sequence
  Description of Artificial Sequence: Synthetic oligonucleotide
uuuccaguggagaaggcua

SEQ ID NO: 2759450 - RNA, 19 nt, Artificial Sequence
  Description of Artificial Sequence: Synthetic oligonucleotide
cugucuguggcacagggac

SEQ ID NO: 2759451 - RNA, 19 nt, Artificial Sequence
  Description of Artificial Sequence: Synthetic oligonucleotide
ugugaaguucccuucuagu

SEQ ID NO: 2759452 - RNA, 19 nt, Artificial Sequence
  Description of Artificial Sequence: Synthetic oligonucleotide
cauuugaagucuguucugg

SEQ ID NO: 2759453 - RNA, 19 nt, Artificial Sequence
  Description of Artificial Sequence: Synthetic oligonucleotide
gaagcauacacugcauuug

SEQ ID NO: 2759454 - RNA, 19 nt, Artificial Sequence
  Description of Artificial Sequence: Synthetic oligonucleotide
uugaacucacucccuaaga

SEQ ID NO: 2759455 - RNA, 19 nt, Artificial Sequence
  Description of Artificial Sequence: Synthetic oligonucleotide
uuguuuguaccaaguguug

SEQ ID NO: 2759456 - RNA, 19 nt, Artificial Sequence
  Description of Artificial Sequence: Synthetic oligonucleotide
aggugcagugaauuugaac

SEQ ID NO: 2759457 - RNA, 19 nt, Artificial Sequence
  Description of Artificial Sequence: Synthetic oligonucleotide
aguggagaaggcuaauggu

SEQ ID NO: 2759458 - RNA, 19 nt, Artificial Sequence
  Description of Artificial Sequence: Synthetic oligonucleotide
ugucauuuccaguggagaa

SEQ ID NO: 2759459 - RNA, 19 nt, Artificial Sequence
  Description of Artificial Sequence: Synthetic oligonucleotide
gacaaacaagucaguaggg

SEQ ID NO: 2759460 - RNA, 19 nt, Artificial Sequence
  Description of Artificial Sequence: Synthetic oligonucleotide
agcagaaacauuucuguuu

SEQ ID NO: 2759461 - RNA, 19 nt, Artificial Sequence
  Description of Artificial Sequence: Synthetic oligonucleotide
acaacaacaacaacaacaa

SEQ ID NO: 2759462 - RNA, 19 nt, Artificial Sequence
  Description of Artificial Sequence: Synthetic oligonucleotide
accacagcauccuugauuu

SEQ ID NO: 2759463 - RNA, 19 nt, Artificial Sequence
  Description of Artificial Sequence: Synthetic oligonucleotide
ugguauaacuucaggcgga

SEQ ID NO: 2759464 - RNA, 19 nt, Artificial Sequence
  Description of Artificial Sequence: Synthetic oligonucleotide
caacugauuccuuuugaac

SEQ ID NO: 2759465 - RNA, 19 nt, Artificial Sequence
  Description of Artificial Sequence: Synthetic oligonucleotide
cuugaaagaggaucucaug

SEQ ID NO: 2759466 - RNA, 19 nt, Artificial Sequence
  Description of Artificial Sequence: Synthetic oligonucleotide
aaacaagucaguaggggaa

SEQ ID NO: 2759467 - RNA, 19 nt, Artificial Sequence
  Description of Artificial Sequence: Synthetic oligonucleotide
cagagcagaaacauuucug

SEQ ID NO: 2759468 - RNA, 19 nt, Artificial Sequence
  Description of Artificial Sequence: Synthetic oligonucleotide
cagaacccuccaaagaagc

SEQ ID NO: 2759469 - RNA, 19 nt, Artificial Sequence
  Description of Artificial Sequence: Synthetic oligonucleotide
aguaggggaacggagaaga

SEQ ID NO: 2759470 - RNA, 19 nt, Artificial Sequence
  Description of Artificial Sequence: Synthetic oligonucleotide
ucuucugugaaguucccuu

SEQ ID NO: 2759471 - RNA, 19 nt, Artificial Sequence
  Description of Artificial Sequence: Synthetic oligonucleotide
cuuucagccuuguuuguac

SEQ ID NO: 2759472 - RNA, 19 nt, Artificial Sequence
  Description of Artificial Sequence: Synthetic oligonucleotide
acaaccacagcauccuuga

SEQ ID NO: 2759473 - RNA, 19 nt, Artificial Sequence
  Description of Artificial Sequence: Synthetic oligonucleotide
ugguacagaacccuccaaa

SEQ ID NO: 2759474 - RNA, 19 nt, Artificial Sequence
  Description of Artificial Sequence: Synthetic oligonucleotide
aacucacucccuaagacau

SEQ ID NO: 2759475 - RNA, 19 nt, Artificial Sequence
  Description of Artificial Sequence: Synthetic oligonucleotide
uuuguaguggcuggggcug

SEQ ID NO: 2759476 - RNA, 19 nt, Artificial Sequence
  Description of Artificial Sequence: Synthetic oligonucleotide
cuguaaagauucuucugug

SEQ ID NO: 2759477 - RNA, 19 nt, Artificial Sequence
  Description of Artificial Sequence: Synthetic oligonucleotide
agaagcauacacugcauuu

SEQ ID NO: 2759478 - RNA, 19 nt, Artificial Sequence
  Description of Artificial Sequence: Synthetic oligonucleotide
acuugauauucucuccuca

SEQ ID NO: 2759479 - RNA, 19 nt, Artificial Sequence
  Description of Artificial Sequence: Synthetic oligonucleotide
acauuucuguuuguagugg

SEQ ID NO: 2759480 - RNA, 19 nt, Artificial Sequence
  Description of Artificial Sequence: Synthetic oligonucleotide
auucccucugcacugcuug

SEQ ID NO: 2759481 - RNA, 19 nt, Artificial Sequence
  Description of Artificial Sequence: Synthetic oligonucleotide
uguggcacagggacaacca

SEQ ID NO: 2759482 - RNA, 19 nt, Artificial Sequence
  Description of Artificial Sequence: Synthetic oligonucleotide
uuuccaugacccacugcag

SEQ ID NO: 2759483 - RNA, 19 nt, Artificial Sequence
  Description of Artificial Sequence: Synthetic oligonucleotide
caacaacaaaaguugugug

SEQ ID NO: 2759484 - RNA, 19 nt, Artificial Sequence
  Description of Artificial Sequence: Synthetic oligonucleotide
gaacucacucccuaagaca

SEQ ID NO: 2759485 - RNA, 19 nt, Artificial Sequence
  Description of Artificial Sequence: Synthetic oligonucleotide
gaauuugaaccugucugug

SEQ ID NO: 2759486 - RNA, 19 nt, Artificial Sequence
  Description of Artificial Sequence: Synthetic oligonucleotide
caagucaggacaaacaagu

SEQ ID NO: 2759487 - RNA, 19 nt, Artificial Sequence
  Description of Artificial Sequence: Synthetic oligonucleotide
agggacaaccacagcaucc

SEQ ID NO: 2759488 - RNA, 19 nt, Artificial Sequence
  Description of Artificial Sequence: Synthetic oligonucleotide
ucaguaggggaacggagaa

SEQ ID NO: 2759489 - RNA, 19 nt, Artificial Sequence
  Description of Artificial Sequence: Synthetic oligonucleotide
cuucuugggauccugguca

SEQ ID NO: 2759490 - RNA, 19 nt, Artificial Sequence
  Description of Artificial Sequence: Synthetic oligonucleotide
gguacagaacccuccaaag

SEQ ID NO: 2759491 - RNA, 19 nt, Artificial Sequence
  Description of Artificial Sequence: Synthetic oligonucleotide
ucuguuuguaguggcuggg

SEQ ID NO: 2759492 - RNA, 19 nt, Artificial Sequence
  Description of Artificial Sequence: Synthetic oligonucleotide
cacagcauccuugauuucc

SEQ ID NO: 2759493 - RNA, 19 nt, Artificial Sequence
  Description of Artificial Sequence: Synthetic oligonucleotide
aacaaaaguugugugucau

SEQ ID NO: 2759494 - RNA, 19 nt, Artificial Sequence
  Description of Artificial Sequence: Synthetic oligonucleotide
gucacuugauauucucucc

SEQ ID NO: 2759495 - RNA, 19 nt, Artificial Sequence
  Description of Artificial Sequence: Synthetic oligonucleotide
uuugccaacugauuccuuu

SEQ ID NO: 2759496 - RNA, 19 nt, Artificial Sequence
  Description of Artificial Sequence: Synthetic oligonucleotide
acugcuugaaagaggaucu

SEQ ID NO: 2759497 - RNA, 19 nt, Artificial Sequence
  Description of Artificial Sequence: Synthetic oligonucleotide
gaaagaggaucucaugucu

SEQ ID NO: 2759498 - RNA, 19 nt, Artificial Sequence
  Description of Artificial Sequence: Synthetic oligonucleotide
uucugugaaguucccuucu

SEQ ID NO: 2759499 - RNA, 19 nt, Artificial Sequence
  Description of Artificial Sequence: Synthetic oligonucleotide
uuuugaacucacucccuaa

SEQ ID NO: 2759500 - RNA, 19 nt, Artificial Sequence
  Description of Artificial Sequence: Synthetic oligonucleotide
ugcaggugcagugaauuug

SEQ ID NO: 2759501 - RNA, 19 nt, Artificial Sequence
  Description of Artificial Sequence: Synthetic oligonucleotide
aggaucucaugucugucug

SEQ ID NO: 2759502 - RNA, 19 nt, Artificial Sequence
  Description of Artificial Sequence: Synthetic oligonucleotide
gagaaggcuaaugguacag

SEQ ID NO: 2759503 - RNA, 19 nt, Artificial Sequence
  Description of Artificial Sequence: Synthetic oligonucleotide
cacagggacaaccacagca

SEQ ID NO: 2759504 - RNA, 19 nt, Artificial Sequence
  Description of Artificial Sequence: Synthetic oligonucleotide
ugcaggcucugcuucuugg

SEQ ID NO: 2759505 - RNA, 19 nt, Artificial Sequence
  Description of Artificial Sequence: Synthetic oligonucleotide
aagucaggacaaacaaguc

SEQ ID NO: 2759506 - RNA, 19 nt, Artificial Sequence
  Description of Artificial Sequence: Synthetic oligonucleotide
uccuugauuuccguguuca

SEQ ID NO: 2759507 - RNA, 19 nt, Artificial Sequence
  Description of Artificial Sequence: Synthetic oligonucleotide
uguuuguaccaaguguugu

SEQ ID NO: 2759508 - RNA, 19 nt, Artificial Sequence
  Description of Artificial Sequence: Synthetic oligonucleotide
cuaaugguacagaacccuc

SEQ ID NO: 2759509 - RNA, 19 nt, Artificial Sequence
  Description of Artificial Sequence: Synthetic oligonucleotide
gcauacacugcauuugaag

SEQ ID NO: 2759510 - RNA, 19 nt, Artificial Sequence
  Description of Artificial Sequence: Synthetic oligonucleotide
acuccaagucaggacaaac

SEQ ID NO: 2759511 - RNA, 19 nt, Artificial Sequence
  Description of Artificial Sequence: Synthetic oligonucleotide
uuucagccuuguuuguacc

SEQ ID NO: 2759512 - RNA, 19 nt, Artificial Sequence
  Description of Artificial Sequence: Synthetic oligonucleotide
cugcauuugaagucuguuc

SEQ ID NO: 2759513 - RNA, 19 nt, Artificial Sequence
  Description of Artificial Sequence: Synthetic oligonucleotide
uggucacuugauauucucu

SEQ ID NO: 2759514 - RNA, 19 nt, Artificial Sequence
  Description of Artificial Sequence: Synthetic oligonucleotide
  modified_base (2)..(2): a, c, u, g, unknown or other
unugcaggugcagugaauu

SEQ ID NO: 2759515 - RNA, 19 nt, Artificial Sequence
  Description of Artificial Sequence: Synthetic oligonucleotide
uugauauucucuccucauu

SEQ ID NO: 2759516 - RNA, 19 nt, Artificial Sequence
  Description of Artificial Sequence: Synthetic oligonucleotide
uaggggaacggagaagacc

SEQ ID NO: 2759517 - RNA, 19 nt, Artificial Sequence
  Description of Artificial Sequence: Synthetic oligonucleotide
ugccaacugauuccuuuug

SEQ ID NO: 2759518 - RNA, 19 nt, Artificial Sequence
  Description of Artificial Sequence: Synthetic oligonucleotide
cauacacugcauuugaagu

SEQ ID NO: 2759519 - RNA, 19 nt, Artificial Sequence
  Description of Artificial Sequence: Synthetic oligonucleotide
ugcagugaauuugaaccug

SEQ ID NO: 2759520 - RNA, 19 nt, Artificial Sequence
  Description of Artificial Sequence: Synthetic oligonucleotide
aagaccagggaagccacca

SEQ ID NO: 2759521 - RNA, 19 nt, Artificial Sequence
  Description of Artificial Sequence: Synthetic oligonucleotide
gucauuuccaguggagaag

SEQ ID NO: 2759522 - RNA, 19 nt, Artificial Sequence
  Description of Artificial Sequence: Synthetic oligonucleotide
aggggaacggagaagacca

SEQ ID NO: 2759523 - RNA, 19 nt, Artificial Sequence
  Description of Artificial Sequence: Synthetic oligonucleotide
gacaaccacagcauccuug

SEQ ID NO: 2759524 - RNA, 19 nt, Artificial Sequence
  Description of Artificial Sequence: Synthetic oligonucleotide
uuugaaccugucuguggca

SEQ ID NO: 2759525 - RNA, 19 nt, Artificial Sequence
  Description of Artificial Sequence: Synthetic oligonucleotide
uucagccuuguuuguacca

SEQ ID NO: 2759526 - RNA, 19 nt, Artificial Sequence
  Description of Artificial Sequence: Synthetic oligonucleotide
cacugcuugaaagaggauc

SEQ ID NO: 2759527 - RNA, 19 nt, Artificial Sequence
  Description of Artificial Sequence: Synthetic oligonucleotide
ugcuugaaagaggaucuca

SEQ ID NO: 2759528 - RNA, 19 nt, Artificial Sequence
  Description of Artificial Sequence: Synthetic oligonucleotide
augucugucugguccuuuc

SEQ ID NO: 2759529 - RNA, 19 nt, Artificial Sequence
  Description of Artificial Sequence: Synthetic oligonucleotide
ucugggauucccucugcac

SEQ ID NO: 2759530 - RNA, 19 nt, Artificial Sequence
  Description of Artificial Sequence: Synthetic oligonucleotide
cagacugguauaacuucag

SEQ ID NO: 2759531 - RNA, 19 nt, Artificial Sequence
  Description of Artificial Sequence: Synthetic oligonucleotide
ccuccaaagaagcauacac

SEQ ID NO: 2759532 - RNA, 19 nt, Artificial Sequence
  Description of Artificial Sequence: Synthetic oligonucleotide
agaagaccagggaagccac

SEQ ID NO: 2759533 - RNA, 19 nt, Artificial Sequence
  Description of Artificial Sequence: Synthetic oligonucleotide
gaacaacaacaacaacaac

SEQ ID NO: 2759534 - RNA, 19 nt, Artificial Sequence
  Description of Artificial Sequence: Synthetic oligonucleotide
ugggauccuggucacuuga

SEQ ID NO: 2759535 - RNA, 19 nt, Artificial Sequence
  Description of Artificial Sequence: Synthetic oligonucleotide
acucccuaagacaucuuuc

SEQ ID NO: 2759536 - RNA, 19 nt, Artificial Sequence
  Description of Artificial Sequence: Synthetic oligonucleotide
agcauccuugauuuccgug

SEQ ID NO: 2759537 - RNA, 19 nt, Artificial Sequence
  Description of Artificial Sequence: Synthetic oligonucleotide
cugugaaguucccuucuag

SEQ ID NO: 2759538 - RNA, 19 nt, Artificial Sequence
  Description of Artificial Sequence: Synthetic oligonucleotide
ccuucuaguuccaucagac

SEQ ID NO: 2759539 - RNA, 19 nt, Artificial Sequence
  Description of Artificial Sequence: Synthetic oligonucleotide
uuacuccaagucaggacaa

SEQ ID NO: 2759540 - RNA, 19 nt, Artificial Sequence
  Description of Artificial Sequence: Synthetic oligonucleotide
uuuguaccaaguguuguuu

SEQ ID NO: 2759541 - RNA, 19 nt, Artificial Sequence
  Description of Artificial Sequence: Synthetic oligonucleotide
ucugucugguccuuucguc

SEQ ID NO: 2759542 - RNA, 19 nt, Artificial Sequence
  Description of Artificial Sequence: Synthetic oligonucleotide
auuuccaguggagaaggcu

SEQ ID NO: 2759543 - RNA, 19 nt, Artificial Sequence
  Description of Artificial Sequence: Synthetic oligonucleotide
acggagaagaccagggaag

SEQ ID NO: 2759544 - RNA, 19 nt, Artificial Sequence
  Description of Artificial Sequence: Synthetic oligonucleotide
ugguccuuucgucacuuuc

SEQ ID NO: 2759545 - RNA, 19 nt, Artificial Sequence
  Description of Artificial Sequence: Synthetic oligonucleotide
acagcauccuugauuuccg

SEQ ID NO: 2759546 - RNA, 19 nt, Artificial Sequence
  Description of Artificial Sequence: Synthetic oligonucleotide
gaaccugucuguggcacag

SEQ ID NO: 2759547 - RNA, 19 nt, Artificial Sequence
  Description of Artificial Sequence: Synthetic oligonucleotide
uucgucacuuucagccuug

SEQ ID NO: 2759548 - RNA, 19 nt, Artificial Sequence
  Description of Artificial Sequence: Synthetic oligonucleotide
ccuaagacaucuuuccaug

SEQ ID NO: 2759549 - RNA, 19 nt, Artificial Sequence
  Description of Artificial Sequence: Synthetic oligonucleotide
ggaacggagaagaccaggg

SEQ ID NO: 2759550 - RNA, 19 nt, Artificial Sequence
  Description of Artificial Sequence: Synthetic oligonucleotide
guacagaacccuccaaaga

SEQ ID NO: 2759551 - RNA, 19 nt, Artificial Sequence
  Description of Artificial Sequence: Synthetic oligonucleotide
ucaggacaaacaagucagu

SEQ ID NO: 2759552 - RNA, 19 nt, Artificial Sequence
  Description of Artificial Sequence: Synthetic oligonucleotide
ggucacuugauauucucuc

SEQ ID NO: 2759553 - RNA, 19 nt, Artificial Sequence
  Description of Artificial Sequence: Synthetic oligonucleotide
cuucugugaaguucccuuc

SEQ ID NO: 2759554 - RNA, 19 nt, Artificial Sequence
  Description of Artificial Sequence: Synthetic oligonucleotide
cuuguuuguaccaaguguu

SEQ ID NO: 2759555 - RNA, 19 nt, Artificial Sequence
  Description of Artificial Sequence: Synthetic oligonucleotide
ugucugguccuuucgucac

SEQ ID NO: 2759556 - RNA, 19 nt, Artificial Sequence
  Description of Artificial Sequence: Synthetic oligonucleotide
uaacuucaggcggagcgcc

SEQ ID NO: 2759557 - RNA, 19 nt, Artificial Sequence
  Description of Artificial Sequence: Synthetic oligonucleotide
cugcacugcuugaaagagg

SEQ ID NO: 2759558 - RNA, 19 nt, Artificial Sequence
  Description of Artificial Sequence: Synthetic oligonucleotide
uuucgucacuuucagccuu

SEQ ID NO: 2759559 - RNA, 19 nt, Artificial Sequence
  Description of Artificial Sequence: Synthetic oligonucleotide
guccuuucgucacuuucag

SEQ ID NO: 2759560 - RNA, 19 nt, Artificial Sequence
  Description of Artificial Sequence: Synthetic oligonucleotide
aagauucuucugugaaguu

SEQ ID NO: 2759561 - RNA, 19 nt, Artificial Sequence
  Description of Artificial Sequence: Synthetic oligonucleotide
aaagaagcauacacugcau

SEQ ID NO: 2759562 - RNA, 19 nt, Artificial Sequence
  Description of Artificial Sequence: Synthetic oligonucleotide
ugauuccuuuugaacucac

SEQ ID NO: 2759563 - RNA, 19 nt, Artificial Sequence
  Description of Artificial Sequence: Synthetic oligonucleotide
acagaacccuccaaagaag

SEQ ID NO: 2759564 - RNA, 19 nt, Artificial Sequence
  Description of Artificial Sequence: Synthetic oligonucleotide
ucuuuccaugacccacugc

SEQ ID NO: 2759565 - RNA, 19 nt, Artificial Sequence
  Description of Artificial Sequence: Synthetic oligonucleotide
uugaaccugucuguggcac

SEQ ID NO: 2759566 - RNA, 19 nt, Artificial Sequence
  Description of Artificial Sequence: Synthetic oligonucleotide
uccuggucacuugauauuc

SEQ ID NO: 2759567 - RNA, 19 nt, Artificial Sequence
  Description of Artificial Sequence: Synthetic oligonucleotide
caagucaguaggggaacgg

SEQ ID NO: 2759568 - RNA, 19 nt, Artificial Sequence
  Description of Artificial Sequence: Synthetic oligonucleotide
acaagucaguaggggaacg

SEQ ID NO: 2759569 - RNA, 19 nt, Artificial Sequence
  Description of Artificial Sequence: Synthetic oligonucleotide
uucugggauucccucugca

SEQ ID NO: 2759570 - RNA, 19 nt, Artificial Sequence
  Description of Artificial Sequence: Synthetic oligonucleotide
agaggaucucaugucuguc

SEQ ID NO: 2759571 - RNA, 19 nt, Artificial Sequence
  Description of Artificial Sequence: Synthetic oligonucleotide
ucccuucuaguuccaucag

SEQ ID NO: 2759572 - RNA, 19 nt, Artificial Sequence
  Description of Artificial Sequence: Synthetic oligonucleotide
auccuugauuuccguguuc

SEQ ID NO: 2759573 - RNA, 19 nt, Artificial Sequence
  Description of Artificial Sequence: Synthetic oligonucleotide
uuccaguggagaaggcuaa

SEQ ID NO: 2759574 - RNA, 19 nt, Artificial Sequence
  Description of Artificial Sequence: Synthetic oligonucleotide
aaguugugugucauuucca

SEQ ID NO: 2759575 - RNA, 19 nt, Artificial Sequence
  Description of Artificial Sequence: Synthetic oligonucleotide
cuccaagucaggacaaaca

SEQ ID NO: 2759576 - RNA, 19 nt, Artificial Sequence
  Description of Artificial Sequence: Synthetic oligonucleotide
agucaguaggggaacggag

SEQ ID NO: 2759577 - RNA, 19 nt, Artificial Sequence
  Description of Artificial Sequence: Synthetic oligonucleotide
cuggucacuugauauucuc

SEQ ID NO: 2759578 - RNA, 19 nt, Artificial Sequence
  Description of Artificial Sequence: Synthetic oligonucleotide
aacuucaggcggagcgccc

SEQ ID NO: 2759579 - RNA, 19 nt, Artificial Sequence
  Description of Artificial Sequence: Synthetic oligonucleotide
ugucuguggcacagggaca

SEQ ID NO: 2759580 - RNA, 19 nt, Artificial Sequence
  Description of Artificial Sequence: Synthetic oligonucleotide
ucugugaaguucccuucua

SEQ ID NO: 2759581 - RNA, 19 nt, Artificial Sequence
  Description of Artificial Sequence: Synthetic oligonucleotide
cuaagacaucuuuccauga

SEQ ID NO: 2759582 - RNA, 19 nt, Artificial Sequence
  Description of Artificial Sequence: Synthetic oligonucleotide
ccaaagaagcauacacugc

SEQ ID NO: 2759583 - RNA, 19 nt, Artificial Sequence
  Description of Artificial Sequence: Synthetic oligonucleotide
cacuugauauucucuccuc

SEQ ID NO: 2759584 - RNA, 19 nt, Artificial Sequence
  Description of Artificial Sequence: Synthetic oligonucleotide
gaacggagaagaccaggga

SEQ ID NO: 2759585 - RNA, 19 nt, Artificial Sequence
  Description of Artificial Sequence: Synthetic oligonucleotide
ggcuguaaagauucuucug

SEQ ID NO: 2759586 - RNA, 19 nt, Artificial Sequence
  Description of Artificial Sequence: Synthetic oligonucleotide
  modified_base (10)..(10): a, c, u, g, unknown or other
gagcgcccunugcaggugc

SEQ ID NO: 2759587 - RNA, 19 nt, Artificial Sequence
  Description of Artificial Sequence: Synthetic oligonucleotide
gcuguaaagauucuucugu

SEQ ID NO: 2759588 - RNA, 19 nt, Artificial Sequence
  Description of Artificial Sequence: Synthetic oligonucleotide
aucuuuccaugacccacug

SEQ ID NO: 2759589 - RNA, 19 nt, Artificial Sequence
  Description of Artificial Sequence: Synthetic oligonucleotide
uuccaucagacugguauaa

SEQ ID NO: 2759590 - RNA, 19 nt, Artificial Sequence
  Description of Artificial Sequence: Synthetic oligonucleotide
caacaacaacaacaacaac

SEQ ID NO: 2759591 - RNA, 19 nt, Artificial Sequence
  Description of Artificial Sequence: Synthetic oligonucleotide
gacaucuuuccaugaccca

SEQ ID NO: 2759592 - RNA, 19 nt, Artificial Sequence
  Description of Artificial Sequence: Synthetic oligonucleotide
auucucuccucauuuccuu

SEQ ID NO: 2759593 - RNA, 19 nt, Artificial Sequence
  Description of Artificial Sequence: Synthetic oligonucleotide
ucagccuuguuuguaccaa

SEQ ID NO: 2759594 - RNA, 19 nt, Artificial Sequence
  Description of Artificial Sequence: Synthetic oligonucleotide
acaaaaguugugugucauu

SEQ ID NO: 2759595 - RNA, 19 nt, Artificial Sequence
  Description of Artificial Sequence: Synthetic oligonucleotide
ugaaccugucuguggcaca

SEQ ID NO: 2759596 - RNA, 19 nt, Artificial Sequence
  Description of Artificial Sequence: Synthetic oligonucleotide
uccuuucgucacuuucagc

SEQ ID NO: 2759597 - RNA, 19 nt, Artificial Sequence
  Description of Artificial Sequence: Synthetic oligonucleotide
accagagcagaaacauuuc

SEQ ID NO: 2759598 - RNA, 19 nt, Artificial Sequence
  Description of Artificial Sequence: Synthetic oligonucleotide
uuguaccaaguguuguuuu

SEQ ID NO: 2759599 - RNA, 19 nt, Artificial Sequence
  Description of Artificial Sequence: Synthetic oligonucleotide
cucugcacugcuugaaaga

SEQ ID NO: 2759600 - RNA, 19 nt, Artificial Sequence
  Description of Artificial Sequence: Synthetic oligonucleotide
caacaaaaguuguguguca

SEQ ID NO: 2759601 - RNA, 19 nt, Artificial Sequence
  Description of Artificial Sequence: Synthetic oligonucleotide
ccaagucaggacaaacaag

SEQ ID NO: 2759602 - RNA, 19 nt, Artificial Sequence
  Description of Artificial Sequence: Synthetic oligonucleotide
uugggauccuggucacuug

SEQ ID NO: 2759603 - RNA, 19 nt, Artificial Sequence
  Description of Artificial Sequence: Synthetic oligonucleotide
gaccagggaagccaccaga

SEQ ID NO: 2759604 - RNA, 19 nt, Artificial Sequence
  Description of Artificial Sequence: Synthetic oligonucleotide
cauuuccaguggagaaggc

SEQ ID NO: 2759605 - RNA, 19 nt, Artificial Sequence
  Description of Artificial Sequence: Synthetic oligonucleotide
agaccagggaagccaccag

SEQ ID NO: 2759606 - RNA, 19 nt, Artificial Sequence
  Description of Artificial Sequence: Synthetic oligonucleotide
agggaagccaccagagcag

SEQ ID NO: 2759607 - RNA, 19 nt, Artificial Sequence
  Description of Artificial Sequence: Synthetic oligonucleotide
uucuugggauccuggucac

SEQ ID NO: 2759608 - RNA, 19 nt, Artificial Sequence
  Description of Artificial Sequence: Synthetic oligonucleotide
uugccaacugauuccuuuu

SEQ ID NO: 2759609 - RNA, 19 nt, Artificial Sequence
  Description of Artificial Sequence: Synthetic oligonucleotide
ggcacagggacaaccacag

SEQ ID NO: 2759610 - RNA, 19 nt, Artificial Sequence
  Description of Artificial Sequence: Synthetic oligonucleotide
ggaucucaugucugucugg

SEQ ID NO: 2759611 - RNA, 19 nt, Artificial Sequence
  Description of Artificial Sequence: Synthetic oligonucleotide
cugucugguccuuucguca

SEQ ID NO: 2759612 - RNA, 19 nt, Artificial Sequence
  Description of Artificial Sequence: Synthetic oligonucleotide
cuguggcacagggacaacc

SEQ ID NO: 2759613 - RNA, 19 nt, Artificial Sequence
  Description of Artificial Sequence: Synthetic oligonucleotide
guuuguaguggcuggggcu

SEQ ID NO: 2759614 - RNA, 19 nt, Artificial Sequence
  Description of Artificial Sequence: Synthetic oligonucleotide
guggagaaggcuaauggua

SEQ ID NO: 2759615 - RNA, 19 nt, Artificial Sequence
  Description of Artificial Sequence: Synthetic oligonucleotide
cagccuuguuuguaccaag

SEQ ID NO: 2759616 - RNA, 19 nt, Artificial Sequence
  Description of Artificial Sequence: Synthetic oligonucleotide
cagugaauuugaaccuguc

SEQ ID NO: 2759617 - RNA, 19 nt, Artificial Sequence
  Description of Artificial Sequence: Synthetic oligonucleotide
cuuuugaacucacucccua

SEQ ID NO: 2759618 - RNA, 19 nt, Artificial Sequence
  Description of Artificial Sequence: Synthetic oligonucleotide
acugcauuugaagucuguu

SEQ ID NO: 2759619 - RNA, 19 nt, Artificial Sequence
  Description of Artificial Sequence: Synthetic oligonucleotide
aacccuccaaagaagcaua

SEQ ID NO: 2759620 - RNA, 19 nt, Artificial Sequence
  Description of Artificial Sequence: Synthetic oligonucleotide
agaaggcuaaugguacaga

SEQ ID NO: 2759621 - RNA, 19 nt, Artificial Sequence
  Description of Artificial Sequence: Synthetic oligonucleotide
cuccaaagaagcauacacu

SEQ ID NO: 2759622 - RNA, 19 nt, Artificial Sequence
  Description of Artificial Sequence: Synthetic oligonucleotide
gucaguaggggaacggaga

SEQ ID NO: 2759623 - RNA, 19 nt, Artificial Sequence
  Description of Artificial Sequence: Synthetic oligonucleotide
  modified_base (14)..(14): a, c, u, g, unknown or other
ggcggagcgcccunugcag

SEQ ID NO: 2759624 - RNA, 19 nt, Artificial Sequence
  Description of Artificial Sequence: Synthetic oligonucleotide
gcauuugaagucuguucug

SEQ ID NO: 2759625 - RNA, 19 nt, Artificial Sequence
  Description of Artificial Sequence: Synthetic oligonucleotide
gguauaacuucaggcggag

SEQ ID NO: 2759626 - RNA, 19 nt, Artificial Sequence
  Description of Artificial Sequence: Synthetic oligonucleotide
gugucauuuccaguggaga

SEQ ID NO: 2759627 - RNA, 19 nt, Artificial Sequence
  Description of Artificial Sequence: Synthetic oligonucleotide
  modified_base (16)..(16): a, c, u, g, unknown or other
caggcggagcgcccunugc

SEQ ID NO: 2759628 - RNA, 19 nt, Artificial Sequence
  Description of Artificial Sequence: Synthetic oligonucleotide
auccuggucacuugauauu

SEQ ID NO: 2759629 - RNA, 19 nt, Artificial Sequence
  Description of Artificial Sequence: Synthetic oligonucleotide
aggcucugcuucuugggau

SEQ ID NO: 2759630 - RNA, 19 nt, Artificial Sequence
  Description of Artificial Sequence: Synthetic oligonucleotide
acagggacaaccacagcau

SEQ ID NO: 2759631 - RNA, 19 nt, Artificial Sequence
  Description of Artificial Sequence: Synthetic oligonucleotide
  modified_base (15)..(15): a, c, u, g, unknown or other
aggcggagcgcccunugca

SEQ ID NO: 2759632 - RNA, 19 nt, Artificial Sequence
  Description of Artificial Sequence: Synthetic oligonucleotide
acccuccaaagaagcauac

SEQ ID NO: 2759633 - RNA, 19 nt, Artificial Sequence
  Description of Artificial Sequence: Synthetic oligonucleotide
uccaucagacugguauaac

SEQ ID NO: 2759634 - RNA, 19 nt, Artificial Sequence
  Description of Artificial Sequence: Synthetic oligonucleotide
  modified_base (17)..(17): a, c, u, g, unknown or other
ucaggcggagcgcccunug

SEQ ID NO: 2759635 - RNA, 19 nt, Artificial Sequence
  Description of Artificial Sequence: Synthetic oligonucleotide
caugacccacugcaggcuc

SEQ ID NO: 2759636 - RNA, 19 nt, Artificial Sequence
  Description of Artificial Sequence: Synthetic oligonucleotide
guggcuggggcuguaaaga

SEQ ID NO: 2759637 - RNA, 19 nt, Artificial Sequence
  Description of Artificial Sequence: Synthetic oligonucleotide
guuccaucagacugguaua

SEQ ID NO: 2759638 - RNA, 19 nt, Artificial Sequence
  Description of Artificial Sequence: Synthetic oligonucleotide
caccagagcagaaacauuu

SEQ ID NO: 2759639 - RNA, 19 nt, Artificial Sequence
  Description of Artificial Sequence: Synthetic oligonucleotide
gaucucaugucugucuggu

SEQ ID NO: 2759640 - RNA, 19 nt, Artificial Sequence
  Description of Artificial Sequence: Synthetic oligonucleotide
agaacccuccaaagaagca

SEQ ID NO: 2759641 - RNA, 19 nt, Artificial Sequence
  Description of Artificial Sequence: Synthetic oligonucleotide
aaccugucuguggcacagg

SEQ ID NO: 2759642 - RNA, 19 nt, Artificial Sequence
  Description of Artificial Sequence: Synthetic oligonucleotide
cuugauauucucuccucau

SEQ ID NO: 2759643 - RNA, 19 nt, Artificial Sequence
  Description of Artificial Sequence: Synthetic oligonucleotide
gccuuguuuguaccaagug

SEQ ID NO: 2759644 - RNA, 19 nt, Artificial Sequence
  Description of Artificial Sequence: Synthetic oligonucleotide
gugaaguucccuucuaguu

SEQ ID NO: 2759645 - RNA, 19 nt, Artificial Sequence
  Description of Artificial Sequence: Synthetic oligonucleotide
gugugucauuuccagugga

SEQ ID NO: 2759646 - RNA, 19 nt, Artificial Sequence
  Description of Artificial Sequence: Synthetic oligonucleotide
gggaacggagaagaccagg

SEQ ID NO: 2759647 - RNA, 19 nt, Artificial Sequence
  Description of Artificial Sequence: Synthetic oligonucleotide
guucugggauucccucugc

SEQ ID NO: 2759648 - RNA, 19 nt, Artificial Sequence
  Description of Artificial Sequence: Synthetic oligonucleotide
caacaacaacaaaaguugu

SEQ ID NO: 2759649 - RNA, 19 nt, Artificial Sequence
  Description of Artificial Sequence: Synthetic oligonucleotide
caucagacugguauaacuu

SEQ ID NO: 2759650 - RNA, 19 nt, Artificial Sequence
  Description of Artificial Sequence: Synthetic oligonucleotide
uucccucugcacugcuuga

SEQ ID NO: 2759651 - RNA, 19 nt, Artificial Sequence
  Description of Artificial Sequence: Synthetic oligonucleotide
caaaaguugugugucauuu

SEQ ID NO: 2759652 - RNA, 19 nt, Artificial Sequence
  Description of Artificial Sequence: Synthetic oligonucleotide
guuuguaccaaguguuguu

SEQ ID NO: 2759653 - RNA, 19 nt, Artificial Sequence
  Description of Artificial Sequence: Synthetic oligonucleotide
gugcagugaauuugaaccu

SEQ ID NO: 2759654 - RNA, 19 nt, Artificial Sequence
  Description of Artificial Sequence: Synthetic oligonucleotide
uuuugccaacugauuccuu

SEQ ID NO: 2759655 - RNA, 19 nt, Artificial Sequence
  Description of Artificial Sequence: Synthetic oligonucleotide
guauaacuucaggcggagc

SEQ ID NO: 2759656 - RNA, 19 nt, Artificial Sequence
  Description of Artificial Sequence: Synthetic oligonucleotide
gaagaccagggaagccacc

SEQ ID NO: 2759657 - RNA, 19 nt, Artificial Sequence
  Description of Artificial Sequence: Synthetic oligonucleotide
ggggcuguaaagauucuuc

SEQ ID NO: 2759658 - RNA, 19 nt, Artificial Sequence
  Description of Artificial Sequence: Synthetic oligonucleotide
gaacccuccaaagaagcau

SEQ ID NO: 2759659 - RNA, 19 nt, Artificial Sequence
  Description of Artificial Sequence: Synthetic oligonucleotide
guggcacagggacaaccac

SEQ ID NO: 2759660 - RNA, 19 nt, Artificial Sequence
  Description of Artificial Sequence: Synthetic oligonucleotide
cagggacaaccacagcauc

SEQ ID NO: 2759661 - RNA, 19 nt, Artificial Sequence
  Description of Artificial Sequence: Synthetic oligonucleotide
acuuucagccuuguuugua

SEQ ID NO: 2759662 - RNA, 19 nt, Artificial Sequence
  Description of Artificial Sequence: Synthetic oligonucleotide
ggcuaaugguacagaaccc

SEQ ID NO: 2759663 - RNA, 19 nt, Artificial Sequence
  Description of Artificial Sequence: Synthetic oligonucleotide
agccuuguuuguaccaagu

SEQ ID NO: 2759664 - RNA, 19 nt, Artificial Sequence
  Description of Artificial Sequence: Synthetic oligonucleotide
guugugugucauuuccagu

SEQ ID NO: 2759665 - RNA, 19 nt, Artificial Sequence
  Description of Artificial Sequence: Synthetic oligonucleotide
gguccuuucgucacuuuca

SEQ ID NO: 2759666 - RNA, 19 nt, Artificial Sequence
  Description of Artificial Sequence: Synthetic oligonucleotide
ucugguccuuucgucacuu

SEQ ID NO: 2759667 - RNA, 19 nt, Artificial Sequence
  Description of Artificial Sequence: Synthetic oligonucleotide
gucuguggcacagggacaa

SEQ ID NO: 2759668 - RNA, 19 nt, Artificial Sequence
  Description of Artificial Sequence: Synthetic oligonucleotide
acucacucccuaagacauc

SEQ ID NO: 2759669 - RNA, 19 nt, Artificial Sequence
  Description of Artificial Sequence: Synthetic oligonucleotide
gcuucuugggauccugguc

SEQ ID NO: 2759670 - RNA, 19 nt, Artificial Sequence
  Description of Artificial Sequence: Synthetic oligonucleotide
caguaggggaacggagaag

SEQ ID NO: 2759671 - RNA, 19 nt, Artificial Sequence
  Description of Artificial Sequence: Synthetic oligonucleotide
caucuuuccaugacccacu

SEQ ID NO: 2759672 - RNA, 19 nt, Artificial Sequence
  Description of Artificial Sequence: Synthetic oligonucleotide
cugauuccuuuugaacuca

SEQ ID NO: 2759673 - RNA, 19 nt, Artificial Sequence
  Description of Artificial Sequence: Synthetic oligonucleotide
gagcagaaacauuucuguu

SEQ ID NO: 2759674 - RNA, 19 nt, Artificial Sequence
  Description of Artificial Sequence: Synthetic oligonucleotide
ugacccacugcaggcucug

SEQ ID NO: 2759675 - RNA, 19 nt, Artificial Sequence
  Description of Artificial Sequence: Synthetic oligonucleotide
uggggcuguaaagauucuu

SEQ ID NO: 2759676 - RNA, 19 nt, Artificial Sequence
  Description of Artificial Sequence: Synthetic oligonucleotide
caggacaaacaagucagua

SEQ ID NO: 2759677 - RNA, 19 nt, Artificial Sequence
  Description of Artificial Sequence: Synthetic oligonucleotide
ggagaagaccagggaagcc

SEQ ID NO: 2759678 - RNA, 19 nt, Artificial Sequence
  Description of Artificial Sequence: Synthetic oligonucleotide
uacuccaagucaggacaaa

SEQ ID NO: 2759679 - RNA, 19 nt, Artificial Sequence
  Description of Artificial Sequence: Synthetic oligonucleotide
gauuccuuuugaacucacu

SEQ ID NO: 2759680 - RNA, 19 nt, Artificial Sequence
  Description of Artificial Sequence: Synthetic oligonucleotide
  modified_base (6)..(6): a, c, u, g, unknown or other
gcccunugcaggugcagug

SEQ ID NO: 2759681 - RNA, 19 nt, Artificial Sequence
  Description of Artificial Sequence: Synthetic oligonucleotide
caacaacaacaacaacaaa

SEQ ID NO: 2759682 - RNA, 19 nt, Artificial Sequence
  Description of Artificial Sequence: Synthetic oligonucleotide
caggcucugcuucuuggga

SEQ ID NO: 2759683 - RNA, 19 nt, Artificial Sequence
  Description of Artificial Sequence: Synthetic oligonucleotide
cuucuaguuccaucagacu

SEQ ID NO: 2759684 - RNA, 19 nt, Artificial Sequence
  Description of Artificial Sequence: Synthetic oligonucleotide
gccaacugauuccuuuuga

SEQ ID NO: 2759685 - RNA, 19 nt, Artificial Sequence
  Description of Artificial Sequence: Synthetic oligonucleotide
cucacucccuaagacaucu

SEQ ID NO: 2759686 - RNA, 19 nt, Artificial Sequence
  Description of Artificial Sequence: Synthetic oligonucleotide
gcuaaugguacagaacccu

SEQ ID NO: 2759687 - RNA, 19 nt, Artificial Sequence
  Description of Artificial Sequence: Synthetic oligonucleotide
agcauacacugcauuugaa

SEQ ID NO: 2759688 - RNA, 19 nt, Artificial Sequence
  Description of Artificial Sequence: Synthetic oligonucleotide
ccaacugauuccuuuugaa

SEQ ID NO: 2759689 - RNA, 19 nt, Artificial Sequence
  Description of Artificial Sequence: Synthetic oligonucleotide
ccuuguuuguaccaagugu

SEQ ID NO: 2759690 - RNA, 19 nt, Artificial Sequence
  Description of Artificial Sequence: Synthetic oligonucleotide
ucccucugcacugcuugaa

SEQ ID NO: 2759691 - RNA, 19 nt, Artificial Sequence
  Description of Artificial Sequence: Synthetic oligonucleotide
gcaggugcagugaauuuga

SEQ ID NO: 2759692 - RNA, 19 nt, Artificial Sequence
  Description of Artificial Sequence: Synthetic oligonucleotide
cucaugucugucugguccu

SEQ ID NO: 2759693 - RNA, 19 nt, Artificial Sequence
  Description of Artificial Sequence: Synthetic oligonucleotide
guaggggaacggagaagac

SEQ ID NO: 2759694 - RNA, 19 nt, Artificial Sequence
  Description of Artificial Sequence: Synthetic oligonucleotide
ucuugggauccuggucacu

SEQ ID NO: 2759695 - RNA, 19 nt, Artificial Sequence
  Description of Artificial Sequence: Synthetic oligonucleotide
gggcuguaaagauucuucu

SEQ ID NO: 2759696 - RNA, 19 nt, Artificial Sequence
  Description of Artificial Sequence: Synthetic oligonucleotide
cugcuugaaagaggaucuc

SEQ ID NO: 2759697 - RNA, 19 nt, Artificial Sequence
  Description of Artificial Sequence: Synthetic oligonucleotide
acacugcauuugaagucug

SEQ ID NO: 2759698 - RNA, 19 nt, Artificial Sequence
  Description of Artificial Sequence: Synthetic oligonucleotide
gucugucugguccuuucgu

SEQ ID NO: 2759699 - RNA, 19 nt, Artificial Sequence
  Description of Artificial Sequence: Synthetic oligonucleotide
uccaguggagaaggcuaau

SEQ ID NO: 2759700 - RNA, 19 nt, Artificial Sequence
  Description of Artificial Sequence: Synthetic oligonucleotide
agccaccagagcagaaaca

SEQ ID NO: 2759701 - RNA, 19 nt, Artificial Sequence
  Description of Artificial Sequence: Synthetic oligonucleotide
cugcaggcucugcuucuug

SEQ ID NO: 2759702 - RNA, 19 nt, Artificial Sequence
  Description of Artificial Sequence: Synthetic oligonucleotide
aaguucccuucuaguucca

SEQ ID NO: 2759703 - RNA, 19 nt, Artificial Sequence
  Description of Artificial Sequence: Synthetic oligonucleotide
ucacucccuaagacaucuu

SEQ ID NO: 2759704 - RNA, 19 nt, Artificial Sequence
  Description of Artificial Sequence: Synthetic oligonucleotide
ccaucagacugguauaacu

SEQ ID NO: 2759705 - RNA, 19 nt, Artificial Sequence
  Description of Artificial Sequence: Synthetic oligonucleotide
ucgucacuuucagccuugu

SEQ ID NO: 2759706 - RNA, 19 nt, Artificial Sequence
  Description of Artificial Sequence: Synthetic oligonucleotide
ccuugauuuccguguucac

SEQ ID NO: 2759707 - RNA, 19 nt, Artificial Sequence
  Description of Artificial Sequence: Synthetic oligonucleotide
ggauccuggucacuugaua

SEQ ID NO: 2759708 - RNA, 19 nt, Artificial Sequence
  Description of Artificial Sequence: Synthetic oligonucleotide
cuguucugggauucccucu

SEQ ID NO: 2759709 - RNA, 19 nt, Artificial Sequence
  Description of Artificial Sequence: Synthetic oligonucleotide
ccaguggagaaggcuaaug

SEQ ID NO: 2759710 - RNA, 19 nt, Artificial Sequence
  Description of Artificial Sequence: Synthetic oligonucleotide
ucuguggcacagggacaac

SEQ ID NO: 2759711 - RNA, 19 nt, Artificial Sequence
  Description of Artificial Sequence: Synthetic oligonucleotide
aguucccuucuaguuccau

SEQ ID NO: 2759712 - RNA, 19 nt, Artificial Sequence
  Description of Artificial Sequence: Synthetic oligonucleotide
augacccacugcaggcucu

SEQ ID NO: 2759713 - RNA, 19 nt, Artificial Sequence
  Description of Artificial Sequence: Synthetic oligonucleotide
  modified_base (18)..(18): a, c, u, g, unknown or other
uucaggcggagcgcccunu

SEQ ID NO: 2759714 - RNA, 19 nt, Artificial Sequence
  Description of Artificial Sequence: Synthetic oligonucleotide
ucaugucugucugguccuu

SEQ ID NO: 2759715 - RNA, 19 nt, Artificial Sequence
  Description of Artificial Sequence: Synthetic oligonucleotide
uguaguggcuggggcugua

SEQ ID NO: 2759716 - RNA, 19 nt, Artificial Sequence
  Description of Artificial Sequence: Synthetic oligonucleotide
cuaguuccaucagacuggu

SEQ ID NO: 2759717 - RNA, 19 nt, Artificial Sequence
  Description of Artificial Sequence: Synthetic oligonucleotide
  modified_base (13)..(13): a, c, u, g, unknown or other
gcggagcgcccunugcagg

SEQ ID NO: 2759718 - RNA, 19 nt, Artificial Sequence
  Description of Artificial Sequence: Synthetic oligonucleotide
cggagaagaccagggaagc

SEQ ID NO: 2759719 - RNA, 19 nt, Artificial Sequence
  Description of Artificial Sequence: Synthetic oligonucleotide
cacucccuaagacaucuuu

SEQ ID NO: 2759720 - RNA, 19 nt, Artificial Sequence
  Description of Artificial Sequence: Synthetic oligonucleotide
gcuugaaagaggaucucau

SEQ ID NO: 2759721 - RNA, 19 nt, Artificial Sequence
  Description of Artificial Sequence: Synthetic oligonucleotide
gggacaaccacagcauccu

SEQ ID NO: 2759722 - RNA, 19 nt, Artificial Sequence
  Description of Artificial Sequence: Synthetic oligonucleotide
  modified_base (3)..(3): a, c, u, g, unknown or other
cunugcaggugcagugaau

SEQ ID NO: 2759723 - RNA, 19 nt, Artificial Sequence
  Description of Artificial Sequence: Synthetic oligonucleotide
gucuguucugggauucccu

SEQ ID NO: 2759724 - RNA, 19 nt, Artificial Sequence
  Description of Artificial Sequence: Synthetic oligonucleotide
cagaaacauuucuguuugu

SEQ ID NO: 2759725 - RNA, 19 nt, Artificial Sequence
  Description of Artificial Sequence: Synthetic oligonucleotide
  modified_base (4)..(4): a, c, u, g, unknown or other
ccunugcaggugcagugaa

SEQ ID NO: 2759726 - RNA, 19 nt, Artificial Sequence
  Description of Artificial Sequence: Synthetic oligonucleotide
gacccacugcaggcucugc

SEQ ID NO: 2759727 - RNA, 19 nt, Artificial Sequence
  Description of Artificial Sequence: Synthetic oligonucleotide
caggugcagugaauuugaa

SEQ ID NO: 2759728 - RNA, 19 nt, Artificial Sequence
  Description of Artificial Sequence: Synthetic oligonucleotide
gccaccagagcagaaacau

SEQ ID NO: 2759729 - RNA, 19 nt, Artificial Sequence
  Description of Artificial Sequence: Synthetic oligonucleotide
  modified_base (9)..(9): a, c, u, g, unknown or other
agcgcccunugcaggugca

SEQ ID NO: 2759730 - RNA, 19 nt, Artificial Sequence
  Description of Artificial Sequence: Synthetic oligonucleotide
ccagagcagaaacauuucu

SEQ ID NO: 2759731 - RNA, 19 nt, Artificial Sequence
  Description of Artificial Sequence: Synthetic oligonucleotide
cccuucuaguuccaucaga

SEQ ID NO: 2759732 - RNA, 19 nt, Artificial Sequence
  Description of Artificial Sequence: Synthetic oligonucleotide
cccuaagacaucuuuccau

SEQ ID NO: 2759733 - RNA, 19 nt, Artificial Sequence
  Description of Artificial Sequence: Synthetic oligonucleotide
gcagugaauuugaaccugu

SEQ ID NO: 2759734 - RNA, 19 nt, Artificial Sequence
  Description of Artificial Sequence: Synthetic oligonucleotide
gcacagggacaaccacagc

SEQ ID NO: 2759735 - RNA, 19 nt, Artificial Sequence
  Description of Artificial Sequence: Synthetic oligonucleotide
ggggaacggagaagaccag

SEQ ID NO: 2759736 - RNA, 19 nt, Artificial Sequence
  Description of Artificial Sequence: Synthetic oligonucleotide
gggaagccaccagagcaga

SEQ ID NO: 2759737 - RNA, 19 nt, Artificial Sequence
  Description of Artificial Sequence: Synthetic oligonucleotide
gucugguccuuucgucacu

SEQ ID NO: 2759738 - RNA, 19 nt, Artificial Sequence
  Description of Artificial Sequence: Synthetic oligonucleotide
guaguggcuggggcuguaa

SEQ ID NO: 2759739 - RNA, 19 nt, Artificial Sequence
  Description of Artificial Sequence: Synthetic oligonucleotide
gauucccucugcacugcuu

SEQ ID NO: 2759740 - RNA, 19 nt, Artificial Sequence
  Description of Artificial Sequence: Synthetic oligonucleotide
  modified_base (11)..(11): a, c, u, g, unknown or other
ggagcgcccunugcaggug

SEQ ID NO: 2759741 - RNA, 19 nt, Artificial Sequence
  Description of Artificial Sequence: Synthetic oligonucleotide
ccuuuugaacucacucccu

SEQ ID NO: 2759742 - RNA, 19 nt, Artificial Sequence
  Description of Artificial Sequence: Synthetic oligonucleotide
  modified_base (5)..(5): a, c, u, g, unknown or other
cccunugcaggugcaguga

SEQ ID NO: 2759743 - RNA, 19 nt, Artificial Sequence
  Description of Artificial Sequence: Synthetic oligonucleotide
cagcauccuugauuuccgu

SEQ ID NO: 2759744 - RNA, 19 nt, Artificial Sequence
  Description of Artificial Sequence: Synthetic oligonucleotide
  modified_base (19)..(19): a, c, u, g, unknown or other
cuucaggcggagcgcccun

SEQ ID NO: 2759745 - RNA, 19 nt, Artificial Sequence
  Description of Artificial Sequence: Synthetic oligonucleotide
ccacagcauccuugauuuc

SEQ ID NO: 2759746 - RNA, 19 nt, Artificial Sequence
  Description of Artificial Sequence: Synthetic oligonucleotide
ccuggucacuugauauucu

SEQ ID NO: 2759747 - RNA, 19 nt, Artificial Sequence
  Description of Artificial Sequence: Synthetic oligonucleotide
ggauucccucugcacugcu

SEQ ID NO: 2759748 - RNA, 19 nt, Artificial Sequence
  Description of Artificial Sequence: Synthetic oligonucleotide
ggaagccaccagagcagaa

SEQ ID NO: 2759749 - RNA, 19 nt, Artificial Sequence
  Description of Artificial Sequence: Synthetic oligonucleotide
  modified_base (8)..(8): a, c, u, g, unknown or other
gcgcccunugcaggugcag

SEQ ID NO: 2759750 - RNA, 19 nt, Artificial Sequence
  Description of Artificial Sequence: Synthetic oligonucleotide
cccuccaaagaagcauaca

SEQ ID NO: 2759751 - RNA, 19 nt, Artificial Sequence
  Description of Artificial Sequence: Synthetic oligonucleotide
cccucugcacugcuugaaa

SEQ ID NO: 2759752 - RNA, 19 nt, Artificial Sequence
  Description of Artificial Sequence: Synthetic oligonucleotide
ggacaaccacagcauccuu

SEQ ID NO: 2759753 - RNA, 19 nt, Artificial Sequence
  Description of Artificial Sequence: Synthetic oligonucleotide
cugguccuuucgucacuuu

SEQ ID NO: 2759754 - RNA, 19 nt, Artificial Sequence
  Description of Artificial Sequence: Synthetic oligonucleotide
cccacugcaggcucugcuu

SEQ ID NO: 2759755 - RNA, 19 nt, Artificial Sequence
  Description of Artificial Sequence: Synthetic oligonucleotide
gggauccuggucacuugau

SEQ ID NO: 2759756 - RNA, 19 nt, Artificial Sequence
  Description of Artificial Sequence: Synthetic oligonucleotide
ggcuggggcuguaaagauu

SEQ ID NO: 2759757 - RNA, 19 nt, Artificial Sequence
  Description of Artificial Sequence: Synthetic oligonucleotide
ccaugacccacugcaggcu

SEQ ID NO: 2759758 - RNA, 19 nt, Artificial Sequence
  Description of Artificial Sequence: Synthetic oligonucleotide
ccaccagagcagaaacauu

SEQ ID NO: 2759759 - RNA, 19 nt, Artificial Sequence
  Description of Artificial Sequence: Synthetic oligonucleotide
  modified_base (12)..(12): a, c, u, g, unknown or other
cggagcgcccunugcaggu

SEQ ID NO: 2759760 - RNA, 19 nt, Artificial Sequence
  Description of Artificial Sequence: Synthetic oligonucleotide
  modified_base (7)..(7): a, c, u, g, unknown or other
cgcccunugcaggugcagu

SEQ ID NO: 2759761 - RNA, 19 nt, Artificial Sequence
  Description of Artificial Sequence: Synthetic oligonucleotide
gcacugcuugaaagaggau

SEQ ID NO: 2759762 - RNA, 19 nt, Artificial Sequence
  Description of Artificial Sequence: Synthetic oligonucleotide
cgucacuuucagccuuguu

SEQ ID NO: 2759763 - RNA, 19 nt, Artificial Sequence
  Description of Artificial Sequence: Synthetic oligonucleotide
  modified_base (1)..(1): a, c, u, g, unknown or other
nugcaggugcagugaauuu

SEQ ID NO: 2759764 - RNA, 19 nt, Artificial Sequence
  Description of Artificial Sequence: Synthetic oligonucleotide
uuuaauauaaauaaggcag

SEQ ID NO: 2759765 - RNA, 19 nt, Artificial Sequence
  Description of Artificial Sequence: Synthetic oligonucleotide
uccuuuaauauaaauaagg

SEQ ID NO: 2759766 - RNA, 19 nt, Artificial Sequence
  Description of Artificial Sequence: Synthetic oligonucleotide
aaauaaggcagcaagaaac

SEQ ID NO: 2759767 - RNA, 19 nt, Artificial Sequence
  Description of Artificial Sequence: Synthetic oligonucleotide
auauaaauaaggcagcaag

SEQ ID NO: 2759768 - RNA, 19 nt, Artificial Sequence
  Description of Artificial Sequence: Synthetic oligonucleotide
uuuacgagaauuuaauucu

SEQ ID NO: 2759769 - RNA, 19 nt, Artificial Sequence
  Description of Artificial Sequence: Synthetic oligonucleotide
uuaauauaaauaaggcagc

SEQ ID NO: 2759770 - RNA, 19 nt, Artificial Sequence
  Description of Artificial Sequence: Synthetic oligonucleotide
uuuuacgagaauuuaauuc

SEQ ID NO: 2759771 - RNA, 19 nt, Artificial Sequence
  Description of Artificial Sequence: Synthetic oligonucleotide
ugugcugugguaaagaguc

SEQ ID NO: 2759772 - RNA, 19 nt, Artificial Sequence
  Description of Artificial Sequence: Synthetic oligonucleotide
aauaaggcagcaagaaacc

SEQ ID NO: 2759773 - RNA, 19 nt, Artificial Sequence
  Description of Artificial Sequence: Synthetic oligonucleotide
aaccccaagagccugccgc

SEQ ID NO: 2759774 - RNA, 19 nt, Artificial Sequence
  Description of Artificial Sequence: Synthetic oligonucleotide
aaagccuuugcagucgucc

SEQ ID NO: 2759775 - RNA, 19 nt, Artificial Sequence
  Description of Artificial Sequence: Synthetic oligonucleotide
acgagaauuuaauucuucc

SEQ ID NO: 2759776 - RNA, 19 nt, Artificial Sequence
  Description of Artificial Sequence: Synthetic oligonucleotide
uauaaauaaggcagcaaga

SEQ ID NO: 2759777 - RNA, 19 nt, Artificial Sequence
  Description of Artificial Sequence: Synthetic oligonucleotide
agcaagaaaccccaagagc

SEQ ID NO: 2759778 - RNA, 19 nt, Artificial Sequence
  Description of Artificial Sequence: Synthetic oligonucleotide
ucuuccuuuaauauaaaua

SEQ ID NO: 2759779 - RNA, 19 nt, Artificial Sequence
  Description of Artificial Sequence: Synthetic oligonucleotide
aauucuuccuuuaauauaa

SEQ ID NO: 2759780 - RNA, 19 nt, Artificial Sequence
  Description of Artificial Sequence: Synthetic oligonucleotide
ucuuaagcauuucauagaa

SEQ ID NO: 2759781 - RNA, 19 nt, Artificial Sequence
  Description of Artificial Sequence: Synthetic oligonucleotide
aagcauuucauagaaugag

SEQ ID NO: 2759782 - RNA, 19 nt, Artificial Sequence
  Description of Artificial Sequence: Synthetic oligonucleotide
acauggagggaauauucgc

SEQ ID NO: 2759783 - RNA, 19 nt, Artificial Sequence
  Description of Artificial Sequence: Synthetic oligonucleotide
cuuuaauauaaauaaggca

SEQ ID NO: 2759784 - RNA, 19 nt, Artificial Sequence
  Description of Artificial Sequence: Synthetic oligonucleotide
aaugaguccacugugcugu

SEQ ID NO: 2759785 - RNA, 19 nt, Artificial Sequence
  Description of Artificial Sequence: Synthetic oligonucleotide
uuaauucuuccuuuaauau

SEQ ID NO: 2759786 - RNA, 19 nt, Artificial Sequence
  Description of Artificial Sequence: Synthetic oligonucleotide
uuugcagucguccggagga

SEQ ID NO: 2759787 - RNA, 19 nt, Artificial Sequence
  Description of Artificial Sequence: Synthetic oligonucleotide
gaaggaggcaaucugcaag

SEQ ID NO: 2759788 - RNA, 19 nt, Artificial Sequence
  Description of Artificial Sequence: Synthetic oligonucleotide
gaagagguccugcagacgc

SEQ ID NO: 2759789 - RNA, 19 nt, Artificial Sequence
  Description of Artificial Sequence: Synthetic oligonucleotide
uaaggcagcaagaaacccc

SEQ ID NO: 2759790 - RNA, 19 nt, Artificial Sequence
  Description of Artificial Sequence: Synthetic oligonucleotide
acugggaccugucaggcgg

SEQ ID NO: 2759791 - RNA, 19 nt, Artificial Sequence
  Description of Artificial Sequence: Synthetic oligonucleotide
ccuuuaauauaaauaaggc

SEQ ID NO: 2759792 - RNA, 19 nt, Artificial Sequence
  Description of Artificial Sequence: Synthetic oligonucleotide
aaagaagugauggagcuuu

SEQ ID NO: 2759793 - RNA, 19 nt, Artificial Sequence
  Description of Artificial Sequence: Synthetic oligonucleotide
uaaauaaggcagcaagaaa

SEQ ID NO: 2759794 - RNA, 19 nt, Artificial Sequence
  Description of Artificial Sequence: Synthetic oligonucleotide
cuugcgguugcccacaaag

SEQ ID NO: 2759795 - RNA, 19 nt, Artificial Sequence
  Description of Artificial Sequence: Synthetic oligonucleotide
cacaaagaagugauggagc

SEQ ID NO: 2759796 - RNA, 19 nt, Artificial Sequence
  Description of Artificial Sequence: Synthetic oligonucleotide
aguugcucagcccacuggg

SEQ ID NO: 2759797 - RNA, 19 nt, Artificial Sequence
  Description of Artificial Sequence: Synthetic oligonucleotide
ugucggggcauucuuaagc

SEQ ID NO: 2759798 - RNA, 19 nt, Artificial Sequence
  Description of Artificial Sequence: Synthetic oligonucleotide
uucuuaagcauuucauaga

SEQ ID NO: 2759799 - RNA, 19 nt, Artificial Sequence
  Description of Artificial Sequence: Synthetic oligonucleotide
uaauauaaauaaggcagca

SEQ ID NO: 2759800 - RNA, 19 nt, Artificial Sequence
  Description of Artificial Sequence: Synthetic oligonucleotide
uaaagaguccucugcagga

SEQ ID NO: 2759801 - RNA, 19 nt, Artificial Sequence
  Description of Artificial Sequence: Synthetic oligonucleotide
uauucgcugacgagugucg

SEQ ID NO: 2759802 - RNA, 19 nt, Artificial Sequence
  Description of Artificial Sequence: Synthetic oligonucleotide
caagaaggaggcaaucugc

SEQ ID NO: 2759803 - RNA, 19 nt, Artificial Sequence
  Description of Artificial Sequence: Synthetic oligonucleotide
aagaguccucugcaggacg

SEQ ID NO: 2759804 - RNA, 19 nt, Artificial Sequence
  Description of Artificial Sequence: Synthetic oligonucleotide
agguuuauaggcuccgcuc

SEQ ID NO: 2759805 - RNA, 19 nt, Artificial Sequence
  Description of Artificial Sequence: Synthetic oligonucleotide
uagaaugaguccacugugc

SEQ ID NO: 2759806 - RNA, 19 nt, Artificial Sequence
  Description of Artificial Sequence: Synthetic oligonucleotide
cucugcaggacgaagggcc

SEQ ID NO: 2759807 - RNA, 19 nt, Artificial Sequence
  Description of Artificial Sequence: Synthetic oligonucleotide
accucugggagucccaucg

SEQ ID NO: 2759808 - RNA, 19 nt, Artificial Sequence
  Description of Artificial Sequence: Synthetic oligonucleotide
aagccuuugcagucguccg

SEQ ID NO: 2759809 - RNA, 19 nt, Artificial Sequence
  Description of Artificial Sequence: Synthetic oligonucleotide
ucugcaagcagcugaggug

SEQ ID NO: 2759810 - RNA, 19 nt, Artificial Sequence
  Description of Artificial Sequence: Synthetic oligonucleotide
uaauucuuccuuuaauaua

SEQ ID NO: 2759811 - RNA, 19 nt, Artificial Sequence
  Description of Artificial Sequence: Synthetic oligonucleotide
auaaauaaggcagcaagaa

SEQ ID NO: 2759812 - RNA, 19 nt, Artificial Sequence
  Description of Artificial Sequence: Synthetic oligonucleotide
aauauaaauaaggcagcaa

SEQ ID NO: 2759813 - RNA, 19 nt, Artificial Sequence
  Description of Artificial Sequence: Synthetic oligonucleotide
auaaggcagcaagaaaccc

SEQ ID NO: 2759814 - RNA, 19 nt, Artificial Sequence
  Description of Artificial Sequence: Synthetic oligonucleotide
agaauuuaauucuuccuuu

SEQ ID NO: 2759815 - RNA, 19 nt, Artificial Sequence
  Description of Artificial Sequence: Synthetic oligonucleotide
ugguaaagaguccucugca

SEQ ID NO: 2759816 - RNA, 19 nt, Artificial Sequence
  Description of Artificial Sequence: Synthetic oligonucleotide
aaagaguccucugcaggac

SEQ ID NO: 2759817 - RNA, 19 nt, Artificial Sequence
  Description of Artificial Sequence: Synthetic oligonucleotide
gcaagaaaccccaagagcc

SEQ ID NO: 2759818 - RNA, 19 nt, Artificial Sequence
  Description of Artificial Sequence: Synthetic oligonucleotide
uccggcaaagccuuugcag

SEQ ID NO: 2759819 - RNA, 19 nt, Artificial Sequence
  Description of Artificial Sequence: Synthetic oligonucleotide
gucugaagagacauggagg

SEQ ID NO: 2759820 - RNA, 19 nt, Artificial Sequence
  Description of Artificial Sequence: Synthetic oligonucleotide
aggugguaguugcucagcc

SEQ ID NO: 2759821 - RNA, 19 nt, Artificial Sequence
  Description of Artificial Sequence: Synthetic oligonucleotide
gacauggagggaauauucg

SEQ ID NO: 2759822 - RNA, 19 nt, Artificial Sequence
  Description of Artificial Sequence: Synthetic oligonucleotide
gaauauucgcugacgagug

SEQ ID NO: 2759823 - RNA, 19 nt, Artificial Sequence
  Description of Artificial Sequence: Synthetic oligonucleotide
ugaagagacauggagggaa

SEQ ID NO: 2759824 - RNA, 19 nt, Artificial Sequence
  Description of Artificial Sequence: Synthetic oligonucleotide
acggucugaagagacaugg

SEQ ID NO: 2759825 - RNA, 19 nt, Artificial Sequence
  Description of Artificial Sequence: Synthetic oligonucleotide
uuauaggcuccgcucuccg

SEQ ID NO: 2759826 - RNA, 19 nt, Artificial Sequence
  Description of Artificial Sequence: Synthetic oligonucleotide
cagacgcacauccagcugg

SEQ ID NO: 2759827 - RNA, 19 nt, Artificial Sequence
  Description of Artificial Sequence: Synthetic oligonucleotide
gauagcaggaggugcagca

SEQ ID NO: 2759828 - RNA, 19 nt, Artificial Sequence
  Description of Artificial Sequence: Synthetic oligonucleotide
ugugguaaagaguccucug

SEQ ID NO: 2759829 - RNA, 19 nt, Artificial Sequence
  Description of Artificial Sequence: Synthetic oligonucleotide
aagagguuuauaggcuccg

SEQ ID NO: 2759830 - RNA, 19 nt, Artificial Sequence
  Description of Artificial Sequence: Synthetic oligonucleotide
agaaugaguccacugugcu

SEQ ID NO: 2759831 - RNA, 19 nt, Artificial Sequence
  Description of Artificial Sequence: Synthetic oligonucleotide
gaggaacugucgcucauag

SEQ ID NO: 2759832 - RNA, 19 nt, Artificial Sequence
  Description of Artificial Sequence: Synthetic oligonucleotide
agacauggagggaauauuc

SEQ ID NO: 2759833 - RNA, 19 nt, Artificial Sequence
  Description of Artificial Sequence: Synthetic oligonucleotide
acugugcugugguaaagag

SEQ ID NO: 2759834 - RNA, 19 nt, Artificial Sequence
  Description of Artificial Sequence: Synthetic oligonucleotide
uugcccacaaagaagugau

SEQ ID NO: 2759835 - RNA, 19 nt, Artificial Sequence
  Description of Artificial Sequence: Synthetic oligonucleotide
gugguaaagaguccucugc

SEQ ID NO: 2759836 - RNA, 19 nt, Artificial Sequence
  Description of Artificial Sequence: Synthetic oligonucleotide
auggagggaauauucgcug

SEQ ID NO: 2759837 - RNA, 19 nt, Artificial Sequence
  Description of Artificial Sequence: Synthetic oligonucleotide
auauucgcugacgaguguc

SEQ ID NO: 2759838 - RNA, 19 nt, Artificial Sequence
  Description of Artificial Sequence: Synthetic oligonucleotide
ucugcaggacgaagggccg

SEQ ID NO: 2759839 - RNA, 19 nt, Artificial Sequence
  Description of Artificial Sequence: Synthetic oligonucleotide
uacgagaauuuaauucuuc

SEQ ID NO: 2759840 - RNA, 19 nt, Artificial Sequence
  Description of Artificial Sequence: Synthetic oligonucleotide
ugcgguugcccacaaagaa

SEQ ID NO: 2759841 - RNA, 19 nt, Artificial Sequence
  Description of Artificial Sequence: Synthetic oligonucleotide
caaucugcaagcagcugag

SEQ ID NO: 2759842 - RNA, 19 nt, Artificial Sequence
  Description of Artificial Sequence: Synthetic oligonucleotide
cugcaagcagcugaggugg

SEQ ID NO: 2759843 - RNA, 19 nt, Artificial Sequence
  Description of Artificial Sequence: Synthetic oligonucleotide
agggaauauucgcugacga

SEQ ID NO: 2759844 - RNA, 19 nt, Artificial Sequence
  Description of Artificial Sequence: Synthetic oligonucleotide
aauauucgcugacgagugu

SEQ ID NO: 2759845 - RNA, 19 nt, Artificial Sequence
  Description of Artificial Sequence: Synthetic oligonucleotide
gaaugaguccacugugcug

SEQ ID NO: 2759846 - RNA, 19 nt, Artificial Sequence
  Description of Artificial Sequence: Synthetic oligonucleotide
cagcaagaaaccccaagag

SEQ ID NO: 2759847 - RNA, 19 nt, Artificial Sequence
  Description of Artificial Sequence: Synthetic oligonucleotide
aaggcagcaagaaacccca

SEQ ID NO: 2759848 - RNA, 19 nt, Artificial Sequence
  Description of Artificial Sequence: Synthetic oligonucleotide
uaggcuccucuccaggaag

SEQ ID NO: 2759849 - RNA, 19 nt, Artificial Sequence
  Description of Artificial Sequence: Synthetic oligonucleotide
uucaggugguaguugcuca

SEQ ID NO: 2759850 - RNA, 19 nt, Artificial Sequence
  Description of Artificial Sequence: Synthetic oligonucleotide
aagcagaagagguccugca

SEQ ID NO: 2759851 - RNA, 19 nt, Artificial Sequence
  Description of Artificial Sequence: Synthetic oligonucleotide
aagaaggaggcaaucugca

SEQ ID NO: 2759852 - RNA, 19 nt, Artificial Sequence
  Description of Artificial Sequence: Synthetic oligonucleotide
gagggaauauucgcugacg

SEQ ID NO: 2759853 - RNA, 19 nt, Artificial Sequence
  Description of Artificial Sequence: Synthetic oligonucleotide
gaagagguuuauaggcucc

SEQ ID NO: 2759854 - RNA, 19 nt, Artificial Sequence
  Description of Artificial Sequence: Synthetic oligonucleotide
agucccaucgccucaggca

SEQ ID NO: 2759855 - RNA, 19 nt, Artificial Sequence
  Description of Artificial Sequence: Synthetic oligonucleotide
uucuccaguaggcuccucu

SEQ ID NO: 2759856 - RNA, 19 nt, Artificial Sequence
  Description of Artificial Sequence: Synthetic oligonucleotide
ugguggugggcuugcacgg

SEQ ID NO: 2759857 - RNA, 19 nt, Artificial Sequence
  Description of Artificial Sequence: Synthetic oligonucleotide
uuuauaggcuccgcucucc

SEQ ID NO: 2759858 - RNA, 19 nt, Artificial Sequence
  Description of Artificial Sequence: Synthetic oligonucleotide
aagaaaccccaagagccug

SEQ ID NO: 2759859 - RNA, 19 nt, Artificial Sequence
  Description of Artificial Sequence: Synthetic oligonucleotide
aggacgaagggccggaaga

SEQ ID NO: 2759860 - RNA, 19 nt, Artificial Sequence
  Description of Artificial Sequence: Synthetic oligonucleotide
auaggcuccgcucuccgca

SEQ ID NO: 2759861 - RNA, 19 nt, Artificial Sequence
  Description of Artificial Sequence: Synthetic oligonucleotide
uucgcugacgagugucggg

SEQ ID NO: 2759862 - RNA, 19 nt, Artificial Sequence
  Description of Artificial Sequence: Synthetic oligonucleotide
ucgcugacgagugucgggg

SEQ ID NO: 2759863 - RNA, 19 nt, Artificial Sequence
  Description of Artificial Sequence: Synthetic oligonucleotide
uuacgagaauuuaauucuu

SEQ ID NO: 2759864 - RNA, 19 nt, Artificial Sequence
  Description of Artificial Sequence: Synthetic oligonucleotide
ccggaagagguuuauaggc

SEQ ID NO: 2759865 - RNA, 19 nt, Artificial Sequence
  Description of Artificial Sequence: Synthetic oligonucleotide
gguaaagaguccucugcag

SEQ ID NO: 2759866 - RNA, 19 nt, Artificial Sequence
  Description of Artificial Sequence: Synthetic oligonucleotide
gugguaguugcucagccca

SEQ ID NO: 2759867 - RNA, 19 nt, Artificial Sequence
  Description of Artificial Sequence: Synthetic oligonucleotide
ucuccgcacgaccucuggg

SEQ ID NO: 2759868 - RNA, 19 nt, Artificial Sequence
  Description of Artificial Sequence: Synthetic oligonucleotide
ucugggagucccaucgccu

SEQ ID NO: 2759869 - RNA, 19 nt, Artificial Sequence
  Description of Artificial Sequence: Synthetic oligonucleotide
gaagcagaagagguccugc

SEQ ID NO: 2759870 - RNA, 19 nt, Artificial Sequence
  Description of Artificial Sequence: Synthetic oligonucleotide
cagaagagguccugcagac

SEQ ID NO: 2759871 - RNA, 19 nt, Artificial Sequence
  Description of Artificial Sequence: Synthetic oligonucleotide
ucguccggaggaacugucg

SEQ ID NO: 2759872 - RNA, 19 nt, Artificial Sequence
  Description of Artificial Sequence: Synthetic oligonucleotide
cuuugcagucguccggagg

SEQ ID NO: 2759873 - RNA, 19 nt, Artificial Sequence
  Description of Artificial Sequence: Synthetic oligonucleotide
cauucuuaagcauuucaua

SEQ ID NO: 2759874 - RNA, 19 nt, Artificial Sequence
  Description of Artificial Sequence: Synthetic oligonucleotide
aaaccccaagagccugccg

SEQ ID NO: 2759875 - RNA, 19 nt, Artificial Sequence
  Description of Artificial Sequence: Synthetic oligonucleotide
ggccggaagagguuuauag

SEQ ID NO: 2759876 - RNA, 19 nt, Artificial Sequence
  Description of Artificial Sequence: Synthetic oligonucleotide
uugcacggucugaagagac

SEQ ID NO: 2759877 - RNA, 19 nt, Artificial Sequence
  Description of Artificial Sequence: Synthetic oligonucleotide
agagguuuauaggcuccgc

SEQ ID NO: 2759878 - RNA, 19 nt, Artificial Sequence
  Description of Artificial Sequence: Synthetic oligonucleotide
gagccugccgcuucagaag

SEQ ID NO: 2759879 - RNA, 19 nt, Artificial Sequence
  Description of Artificial Sequence: Synthetic oligonucleotide
ugagguggcaggcacccuc

SEQ ID NO: 2759880 - RNA, 19 nt, Artificial Sequence
  Description of Artificial Sequence: Synthetic oligonucleotide
ugcugugguaaagaguccu

SEQ ID NO: 2759881 - RNA, 19 nt, Artificial Sequence
  Description of Artificial Sequence: Synthetic oligonucleotide
cuuggagagcaagaaggag

SEQ ID NO: 2759882 - RNA, 19 nt, Artificial Sequence
  Description of Artificial Sequence: Synthetic oligonucleotide
ucaggcaccuugcgguugc

SEQ ID NO: 2759883 - RNA, 19 nt, Artificial Sequence
  Description of Artificial Sequence: Synthetic oligonucleotide
uggagggaauauucgcuga

SEQ ID NO: 2759884 - RNA, 19 nt, Artificial Sequence
  Description of Artificial Sequence: Synthetic oligonucleotide
gagagcaagaaggaggcaa

SEQ ID NO: 2759885 - RNA, 19 nt, Artificial Sequence
  Description of Artificial Sequence: Synthetic oligonucleotide
gcccacaaagaagugaugg

SEQ ID NO: 2759886 - RNA, 19 nt, Artificial Sequence
  Description of Artificial Sequence: Synthetic oligonucleotide
guccugcagacgcacaucc

SEQ ID NO: 2759887 - RNA, 19 nt, Artificial Sequence
  Description of Artificial Sequence: Synthetic oligonucleotide
uccgcacgaccucugggag

SEQ ID NO: 2759888 - RNA, 19 nt, Artificial Sequence
  Description of Artificial Sequence: Synthetic oligonucleotide
gcaggccugguuuuggugg

SEQ ID NO: 2759889 - RNA, 19 nt, Artificial Sequence
  Description of Artificial Sequence: Synthetic oligonucleotide
agccuuugcagucguccgg

SEQ ID NO: 2759890 - RNA, 19 nt, Artificial Sequence
  Description of Artificial Sequence: Synthetic oligonucleotide
uugcgguugcccacaaaga

SEQ ID NO: 2759891 - RNA, 19 nt, Artificial Sequence
  Description of Artificial Sequence: Synthetic oligonucleotide
gcaagaaggaggcaaucug

SEQ ID NO: 2759892 - RNA, 19 nt, Artificial Sequence
  Description of Artificial Sequence: Synthetic oligonucleotide
agagccugccgcuucagaa

SEQ ID NO: 2759893 - RNA, 19 nt, Artificial Sequence
  Description of Artificial Sequence: Synthetic oligonucleotide
agugucggggcauucuuaa

SEQ ID NO: 2759894 - RNA, 19 nt, Artificial Sequence
  Description of Artificial Sequence: Synthetic oligonucleotide
agaaaccccaagagccugc

SEQ ID NO: 2759895 - RNA, 19 nt, Artificial Sequence
  Description of Artificial Sequence: Synthetic oligonucleotide
uucagaagcaggccugguu

SEQ ID NO: 2759896 - RNA, 19 nt, Artificial Sequence
  Description of Artificial Sequence: Synthetic oligonucleotide
agcagcugagguggcaggc

SEQ ID NO: 2759897 - RNA, 19 nt, Artificial Sequence
  Description of Artificial Sequence: Synthetic oligonucleotide
uccgcucuccgcacgaccu

SEQ ID NO: 2759898 - RNA, 19 nt, Artificial Sequence
  Description of Artificial Sequence: Synthetic oligonucleotide
gcuugcacggucugaagag

SEQ ID NO: 2759899 - RNA, 19 nt, Artificial Sequence
  Description of Artificial Sequence: Synthetic oligonucleotide
acgcacauccagcuggcug

SEQ ID NO: 2759900 - RNA, 19 nt, Artificial Sequence
  Description of Artificial Sequence: Synthetic oligonucleotide
uccagucagcagccggccg

SEQ ID NO: 2759901 - RNA, 19 nt, Artificial Sequence
  Description of Artificial Sequence: Synthetic oligonucleotide
gccggaagagguuuauagg

SEQ ID NO: 2759902 - RNA, 19 nt, Artificial Sequence
  Description of Artificial Sequence: Synthetic oligonucleotide
gcaaucugcaagcagcuga

SEQ ID NO: 2759903 - RNA, 19 nt, Artificial Sequence
  Description of Artificial Sequence: Synthetic oligonucleotide
cugcagacgcacauccagc

SEQ ID NO: 2759904 - RNA, 19 nt, Artificial Sequence
  Description of Artificial Sequence: Synthetic oligonucleotide
ugcacggucugaagagaca

SEQ ID NO: 2759905 - RNA, 19 nt, Artificial Sequence
  Description of Artificial Sequence: Synthetic oligonucleotide
guggcaggcacccuccggc

SEQ ID NO: 2759906 - RNA, 19 nt, Artificial Sequence
  Description of Artificial Sequence: Synthetic oligonucleotide
ugcagcagggcagucuuca

SEQ ID NO: 2759907 - RNA, 19 nt, Artificial Sequence
  Description of Artificial Sequence: Synthetic oligonucleotide
gacgaagggccggaagagg

SEQ ID NO: 2759908 - RNA, 19 nt, Artificial Sequence
  Description of Artificial Sequence: Synthetic oligonucleotide
uauaggcuccgcucuccgc

SEQ ID NO: 2759909 - RNA, 19 nt, Artificial Sequence
  Description of Artificial Sequence: Synthetic oligonucleotide
gucccaucgccucaggcac

SEQ ID NO: 2759910 - RNA, 19 nt, Artificial Sequence
  Description of Artificial Sequence: Synthetic oligonucleotide
gggaauauucgcugacgag

SEQ ID NO: 2759911 - RNA, 19 nt, Artificial Sequence
  Description of Artificial Sequence: Synthetic oligonucleotide
ggaagagguuuauaggcuc

SEQ ID NO: 2759912 - RNA, 19 nt, Artificial Sequence
  Description of Artificial Sequence: Synthetic oligonucleotide
aucgccucaggcaccuugc

SEQ ID NO: 2759913 - RNA, 19 nt, Artificial Sequence
  Description of Artificial Sequence: Synthetic oligonucleotide
agagacauggagggaauau

SEQ ID NO: 2759914 - RNA, 19 nt, Artificial Sequence
  Description of Artificial Sequence: Synthetic oligonucleotide
cucugggagucccaucgcc

SEQ ID NO: 2759915 - RNA, 19 nt, Artificial Sequence
  Description of Artificial Sequence: Synthetic oligonucleotide
gcagcaagaaaccccaaga

SEQ ID NO: 2759916 - RNA, 19 nt, Artificial Sequence
  Description of Artificial Sequence: Synthetic oligonucleotide
guaguugcucagcccacug

SEQ ID NO: 2759917 - RNA, 19 nt, Artificial Sequence
  Description of Artificial Sequence: Synthetic oligonucleotide
gucggggcauucuuaagca

SEQ ID NO: 2759918 - RNA, 19 nt, Artificial Sequence
  Description of Artificial Sequence: Synthetic oligonucleotide
agaagagguccugcagacg

SEQ ID NO: 2759919 - RNA, 19 nt, Artificial Sequence
  Description of Artificial Sequence: Synthetic oligonucleotide
cuccaguaggcuccucucc

SEQ ID NO: 2759920 - RNA, 19 nt, Artificial Sequence
  Description of Artificial Sequence: Synthetic oligonucleotide
agaaggaggcaaucugcaa

SEQ ID NO: 2759921 - RNA, 19 nt, Artificial Sequence
  Description of Artificial Sequence: Synthetic oligonucleotide
uccacugugcugugguaaa

SEQ ID NO: 2759922 - RNA, 19 nt, Artificial Sequence
  Description of Artificial Sequence: Synthetic oligonucleotide
guuuauaggcuccgcucuc

SEQ ID NO: 2759923 - RNA, 19 nt, Artificial Sequence
  Description of Artificial Sequence: Synthetic oligonucleotide
ggcauucuuaagcauuuca

SEQ ID NO: 2759924 - RNA, 19 nt, Artificial Sequence
  Description of Artificial Sequence: Synthetic oligonucleotide
guugcccacaaagaaguga

SEQ ID NO: 2759925 - RNA, 19 nt, Artificial Sequence
  Description of Artificial Sequence: Synthetic oligonucleotide
auucgcugacgagugucgg

SEQ ID NO: 2759926 - RNA, 19 nt, Artificial Sequence
  Description of Artificial Sequence: Synthetic oligonucleotide
aagagccugccgcuucaga

SEQ ID NO: 2759927 - RNA, 19 nt, Artificial Sequence
  Description of Artificial Sequence: Synthetic oligonucleotide
ucagcagccggccgggaua

SEQ ID NO: 2759928 - RNA, 19 nt, Artificial Sequence
  Description of Artificial Sequence: Synthetic oligonucleotide
gaaaccccaagagccugcc

SEQ ID NO: 2759929 - RNA, 19 nt, Artificial Sequence
  Description of Artificial Sequence: Synthetic oligonucleotide
gagucccaucgccucaggc

SEQ ID NO: 2759930 - RNA, 19 nt, Artificial Sequence
  Description of Artificial Sequence: Synthetic oligonucleotide
ugcccacaaagaagugaug

SEQ ID NO: 2759931 - RNA, 19 nt, Artificial Sequence
  Description of Artificial Sequence: Synthetic oligonucleotide
agcaggccugguuuuggug

SEQ ID NO: 2759932 - RNA, 19 nt, Artificial Sequence
  Description of Artificial Sequence: Synthetic oligonucleotide
ugguaguugcucagcccac

SEQ ID NO: 2759933 - RNA, 19 nt, Artificial Sequence
  Description of Artificial Sequence: Synthetic oligonucleotide
ugaguccacugugcugugg

SEQ ID NO: 2759934 - RNA, 19 nt, Artificial Sequence
  Description of Artificial Sequence: Synthetic oligonucleotide
cauggagggaauauucgcu

SEQ ID NO: 2759935 - RNA, 19 nt, Artificial Sequence
  Description of Artificial Sequence: Synthetic oligonucleotide
gagguuuauaggcuccgcu

SEQ ID NO: 2759936 - RNA, 19 nt, Artificial Sequence
  Description of Artificial Sequence: Synthetic oligonucleotide
agacgcacauccagcuggc

SEQ ID NO: 2759937 - RNA, 19 nt, Artificial Sequence
  Description of Artificial Sequence: Synthetic oligonucleotide
agccggccgggauagcagg

SEQ ID NO: 2759938 - RNA, 19 nt, Artificial Sequence
  Description of Artificial Sequence: Synthetic oligonucleotide
uccucuccaggaagcagaa

SEQ ID NO: 2759939 - RNA, 19 nt, Artificial Sequence
  Description of Artificial Sequence: Synthetic oligonucleotide
cuucaggugguaguugcuc

SEQ ID NO: 2759940 - RNA, 19 nt, Artificial Sequence
  Description of Artificial Sequence: Synthetic oligonucleotide
ggaauauucgcugacgagu

SEQ ID NO: 2759941 - RNA, 19 nt, Artificial Sequence
  Description of Artificial Sequence: Synthetic oligonucleotide
ggcggcucugcuuggagag

SEQ ID NO: 2759942 - RNA, 19 nt, Artificial Sequence
  Description of Artificial Sequence: Synthetic oligonucleotide
ugggagucccaucgccuca

SEQ ID NO: 2759943 - RNA, 19 nt, Artificial Sequence
  Description of Artificial Sequence: Synthetic oligonucleotide
ggugguaguugcucagccc

SEQ ID NO: 2759944 - RNA, 19 nt, Artificial Sequence
  Description of Artificial Sequence: Synthetic oligonucleotide
caucgccucaggcaccuug

SEQ ID NO: 2759945 - RNA, 19 nt, Artificial Sequence
  Description of Artificial Sequence: Synthetic oligonucleotide
uccggaggaacugucgcuc

SEQ ID NO: 2759946 - RNA, 19 nt, Artificial Sequence
  Description of Artificial Sequence: Synthetic oligonucleotide
aggcuccucuccaggaagc

SEQ ID NO: 2759947 - RNA, 19 nt, Artificial Sequence
  Description of Artificial Sequence: Synthetic oligonucleotide
cuggccuuccagucagcag

SEQ ID NO: 2759948 - RNA, 19 nt, Artificial Sequence
  Description of Artificial Sequence: Synthetic oligonucleotide
gcagaagagguccugcaga

SEQ ID NO: 2759949 - RNA, 19 nt, Artificial Sequence
  Description of Artificial Sequence: Synthetic oligonucleotide
ggcaaagccuuugcagucg

SEQ ID NO: 2759950 - RNA, 19 nt, Artificial Sequence
  Description of Artificial Sequence: Synthetic oligonucleotide
cgcacauccagcuggcugg

SEQ ID NO: 2759951 - RNA, 19 nt, Artificial Sequence
  Description of Artificial Sequence: Synthetic oligonucleotide
acgaagggccggaagaggu

SEQ ID NO: 2759952 - RNA, 19 nt, Artificial Sequence
  Description of Artificial Sequence: Synthetic oligonucleotide
ugggcuugcacggucugaa

SEQ ID NO: 2759953 - RNA, 19 nt, Artificial Sequence
  Description of Artificial Sequence: Synthetic oligonucleotide
agguccugcagacgcacau

SEQ ID NO: 2759954 - RNA, 19 nt, Artificial Sequence
  Description of Artificial Sequence: Synthetic oligonucleotide
uuccagucagcagccggcc

SEQ ID NO: 2759955 - RNA, 19 nt, Artificial Sequence
  Description of Artificial Sequence: Synthetic oligonucleotide
agucuucaggugguaguug

SEQ ID NO: 2759956 - RNA, 19 nt, Artificial Sequence
  Description of Artificial Sequence: Synthetic oligonucleotide
cugggagucccaucgccuc

SEQ ID NO: 2759957 - RNA, 19 nt, Artificial Sequence
  Description of Artificial Sequence: Synthetic oligonucleotide
uggugggcuugcacggucu

SEQ ID NO: 2759958 - RNA, 19 nt, Artificial Sequence
  Description of Artificial Sequence: Synthetic oligonucleotide
agaagcaggccugguuuug

SEQ ID NO: 2759959 - RNA, 19 nt, Artificial Sequence
  Description of Artificial Sequence: Synthetic oligonucleotide
ggagggaauauucgcugac

SEQ ID NO: 2759960 - RNA, 19 nt, Artificial Sequence
  Description of Artificial Sequence: Synthetic oligonucleotide
ugcaagcagcugagguggc

SEQ ID NO: 2759961 - RNA, 19 nt, Artificial Sequence
  Description of Artificial Sequence: Synthetic oligonucleotide
aguccucugcaggacgaag

SEQ ID NO: 2759962 - RNA, 19 nt, Artificial Sequence
  Description of Artificial Sequence: Synthetic oligonucleotide
agcugagguggcaggcacc

SEQ ID NO: 2759963 - RNA, 19 nt, Artificial Sequence
  Description of Artificial Sequence: Synthetic oligonucleotide
agcuggcuggccuuccagu

SEQ ID NO: 2759964 - RNA, 19 nt, Artificial Sequence
  Description of Artificial Sequence: Synthetic oligonucleotide
agagcaagaaggaggcaau

SEQ ID NO: 2759965 - RNA, 19 nt, Artificial Sequence
  Description of Artificial Sequence: Synthetic oligonucleotide
gguuuauaggcuccgcucu

SEQ ID NO: 2759966 - RNA, 19 nt, Artificial Sequence
  Description of Artificial Sequence: Synthetic oligonucleotide
cacugggaccugucaggcg

SEQ ID NO: 2759967 - RNA, 19 nt, Artificial Sequence
  Description of Artificial Sequence: Synthetic oligonucleotide
caggacgaagggccggaag

SEQ ID NO: 2759968 - RNA, 19 nt, Artificial Sequence
  Description of Artificial Sequence: Synthetic oligonucleotide
aagagacauggagggaaua

SEQ ID NO: 2759969 - RNA, 19 nt, Artificial Sequence
  Description of Artificial Sequence: Synthetic oligonucleotide
guuuugguggugggcuugc

SEQ ID NO: 2759970 - RNA, 19 nt, Artificial Sequence
  Description of Artificial Sequence: Synthetic oligonucleotide
caggaggugcagcagggca

SEQ ID NO: 2759971 - RNA, 19 nt, Artificial Sequence
  Description of Artificial Sequence: Synthetic oligonucleotide
cccacugggaccugucagg

SEQ ID NO: 2759972 - RNA, 19 nt, Artificial Sequence
  Description of Artificial Sequence: Synthetic oligonucleotide
accccaagagccugccgcu

SEQ ID NO: 2759973 - RNA, 19 nt, Artificial Sequence
  Description of Artificial Sequence: Synthetic oligonucleotide
cacggucugaagagacaug

SEQ ID NO: 2759974 - RNA, 19 nt, Artificial Sequence
  Description of Artificial Sequence: Synthetic oligonucleotide
cucuccgcacgaccucugg

SEQ ID NO: 2759975 - RNA, 19 nt, Artificial Sequence
  Description of Artificial Sequence: Synthetic oligonucleotide
cuccgcacgaccucuggga

SEQ ID NO: 2759976 - RNA, 19 nt, Artificial Sequence
  Description of Artificial Sequence: Synthetic oligonucleotide
gagguggcaggcacccucc

SEQ ID NO: 2759977 - RNA, 19 nt, Artificial Sequence
  Description of Artificial Sequence: Synthetic oligonucleotide
cagcugagguggcaggcac

SEQ ID NO: 2759978 - RNA, 19 nt, Artificial Sequence
  Description of Artificial Sequence: Synthetic oligonucleotide
aagagguccugcagacgca

SEQ ID NO: 2759979 - RNA, 19 nt, Artificial Sequence
  Description of Artificial Sequence: Synthetic oligonucleotide
ggcacccuccggcaaagcc

SEQ ID NO: 2759980 - RNA, 19 nt, Artificial Sequence
  Description of Artificial Sequence: Synthetic oligonucleotide
caagaaaccccaagagccu

SEQ ID NO: 2759981 - RNA, 19 nt, Artificial Sequence
  Description of Artificial Sequence: Synthetic oligonucleotide
gugucggggcauucuuaag

SEQ ID NO: 2759982 - RNA, 19 nt, Artificial Sequence
  Description of Artificial Sequence: Synthetic oligonucleotide
ccagucagcagccggccgg

SEQ ID NO: 2759983 - RNA, 19 nt, Artificial Sequence
  Description of Artificial Sequence: Synthetic oligonucleotide
aggcaccuugcgguugccc

SEQ ID NO: 2759984 - RNA, 19 nt, Artificial Sequence
  Description of Artificial Sequence: Synthetic oligonucleotide
ugcaggacgaagggccgga

SEQ ID NO: 2759985 - RNA, 19 nt, Artificial Sequence
  Description of Artificial Sequence: Synthetic oligonucleotide
ucccaucgccucaggcacc

SEQ ID NO: 2759986 - RNA, 19 nt, Artificial Sequence
  Description of Artificial Sequence: Synthetic oligonucleotide
aggcaaucugcaagcagcu

SEQ ID NO: 2759987 - RNA, 19 nt, Artificial Sequence
  Description of Artificial Sequence: Synthetic oligonucleotide
caggugguaguugcucagc

SEQ ID NO: 2759988 - RNA, 19 nt, Artificial Sequence
  Description of Artificial Sequence: Synthetic oligonucleotide
agaguccucugcaggacga

SEQ ID NO: 2759989 - RNA, 19 nt, Artificial Sequence
  Description of Artificial Sequence: Synthetic oligonucleotide
ggcuugcacggucugaaga

SEQ ID NO: 2759990 - RNA, 19 nt, Artificial Sequence
  Description of Artificial Sequence: Synthetic oligonucleotide
gagcaagaaggaggcaauc

SEQ ID NO: 2759991 - RNA, 19 nt, Artificial Sequence
  Description of Artificial Sequence: Synthetic oligonucleotide
ucggggcauucuuaagcau

SEQ ID NO: 2759992 - RNA, 19 nt, Artificial Sequence
  Description of Artificial Sequence: Synthetic oligonucleotide
cuccgcucuccgcacgacc

SEQ ID NO: 2759993 - RNA, 19 nt, Artificial Sequence
  Description of Artificial Sequence: Synthetic oligonucleotide
gcgguugcccacaaagaag

SEQ ID NO: 2759994 - RNA, 19 nt, Artificial Sequence
  Description of Artificial Sequence: Synthetic oligonucleotide
aggcggcucugcuuggaga

SEQ ID NO: 2759995 - RNA, 19 nt, Artificial Sequence
  Description of Artificial Sequence: Synthetic oligonucleotide
uggcaggcacccuccggca

SEQ ID NO: 2759996 - RNA, 19 nt, Artificial Sequence
  Description of Artificial Sequence: Synthetic oligonucleotide
gcuucagaagcaggccugg

SEQ ID NO: 2759997 - RNA, 19 nt, Artificial Sequence
  Description of Artificial Sequence: Synthetic oligonucleotide
ggacgaagggccggaagag

SEQ ID NO: 2759998 - RNA, 19 nt, Artificial Sequence
  Description of Artificial Sequence: Synthetic oligonucleotide
augaguccacugugcugug

SEQ ID NO: 2759999 - RNA, 19 nt, Artificial Sequence
  Description of Artificial Sequence: Synthetic oligonucleotide
uaggcuccgcucuccgcac

SEQ ID NO: 2760000 - RNA, 19 nt, Artificial Sequence
  Description of Artificial Sequence: Synthetic oligonucleotide
gguggcaggcacccuccgg

SEQ ID NO: 2760001 - RNA, 19 nt, Artificial Sequence
  Description of Artificial Sequence: Synthetic oligonucleotide
accugucaggcggcucugc

SEQ ID NO: 2760002 - RNA, 19 nt, Artificial Sequence
  Description of Artificial Sequence: Synthetic oligonucleotide
guaggcuccucuccaggaa

SEQ ID NO: 2760003 - RNA, 19 nt, Artificial Sequence
  Description of Artificial Sequence: Synthetic oligonucleotide
ugcagucguccggaggaac

SEQ ID NO: 2760004 - RNA, 19 nt, Artificial Sequence
  Description of Artificial Sequence: Synthetic oligonucleotide
cagccggccgggauagcag

SEQ ID NO: 2760005 - RNA, 19 nt, Artificial Sequence
  Description of Artificial Sequence: Synthetic oligonucleotide
ggcaccuugcgguugccca

SEQ ID NO: 2760006 - RNA, 19 nt, Artificial Sequence
  Description of Artificial Sequence: Synthetic oligonucleotide
agcccacugggaccuguca

SEQ ID NO: 2760007 - RNA, 19 nt, Artificial Sequence
  Description of Artificial Sequence: Synthetic oligonucleotide
gcugagguggcaggcaccc

SEQ ID NO: 2760008 - RNA, 19 nt, Artificial Sequence
  Description of Artificial Sequence: Synthetic oligonucleotide
uuuugguggugggcuugca

SEQ ID NO: 2760009 - RNA, 19 nt, Artificial Sequence
  Description of Artificial Sequence: Synthetic oligonucleotide
ggaagcagaagagguccug

SEQ ID NO: 2760010 - RNA, 19 nt, Artificial Sequence
  Description of Artificial Sequence: Synthetic oligonucleotide
acgagugucggggcauucu

SEQ ID NO: 2760011 - RNA, 19 nt, Artificial Sequence
  Description of Artificial Sequence: Synthetic oligonucleotide
cuuaagcauuucauagaau

SEQ ID NO: 2760012 - RNA, 19 nt, Artificial Sequence
  Description of Artificial Sequence: Synthetic oligonucleotide
cuugcacggucugaagaga

SEQ ID NO: 2760013 - RNA, 19 nt, Artificial Sequence
  Description of Artificial Sequence: Synthetic oligonucleotide
caaagccuuugcagucguc

SEQ ID NO: 2760014 - RNA, 19 nt, Artificial Sequence
  Description of Artificial Sequence: Synthetic oligonucleotide
agggcagucuucagguggu

SEQ ID NO: 2760015 - RNA, 19 nt, Artificial Sequence
  Description of Artificial Sequence: Synthetic oligonucleotide
cagucguccggaggaacug

SEQ ID NO: 2760016 - RNA, 19 nt, Artificial Sequence
  Description of Artificial Sequence: Synthetic oligonucleotide
agucguccggaggaacugu

SEQ ID NO: 2760017 - RNA, 19 nt, Artificial Sequence
  Description of Artificial Sequence: Synthetic oligonucleotide
cugcaggacgaagggccgg

SEQ ID NO: 2760018 - RNA, 19 nt, Artificial Sequence
  Description of Artificial Sequence: Synthetic oligonucleotide
caggcggcucugcuuggag

SEQ ID NO: 2760019 - RNA, 19 nt, Artificial Sequence
  Description of Artificial Sequence: Synthetic oligonucleotide
aagaagugauggagcuuuu

SEQ ID NO: 2760020 - RNA, 19 nt, Artificial Sequence
  Description of Artificial Sequence: Synthetic oligonucleotide
aggaagcagaagagguccu

SEQ ID NO: 2760021 - RNA, 19 nt, Artificial Sequence
  Description of Artificial Sequence: Synthetic oligonucleotide
cugugcugugguaaagagu

SEQ ID NO: 2760022 - RNA, 19 nt, Artificial Sequence
  Description of Artificial Sequence: Synthetic oligonucleotide
cuggcuggccuuccaguca

SEQ ID NO: 2760023 - RNA, 19 nt, Artificial Sequence
  Description of Artificial Sequence: Synthetic oligonucleotide
ucaggcggcucugcuugga

SEQ ID NO: 2760024 - RNA, 19 nt, Artificial Sequence
  Description of Artificial Sequence: Synthetic oligonucleotide
guggugggcuugcacgguc

SEQ ID NO: 2760025 - RNA, 19 nt, Artificial Sequence
  Description of Artificial Sequence: Synthetic oligonucleotide
gagacauggagggaauauu

SEQ ID NO: 2760026 - RNA, 19 nt, Artificial Sequence
  Description of Artificial Sequence: Synthetic oligonucleotide
gcuuggagagcaagaagga

SEQ ID NO: 2760027 - RNA, 19 nt, Artificial Sequence
  Description of Artificial Sequence: Synthetic oligonucleotide
ggccugguuuugguggugg

SEQ ID NO: 2760028 - RNA, 19 nt, Artificial Sequence
  Description of Artificial Sequence: Synthetic oligonucleotide
gaagagacauggagggaau

SEQ ID NO: 2760029 - RNA, 19 nt, Artificial Sequence
  Description of Artificial Sequence: Synthetic oligonucleotide
guugcucagcccacuggga

SEQ ID NO: 2760030 - RNA, 19 nt, Artificial Sequence
  Description of Artificial Sequence: Synthetic oligonucleotide
gaccucugggagucccauc

SEQ ID NO: 2760031 - RNA, 19 nt, Artificial Sequence
  Description of Artificial Sequence: Synthetic oligonucleotide
ggauagcaggaggugcagc

SEQ ID NO: 2760032 - RNA, 19 nt, Artificial Sequence
  Description of Artificial Sequence: Synthetic oligonucleotide
gcuggcuggccuuccaguc

SEQ ID NO: 2760033 - RNA, 19 nt, Artificial Sequence
  Description of Artificial Sequence: Synthetic oligonucleotide
gugcugugguaaagagucc

SEQ ID NO: 2760034 - RNA, 19 nt, Artificial Sequence
  Description of Artificial Sequence: Synthetic oligonucleotide
cucaggcaccuugcgguug

SEQ ID NO: 2760035 - RNA, 19 nt, Artificial Sequence
  Description of Artificial Sequence: Synthetic oligonucleotide
cugaagagacauggaggga

SEQ ID NO: 2760036 - RNA, 19 nt, Artificial Sequence
  Description of Artificial Sequence: Synthetic oligonucleotide
gccugguuuuggugguggg

SEQ ID NO: 2760037 - RNA, 19 nt, Artificial Sequence
  Description of Artificial Sequence: Synthetic oligonucleotide
cagcagccggccgggauag

SEQ ID NO: 2760038 - RNA, 19 nt, Artificial Sequence
  Description of Artificial Sequence: Synthetic oligonucleotide
gccucaggcaccuugcggu

SEQ ID NO: 2760039 - RNA, 19 nt, Artificial Sequence
  Description of Artificial Sequence: Synthetic oligonucleotide
caagagccugccgcuucag

SEQ ID NO: 2760040 - RNA, 19 nt, Artificial Sequence
  Description of Artificial Sequence: Synthetic oligonucleotide
gcagucuucaggugguagu

SEQ ID NO: 2760041 - RNA, 19 nt, Artificial Sequence
  Description of Artificial Sequence: Synthetic oligonucleotide
gcucugcuuggagagcaag

SEQ ID NO: 2760042 - RNA, 19 nt, Artificial Sequence
  Description of Artificial Sequence: Synthetic oligonucleotide
cugugguaaagaguccucu

SEQ ID NO: 2760043 - RNA, 19 nt, Artificial Sequence
  Description of Artificial Sequence: Synthetic oligonucleotide
cuccggcaaagccuuugca

SEQ ID NO: 2760044 - RNA, 19 nt, Artificial Sequence
  Description of Artificial Sequence: Synthetic oligonucleotide
ccgggauagcaggaggugc

SEQ ID NO: 2760045 - RNA, 19 nt, Artificial Sequence
  Description of Artificial Sequence: Synthetic oligonucleotide
caggcacccuccggcaaag

SEQ ID NO: 2760046 - RNA, 19 nt, Artificial Sequence
  Description of Artificial Sequence: Synthetic oligonucleotide
ggugggcuugcacggucug

SEQ ID NO: 2760047 - RNA, 19 nt, Artificial Sequence
  Description of Artificial Sequence: Synthetic oligonucleotide
gaccugucaggcggcucug

SEQ ID NO: 2760048 - RNA, 19 nt, Artificial Sequence
  Description of Artificial Sequence: Synthetic oligonucleotide
cguccggaggaacugucgc

SEQ ID NO: 2760049 - RNA, 19 nt, Artificial Sequence
  Description of Artificial Sequence: Synthetic oligonucleotide
uugcagucguccggaggaa

SEQ ID NO: 2760050 - RNA, 19 nt, Artificial Sequence
  Description of Artificial Sequence: Synthetic oligonucleotide
gccgcuucagaagcaggcc

SEQ ID NO: 2760051 - RNA, 19 nt, Artificial Sequence
  Description of Artificial Sequence: Synthetic oligonucleotide
ccuccggcaaagccuuugc

SEQ ID NO: 2760052 - RNA, 19 nt, Artificial Sequence
  Description of Artificial Sequence: Synthetic oligonucleotide
aggcacccuccggcaaagc

SEQ ID NO: 2760053 - RNA, 19 nt, Artificial Sequence
  Description of Artificial Sequence: Synthetic oligonucleotide
gcagcagggcagucuucag

SEQ ID NO: 2760054 - RNA, 19 nt, Artificial Sequence
  Description of Artificial Sequence: Synthetic oligonucleotide
gaagggccggaagagguuu

SEQ ID NO: 2760055 - RNA, 19 nt, Artificial Sequence
  Description of Artificial Sequence: Synthetic oligonucleotide
cgagaauuuaauucuuccu

SEQ ID NO: 2760056 - RNA, 19 nt, Artificial Sequence
  Description of Artificial Sequence: Synthetic oligonucleotide
ggagucccaucgccucagg

SEQ ID NO: 2760057 - RNA, 19 nt, Artificial Sequence
  Description of Artificial Sequence: Synthetic oligonucleotide
gagugucggggcauucuua

SEQ ID NO: 2760058 - RNA, 19 nt, Artificial Sequence
  Description of Artificial Sequence: Synthetic oligonucleotide
gggcuugcacggucugaag

SEQ ID NO: 2760059 - RNA, 19 nt, Artificial Sequence
  Description of Artificial Sequence: Synthetic oligonucleotide
ccacugggaccugucaggc

SEQ ID NO: 2760060 - RNA, 19 nt, Artificial Sequence
  Description of Artificial Sequence: Synthetic oligonucleotide
gacgagugucggggcauuc

SEQ ID NO: 2760061 - RNA, 19 nt, Artificial Sequence
  Description of Artificial Sequence: Synthetic oligonucleotide
gcuccucuccaggaagcag

SEQ ID NO: 2760062 - RNA, 19 nt, Artificial Sequence
  Description of Artificial Sequence: Synthetic oligonucleotide
cgcuucagaagcaggccug

SEQ ID NO: 2760063 - RNA, 19 nt, Artificial Sequence
  Description of Artificial Sequence: Synthetic oligonucleotide
gucguccggaggaacuguc

SEQ ID NO: 2760064 - RNA, 19 nt, Artificial Sequence
  Description of Artificial Sequence: Synthetic oligonucleotide
gggagucccaucgccucag

SEQ ID NO: 2760065 - RNA, 19 nt, Artificial Sequence
  Description of Artificial Sequence: Synthetic oligonucleotide
gguugcccacaaagaagug

SEQ ID NO: 2760066 - RNA, 19 nt, Artificial Sequence
  Description of Artificial Sequence: Synthetic oligonucleotide
guccggaggaacugucgcu

SEQ ID NO: 2760067 - RNA, 19 nt, Artificial Sequence
  Description of Artificial Sequence: Synthetic oligonucleotide
ccugccgcuucagaagcag

SEQ ID NO: 2760068 - RNA, 19 nt, Artificial Sequence
  Description of Artificial Sequence: Synthetic oligonucleotide
gcugugguaaagaguccuc

SEQ ID NO: 2760069 - RNA, 19 nt, Artificial Sequence
  Description of Artificial Sequence: Synthetic oligonucleotide
cagcccacugggaccuguc

SEQ ID NO: 2760070 - RNA, 19 nt, Artificial Sequence
  Description of Artificial Sequence: Synthetic oligonucleotide
gcagggcagucuucaggug

SEQ ID NO: 2760071 - RNA, 19 nt, Artificial Sequence
  Description of Artificial Sequence: Synthetic oligonucleotide
aagggccggaagagguuua

SEQ ID NO: 2760072 - RNA, 19 nt, Artificial Sequence
  Description of Artificial Sequence: Synthetic oligonucleotide
ugacgagugucggggcauu

SEQ ID NO: 2760073 - RNA, 19 nt, Artificial Sequence
  Description of Artificial Sequence: Synthetic oligonucleotide
ugggaccugucaggcggcu

SEQ ID NO: 2760074 - RNA, 19 nt, Artificial Sequence
  Description of Artificial Sequence: Synthetic oligonucleotide
gagguccugcagacgcaca

SEQ ID NO: 2760075 - RNA, 19 nt, Artificial Sequence
  Description of Artificial Sequence: Synthetic oligonucleotide
ggugcagcagggcagucuu

SEQ ID NO: 2760076 - RNA, 19 nt, Artificial Sequence
  Description of Artificial Sequence: Synthetic oligonucleotide
gccgggauagcaggaggug

SEQ ID NO: 2760077 - RNA, 19 nt, Artificial Sequence
  Description of Artificial Sequence: Synthetic oligonucleotide
ccggcaaagccuuugcagu

SEQ ID NO: 2760078 - RNA, 19 nt, Artificial Sequence
  Description of Artificial Sequence: Synthetic oligonucleotide
agggccggaagagguuuau

SEQ ID NO: 2760079 - RNA, 19 nt, Artificial Sequence
  Description of Artificial Sequence: Synthetic oligonucleotide
gccuuugcagucguccgga

SEQ ID NO: 2760080 - RNA, 19 nt, Artificial Sequence
  Description of Artificial Sequence: Synthetic oligonucleotide
ccuuugcagucguccggag

SEQ ID NO: 2760081 - RNA, 19 nt, Artificial Sequence
  Description of Artificial Sequence: Synthetic oligonucleotide
gaguccucugcaggacgaa

SEQ ID NO: 2760082 - RNA, 19 nt, Artificial Sequence
  Description of Artificial Sequence: Synthetic oligonucleotide
aggccugguuuugguggug

SEQ ID NO: 2760083 - RNA, 19 nt, Artificial Sequence
  Description of Artificial Sequence: Synthetic oligonucleotide
accuugcgguugcccacaa

SEQ ID NO: 2760084 - RNA, 19 nt, Artificial Sequence
  Description of Artificial Sequence: Synthetic oligonucleotide
cggcaaagccuuugcaguc

SEQ ID NO: 2760085 - RNA, 19 nt, Artificial Sequence
  Description of Artificial Sequence: Synthetic oligonucleotide
cccaagagccugccgcuuc

SEQ ID NO: 2760086 - RNA, 19 nt, Artificial Sequence
  Description of Artificial Sequence: Synthetic oligonucleotide
agcagccggccgggauagc

SEQ ID NO: 2760087 - RNA, 19 nt, Artificial Sequence
  Description of Artificial Sequence: Synthetic oligonucleotide
gugggcuugcacggucuga

SEQ ID NO: 2760088 - RNA, 19 nt, Artificial Sequence
  Description of Artificial Sequence: Synthetic oligonucleotide
gguccugcagacgcacauc

SEQ ID NO: 2760089 - RNA, 19 nt, Artificial Sequence
  Description of Artificial Sequence: Synthetic oligonucleotide
acgaccucugggaguccca

SEQ ID NO: 2760090 - RNA, 19 nt, Artificial Sequence
  Description of Artificial Sequence: Synthetic oligonucleotide
caccuugcgguugcccaca

SEQ ID NO: 2760091 - RNA, 19 nt, Artificial Sequence
  Description of Artificial Sequence: Synthetic oligonucleotide
gcuggccuuccagucagca

SEQ ID NO: 2760092 - RNA, 19 nt, Artificial Sequence
  Description of Artificial Sequence: Synthetic oligonucleotide
cgguugcccacaaagaagu

SEQ ID NO: 2760093 - RNA, 19 nt, Artificial Sequence
  Description of Artificial Sequence: Synthetic oligonucleotide
caggccugguuuugguggu

SEQ ID NO: 2760094 - RNA, 19 nt, Artificial Sequence
  Description of Artificial Sequence: Synthetic oligonucleotide
cagaagcaggccugguuuu

SEQ ID NO: 2760095 - RNA, 19 nt, Artificial Sequence
  Description of Artificial Sequence: Synthetic oligonucleotide
cgcacgaccucugggaguc

SEQ ID NO: 2760096 - RNA, 19 nt, Artificial Sequence
  Description of Artificial Sequence: Synthetic oligonucleotide
gcaggcacccuccggcaaa

SEQ ID NO: 2760097 - RNA, 19 nt, Artificial Sequence
  Description of Artificial Sequence: Synthetic oligonucleotide
gcaaagccuuugcagucgu

SEQ ID NO: 2760098 - RNA, 19 nt, Artificial Sequence
  Description of Artificial Sequence: Synthetic oligonucleotide
gcagccggccgggauagca

SEQ ID NO: 2760099 - RNA, 19 nt, Artificial Sequence
  Description of Artificial Sequence: Synthetic oligonucleotide
gaggugcagcagggcaguc

SEQ ID NO: 2760100 - RNA, 19 nt, Artificial Sequence
  Description of Artificial Sequence: Synthetic oligonucleotide
ggaggaacugucgcucaua

SEQ ID NO: 2760101 - RNA, 19 nt, Artificial Sequence
  Description of Artificial Sequence: Synthetic oligonucleotide
cacccuccggcaaagccuu

SEQ ID NO: 2760102 - RNA, 19 nt, Artificial Sequence
  Description of Artificial Sequence: Synthetic oligonucleotide
cagucuucaggugguaguu

SEQ ID NO: 2760103 - RNA, 19 nt, Artificial Sequence
  Description of Artificial Sequence: Synthetic oligonucleotide
gcacggucugaagagacau

SEQ ID NO: 2760104 - RNA, 19 nt, Artificial Sequence
  Description of Artificial Sequence: Synthetic oligonucleotide
gguaguugcucagcccacu

SEQ ID NO: 2760105 - RNA, 19 nt, Artificial Sequence
  Description of Artificial Sequence: Synthetic oligonucleotide
ggagagcaagaaggaggca

SEQ ID NO: 2760106 - RNA, 19 nt, Artificial Sequence
  Description of Artificial Sequence: Synthetic oligonucleotide
ccaagagccugccgcuuca

SEQ ID NO: 2760107 - RNA, 19 nt, Artificial Sequence
  Description of Artificial Sequence: Synthetic oligonucleotide
caggcaccuugcgguugcc

SEQ ID NO: 2760108 - RNA, 19 nt, Artificial Sequence
  Description of Artificial Sequence: Synthetic oligonucleotide
gucagcagccggccgggau

SEQ ID NO: 2760109 - RNA, 19 nt, Artificial Sequence
  Description of Artificial Sequence: Synthetic oligonucleotide
ggcuccgcucuccgcacga

SEQ ID NO: 2760110 - RNA, 19 nt, Artificial Sequence
  Description of Artificial Sequence: Synthetic oligonucleotide
ggggcauucuuaagcauuu

SEQ ID NO: 2760111 - RNA, 19 nt, Artificial Sequence
  Description of Artificial Sequence: Synthetic oligonucleotide
gcacccuccggcaaagccu

SEQ ID NO: 2760112 - RNA, 19 nt, Artificial Sequence
  Description of Artificial Sequence: Synthetic oligonucleotide
ggcuccucuccaggaagca

SEQ ID NO: 2760113 - RNA, 19 nt, Artificial Sequence
  Description of Artificial Sequence: Synthetic oligonucleotide
cggccgggauagcaggagg

SEQ ID NO: 2760114 - RNA, 19 nt, Artificial Sequence
  Description of Artificial Sequence: Synthetic oligonucleotide
cauccagcuggcuggccuu

SEQ ID NO: 2760115 - RNA, 19 nt, Artificial Sequence
  Description of Artificial Sequence: Synthetic oligonucleotide
gccuuccagucagcagccg

SEQ ID NO: 2760116 - RNA, 19 nt, Artificial Sequence
  Description of Artificial Sequence: Synthetic oligonucleotide
cugucaggcggcucugcuu

SEQ ID NO: 2760117 - RNA, 19 nt, Artificial Sequence
  Description of Artificial Sequence: Synthetic oligonucleotide
agucagcagccggccggga

SEQ ID NO: 2760118 - RNA, 19 nt, Artificial Sequence
  Description of Artificial Sequence: Synthetic oligonucleotide
gcagucguccggaggaacu

SEQ ID NO: 2760119 - RNA, 19 nt, Artificial Sequence
  Description of Artificial Sequence: Synthetic oligonucleotide
ggaggugcagcagggcagu

SEQ ID NO: 2760120 - RNA, 19 nt, Artificial Sequence
  Description of Artificial Sequence: Synthetic oligonucleotide
cuucagaagcaggccuggu

SEQ ID NO: 2760121 - RNA, 19 nt, Artificial Sequence
  Description of Artificial Sequence: Synthetic oligonucleotide
ggcaggcacccuccggcaa

SEQ ID NO: 2760122 - RNA, 19 nt, Artificial Sequence
  Description of Artificial Sequence: Synthetic oligonucleotide
cccuccggcaaagccuuug

SEQ ID NO: 2760123 - RNA, 19 nt, Artificial Sequence
  Description of Artificial Sequence: Synthetic oligonucleotide
cugacgagugucggggcau

SEQ ID NO: 2760124 - RNA, 19 nt, Artificial Sequence
  Description of Artificial Sequence: Synthetic oligonucleotide
ccggaggaacugucgcuca

SEQ ID NO: 2760125 - RNA, 19 nt, Artificial Sequence
  Description of Artificial Sequence: Synthetic oligonucleotide
gacgcacauccagcuggcu

SEQ ID NO: 2760126 - RNA, 19 nt, Artificial Sequence
  Description of Artificial Sequence: Synthetic oligonucleotide
ccggccgggauagcaggag

SEQ ID NO: 2760127 - RNA, 19 nt, Artificial Sequence
  Description of Artificial Sequence: Synthetic oligonucleotide
gcggcucugcuuggagagc

SEQ ID NO: 2760128 - RNA, 19 nt, Artificial Sequence
  Description of Artificial Sequence: Synthetic oligonucleotide
ggccgggauagcaggaggu

SEQ ID NO: 2760129 - RNA, 19 nt, Artificial Sequence
  Description of Artificial Sequence: Synthetic oligonucleotide
ccgcuucagaagcaggccu

SEQ ID NO: 2760130 - RNA, 19 nt, Artificial Sequence
  Description of Artificial Sequence: Synthetic oligonucleotide
gcucuccgcacgaccucug

SEQ ID NO: 2760131 - RNA, 19 nt, Artificial Sequence
  Description of Artificial Sequence: Synthetic oligonucleotide
cggucugaagagacaugga

SEQ ID NO: 2760132 - RNA, 19 nt, Artificial Sequence
  Description of Artificial Sequence: Synthetic oligonucleotide
gggaccugucaggcggcuc

SEQ ID NO: 2760133 - RNA, 19 nt, Artificial Sequence
  Description of Artificial Sequence: Synthetic oligonucleotide
ccagcuggcuggccuucca

SEQ ID NO: 2760134 - RNA, 19 nt, Artificial Sequence
  Description of Artificial Sequence: Synthetic oligonucleotide
gguggugggcuugcacggu

SEQ ID NO: 2760135 - RNA, 19 nt, Artificial Sequence
  Description of Artificial Sequence: Synthetic oligonucleotide
ccugucaggcggcucugcu

SEQ ID NO: 2760136 - RNA, 19 nt, Artificial Sequence
  Description of Artificial Sequence: Synthetic oligonucleotide
cggggcauucuuaagcauu

SEQ ID NO: 2760137 - RNA, 19 nt, Artificial Sequence
  Description of Artificial Sequence: Synthetic oligonucleotide
ccgcucuccgcacgaccuc

SEQ ID NO: 2760138 - RNA, 19 nt, Artificial Sequence
  Description of Artificial Sequence: Synthetic oligonucleotide
cggcucugcuuggagagca

SEQ ID NO: 2760139 - RNA, 19 nt, Artificial Sequence
  Description of Artificial Sequence: Synthetic oligonucleotide
gcuccgcucuccgcacgac

SEQ ID NO: 2760140 - RNA, 19 nt, Artificial Sequence
  Description of Artificial Sequence: Synthetic oligonucleotide
gccugccgcuucagaagca

SEQ ID NO: 2760141 - RNA, 19 nt, Artificial Sequence
  Description of Artificial Sequence: Synthetic oligonucleotide
gggccggaagagguuuaua

SEQ ID NO: 2760142 - RNA, 19 nt, Artificial Sequence
  Description of Artificial Sequence: Synthetic oligonucleotide
gcacgaccucugggagucc

SEQ ID NO: 2760143 - RNA, 19 nt, Artificial Sequence
  Description of Artificial Sequence: Synthetic oligonucleotide
gcaggacgaagggccggaa

SEQ ID NO: 2760144 - RNA, 19 nt, Artificial Sequence
  Description of Artificial Sequence: Synthetic oligonucleotide
ccuugcgguugcccacaaa

SEQ ID NO: 2760145 - RNA, 19 nt, Artificial Sequence
  Description of Artificial Sequence: Synthetic oligonucleotide
ccgcacgaccucugggagu

SEQ ID NO: 2760146 - RNA, 19 nt, Artificial Sequence
  Description of Artificial Sequence: Synthetic oligonucleotide
gggcagucuucagguggua

SEQ ID NO: 2760147 - RNA, 19 nt, Artificial Sequence
  Description of Artificial Sequence: Synthetic oligonucleotide
cccaucgccucaggcaccu

SEQ ID NO: 2760148 - RNA, 19 nt, Artificial Sequence
  Description of Artificial Sequence: Synthetic oligonucleotide
acccuccggcaaagccuuu

SEQ ID NO: 2760149 - RNA, 19 nt, Artificial Sequence
  Description of Artificial Sequence: Synthetic oligonucleotide
cgagugucggggcauucuu

SEQ ID NO: 2760150 - RNA, 19 nt, Artificial Sequence
  Description of Artificial Sequence: Synthetic oligonucleotide
ccucaggcaccuugcgguu

SEQ ID NO: 2760151 - RNA, 19 nt, Artificial Sequence
  Description of Artificial Sequence: Synthetic oligonucleotide
cgaagggccggaagagguu

SEQ ID NO: 2760152 - RNA, 19 nt, Artificial Sequence
  Description of Artificial Sequence: Synthetic oligonucleotide
cggaggaacugucgcucau

SEQ ID NO: 2760153 - RNA, 19 nt, Artificial Sequence
  Description of Artificial Sequence: Synthetic oligonucleotide
cgcucuccgcacgaccucu

SEQ ID NO: 2760154 - RNA, 19 nt, Artificial Sequence
  Description of Artificial Sequence: Synthetic oligonucleotide
cgaccucugggagucccau

SEQ ID NO: 2760155 - RNA, 19 nt, Artificial Sequence
  Description of Artificial Sequence: Synthetic oligonucleotide
ccccaagagccugccgcuu

SEQ ID NO: 2760156 - RNA, 19 nt, Artificial Sequence
  Description of Artificial Sequence: Synthetic oligonucleotide
ccaucgccucaggcaccuu

SEQ ID NO: 2760157 - RNA, 19 nt, Artificial Sequence
  Description of Artificial Sequence: Synthetic oligonucleotide
aauuccaaggaucacaagc

SEQ ID NO: 2760158 - RNA, 19 nt, Artificial Sequence
  Description of Artificial Sequence: Synthetic oligonucleotide
aaugaggacgaacaucacc

SEQ ID NO: 2760159 - RNA, 19 nt, Artificial Sequence
  Description of Artificial Sequence: Synthetic oligonucleotide
  modified_base (15)..(15): a, c, u, g, unknown or other
agagugagcacccanagac

SEQ ID NO: 2760160 - RNA, 19 nt, Artificial Sequence
  Description of Artificial Sequence: Synthetic oligonucleotide
agcuacaucaaauccaacc

SEQ ID NO: 2760161 - RNA, 19 nt, Artificial Sequence
  Description of Artificial Sequence: Synthetic oligonucleotide
ugagauuacaaguggaagg

SEQ ID NO: 2760162 - RNA, 19 nt, Artificial Sequence
  Description of Artificial Sequence: Synthetic oligonucleotide
aauccaaccaaugagguug

SEQ ID NO: 2760163 - RNA, 19 nt, Artificial Sequence
  Description of Artificial Sequence: Synthetic oligonucleotide
uucuaaauaguucaggauc

SEQ ID NO: 2760164 - RNA, 19 nt, Artificial Sequence
  Description of Artificial Sequence: Synthetic oligonucleotide
uagaccaggacacacagcc

SEQ ID NO: 2760165 - RNA, 19 nt, Artificial Sequence
  Description of Artificial Sequence: Synthetic oligonucleotide
aucaaauccaaccaaugag

SEQ ID NO: 2760166 - RNA, 19 nt, Artificial Sequence
  Description of Artificial Sequence: Synthetic oligonucleotide
ucuaaauaguucaggaucu

SEQ ID NO: 2760167 - RNA, 19 nt, Artificial Sequence
  Description of Artificial Sequence: Synthetic oligonucleotide
ucugaaucagcacagcuac

SEQ ID NO: 2760168 - RNA, 19 nt, Artificial Sequence
  Description of Artificial Sequence: Synthetic oligonucleotide
aauaguucaggaucucuca

SEQ ID NO: 2760169 - RNA, 19 nt, Artificial Sequence
  Description of Artificial Sequence: Synthetic oligonucleotide
ugauacucaccacuguagg

SEQ ID NO: 2760170 - RNA, 19 nt, Artificial Sequence
  Description of Artificial Sequence: Synthetic oligonucleotide
uguaggaguuucuaggcag

SEQ ID NO: 2760171 - RNA, 19 nt, Artificial Sequence
  Description of Artificial Sequence: Synthetic oligonucleotide
gaaugagugauacucacca

SEQ ID NO: 2760172 - RNA, 19 nt, Artificial Sequence
  Description of Artificial Sequence: Synthetic oligonucleotide
aaauaguucaggaucucuc

SEQ ID NO: 2760173 - RNA, 19 nt, Artificial Sequence
  Description of Artificial Sequence: Synthetic oligonucleotide
aguucaggaucucucacac

SEQ ID NO: 2760174 - RNA, 19 nt, Artificial Sequence
  Description of Artificial Sequence: Synthetic oligonucleotide
aggugaaugagugauacuc

SEQ ID NO: 2760175 - RNA, 19 nt, Artificial Sequence
  Description of Artificial Sequence: Synthetic oligonucleotide
augacaaugcuguugcuag

SEQ ID NO: 2760176 - RNA, 19 nt, Artificial Sequence
  Description of Artificial Sequence: Synthetic oligonucleotide
  modified_base (2)..(2): a, c, u, g, unknown or other
anagacacagucagcaguc

SEQ ID NO: 2760177 - RNA, 19 nt, Artificial Sequence
  Description of Artificial Sequence: Synthetic oligonucleotide
aaugagugauacucaccac

SEQ ID NO: 2760178 - RNA, 19 nt, Artificial Sequence
  Description of Artificial Sequence: Synthetic oligonucleotide
ugcuaggauaauuccaagg

SEQ ID NO: 2760179 - RNA, 19 nt, Artificial Sequence
  Description of Artificial Sequence: Synthetic oligonucleotide
gaggcaagcacccagcgcc

SEQ ID NO: 2760180 - RNA, 19 nt, Artificial Sequence
  Description of Artificial Sequence: Synthetic oligonucleotide
uaggauaauuccaaggauc

SEQ ID NO: 2760181 - RNA, 19 nt, Artificial Sequence
  Description of Artificial Sequence: Synthetic oligonucleotide
gauguaggaguuucuaggc

SEQ ID NO: 2760182 - RNA, 19 nt, Artificial Sequence
  Description of Artificial Sequence: Synthetic oligonucleotide
gauacucaccacuguaggg

SEQ ID NO: 2760183 - RNA, 19 nt, Artificial Sequence
  Description of Artificial Sequence: Synthetic oligonucleotide
aggaucacaagcaaagugg

SEQ ID NO: 2760184 - RNA, 19 nt, Artificial Sequence
  Description of Artificial Sequence: Synthetic oligonucleotide
auacucucggcacuagccc

SEQ ID NO: 2760185 - RNA, 19 nt, Artificial Sequence
  Description of Artificial Sequence: Synthetic oligonucleotide
agcacagcuacaucaaauc

SEQ ID NO: 2760186 - RNA, 19 nt, Artificial Sequence
  Description of Artificial Sequence: Synthetic oligonucleotide
ugcaguagcucucagcaca

SEQ ID NO: 2760187 - RNA, 19 nt, Artificial Sequence
  Description of Artificial Sequence: Synthetic oligonucleotide
acacuugguguucugaauc

SEQ ID NO: 2760188 - RNA, 19 nt, Artificial Sequence
  Description of Artificial Sequence: Synthetic oligonucleotide
gagguugugacagagugag

SEQ ID NO: 2760189 - RNA, 19 nt, Artificial Sequence
  Description of Artificial Sequence: Synthetic oligonucleotide
ugagugauacucaccacug

SEQ ID NO: 2760190 - RNA, 19 nt, Artificial Sequence
  Description of Artificial Sequence: Synthetic oligonucleotide
uguugcuaggauaauucca

SEQ ID NO: 2760191 - RNA, 19 nt, Artificial Sequence
  Description of Artificial Sequence: Synthetic oligonucleotide
uucaggaucucucacacuu

SEQ ID NO: 2760192 - RNA, 19 nt, Artificial Sequence
  Description of Artificial Sequence: Synthetic oligonucleotide
aagcaaaguggcuacacaa

SEQ ID NO: 2760193 - RNA, 19 nt, Artificial Sequence
  Description of Artificial Sequence: Synthetic oligonucleotide
guuucuaaauaguucagga

SEQ ID NO: 2760194 - RNA, 19 nt, Artificial Sequence
  Description of Artificial Sequence: Synthetic oligonucleotide
  modified_base (9)..(9): a, c, u, g, unknown or other
agcacccanagacacaguc

SEQ ID NO: 2760195 - RNA, 19 nt, Artificial Sequence
  Description of Artificial Sequence: Synthetic oligonucleotide
accuuugccacccucgagg

SEQ ID NO: 2760196 - RNA, 19 nt, Artificial Sequence
  Description of Artificial Sequence: Synthetic oligonucleotide
aguggcuacacaaaugagg

SEQ ID NO: 2760197 - RNA, 19 nt, Artificial Sequence
  Description of Artificial Sequence: Synthetic oligonucleotide
uugguguucugaaucagca

SEQ ID NO: 2760198 - RNA, 19 nt, Artificial Sequence
  Description of Artificial Sequence: Synthetic oligonucleotide
gauaauuccaaggaucaca

SEQ ID NO: 2760199 - RNA, 19 nt, Artificial Sequence
  Description of Artificial Sequence: Synthetic oligonucleotide
acagucagcagucagugga

SEQ ID NO: 2760200 - RNA, 19 nt, Artificial Sequence
  Description of Artificial Sequence: Synthetic oligonucleotide
auaguucaggaucucucac

SEQ ID NO: 2760201 - RNA, 19 nt, Artificial Sequence
  Description of Artificial Sequence: Synthetic oligonucleotide
accaaugagguugugacag

SEQ ID NO: 2760202 - RNA, 19 nt, Artificial Sequence
  Description of Artificial Sequence: Synthetic oligonucleotide
aaugcuguugcuaggauaa

SEQ ID NO: 2760203 - RNA, 19 nt, Artificial Sequence
  Description of Artificial Sequence: Synthetic oligonucleotide
ggauguaggaguuucuagg

SEQ ID NO: 2760204 - RNA, 19 nt, Artificial Sequence
  Description of Artificial Sequence: Synthetic oligonucleotide
gugguuucuaaauaguuca

SEQ ID NO: 2760205 - RNA, 19 nt, Artificial Sequence
  Description of Artificial Sequence: Synthetic oligonucleotide
cauacucucggcacuagcc

SEQ ID NO: 2760206 - RNA, 19 nt, Artificial Sequence
  Description of Artificial Sequence: Synthetic oligonucleotide
aggacaaagagcucuugag

SEQ ID NO: 2760207 - RNA, 19 nt, Artificial Sequence
  Description of Artificial Sequence: Synthetic oligonucleotide
auacucaccacuguagggg

SEQ ID NO: 2760208 - RNA, 19 nt, Artificial Sequence
  Description of Artificial Sequence: Synthetic oligonucleotide
  modified_base (7)..(7): a, c, u, g, unknown or other
cacccanagacacagucag

SEQ ID NO: 2760209 - RNA, 19 nt, Artificial Sequence
  Description of Artificial Sequence: Synthetic oligonucleotide
ucugagauuacaaguggaa

SEQ ID NO: 2760210 - RNA, 19 nt, Artificial Sequence
  Description of Artificial Sequence: Synthetic oligonucleotide
uggggugucaggcugggag

SEQ ID NO: 2760211 - RNA, 19 nt, Artificial Sequence
  Description of Artificial Sequence: Synthetic oligonucleotide
  modified_base (11)..(11): a, c, u, g, unknown or other
ugagcacccanagacacag

SEQ ID NO: 2760212 - RNA, 19 nt, Artificial Sequence
  Description of Artificial Sequence: Synthetic oligonucleotide
uagcucucagcacaugggg

SEQ ID NO: 2760213 - RNA, 19 nt, Artificial Sequence
  Description of Artificial Sequence: Synthetic oligonucleotide
acaggcuagcucuagacca

SEQ ID NO: 2760214 - RNA, 19 nt, Artificial Sequence
  Description of Artificial Sequence: Synthetic oligonucleotide
augagugauacucaccacu

SEQ ID NO: 2760215 - RNA, 19 nt, Artificial Sequence
  Description of Artificial Sequence: Synthetic oligonucleotide
ucugaggacaaagagcucu

SEQ ID NO: 2760216 - RNA, 19 nt, Artificial Sequence
  Description of Artificial Sequence: Synthetic oligonucleotide
ugaaugagugauacucacc

SEQ ID NO: 2760217 - RNA, 19 nt, Artificial Sequence
  Description of Artificial Sequence: Synthetic oligonucleotide
agcacauggggugucaggc

SEQ ID NO: 2760218 - RNA, 19 nt, Artificial Sequence
  Description of Artificial Sequence: Synthetic oligonucleotide
ugugguugcuaugacaaug

SEQ ID NO: 2760219 - RNA, 19 nt, Artificial Sequence
  Description of Artificial Sequence: Synthetic oligonucleotide
uuucuaaauaguucaggau

SEQ ID NO: 2760220 - RNA, 19 nt, Artificial Sequence
  Description of Artificial Sequence: Synthetic oligonucleotide
auuacaaguggaaggacag

SEQ ID NO: 2760221 - RNA, 19 nt, Artificial Sequence
  Description of Artificial Sequence: Synthetic oligonucleotide
ugugacagagugagcaccc

SEQ ID NO: 2760222 - RNA, 19 nt, Artificial Sequence
  Description of Artificial Sequence: Synthetic oligonucleotide
uguggucggauucucugag

SEQ ID NO: 2760223 - RNA, 19 nt, Artificial Sequence
  Description of Artificial Sequence: Synthetic oligonucleotide
  modified_base (13)..(13): a, c, u, g, unknown or other
agugagcacccanagacac

SEQ ID NO: 2760224 - RNA, 19 nt, Artificial Sequence
  Description of Artificial Sequence: Synthetic oligonucleotide
gaagugggagcuuccaggc

SEQ ID NO: 2760225 - RNA, 19 nt, Artificial Sequence
  Description of Artificial Sequence: Synthetic oligonucleotide
ggcuacacaaaugaggacg

SEQ ID NO: 2760226 - RNA, 19 nt, Artificial Sequence
  Description of Artificial Sequence: Synthetic oligonucleotide
uacaaguggaaggacagga

SEQ ID NO: 2760227 - RNA, 19 nt, Artificial Sequence
  Description of Artificial Sequence: Synthetic oligonucleotide
uguccugcacauacucucg

SEQ ID NO: 2760228 - RNA, 19 nt, Artificial Sequence
  Description of Artificial Sequence: Synthetic oligonucleotide
gcuaugacaaugcuguugc

SEQ ID NO: 2760229 - RNA, 19 nt, Artificial Sequence
  Description of Artificial Sequence: Synthetic oligonucleotide
  modified_base (17)..(17): a, c, u, g, unknown or other
acagagugagcacccanag

SEQ ID NO: 2760230 - RNA, 19 nt, Artificial Sequence
  Description of Artificial Sequence: Synthetic oligonucleotide
guugcuaugacaaugcugu

SEQ ID NO: 2760231 - RNA, 19 nt, Artificial Sequence
  Description of Artificial Sequence: Synthetic oligonucleotide
uacaggcuagcucuagacc

SEQ ID NO: 2760232 - RNA, 19 nt, Artificial Sequence
  Description of Artificial Sequence: Synthetic oligonucleotide
ugguuucuaaauaguucag

SEQ ID NO: 2760233 - RNA, 19 nt, Artificial Sequence
  Description of Artificial Sequence: Synthetic oligonucleotide
acauacucucggcacuagc

SEQ ID NO: 2760234 - RNA, 19 nt, Artificial Sequence
  Description of Artificial Sequence: Synthetic oligonucleotide
uagcucuagaccaggacac

SEQ ID NO: 2760235 - RNA, 19 nt, Artificial Sequence
  Description of Artificial Sequence: Synthetic oligonucleotide
gacaaagagcucuugaggu

SEQ ID NO: 2760236 - RNA, 19 nt, Artificial Sequence
  Description of Artificial Sequence: Synthetic oligonucleotide
aggauguaggaguuucuag

SEQ ID NO: 2760237 - RNA, 19 nt, Artificial Sequence
  Description of Artificial Sequence: Synthetic oligonucleotide
gauuacaaguggaaggaca

SEQ ID NO: 2760238 - RNA, 19 nt, Artificial Sequence
  Description of Artificial Sequence: Synthetic oligonucleotide
augaggacgaacaucaccu

SEQ ID NO: 2760239 - RNA, 19 nt, Artificial Sequence
  Description of Artificial Sequence: Synthetic oligonucleotide
uggucggauucucugagga

SEQ ID NO: 2760240 - RNA, 19 nt, Artificial Sequence
  Description of Artificial Sequence: Synthetic oligonucleotide
uuucuaggcaggagugucc

SEQ ID NO: 2760241 - RNA, 19 nt, Artificial Sequence
  Description of Artificial Sequence: Synthetic oligonucleotide
agaggcaagcacccagcgc

SEQ ID NO: 2760242 - RNA, 19 nt, Artificial Sequence
  Description of Artificial Sequence: Synthetic oligonucleotide
caaaguggcuacacaaaug

SEQ ID NO: 2760243 - RNA, 19 nt, Artificial Sequence
  Description of Artificial Sequence: Synthetic oligonucleotide
acaagcaaaguggcuacac

SEQ ID NO: 2760244 - RNA, 19 nt, Artificial Sequence
  Description of Artificial Sequence: Synthetic oligonucleotide
ugaaucagcacagcuacau

SEQ ID NO: 2760245 - RNA, 19 nt, Artificial Sequence
  Description of Artificial Sequence: Synthetic oligonucleotide
ugcuaugacaaugcuguug

SEQ ID NO: 2760246 - RNA, 19 nt, Artificial Sequence
  Description of Artificial Sequence: Synthetic oligonucleotide
acacagcccagccuccugc

SEQ ID NO: 2760247 - RNA, 19 nt, Artificial Sequence
  Description of Artificial Sequence: Synthetic oligonucleotide
ccaaggaucacaagcaaag

SEQ ID NO: 2760248 - RNA, 19 nt, Artificial Sequence
  Description of Artificial Sequence: Synthetic oligonucleotide
aguggaguccacuaggcuu

SEQ ID NO: 2760249 - RNA, 19 nt, Artificial Sequence
  Description of Artificial Sequence: Synthetic oligonucleotide
ggagcuuccaggcaggaug

SEQ ID NO: 2760250 - RNA, 19 nt, Artificial Sequence
  Description of Artificial Sequence: Synthetic oligonucleotide
aggauaauuccaaggauca

SEQ ID NO: 2760251 - RNA, 19 nt, Artificial Sequence
  Description of Artificial Sequence: Synthetic oligonucleotide
auuccaaggaucacaagca

SEQ ID NO: 2760252 - RNA, 19 nt, Artificial Sequence
  Description of Artificial Sequence: Synthetic oligonucleotide
gugaaugagugauacucac

SEQ ID NO: 2760253 - RNA, 19 nt, Artificial Sequence
  Description of Artificial Sequence: Synthetic oligonucleotide
uacacaaaugaggacgaac

SEQ ID NO: 2760254 - RNA, 19 nt, Artificial Sequence
  Description of Artificial Sequence: Synthetic oligonucleotide
aaauccaaccaaugagguu

SEQ ID NO: 2760255 - RNA, 19 nt, Artificial Sequence
  Description of Artificial Sequence: Synthetic oligonucleotide
aaccaaugagguugugaca

SEQ ID NO: 2760256 - RNA, 19 nt, Artificial Sequence
  Description of Artificial Sequence: Synthetic oligonucleotide
agugauacucaccacugua

SEQ ID NO: 2760257 - RNA, 19 nt, Artificial Sequence
  Description of Artificial Sequence: Synthetic oligonucleotide
cuagcucuagaccaggaca

SEQ ID NO: 2760258 - RNA, 19 nt, Artificial Sequence
  Description of Artificial Sequence: Synthetic oligonucleotide
ggucugagauuacaagugg

SEQ ID NO: 2760259 - RNA, 19 nt, Artificial Sequence
  Description of Artificial Sequence: Synthetic oligonucleotide
cuacaggcuagcucuagac

SEQ ID NO: 2760260 - RNA, 19 nt, Artificial Sequence
  Description of Artificial Sequence: Synthetic oligonucleotide
cacagcuacaucaaaucca

SEQ ID NO: 2760261 - RNA, 19 nt, Artificial Sequence
  Description of Artificial Sequence: Synthetic oligonucleotide
gguuucuaaauaguucagg

SEQ ID NO: 2760262 - RNA, 19 nt, Artificial Sequence
  Description of Artificial Sequence: Synthetic oligonucleotide
uuacaaguggaaggacagg

SEQ ID NO: 2760263 - RNA, 19 nt, Artificial Sequence
  Description of Artificial Sequence: Synthetic oligonucleotide
agauuacaaguggaaggac

SEQ ID NO: 2760264 - RNA, 19 nt, Artificial Sequence
  Description of Artificial Sequence: Synthetic oligonucleotide
gagaggcaagcacccagcg

SEQ ID NO: 2760265 - RNA, 19 nt, Artificial Sequence
  Description of Artificial Sequence: Synthetic oligonucleotide
gcuacaucaaauccaacca

SEQ ID NO: 2760266 - RNA, 19 nt, Artificial Sequence
  Description of Artificial Sequence: Synthetic oligonucleotide
uaugacaaugcuguugcua

SEQ ID NO: 2760267 - RNA, 19 nt, Artificial Sequence
  Description of Artificial Sequence: Synthetic oligonucleotide
guggcuacacaaaugagga

SEQ ID NO: 2760268 - RNA, 19 nt, Artificial Sequence
  Description of Artificial Sequence: Synthetic oligonucleotide
gugauacucaccacuguag

SEQ ID NO: 2760269 - RNA, 19 nt, Artificial Sequence
  Description of Artificial Sequence: Synthetic oligonucleotide
ggaucucucacacuuggug

SEQ ID NO: 2760270 - RNA, 19 nt, Artificial Sequence
  Description of Artificial Sequence: Synthetic oligonucleotide
aucacaagcaaaguggcua

SEQ ID NO: 2760271 - RNA, 19 nt, Artificial Sequence
  Description of Artificial Sequence: Synthetic oligonucleotide
agacacagucagcagucag

SEQ ID NO: 2760272 - RNA, 19 nt, Artificial Sequence
  Description of Artificial Sequence: Synthetic oligonucleotide
uacucucggcacuagcccc

SEQ ID NO: 2760273 - RNA, 19 nt, Artificial Sequence
  Description of Artificial Sequence: Synthetic oligonucleotide
auaauuccaaggaucacaa

SEQ ID NO: 2760274 - RNA, 19 nt, Artificial Sequence
  Description of Artificial Sequence: Synthetic oligonucleotide
aaaugaggacgaacaucac

SEQ ID NO: 2760275 - RNA, 19 nt, Artificial Sequence
  Description of Artificial Sequence: Synthetic oligonucleotide
ucgagggagaggcaagcac

SEQ ID NO: 2760276 - RNA, 19 nt, Artificial Sequence
  Description of Artificial Sequence: Synthetic oligonucleotide
guagcucucagcacauggg

SEQ ID NO: 2760277 - RNA, 19 nt, Artificial Sequence
  Description of Artificial Sequence: Synthetic oligonucleotide
uaauuccaaggaucacaag

SEQ ID NO: 2760278 - RNA, 19 nt, Artificial Sequence
  Description of Artificial Sequence: Synthetic oligonucleotide
gacucuguugcaggugugg

SEQ ID NO: 2760279 - RNA, 19 nt, Artificial Sequence
  Description of Artificial Sequence: Synthetic oligonucleotide
gaguuucuaggcaggagug

SEQ ID NO: 2760280 - RNA, 19 nt, Artificial Sequence
  Description of Artificial Sequence: Synthetic oligonucleotide
acaaguggaaggacaggac

SEQ ID NO: 2760281 - RNA, 19 nt, Artificial Sequence
  Description of Artificial Sequence: Synthetic oligonucleotide
aucaccuuugccacccucg

SEQ ID NO: 2760282 - RNA, 19 nt, Artificial Sequence
  Description of Artificial Sequence: Synthetic oligonucleotide
auguaggaguuucuaggca

SEQ ID NO: 2760283 - RNA, 19 nt, Artificial Sequence
  Description of Artificial Sequence: Synthetic oligonucleotide
acaucaaauccaaccaaug

SEQ ID NO: 2760284 - RNA, 19 nt, Artificial Sequence
  Description of Artificial Sequence: Synthetic oligonucleotide
gguugugacagagugagca

SEQ ID NO: 2760285 - RNA, 19 nt, Artificial Sequence
  Description of Artificial Sequence: Synthetic oligonucleotide
guugcuaggauaauuccaa

SEQ ID NO: 2760286 - RNA, 19 nt, Artificial Sequence
  Description of Artificial Sequence: Synthetic oligonucleotide
uuccaaggaucacaagcaa

SEQ ID NO: 2760287 - RNA, 19 nt, Artificial Sequence
  Description of Artificial Sequence: Synthetic oligonucleotide
uucuaggcaggaguguccc

SEQ ID NO: 2760288 - RNA, 19 nt, Artificial Sequence
  Description of Artificial Sequence: Synthetic oligonucleotide
caaugagguugugacagag

SEQ ID NO: 2760289 - RNA, 19 nt, Artificial Sequence
  Description of Artificial Sequence: Synthetic oligonucleotide
uccacuaggcuuugguguc

SEQ ID NO: 2760290 - RNA, 19 nt, Artificial Sequence
  Description of Artificial Sequence: Synthetic oligonucleotide
ugguguccugcacauacuc

SEQ ID NO: 2760291 - RNA, 19 nt, Artificial Sequence
  Description of Artificial Sequence: Synthetic oligonucleotide
guaggaguuucuaggcagg

SEQ ID NO: 2760292 - RNA, 19 nt, Artificial Sequence
  Description of Artificial Sequence: Synthetic oligonucleotide
gaucucucacacuuggugu

SEQ ID NO: 2760293 - RNA, 19 nt, Artificial Sequence
  Description of Artificial Sequence: Synthetic oligonucleotide
ugcagguguggucggauuc

SEQ ID NO: 2760294 - RNA, 19 nt, Artificial Sequence
  Description of Artificial Sequence: Synthetic oligonucleotide
agcacccagcgccaucuac

SEQ ID NO: 2760295 - RNA, 19 nt, Artificial Sequence
  Description of Artificial Sequence: Synthetic oligonucleotide
aggaagugggagcuuccag

SEQ ID NO: 2760296 - RNA, 19 nt, Artificial Sequence
  Description of Artificial Sequence: Synthetic oligonucleotide
gugguugcuaugacaaugc

SEQ ID NO: 2760297 - RNA, 19 nt, Artificial Sequence
  Description of Artificial Sequence: Synthetic oligonucleotide
cuaggcuuugguguccugc

SEQ ID NO: 2760298 - RNA, 19 nt, Artificial Sequence
  Description of Artificial Sequence: Synthetic oligonucleotide
aggacgaacaucaccuuug

SEQ ID NO: 2760299 - RNA, 19 nt, Artificial Sequence
  Description of Artificial Sequence: Synthetic oligonucleotide
caggacacugacucuguug

SEQ ID NO: 2760300 - RNA, 19 nt, Artificial Sequence
  Description of Artificial Sequence: Synthetic oligonucleotide
  modified_base (19)..(19): a, c, u, g, unknown or other
ugacagagugagcacccan

SEQ ID NO: 2760301 - RNA, 19 nt, Artificial Sequence
  Description of Artificial Sequence: Synthetic oligonucleotide
ugaggaggugaaugaguga

SEQ ID NO: 2760302 - RNA, 19 nt, Artificial Sequence
  Description of Artificial Sequence: Synthetic oligonucleotide
aaguggcuacacaaaugag

SEQ ID NO: 2760303 - RNA, 19 nt, Artificial Sequence
  Description of Artificial Sequence: Synthetic oligonucleotide
aggaguguccccacuacag

SEQ ID NO: 2760304 - RNA, 19 nt, Artificial Sequence
  Description of Artificial Sequence: Synthetic oligonucleotide
uguucugaaucagcacagc

SEQ ID NO: 2760305 - RNA, 19 nt, Artificial Sequence
  Description of Artificial Sequence: Synthetic oligonucleotide
acagcuacaucaaauccaa

SEQ ID NO: 2760306 - RNA, 19 nt, Artificial Sequence
  Description of Artificial Sequence: Synthetic oligonucleotide
acuacaggcuagcucuaga

SEQ ID NO: 2760307 - RNA, 19 nt, Artificial Sequence
  Description of Artificial Sequence: Synthetic oligonucleotide
aagagcucuugaggugugg

SEQ ID NO: 2760308 - RNA, 19 nt, Artificial Sequence
  Description of Artificial Sequence: Synthetic oligonucleotide
ucggauucucugaggacaa

SEQ ID NO: 2760309 - RNA, 19 nt, Artificial Sequence
  Description of Artificial Sequence: Synthetic oligonucleotide
gaaucagcacagcuacauc

SEQ ID NO: 2760310 - RNA, 19 nt, Artificial Sequence
  Description of Artificial Sequence: Synthetic oligonucleotide
gucggauucucugaggaca

SEQ ID NO: 2760311 - RNA, 19 nt, Artificial Sequence
  Description of Artificial Sequence: Synthetic oligonucleotide
gaacaucaccuuugccacc

SEQ ID NO: 2760312 - RNA, 19 nt, Artificial Sequence
  Description of Artificial Sequence: Synthetic oligonucleotide
ucagcacagcuacaucaaa

SEQ ID NO: 2760313 - RNA, 19 nt, Artificial Sequence
  Description of Artificial Sequence: Synthetic oligonucleotide
cacauggggugucaggcug

SEQ ID NO: 2760314 - RNA, 19 nt, Artificial Sequence
  Description of Artificial Sequence: Synthetic oligonucleotide
uccugcacauacucucggc

SEQ ID NO: 2760315 - RNA, 19 nt, Artificial Sequence
  Description of Artificial Sequence: Synthetic oligonucleotide
gcacagcuacaucaaaucc

SEQ ID NO: 2760316 - RNA, 19 nt, Artificial Sequence
  Description of Artificial Sequence: Synthetic oligonucleotide
aggugugguugcuaugaca

SEQ ID NO: 2760317 - RNA, 19 nt, Artificial Sequence
  Description of Artificial Sequence: Synthetic oligonucleotide
ugguugcuaugacaaugcu

SEQ ID NO: 2760318 - RNA, 19 nt, Artificial Sequence
  Description of Artificial Sequence: Synthetic oligonucleotide
gguguggucggauucucug

SEQ ID NO: 2760319 - RNA, 19 nt, Artificial Sequence
  Description of Artificial Sequence: Synthetic oligonucleotide
ggaguguccccacuacagg

SEQ ID NO: 2760320 - RNA, 19 nt, Artificial Sequence
  Description of Artificial Sequence: Synthetic oligonucleotide
guuucuaggcaggaguguc

SEQ ID NO: 2760321 - RNA, 19 nt, Artificial Sequence
  Description of Artificial Sequence: Synthetic oligonucleotide
gagggagaggcaagcaccc

SEQ ID NO: 2760322 - RNA, 19 nt, Artificial Sequence
  Description of Artificial Sequence: Synthetic oligonucleotide
aagugggagcuuccaggca

SEQ ID NO: 2760323 - RNA, 19 nt, Artificial Sequence
  Description of Artificial Sequence: Synthetic oligonucleotide
ggaggugaaugagugauac

SEQ ID NO: 2760324 - RNA, 19 nt, Artificial Sequence
  Description of Artificial Sequence: Synthetic oligonucleotide
ggaucacaagcaaaguggc

SEQ ID NO: 2760325 - RNA, 19 nt, Artificial Sequence
  Description of Artificial Sequence: Synthetic oligonucleotide
ggugguuucuaaauaguuc

SEQ ID NO: 2760326 - RNA, 19 nt, Artificial Sequence
  Description of Artificial Sequence: Synthetic oligonucleotide
caggacacacagcccagcc

SEQ ID NO: 2760327 - RNA, 19 nt, Artificial Sequence
  Description of Artificial Sequence: Synthetic oligonucleotide
  modified_base (14)..(14): a, c, u, g, unknown or other
gagugagcacccanagaca

SEQ ID NO: 2760328 - RNA, 19 nt, Artificial Sequence
  Description of Artificial Sequence: Synthetic oligonucleotide
  modified_base (3)..(3): a, c, u, g, unknown or other
canagacacagucagcagu

SEQ ID NO: 2760329 - RNA, 19 nt, Artificial Sequence
  Description of Artificial Sequence: Synthetic oligonucleotide
aggcuuugguguccugcac

SEQ ID NO: 2760330 - RNA, 19 nt, Artificial Sequence
  Description of Artificial Sequence: Synthetic oligonucleotide
aucucucacacuugguguu

SEQ ID NO: 2760331 - RNA, 19 nt, Artificial Sequence
  Description of Artificial Sequence: Synthetic oligonucleotide
cagucagcagucaguggag

SEQ ID NO: 2760332 - RNA, 19 nt, Artificial Sequence
  Description of Artificial Sequence: Synthetic oligonucleotide
cuacaucaaauccaaccaa

SEQ ID NO: 2760333 - RNA, 19 nt, Artificial Sequence
  Description of Artificial Sequence: Synthetic oligonucleotide
uguccccacuacaggcuag

SEQ ID NO: 2760334 - RNA, 19 nt, Artificial Sequence
  Description of Artificial Sequence: Synthetic oligonucleotide
accacuguagggguuggug

SEQ ID NO: 2760335 - RNA, 19 nt, Artificial Sequence
  Description of Artificial Sequence: Synthetic oligonucleotide
gggucugagauuacaagug

SEQ ID NO: 2760336 - RNA, 19 nt, Artificial Sequence
  Description of Artificial Sequence: Synthetic oligonucleotide
agcgccaucuacgcaauca

SEQ ID NO: 2760337 - RNA, 19 nt, Artificial Sequence
  Description of Artificial Sequence: Synthetic oligonucleotide
caaauccaaccaaugaggu

SEQ ID NO: 2760338 - RNA, 19 nt, Artificial Sequence
  Description of Artificial Sequence: Synthetic oligonucleotide
uugaggugugguugcuaug

SEQ ID NO: 2760339 - RNA, 19 nt, Artificial Sequence
  Description of Artificial Sequence: Synthetic oligonucleotide
ggugugaggaggugaauga

SEQ ID NO: 2760340 - RNA, 19 nt, Artificial Sequence
  Description of Artificial Sequence: Synthetic oligonucleotide
guggucggauucucugagg

SEQ ID NO: 2760341 - RNA, 19 nt, Artificial Sequence
  Description of Artificial Sequence: Synthetic oligonucleotide
ggugugguugcuaugacaa

SEQ ID NO: 2760342 - RNA, 19 nt, Artificial Sequence
  Description of Artificial Sequence: Synthetic oligonucleotide
cuaaauaguucaggaucuc

SEQ ID NO: 2760343 - RNA, 19 nt, Artificial Sequence
  Description of Artificial Sequence: Synthetic oligonucleotide
ugaggacaaagagcucuug

SEQ ID NO: 2760344 - RNA, 19 nt, Artificial Sequence
  Description of Artificial Sequence: Synthetic oligonucleotide
ugacucuguugcaggugug

SEQ ID NO: 2760345 - RNA, 19 nt, Artificial Sequence
  Description of Artificial Sequence: Synthetic oligonucleotide
cagcacauggggugucagg

SEQ ID NO: 2760346 - RNA, 19 nt, Artificial Sequence
  Description of Artificial Sequence: Synthetic oligonucleotide
caagcaaaguggcuacaca

SEQ ID NO: 2760347 - RNA, 19 nt, Artificial Sequence
  Description of Artificial Sequence: Synthetic oligonucleotide
  modified_base (6)..(6): a, c, u, g, unknown or other
acccanagacacagucagc

SEQ ID NO: 2760348 - RNA, 19 nt, Artificial Sequence
  Description of Artificial Sequence: Synthetic oligonucleotide
ccugcaguagcucucagca

SEQ ID NO: 2760349 - RNA, 19 nt, Artificial Sequence
  Description of Artificial Sequence: Synthetic oligonucleotide
  modified_base (18)..(18): a, c, u, g, unknown or other
gacagagugagcacccana

SEQ ID NO: 2760350 - RNA, 19 nt, Artificial Sequence
  Description of Artificial Sequence: Synthetic oligonucleotide
ucagcacauggggugucag

SEQ ID NO: 2760351 - RNA, 19 nt, Artificial Sequence
  Description of Artificial Sequence: Synthetic oligonucleotide
gugugaggaggugaaugag

SEQ ID NO: 2760352 - RNA, 19 nt, Artificial Sequence
  Description of Artificial Sequence: Synthetic oligonucleotide
gaggaggugaaugagugau

SEQ ID NO: 2760353 - RNA, 19 nt, Artificial Sequence
  Description of Artificial Sequence: Synthetic oligonucleotide
acaaugcuguugcuaggau

SEQ ID NO: 2760354 - RNA, 19 nt, Artificial Sequence
  Description of Artificial Sequence: Synthetic oligonucleotide
uggcuacacaaaugaggac

SEQ ID NO: 2760355 - RNA, 19 nt, Artificial Sequence
  Description of Artificial Sequence: Synthetic oligonucleotide
ggaguuucuaggcaggagu

SEQ ID NO: 2760356 - RNA, 19 nt, Artificial Sequence
  Description of Artificial Sequence: Synthetic oligonucleotide
cucuagaccaggacacaca

SEQ ID NO: 2760357 - RNA, 19 nt, Artificial Sequence
  Description of Artificial Sequence: Synthetic oligonucleotide
ucuaggcaggagugucccc

SEQ ID NO: 2760358 - RNA, 19 nt, Artificial Sequence
  Description of Artificial Sequence: Synthetic oligonucleotide
gucugagauuacaagugga

SEQ ID NO: 2760359 - RNA, 19 nt, Artificial Sequence
  Description of Artificial Sequence: Synthetic oligonucleotide
ugcuguugcuaggauaauu

SEQ ID NO: 2760360 - RNA, 19 nt, Artificial Sequence
  Description of Artificial Sequence: Synthetic oligonucleotide
agcaaaguggcuacacaaa

SEQ ID NO: 2760361 - RNA, 19 nt, Artificial Sequence
  Description of Artificial Sequence: Synthetic oligonucleotide
guggaaggacaggacacug

SEQ ID NO: 2760362 - RNA, 19 nt, Artificial Sequence
  Description of Artificial Sequence: Synthetic oligonucleotide
  modified_base (16)..(16): a, c, u, g, unknown or other
cagagugagcacccanaga

SEQ ID NO: 2760363 - RNA, 19 nt, Artificial Sequence
  Description of Artificial Sequence: Synthetic oligonucleotide
  modified_base (4)..(4): a, c, u, g, unknown or other
ccanagacacagucagcag

SEQ ID NO: 2760364 - RNA, 19 nt, Artificial Sequence
  Description of Artificial Sequence: Synthetic oligonucleotide
caaugcuguugcuaggaua

SEQ ID NO: 2760365 - RNA, 19 nt, Artificial Sequence
  Description of Artificial Sequence: Synthetic oligonucleotide
ucaccacuguagggguugg

SEQ ID NO: 2760366 - RNA, 19 nt, Artificial Sequence
  Description of Artificial Sequence: Synthetic oligonucleotide
ccuuugccacccucgaggg

SEQ ID NO: 2760367 - RNA, 19 nt, Artificial Sequence
  Description of Artificial Sequence: Synthetic oligonucleotide
ggugaaugagugauacuca

SEQ ID NO: 2760368 - RNA, 19 nt, Artificial Sequence
  Description of Artificial Sequence: Synthetic oligonucleotide
cuaggcaggagugucccca

SEQ ID NO: 2760369 - RNA, 19 nt, Artificial Sequence
  Description of Artificial Sequence: Synthetic oligonucleotide
  modified_base (5)..(5): a, c, u, g, unknown or other
cccanagacacagucagca

SEQ ID NO: 2760370 - RNA, 19 nt, Artificial Sequence
  Description of Artificial Sequence: Synthetic oligonucleotide
ugaggacgaacaucaccuu

SEQ ID NO: 2760371 - RNA, 19 nt, Artificial Sequence
  Description of Artificial Sequence: Synthetic oligonucleotide
gaguccacuaggcuuuggu

SEQ ID NO: 2760372 - RNA, 19 nt, Artificial Sequence
  Description of Artificial Sequence: Synthetic oligonucleotide
uguagggguuggugguuuc

SEQ ID NO: 2760373 - RNA, 19 nt, Artificial Sequence
  Description of Artificial Sequence: Synthetic oligonucleotide
cugcaguagcucucagcac

SEQ ID NO: 2760374 - RNA, 19 nt, Artificial Sequence
  Description of Artificial Sequence: Synthetic oligonucleotide
ucucucacacuugguguuc

SEQ ID NO: 2760375 - RNA, 19 nt, Artificial Sequence
  Description of Artificial Sequence: Synthetic oligonucleotide
gcucuugaggugugguugc

SEQ ID NO: 2760376 - RNA, 19 nt, Artificial Sequence
  Description of Artificial Sequence: Synthetic oligonucleotide
agcuuucaggcaggaagug

SEQ ID NO: 2760377 - RNA, 19 nt, Artificial Sequence
  Description of Artificial Sequence: Synthetic oligonucleotide
guguggucggauucucuga

SEQ ID NO: 2760378 - RNA, 19 nt, Artificial Sequence
  Description of Artificial Sequence: Synthetic oligonucleotide
gacacagucagcagucagu

SEQ ID NO: 2760379 - RNA, 19 nt, Artificial Sequence
  Description of Artificial Sequence: Synthetic oligonucleotide
agggguuggugguuucuaa

SEQ ID NO: 2760380 - RNA, 19 nt, Artificial Sequence
  Description of Artificial Sequence: Synthetic oligonucleotide
aggcuagcucuagaccagg

SEQ ID NO: 2760381 - RNA, 19 nt, Artificial Sequence
  Description of Artificial Sequence: Synthetic oligonucleotide
gcuagcucuagaccaggac

SEQ ID NO: 2760382 - RNA, 19 nt, Artificial Sequence
  Description of Artificial Sequence: Synthetic oligonucleotide
gcacccagcgccaucuacg

SEQ ID NO: 2760383 - RNA, 19 nt, Artificial Sequence
  Description of Artificial Sequence: Synthetic oligonucleotide
ccacccucgagggagaggc

SEQ ID NO: 2760384 - RNA, 19 nt, Artificial Sequence
  Description of Artificial Sequence: Synthetic oligonucleotide
agguugugacagagugagc

SEQ ID NO: 2760385 - RNA, 19 nt, Artificial Sequence
  Description of Artificial Sequence: Synthetic oligonucleotide
cuugaggugugguugcuau

SEQ ID NO: 2760386 - RNA, 19 nt, Artificial Sequence
  Description of Artificial Sequence: Synthetic oligonucleotide
agcucucagcacauggggu

SEQ ID NO: 2760387 - RNA, 19 nt, Artificial Sequence
  Description of Artificial Sequence: Synthetic oligonucleotide
cauggggugucaggcuggg

SEQ ID NO: 2760388 - RNA, 19 nt, Artificial Sequence
  Description of Artificial Sequence: Synthetic oligonucleotide
gguuggugguuucuaaaua

SEQ ID NO: 2760389 - RNA, 19 nt, Artificial Sequence
  Description of Artificial Sequence: Synthetic oligonucleotide
ggcaggauguaggaguuuc

SEQ ID NO: 2760390 - RNA, 19 nt, Artificial Sequence
  Description of Artificial Sequence: Synthetic oligonucleotide
ggcuuugguguccugcaca

SEQ ID NO: 2760391 - RNA, 19 nt, Artificial Sequence
  Description of Artificial Sequence: Synthetic oligonucleotide
gcuacacaaaugaggacga

SEQ ID NO: 2760392 - RNA, 19 nt, Artificial Sequence
  Description of Artificial Sequence: Synthetic oligonucleotide
cugacucuguugcaggugu

SEQ ID NO: 2760393 - RNA, 19 nt, Artificial Sequence
  Description of Artificial Sequence: Synthetic oligonucleotide
agucagcagucaguggagu

SEQ ID NO: 2760394 - RNA, 19 nt, Artificial Sequence
  Description of Artificial Sequence: Synthetic oligonucleotide
gcuuccaggcaggauguag

SEQ ID NO: 2760395 - RNA, 19 nt, Artificial Sequence
  Description of Artificial Sequence: Synthetic oligonucleotide
gugggagcuuccaggcagg

SEQ ID NO: 2760396 - RNA, 19 nt, Artificial Sequence
  Description of Artificial Sequence: Synthetic oligonucleotide
caccuuugccacccucgag

SEQ ID NO: 2760397 - RNA, 19 nt, Artificial Sequence
  Description of Artificial Sequence: Synthetic oligonucleotide
gagugauacucaccacugu

SEQ ID NO: 2760398 - RNA, 19 nt, Artificial Sequence
  Description of Artificial Sequence: Synthetic oligonucleotide
cacuacaggcuagcucuag

SEQ ID NO: 2760399 - RNA, 19 nt, Artificial Sequence
  Description of Artificial Sequence: Synthetic oligonucleotide
ucuugaggugugguugcua

SEQ ID NO: 2760400 - RNA, 19 nt, Artificial Sequence
  Description of Artificial Sequence: Synthetic oligonucleotide
ggagaggcaagcacccagc

SEQ ID NO: 2760401 - RNA, 19 nt, Artificial Sequence
  Description of Artificial Sequence: Synthetic oligonucleotide
cucugaggacaaagagcuc

SEQ ID NO: 2760402 - RNA, 19 nt, Artificial Sequence
  Description of Artificial Sequence: Synthetic oligonucleotide
gaucacaagcaaaguggcu

SEQ ID NO: 2760403 - RNA, 19 nt, Artificial Sequence
  Description of Artificial Sequence: Synthetic oligonucleotide
cagcuacaucaaauccaac

SEQ ID NO: 2760404 - RNA, 19 nt, Artificial Sequence
  Description of Artificial Sequence: Synthetic oligonucleotide
acuaggcuuugguguccug

SEQ ID NO: 2760405 - RNA, 19 nt, Artificial Sequence
  Description of Artificial Sequence: Synthetic oligonucleotide
gaggacgaacaucaccuuu

SEQ ID NO: 2760406 - RNA, 19 nt, Artificial Sequence
  Description of Artificial Sequence: Synthetic oligonucleotide
cugaaucagcacagcuaca

SEQ ID NO: 2760407 - RNA, 19 nt, Artificial Sequence
  Description of Artificial Sequence: Synthetic oligonucleotide
uugccacccucgagggaga

SEQ ID NO: 2760408 - RNA, 19 nt, Artificial Sequence
  Description of Artificial Sequence: Synthetic oligonucleotide
ggucggauucucugaggac

SEQ ID NO: 2760409 - RNA, 19 nt, Artificial Sequence
  Description of Artificial Sequence: Synthetic oligonucleotide
cacauacucucggcacuag

SEQ ID NO: 2760410 - RNA, 19 nt, Artificial Sequence
  Description of Artificial Sequence: Synthetic oligonucleotide
caggaguguccccacuaca

SEQ ID NO: 2760411 - RNA, 19 nt, Artificial Sequence
  Description of Artificial Sequence: Synthetic oligonucleotide
uugcuaugacaaugcuguu

SEQ ID NO: 2760412 - RNA, 19 nt, Artificial Sequence
  Description of Artificial Sequence: Synthetic oligonucleotide
agcucuagaccaggacaca

SEQ ID NO: 2760413 - RNA, 19 nt, Artificial Sequence
  Description of Artificial Sequence: Synthetic oligonucleotide
auccaaccaaugagguugu

SEQ ID NO: 2760414 - RNA, 19 nt, Artificial Sequence
  Description of Artificial Sequence: Synthetic oligonucleotide
gcaggaguguccccacuac

SEQ ID NO: 2760415 - RNA, 19 nt, Artificial Sequence
  Description of Artificial Sequence: Synthetic oligonucleotide
guccccacuacaggcuagc

SEQ ID NO: 2760416 - RNA, 19 nt, Artificial Sequence
  Description of Artificial Sequence: Synthetic oligonucleotide
cacaaaugaggacgaacau

SEQ ID NO: 2760417 - RNA, 19 nt, Artificial Sequence
  Description of Artificial Sequence: Synthetic oligonucleotide
cagcacagcuacaucaaau

SEQ ID NO: 2760418 - RNA, 19 nt, Artificial Sequence
  Description of Artificial Sequence: Synthetic oligonucleotide
gcucuagaccaggacacac

SEQ ID NO: 2760419 - RNA, 19 nt, Artificial Sequence
  Description of Artificial Sequence: Synthetic oligonucleotide
  modified_base (12)..(12): a, c, u, g, unknown or other
gugagcacccanagacaca

SEQ ID NO: 2760420 - RNA, 19 nt, Artificial Sequence
  Description of Artificial Sequence: Synthetic oligonucleotide
uggaguccacuaggcuuug

SEQ ID NO: 2760421 - RNA, 19 nt, Artificial Sequence
  Description of Artificial Sequence: Synthetic oligonucleotide
aggaucucucacacuuggu

SEQ ID NO: 2760422 - RNA, 19 nt, Artificial Sequence
  Description of Artificial Sequence: Synthetic oligonucleotide
ucucagcacaugggguguc

SEQ ID NO: 2760423 - RNA, 19 nt, Artificial Sequence
  Description of Artificial Sequence: Synthetic oligonucleotide
caggauguaggaguuucua

SEQ ID NO: 2760424 - RNA, 19 nt, Artificial Sequence
  Description of Artificial Sequence: Synthetic oligonucleotide
uccaaccaaugagguugug

SEQ ID NO: 2760425 - RNA, 19 nt, Artificial Sequence
  Description of Artificial Sequence: Synthetic oligonucleotide
acccucgagggagaggcaa

SEQ ID NO: 2760426 - RNA, 19 nt, Artificial Sequence
  Description of Artificial Sequence: Synthetic oligonucleotide
  modified_base (8)..(8): a, c, u, g, unknown or other
gcacccanagacacaguca

SEQ ID NO: 2760427 - RNA, 19 nt, Artificial Sequence
  Description of Artificial Sequence: Synthetic oligonucleotide
acaucaccuuugccacccu

SEQ ID NO: 2760428 - RNA, 19 nt, Artificial Sequence
  Description of Artificial Sequence: Synthetic oligonucleotide
acuguagggguuggugguu

SEQ ID NO: 2760429 - RNA, 19 nt, Artificial Sequence
  Description of Artificial Sequence: Synthetic oligonucleotide
gagcuuccaggcaggaugu

SEQ ID NO: 2760430 - RNA, 19 nt, Artificial Sequence
  Description of Artificial Sequence: Synthetic oligonucleotide
gggguuggugguuucuaaa

SEQ ID NO: 2760431 - RNA, 19 nt, Artificial Sequence
  Description of Artificial Sequence: Synthetic oligonucleotide
acacacagcccagccuccu

SEQ ID NO: 2760432 - RNA, 19 nt, Artificial Sequence
  Description of Artificial Sequence: Synthetic oligonucleotide
cccagcgccaucuacgcaa

SEQ ID NO: 2760433 - RNA, 19 nt, Artificial Sequence
  Description of Artificial Sequence: Synthetic oligonucleotide
uccccacuacaggcuagcu

SEQ ID NO: 2760434 - RNA, 19 nt, Artificial Sequence
  Description of Artificial Sequence: Synthetic oligonucleotide
cuccugcaguagcucucag

SEQ ID NO: 2760435 - RNA, 19 nt, Artificial Sequence
  Description of Artificial Sequence: Synthetic oligonucleotide
cacacuugguguucugaau

SEQ ID NO: 2760436 - RNA, 19 nt, Artificial Sequence
  Description of Artificial Sequence: Synthetic oligonucleotide
caaggaucacaagcaaagu

SEQ ID NO: 2760437 - RNA, 19 nt, Artificial Sequence
  Description of Artificial Sequence: Synthetic oligonucleotide
ggguuggugguuucuaaau

SEQ ID NO: 2760438 - RNA, 19 nt, Artificial Sequence
  Description of Artificial Sequence: Synthetic oligonucleotide
guguccccacuacaggcua

SEQ ID NO: 2760439 - RNA, 19 nt, Artificial Sequence
  Description of Artificial Sequence: Synthetic oligonucleotide
acccagcgccaucuacgca

SEQ ID NO: 2760440 - RNA, 19 nt, Artificial Sequence
  Description of Artificial Sequence: Synthetic oligonucleotide
ccaaccaaugagguuguga

SEQ ID NO: 2760441 - RNA, 19 nt, Artificial Sequence
  Description of Artificial Sequence: Synthetic oligonucleotide
caagcacccagcgccaucu

SEQ ID NO: 2760442 - RNA, 19 nt, Artificial Sequence
  Description of Artificial Sequence: Synthetic oligonucleotide
guucaggaucucucacacu

SEQ ID NO: 2760443 - RNA, 19 nt, Artificial Sequence
  Description of Artificial Sequence: Synthetic oligonucleotide
cagguguggucggauucuc

SEQ ID NO: 2760444 - RNA, 19 nt, Artificial Sequence
  Description of Artificial Sequence: Synthetic oligonucleotide
agguguggucggauucucu

SEQ ID NO: 2760445 - RNA, 19 nt, Artificial Sequence
  Description of Artificial Sequence: Synthetic oligonucleotide
gggaggugugaggagguga

SEQ ID NO: 2760446 - RNA, 19 nt, Artificial Sequence
  Description of Artificial Sequence: Synthetic oligonucleotide
aagcacccagcgccaucua

SEQ ID NO: 2760447 - RNA, 19 nt, Artificial Sequence
  Description of Artificial Sequence: Synthetic oligonucleotide
cuuugccacccucgaggga

SEQ ID NO: 2760448 - RNA, 19 nt, Artificial Sequence
  Description of Artificial Sequence: Synthetic oligonucleotide
gagcucuugaggugugguu

SEQ ID NO: 2760449 - RNA, 19 nt, Artificial Sequence
  Description of Artificial Sequence: Synthetic oligonucleotide
gugacagagugagcaccca

SEQ ID NO: 2760450 - RNA, 19 nt, Artificial Sequence
  Description of Artificial Sequence: Synthetic oligonucleotide
gccaucuacgcaaucauuu

SEQ ID NO: 2760451 - RNA, 19 nt, Artificial Sequence
  Description of Artificial Sequence: Synthetic oligonucleotide
ggacacugacucuguugca

SEQ ID NO: 2760452 - RNA, 19 nt, Artificial Sequence
  Description of Artificial Sequence: Synthetic oligonucleotide
aggaggugaaugagugaua

SEQ ID NO: 2760453 - RNA, 19 nt, Artificial Sequence
  Description of Artificial Sequence: Synthetic oligonucleotide
cucgagggagaggcaagca

SEQ ID NO: 2760454 - RNA, 19 nt, Artificial Sequence
  Description of Artificial Sequence: Synthetic oligonucleotide
ggcaggaguguccccacua

SEQ ID NO: 2760455 - RNA, 19 nt, Artificial Sequence
  Description of Artificial Sequence: Synthetic oligonucleotide
caguagcucucagcacaug

SEQ ID NO: 2760456 - RNA, 19 nt, Artificial Sequence
  Description of Artificial Sequence: Synthetic oligonucleotide
cuaugacaaugcuguugcu

SEQ ID NO: 2760457 - RNA, 19 nt, Artificial Sequence
  Description of Artificial Sequence: Synthetic oligonucleotide
ccucgagggagaggcaagc

SEQ ID NO: 2760458 - RNA, 19 nt, Artificial Sequence
  Description of Artificial Sequence: Synthetic oligonucleotide
cccucgagggagaggcaag

SEQ ID NO: 2760459 - RNA, 19 nt, Artificial Sequence
  Description of Artificial Sequence: Synthetic oligonucleotide
ccccacuacaggcuagcuc

SEQ ID NO: 2760460 - RNA, 19 nt, Artificial Sequence
  Description of Artificial Sequence: Synthetic oligonucleotide
cuacacaaaugaggacgaa

SEQ ID NO: 2760461 - RNA, 19 nt, Artificial Sequence
  Description of Artificial Sequence: Synthetic oligonucleotide
gugucaggcugggaggugu

SEQ ID NO: 2760462 - RNA, 19 nt, Artificial Sequence
  Description of Artificial Sequence: Synthetic oligonucleotide
ggaguccacuaggcuuugg

SEQ ID NO: 2760463 - RNA, 19 nt, Artificial Sequence
  Description of Artificial Sequence: Synthetic oligonucleotide
aggcaagcacccagcgcca

SEQ ID NO: 2760464 - RNA, 19 nt, Artificial Sequence
  Description of Artificial Sequence: Synthetic oligonucleotide
augcuguugcuaggauaau

SEQ ID NO: 2760465 - RNA, 19 nt, Artificial Sequence
  Description of Artificial Sequence: Synthetic oligonucleotide
ccaggacacacagcccagc

SEQ ID NO: 2760466 - RNA, 19 nt, Artificial Sequence
  Description of Artificial Sequence: Synthetic oligonucleotide
ccaaugagguugugacaga

SEQ ID NO: 2760467 - RNA, 19 nt, Artificial Sequence
  Description of Artificial Sequence: Synthetic oligonucleotide
ccacuaggcuuuggugucc

SEQ ID NO: 2760468 - RNA, 19 nt, Artificial Sequence
  Description of Artificial Sequence: Synthetic oligonucleotide
gugugguugcuaugacaau

SEQ ID NO: 2760469 - RNA, 19 nt, Artificial Sequence
  Description of Artificial Sequence: Synthetic oligonucleotide
gcaagcacccagcgccauc

SEQ ID NO: 2760470 - RNA, 19 nt, Artificial Sequence
  Description of Artificial Sequence: Synthetic oligonucleotide
cucucagcacauggggugu

SEQ ID NO: 2760471 - RNA, 19 nt, Artificial Sequence
  Description of Artificial Sequence: Synthetic oligonucleotide
gguguccugcacauacucu

SEQ ID NO: 2760472 - RNA, 19 nt, Artificial Sequence
  Description of Artificial Sequence: Synthetic oligonucleotide
cucucacacuugguguucu

SEQ ID NO: 2760473 - RNA, 19 nt, Artificial Sequence
  Description of Artificial Sequence: Synthetic oligonucleotide
ccggggucugagauuacaa

SEQ ID NO: 2760474 - RNA, 19 nt, Artificial Sequence
  Description of Artificial Sequence: Synthetic oligonucleotide
aggcaggauguaggaguuu

SEQ ID NO: 2760475 - RNA, 19 nt, Artificial Sequence
  Description of Artificial Sequence: Synthetic oligonucleotide
gcacauacucucggcacua

SEQ ID NO: 2760476 - RNA, 19 nt, Artificial Sequence
  Description of Artificial Sequence: Synthetic oligonucleotide
cagcgccaucuacgcaauc

SEQ ID NO: 2760477 - RNA, 19 nt, Artificial Sequence
  Description of Artificial Sequence: Synthetic oligonucleotide
gcacauggggugucaggcu

SEQ ID NO: 2760478 - RNA, 19 nt, Artificial Sequence
  Description of Artificial Sequence: Synthetic oligonucleotide
  modified_base (10)..(10): a, c, u, g, unknown or other
gagcacccanagacacagu

SEQ ID NO: 2760479 - RNA, 19 nt, Artificial Sequence
  Description of Artificial Sequence: Synthetic oligonucleotide
cuuugguguccugcacaua

SEQ ID NO: 2760480 - RNA, 19 nt, Artificial Sequence
  Description of Artificial Sequence: Synthetic oligonucleotide
cacccucgagggagaggca

SEQ ID NO: 2760481 - RNA, 19 nt, Artificial Sequence
  Description of Artificial Sequence: Synthetic oligonucleotide
gaggugugaggaggugaau

SEQ ID NO: 2760482 - RNA, 19 nt, Artificial Sequence
  Description of Artificial Sequence: Synthetic oligonucleotide
gcagguguggucggauucu

SEQ ID NO: 2760483 - RNA, 19 nt, Artificial Sequence
  Description of Artificial Sequence: Synthetic oligonucleotide
gcgccaucuacgcaaucau

SEQ ID NO: 2760484 - RNA, 19 nt, Artificial Sequence
  Description of Artificial Sequence: Synthetic oligonucleotide
cacuaggcuuugguguccu

SEQ ID NO: 2760485 - RNA, 19 nt, Artificial Sequence
  Description of Artificial Sequence: Synthetic oligonucleotide
agcuuccaggcaggaugua

SEQ ID NO: 2760486 - RNA, 19 nt, Artificial Sequence
  Description of Artificial Sequence: Synthetic oligonucleotide
cucuugaggugugguugcu

SEQ ID NO: 2760487 - RNA, 19 nt, Artificial Sequence
  Description of Artificial Sequence: Synthetic oligonucleotide
gggugucaggcugggaggu

SEQ ID NO: 2760488 - RNA, 19 nt, Artificial Sequence
  Description of Artificial Sequence: Synthetic oligonucleotide
gcaggauguaggaguuucu

SEQ ID NO: 2760489 - RNA, 19 nt, Artificial Sequence
  Description of Artificial Sequence: Synthetic oligonucleotide
cuguagggguuggugguuu

SEQ ID NO: 2760490 - RNA, 19 nt, Artificial Sequence
  Description of Artificial Sequence: Synthetic oligonucleotide
gcaguagcucucagcacau

SEQ ID NO: 2760491 - RNA, 19 nt, Artificial Sequence
  Description of Artificial Sequence: Synthetic oligonucleotide
cccggggucugagauuaca

SEQ ID NO: 2760492 - RNA, 19 nt, Artificial Sequence
  Description of Artificial Sequence: Synthetic oligonucleotide
gcccagccuccugcaguag

SEQ ID NO: 2760493 - RNA, 19 nt, Artificial Sequence
  Description of Artificial Sequence: Synthetic oligonucleotide
ccacuacaggcuagcucua

SEQ ID NO: 2760494 - RNA, 19 nt, Artificial Sequence
  Description of Artificial Sequence: Synthetic oligonucleotide
caccacuguagggguuggu

SEQ ID NO: 2760495 - RNA, 19 nt, Artificial Sequence
  Description of Artificial Sequence: Synthetic oligonucleotide
ccagcgccaucuacgcaau

SEQ ID NO: 2760496 - RNA, 19 nt, Artificial Sequence
  Description of Artificial Sequence: Synthetic oligonucleotide
ccccggggucugagauuac

SEQ ID NO: 2760497 - RNA, 19 nt, Artificial Sequence
  Description of Artificial Sequence: Synthetic oligonucleotide
ggcaagcacccagcgccau

SEQ ID NO: 2760498 - RNA, 19 nt, Artificial Sequence
  Description of Artificial Sequence: Synthetic oligonucleotide
cgccaucuacgcaaucauu

SEQ ID NO: 2760499 - RNA, 19 nt, Artificial Sequence
  Description of Artificial Sequence: Synthetic oligonucleotide
  modified_base (1)..(1): a, c, u, g, unknown or other
nagacacagucagcaguca

SEQ ID NO: 2760500 - RNA, 19 nt, Artificial Sequence
  Description of Artificial Sequence: Synthetic oligonucleotide
ucugcuuggacacagacgc

SEQ ID NO: 2760501 - RNA, 19 nt, Artificial Sequence
  Description of Artificial Sequence: Synthetic oligonucleotide
acgcauacagaccagauac

SEQ ID NO: 2760502 - RNA, 19 nt, Artificial Sequence
  Description of Artificial Sequence: Synthetic oligonucleotide
uucaaaagagaacacgccc

SEQ ID NO: 2760503 - RNA, 19 nt, Artificial Sequence
  Description of Artificial Sequence: Synthetic oligonucleotide
uacuguuccaucuugugag

SEQ ID NO: 2760504 - RNA, 19 nt, Artificial Sequence
  Description of Artificial Sequence: Synthetic oligonucleotide
ucucauagagguaauuccc

SEQ ID NO: 2760505 - RNA, 19 nt, Artificial Sequence
  Description of Artificial Sequence: Synthetic oligonucleotide
aguucuggaacgccggucc

SEQ ID NO: 2760506 - RNA, 19 nt, Artificial Sequence
  Description of Artificial Sequence: Synthetic oligonucleotide
aauggcggcagccacagcu

SEQ ID NO: 2760507 - RNA, 19 nt, Artificial Sequence
  Description of Artificial Sequence: Synthetic oligonucleotide
gacacagacgcauacagac

SEQ ID NO: 2760508 - RNA, 19 nt, Artificial Sequence
  Description of Artificial Sequence: Synthetic oligonucleotide
aaguggcuagcucaaacuc

SEQ ID NO: 2760509 - RNA, 19 nt, Artificial Sequence
  Description of Artificial Sequence: Synthetic oligonucleotide
aaaugguacggccagcugu

SEQ ID NO: 2760510 - RNA, 19 nt, Artificial Sequence
  Description of Artificial Sequence: Synthetic oligonucleotide
uucucauagagguaauucc

SEQ ID NO: 2760511 - RNA, 19 nt, Artificial Sequence
  Description of Artificial Sequence: Synthetic oligonucleotide
aagagggcccucuugggac

SEQ ID NO: 2760512 - RNA, 19 nt, Artificial Sequence
  Description of Artificial Sequence: Synthetic oligonucleotide
ucaaaagagaacacgcccu

SEQ ID NO: 2760513 - RNA, 19 nt, Artificial Sequence
  Description of Artificial Sequence: Synthetic oligonucleotide
auagagguaauucccacug

SEQ ID NO: 2760514 - RNA, 19 nt, Artificial Sequence
  Description of Artificial Sequence: Synthetic oligonucleotide
ugcacagguucucauagag

SEQ ID NO: 2760515 - RNA, 19 nt, Artificial Sequence
  Description of Artificial Sequence: Synthetic oligonucleotide
aaagagaacacgcccuugu

SEQ ID NO: 2760516 - RNA, 19 nt, Artificial Sequence
  Description of Artificial Sequence: Synthetic oligonucleotide
ucuggaaguggcuagcuca

SEQ ID NO: 2760517 - RNA, 19 nt, Artificial Sequence
  Description of Artificial Sequence: Synthetic oligonucleotide
ucuugugaggggcugagca

SEQ ID NO: 2760518 - RNA, 19 nt, Artificial Sequence
  Description of Artificial Sequence: Synthetic oligonucleotide
uggacacagacgcauacag

SEQ ID NO: 2760519 - RNA, 19 nt, Artificial Sequence
  Description of Artificial Sequence: Synthetic oligonucleotide
gagaacacgcccuugucag

SEQ ID NO: 2760520 - RNA, 19 nt, Artificial Sequence
  Description of Artificial Sequence: Synthetic oligonucleotide
cuucaaaagagaacacgcc

SEQ ID NO: 2760521 - RNA, 19 nt, Artificial Sequence
  Description of Artificial Sequence: Synthetic oligonucleotide
guuguugugguagaugggg

SEQ ID NO: 2760522 - RNA, 19 nt, Artificial Sequence
  Description of Artificial Sequence: Synthetic oligonucleotide
agcucaaacucccggggcc

SEQ ID NO: 2760523 - RNA, 19 nt, Artificial Sequence
  Description of Artificial Sequence: Synthetic oligonucleotide
auaugucuggggcacgugg

SEQ ID NO: 2760524 - RNA, 19 nt, Artificial Sequence
  Description of Artificial Sequence: Synthetic oligonucleotide
accaagagggcccucuugg

SEQ ID NO: 2760525 - RNA, 19 nt, Artificial Sequence
  Description of Artificial Sequence: Synthetic oligonucleotide
aagagaacacgcccuuguc

SEQ ID NO: 2760526 - RNA, 19 nt, Artificial Sequence
  Description of Artificial Sequence: Synthetic oligonucleotide
gauacuguuccaucuugug

SEQ ID NO: 2760527 - RNA, 19 nt, Artificial Sequence
  Description of Artificial Sequence: Synthetic oligonucleotide
uguuccaucuugugagggg

SEQ ID NO: 2760528 - RNA, 19 nt, Artificial Sequence
  Description of Artificial Sequence: Synthetic oligonucleotide
agguaauucccacuggcug

SEQ ID NO: 2760529 - RNA, 19 nt, Artificial Sequence
  Description of Artificial Sequence: Synthetic oligonucleotide
caugcacagguucucauag

SEQ ID NO: 2760530 - RNA, 19 nt, Artificial Sequence
  Description of Artificial Sequence: Synthetic oligonucleotide
aacucccggggccaccucc

SEQ ID NO: 2760531 - RNA, 19 nt, Artificial Sequence
  Description of Artificial Sequence: Synthetic oligonucleotide
aauucccacuggcugcggg

SEQ ID NO: 2760532 - RNA, 19 nt, Artificial Sequence
  Description of Artificial Sequence: Synthetic oligonucleotide
gcuguggccaccaagaggg

SEQ ID NO: 2760533 - RNA, 19 nt, Artificial Sequence
  Description of Artificial Sequence: Synthetic oligonucleotide
aguggcuagcucaaacucc

SEQ ID NO: 2760534 - RNA, 19 nt, Artificial Sequence
  Description of Artificial Sequence: Synthetic oligonucleotide
ucagagccgaacuugcgca

SEQ ID NO: 2760535 - RNA, 19 nt, Artificial Sequence
  Description of Artificial Sequence: Synthetic oligonucleotide
aguggcaggcuuugaggcc

SEQ ID NO: 2760536 - RNA, 19 nt, Artificial Sequence
  Description of Artificial Sequence: Synthetic oligonucleotide
uagagguaauucccacugg

SEQ ID NO: 2760537 - RNA, 19 nt, Artificial Sequence
  Description of Artificial Sequence: Synthetic oligonucleotide
auacagaccagauacuguu

SEQ ID NO: 2760538 - RNA, 19 nt, Artificial Sequence
  Description of Artificial Sequence: Synthetic oligonucleotide
cuaggcagcuuucuggaag

SEQ ID NO: 2760539 - RNA, 19 nt, Artificial Sequence
  Description of Artificial Sequence: Synthetic oligonucleotide
uugcgcaggaaaugguacg

SEQ ID NO: 2760540 - RNA, 19 nt, Artificial Sequence
  Description of Artificial Sequence: Synthetic oligonucleotide
acacgcccuugucagagcc

SEQ ID NO: 2760541 - RNA, 19 nt, Artificial Sequence
  Description of Artificial Sequence: Synthetic oligonucleotide
auucccacuggcugcgggc

SEQ ID NO: 2760542 - RNA, 19 nt, Artificial Sequence
  Description of Artificial Sequence: Synthetic oligonucleotide
uugucagagccgaacuugc

SEQ ID NO: 2760543 - RNA, 19 nt, Artificial Sequence
  Description of Artificial Sequence: Synthetic oligonucleotide
caggcuuugaggcccaggg

SEQ ID NO: 2760544 - RNA, 19 nt, Artificial Sequence
  Description of Artificial Sequence: Synthetic oligonucleotide
cuagcucaaacucccgggg

SEQ ID NO: 2760545 - RNA, 19 nt, Artificial Sequence
  Description of Artificial Sequence: Synthetic oligonucleotide
ucauagagguaauucccac

SEQ ID NO: 2760546 - RNA, 19 nt, Artificial Sequence
  Description of Artificial Sequence: Synthetic oligonucleotide
guccuaggcagcuuucugg

SEQ ID NO: 2760547 - RNA, 19 nt, Artificial Sequence
  Description of Artificial Sequence: Synthetic oligonucleotide
accagauacuguuccaucu

SEQ ID NO: 2760548 - RNA, 19 nt, Artificial Sequence
  Description of Artificial Sequence: Synthetic oligonucleotide
uacaacggcggccagcuuc

SEQ ID NO: 2760549 - RNA, 19 nt, Artificial Sequence
  Description of Artificial Sequence: Synthetic oligonucleotide
uguugugguagauggggcu

SEQ ID NO: 2760550 - RNA, 19 nt, Artificial Sequence
  Description of Artificial Sequence: Synthetic oligonucleotide
acuggucuccagcaugcac

SEQ ID NO: 2760551 - RNA, 19 nt, Artificial Sequence
  Description of Artificial Sequence: Synthetic oligonucleotide
agagaacacgcccuuguca

SEQ ID NO: 2760552 - RNA, 19 nt, Artificial Sequence
  Description of Artificial Sequence: Synthetic oligonucleotide
uuguugugguagauggggc

SEQ ID NO: 2760553 - RNA, 19 nt, Artificial Sequence
  Description of Artificial Sequence: Synthetic oligonucleotide
aacacgcccuugucagagc

SEQ ID NO: 2760554 - RNA, 19 nt, Artificial Sequence
  Description of Artificial Sequence: Synthetic oligonucleotide
agcuguagcaggccguggg

SEQ ID NO: 2760555 - RNA, 19 nt, Artificial Sequence
  Description of Artificial Sequence: Synthetic oligonucleotide
ugucagagccgaacuugcg

SEQ ID NO: 2760556 - RNA, 19 nt, Artificial Sequence
  Description of Artificial Sequence: Synthetic oligonucleotide
cuugcgcaggaaaugguac

SEQ ID NO: 2760557 - RNA, 19 nt, Artificial Sequence
  Description of Artificial Sequence: Synthetic oligonucleotide
uaugucuggggcacgugga

SEQ ID NO: 2760558 - RNA, 19 nt, Artificial Sequence
  Description of Artificial Sequence: Synthetic oligonucleotide
gguaauucccacuggcugc

SEQ ID NO: 2760559 - RNA, 19 nt, Artificial Sequence
  Description of Artificial Sequence: Synthetic oligonucleotide
gcuucaaaagagaacacgc

SEQ ID NO: 2760560 - RNA, 19 nt, Artificial Sequence
  Description of Artificial Sequence: Synthetic oligonucleotide
acuguuccaucuugugagg

SEQ ID NO: 2760561 - RNA, 19 nt, Artificial Sequence
  Description of Artificial Sequence: Synthetic oligonucleotide
ugcgcaggaaaugguacgg

SEQ ID NO: 2760562 - RNA, 19 nt, Artificial Sequence
  Description of Artificial Sequence: Synthetic oligonucleotide
aaaagagaacacgcccuug

SEQ ID NO: 2760563 - RNA, 19 nt, Artificial Sequence
  Description of Artificial Sequence: Synthetic oligonucleotide
cuugucagagccgaacuug

SEQ ID NO: 2760564 - RNA, 19 nt, Artificial Sequence
  Description of Artificial Sequence: Synthetic oligonucleotide
aguuacaacggcggccagc

SEQ ID NO: 2760565 - RNA, 19 nt, Artificial Sequence
  Description of Artificial Sequence: Synthetic oligonucleotide
uccuaggcagcuuucugga

SEQ ID NO: 2760566 - RNA, 19 nt, Artificial Sequence
  Description of Artificial Sequence: Synthetic oligonucleotide
caggaaaugguacggccag

SEQ ID NO: 2760567 - RNA, 19 nt, Artificial Sequence
  Description of Artificial Sequence: Synthetic oligonucleotide
cuccugaagcucuccaggg

SEQ ID NO: 2760568 - RNA, 19 nt, Artificial Sequence
  Description of Artificial Sequence: Synthetic oligonucleotide
cuccgcauaugucuggggc

SEQ ID NO: 2760569 - RNA, 19 nt, Artificial Sequence
  Description of Artificial Sequence: Synthetic oligonucleotide
agccccauuggacagcuca

SEQ ID NO: 2760570 - RNA, 19 nt, Artificial Sequence
  Description of Artificial Sequence: Synthetic oligonucleotide
guucucauagagguaauuc

SEQ ID NO: 2760571 - RNA, 19 nt, Artificial Sequence
  Description of Artificial Sequence: Synthetic oligonucleotide
gaacacgcccuugucagag

SEQ ID NO: 2760572 - RNA, 19 nt, Artificial Sequence
  Description of Artificial Sequence: Synthetic oligonucleotide
cauggccaguucuggaacg

SEQ ID NO: 2760573 - RNA, 19 nt, Artificial Sequence
  Description of Artificial Sequence: Synthetic oligonucleotide
ucuagggaggguagggaaa

SEQ ID NO: 2760574 - RNA, 19 nt, Artificial Sequence
  Description of Artificial Sequence: Synthetic oligonucleotide
gucagagccgaacuugcgc

SEQ ID NO: 2760575 - RNA, 19 nt, Artificial Sequence
  Description of Artificial Sequence: Synthetic oligonucleotide
guaauucccacuggcugcg

SEQ ID NO: 2760576 - RNA, 19 nt, Artificial Sequence
  Description of Artificial Sequence: Synthetic oligonucleotide
uguagcaggccgugggagc

SEQ ID NO: 2760577 - RNA, 19 nt, Artificial Sequence
  Description of Artificial Sequence: Synthetic oligonucleotide
ucacccgaguuacaacggc

SEQ ID NO: 2760578 - RNA, 19 nt, Artificial Sequence
  Description of Artificial Sequence: Synthetic oligonucleotide
cacagacgcauacagacca

SEQ ID NO: 2760579 - RNA, 19 nt, Artificial Sequence
  Description of Artificial Sequence: Synthetic oligonucleotide
cuuggacacagacgcauac

SEQ ID NO: 2760580 - RNA, 19 nt, Artificial Sequence
  Description of Artificial Sequence: Synthetic oligonucleotide
uccgcauaugucuggggca

SEQ ID NO: 2760581 - RNA, 19 nt, Artificial Sequence
  Description of Artificial Sequence: Synthetic oligonucleotide
cuugugaggggcugagcag

SEQ ID NO: 2760582 - RNA, 19 nt, Artificial Sequence
  Description of Artificial Sequence: Synthetic oligonucleotide
uagcucaaacucccggggc

SEQ ID NO: 2760583 - RNA, 19 nt, Artificial Sequence
  Description of Artificial Sequence: Synthetic oligonucleotide
ucgggagccccauuggaca

SEQ ID NO: 2760584 - RNA, 19 nt, Artificial Sequence
  Description of Artificial Sequence: Synthetic oligonucleotide
acacagacgcauacagacc

SEQ ID NO: 2760585 - RNA, 19 nt, Artificial Sequence
  Description of Artificial Sequence: Synthetic oligonucleotide
cucaggacuggucuccagc

SEQ ID NO: 2760586 - RNA, 19 nt, Artificial Sequence
  Description of Artificial Sequence: Synthetic oligonucleotide
augucuggggcacguggac

SEQ ID NO: 2760587 - RNA, 19 nt, Artificial Sequence
  Description of Artificial Sequence: Synthetic oligonucleotide
uggucuccagcaugcacag

SEQ ID NO: 2760588 - RNA, 19 nt, Artificial Sequence
  Description of Artificial Sequence: Synthetic oligonucleotide
cucacccgaguuacaacgg

SEQ ID NO: 2760589 - RNA, 19 nt, Artificial Sequence
  Description of Artificial Sequence: Synthetic oligonucleotide
uaggcagcuuucuggaagu

SEQ ID NO: 2760590 - RNA, 19 nt, Artificial Sequence
  Description of Artificial Sequence: Synthetic oligonucleotide
cacccgaguuacaacggcg

SEQ ID NO: 2760591 - RNA, 19 nt, Artificial Sequence
  Description of Artificial Sequence: Synthetic oligonucleotide
cucauagagguaauuccca

SEQ ID NO: 2760592 - RNA, 19 nt, Artificial Sequence
  Description of Artificial Sequence: Synthetic oligonucleotide
cagauacuguuccaucuug

SEQ ID NO: 2760593 - RNA, 19 nt, Artificial Sequence
  Description of Artificial Sequence: Synthetic oligonucleotide
cagggucaguccuaggcag

SEQ ID NO: 2760594 - RNA, 19 nt, Artificial Sequence
  Description of Artificial Sequence: Synthetic oligonucleotide
ccucacccgaguuacaacg

SEQ ID NO: 2760595 - RNA, 19 nt, Artificial Sequence
  Description of Artificial Sequence: Synthetic oligonucleotide
gaaaugguacggccagcug

SEQ ID NO: 2760596 - RNA, 19 nt, Artificial Sequence
  Description of Artificial Sequence: Synthetic oligonucleotide
uugugguagauggggcugg

SEQ ID NO: 2760597 - RNA, 19 nt, Artificial Sequence
  Description of Artificial Sequence: Synthetic oligonucleotide
guagggaaagggcccgagg

SEQ ID NO: 2760598 - RNA, 19 nt, Artificial Sequence
  Description of Artificial Sequence: Synthetic oligonucleotide
guuccaucuugugaggggc

SEQ ID NO: 2760599 - RNA, 19 nt, Artificial Sequence
  Description of Artificial Sequence: Synthetic oligonucleotide
gaaguggcuagcucaaacu

SEQ ID NO: 2760600 - RNA, 19 nt, Artificial Sequence
  Description of Artificial Sequence: Synthetic oligonucleotide
cuggucuccagcaugcaca

SEQ ID NO: 2760601 - RNA, 19 nt, Artificial Sequence
  Description of Artificial Sequence: Synthetic oligonucleotide
ugaggggcugagcagcagu

SEQ ID NO: 2760602 - RNA, 19 nt, Artificial Sequence
  Description of Artificial Sequence: Synthetic oligonucleotide
acggcggccagcuucaaaa

SEQ ID NO: 2760603 - RNA, 19 nt, Artificial Sequence
  Description of Artificial Sequence: Synthetic oligonucleotide
guggcuagcucaaacuccc

SEQ ID NO: 2760604 - RNA, 19 nt, Artificial Sequence
  Description of Artificial Sequence: Synthetic oligonucleotide
gacucgggagccccauugg

SEQ ID NO: 2760605 - RNA, 19 nt, Artificial Sequence
  Description of Artificial Sequence: Synthetic oligonucleotide
cauuggacagcucaggacu

SEQ ID NO: 2760606 - RNA, 19 nt, Artificial Sequence
  Description of Artificial Sequence: Synthetic oligonucleotide
cuagggaggguagggaaag

SEQ ID NO: 2760607 - RNA, 19 nt, Artificial Sequence
  Description of Artificial Sequence: Synthetic oligonucleotide
gacauggccaguucuggaa

SEQ ID NO: 2760608 - RNA, 19 nt, Artificial Sequence
  Description of Artificial Sequence: Synthetic oligonucleotide
aguccuaggcagcuuucug

SEQ ID NO: 2760609 - RNA, 19 nt, Artificial Sequence
  Description of Artificial Sequence: Synthetic oligonucleotide
gaggguagggaaagggccc

SEQ ID NO: 2760610 - RNA, 19 nt, Artificial Sequence
  Description of Artificial Sequence: Synthetic oligonucleotide
uggggacauggccaguucu

SEQ ID NO: 2760611 - RNA, 19 nt, Artificial Sequence
  Description of Artificial Sequence: Synthetic oligonucleotide
aaaaggcccucacccgagu

SEQ ID NO: 2760612 - RNA, 19 nt, Artificial Sequence
  Description of Artificial Sequence: Synthetic oligonucleotide
gucugcuuggacacagacg

SEQ ID NO: 2760613 - RNA, 19 nt, Artificial Sequence
  Description of Artificial Sequence: Synthetic oligonucleotide
cuuucuggaaguggcuagc

SEQ ID NO: 2760614 - RNA, 19 nt, Artificial Sequence
  Description of Artificial Sequence: Synthetic oligonucleotide
gcaguggcaggcuuugagg

SEQ ID NO: 2760615 - RNA, 19 nt, Artificial Sequence
  Description of Artificial Sequence: Synthetic oligonucleotide
gaaagggcccgaggcaggg

SEQ ID NO: 2760616 - RNA, 19 nt, Artificial Sequence
  Description of Artificial Sequence: Synthetic oligonucleotide
gaccagauacuguuccauc

SEQ ID NO: 2760617 - RNA, 19 nt, Artificial Sequence
  Description of Artificial Sequence: Synthetic oligonucleotide
uucuggaacgccggucccg

SEQ ID NO: 2760618 - RNA, 19 nt, Artificial Sequence
  Description of Artificial Sequence: Synthetic oligonucleotide
aaugguacggccagcugua

SEQ ID NO: 2760619 - RNA, 19 nt, Artificial Sequence
  Description of Artificial Sequence: Synthetic oligonucleotide
ugugaggggcugagcagca

SEQ ID NO: 2760620 - RNA, 19 nt, Artificial Sequence
  Description of Artificial Sequence: Synthetic oligonucleotide
ugguacggccagcuguagc

SEQ ID NO: 2760621 - RNA, 19 nt, Artificial Sequence
  Description of Artificial Sequence: Synthetic oligonucleotide
uucuggaaguggcuagcuc

SEQ ID NO: 2760622 - RNA, 19 nt, Artificial Sequence
  Description of Artificial Sequence: Synthetic oligonucleotide
gguacggccagcuguagca

SEQ ID NO: 2760623 - RNA, 19 nt, Artificial Sequence
  Description of Artificial Sequence: Synthetic oligonucleotide
aggguggggacauggccag

SEQ ID NO: 2760624 - RNA, 19 nt, Artificial Sequence
  Description of Artificial Sequence: Synthetic oligonucleotide
cuguuccaucuugugaggg

SEQ ID NO: 2760625 - RNA, 19 nt, Artificial Sequence
  Description of Artificial Sequence: Synthetic oligonucleotide
ugcuuggacacagacgcau

SEQ ID NO: 2760626 - RNA, 19 nt, Artificial Sequence
  Description of Artificial Sequence: Synthetic oligonucleotide
cacguggacugcugaaggc

SEQ ID NO: 2760627 - RNA, 19 nt, Artificial Sequence
  Description of Artificial Sequence: Synthetic oligonucleotide
ggaggguagggaaagggcc

SEQ ID NO: 2760628 - RNA, 19 nt, Artificial Sequence
  Description of Artificial Sequence: Synthetic oligonucleotide
guugugguagauggggcug

SEQ ID NO: 2760629 - RNA, 19 nt, Artificial Sequence
  Description of Artificial Sequence: Synthetic oligonucleotide
uguggccaccaagagggcc

SEQ ID NO: 2760630 - RNA, 19 nt, Artificial Sequence
  Description of Artificial Sequence: Synthetic oligonucleotide
aggaaaugguacggccagc

SEQ ID NO: 2760631 - RNA, 19 nt, Artificial Sequence
  Description of Artificial Sequence: Synthetic oligonucleotide
gguagauggggcuggccag

SEQ ID NO: 2760632 - RNA, 19 nt, Artificial Sequence
  Description of Artificial Sequence: Synthetic oligonucleotide
acccgaguuacaacggcgg

SEQ ID NO: 2760633 - RNA, 19 nt, Artificial Sequence
  Description of Artificial Sequence: Synthetic oligonucleotide
aggcccucacccgaguuac

SEQ ID NO: 2760634 - RNA, 19 nt, Artificial Sequence
  Description of Artificial Sequence: Synthetic oligonucleotide
ggaaguggcuagcucaaac

SEQ ID NO: 2760635 - RNA, 19 nt, Artificial Sequence
  Description of Artificial Sequence: Synthetic oligonucleotide
ggcuagcucaaacucccgg

SEQ ID NO: 2760636 - RNA, 19 nt, Artificial Sequence
  Description of Artificial Sequence: Synthetic oligonucleotide
gucuggggcacguggacug

SEQ ID NO: 2760637 - RNA, 19 nt, Artificial Sequence
  Description of Artificial Sequence: Synthetic oligonucleotide
cucgggagccccauuggac

SEQ ID NO: 2760638 - RNA, 19 nt, Artificial Sequence
  Description of Artificial Sequence: Synthetic oligonucleotide
ggcuuugaggcccaggguc

SEQ ID NO: 2760639 - RNA, 19 nt, Artificial Sequence
  Description of Artificial Sequence: Synthetic oligonucleotide
gucuccagcaugcacaggu

SEQ ID NO: 2760640 - RNA, 19 nt, Artificial Sequence
  Description of Artificial Sequence: Synthetic oligonucleotide
uuggacacagacgcauaca

SEQ ID NO: 2760641 - RNA, 19 nt, Artificial Sequence
  Description of Artificial Sequence: Synthetic oligonucleotide
agggaaagggcccgaggca

SEQ ID NO: 2760642 - RNA, 19 nt, Artificial Sequence
  Description of Artificial Sequence: Synthetic oligonucleotide
uggcuagcucaaacucccg

SEQ ID NO: 2760643 - RNA, 19 nt, Artificial Sequence
  Description of Artificial Sequence: Synthetic oligonucleotide
gcuuucuggaaguggcuag

SEQ ID NO: 2760644 - RNA, 19 nt, Artificial Sequence
  Description of Artificial Sequence: Synthetic oligonucleotide
ucuggaacgccggucccgc

SEQ ID NO: 2760645 - RNA, 19 nt, Artificial Sequence
  Description of Artificial Sequence: Synthetic oligonucleotide
gcauacagaccagauacug

SEQ ID NO: 2760646 - RNA, 19 nt, Artificial Sequence
  Description of Artificial Sequence: Synthetic oligonucleotide
uuucuggaaguggcuagcu

SEQ ID NO: 2760647 - RNA, 19 nt, Artificial Sequence
  Description of Artificial Sequence: Synthetic oligonucleotide
agguccucguuguuguggu

SEQ ID NO: 2760648 - RNA, 19 nt, Artificial Sequence
  Description of Artificial Sequence: Synthetic oligonucleotide
guagauggggcuggccagg

SEQ ID NO: 2760649 - RNA, 19 nt, Artificial Sequence
  Description of Artificial Sequence: Synthetic oligonucleotide
gcagcuuucuggaaguggc

SEQ ID NO: 2760650 - RNA, 19 nt, Artificial Sequence
  Description of Artificial Sequence: Synthetic oligonucleotide
aaggcccucacccgaguua

SEQ ID NO: 2760651 - RNA, 19 nt, Artificial Sequence
  Description of Artificial Sequence: Synthetic oligonucleotide
uuccaucuugugaggggcu

SEQ ID NO: 2760652 - RNA, 19 nt, Artificial Sequence
  Description of Artificial Sequence: Synthetic oligonucleotide
gacgcauacagaccagaua

SEQ ID NO: 2760653 - RNA, 19 nt, Artificial Sequence
  Description of Artificial Sequence: Synthetic oligonucleotide
aacgccggucccgcguggc

SEQ ID NO: 2760654 - RNA, 19 nt, Artificial Sequence
  Description of Artificial Sequence: Synthetic oligonucleotide
cagguccucguuguugugg

SEQ ID NO: 2760655 - RNA, 19 nt, Artificial Sequence
  Description of Artificial Sequence: Synthetic oligonucleotide
uccucguuguugugguaga

SEQ ID NO: 2760656 - RNA, 19 nt, Artificial Sequence
  Description of Artificial Sequence: Synthetic oligonucleotide
gcacguggacugcugaagg

SEQ ID NO: 2760657 - RNA, 19 nt, Artificial Sequence
  Description of Artificial Sequence: Synthetic oligonucleotide
uggaacgccggucccgcgu

SEQ ID NO: 2760658 - RNA, 19 nt, Artificial Sequence
  Description of Artificial Sequence: Synthetic oligonucleotide
uccaucuugugaggggcug

SEQ ID NO: 2760659 - RNA, 19 nt, Artificial Sequence
  Description of Artificial Sequence: Synthetic oligonucleotide
agauacuguuccaucuugu

SEQ ID NO: 2760660 - RNA, 19 nt, Artificial Sequence
  Description of Artificial Sequence: Synthetic oligonucleotide
aaaggcccucacccgaguu

SEQ ID NO: 2760661 - RNA, 19 nt, Artificial Sequence
  Description of Artificial Sequence: Synthetic oligonucleotide
agagccgaacuugcgcagg

SEQ ID NO: 2760662 - RNA, 19 nt, Artificial Sequence
  Description of Artificial Sequence: Synthetic oligonucleotide
aggguagggaaagggcccg

SEQ ID NO: 2760663 - RNA, 19 nt, Artificial Sequence
  Description of Artificial Sequence: Synthetic oligonucleotide
cagguucucauagagguaa

SEQ ID NO: 2760664 - RNA, 19 nt, Artificial Sequence
  Description of Artificial Sequence: Synthetic oligonucleotide
cacagcuccgcauaugucu

SEQ ID NO: 2760665 - RNA, 19 nt, Artificial Sequence
  Description of Artificial Sequence: Synthetic oligonucleotide
cucguuguugugguagaug

SEQ ID NO: 2760666 - RNA, 19 nt, Artificial Sequence
  Description of Artificial Sequence: Synthetic oligonucleotide
aucuugugaggggcugagc

SEQ ID NO: 2760667 - RNA, 19 nt, Artificial Sequence
  Description of Artificial Sequence: Synthetic oligonucleotide
aacuugcgcaggaaauggu

SEQ ID NO: 2760668 - RNA, 19 nt, Artificial Sequence
  Description of Artificial Sequence: Synthetic oligonucleotide
ucaguccuaggcagcuuuc

SEQ ID NO: 2760669 - RNA, 19 nt, Artificial Sequence
  Description of Artificial Sequence: Synthetic oligonucleotide
agggucaguccuaggcagc

SEQ ID NO: 2760670 - RNA, 19 nt, Artificial Sequence
  Description of Artificial Sequence: Synthetic oligonucleotide
auuggacagcucaggacug

SEQ ID NO: 2760671 - RNA, 19 nt, Artificial Sequence
  Description of Artificial Sequence: Synthetic oligonucleotide
agcuccgcauaugucuggg

SEQ ID NO: 2760672 - RNA, 19 nt, Artificial Sequence
  Description of Artificial Sequence: Synthetic oligonucleotide
cuggucugcuuggacacag

SEQ ID NO: 2760673 - RNA, 19 nt, Artificial Sequence
  Description of Artificial Sequence: Synthetic oligonucleotide
acguggacugcugaaggca

SEQ ID NO: 2760674 - RNA, 19 nt, Artificial Sequence
  Description of Artificial Sequence: Synthetic oligonucleotide
aaacucccggggccaccuc

SEQ ID NO: 2760675 - RNA, 19 nt, Artificial Sequence
  Description of Artificial Sequence: Synthetic oligonucleotide
acucgggagccccauugga

SEQ ID NO: 2760676 - RNA, 19 nt, Artificial Sequence
  Description of Artificial Sequence: Synthetic oligonucleotide
agaccagauacuguuccau

SEQ ID NO: 2760677 - RNA, 19 nt, Artificial Sequence
  Description of Artificial Sequence: Synthetic oligonucleotide
cuccagcaugcacagguuc

SEQ ID NO: 2760678 - RNA, 19 nt, Artificial Sequence
  Description of Artificial Sequence: Synthetic oligonucleotide
acagcuccgcauaugucug

SEQ ID NO: 2760679 - RNA, 19 nt, Artificial Sequence
  Description of Artificial Sequence: Synthetic oligonucleotide
agcaugcacagguucucau

SEQ ID NO: 2760680 - RNA, 19 nt, Artificial Sequence
  Description of Artificial Sequence: Synthetic oligonucleotide
aaagggcccgaggcagggg

SEQ ID NO: 2760681 - RNA, 19 nt, Artificial Sequence
  Description of Artificial Sequence: Synthetic oligonucleotide
cagagccgaacuugcgcag

SEQ ID NO: 2760682 - RNA, 19 nt, Artificial Sequence
  Description of Artificial Sequence: Synthetic oligonucleotide
caucuugugaggggcugag

SEQ ID NO: 2760683 - RNA, 19 nt, Artificial Sequence
  Description of Artificial Sequence: Synthetic oligonucleotide
cuguagcaggccgugggag

SEQ ID NO: 2760684 - RNA, 19 nt, Artificial Sequence
  Description of Artificial Sequence: Synthetic oligonucleotide
agaacacgcccuugucaga

SEQ ID NO: 2760685 - RNA, 19 nt, Artificial Sequence
  Description of Artificial Sequence: Synthetic oligonucleotide
uucccacuggcugcgggcc

SEQ ID NO: 2760686 - RNA, 19 nt, Artificial Sequence
  Description of Artificial Sequence: Synthetic oligonucleotide
cauacagaccagauacugu

SEQ ID NO: 2760687 - RNA, 19 nt, Artificial Sequence
  Description of Artificial Sequence: Synthetic oligonucleotide
augcacagguucucauaga

SEQ ID NO: 2760688 - RNA, 19 nt, Artificial Sequence
  Description of Artificial Sequence: Synthetic oligonucleotide
cauagagguaauucccacu

SEQ ID NO: 2760689 - RNA, 19 nt, Artificial Sequence
  Description of Artificial Sequence: Synthetic oligonucleotide
guuacaacggcggccagcu

SEQ ID NO: 2760690 - RNA, 19 nt, Artificial Sequence
  Description of Artificial Sequence: Synthetic oligonucleotide
ggucugcuuggacacagac

SEQ ID NO: 2760691 - RNA, 19 nt, Artificial Sequence
  Description of Artificial Sequence: Synthetic oligonucleotide
gcggccagcuucaaaagag

SEQ ID NO: 2760692 - RNA, 19 nt, Artificial Sequence
  Description of Artificial Sequence: Synthetic oligonucleotide
cucuagggaggguagggaa

SEQ ID NO: 2760693 - RNA, 19 nt, Artificial Sequence
  Description of Artificial Sequence: Synthetic oligonucleotide
ggcagcuuucuggaagugg

SEQ ID NO: 2760694 - RNA, 19 nt, Artificial Sequence
  Description of Artificial Sequence: Synthetic oligonucleotide
ugucuggggcacguggacu

SEQ ID NO: 2760695 - RNA, 19 nt, Artificial Sequence
  Description of Artificial Sequence: Synthetic oligonucleotide
agauggggcuggccagggg

SEQ ID NO: 2760696 - RNA, 19 nt, Artificial Sequence
  Description of Artificial Sequence: Synthetic oligonucleotide
gggaaagggcccgaggcag

SEQ ID NO: 2760697 - RNA, 19 nt, Artificial Sequence
  Description of Artificial Sequence: Synthetic oligonucleotide
ggacucgggagccccauug

SEQ ID NO: 2760698 - RNA, 19 nt, Artificial Sequence
  Description of Artificial Sequence: Synthetic oligonucleotide
uugaggcccagggucaguc

SEQ ID NO: 2760699 - RNA, 19 nt, Artificial Sequence
  Description of Artificial Sequence: Synthetic oligonucleotide
caagagggcccucuuggga

SEQ ID NO: 2760700 - RNA, 19 nt, Artificial Sequence
  Description of Artificial Sequence: Synthetic oligonucleotide
cacgcccuugucagagccg

SEQ ID NO: 2760701 - RNA, 19 nt, Artificial Sequence
  Description of Artificial Sequence: Synthetic oligonucleotide
agagggcccucuugggacu

SEQ ID NO: 2760702 - RNA, 19 nt, Artificial Sequence
  Description of Artificial Sequence: Synthetic oligonucleotide
ugugguagauggggcuggc

SEQ ID NO: 2760703 - RNA, 19 nt, Artificial Sequence
  Description of Artificial Sequence: Synthetic oligonucleotide
cucuugggacucgggagcc

SEQ ID NO: 2760704 - RNA, 19 nt, Artificial Sequence
  Description of Artificial Sequence: Synthetic oligonucleotide
gggacauggccaguucugg

SEQ ID NO: 2760705 - RNA, 19 nt, Artificial Sequence
  Description of Artificial Sequence: Synthetic oligonucleotide
ccauuggacagcucaggac

SEQ ID NO: 2760706 - RNA, 19 nt, Artificial Sequence
  Description of Artificial Sequence: Synthetic oligonucleotide
uggggcacguggacugcug

SEQ ID NO: 2760707 - RNA, 19 nt, Artificial Sequence
  Description of Artificial Sequence: Synthetic oligonucleotide
ccucuugggacucgggagc

SEQ ID NO: 2760708 - RNA, 19 nt, Artificial Sequence
  Description of Artificial Sequence: Synthetic oligonucleotide
uaauucccacuggcugcgg

SEQ ID NO: 2760709 - RNA, 19 nt, Artificial Sequence
  Description of Artificial Sequence: Synthetic oligonucleotide
cagcuccgcauaugucugg

SEQ ID NO: 2760710 - RNA, 19 nt, Artificial Sequence
  Description of Artificial Sequence: Synthetic oligonucleotide
aggggcugagcagcagugg

SEQ ID NO: 2760711 - RNA, 19 nt, Artificial Sequence
  Description of Artificial Sequence: Synthetic oligonucleotide
ucaaacucccggggccacc

SEQ ID NO: 2760712 - RNA, 19 nt, Artificial Sequence
  Description of Artificial Sequence: Synthetic oligonucleotide
ggcucuagggaggguaggg

SEQ ID NO: 2760713 - RNA, 19 nt, Artificial Sequence
  Description of Artificial Sequence: Synthetic oligonucleotide
aacggcggccagcuucaaa

SEQ ID NO: 2760714 - RNA, 19 nt, Artificial Sequence
  Description of Artificial Sequence: Synthetic oligonucleotide
uggucugcuuggacacaga

SEQ ID NO: 2760715 - RNA, 19 nt, Artificial Sequence
  Description of Artificial Sequence: Synthetic oligonucleotide
cuuugaggcccagggucag

SEQ ID NO: 2760716 - RNA, 19 nt, Artificial Sequence
  Description of Artificial Sequence: Synthetic oligonucleotide
acuugcgcaggaaauggua

SEQ ID NO: 2760717 - RNA, 19 nt, Artificial Sequence
  Description of Artificial Sequence: Synthetic oligonucleotide
agcuuucuggaaguggcua

SEQ ID NO: 2760718 - RNA, 19 nt, Artificial Sequence
  Description of Artificial Sequence: Synthetic oligonucleotide
caccaagagggcccucuug

SEQ ID NO: 2760719 - RNA, 19 nt, Artificial Sequence
  Description of Artificial Sequence: Synthetic oligonucleotide
gagguaauucccacuggcu

SEQ ID NO: 2760720 - RNA, 19 nt, Artificial Sequence
  Description of Artificial Sequence: Synthetic oligonucleotide
uggacagcucaggacuggu

SEQ ID NO: 2760721 - RNA, 19 nt, Artificial Sequence
  Description of Artificial Sequence: Synthetic oligonucleotide
auggcggcagccacagcuc

SEQ ID NO: 2760722 - RNA, 19 nt, Artificial Sequence
  Description of Artificial Sequence: Synthetic oligonucleotide
cccucuugggacucgggag

SEQ ID NO: 2760723 - RNA, 19 nt, Artificial Sequence
  Description of Artificial Sequence: Synthetic oligonucleotide
gaguuacaacggcggccag

SEQ ID NO: 2760724 - RNA, 19 nt, Artificial Sequence
  Description of Artificial Sequence: Synthetic oligonucleotide
cuggaaguggcuagcucaa

SEQ ID NO: 2760725 - RNA, 19 nt, Artificial Sequence
  Description of Artificial Sequence: Synthetic oligonucleotide
ggccaguucuggaacgccg

SEQ ID NO: 2760726 - RNA, 19 nt, Artificial Sequence
  Description of Artificial Sequence: Synthetic oligonucleotide
ggacuggucuccagcaugc

SEQ ID NO: 2760727 - RNA, 19 nt, Artificial Sequence
  Description of Artificial Sequence: Synthetic oligonucleotide
acaacggcggccagcuuca

SEQ ID NO: 2760728 - RNA, 19 nt, Artificial Sequence
  Description of Artificial Sequence: Synthetic oligonucleotide
acagacgcauacagaccag

SEQ ID NO: 2760729 - RNA, 19 nt, Artificial Sequence
  Description of Artificial Sequence: Synthetic oligonucleotide
gagccgaacuugcgcagga

SEQ ID NO: 2760730 - RNA, 19 nt, Artificial Sequence
  Description of Artificial Sequence: Synthetic oligonucleotide
cagaccagauacuguucca

SEQ ID NO: 2760731 - RNA, 19 nt, Artificial Sequence
  Description of Artificial Sequence: Synthetic oligonucleotide
ggccagcuguagcaggccg

SEQ ID NO: 2760732 - RNA, 19 nt, Artificial Sequence
  Description of Artificial Sequence: Synthetic oligonucleotide
gaacgccggucccgcgugg

SEQ ID NO: 2760733 - RNA, 19 nt, Artificial Sequence
  Description of Artificial Sequence: Synthetic oligonucleotide
gggccugcuggucugcuug

SEQ ID NO: 2760734 - RNA, 19 nt, Artificial Sequence
  Description of Artificial Sequence: Synthetic oligonucleotide
agcaggccgugggagcugg

SEQ ID NO: 2760735 - RNA, 19 nt, Artificial Sequence
  Description of Artificial Sequence: Synthetic oligonucleotide
ggcacguggacugcugaag

SEQ ID NO: 2760736 - RNA, 19 nt, Artificial Sequence
  Description of Artificial Sequence: Synthetic oligonucleotide
ccaagagggcccucuuggg

SEQ ID NO: 2760737 - RNA, 19 nt, Artificial Sequence
  Description of Artificial Sequence: Synthetic oligonucleotide
agacgcauacagaccagau

SEQ ID NO: 2760738 - RNA, 19 nt, Artificial Sequence
  Description of Artificial Sequence: Synthetic oligonucleotide
uugggacucgggagcccca

SEQ ID NO: 2760739 - RNA, 19 nt, Artificial Sequence
  Description of Artificial Sequence: Synthetic oligonucleotide
gccaguucuggaacgccgg

SEQ ID NO: 2760740 - RNA, 19 nt, Artificial Sequence
  Description of Artificial Sequence: Synthetic oligonucleotide
acgcccuugucagagccga

SEQ ID NO: 2760741 - RNA, 19 nt, Artificial Sequence
  Description of Artificial Sequence: Synthetic oligonucleotide
cauaugucuggggcacgug

SEQ ID NO: 2760742 - RNA, 19 nt, Artificial Sequence
  Description of Artificial Sequence: Synthetic oligonucleotide
cgcaggaaaugguacggcc

SEQ ID NO: 2760743 - RNA, 19 nt, Artificial Sequence
  Description of Artificial Sequence: Synthetic oligonucleotide
guacggccagcuguagcag

SEQ ID NO: 2760744 - RNA, 19 nt, Artificial Sequence
  Description of Artificial Sequence: Synthetic oligonucleotide
ucuggggcacguggacugc

SEQ ID NO: 2760745 - RNA, 19 nt, Artificial Sequence
  Description of Artificial Sequence: Synthetic oligonucleotide
ucccggggccaccuccuga

SEQ ID NO: 2760746 - RNA, 19 nt, Artificial Sequence
  Description of Artificial Sequence: Synthetic oligonucleotide
gcaggaaaugguacggcca

SEQ ID NO: 2760747 - RNA, 19 nt, Artificial Sequence
  Description of Artificial Sequence: Synthetic oligonucleotide
uggcgggcaauggcggcag

SEQ ID NO: 2760748 - RNA, 19 nt, Artificial Sequence
  Description of Artificial Sequence: Synthetic oligonucleotide
gaggcccagggucaguccu

SEQ ID NO: 2760749 - RNA, 19 nt, Artificial Sequence
  Description of Artificial Sequence: Synthetic oligonucleotide
caguucuggaacgccgguc

SEQ ID NO: 2760750 - RNA, 19 nt, Artificial Sequence
  Description of Artificial Sequence: Synthetic oligonucleotide
ggaaagggcccgaggcagg

SEQ ID NO: 2760751 - RNA, 19 nt, Artificial Sequence
  Description of Artificial Sequence: Synthetic oligonucleotide
cguuguugugguagauggg

SEQ ID NO: 2760752 - RNA, 19 nt, Artificial Sequence
  Description of Artificial Sequence: Synthetic oligonucleotide
ccgaguuacaacggcggcc

SEQ ID NO: 2760753 - RNA, 19 nt, Artificial Sequence
  Description of Artificial Sequence: Synthetic oligonucleotide
ggggacauggccaguucug

SEQ ID NO: 2760754 - RNA, 19 nt, Artificial Sequence
  Description of Artificial Sequence: Synthetic oligonucleotide
caaaagagaacacgcccuu

SEQ ID NO: 2760755 - RNA, 19 nt, Artificial Sequence
  Description of Artificial Sequence: Synthetic oligonucleotide
gguagggaaagggcccgag

SEQ ID NO: 2760756 - RNA, 19 nt, Artificial Sequence
  Description of Artificial Sequence: Synthetic oligonucleotide
acgccggucccgcguggcg

SEQ ID NO: 2760757 - RNA, 19 nt, Artificial Sequence
  Description of Artificial Sequence: Synthetic oligonucleotide
gugggagcuggaagucucc

SEQ ID NO: 2760758 - RNA, 19 nt, Artificial Sequence
  Description of Artificial Sequence: Synthetic oligonucleotide
cuggaacgccggucccgcg

SEQ ID NO: 2760759 - RNA, 19 nt, Artificial Sequence
  Description of Artificial Sequence: Synthetic oligonucleotide
gcuccgcauaugucugggg

SEQ ID NO: 2760760 - RNA, 19 nt, Artificial Sequence
  Description of Artificial Sequence: Synthetic oligonucleotide
cgcguggcgggcaauggcg

SEQ ID NO: 2760761 - RNA, 19 nt, Artificial Sequence
  Description of Artificial Sequence: Synthetic oligonucleotide
ggacauggccaguucugga

SEQ ID NO: 2760762 - RNA, 19 nt, Artificial Sequence
  Description of Artificial Sequence: Synthetic oligonucleotide
cuguggccaccaagagggc

SEQ ID NO: 2760763 - RNA, 19 nt, Artificial Sequence
  Description of Artificial Sequence: Synthetic oligonucleotide
ggaacgccggucccgcgug

SEQ ID NO: 2760764 - RNA, 19 nt, Artificial Sequence
  Description of Artificial Sequence: Synthetic oligonucleotide
cagacgcauacagaccaga

SEQ ID NO: 2760765 - RNA, 19 nt, Artificial Sequence
  Description of Artificial Sequence: Synthetic oligonucleotide
uggaaguggcuagcucaaa

SEQ ID NO: 2760766 - RNA, 19 nt, Artificial Sequence
  Description of Artificial Sequence: Synthetic oligonucleotide
ggaaaugguacggccagcu

SEQ ID NO: 2760767 - RNA, 19 nt, Artificial Sequence
  Description of Artificial Sequence: Synthetic oligonucleotide
gucaguccuaggcagcuuu

SEQ ID NO: 2760768 - RNA, 19 nt, Artificial Sequence
  Description of Artificial Sequence: Synthetic oligonucleotide
augguacggccagcuguag

SEQ ID NO: 2760769 - RNA, 19 nt, Artificial Sequence
  Description of Artificial Sequence: Synthetic oligonucleotide
gggcaggguggggacaugg

SEQ ID NO: 2760770 - RNA, 19 nt, Artificial Sequence
  Description of Artificial Sequence: Synthetic oligonucleotide
guggggacauggccaguuc

SEQ ID NO: 2760771 - RNA, 19 nt, Artificial Sequence
  Description of Artificial Sequence: Synthetic oligonucleotide
gugguagauggggcuggcc

SEQ ID NO: 2760772 - RNA, 19 nt, Artificial Sequence
  Description of Artificial Sequence: Synthetic oligonucleotide
cucaaacucccggggccac

SEQ ID NO: 2760773 - RNA, 19 nt, Artificial Sequence
  Description of Artificial Sequence: Synthetic oligonucleotide
ucccgcguggcgggcaaug

SEQ ID NO: 2760774 - RNA, 19 nt, Artificial Sequence
  Description of Artificial Sequence: Synthetic oligonucleotide
acagguucucauagaggua

SEQ ID NO: 2760775 - RNA, 19 nt, Artificial Sequence
  Description of Artificial Sequence: Synthetic oligonucleotide
ggcggccagcuucaaaaga

SEQ ID NO: 2760776 - RNA, 19 nt, Artificial Sequence
  Description of Artificial Sequence: Synthetic oligonucleotide
gcuuugaggcccaggguca

SEQ ID NO: 2760777 - RNA, 19 nt, Artificial Sequence
  Description of Artificial Sequence: Synthetic oligonucleotide
agccacagcuccgcauaug

SEQ ID NO: 2760778 - RNA, 19 nt, Artificial Sequence
  Description of Artificial Sequence: Synthetic oligonucleotide
cccgaguuacaacggcggc

SEQ ID NO: 2760779 - RNA, 19 nt, Artificial Sequence
  Description of Artificial Sequence: Synthetic oligonucleotide
gcagcaguggcaggcuuug

SEQ ID NO: 2760780 - RNA, 19 nt, Artificial Sequence
  Description of Artificial Sequence: Synthetic oligonucleotide
gcuguagcaggccguggga

SEQ ID NO: 2760781 - RNA, 19 nt, Artificial Sequence
  Description of Artificial Sequence: Synthetic oligonucleotide
cagcuguagcaggccgugg

SEQ ID NO: 2760782 - RNA, 19 nt, Artificial Sequence
  Description of Artificial Sequence: Synthetic oligonucleotide
gcagccacagcuccgcaua

SEQ ID NO: 2760783 - RNA, 19 nt, Artificial Sequence
  Description of Artificial Sequence: Synthetic oligonucleotide
gccacagcuccgcauaugu

SEQ ID NO: 2760784 - RNA, 19 nt, Artificial Sequence
  Description of Artificial Sequence: Synthetic oligonucleotide
agcucaggacuggucucca

SEQ ID NO: 2760785 - RNA, 19 nt, Artificial Sequence
  Description of Artificial Sequence: Synthetic oligonucleotide
ggacacagacgcauacaga

SEQ ID NO: 2760786 - RNA, 19 nt, Artificial Sequence
  Description of Artificial Sequence: Synthetic oligonucleotide
gccgaacuugcgcaggaaa

SEQ ID NO: 2760787 - RNA, 19 nt, Artificial Sequence
  Description of Artificial Sequence: Synthetic oligonucleotide
ccagggucaguccuaggca

SEQ ID NO: 2760788 - RNA, 19 nt, Artificial Sequence
  Description of Artificial Sequence: Synthetic oligonucleotide
aggcagcuuucuggaagug

SEQ ID NO: 2760789 - RNA, 19 nt, Artificial Sequence
  Description of Artificial Sequence: Synthetic oligonucleotide
guagcaggccgugggagcu

SEQ ID NO: 2760790 - RNA, 19 nt, Artificial Sequence
  Description of Artificial Sequence: Synthetic oligonucleotide
ggggcucuagggaggguag

SEQ ID NO: 2760791 - RNA, 19 nt, Artificial Sequence
  Description of Artificial Sequence: Synthetic oligonucleotide
cugcgggccugcuggucug

SEQ ID NO: 2760792 - RNA, 19 nt, Artificial Sequence
  Description of Artificial Sequence: Synthetic oligonucleotide
agcagcaguggcaggcuuu

SEQ ID NO: 2760793 - RNA, 19 nt, Artificial Sequence
  Description of Artificial Sequence: Synthetic oligonucleotide
cugcuuggacacagacgca

SEQ ID NO: 2760794 - RNA, 19 nt, Artificial Sequence
  Description of Artificial Sequence: Synthetic oligonucleotide
gcaugcacagguucucaua

SEQ ID NO: 2760795 - RNA, 19 nt, Artificial Sequence
  Description of Artificial Sequence: Synthetic oligonucleotide
cccauuggacagcucagga

SEQ ID NO: 2760796 - RNA, 19 nt, Artificial Sequence
  Description of Artificial Sequence: Synthetic oligonucleotide
ccccauuggacagcucagg

SEQ ID NO: 2760797 - RNA, 19 nt, Artificial Sequence
  Description of Artificial Sequence: Synthetic oligonucleotide
gugaggggcugagcagcag

SEQ ID NO: 2760798 - RNA, 19 nt, Artificial Sequence
  Description of Artificial Sequence: Synthetic oligonucleotide
uggccaccaagagggcccu

SEQ ID NO: 2760799 - RNA, 19 nt, Artificial Sequence
  Description of Artificial Sequence: Synthetic oligonucleotide
uuacaacggcggccagcuu

SEQ ID NO: 2760800 - RNA, 19 nt, Artificial Sequence
  Description of Artificial Sequence: Synthetic oligonucleotide
ccugcuggucugcuuggac

SEQ ID NO: 2760801 - RNA, 19 nt, Artificial Sequence
  Description of Artificial Sequence: Synthetic oligonucleotide
uagcaggccgugggagcug

SEQ ID NO: 2760802 - RNA, 19 nt, Artificial Sequence
  Description of Artificial Sequence: Synthetic oligonucleotide
gcccucuugggacucggga

SEQ ID NO: 2760803 - RNA, 19 nt, Artificial Sequence
  Description of Artificial Sequence: Synthetic oligonucleotide
gacuggucuccagcaugca

SEQ ID NO: 2760804 - RNA, 19 nt, Artificial Sequence
  Description of Artificial Sequence: Synthetic oligonucleotide
cgugggagcuggaagucuc

SEQ ID NO: 2760805 - RNA, 19 nt, Artificial Sequence
  Description of Artificial Sequence: Synthetic oligonucleotide
gcaggcuuugaggcccagg

SEQ ID NO: 2760806 - RNA, 19 nt, Artificial Sequence
  Description of Artificial Sequence: Synthetic oligonucleotide
ccgcauaugucuggggcac

SEQ ID NO: 2760807 - RNA, 19 nt, Artificial Sequence
  Description of Artificial Sequence: Synthetic oligonucleotide
ggccagcuucaaaagagaa

SEQ ID NO: 2760808 - RNA, 19 nt, Artificial Sequence
  Description of Artificial Sequence: Synthetic oligonucleotide
ugggacucgggagccccau

SEQ ID NO: 2760809 - RNA, 19 nt, Artificial Sequence
  Description of Artificial Sequence: Synthetic oligonucleotide
agguucucauagagguaau

SEQ ID NO: 2760810 - RNA, 19 nt, Artificial Sequence
  Description of Artificial Sequence: Synthetic oligonucleotide
cagcaugcacagguucuca

SEQ ID NO: 2760811 - RNA, 19 nt, Artificial Sequence
  Description of Artificial Sequence: Synthetic oligonucleotide
gccccauuggacagcucag

SEQ ID NO: 2760812 - RNA, 19 nt, Artificial Sequence
  Description of Artificial Sequence: Synthetic oligonucleotide
gggcucuagggaggguagg

SEQ ID NO: 2760813 - RNA, 19 nt, Artificial Sequence
  Description of Artificial Sequence: Synthetic oligonucleotide
agggcccucuugggacucg

SEQ ID NO: 2760814 - RNA, 19 nt, Artificial Sequence
  Description of Artificial Sequence: Synthetic oligonucleotide
cgaguuacaacggcggcca

SEQ ID NO: 2760815 - RNA, 19 nt, Artificial Sequence
  Description of Artificial Sequence: Synthetic oligonucleotide
guggcgggcaauggcggca

SEQ ID NO: 2760816 - RNA, 19 nt, Artificial Sequence
  Description of Artificial Sequence: Synthetic oligonucleotide
gcccuugucagagccgaac

SEQ ID NO: 2760817 - RNA, 19 nt, Artificial Sequence
  Description of Artificial Sequence: Synthetic oligonucleotide
gcguggcgggcaauggcgg

SEQ ID NO: 2760818 - RNA, 19 nt, Artificial Sequence
  Description of Artificial Sequence: Synthetic oligonucleotide
gcgcaggaaaugguacggc

SEQ ID NO: 2760819 - RNA, 19 nt, Artificial Sequence
  Description of Artificial Sequence: Synthetic oligonucleotide
acucccggggccaccuccu

SEQ ID NO: 2760820 - RNA, 19 nt, Artificial Sequence
  Description of Artificial Sequence: Synthetic oligonucleotide
cccucacccgaguuacaac

SEQ ID NO: 2760821 - RNA, 19 nt, Artificial Sequence
  Description of Artificial Sequence: Synthetic oligonucleotide
cagcuuucuggaaguggcu

SEQ ID NO: 2760822 - RNA, 19 nt, Artificial Sequence
  Description of Artificial Sequence: Synthetic oligonucleotide
ggcggcagccacagcuccg

SEQ ID NO: 2760823 - RNA, 19 nt, Artificial Sequence
  Description of Artificial Sequence: Synthetic oligonucleotide
ggcaggguggggacauggc

SEQ ID NO: 2760824 - RNA, 19 nt, Artificial Sequence
  Description of Artificial Sequence: Synthetic oligonucleotide
ugcgggccugcuggucugc

SEQ ID NO: 2760825 - RNA, 19 nt, Artificial Sequence
  Description of Artificial Sequence: Synthetic oligonucleotide
gccggucccgcguggcggg

SEQ ID NO: 2760826 - RNA, 19 nt, Artificial Sequence
  Description of Artificial Sequence: Synthetic oligonucleotide
ggcccagggucaguccuag

SEQ ID NO: 2760827 - RNA, 19 nt, Artificial Sequence
  Description of Artificial Sequence: Synthetic oligonucleotide
gcucuagggaggguaggga

SEQ ID NO: 2760828 - RNA, 19 nt, Artificial Sequence
  Description of Artificial Sequence: Synthetic oligonucleotide
ggggcacguggacugcuga

SEQ ID NO: 2760829 - RNA, 19 nt, Artificial Sequence
  Description of Artificial Sequence: Synthetic oligonucleotide
gcucaaacucccggggcca

SEQ ID NO: 2760830 - RNA, 19 nt, Artificial Sequence
  Description of Artificial Sequence: Synthetic oligonucleotide
gagggcccucuugggacuc

SEQ ID NO: 2760831 - RNA, 19 nt, Artificial Sequence
  Description of Artificial Sequence: Synthetic oligonucleotide
ccacagcuccgcauauguc

SEQ ID NO: 2760832 - RNA, 19 nt, Artificial Sequence
  Description of Artificial Sequence: Synthetic oligonucleotide
guggacugcugaaggcaaa

SEQ ID NO: 2760833 - RNA, 19 nt, Artificial Sequence
  Description of Artificial Sequence: Synthetic oligonucleotide
gcgggcaauggcggcagcc

SEQ ID NO: 2760834 - RNA, 19 nt, Artificial Sequence
  Description of Artificial Sequence: Synthetic oligonucleotide
agccgaacuugcgcaggaa

SEQ ID NO: 2760835 - RNA, 19 nt, Artificial Sequence
  Description of Artificial Sequence: Synthetic oligonucleotide
cggggccaccuccugaagc

SEQ ID NO: 2760836 - RNA, 19 nt, Artificial Sequence
  Description of Artificial Sequence: Synthetic oligonucleotide
caaacucccggggccaccu

SEQ ID NO: 2760837 - RNA, 19 nt, Artificial Sequence
  Description of Artificial Sequence: Synthetic oligonucleotide
cgggagccccauuggacag

SEQ ID NO: 2760838 - RNA, 19 nt, Artificial Sequence
  Description of Artificial Sequence: Synthetic oligonucleotide
gggagccccauuggacagc

SEQ ID NO: 2760839 - RNA, 19 nt, Artificial Sequence
  Description of Artificial Sequence: Synthetic oligonucleotide
ccgcguggcgggcaauggc

SEQ ID NO: 2760840 - RNA, 19 nt, Artificial Sequence
  Description of Artificial Sequence: Synthetic oligonucleotide
gggcccucuugggacucgg

SEQ ID NO: 2760841 - RNA, 19 nt, Artificial Sequence
  Description of Artificial Sequence: Synthetic oligonucleotide
gggcacguggacugcugaa

SEQ ID NO: 2760842 - RNA, 19 nt, Artificial Sequence
  Description of Artificial Sequence: Synthetic oligonucleotide
gcugcgggccugcuggucu

SEQ ID NO: 2760843 - RNA, 19 nt, Artificial Sequence
  Description of Artificial Sequence: Synthetic oligonucleotide
ccgaacuugcgcaggaaau

SEQ ID NO: 2760844 - RNA, 19 nt, Artificial Sequence
  Description of Artificial Sequence: Synthetic oligonucleotide
ggcccucuugggacucggg

SEQ ID NO: 2760845 - RNA, 19 nt, Artificial Sequence
  Description of Artificial Sequence: Synthetic oligonucleotide
gagcagcaguggcaggcuu

SEQ ID NO: 2760846 - RNA, 19 nt, Artificial Sequence
  Description of Artificial Sequence: Synthetic oligonucleotide
cguggcgggcaauggcggc

SEQ ID NO: 2760847 - RNA, 19 nt, Artificial Sequence
  Description of Artificial Sequence: Synthetic oligonucleotide
cguggacugcugaaggcaa

SEQ ID NO: 2760848 - RNA, 19 nt, Artificial Sequence
  Description of Artificial Sequence: Synthetic oligonucleotide
gcauaugucuggggcacgu

SEQ ID NO: 2760849 - RNA, 19 nt, Artificial Sequence
  Description of Artificial Sequence: Synthetic oligonucleotide
gcccagggucaguccuagg

SEQ ID NO: 2760850 - RNA, 19 nt, Artificial Sequence
  Description of Artificial Sequence: Synthetic oligonucleotide
gcccucacccgaguuacaa

SEQ ID NO: 2760851 - RNA, 19 nt, Artificial Sequence
  Description of Artificial Sequence: Synthetic oligonucleotide
caggccgugggagcuggaa

SEQ ID NO: 2760852 - RNA, 19 nt, Artificial Sequence
  Description of Artificial Sequence: Synthetic oligonucleotide
gguucucauagagguaauu

SEQ ID NO: 2760853 - RNA, 19 nt, Artificial Sequence
  Description of Artificial Sequence: Synthetic oligonucleotide
gccgugggagcuggaaguc

SEQ ID NO: 2760854 - RNA, 19 nt, Artificial Sequence
  Description of Artificial Sequence: Synthetic oligonucleotide
caggacuggucuccagcau

SEQ ID NO: 2760855 - RNA, 19 nt, Artificial Sequence
  Description of Artificial Sequence: Synthetic oligonucleotide
ggagccccauuggacagcu

SEQ ID NO: 2760856 - RNA, 19 nt, Artificial Sequence
  Description of Artificial Sequence: Synthetic oligonucleotide
gggucaguccuaggcagcu

SEQ ID NO: 2760857 - RNA, 19 nt, Artificial Sequence
  Description of Artificial Sequence: Synthetic oligonucleotide
cccuugucagagccgaacu

SEQ ID NO: 2760858 - RNA, 19 nt, Artificial Sequence
  Description of Artificial Sequence: Synthetic oligonucleotide
cggcggccagcuucaaaag

SEQ ID NO: 2760859 - RNA, 19 nt, Artificial Sequence
  Description of Artificial Sequence: Synthetic oligonucleotide
ccuaggcagcuuucuggaa

SEQ ID NO: 2760860 - RNA, 19 nt, Artificial Sequence
  Description of Artificial Sequence: Synthetic oligonucleotide
ccagauacuguuccaucuu

SEQ ID NO: 2760861 - RNA, 19 nt, Artificial Sequence
  Description of Artificial Sequence: Synthetic oligonucleotide
cccgcguggcgggcaaugg

SEQ ID NO: 2760862 - RNA, 19 nt, Artificial Sequence
  Description of Artificial Sequence: Synthetic oligonucleotide
aggcccagggucaguccua

SEQ ID NO: 2760863 - RNA, 19 nt, Artificial Sequence
  Description of Artificial Sequence: Synthetic oligonucleotide
cgcauaugucuggggcacg

SEQ ID NO: 2760864 - RNA, 19 nt, Artificial Sequence
  Description of Artificial Sequence: Synthetic oligonucleotide
cggccagcuucaaaagaga

SEQ ID NO: 2760865 - RNA, 19 nt, Artificial Sequence
  Description of Artificial Sequence: Synthetic oligonucleotide
ccaucuugugaggggcuga

SEQ ID NO: 2760866 - RNA, 19 nt, Artificial Sequence
  Description of Artificial Sequence: Synthetic oligonucleotide
gcuggucugcuuggacaca

SEQ ID NO: 2760867 - RNA, 19 nt, Artificial Sequence
  Description of Artificial Sequence: Synthetic oligonucleotide
gccaccaagagggcccucu

SEQ ID NO: 2760868 - RNA, 19 nt, Artificial Sequence
  Description of Artificial Sequence: Synthetic oligonucleotide
gguccucguuguuguggua

SEQ ID NO: 2760869 - RNA, 19 nt, Artificial Sequence
  Description of Artificial Sequence: Synthetic oligonucleotide
ggcgggcaauggcggcagc

SEQ ID NO: 2760870 - RNA, 19 nt, Artificial Sequence
  Description of Artificial Sequence: Synthetic oligonucleotide
cccggggccaccuccugaa

SEQ ID NO: 2760871 - RNA, 19 nt, Artificial Sequence
  Description of Artificial Sequence: Synthetic oligonucleotide
cccacuggcugcgggccug

SEQ ID NO: 2760872 - RNA, 19 nt, Artificial Sequence
  Description of Artificial Sequence: Synthetic oligonucleotide
gagccccauuggacagcuc

SEQ ID NO: 2760873 - RNA, 19 nt, Artificial Sequence
  Description of Artificial Sequence: Synthetic oligonucleotide
cagcaguggcaggcuuuga

SEQ ID NO: 2760874 - RNA, 19 nt, Artificial Sequence
  Description of Artificial Sequence: Synthetic oligonucleotide
ccuugucagagccgaacuu

SEQ ID NO: 2760875 - RNA, 19 nt, Artificial Sequence
  Description of Artificial Sequence: Synthetic oligonucleotide
ggucccgcguggcgggcaa

SEQ ID NO: 2760876 - RNA, 19 nt, Artificial Sequence
  Description of Artificial Sequence: Synthetic oligonucleotide
cagccacagcuccgcauau

SEQ ID NO: 2760877 - RNA, 19 nt, Artificial Sequence
  Description of Artificial Sequence: Synthetic oligonucleotide
cgcauacagaccagauacu

SEQ ID NO: 2760878 - RNA, 19 nt, Artificial Sequence
  Description of Artificial Sequence: Synthetic oligonucleotide
gccagcuguagcaggccgu

SEQ ID NO: 2760879 - RNA, 19 nt, Artificial Sequence
  Description of Artificial Sequence: Synthetic oligonucleotide
cgccggucccgcguggcgg

SEQ ID NO: 2760880 - RNA, 19 nt, Artificial Sequence
  Description of Artificial Sequence: Synthetic oligonucleotide
cuggggcacguggacugcu

SEQ ID NO: 2760881 - RNA, 19 nt, Artificial Sequence
  Description of Artificial Sequence: Synthetic oligonucleotide
ccaguucuggaacgccggu

SEQ ID NO: 2760882 - RNA, 19 nt, Artificial Sequence
  Description of Artificial Sequence: Synthetic oligonucleotide
ccacuggcugcgggccugc

SEQ ID NO: 2760883 - RNA, 19 nt, Artificial Sequence
  Description of Artificial Sequence: Synthetic oligonucleotide
gccugcuggucugcuugga

SEQ ID NO: 2760884 - RNA, 19 nt, Artificial Sequence
  Description of Artificial Sequence: Synthetic oligonucleotide
ggcccucacccgaguuaca

SEQ ID NO: 2760885 - RNA, 19 nt, Artificial Sequence
  Description of Artificial Sequence: Synthetic oligonucleotide
caacggcggccagcuucaa

SEQ ID NO: 2760886 - RNA, 19 nt, Artificial Sequence
  Description of Artificial Sequence: Synthetic oligonucleotide
gggacucgggagccccauu

SEQ ID NO: 2760887 - RNA, 19 nt, Artificial Sequence
  Description of Artificial Sequence: Synthetic oligonucleotide
ccucguuguugugguagau

SEQ ID NO: 2760888 - RNA, 19 nt, Artificial Sequence
  Description of Artificial Sequence: Synthetic oligonucleotide
ccgugggagcuggaagucu

SEQ ID NO: 2760889 - RNA, 19 nt, Artificial Sequence
  Description of Artificial Sequence: Synthetic oligonucleotide
ggccaccaagagggcccuc

SEQ ID NO: 2760890 - RNA, 19 nt, Artificial Sequence
  Description of Artificial Sequence: Synthetic oligonucleotide
ccggucccgcguggcgggc

SEQ ID NO: 2760891 - RNA, 19 nt, Artificial Sequence
  Description of Artificial Sequence: Synthetic oligonucleotide
gcaggccgugggagcugga

SEQ ID NO: 2760892 - RNA, 19 nt, Artificial Sequence
  Description of Artificial Sequence: Synthetic oligonucleotide
cacuggcugcgggccugcu

SEQ ID NO: 2760893 - RNA, 19 nt, Artificial Sequence
  Description of Artificial Sequence: Synthetic oligonucleotide
cgcccuugucagagccgaa

SEQ ID NO: 2760894 - RNA, 19 nt, Artificial Sequence
  Description of Artificial Sequence: Synthetic oligonucleotide
gucccgcguggcgggcaau

SEQ ID NO: 2760895 - RNA, 19 nt, Artificial Sequence
  Description of Artificial Sequence: Synthetic oligonucleotide
cggucccgcguggcgggca

SEQ ID NO: 2760896 - RNA, 19 nt, Artificial Sequence
  Description of Artificial Sequence: Synthetic oligonucleotide
cgggccugcuggucugcuu

SEQ ID NO: 2760897 - RNA, 19 nt, Artificial Sequence
  Description of Artificial Sequence: Synthetic oligonucleotide
aaucguagcagcuuaaaac

SEQ ID NO: 2760898 - RNA, 19 nt, Artificial Sequence
  Description of Artificial Sequence: Synthetic oligonucleotide
aaaugaauaauuuguuuuc

SEQ ID NO: 2760899 - RNA, 19 nt, Artificial Sequence
  Description of Artificial Sequence: Synthetic oligonucleotide
uauugcaugaccaacagug

SEQ ID NO: 2760900 - RNA, 19 nt, Artificial Sequence
  Description of Artificial Sequence: Synthetic oligonucleotide
ugugugaaaacccaggucc

SEQ ID NO: 2760901 - RNA, 19 nt, Artificial Sequence
  Description of Artificial Sequence: Synthetic oligonucleotide
cauucuaggggcuugaucg

SEQ ID NO: 2760902 - RNA, 19 nt, Artificial Sequence
  Description of Artificial Sequence: Synthetic oligonucleotide
aaugaauaauuuguuuucc

SEQ ID NO: 2760903 - RNA, 19 nt, Artificial Sequence
  Description of Artificial Sequence: Synthetic oligonucleotide
uuuguuuuccgguaaaucc

SEQ ID NO: 2760904 - RNA, 19 nt, Artificial Sequence
  Description of Artificial Sequence: Synthetic oligonucleotide
ugaauaauuuguuuuccgg

SEQ ID NO: 2760905 - RNA, 19 nt, Artificial Sequence
  Description of Artificial Sequence: Synthetic oligonucleotide
ugauuaaaugaauaauuug

SEQ ID NO: 2760906 - RNA, 19 nt, Artificial Sequence
  Description of Artificial Sequence: Synthetic oligonucleotide
uguaccaagaggaaugucu

SEQ ID NO: 2760907 - RNA, 19 nt, Artificial Sequence
  Description of Artificial Sequence: Synthetic oligonucleotide
aauaauuuguuuuccggua

SEQ ID NO: 2760908 - RNA, 19 nt, Artificial Sequence
  Description of Artificial Sequence: Synthetic oligonucleotide
ugugcuggugacaucaucc

SEQ ID NO: 2760909 - RNA, 19 nt, Artificial Sequence
  Description of Artificial Sequence: Synthetic oligonucleotide
aaaacccagguccaaagga

SEQ ID NO: 2760910 - RNA, 19 nt, Artificial Sequence
  Description of Artificial Sequence: Synthetic oligonucleotide
augaauaauuuguuuuccg

SEQ ID NO: 2760911 - RNA, 19 nt, Artificial Sequence
  Description of Artificial Sequence: Synthetic oligonucleotide
uaaauccauacauucucgg

SEQ ID NO: 2760912 - RNA, 19 nt, Artificial Sequence
  Description of Artificial Sequence: Synthetic oligonucleotide
gauuaaaugaauaauuugu

SEQ ID NO: 2760913 - RNA, 19 nt, Artificial Sequence
  Description of Artificial Sequence: Synthetic oligonucleotide
acgguucccaccucgaugc

SEQ ID NO: 2760914 - RNA, 19 nt, Artificial Sequence
  Description of Artificial Sequence: Synthetic oligonucleotide
ugcaugaccaacagugagg

SEQ ID NO: 2760915 - RNA, 19 nt, Artificial Sequence
  Description of Artificial Sequence: Synthetic oligonucleotide
aucguagcagcuuaaaaca

SEQ ID NO: 2760916 - RNA, 19 nt, Artificial Sequence
  Description of Artificial Sequence: Synthetic oligonucleotide
ucucauguugacaaggauc

SEQ ID NO: 2760917 - RNA, 19 nt, Artificial Sequence
  Description of Artificial Sequence: Synthetic oligonucleotide
aauccauacauucucgguu

SEQ ID NO: 2760918 - RNA, 19 nt, Artificial Sequence
  Description of Artificial Sequence: Synthetic oligonucleotide
uuaaaugaauaauuuguuu

SEQ ID NO: 2760919 - RNA, 19 nt, Artificial Sequence
  Description of Artificial Sequence: Synthetic oligonucleotide
uggauuggucaucagcgcg

SEQ ID NO: 2760920 - RNA, 19 nt, Artificial Sequence
  Description of Artificial Sequence: Synthetic oligonucleotide
uuguuuuccgguaaaucca

SEQ ID NO: 2760921 - RNA, 19 nt, Artificial Sequence
  Description of Artificial Sequence: Synthetic oligonucleotide
uuguagauugugcugguga

SEQ ID NO: 2760922 - RNA, 19 nt, Artificial Sequence
  Description of Artificial Sequence: Synthetic oligonucleotide
aaauccauacauucucggu

SEQ ID NO: 2760923 - RNA, 19 nt, Artificial Sequence
  Description of Artificial Sequence: Synthetic oligonucleotide
gaaucucauguugacaagg

SEQ ID NO: 2760924 - RNA, 19 nt, Artificial Sequence
  Description of Artificial Sequence: Synthetic oligonucleotide
agcagcuuaaaacaucaug

SEQ ID NO: 2760925 - RNA, 19 nt, Artificial Sequence
  Description of Artificial Sequence: Synthetic oligonucleotide
aaugcuagucccauucuag

SEQ ID NO: 2760926 - RNA, 19 nt, Artificial Sequence
  Description of Artificial Sequence: Synthetic oligonucleotide
ugaaaacccagguccaaag

SEQ ID NO: 2760927 - RNA, 19 nt, Artificial Sequence
  Description of Artificial Sequence: Synthetic oligonucleotide
gcuaaauccacccaugccc

SEQ ID NO: 2760928 - RNA, 19 nt, Artificial Sequence
  Description of Artificial Sequence: Synthetic oligonucleotide
acaccugcugauuaaauga

SEQ ID NO: 2760929 - RNA, 19 nt, Artificial Sequence
  Description of Artificial Sequence: Synthetic oligonucleotide
aaacaucauguuuccuggg

SEQ ID NO: 2760930 - RNA, 19 nt, Artificial Sequence
  Description of Artificial Sequence: Synthetic oligonucleotide
gaaaacccagguccaaagg

SEQ ID NO: 2760931 - RNA, 19 nt, Artificial Sequence
  Description of Artificial Sequence: Synthetic oligonucleotide
uucuccuauugcaugacca

SEQ ID NO: 2760932 - RNA, 19 nt, Artificial Sequence
  Description of Artificial Sequence: Synthetic oligonucleotide
uugcaugaccaacagugag

SEQ ID NO: 2760933 - RNA, 19 nt, Artificial Sequence
  Description of Artificial Sequence: Synthetic oligonucleotide
aaacccagguccaaaggac

SEQ ID NO: 2760934 - RNA, 19 nt, Artificial Sequence
  Description of Artificial Sequence: Synthetic oligonucleotide
uccuauugcaugaccaaca

SEQ ID NO: 2760935 - RNA, 19 nt, Artificial Sequence
  Description of Artificial Sequence: Synthetic oligonucleotide
ugcuagucccauucuaggg

SEQ ID NO: 2760936 - RNA, 19 nt, Artificial Sequence
  Description of Artificial Sequence: Synthetic oligonucleotide
gaugacgguucccaccucg

SEQ ID NO: 2760937 - RNA, 19 nt, Artificial Sequence
  Description of Artificial Sequence: Synthetic oligonucleotide
gauggagauguaccaagag

SEQ ID NO: 2760938 - RNA, 19 nt, Artificial Sequence
  Description of Artificial Sequence: Synthetic oligonucleotide
uggauggagauguaccaag

SEQ ID NO: 2760939 - RNA, 19 nt, Artificial Sequence
  Description of Artificial Sequence: Synthetic oligonucleotide
auuuguuuuccgguaaauc

SEQ ID NO: 2760940 - RNA, 19 nt, Artificial Sequence
  Description of Artificial Sequence: Synthetic oligonucleotide
caucauccggugaugacgg

SEQ ID NO: 2760941 - RNA, 19 nt, Artificial Sequence
  Description of Artificial Sequence: Synthetic oligonucleotide
aggaucggcacauccaauc

SEQ ID NO: 2760942 - RNA, 19 nt, Artificial Sequence
  Description of Artificial Sequence: Synthetic oligonucleotide
aagaggaaugucuggaguu

SEQ ID NO: 2760943 - RNA, 19 nt, Artificial Sequence
  Description of Artificial Sequence: Synthetic oligonucleotide
uuccgguaaauccauacau

SEQ ID NO: 2760944 - RNA, 19 nt, Artificial Sequence
  Description of Artificial Sequence: Synthetic oligonucleotide
caucagagcagcucgcagg

SEQ ID NO: 2760945 - RNA, 19 nt, Artificial Sequence
  Description of Artificial Sequence: Synthetic oligonucleotide
guaaauccauacauucucg

SEQ ID NO: 2760946 - RNA, 19 nt, Artificial Sequence
  Description of Artificial Sequence: Synthetic oligonucleotide
uuuccgguaaauccauaca

SEQ ID NO: 2760947 - RNA, 19 nt, Artificial Sequence
  Description of Artificial Sequence: Synthetic oligonucleotide
augugugaaaacccagguc

SEQ ID NO: 2760948 - RNA, 19 nt, Artificial Sequence
  Description of Artificial Sequence: Synthetic oligonucleotide
auucucgguucccuauucc

SEQ ID NO: 2760949 - RNA, 19 nt, Artificial Sequence
  Description of Artificial Sequence: Synthetic oligonucleotide
gacaaggaucggcacaucc

SEQ ID NO: 2760950 - RNA, 19 nt, Artificial Sequence
  Description of Artificial Sequence: Synthetic oligonucleotide
auucuaggggcuugaucgc

SEQ ID NO: 2760951 - RNA, 19 nt, Artificial Sequence
  Description of Artificial Sequence: Synthetic oligonucleotide
ugccagguaaugcuagucc

SEQ ID NO: 2760952 - RNA, 19 nt, Artificial Sequence
  Description of Artificial Sequence: Synthetic oligonucleotide
uguagauugugcuggugac

SEQ ID NO: 2760953 - RNA, 19 nt, Artificial Sequence
  Description of Artificial Sequence: Synthetic oligonucleotide
agauguaccaagaggaaug

SEQ ID NO: 2760954 - RNA, 19 nt, Artificial Sequence
  Description of Artificial Sequence: Synthetic oligonucleotide
gaauaauuuguuuuccggu

SEQ ID NO: 2760955 - RNA, 19 nt, Artificial Sequence
  Description of Artificial Sequence: Synthetic oligonucleotide
uggaguuccuacuggcccg

SEQ ID NO: 2760956 - RNA, 19 nt, Artificial Sequence
  Description of Artificial Sequence: Synthetic oligonucleotide
gauugugcuggugacauca

SEQ ID NO: 2760957 - RNA, 19 nt, Artificial Sequence
  Description of Artificial Sequence: Synthetic oligonucleotide
aauccacccaugcccaaug

SEQ ID NO: 2760958 - RNA, 19 nt, Artificial Sequence
  Description of Artificial Sequence: Synthetic oligonucleotide
augcuagucccauucuagg

SEQ ID NO: 2760959 - RNA, 19 nt, Artificial Sequence
  Description of Artificial Sequence: Synthetic oligonucleotide
cauguugacaaggaucggc

SEQ ID NO: 2760960 - RNA, 19 nt, Artificial Sequence
  Description of Artificial Sequence: Synthetic oligonucleotide
agugaggacuccuggaacu

SEQ ID NO: 2760961 - RNA, 19 nt, Artificial Sequence
  Description of Artificial Sequence: Synthetic oligonucleotide
cuagucccauucuaggggc

SEQ ID NO: 2760962 - RNA, 19 nt, Artificial Sequence
  Description of Artificial Sequence: Synthetic oligonucleotide
uccuuggcuaaauccaccc

SEQ ID NO: 2760963 - RNA, 19 nt, Artificial Sequence
  Description of Artificial Sequence: Synthetic oligonucleotide
uuggcuaaauccacccaug

SEQ ID NO: 2760964 - RNA, 19 nt, Artificial Sequence
  Description of Artificial Sequence: Synthetic oligonucleotide
ucucgguucccuauucccc

SEQ ID NO: 2760965 - RNA, 19 nt, Artificial Sequence
  Description of Artificial Sequence: Synthetic oligonucleotide
ugcccaauggccacagcag

SEQ ID NO: 2760966 - RNA, 19 nt, Artificial Sequence
  Description of Artificial Sequence: Synthetic oligonucleotide
gcuggauuggucaucagcg

SEQ ID NO: 2760967 - RNA, 19 nt, Artificial Sequence
  Description of Artificial Sequence: Synthetic oligonucleotide
uucucgguucccuauuccc

SEQ ID NO: 2760968 - RNA, 19 nt, Artificial Sequence
  Description of Artificial Sequence: Synthetic oligonucleotide
gcuuaaaacaucauguuuc

SEQ ID NO: 2760969 - RNA, 19 nt, Artificial Sequence
  Description of Artificial Sequence: Synthetic oligonucleotide
agcuuaaaacaucauguuu

SEQ ID NO: 2760970 - RNA, 19 nt, Artificial Sequence
  Description of Artificial Sequence: Synthetic oligonucleotide
aucauguuuccuggguugc

SEQ ID NO: 2760971 - RNA, 19 nt, Artificial Sequence
  Description of Artificial Sequence: Synthetic oligonucleotide
ugaccaacagugaggacuc

SEQ ID NO: 2760972 - RNA, 19 nt, Artificial Sequence
  Description of Artificial Sequence: Synthetic oligonucleotide
uggguugccagguccuugg

SEQ ID NO: 2760973 - RNA, 19 nt, Artificial Sequence
  Description of Artificial Sequence: Synthetic oligonucleotide
uggcuaaauccacccaugc

SEQ ID NO: 2760974 - RNA, 19 nt, Artificial Sequence
  Description of Artificial Sequence: Synthetic oligonucleotide
ugcugauuaaaugaauaau

SEQ ID NO: 2760975 - RNA, 19 nt, Artificial Sequence
  Description of Artificial Sequence: Synthetic oligonucleotide
uggagaaaaggcugguggu

SEQ ID NO: 2760976 - RNA, 19 nt, Artificial Sequence
  Description of Artificial Sequence: Synthetic oligonucleotide
gcuagucccauucuagggg

SEQ ID NO: 2760977 - RNA, 19 nt, Artificial Sequence
  Description of Artificial Sequence: Synthetic oligonucleotide
aaucucauguugacaagga

SEQ ID NO: 2760978 - RNA, 19 nt, Artificial Sequence
  Description of Artificial Sequence: Synthetic oligonucleotide
ucucauuggguuguggccu

SEQ ID NO: 2760979 - RNA, 19 nt, Artificial Sequence
  Description of Artificial Sequence: Synthetic oligonucleotide
uguuuuccgguaaauccau

SEQ ID NO: 2760980 - RNA, 19 nt, Artificial Sequence
  Description of Artificial Sequence: Synthetic oligonucleotide
gcauuguagauugugcugg

SEQ ID NO: 2760981 - RNA, 19 nt, Artificial Sequence
  Description of Artificial Sequence: Synthetic oligonucleotide
uaaugcuagucccauucua

SEQ ID NO: 2760982 - RNA, 19 nt, Artificial Sequence
  Description of Artificial Sequence: Synthetic oligonucleotide
agaaaaggcugguggucuc

SEQ ID NO: 2760983 - RNA, 19 nt, Artificial Sequence
  Description of Artificial Sequence: Synthetic oligonucleotide
aaacacaccugcugauuaa

SEQ ID NO: 2760984 - RNA, 19 nt, Artificial Sequence
  Description of Artificial Sequence: Synthetic oligonucleotide
gucucauuggguuguggcc

SEQ ID NO: 2760985 - RNA, 19 nt, Artificial Sequence
  Description of Artificial Sequence: Synthetic oligonucleotide
ucgcucuucuccuauugca

SEQ ID NO: 2760986 - RNA, 19 nt, Artificial Sequence
  Description of Artificial Sequence: Synthetic oligonucleotide
uguuuccuggguugccagg

SEQ ID NO: 2760987 - RNA, 19 nt, Artificial Sequence
  Description of Artificial Sequence: Synthetic oligonucleotide
uagauugugcuggugacau

SEQ ID NO: 2760988 - RNA, 19 nt, Artificial Sequence
  Description of Artificial Sequence: Synthetic oligonucleotide
caccucgaugccuugcugg

SEQ ID NO: 2760989 - RNA, 19 nt, Artificial Sequence
  Description of Artificial Sequence: Synthetic oligonucleotide
guagcagcuuaaaacauca

SEQ ID NO: 2760990 - RNA, 19 nt, Artificial Sequence
  Description of Artificial Sequence: Synthetic oligonucleotide
gacgguucccaccucgaug

SEQ ID NO: 2760991 - RNA, 19 nt, Artificial Sequence
  Description of Artificial Sequence: Synthetic oligonucleotide
uuccuggguugccaggucc

SEQ ID NO: 2760992 - RNA, 19 nt, Artificial Sequence
  Description of Artificial Sequence: Synthetic oligonucleotide
ucuccuauugcaugaccaa

SEQ ID NO: 2760993 - RNA, 19 nt, Artificial Sequence
  Description of Artificial Sequence: Synthetic oligonucleotide
cuaaauccacccaugccca

SEQ ID NO: 2760994 - RNA, 19 nt, Artificial Sequence
  Description of Artificial Sequence: Synthetic oligonucleotide
guuccuacuggcccggggc

SEQ ID NO: 2760995 - RNA, 19 nt, Artificial Sequence
  Description of Artificial Sequence: Synthetic oligonucleotide
guugacaaggaucggcaca

SEQ ID NO: 2760996 - RNA, 19 nt, Artificial Sequence
  Description of Artificial Sequence: Synthetic oligonucleotide
gguccaaaggacccugugg

SEQ ID NO: 2760997 - RNA, 19 nt, Artificial Sequence
  Description of Artificial Sequence: Synthetic oligonucleotide
gaugccuugcuggagaaaa

SEQ ID NO: 2760998 - RNA, 19 nt, Artificial Sequence
  Description of Artificial Sequence: Synthetic oligonucleotide
cauggauggagauguacca

SEQ ID NO: 2760999 - RNA, 19 nt, Artificial Sequence
  Description of Artificial Sequence: Synthetic oligonucleotide
guaccaagaggaaugucug

SEQ ID NO: 2761000 - RNA, 19 nt, Artificial Sequence
  Description of Artificial Sequence: Synthetic oligonucleotide
uccgguaaauccauacauu

SEQ ID NO: 2761001 - RNA, 19 nt, Artificial Sequence
  Description of Artificial Sequence: Synthetic oligonucleotide
acagugaggacuccuggaa

SEQ ID NO: 2761002 - RNA, 19 nt, Artificial Sequence
  Description of Artificial Sequence: Synthetic oligonucleotide
cacauccaaucguagcagc

SEQ ID NO: 2761003 - RNA, 19 nt, Artificial Sequence
  Description of Artificial Sequence: Synthetic oligonucleotide
uguugacaaggaucggcac

SEQ ID NO: 2761004 - RNA, 19 nt, Artificial Sequence
  Description of Artificial Sequence: Synthetic oligonucleotide
cuggauuggucaucagcgc

SEQ ID NO: 2761005 - RNA, 19 nt, Artificial Sequence
  Description of Artificial Sequence: Synthetic oligonucleotide
ggaucggcacauccaaucg

SEQ ID NO: 2761006 - RNA, 19 nt, Artificial Sequence
  Description of Artificial Sequence: Synthetic oligonucleotide
accaagaggaaugucugga

SEQ ID NO: 2761007 - RNA, 19 nt, Artificial Sequence
  Description of Artificial Sequence: Synthetic oligonucleotide
ucggcacauccaaucguag

SEQ ID NO: 2761008 - RNA, 19 nt, Artificial Sequence
  Description of Artificial Sequence: Synthetic oligonucleotide
ccugcaugugugaaaaccc

SEQ ID NO: 2761009 - RNA, 19 nt, Artificial Sequence
  Description of Artificial Sequence: Synthetic oligonucleotide
uacauucucgguucccuau

SEQ ID NO: 2761010 - RNA, 19 nt, Artificial Sequence
  Description of Artificial Sequence: Synthetic oligonucleotide
cauccggugaugacgguuc

SEQ ID NO: 2761011 - RNA, 19 nt, Artificial Sequence
  Description of Artificial Sequence: Synthetic oligonucleotide
gucuggaguuccuacuggc

SEQ ID NO: 2761012 - RNA, 19 nt, Artificial Sequence
  Description of Artificial Sequence: Synthetic oligonucleotide
cuugaucgcucaucauccc

SEQ ID NO: 2761013 - RNA, 19 nt, Artificial Sequence
  Description of Artificial Sequence: Synthetic oligonucleotide
cugauuaaaugaauaauuu

SEQ ID NO: 2761014 - RNA, 19 nt, Artificial Sequence
  Description of Artificial Sequence: Synthetic oligonucleotide
auguuuccuggguugccag

SEQ ID NO: 2761015 - RNA, 19 nt, Artificial Sequence
  Description of Artificial Sequence: Synthetic oligonucleotide
gacaucauccggugaugac

SEQ ID NO: 2761016 - RNA, 19 nt, Artificial Sequence
  Description of Artificial Sequence: Synthetic oligonucleotide
cuucuccuauugcaugacc

SEQ ID NO: 2761017 - RNA, 19 nt, Artificial Sequence
  Description of Artificial Sequence: Synthetic oligonucleotide
cugcugauuaaaugaauaa

SEQ ID NO: 2761018 - RNA, 19 nt, Artificial Sequence
  Description of Artificial Sequence: Synthetic oligonucleotide
uuccuacuggcccggggcc

SEQ ID NO: 2761019 - RNA, 19 nt, Artificial Sequence
  Description of Artificial Sequence: Synthetic oligonucleotide
auuggucaucagcgcggcc

SEQ ID NO: 2761020 - RNA, 19 nt, Artificial Sequence
  Description of Artificial Sequence: Synthetic oligonucleotide
ugacaucauccggugauga

SEQ ID NO: 2761021 - RNA, 19 nt, Artificial Sequence
  Description of Artificial Sequence: Synthetic oligonucleotide
ggugaugacgguucccacc

SEQ ID NO: 2761022 - RNA, 19 nt, Artificial Sequence
  Description of Artificial Sequence: Synthetic oligonucleotide
ggcacauccaaucguagca

SEQ ID NO: 2761023 - RNA, 19 nt, Artificial Sequence
  Description of Artificial Sequence: Synthetic oligonucleotide
auguugacaaggaucggca

SEQ ID NO: 2761024 - RNA, 19 nt, Artificial Sequence
  Description of Artificial Sequence: Synthetic oligonucleotide
auccggugaugacgguucc

SEQ ID NO: 2761025 - RNA, 19 nt, Artificial Sequence
  Description of Artificial Sequence: Synthetic oligonucleotide
ucauguugacaaggaucgg

SEQ ID NO: 2761026 - RNA, 19 nt, Artificial Sequence
  Description of Artificial Sequence: Synthetic oligonucleotide
aacacaccugcugauuaaa

SEQ ID NO: 2761027 - RNA, 19 nt, Artificial Sequence
  Description of Artificial Sequence: Synthetic oligonucleotide
aucucauguugacaaggau

SEQ ID NO: 2761028 - RNA, 19 nt, Artificial Sequence
  Description of Artificial Sequence: Synthetic oligonucleotide
ggcuugaucgcucaucauc

SEQ ID NO: 2761029 - RNA, 19 nt, Artificial Sequence
  Description of Artificial Sequence: Synthetic oligonucleotide
augccagguaaugcuaguc

SEQ ID NO: 2761030 - RNA, 19 nt, Artificial Sequence
  Description of Artificial Sequence: Synthetic oligonucleotide
ucuaggggcuugaucgcuc

SEQ ID NO: 2761031 - RNA, 19 nt, Artificial Sequence
  Description of Artificial Sequence: Synthetic oligonucleotide
uggccuggcauggauggag

SEQ ID NO: 2761032 - RNA, 19 nt, Artificial Sequence
  Description of Artificial Sequence: Synthetic oligonucleotide
ggauuggucaucagcgcgg

SEQ ID NO: 2761033 - RNA, 19 nt, Artificial Sequence
  Description of Artificial Sequence: Synthetic oligonucleotide
ucaucauccccugcaugug

SEQ ID NO: 2761034 - RNA, 19 nt, Artificial Sequence
  Description of Artificial Sequence: Synthetic oligonucleotide
auccacccaugcccaaugg

SEQ ID NO: 2761035 - RNA, 19 nt, Artificial Sequence
  Description of Artificial Sequence: Synthetic oligonucleotide
gccagguaaugcuaguccc

SEQ ID NO: 2761036 - RNA, 19 nt, Artificial Sequence
  Description of Artificial Sequence: Synthetic oligonucleotide
gcagcuuaaaacaucaugu

SEQ ID NO: 2761037 - RNA, 19 nt, Artificial Sequence
  Description of Artificial Sequence: Synthetic oligonucleotide
auccaaucguagcagcuua

SEQ ID NO: 2761038 - RNA, 19 nt, Artificial Sequence
  Description of Artificial Sequence: Synthetic oligonucleotide
caucagcgcggccuggccg

SEQ ID NO: 2761039 - RNA, 19 nt, Artificial Sequence
  Description of Artificial Sequence: Synthetic oligonucleotide
ggcuaaauccacccaugcc

SEQ ID NO: 2761040 - RNA, 19 nt, Artificial Sequence
  Description of Artificial Sequence: Synthetic oligonucleotide
cucuucuccuauugcauga

SEQ ID NO: 2761041 - RNA, 19 nt, Artificial Sequence
  Description of Artificial Sequence: Synthetic oligonucleotide
ucaucagcgcggccuggcc

SEQ ID NO: 2761042 - RNA, 19 nt, Artificial Sequence
  Description of Artificial Sequence: Synthetic oligonucleotide
ggaaucucauguugacaag

SEQ ID NO: 2761043 - RNA, 19 nt, Artificial Sequence
  Description of Artificial Sequence: Synthetic oligonucleotide
uccaaucguagcagcuuaa

SEQ ID NO: 2761044 - RNA, 19 nt, Artificial Sequence
  Description of Artificial Sequence: Synthetic oligonucleotide
ccacccaugcccaauggcc

SEQ ID NO: 2761045 - RNA, 19 nt, Artificial Sequence
  Description of Artificial Sequence: Synthetic oligonucleotide
acaaggaucggcacaucca

SEQ ID NO: 2761046 - RNA, 19 nt, Artificial Sequence
  Description of Artificial Sequence: Synthetic oligonucleotide
agguccaaaggacccugug

SEQ ID NO: 2761047 - RNA, 19 nt, Artificial Sequence
  Description of Artificial Sequence: Synthetic oligonucleotide
gucgcucuucuccuauugc

SEQ ID NO: 2761048 - RNA, 19 nt, Artificial Sequence
  Description of Artificial Sequence: Synthetic oligonucleotide
aaauccacccaugcccaau

SEQ ID NO: 2761049 - RNA, 19 nt, Artificial Sequence
  Description of Artificial Sequence: Synthetic oligonucleotide
cucaucauccccugcaugu

SEQ ID NO: 2761050 - RNA, 19 nt, Artificial Sequence
  Description of Artificial Sequence: Synthetic oligonucleotide
auuggguuguggccuggca

SEQ ID NO: 2761051 - RNA, 19 nt, Artificial Sequence
  Description of Artificial Sequence: Synthetic oligonucleotide
cugcaugugugaaaaccca

SEQ ID NO: 2761052 - RNA, 19 nt, Artificial Sequence
  Description of Artificial Sequence: Synthetic oligonucleotide
cauucucgguucccuauuc

SEQ ID NO: 2761053 - RNA, 19 nt, Artificial Sequence
  Description of Artificial Sequence: Synthetic oligonucleotide
ugugaaaacccagguccaa

SEQ ID NO: 2761054 - RNA, 19 nt, Artificial Sequence
  Description of Artificial Sequence: Synthetic oligonucleotide
cagugaggacuccuggaac

SEQ ID NO: 2761055 - RNA, 19 nt, Artificial Sequence
  Description of Artificial Sequence: Synthetic oligonucleotide
auuguagauugugcuggug

SEQ ID NO: 2761056 - RNA, 19 nt, Artificial Sequence
  Description of Artificial Sequence: Synthetic oligonucleotide
cuccuauugcaugaccaac

SEQ ID NO: 2761057 - RNA, 19 nt, Artificial Sequence
  Description of Artificial Sequence: Synthetic oligonucleotide
ucuucuccuauugcaugac

SEQ ID NO: 2761058 - RNA, 19 nt, Artificial Sequence
  Description of Artificial Sequence: Synthetic oligonucleotide
uccuggguugccagguccu

SEQ ID NO: 2761059 - RNA, 19 nt, Artificial Sequence
  Description of Artificial Sequence: Synthetic oligonucleotide
caaggaucggcacauccaa

SEQ ID NO: 2761060 - RNA, 19 nt, Artificial Sequence
  Description of Artificial Sequence: Synthetic oligonucleotide
accucgaugccuugcugga

SEQ ID NO: 2761061 - RNA, 19 nt, Artificial Sequence
  Description of Artificial Sequence: Synthetic oligonucleotide
uccaucagagcagcucgca

SEQ ID NO: 2761062 - RNA, 19 nt, Artificial Sequence
  Description of Artificial Sequence: Synthetic oligonucleotide
uggugacaucauccgguga

SEQ ID NO: 2761063 - RNA, 19 nt, Artificial Sequence
  Description of Artificial Sequence: Synthetic oligonucleotide
aggggcuugaucgcucauc

SEQ ID NO: 2761064 - RNA, 19 nt, Artificial Sequence
  Description of Artificial Sequence: Synthetic oligonucleotide
gcagcagcuggauugguca

SEQ ID NO: 2761065 - RNA, 19 nt, Artificial Sequence
  Description of Artificial Sequence: Synthetic oligonucleotide
cucauuggguuguggccug

SEQ ID NO: 2761066 - RNA, 19 nt, Artificial Sequence
  Description of Artificial Sequence: Synthetic oligonucleotide
gagaaaaggcugguggucu

SEQ ID NO: 2761067 - RNA, 19 nt, Artificial Sequence
  Description of Artificial Sequence: Synthetic oligonucleotide
aaaaggcugguggucucau

SEQ ID NO: 2761068 - RNA, 19 nt, Artificial Sequence
  Description of Artificial Sequence: Synthetic oligonucleotide
acauccaaucguagcagcu

SEQ ID NO: 2761069 - RNA, 19 nt, Artificial Sequence
  Description of Artificial Sequence: Synthetic oligonucleotide
auguaccaagaggaauguc

SEQ ID NO: 2761070 - RNA, 19 nt, Artificial Sequence
  Description of Artificial Sequence: Synthetic oligonucleotide
uucuaggggcuugaucgcu

SEQ ID NO: 2761071 - RNA, 19 nt, Artificial Sequence
  Description of Artificial Sequence: Synthetic oligonucleotide
cuccaucagagcagcucgc

SEQ ID NO: 2761072 - RNA, 19 nt, Artificial Sequence
  Description of Artificial Sequence: Synthetic oligonucleotide
agcagcuggauuggucauc

SEQ ID NO: 2761073 - RNA, 19 nt, Artificial Sequence
  Description of Artificial Sequence: Synthetic oligonucleotide
auacauucucgguucccua

SEQ ID NO: 2761074 - RNA, 19 nt, Artificial Sequence
  Description of Artificial Sequence: Synthetic oligonucleotide
cucgaugccuugcuggaga

SEQ ID NO: 2761075 - RNA, 19 nt, Artificial Sequence
  Description of Artificial Sequence: Synthetic oligonucleotide
caugugugaaaacccaggu

SEQ ID NO: 2761076 - RNA, 19 nt, Artificial Sequence
  Description of Artificial Sequence: Synthetic oligonucleotide
ggccgggcauuguagauug

SEQ ID NO: 2761077 - RNA, 19 nt, Artificial Sequence
  Description of Artificial Sequence: Synthetic oligonucleotide
uaaauccacccaugcccaa

SEQ ID NO: 2761078 - RNA, 19 nt, Artificial Sequence
  Description of Artificial Sequence: Synthetic oligonucleotide
gaaaaggcugguggucuca

SEQ ID NO: 2761079 - RNA, 19 nt, Artificial Sequence
  Description of Artificial Sequence: Synthetic oligonucleotide
acauucucgguucccuauu

SEQ ID NO: 2761080 - RNA, 19 nt, Artificial Sequence
  Description of Artificial Sequence: Synthetic oligonucleotide
uagucccauucuaggggcu

SEQ ID NO: 2761081 - RNA, 19 nt, Artificial Sequence
  Description of Artificial Sequence: Synthetic oligonucleotide
cuuggcuaaauccacccau

SEQ ID NO: 2761082 - RNA, 19 nt, Artificial Sequence
  Description of Artificial Sequence: Synthetic oligonucleotide
guagauugugcuggugaca

SEQ ID NO: 2761083 - RNA, 19 nt, Artificial Sequence
  Description of Artificial Sequence: Synthetic oligonucleotide
ucgaugccuugcuggagaa

SEQ ID NO: 2761084 - RNA, 19 nt, Artificial Sequence
  Description of Artificial Sequence: Synthetic oligonucleotide
ggccuggaaucucauguug

SEQ ID NO: 2761085 - RNA, 19 nt, Artificial Sequence
  Description of Artificial Sequence: Synthetic oligonucleotide
auggauggagauguaccaa

SEQ ID NO: 2761086 - RNA, 19 nt, Artificial Sequence
  Description of Artificial Sequence: Synthetic oligonucleotide
gaucggcacauccaaucgu

SEQ ID NO: 2761087 - RNA, 19 nt, Artificial Sequence
  Description of Artificial Sequence: Synthetic oligonucleotide
uagcagcuuaaaacaucau

SEQ ID NO: 2761088 - RNA, 19 nt, Artificial Sequence
  Description of Artificial Sequence: Synthetic oligonucleotide
ggucgcucuucuccuauug

SEQ ID NO: 2761089 - RNA, 19 nt, Artificial Sequence
  Description of Artificial Sequence: Synthetic oligonucleotide
aucauccccugcaugugug

SEQ ID NO: 2761090 - RNA, 19 nt, Artificial Sequence
  Description of Artificial Sequence: Synthetic oligonucleotide
ugacgguucccaccucgau

SEQ ID NO: 2761091 - RNA, 19 nt, Artificial Sequence
  Description of Artificial Sequence: Synthetic oligonucleotide
gcaugaccaacagugagga

SEQ ID NO: 2761092 - RNA, 19 nt, Artificial Sequence
  Description of Artificial Sequence: Synthetic oligonucleotide
ucauccggugaugacgguu

SEQ ID NO: 2761093 - RNA, 19 nt, Artificial Sequence
  Description of Artificial Sequence: Synthetic oligonucleotide
guccuuggcuaaauccacc

SEQ ID NO: 2761094 - RNA, 19 nt, Artificial Sequence
  Description of Artificial Sequence: Synthetic oligonucleotide
gagauguaccaagaggaau

SEQ ID NO: 2761095 - RNA, 19 nt, Artificial Sequence
  Description of Artificial Sequence: Synthetic oligonucleotide
caagaggaaugucuggagu

SEQ ID NO: 2761096 - RNA, 19 nt, Artificial Sequence
  Description of Artificial Sequence: Synthetic oligonucleotide
caccugcugauuaaaugaa

SEQ ID NO: 2761097 - RNA, 19 nt, Artificial Sequence
  Description of Artificial Sequence: Synthetic oligonucleotide
gugacaucauccggugaug

SEQ ID NO: 2761098 - RNA, 19 nt, Artificial Sequence
  Description of Artificial Sequence: Synthetic oligonucleotide
ggugacaucauccggugau

SEQ ID NO: 2761099 - RNA, 19 nt, Artificial Sequence
  Description of Artificial Sequence: Synthetic oligonucleotide
cauguuuccuggguugcca

SEQ ID NO: 2761100 - RNA, 19 nt, Artificial Sequence
  Description of Artificial Sequence: Synthetic oligonucleotide
caugaccaacagugaggac

SEQ ID NO: 2761101 - RNA, 19 nt, Artificial Sequence
  Description of Artificial Sequence: Synthetic oligonucleotide
ggagaaaaggcuggugguc

SEQ ID NO: 2761102 - RNA, 19 nt, Artificial Sequence
  Description of Artificial Sequence: Synthetic oligonucleotide
agcucgcagggccuggaau

SEQ ID NO: 2761103 - RNA, 19 nt, Artificial Sequence
  Description of Artificial Sequence: Synthetic oligonucleotide
cuggaaucucauguugaca

SEQ ID NO: 2761104 - RNA, 19 nt, Artificial Sequence
  Description of Artificial Sequence: Synthetic oligonucleotide
ccugcugauuaaaugaaua

SEQ ID NO: 2761105 - RNA, 19 nt, Artificial Sequence
  Description of Artificial Sequence: Synthetic oligonucleotide
cuaggggcuugaucgcuca

SEQ ID NO: 2761106 - RNA, 19 nt, Artificial Sequence
  Description of Artificial Sequence: Synthetic oligonucleotide
aucggcacauccaaucgua

SEQ ID NO: 2761107 - RNA, 19 nt, Artificial Sequence
  Description of Artificial Sequence: Synthetic oligonucleotide
aaggaucggcacauccaau

SEQ ID NO: 2761108 - RNA, 19 nt, Artificial Sequence
  Description of Artificial Sequence: Synthetic oligonucleotide
uccggugaugacgguuccc

SEQ ID NO: 2761109 - RNA, 19 nt, Artificial Sequence
  Description of Artificial Sequence: Synthetic oligonucleotide
ucccauucuaggggcuuga

SEQ ID NO: 2761110 - RNA, 19 nt, Artificial Sequence
  Description of Artificial Sequence: Synthetic oligonucleotide
auccccugcaugugugaaa

SEQ ID NO: 2761111 - RNA, 19 nt, Artificial Sequence
  Description of Artificial Sequence: Synthetic oligonucleotide
cauacauucucgguucccu

SEQ ID NO: 2761112 - RNA, 19 nt, Artificial Sequence
  Description of Artificial Sequence: Synthetic oligonucleotide
gcucgcagggccuggaauc

SEQ ID NO: 2761113 - RNA, 19 nt, Artificial Sequence
  Description of Artificial Sequence: Synthetic oligonucleotide
cauuggguuguggccuggc

SEQ ID NO: 2761114 - RNA, 19 nt, Artificial Sequence
  Description of Artificial Sequence: Synthetic oligonucleotide
cgggcauuguagauugugc

SEQ ID NO: 2761115 - RNA, 19 nt, Artificial Sequence
  Description of Artificial Sequence: Synthetic oligonucleotide
gggcauuguagauugugcu

SEQ ID NO: 2761116 - RNA, 19 nt, Artificial Sequence
  Description of Artificial Sequence: Synthetic oligonucleotide
ugaugacgguucccaccuc

SEQ ID NO: 2761117 - RNA, 19 nt, Artificial Sequence
  Description of Artificial Sequence: Synthetic oligonucleotide
accugcugauuaaaugaau

SEQ ID NO: 2761118 - RNA, 19 nt, Artificial Sequence
  Description of Artificial Sequence: Synthetic oligonucleotide
ggaguuccuacuggcccgg

SEQ ID NO: 2761119 - RNA, 19 nt, Artificial Sequence
  Description of Artificial Sequence: Synthetic oligonucleotide
cagcuuaaaacaucauguu

SEQ ID NO: 2761120 - RNA, 19 nt, Artificial Sequence
  Description of Artificial Sequence: Synthetic oligonucleotide
ggauggagauguaccaaga

SEQ ID NO: 2761121 - RNA, 19 nt, Artificial Sequence
  Description of Artificial Sequence: Synthetic oligonucleotide
ucccaccucgaugccuugc

SEQ ID NO: 2761122 - RNA, 19 nt, Artificial Sequence
  Description of Artificial Sequence: Synthetic oligonucleotide
ccaauggccacagcagcag

SEQ ID NO: 2761123 - RNA, 19 nt, Artificial Sequence
  Description of Artificial Sequence: Synthetic oligonucleotide
agagcagcucgcagggccu

SEQ ID NO: 2761124 - RNA, 19 nt, Artificial Sequence
  Description of Artificial Sequence: Synthetic oligonucleotide
uccuacuggcccggggccu

SEQ ID NO: 2761125 - RNA, 19 nt, Artificial Sequence
  Description of Artificial Sequence: Synthetic oligonucleotide
cuggguugccagguccuug

SEQ ID NO: 2761126 - RNA, 19 nt, Artificial Sequence
  Description of Artificial Sequence: Synthetic oligonucleotide
cugguggucucauuggguu

SEQ ID NO: 2761127 - RNA, 19 nt, Artificial Sequence
  Description of Artificial Sequence: Synthetic oligonucleotide
cuauugcaugaccaacagu

SEQ ID NO: 2761128 - RNA, 19 nt, Artificial Sequence
  Description of Artificial Sequence: Synthetic oligonucleotide
ccauucuaggggcuugauc

SEQ ID NO: 2761129 - RNA, 19 nt, Artificial Sequence
  Description of Artificial Sequence: Synthetic oligonucleotide
aucauccggugaugacggu

SEQ ID NO: 2761130 - RNA, 19 nt, Artificial Sequence
  Description of Artificial Sequence: Synthetic oligonucleotide
cauuguagauugugcuggu

SEQ ID NO: 2761131 - RNA, 19 nt, Artificial Sequence
  Description of Artificial Sequence: Synthetic oligonucleotide
caugcccaauggccacagc

SEQ ID NO: 2761132 - RNA, 19 nt, Artificial Sequence
  Description of Artificial Sequence: Synthetic oligonucleotide
uggccgggcauuguagauu

SEQ ID NO: 2761133 - RNA, 19 nt, Artificial Sequence
  Description of Artificial Sequence: Synthetic oligonucleotide
augacgguucccaccucga

SEQ ID NO: 2761134 - RNA, 19 nt, Artificial Sequence
  Description of Artificial Sequence: Synthetic oligonucleotide
uucccaccucgaugccuug

SEQ ID NO: 2761135 - RNA, 19 nt, Artificial Sequence
  Description of Artificial Sequence: Synthetic oligonucleotide
gcagcuggauuggucauca

SEQ ID NO: 2761136 - RNA, 19 nt, Artificial Sequence
  Description of Artificial Sequence: Synthetic oligonucleotide
gaguuccuacuggcccggg

SEQ ID NO: 2761137 - RNA, 19 nt, Artificial Sequence
  Description of Artificial Sequence: Synthetic oligonucleotide
ggagauguaccaagaggaa

SEQ ID NO: 2761138 - RNA, 19 nt, Artificial Sequence
  Description of Artificial Sequence: Synthetic oligonucleotide
agcagcucgcagggccugg

SEQ ID NO: 2761139 - RNA, 19 nt, Artificial Sequence
  Description of Artificial Sequence: Synthetic oligonucleotide
guuguggccuggcauggau

SEQ ID NO: 2761140 - RNA, 19 nt, Artificial Sequence
  Description of Artificial Sequence: Synthetic oligonucleotide
uaggggcuugaucgcucau

SEQ ID NO: 2761141 - RNA, 19 nt, Artificial Sequence
  Description of Artificial Sequence: Synthetic oligonucleotide
agucccauucuaggggcuu

SEQ ID NO: 2761142 - RNA, 19 nt, Artificial Sequence
  Description of Artificial Sequence: Synthetic oligonucleotide
agccccgggucgcucuucu

SEQ ID NO: 2761143 - RNA, 19 nt, Artificial Sequence
  Description of Artificial Sequence: Synthetic oligonucleotide
gcuggugacaucauccggu

SEQ ID NO: 2761144 - RNA, 19 nt, Artificial Sequence
  Description of Artificial Sequence: Synthetic oligonucleotide
ccccgggucgcucuucucc

SEQ ID NO: 2761145 - RNA, 19 nt, Artificial Sequence
  Description of Artificial Sequence: Synthetic oligonucleotide
gaccaacagugaggacucc

SEQ ID NO: 2761146 - RNA, 19 nt, Artificial Sequence
  Description of Artificial Sequence: Synthetic oligonucleotide
cggcacauccaaucguagc

SEQ ID NO: 2761147 - RNA, 19 nt, Artificial Sequence
  Description of Artificial Sequence: Synthetic oligonucleotide
ugacaaggaucggcacauc

SEQ ID NO: 2761148 - RNA, 19 nt, Artificial Sequence
  Description of Artificial Sequence: Synthetic oligonucleotide
ggacuccuggaacuccauc

SEQ ID NO: 2761149 - RNA, 19 nt, Artificial Sequence
  Description of Artificial Sequence: Synthetic oligonucleotide
caucauccccugcaugugu

SEQ ID NO: 2761150 - RNA, 19 nt, Artificial Sequence
  Description of Artificial Sequence: Synthetic oligonucleotide
gccuggaaucucauguuga

SEQ ID NO: 2761151 - RNA, 19 nt, Artificial Sequence
  Description of Artificial Sequence: Synthetic oligonucleotide
cagcuggauuggucaucag

SEQ ID NO: 2761152 - RNA, 19 nt, Artificial Sequence
  Description of Artificial Sequence: Synthetic oligonucleotide
auugugcuggugacaucau

SEQ ID NO: 2761153 - RNA, 19 nt, Artificial Sequence
  Description of Artificial Sequence: Synthetic oligonucleotide
ccgggcauuguagauugug

SEQ ID NO: 2761154 - RNA, 19 nt, Artificial Sequence
  Description of Artificial Sequence: Synthetic oligonucleotide
ccucccaugccagguaaug

SEQ ID NO: 2761155 - RNA, 19 nt, Artificial Sequence
  Description of Artificial Sequence: Synthetic oligonucleotide
gguggucucauuggguugu

SEQ ID NO: 2761156 - RNA, 19 nt, Artificial Sequence
  Description of Artificial Sequence: Synthetic oligonucleotide
ugccagguccuuggcuaaa

SEQ ID NO: 2761157 - RNA, 19 nt, Artificial Sequence
  Description of Artificial Sequence: Synthetic oligonucleotide
ggcccggggccucccaugc

SEQ ID NO: 2761158 - RNA, 19 nt, Artificial Sequence
  Description of Artificial Sequence: Synthetic oligonucleotide
guuuuccgguaaauccaua

SEQ ID NO: 2761159 - RNA, 19 nt, Artificial Sequence
  Description of Artificial Sequence: Synthetic oligonucleotide
gguugccagguccuuggcu

SEQ ID NO: 2761160 - RNA, 19 nt, Artificial Sequence
  Description of Artificial Sequence: Synthetic oligonucleotide
ggucaucagcgcggccugg

SEQ ID NO: 2761161 - RNA, 19 nt, Artificial Sequence
  Description of Artificial Sequence: Synthetic oligonucleotide
cagguaaugcuagucccau

SEQ ID NO: 2761162 - RNA, 19 nt, Artificial Sequence
  Description of Artificial Sequence: Synthetic oligonucleotide
ccagguccuuggcuaaauc

SEQ ID NO: 2761163 - RNA, 19 nt, Artificial Sequence
  Description of Artificial Sequence: Synthetic oligonucleotide
cauccaaucguagcagcuu

SEQ ID NO: 2761164 - RNA, 19 nt, Artificial Sequence
  Description of Artificial Sequence: Synthetic oligonucleotide
cuacuggcccggggccucc

SEQ ID NO: 2761165 - RNA, 19 nt, Artificial Sequence
  Description of Artificial Sequence: Synthetic oligonucleotide
guucccaccucgaugccuu

SEQ ID NO: 2761166 - RNA, 19 nt, Artificial Sequence
  Description of Artificial Sequence: Synthetic oligonucleotide
gccuggccgggcauuguag

SEQ ID NO: 2761167 - RNA, 19 nt, Artificial Sequence
  Description of Artificial Sequence: Synthetic oligonucleotide
aggacuccuggaacuccau

SEQ ID NO: 2761168 - RNA, 19 nt, Artificial Sequence
  Description of Artificial Sequence: Synthetic oligonucleotide
ccggugaugacgguuccca

SEQ ID NO: 2761169 - RNA, 19 nt, Artificial Sequence
  Description of Artificial Sequence: Synthetic oligonucleotide
ccaugcccaauggccacag

SEQ ID NO: 2761170 - RNA, 19 nt, Artificial Sequence
  Description of Artificial Sequence: Synthetic oligonucleotide
ccuggccgggcauuguaga

SEQ ID NO: 2761171 - RNA, 19 nt, Artificial Sequence
  Description of Artificial Sequence: Synthetic oligonucleotide
ggccucccaugccagguaa

SEQ ID NO: 2761172 - RNA, 19 nt, Artificial Sequence
  Description of Artificial Sequence: Synthetic oligonucleotide
uacuggcccggggccuccc

SEQ ID NO: 2761173 - RNA, 19 nt, Artificial Sequence
  Description of Artificial Sequence: Synthetic oligonucleotide
cgguaaauccauacauucu

SEQ ID NO: 2761174 - RNA, 19 nt, Artificial Sequence
  Description of Artificial Sequence: Synthetic oligonucleotide
cucgcagggccuggaaucu

SEQ ID NO: 2761175 - RNA, 19 nt, Artificial Sequence
  Description of Artificial Sequence: Synthetic oligonucleotide
cuggccgggcauuguagau

SEQ ID NO: 2761176 - RNA, 19 nt, Artificial Sequence
  Description of Artificial Sequence: Synthetic oligonucleotide
ccucgaugccuugcuggag

SEQ ID NO: 2761177 - RNA, 19 nt, Artificial Sequence
  Description of Artificial Sequence: Synthetic oligonucleotide
gaacuccaucagagcagcu

SEQ ID NO: 2761178 - RNA, 19 nt, Artificial Sequence
  Description of Artificial Sequence: Synthetic oligonucleotide
ccaaucguagcagcuuaaa

SEQ ID NO: 2761179 - RNA, 19 nt, Artificial Sequence
  Description of Artificial Sequence: Synthetic oligonucleotide
ggccuggcauggauggaga

SEQ ID NO: 2761180 - RNA, 19 nt, Artificial Sequence
  Description of Artificial Sequence: Synthetic oligonucleotide
guggccuggcauggaugga

SEQ ID NO: 2761181 - RNA, 19 nt, Artificial Sequence
  Description of Artificial Sequence: Synthetic oligonucleotide
ccggggccucccaugccag

SEQ ID NO: 2761182 - RNA, 19 nt, Artificial Sequence
  Description of Artificial Sequence: Synthetic oligonucleotide
gguucccaccucgaugccu

SEQ ID NO: 2761183 - RNA, 19 nt, Artificial Sequence
  Description of Artificial Sequence: Synthetic oligonucleotide
cggugaugacgguucccac

SEQ ID NO: 2761184 - RNA, 19 nt, Artificial Sequence
  Description of Artificial Sequence: Synthetic oligonucleotide
cagcagcuggauuggucau

SEQ ID NO: 2761185 - RNA, 19 nt, Artificial Sequence
  Description of Artificial Sequence: Synthetic oligonucleotide
gguuguggccuggcaugga

SEQ ID NO: 2761186 - RNA, 19 nt, Artificial Sequence
  Description of Artificial Sequence: Synthetic oligonucleotide
cccggggccucccaugcca

SEQ ID NO: 2761187 - RNA, 19 nt, Artificial Sequence
  Description of Artificial Sequence: Synthetic oligonucleotide
ccccugcaugugugaaaac

SEQ ID NO: 2761188 - RNA, 19 nt, Artificial Sequence
  Description of Artificial Sequence: Synthetic oligonucleotide
gggccuggaaucucauguu

SEQ ID NO: 2761189 - RNA, 19 nt, Artificial Sequence
  Description of Artificial Sequence: Synthetic oligonucleotide
ggccuggccgggcauugua

SEQ ID NO: 2761190 - RNA, 19 nt, Artificial Sequence
  Description of Artificial Sequence: Synthetic oligonucleotide
cagcucgcagggccuggaa

SEQ ID NO: 2761191 - RNA, 19 nt, Artificial Sequence
  Description of Artificial Sequence: Synthetic oligonucleotide
ccuacuggcccggggccuc

SEQ ID NO: 2761192 - RNA, 19 nt, Artificial Sequence
  Description of Artificial Sequence: Synthetic oligonucleotide
gcggccuggccgggcauug

SEQ ID NO: 2761193 - RNA, 19 nt, Artificial Sequence
  Description of Artificial Sequence: Synthetic oligonucleotide
ggggccucccaugccaggu

SEQ ID NO: 2761194 - RNA, 19 nt, Artificial Sequence
  Description of Artificial Sequence: Synthetic oligonucleotide
cgcucuucuccuauugcau

SEQ ID NO: 2761195 - RNA, 19 nt, Artificial Sequence
  Description of Artificial Sequence: Synthetic oligonucleotide
gcccggggccucccaugcc

SEQ ID NO: 2761196 - RNA, 19 nt, Artificial Sequence
  Description of Artificial Sequence: Synthetic oligonucleotide
gcagcucgcagggccugga

SEQ ID NO: 2761197 - RNA, 19 nt, Artificial Sequence
  Description of Artificial Sequence: Synthetic oligonucleotide
cggggccucccaugccagg

SEQ ID NO: 2761198 - RNA, 19 nt, Artificial Sequence
  Description of Artificial Sequence: Synthetic oligonucleotide
cagccccgggucgcucuuc

SEQ ID NO: 2761199 - RNA, 19 nt, Artificial Sequence
  Description of Artificial Sequence: Synthetic oligonucleotide
gccuggcauggauggagau

SEQ ID NO: 2761200 - RNA, 19 nt, Artificial Sequence
  Description of Artificial Sequence: Synthetic oligonucleotide
gggcuugaucgcucaucau

SEQ ID NO: 2761201 - RNA, 19 nt, Artificial Sequence
  Description of Artificial Sequence: Synthetic oligonucleotide
cgguucccaccucgaugcc

SEQ ID NO: 2761202 - RNA, 19 nt, Artificial Sequence
  Description of Artificial Sequence: Synthetic oligonucleotide
ccccacagcagccccgggu

SEQ ID NO: 2761203 - RNA, 19 nt, Artificial Sequence
  Description of Artificial Sequence: Synthetic oligonucleotide
cuggcccggggccucccau

SEQ ID NO: 2761204 - RNA, 19 nt, Artificial Sequence
  Description of Artificial Sequence: Synthetic oligonucleotide
gggucgcucuucuccuauu

SEQ ID NO: 2761205 - RNA, 19 nt, Artificial Sequence
  Description of Artificial Sequence: Synthetic oligonucleotide
gccccgggucgcucuucuc

SEQ ID NO: 2761206 - RNA, 19 nt, Artificial Sequence
  Description of Artificial Sequence: Synthetic oligonucleotide
ccgggucgcucuucuccua

SEQ ID NO: 2761207 - RNA, 19 nt, Artificial Sequence
  Description of Artificial Sequence: Synthetic oligonucleotide
cgaugccuugcuggagaaa

SEQ ID NO: 2761208 - RNA, 19 nt, Artificial Sequence
  Description of Artificial Sequence: Synthetic oligonucleotide
cccauucuaggggcuugau

SEQ ID NO: 2761209 - RNA, 19 nt, Artificial Sequence
  Description of Artificial Sequence: Synthetic oligonucleotide
cgggucgcucuucuccuau

SEQ ID NO: 2761210 - RNA, 19 nt, Artificial Sequence
  Description of Artificial Sequence: Synthetic oligonucleotide
gccgggcauuguagauugu

SEQ ID NO: 2761211 - RNA, 19 nt, Artificial Sequence
  Description of Artificial Sequence: Synthetic oligonucleotide
ccuggguugccagguccuu

SEQ ID NO: 2761212 - RNA, 19 nt, Artificial Sequence
  Description of Artificial Sequence: Synthetic oligonucleotide
cggccuggccgggcauugu

SEQ ID NO: 2761213 - RNA, 19 nt, Artificial Sequence
  Description of Artificial Sequence: Synthetic oligonucleotide
auaaaagucagccaucucc

SEQ ID NO: 2761214 - RNA, 19 nt, Artificial Sequence
  Description of Artificial Sequence: Synthetic oligonucleotide
uuuaguuuaaguuuaaguc

SEQ ID NO: 2761215 - RNA, 19 nt, Artificial Sequence
  Description of Artificial Sequence: Synthetic oligonucleotide
uuauuaaaagucaaauucu

SEQ ID NO: 2761216 - RNA, 19 nt, Artificial Sequence
  Description of Artificial Sequence: Synthetic oligonucleotide
aauucuuacucagaaacuc

SEQ ID NO: 2761217 - RNA, 19 nt, Artificial Sequence
  Description of Artificial Sequence: Synthetic oligonucleotide
ucgguuauaagacaugugc

SEQ ID NO: 2761218 - RNA, 19 nt, Artificial Sequence
  Description of Artificial Sequence: Synthetic oligonucleotide
uuaaguuuaagucuccuaa

SEQ ID NO: 2761219 - RNA, 19 nt, Artificial Sequence
  Description of Artificial Sequence: Synthetic oligonucleotide
uauuaaaagucaaauucug

SEQ ID NO: 2761220 - RNA, 19 nt, Artificial Sequence
  Description of Artificial Sequence: Synthetic oligonucleotide
uuuauuuaguuuaaguuua

SEQ ID NO: 2761221 - RNA, 19 nt, Artificial Sequence
  Description of Artificial Sequence: Synthetic oligonucleotide
aagguuugaguauuuaucu

SEQ ID NO: 2761222 - RNA, 19 nt, Artificial Sequence
  Description of Artificial Sequence: Synthetic oligonucleotide
aacugcuugucucuuuugc

SEQ ID NO: 2761223 - RNA, 19 nt, Artificial Sequence
  Description of Artificial Sequence: Synthetic oligonucleotide
auuuauuuaguuuaaguuu

SEQ ID NO: 2761224 - RNA, 19 nt, Artificial Sequence
  Description of Artificial Sequence: Synthetic oligonucleotide
uuuuccuuauuaaaaguca

SEQ ID NO: 2761225 - RNA, 19 nt, Artificial Sequence
  Description of Artificial Sequence: Synthetic oligonucleotide
auuuaguuuaaguuuaagu

SEQ ID NO: 2761226 - RNA, 19 nt, Artificial Sequence
  Description of Artificial Sequence: Synthetic oligonucleotide
aacgugauggcaaaauuac

SEQ ID NO: 2761227 - RNA, 19 nt, Artificial Sequence
  Description of Artificial Sequence: Synthetic oligonucleotide
uuuugcuucugucugagcu

SEQ ID NO: 2761228 - RNA, 19 nt, Artificial Sequence
  Description of Artificial Sequence: Synthetic oligonucleotide
aaaagucaaauucugguuu

SEQ ID NO: 2761229 - RNA, 19 nt, Artificial Sequence
  Description of Artificial Sequence: Synthetic oligonucleotide
auuaauuaacuuuauuuau

SEQ ID NO: 2761230 - RNA, 19 nt, Artificial Sequence
  Description of Artificial Sequence: Synthetic oligonucleotide
aagccuuuagcuugcaguc

SEQ ID NO: 2761231 - RNA, 19 nt, Artificial Sequence
  Description of Artificial Sequence: Synthetic oligonucleotide
ugucucaauucucugagcc

SEQ ID NO: 2761232 - RNA, 19 nt, Artificial Sequence
  Description of Artificial Sequence: Synthetic oligonucleotide
ucaaauucugguuugccca

SEQ ID NO: 2761233 - RNA, 19 nt, Artificial Sequence
  Description of Artificial Sequence: Synthetic oligonucleotide
uuugaccugacucgguucg

SEQ ID NO: 2761234 - RNA, 19 nt, Artificial Sequence
  Description of Artificial Sequence: Synthetic oligonucleotide
ucagaaacuccuuauaaaa

SEQ ID NO: 2761235 - RNA, 19 nt, Artificial Sequence
  Description of Artificial Sequence: Synthetic oligonucleotide
aaaauuacgcuuguaccag

SEQ ID NO: 2761236 - RNA, 19 nt, Artificial Sequence
  Description of Artificial Sequence: Synthetic oligonucleotide
agaaacuccuuauaaaagu

SEQ ID NO: 2761237 - RNA, 19 nt, Artificial Sequence
  Description of Artificial Sequence: Synthetic oligonucleotide
aaagucaaauucugguuug

SEQ ID NO: 2761238 - RNA, 19 nt, Artificial Sequence
  Description of Artificial Sequence: Synthetic oligonucleotide
guuuaagucuccuaacugc

SEQ ID NO: 2761239 - RNA, 19 nt, Artificial Sequence
  Description of Artificial Sequence: Synthetic oligonucleotide
aaguuuaagucuccuaacu

SEQ ID NO: 2761240 - RNA, 19 nt, Artificial Sequence
  Description of Artificial Sequence: Synthetic oligonucleotide
uuccacauccucucgagcg

SEQ ID NO: 2761241 - RNA, 19 nt, Artificial Sequence
  Description of Artificial Sequence: Synthetic oligonucleotide
ugagccuuuguuccaaggg

SEQ ID NO: 2761242 - RNA, 19 nt, Artificial Sequence
  Description of Artificial Sequence: Synthetic oligonucleotide
ugcucuuugaccugacucg

SEQ ID NO: 2761243 - RNA, 19 nt, Artificial Sequence
  Description of Artificial Sequence: Synthetic oligonucleotide
uucugguuugcccagaacu

SEQ ID NO: 2761244 - RNA, 19 nt, Artificial Sequence
  Description of Artificial Sequence: Synthetic oligonucleotide
ucuggaaauucuuacucag

SEQ ID NO: 2761245 - RNA, 19 nt, Artificial Sequence
  Description of Artificial Sequence: Synthetic oligonucleotide
aaaagaacuggacgaaggu

SEQ ID NO: 2761246 - RNA, 19 nt, Artificial Sequence
  Description of Artificial Sequence: Synthetic oligonucleotide
uuagcuugcagucuugagu

SEQ ID NO: 2761247 - RNA, 19 nt, Artificial Sequence
  Description of Artificial Sequence: Synthetic oligonucleotide
agaacugcugguuccauuc

SEQ ID NO: 2761248 - RNA, 19 nt, Artificial Sequence
  Description of Artificial Sequence: Synthetic oligonucleotide
uccaaucauggcaagacug

SEQ ID NO: 2761249 - RNA, 19 nt, Artificial Sequence
  Description of Artificial Sequence: Synthetic oligonucleotide
gagggcagaaucuugagac

SEQ ID NO: 2761250 - RNA, 19 nt, Artificial Sequence
  Description of Artificial Sequence: Synthetic oligonucleotide
uuuaagucuccuaacugcu

SEQ ID NO: 2761251 - RNA, 19 nt, Artificial Sequence
  Description of Artificial Sequence: Synthetic oligonucleotide
ugaguaaaugaauucuucu

SEQ ID NO: 2761252 - RNA, 19 nt, Artificial Sequence
  Description of Artificial Sequence: Synthetic oligonucleotide
gguuugaguauuuaucugg

SEQ ID NO: 2761253 - RNA, 19 nt, Artificial Sequence
  Description of Artificial Sequence: Synthetic oligonucleotide
uaguuuaaguuuaagucuc

SEQ ID NO: 2761254 - RNA, 19 nt, Artificial Sequence
  Description of Artificial Sequence: Synthetic oligonucleotide
uggaaauucuuacucagaa

SEQ ID NO: 2761255 - RNA, 19 nt, Artificial Sequence
  Description of Artificial Sequence: Synthetic oligonucleotide
uucucugagccuuuguucc

SEQ ID NO: 2761256 - RNA, 19 nt, Artificial Sequence
  Description of Artificial Sequence: Synthetic oligonucleotide
ucucuuuugcuucugucug

SEQ ID NO: 2761257 - RNA, 19 nt, Artificial Sequence
  Description of Artificial Sequence: Synthetic oligonucleotide
aaucuugagaccgggcugg

SEQ ID NO: 2761258 - RNA, 19 nt, Artificial Sequence
  Description of Artificial Sequence: Synthetic oligonucleotide
ucuugaguaaaugaauucu

SEQ ID NO: 2761259 - RNA, 19 nt, Artificial Sequence
  Description of Artificial Sequence: Synthetic oligonucleotide
cugagcuuguuccacaucc

SEQ ID NO: 2761260 - RNA, 19 nt, Artificial Sequence
  Description of Artificial Sequence: Synthetic oligonucleotide
aguaaaugaauucuucuuu

SEQ ID NO: 2761261 - RNA, 19 nt, Artificial Sequence
  Description of Artificial Sequence: Synthetic oligonucleotide
uaagucuccuaacugcuug

SEQ ID NO: 2761262 - RNA, 19 nt, Artificial Sequence
  Description of Artificial Sequence: Synthetic oligonucleotide
uuugaguauuuaucugggg

SEQ ID NO: 2761263 - RNA, 19 nt, Artificial Sequence
  Description of Artificial Sequence: Synthetic oligonucleotide
uuccccaugaagaacguga

SEQ ID NO: 2761264 - RNA, 19 nt, Artificial Sequence
  Description of Artificial Sequence: Synthetic oligonucleotide
aguuuaagucuccuaacug

SEQ ID NO: 2761265 - RNA, 19 nt, Artificial Sequence
  Description of Artificial Sequence: Synthetic oligonucleotide
aaagucagccaucuccucu

SEQ ID NO: 2761266 - RNA, 19 nt, Artificial Sequence
  Description of Artificial Sequence: Synthetic oligonucleotide
uaagacaugugcuucugga

SEQ ID NO: 2761267 - RNA, 19 nt, Artificial Sequence
  Description of Artificial Sequence: Synthetic oligonucleotide
cucguuuucaggaacauga

SEQ ID NO: 2761268 - RNA, 19 nt, Artificial Sequence
  Description of Artificial Sequence: Synthetic oligonucleotide
aguuucuugucucaauucu

SEQ ID NO: 2761269 - RNA, 19 nt, Artificial Sequence
  Description of Artificial Sequence: Synthetic oligonucleotide
aacuccuuauaaaagucag

SEQ ID NO: 2761270 - RNA, 19 nt, Artificial Sequence
  Description of Artificial Sequence: Synthetic oligonucleotide
cuugucucaauucucugag

SEQ ID NO: 2761271 - RNA, 19 nt, Artificial Sequence
  Description of Artificial Sequence: Synthetic oligonucleotide
agaaucuugagaccgggcu

SEQ ID NO: 2761272 - RNA, 19 nt, Artificial Sequence
  Description of Artificial Sequence: Synthetic oligonucleotide
gauggcaaaauuacgcuug

SEQ ID NO: 2761273 - RNA, 19 nt, Artificial Sequence
  Description of Artificial Sequence: Synthetic oligonucleotide
caaaauuacgcuuguacca

SEQ ID NO: 2761274 - RNA, 19 nt, Artificial Sequence
  Description of Artificial Sequence: Synthetic oligonucleotide
gagccuuuguuccaagggg

SEQ ID NO: 2761275 - RNA, 19 nt, Artificial Sequence
  Description of Artificial Sequence: Synthetic oligonucleotide
uacgcuuguaccagucucg

SEQ ID NO: 2761276 - RNA, 19 nt, Artificial Sequence
  Description of Artificial Sequence: Synthetic oligonucleotide
cuugagaccgggcuggacg

SEQ ID NO: 2761277 - RNA, 19 nt, Artificial Sequence
  Description of Artificial Sequence: Synthetic oligonucleotide
uuauaaaagucagccaucu

SEQ ID NO: 2761278 - RNA, 19 nt, Artificial Sequence
  Description of Artificial Sequence: Synthetic oligonucleotide
uuuccuuauuaaaagucaa

SEQ ID NO: 2761279 - RNA, 19 nt, Artificial Sequence
  Description of Artificial Sequence: Synthetic oligonucleotide
auucuuacucagaaacucc

SEQ ID NO: 2761280 - RNA, 19 nt, Artificial Sequence
  Description of Artificial Sequence: Synthetic oligonucleotide
ucugguuugcccagaacug

SEQ ID NO: 2761281 - RNA, 19 nt, Artificial Sequence
  Description of Artificial Sequence: Synthetic oligonucleotide
uugaguaaaugaauucuuc

SEQ ID NO: 2761282 - RNA, 19 nt, Artificial Sequence
  Description of Artificial Sequence: Synthetic oligonucleotide
cagaaacuccuuauaaaag

SEQ ID NO: 2761283 - RNA, 19 nt, Artificial Sequence
  Description of Artificial Sequence: Synthetic oligonucleotide
ugcagucuugaguaaauga

SEQ ID NO: 2761284 - RNA, 19 nt, Artificial Sequence
  Description of Artificial Sequence: Synthetic oligonucleotide
uucuuacucagaaacuccu

SEQ ID NO: 2761285 - RNA, 19 nt, Artificial Sequence
  Description of Artificial Sequence: Synthetic oligonucleotide
gaagguuugaguauuuauc

SEQ ID NO: 2761286 - RNA, 19 nt, Artificial Sequence
  Description of Artificial Sequence: Synthetic oligonucleotide
aagucaaauucugguuugc

SEQ ID NO: 2761287 - RNA, 19 nt, Artificial Sequence
  Description of Artificial Sequence: Synthetic oligonucleotide
aaaagucagccaucuccuc

SEQ ID NO: 2761288 - RNA, 19 nt, Artificial Sequence
  Description of Artificial Sequence: Synthetic oligonucleotide
uaaguuuaagucuccuaac

SEQ ID NO: 2761289 - RNA, 19 nt, Artificial Sequence
  Description of Artificial Sequence: Synthetic oligonucleotide
accagucucgguuauaaga

SEQ ID NO: 2761290 - RNA, 19 nt, Artificial Sequence
  Description of Artificial Sequence: Synthetic oligonucleotide
uccuuauuaaaagucaaau

SEQ ID NO: 2761291 - RNA, 19 nt, Artificial Sequence
  Description of Artificial Sequence: Synthetic oligonucleotide
gucaaauucugguuugccc

SEQ ID NO: 2761292 - RNA, 19 nt, Artificial Sequence
  Description of Artificial Sequence: Synthetic oligonucleotide
ucuugucucaauucucuga

SEQ ID NO: 2761293 - RNA, 19 nt, Artificial Sequence
  Description of Artificial Sequence: Synthetic oligonucleotide
aagucagccaucuccucug

SEQ ID NO: 2761294 - RNA, 19 nt, Artificial Sequence
  Description of Artificial Sequence: Synthetic oligonucleotide
gcaaaauuacgcuuguacc

SEQ ID NO: 2761295 - RNA, 19 nt, Artificial Sequence
  Description of Artificial Sequence: Synthetic oligonucleotide
guuugaguauuuaucuggg

SEQ ID NO: 2761296 - RNA, 19 nt, Artificial Sequence
  Description of Artificial Sequence: Synthetic oligonucleotide
cuuauaaaagucagccauc

SEQ ID NO: 2761297 - RNA, 19 nt, Artificial Sequence
  Description of Artificial Sequence: Synthetic oligonucleotide
cuucuggaaauucuuacuc

SEQ ID NO: 2761298 - RNA, 19 nt, Artificial Sequence
  Description of Artificial Sequence: Synthetic oligonucleotide
ggcaagacugucuuggagg

SEQ ID NO: 2761299 - RNA, 19 nt, Artificial Sequence
  Description of Artificial Sequence: Synthetic oligonucleotide
ugucuuggagggcagaauc

SEQ ID NO: 2761300 - RNA, 19 nt, Artificial Sequence
  Description of Artificial Sequence: Synthetic oligonucleotide
uauccaaucauggcaagac

SEQ ID NO: 2761301 - RNA, 19 nt, Artificial Sequence
  Description of Artificial Sequence: Synthetic oligonucleotide
uauuuaguuuaaguuuaag

SEQ ID NO: 2761302 - RNA, 19 nt, Artificial Sequence
  Description of Artificial Sequence: Synthetic oligonucleotide
uucuggaaauucuuacuca

SEQ ID NO: 2761303 - RNA, 19 nt, Artificial Sequence
  Description of Artificial Sequence: Synthetic oligonucleotide
aagacugucuuggagggca

SEQ ID NO: 2761304 - RNA, 19 nt, Artificial Sequence
  Description of Artificial Sequence: Synthetic oligonucleotide
auucuugaguuucuugucu

SEQ ID NO: 2761305 - RNA, 19 nt, Artificial Sequence
  Description of Artificial Sequence: Synthetic oligonucleotide
aauuacgcuuguaccaguc

SEQ ID NO: 2761306 - RNA, 19 nt, Artificial Sequence
  Description of Artificial Sequence: Synthetic oligonucleotide
uccaguguugcucuuugac

SEQ ID NO: 2761307 - RNA, 19 nt, Artificial Sequence
  Description of Artificial Sequence: Synthetic oligonucleotide
uugcucuuugaccugacuc

SEQ ID NO: 2761308 - RNA, 19 nt, Artificial Sequence
  Description of Artificial Sequence: Synthetic oligonucleotide
uccuauccaaucauggcaa

SEQ ID NO: 2761309 - RNA, 19 nt, Artificial Sequence
  Description of Artificial Sequence: Synthetic oligonucleotide
uuuagcuugcagucuugag

SEQ ID NO: 2761310 - RNA, 19 nt, Artificial Sequence
  Description of Artificial Sequence: Synthetic oligonucleotide
auaagacaugugcuucugg

SEQ ID NO: 2761311 - RNA, 19 nt, Artificial Sequence
  Description of Artificial Sequence: Synthetic oligonucleotide
agucaaauucugguuugcc

SEQ ID NO: 2761312 - RNA, 19 nt, Artificial Sequence
  Description of Artificial Sequence: Synthetic oligonucleotide
uuuaaguuuaagucuccua

SEQ ID NO: 2761313 - RNA, 19 nt, Artificial Sequence
  Description of Artificial Sequence: Synthetic oligonucleotide
ucuccuaacugcuugucuc

SEQ ID NO: 2761314 - RNA, 19 nt, Artificial Sequence
  Description of Artificial Sequence: Synthetic oligonucleotide
gaaucuugagaccgggcug

SEQ ID NO: 2761315 - RNA, 19 nt, Artificial Sequence
  Description of Artificial Sequence: Synthetic oligonucleotide
ggcaaaauuacgcuuguac

SEQ ID NO: 2761316 - RNA, 19 nt, Artificial Sequence
  Description of Artificial Sequence: Synthetic oligonucleotide
ugaguuucuugucucaauu

SEQ ID NO: 2761317 - RNA, 19 nt, Artificial Sequence
  Description of Artificial Sequence: Synthetic oligonucleotide
aaacuccuuauaaaaguca

SEQ ID NO: 2761318 - RNA, 19 nt, Artificial Sequence
  Description of Artificial Sequence: Synthetic oligonucleotide
acucagaaacuccuuauaa

SEQ ID NO: 2761319 - RNA, 19 nt, Artificial Sequence
  Description of Artificial Sequence: Synthetic oligonucleotide
ugcuucuggaaauucuuac

SEQ ID NO: 2761320 - RNA, 19 nt, Artificial Sequence
  Description of Artificial Sequence: Synthetic oligonucleotide
uagcuugcagucuugagua

SEQ ID NO: 2761321 - RNA, 19 nt, Artificial Sequence
  Description of Artificial Sequence: Synthetic oligonucleotide
gaaacuccuuauaaaaguc

SEQ ID NO: 2761322 - RNA, 19 nt, Artificial Sequence
  Description of Artificial Sequence: Synthetic oligonucleotide
uccuuauaaaagucagcca

SEQ ID NO: 2761323 - RNA, 19 nt, Artificial Sequence
  Description of Artificial Sequence: Synthetic oligonucleotide
agggcagaaucuugagacc

SEQ ID NO: 2761324 - RNA, 19 nt, Artificial Sequence
  Description of Artificial Sequence: Synthetic oligonucleotide
uuacgcuuguaccagucuc

SEQ ID NO: 2761325 - RNA, 19 nt, Artificial Sequence
  Description of Artificial Sequence: Synthetic oligonucleotide
uuccuuauuaaaagucaaa

SEQ ID NO: 2761326 - RNA, 19 nt, Artificial Sequence
  Description of Artificial Sequence: Synthetic oligonucleotide
aacuggacgaagguuugag

SEQ ID NO: 2761327 - RNA, 19 nt, Artificial Sequence
  Description of Artificial Sequence: Synthetic oligonucleotide
cccaugaagaacgugaugg

SEQ ID NO: 2761328 - RNA, 19 nt, Artificial Sequence
  Description of Artificial Sequence: Synthetic oligonucleotide
uuauuuaguuuaaguuuaa

SEQ ID NO: 2761329 - RNA, 19 nt, Artificial Sequence
  Description of Artificial Sequence: Synthetic oligonucleotide
aguuuaaguuuaagucucc

SEQ ID NO: 2761330 - RNA, 19 nt, Artificial Sequence
  Description of Artificial Sequence: Synthetic oligonucleotide
aaauuacgcuuguaccagu

SEQ ID NO: 2761331 - RNA, 19 nt, Artificial Sequence
  Description of Artificial Sequence: Synthetic oligonucleotide
guuauaagacaugugcuuc

SEQ ID NO: 2761332 - RNA, 19 nt, Artificial Sequence
  Description of Artificial Sequence: Synthetic oligonucleotide
ucucgguuauaagacaugu

SEQ ID NO: 2761333 - RNA, 19 nt, Artificial Sequence
  Description of Artificial Sequence: Synthetic oligonucleotide
agacaugugcuucuggaaa

SEQ ID NO: 2761334 - RNA, 19 nt, Artificial Sequence
  Description of Artificial Sequence: Synthetic oligonucleotide
guuugcccagaacugcugg

SEQ ID NO: 2761335 - RNA, 19 nt, Artificial Sequence
  Description of Artificial Sequence: Synthetic oligonucleotide
agguuugaguauuuaucug

SEQ ID NO: 2761336 - RNA, 19 nt, Artificial Sequence
  Description of Artificial Sequence: Synthetic oligonucleotide
uuacucagaaacuccuuau

SEQ ID NO: 2761337 - RNA, 19 nt, Artificial Sequence
  Description of Artificial Sequence: Synthetic oligonucleotide
acuccuuauaaaagucagc

SEQ ID NO: 2761338 - RNA, 19 nt, Artificial Sequence
  Description of Artificial Sequence: Synthetic oligonucleotide
ucuuuugcuucugucugag

SEQ ID NO: 2761339 - RNA, 19 nt, Artificial Sequence
  Description of Artificial Sequence: Synthetic oligonucleotide
ucgagcgccacuuucccca

SEQ ID NO: 2761340 - RNA, 19 nt, Artificial Sequence
  Description of Artificial Sequence: Synthetic oligonucleotide
ucuugaguuucuugucuca

SEQ ID NO: 2761341 - RNA, 19 nt, Artificial Sequence
  Description of Artificial Sequence: Synthetic oligonucleotide
guccuauccaaucauggca

SEQ ID NO: 2761342 - RNA, 19 nt, Artificial Sequence
  Description of Artificial Sequence: Synthetic oligonucleotide
aaucauggcaagacugucu

SEQ ID NO: 2761343 - RNA, 19 nt, Artificial Sequence
  Description of Artificial Sequence: Synthetic oligonucleotide
uggcaagacugucuuggag

SEQ ID NO: 2761344 - RNA, 19 nt, Artificial Sequence
  Description of Artificial Sequence: Synthetic oligonucleotide
ucugcauccaguguugcuc

SEQ ID NO: 2761345 - RNA, 19 nt, Artificial Sequence
  Description of Artificial Sequence: Synthetic oligonucleotide
ugaagaacgugauggcaaa

SEQ ID NO: 2761346 - RNA, 19 nt, Artificial Sequence
  Description of Artificial Sequence: Synthetic oligonucleotide
gaguuucuugucucaauuc

SEQ ID NO: 2761347 - RNA, 19 nt, Artificial Sequence
  Description of Artificial Sequence: Synthetic oligonucleotide
aagaacgugauggcaaaau

SEQ ID NO: 2761348 - RNA, 19 nt, Artificial Sequence
  Description of Artificial Sequence: Synthetic oligonucleotide
aaagaacuggacgaagguu

SEQ ID NO: 2761349 - RNA, 19 nt, Artificial Sequence
  Description of Artificial Sequence: Synthetic oligonucleotide
gucuugaguaaaugaauuc

SEQ ID NO: 2761350 - RNA, 19 nt, Artificial Sequence
  Description of Artificial Sequence: Synthetic oligonucleotide
aauucugguuugcccagaa

SEQ ID NO: 2761351 - RNA, 19 nt, Artificial Sequence
  Description of Artificial Sequence: Synthetic oligonucleotide
cauucuugaguuucuuguc

SEQ ID NO: 2761352 - RNA, 19 nt, Artificial Sequence
  Description of Artificial Sequence: Synthetic oligonucleotide
cgugauggcaaaauuacgc

SEQ ID NO: 2761353 - RNA, 19 nt, Artificial Sequence
  Description of Artificial Sequence: Synthetic oligonucleotide
uucuugaguuucuugucuc

SEQ ID NO: 2761354 - RNA, 19 nt, Artificial Sequence
  Description of Artificial Sequence: Synthetic oligonucleotide
acugcuugucucuuuugcu

SEQ ID NO: 2761355 - RNA, 19 nt, Artificial Sequence
  Description of Artificial Sequence: Synthetic oligonucleotide
aucuccucugcauccagug

SEQ ID NO: 2761356 - RNA, 19 nt, Artificial Sequence
  Description of Artificial Sequence: Synthetic oligonucleotide
uauaaaagucagccaucuc

SEQ ID NO: 2761357 - RNA, 19 nt, Artificial Sequence
  Description of Artificial Sequence: Synthetic oligonucleotide
aagucuccuaacugcuugu

SEQ ID NO: 2761358 - RNA, 19 nt, Artificial Sequence
  Description of Artificial Sequence: Synthetic oligonucleotide
uccacauccucucgagcgc

SEQ ID NO: 2761359 - RNA, 19 nt, Artificial Sequence
  Description of Artificial Sequence: Synthetic oligonucleotide
ugauggcaaaauuacgcuu

SEQ ID NO: 2761360 - RNA, 19 nt, Artificial Sequence
  Description of Artificial Sequence: Synthetic oligonucleotide
gcaagacugucuuggaggg

SEQ ID NO: 2761361 - RNA, 19 nt, Artificial Sequence
  Description of Artificial Sequence: Synthetic oligonucleotide
uugagaccgggcuggacgc

SEQ ID NO: 2761362 - RNA, 19 nt, Artificial Sequence
  Description of Artificial Sequence: Synthetic oligonucleotide
auucugguuugcccagaac

SEQ ID NO: 2761363 - RNA, 19 nt, Artificial Sequence
  Description of Artificial Sequence: Synthetic oligonucleotide
uuguuccacauccucucga

SEQ ID NO: 2761364 - RNA, 19 nt, Artificial Sequence
  Description of Artificial Sequence: Synthetic oligonucleotide
uacucagaaacuccuuaua

SEQ ID NO: 2761365 - RNA, 19 nt, Artificial Sequence
  Description of Artificial Sequence: Synthetic oligonucleotide
ucuuugaccugacucgguu

SEQ ID NO: 2761366 - RNA, 19 nt, Artificial Sequence
  Description of Artificial Sequence: Synthetic oligonucleotide
ucucaauucucugagccuu

SEQ ID NO: 2761367 - RNA, 19 nt, Artificial Sequence
  Description of Artificial Sequence: Synthetic oligonucleotide
ugcugguuccauucuugag

SEQ ID NO: 2761368 - RNA, 19 nt, Artificial Sequence
  Description of Artificial Sequence: Synthetic oligonucleotide
cuuguuccacauccucucg

SEQ ID NO: 2761369 - RNA, 19 nt, Artificial Sequence
  Description of Artificial Sequence: Synthetic oligonucleotide
uggacgaagguuugaguau

SEQ ID NO: 2761370 - RNA, 19 nt, Artificial Sequence
  Description of Artificial Sequence: Synthetic oligonucleotide
cucucgagcgccacuuucc

SEQ ID NO: 2761371 - RNA, 19 nt, Artificial Sequence
  Description of Artificial Sequence: Synthetic oligonucleotide
auuacgcuuguaccagucu

SEQ ID NO: 2761372 - RNA, 19 nt, Artificial Sequence
  Description of Artificial Sequence: Synthetic oligonucleotide
uccucugcauccaguguug

SEQ ID NO: 2761373 - RNA, 19 nt, Artificial Sequence
  Description of Artificial Sequence: Synthetic oligonucleotide
ucucgagcgccacuuuccc

SEQ ID NO: 2761374 - RNA, 19 nt, Artificial Sequence
  Description of Artificial Sequence: Synthetic oligonucleotide
agaacgugauggcaaaauu

SEQ ID NO: 2761375 - RNA, 19 nt, Artificial Sequence
  Description of Artificial Sequence: Synthetic oligonucleotide
ugguuugcccagaacugcu

SEQ ID NO: 2761376 - RNA, 19 nt, Artificial Sequence
  Description of Artificial Sequence: Synthetic oligonucleotide
accugacucgguucgcagg

SEQ ID NO: 2761377 - RNA, 19 nt, Artificial Sequence
  Description of Artificial Sequence: Synthetic oligonucleotide
ugacucgguucgcaggccc

SEQ ID NO: 2761378 - RNA, 19 nt, Artificial Sequence
  Description of Artificial Sequence: Synthetic oligonucleotide
ugagcuuguuccacauccu

SEQ ID NO: 2761379 - RNA, 19 nt, Artificial Sequence
  Description of Artificial Sequence: Synthetic oligonucleotide
uuugcuucugucugagcuu

SEQ ID NO: 2761380 - RNA, 19 nt, Artificial Sequence
  Description of Artificial Sequence: Synthetic oligonucleotide
cuuggagggcagaaucuug

SEQ ID NO: 2761381 - RNA, 19 nt, Artificial Sequence
  Description of Artificial Sequence: Synthetic oligonucleotide
cucagaaacuccuuauaaa

SEQ ID NO: 2761382 - RNA, 19 nt, Artificial Sequence
  Description of Artificial Sequence: Synthetic oligonucleotide
ugucugagcuuguuccaca

SEQ ID NO: 2761383 - RNA, 19 nt, Artificial Sequence
  Description of Artificial Sequence: Synthetic oligonucleotide
gaguaaaugaauucuucuu

SEQ ID NO: 2761384 - RNA, 19 nt, Artificial Sequence
  Description of Artificial Sequence: Synthetic oligonucleotide
agucagccaucuccucugc

SEQ ID NO: 2761385 - RNA, 19 nt, Artificial Sequence
  Description of Artificial Sequence: Synthetic oligonucleotide
gaacgugauggcaaaauua

SEQ ID NO: 2761386 - RNA, 19 nt, Artificial Sequence
  Description of Artificial Sequence: Synthetic oligonucleotide
uggagggcagaaucuugag

SEQ ID NO: 2761387 - RNA, 19 nt, Artificial Sequence
  Description of Artificial Sequence: Synthetic oligonucleotide
uugucucaauucucugagc

SEQ ID NO: 2761388 - RNA, 19 nt, Artificial Sequence
  Description of Artificial Sequence: Synthetic oligonucleotide
ucguuuucaggaacaugaa

SEQ ID NO: 2761389 - RNA, 19 nt, Artificial Sequence
  Description of Artificial Sequence: Synthetic oligonucleotide
cugagccuuuguuccaagg

SEQ ID NO: 2761390 - RNA, 19 nt, Artificial Sequence
  Description of Artificial Sequence: Synthetic oligonucleotide
auccaaucauggcaagacu

SEQ ID NO: 2761391 - RNA, 19 nt, Artificial Sequence
  Description of Artificial Sequence: Synthetic oligonucleotide
augaagaacgugauggcaa

SEQ ID NO: 2761392 - RNA, 19 nt, Artificial Sequence
  Description of Artificial Sequence: Synthetic oligonucleotide
ucuuacucagaaacuccuu

SEQ ID NO: 2761393 - RNA, 19 nt, Artificial Sequence
  Description of Artificial Sequence: Synthetic oligonucleotide
ccagucucgguuauaagac

SEQ ID NO: 2761394 - RNA, 19 nt, Artificial Sequence
  Description of Artificial Sequence: Synthetic oligonucleotide
cucgguuauaagacaugug

SEQ ID NO: 2761395 - RNA, 19 nt, Artificial Sequence
  Description of Artificial Sequence: Synthetic oligonucleotide
uugaguuucuugucucaau

SEQ ID NO: 2761396 - RNA, 19 nt, Artificial Sequence
  Description of Artificial Sequence: Synthetic oligonucleotide
agucuugaguaaaugaauu

SEQ ID NO: 2761397 - RNA, 19 nt, Artificial Sequence
  Description of Artificial Sequence: Synthetic oligonucleotide
uuaagucuccuaacugcuu

SEQ ID NO: 2761398 - RNA, 19 nt, Artificial Sequence
  Description of Artificial Sequence: Synthetic oligonucleotide
cuggacgaagguuugagua

SEQ ID NO: 2761399 - RNA, 19 nt, Artificial Sequence
  Description of Artificial Sequence: Synthetic oligonucleotide
aguguugcucuuugaccug

SEQ ID NO: 2761400 - RNA, 19 nt, Artificial Sequence
  Description of Artificial Sequence: Synthetic oligonucleotide
gggcagaaucuugagaccg

SEQ ID NO: 2761401 - RNA, 19 nt, Artificial Sequence
  Description of Artificial Sequence: Synthetic oligonucleotide
uuugcccagaacugcuggu

SEQ ID NO: 2761402 - RNA, 19 nt, Artificial Sequence
  Description of Artificial Sequence: Synthetic oligonucleotide
gguccuauccaaucauggc

SEQ ID NO: 2761403 - RNA, 19 nt, Artificial Sequence
  Description of Artificial Sequence: Synthetic oligonucleotide
auggcaaaauuacgcuugu

SEQ ID NO: 2761404 - RNA, 19 nt, Artificial Sequence
  Description of Artificial Sequence: Synthetic oligonucleotide
cuuugaccugacucgguuc

SEQ ID NO: 2761405 - RNA, 19 nt, Artificial Sequence
  Description of Artificial Sequence: Synthetic oligonucleotide
acuggacgaagguuugagu

SEQ ID NO: 2761406 - RNA, 19 nt, Artificial Sequence
  Description of Artificial Sequence: Synthetic oligonucleotide
guaaaugaauucuucuuuu

SEQ ID NO: 2761407 - RNA, 19 nt, Artificial Sequence
  Description of Artificial Sequence: Synthetic oligonucleotide
caagccuuuagcuugcagu

SEQ ID NO: 2761408 - RNA, 19 nt, Artificial Sequence
  Description of Artificial Sequence: Synthetic oligonucleotide
cugguuugcccagaacugc

SEQ ID NO: 2761409 - RNA, 19 nt, Artificial Sequence
  Description of Artificial Sequence: Synthetic oligonucleotide
cagaaucuugagaccgggc

SEQ ID NO: 2761410 - RNA, 19 nt, Artificial Sequence
  Description of Artificial Sequence: Synthetic oligonucleotide
aacugcugguuccauucuu

SEQ ID NO: 2761411 - RNA, 19 nt, Artificial Sequence
  Description of Artificial Sequence: Synthetic oligonucleotide
acgugauggcaaaauuacg

SEQ ID NO: 2761412 - RNA, 19 nt, Artificial Sequence
  Description of Artificial Sequence: Synthetic oligonucleotide
ucaauucucugagccuuug

SEQ ID NO: 2761413 - RNA, 19 nt, Artificial Sequence
  Description of Artificial Sequence: Synthetic oligonucleotide
cauccaguguugcucuuug

SEQ ID NO: 2761414 - RNA, 19 nt, Artificial Sequence
  Description of Artificial Sequence: Synthetic oligonucleotide
ucgguucgcaggcccaagc

SEQ ID NO: 2761415 - RNA, 19 nt, Artificial Sequence
  Description of Artificial Sequence: Synthetic oligonucleotide
ucugagccuuuguuccaag

SEQ ID NO: 2761416 - RNA, 19 nt, Artificial Sequence
  Description of Artificial Sequence: Synthetic oligonucleotide
ggcccaagccuuuagcuug

SEQ ID NO: 2761417 - RNA, 19 nt, Artificial Sequence
  Description of Artificial Sequence: Synthetic oligonucleotide
uugcagucuugaguaaaug

SEQ ID NO: 2761418 - RNA, 19 nt, Artificial Sequence
  Description of Artificial Sequence: Synthetic oligonucleotide
gccacuuuccccaugaaga

SEQ ID NO: 2761419 - RNA, 19 nt, Artificial Sequence
  Description of Artificial Sequence: Synthetic oligonucleotide
gagcuuguuccacauccuc

SEQ ID NO: 2761420 - RNA, 19 nt, Artificial Sequence
  Description of Artificial Sequence: Synthetic oligonucleotide
uccccaugaagaacgugau

SEQ ID NO: 2761421 - RNA, 19 nt, Artificial Sequence
  Description of Artificial Sequence: Synthetic oligonucleotide
ucucugagccuuuguucca

SEQ ID NO: 2761422 - RNA, 19 nt, Artificial Sequence
  Description of Artificial Sequence: Synthetic oligonucleotide
caucccugcgcuccgugcc

SEQ ID NO: 2761423 - RNA, 19 nt, Artificial Sequence
  Description of Artificial Sequence: Synthetic oligonucleotide
agcgccacuuuccccauga

SEQ ID NO: 2761424 - RNA, 19 nt, Artificial Sequence
  Description of Artificial Sequence: Synthetic oligonucleotide
gaccugacucgguucgcag

SEQ ID NO: 2761425 - RNA, 19 nt, Artificial Sequence
  Description of Artificial Sequence: Synthetic oligonucleotide
uaccagucucgguuauaag

SEQ ID NO: 2761426 - RNA, 19 nt, Artificial Sequence
  Description of Artificial Sequence: Synthetic oligonucleotide
caguguugcucuuugaccu

SEQ ID NO: 2761427 - RNA, 19 nt, Artificial Sequence
  Description of Artificial Sequence: Synthetic oligonucleotide
ggguccuauccaaucaugg

SEQ ID NO: 2761428 - RNA, 19 nt, Artificial Sequence
  Description of Artificial Sequence: Synthetic oligonucleotide
gugauggcaaaauuacgcu

SEQ ID NO: 2761429 - RNA, 19 nt, Artificial Sequence
  Description of Artificial Sequence: Synthetic oligonucleotide
cuucugucugagcuuguuc

SEQ ID NO: 2761430 - RNA, 19 nt, Artificial Sequence
  Description of Artificial Sequence: Synthetic oligonucleotide
gucucuuuugcuucugucu

SEQ ID NO: 2761431 - RNA, 19 nt, Artificial Sequence
  Description of Artificial Sequence: Synthetic oligonucleotide
aaauucugguuugcccaga

SEQ ID NO: 2761432 - RNA, 19 nt, Artificial Sequence
  Description of Artificial Sequence: Synthetic oligonucleotide
caugaagaacgugauggca

SEQ ID NO: 2761433 - RNA, 19 nt, Artificial Sequence
  Description of Artificial Sequence: Synthetic oligonucleotide
ucauggcaagacugucuug

SEQ ID NO: 2761434 - RNA, 19 nt, Artificial Sequence
  Description of Artificial Sequence: Synthetic oligonucleotide
gguuccauucuugaguuuc

SEQ ID NO: 2761435 - RNA, 19 nt, Artificial Sequence
  Description of Artificial Sequence: Synthetic oligonucleotide
cuggacgccgcaucccugc

SEQ ID NO: 2761436 - RNA, 19 nt, Artificial Sequence
  Description of Artificial Sequence: Synthetic oligonucleotide
ugcccagaacugcugguuc

SEQ ID NO: 2761437 - RNA, 19 nt, Artificial Sequence
  Description of Artificial Sequence: Synthetic oligonucleotide
cuccgugccgcguucccgg

SEQ ID NO: 2761438 - RNA, 19 nt, Artificial Sequence
  Description of Artificial Sequence: Synthetic oligonucleotide
agucuccuaacugcuuguc

SEQ ID NO: 2761439 - RNA, 19 nt, Artificial Sequence
  Description of Artificial Sequence: Synthetic oligonucleotide
acugcugguuccauucuug

SEQ ID NO: 2761440 - RNA, 19 nt, Artificial Sequence
  Description of Artificial Sequence: Synthetic oligonucleotide
agaacuggacgaagguuug

SEQ ID NO: 2761441 - RNA, 19 nt, Artificial Sequence
  Description of Artificial Sequence: Synthetic oligonucleotide
ucugagcuuguuccacauc

SEQ ID NO: 2761442 - RNA, 19 nt, Artificial Sequence
  Description of Artificial Sequence: Synthetic oligonucleotide
agucucgguuauaagacau

SEQ ID NO: 2761443 - RNA, 19 nt, Artificial Sequence
  Description of Artificial Sequence: Synthetic oligonucleotide
acgcuuguaccagucucgg

SEQ ID NO: 2761444 - RNA, 19 nt, Artificial Sequence
  Description of Artificial Sequence: Synthetic oligonucleotide
agcuuguuccacauccucu

SEQ ID NO: 2761445 - RNA, 19 nt, Artificial Sequence
  Description of Artificial Sequence: Synthetic oligonucleotide
cuugaguaaaugaauucuu

SEQ ID NO: 2761446 - RNA, 19 nt, Artificial Sequence
  Description of Artificial Sequence: Synthetic oligonucleotide
uguugcucuuugaccugac

SEQ ID NO: 2761447 - RNA, 19 nt, Artificial Sequence
  Description of Artificial Sequence: Synthetic oligonucleotide
caaucauggcaagacuguc

SEQ ID NO: 2761448 - RNA, 19 nt, Artificial Sequence
  Description of Artificial Sequence: Synthetic oligonucleotide
ggaaauucuuacucagaaa

SEQ ID NO: 2761449 - RNA, 19 nt, Artificial Sequence
  Description of Artificial Sequence: Synthetic oligonucleotide
acucguuuucaggaacaug

SEQ ID NO: 2761450 - RNA, 19 nt, Artificial Sequence
  Description of Artificial Sequence: Synthetic oligonucleotide
uuuccccaugaagaacgug

SEQ ID NO: 2761451 - RNA, 19 nt, Artificial Sequence
  Description of Artificial Sequence: Synthetic oligonucleotide
aucccugcgcuccgugccg

SEQ ID NO: 2761452 - RNA, 19 nt, Artificial Sequence
  Description of Artificial Sequence: Synthetic oligonucleotide
gacaugugcuucuggaaau

SEQ ID NO: 2761453 - RNA, 19 nt, Artificial Sequence
  Description of Artificial Sequence: Synthetic oligonucleotide
uggacgccgcaucccugcg

SEQ ID NO: 2761454 - RNA, 19 nt, Artificial Sequence
  Description of Artificial Sequence: Synthetic oligonucleotide
ccaugaagaacgugauggc

SEQ ID NO: 2761455 - RNA, 19 nt, Artificial Sequence
  Description of Artificial Sequence: Synthetic oligonucleotide
ccuuauaaaagucagccau

SEQ ID NO: 2761456 - RNA, 19 nt, Artificial Sequence
  Description of Artificial Sequence: Synthetic oligonucleotide
auggcaagacugucuugga

SEQ ID NO: 2761457 - RNA, 19 nt, Artificial Sequence
  Description of Artificial Sequence: Synthetic oligonucleotide
gagaccgggcuggacgccg

SEQ ID NO: 2761458 - RNA, 19 nt, Artificial Sequence
  Description of Artificial Sequence: Synthetic oligonucleotide
augugcuucuggaaauucu

SEQ ID NO: 2761459 - RNA, 19 nt, Artificial Sequence
  Description of Artificial Sequence: Synthetic oligonucleotide
caugugcuucuggaaauuc

SEQ ID NO: 2761460 - RNA, 19 nt, Artificial Sequence
  Description of Artificial Sequence: Synthetic oligonucleotide
ugaccugacucgguucgca

SEQ ID NO: 2761461 - RNA, 19 nt, Artificial Sequence
  Description of Artificial Sequence: Synthetic oligonucleotide
cuuguaccagucucgguua

SEQ ID NO: 2761462 - RNA, 19 nt, Artificial Sequence
  Description of Artificial Sequence: Synthetic oligonucleotide
gcagaaucuugagaccggg

SEQ ID NO: 2761463 - RNA, 19 nt, Artificial Sequence
  Description of Artificial Sequence: Synthetic oligonucleotide
gguuauaagacaugugcuu

SEQ ID NO: 2761464 - RNA, 19 nt, Artificial Sequence
  Description of Artificial Sequence: Synthetic oligonucleotide
guaccagucucgguuauaa

SEQ ID NO: 2761465 - RNA, 19 nt, Artificial Sequence
  Description of Artificial Sequence: Synthetic oligonucleotide
uuguaccagucucgguuau

SEQ ID NO: 2761466 - RNA, 19 nt, Artificial Sequence
  Description of Artificial Sequence: Synthetic oligonucleotide
gcugguuccauucuugagu

SEQ ID NO: 2761467 - RNA, 19 nt, Artificial Sequence
  Description of Artificial Sequence: Synthetic oligonucleotide
gcucuuugaccugacucgg

SEQ ID NO: 2761468 - RNA, 19 nt, Artificial Sequence
  Description of Artificial Sequence: Synthetic oligonucleotide
ccugacucgguucgcaggc

SEQ ID NO: 2761469 - RNA, 19 nt, Artificial Sequence
  Description of Artificial Sequence: Synthetic oligonucleotide
cucuuuugcuucugucuga

SEQ ID NO: 2761470 - RNA, 19 nt, Artificial Sequence
  Description of Artificial Sequence: Synthetic oligonucleotide
cucgagcgccacuuucccc

SEQ ID NO: 2761471 - RNA, 19 nt, Artificial Sequence
  Description of Artificial Sequence: Synthetic oligonucleotide
uucccgggccagccggccg

SEQ ID NO: 2761472 - RNA, 19 nt, Artificial Sequence
  Description of Artificial Sequence: Synthetic oligonucleotide
aggcccaagccuuuagcuu

SEQ ID NO: 2761473 - RNA, 19 nt, Artificial Sequence
  Description of Artificial Sequence: Synthetic oligonucleotide
cugucugagcuuguuccac

SEQ ID NO: 2761474 - RNA, 19 nt, Artificial Sequence
  Description of Artificial Sequence: Synthetic oligonucleotide
gucucgguuauaagacaug

SEQ ID NO: 2761475 - RNA, 19 nt, Artificial Sequence
  Description of Artificial Sequence: Synthetic oligonucleotide
cuauccaaucauggcaaga

SEQ ID NO: 2761476 - RNA, 19 nt, Artificial Sequence
  Description of Artificial Sequence: Synthetic oligonucleotide
cagucucgguuauaagaca

SEQ ID NO: 2761477 - RNA, 19 nt, Artificial Sequence
  Description of Artificial Sequence: Synthetic oligonucleotide
acugucuuggagggcagaa

SEQ ID NO: 2761478 - RNA, 19 nt, Artificial Sequence
  Description of Artificial Sequence: Synthetic oligonucleotide
gggacucguuuucaggaac

SEQ ID NO: 2761479 - RNA, 19 nt, Artificial Sequence
  Description of Artificial Sequence: Synthetic oligonucleotide
ggcagaaucuugagaccgg

SEQ ID NO: 2761480 - RNA, 19 nt, Artificial Sequence
  Description of Artificial Sequence: Synthetic oligonucleotide
guuuaaguuuaagucuccu

SEQ ID NO: 2761481 - RNA, 19 nt, Artificial Sequence
  Description of Artificial Sequence: Synthetic oligonucleotide
cuuuagcuugcagucuuga

SEQ ID NO: 2761482 - RNA, 19 nt, Artificial Sequence
  Description of Artificial Sequence: Synthetic oligonucleotide
ggagggcagaaucuugaga

SEQ ID NO: 2761483 - RNA, 19 nt, Artificial Sequence
  Description of Artificial Sequence: Synthetic oligonucleotide
auccaguguugcucuuuga

SEQ ID NO: 2761484 - RNA, 19 nt, Artificial Sequence
  Description of Artificial Sequence: Synthetic oligonucleotide
gucucaauucucugagccu

SEQ ID NO: 2761485 - RNA, 19 nt, Artificial Sequence
  Description of Artificial Sequence: Synthetic oligonucleotide
ucccgggccagccggccgc

SEQ ID NO: 2761486 - RNA, 19 nt, Artificial Sequence
  Description of Artificial Sequence: Synthetic oligonucleotide
caagacugucuuggagggc

SEQ ID NO: 2761487 - RNA, 19 nt, Artificial Sequence
  Description of Artificial Sequence: Synthetic oligonucleotide
uugaccugacucgguucgc

SEQ ID NO: 2761488 - RNA, 19 nt, Artificial Sequence
  Description of Artificial Sequence: Synthetic oligonucleotide
ccauucuugaguuucuugu

SEQ ID NO: 2761489 - RNA, 19 nt, Artificial Sequence
  Description of Artificial Sequence: Synthetic oligonucleotide
cugcugguuccauucuuga

SEQ ID NO: 2761490 - RNA, 19 nt, Artificial Sequence
  Description of Artificial Sequence: Synthetic oligonucleotide
uccgugccgcguucccggg

SEQ ID NO: 2761491 - RNA, 19 nt, Artificial Sequence
  Description of Artificial Sequence: Synthetic oligonucleotide
gaagaacgugauggcaaaa

SEQ ID NO: 2761492 - RNA, 19 nt, Artificial Sequence
  Description of Artificial Sequence: Synthetic oligonucleotide
gcuuguaccagucucgguu

SEQ ID NO: 2761493 - RNA, 19 nt, Artificial Sequence
  Description of Artificial Sequence: Synthetic oligonucleotide
uugcccagaacugcugguu

SEQ ID NO: 2761494 - RNA, 19 nt, Artificial Sequence
  Description of Artificial Sequence: Synthetic oligonucleotide
cuugcagucuugaguaaau

SEQ ID NO: 2761495 - RNA, 19 nt, Artificial Sequence
  Description of Artificial Sequence: Synthetic oligonucleotide
gacgccgcaucccugcgcu

SEQ ID NO: 2761496 - RNA, 19 nt, Artificial Sequence
  Description of Artificial Sequence: Synthetic oligonucleotide
gcuucuggaaauucuuacu

SEQ ID NO: 2761497 - RNA, 19 nt, Artificial Sequence
  Description of Artificial Sequence: Synthetic oligonucleotide
ugcuucugucugagcuugu

SEQ ID NO: 2761498 - RNA, 19 nt, Artificial Sequence
  Description of Artificial Sequence: Synthetic oligonucleotide
uuccauucuugaguuucuu

SEQ ID NO: 2761499 - RNA, 19 nt, Artificial Sequence
  Description of Artificial Sequence: Synthetic oligonucleotide
gaacuggacgaagguuuga

SEQ ID NO: 2761500 - RNA, 19 nt, Artificial Sequence
  Description of Artificial Sequence: Synthetic oligonucleotide
uucgcaggcccaagccuuu

SEQ ID NO: 2761501 - RNA, 19 nt, Artificial Sequence
  Description of Artificial Sequence: Synthetic oligonucleotide
gcccagaacugcugguucc

SEQ ID NO: 2761502 - RNA, 19 nt, Artificial Sequence
  Description of Artificial Sequence: Synthetic oligonucleotide
ccuauccaaucauggcaag

SEQ ID NO: 2761503 - RNA, 19 nt, Artificial Sequence
  Description of Artificial Sequence: Synthetic oligonucleotide
uguaccagucucgguuaua

SEQ ID NO: 2761504 - RNA, 19 nt, Artificial Sequence
  Description of Artificial Sequence: Synthetic oligonucleotide
acaugugcuucuggaaauu

SEQ ID NO: 2761505 - RNA, 19 nt, Artificial Sequence
  Description of Artificial Sequence: Synthetic oligonucleotide
cugguuccauucuugaguu

SEQ ID NO: 2761506 - RNA, 19 nt, Artificial Sequence
  Description of Artificial Sequence: Synthetic oligonucleotide
agcuugcagucuugaguaa

SEQ ID NO: 2761507 - RNA, 19 nt, Artificial Sequence
  Description of Artificial Sequence: Synthetic oligonucleotide
gaacugcugguuccauucu

SEQ ID NO: 2761508 - RNA, 19 nt, Artificial Sequence
  Description of Artificial Sequence: Synthetic oligonucleotide
cuaacugcuugucucuuuu

SEQ ID NO: 2761509 - RNA, 19 nt, Artificial Sequence
  Description of Artificial Sequence: Synthetic oligonucleotide
acgaagguuugaguauuua

SEQ ID NO: 2761510 - RNA, 19 nt, Artificial Sequence
  Description of Artificial Sequence: Synthetic oligonucleotide
caggcccaagccuuuagcu

SEQ ID NO: 2761511 - RNA, 19 nt, Artificial Sequence
  Description of Artificial Sequence: Synthetic oligonucleotide
ugagaccgggcuggacgcc

SEQ ID NO: 2761512 - RNA, 19 nt, Artificial Sequence
  Description of Artificial Sequence: Synthetic oligonucleotide
ccuuauuaaaagucaaauu

SEQ ID NO: 2761513 - RNA, 19 nt, Artificial Sequence
  Description of Artificial Sequence: Synthetic oligonucleotide
guguugcucuuugaccuga

SEQ ID NO: 2761514 - RNA, 19 nt, Artificial Sequence
  Description of Artificial Sequence: Synthetic oligonucleotide
uccuaacugcuugucucuu

SEQ ID NO: 2761515 - RNA, 19 nt, Artificial Sequence
  Description of Artificial Sequence: Synthetic oligonucleotide
cuccuaacugcuugucucu

SEQ ID NO: 2761516 - RNA, 19 nt, Artificial Sequence
  Description of Artificial Sequence: Synthetic oligonucleotide
cugacucgguucgcaggcc

SEQ ID NO: 2761517 - RNA, 19 nt, Artificial Sequence
  Description of Artificial Sequence: Synthetic oligonucleotide
agaccgggcuggacgccgc

SEQ ID NO: 2761518 - RNA, 19 nt, Artificial Sequence
  Description of Artificial Sequence: Synthetic oligonucleotide
uggcaaaauuacgcuugua

SEQ ID NO: 2761519 - RNA, 19 nt, Artificial Sequence
  Description of Artificial Sequence: Synthetic oligonucleotide
agacugucuuggagggcag

SEQ ID NO: 2761520 - RNA, 19 nt, Artificial Sequence
  Description of Artificial Sequence: Synthetic oligonucleotide
auccucucgagcgccacuu

SEQ ID NO: 2761521 - RNA, 19 nt, Artificial Sequence
  Description of Artificial Sequence: Synthetic oligonucleotide
ggacucguuuucaggaaca

SEQ ID NO: 2761522 - RNA, 19 nt, Artificial Sequence
  Description of Artificial Sequence: Synthetic oligonucleotide
gguuugcccagaacugcug

SEQ ID NO: 2761523 - RNA, 19 nt, Artificial Sequence
  Description of Artificial Sequence: Synthetic oligonucleotide
cugcuugucucuuuugcuu

SEQ ID NO: 2761524 - RNA, 19 nt, Artificial Sequence
  Description of Artificial Sequence: Synthetic oligonucleotide
ugcgcuccgugccgcguuc

SEQ ID NO: 2761525 - RNA, 19 nt, Artificial Sequence
  Description of Artificial Sequence: Synthetic oligonucleotide
ugguuccauucuugaguuu

SEQ ID NO: 2761526 - RNA, 19 nt, Artificial Sequence
  Description of Artificial Sequence: Synthetic oligonucleotide
guugcucuuugaccugacu

SEQ ID NO: 2761527 - RNA, 19 nt, Artificial Sequence
  Description of Artificial Sequence: Synthetic oligonucleotide
cugcauccaguguugcucu

SEQ ID NO: 2761528 - RNA, 19 nt, Artificial Sequence
  Description of Artificial Sequence: Synthetic oligonucleotide
ccuuuagcuugcagucuug

SEQ ID NO: 2761529 - RNA, 19 nt, Artificial Sequence
  Description of Artificial Sequence: Synthetic oligonucleotide
gggguccuauccaaucaug

SEQ ID NO: 2761530 - RNA, 19 nt, Artificial Sequence
  Description of Artificial Sequence: Synthetic oligonucleotide
gucuuggagggcagaaucu

SEQ ID NO: 2761531 - RNA, 19 nt, Artificial Sequence
  Description of Artificial Sequence: Synthetic oligonucleotide
cuccucugcauccaguguu

SEQ ID NO: 2761532 - RNA, 19 nt, Artificial Sequence
  Description of Artificial Sequence: Synthetic oligonucleotide
uccucucgagcgccacuuu

SEQ ID NO: 2761533 - RNA, 19 nt, Artificial Sequence
  Description of Artificial Sequence: Synthetic oligonucleotide
gugcuucuggaaauucuua

SEQ ID NO: 2761534 - RNA, 19 nt, Artificial Sequence
  Description of Artificial Sequence: Synthetic oligonucleotide
gacugucuuggagggcaga

SEQ ID NO: 2761535 - RNA, 19 nt, Artificial Sequence
  Description of Artificial Sequence: Synthetic oligonucleotide
ccaaucauggcaagacugu

SEQ ID NO: 2761536 - RNA, 19 nt, Artificial Sequence
  Description of Artificial Sequence: Synthetic oligonucleotide
gcaucccugcgcuccgugc

SEQ ID NO: 2761537 - RNA, 19 nt, Artificial Sequence
  Description of Artificial Sequence: Synthetic oligonucleotide
ugcauccaguguugcucuu

SEQ ID NO: 2761538 - RNA, 19 nt, Artificial Sequence
  Description of Artificial Sequence: Synthetic oligonucleotide
guuccauucuugaguuucu

SEQ ID NO: 2761539 - RNA, 19 nt, Artificial Sequence
  Description of Artificial Sequence: Synthetic oligonucleotide
ccaagccuuuagcuugcag

SEQ ID NO: 2761540 - RNA, 19 nt, Artificial Sequence
  Description of Artificial Sequence: Synthetic oligonucleotide
gucugagcuuguuccacau

SEQ ID NO: 2761541 - RNA, 19 nt, Artificial Sequence
  Description of Artificial Sequence: Synthetic oligonucleotide
cucgguucgcaggcccaag

SEQ ID NO: 2761542 - RNA, 19 nt, Artificial Sequence
  Description of Artificial Sequence: Synthetic oligonucleotide
gguucgcaggcccaagccu

SEQ ID NO: 2761543 - RNA, 19 nt, Artificial Sequence
  Description of Artificial Sequence: Synthetic oligonucleotide
gagcgccacuuuccccaug

SEQ ID NO: 2761544 - RNA, 19 nt, Artificial Sequence
  Description of Artificial Sequence: Synthetic oligonucleotide
cgccacuuuccccaugaag

SEQ ID NO: 2761545 - RNA, 19 nt, Artificial Sequence
  Description of Artificial Sequence: Synthetic oligonucleotide
gcuugcagucuugaguaaa

SEQ ID NO: 2761546 - RNA, 19 nt, Artificial Sequence
  Description of Artificial Sequence: Synthetic oligonucleotide
cuuuccccaugaagaacgu

SEQ ID NO: 2761547 - RNA, 19 nt, Artificial Sequence
  Description of Artificial Sequence: Synthetic oligonucleotide
cacauccucucgagcgcca

SEQ ID NO: 2761548 - RNA, 19 nt, Artificial Sequence
  Description of Artificial Sequence: Synthetic oligonucleotide
gacucguuuucaggaacau

SEQ ID NO: 2761549 - RNA, 19 nt, Artificial Sequence
  Description of Artificial Sequence: Synthetic oligonucleotide
ggggacucguuuucaggaa

SEQ ID NO: 2761550 - RNA, 19 nt, Artificial Sequence
  Description of Artificial Sequence: Synthetic oligonucleotide
ucccugcgcuccgugccgc

SEQ ID NO: 2761551 - RNA, 19 nt, Artificial Sequence
  Description of Artificial Sequence: Synthetic oligonucleotide
ugccgcguucccgggccag

SEQ ID NO: 2761552 - RNA, 19 nt, Artificial Sequence
  Description of Artificial Sequence: Synthetic oligonucleotide
ccacauccucucgagcgcc

SEQ ID NO: 2761553 - RNA, 19 nt, Artificial Sequence
  Description of Artificial Sequence: Synthetic oligonucleotide
acucgguucgcaggcccaa

SEQ ID NO: 2761554 - RNA, 19 nt, Artificial Sequence
  Description of Artificial Sequence: Synthetic oligonucleotide
ccccaugaagaacgugaug

SEQ ID NO: 2761555 - RNA, 19 nt, Artificial Sequence
  Description of Artificial Sequence: Synthetic oligonucleotide
caucuccucugcauccagu

SEQ ID NO: 2761556 - RNA, 19 nt, Artificial Sequence
  Description of Artificial Sequence: Synthetic oligonucleotide
acgccgcaucccugcgcuc

SEQ ID NO: 2761557 - RNA, 19 nt, Artificial Sequence
  Description of Artificial Sequence: Synthetic oligonucleotide
cucuuugaccugacucggu

SEQ ID NO: 2761558 - RNA, 19 nt, Artificial Sequence
  Description of Artificial Sequence: Synthetic oligonucleotide
ggacgccgcaucccugcgc

SEQ ID NO: 2761559 - RNA, 19 nt, Artificial Sequence
  Description of Artificial Sequence: Synthetic oligonucleotide
cguuuucaggaacaugaaa

SEQ ID NO: 2761560 - RNA, 19 nt, Artificial Sequence
  Description of Artificial Sequence: Synthetic oligonucleotide
gccgcaucccugcgcuccg

SEQ ID NO: 2761561 - RNA, 19 nt, Artificial Sequence
  Description of Artificial Sequence: Synthetic oligonucleotide
cgguuauaagacaugugcu

SEQ ID NO: 2761562 - RNA, 19 nt, Artificial Sequence
  Description of Artificial Sequence: Synthetic oligonucleotide
cgguucgcaggcccaagcc

SEQ ID NO: 2761563 - RNA, 19 nt, Artificial Sequence
  Description of Artificial Sequence: Synthetic oligonucleotide
gcuccgugccgcguucccg

SEQ ID NO: 2761564 - RNA, 19 nt, Artificial Sequence
  Description of Artificial Sequence: Synthetic oligonucleotide
guucgcaggcccaagccuu

SEQ ID NO: 2761565 - RNA, 19 nt, Artificial Sequence
  Description of Artificial Sequence: Synthetic oligonucleotide
cgugccgcguucccgggcc

SEQ ID NO: 2761566 - RNA, 19 nt, Artificial Sequence
  Description of Artificial Sequence: Synthetic oligonucleotide
cucaauucucugagccuuu

SEQ ID NO: 2761567 - RNA, 19 nt, Artificial Sequence
  Description of Artificial Sequence: Synthetic oligonucleotide
gacgaagguuugaguauuu

SEQ ID NO: 2761568 - RNA, 19 nt, Artificial Sequence
  Description of Artificial Sequence: Synthetic oligonucleotide
gccuuuagcuugcagucuu

SEQ ID NO: 2761569 - RNA, 19 nt, Artificial Sequence
  Description of Artificial Sequence: Synthetic oligonucleotide
gcccaagccuuuagcuugc

SEQ ID NO: 2761570 - RNA, 19 nt, Artificial Sequence
  Description of Artificial Sequence: Synthetic oligonucleotide
gaccgggcuggacgccgca

SEQ ID NO: 2761571 - RNA, 19 nt, Artificial Sequence
  Description of Artificial Sequence: Synthetic oligonucleotide
cagaacugcugguuccauu

SEQ ID NO: 2761572 - RNA, 19 nt, Artificial Sequence
  Description of Artificial Sequence: Synthetic oligonucleotide
cgaagguuugaguauuuau

SEQ ID NO: 2761573 - RNA, 19 nt, Artificial Sequence
  Description of Artificial Sequence: Synthetic oligonucleotide
ggacgaagguuugaguauu

SEQ ID NO: 2761574 - RNA, 19 nt, Artificial Sequence
  Description of Artificial Sequence: Synthetic oligonucleotide
ucgcaggcccaagccuuua

SEQ ID NO: 2761575 - RNA, 19 nt, Artificial Sequence
  Description of Artificial Sequence: Synthetic oligonucleotide
cgggcuggacgccgcaucc

SEQ ID NO: 2761576 - RNA, 19 nt, Artificial Sequence
  Description of Artificial Sequence: Synthetic oligonucleotide
gggccagccggccgccgcc

SEQ ID NO: 2761577 - RNA, 19 nt, Artificial Sequence
  Description of Artificial Sequence: Synthetic oligonucleotide
gcuggacgccgcaucccug

SEQ ID NO: 2761578 - RNA, 19 nt, Artificial Sequence
  Description of Artificial Sequence: Synthetic oligonucleotide
cauccucucgagcgccacu

SEQ ID NO: 2761579 - RNA, 19 nt, Artificial Sequence
  Description of Artificial Sequence: Synthetic oligonucleotide
gggcuggacgccgcauccc

SEQ ID NO: 2761580 - RNA, 19 nt, Artificial Sequence
  Description of Artificial Sequence: Synthetic oligonucleotide
cugucuuggagggcagaau

SEQ ID NO: 2761581 - RNA, 19 nt, Artificial Sequence
  Description of Artificial Sequence: Synthetic oligonucleotide
cccagaacugcugguucca

SEQ ID NO: 2761582 - RNA, 19 nt, Artificial Sequence
  Description of Artificial Sequence: Synthetic oligonucleotide
accgggcuggacgccgcau

SEQ ID NO: 2761583 - RNA, 19 nt, Artificial Sequence
  Description of Artificial Sequence: Synthetic oligonucleotide
cgccgcaucccugcgcucc

SEQ ID NO: 2761584 - RNA, 19 nt, Artificial Sequence
  Description of Artificial Sequence: Synthetic oligonucleotide
cgcaggcccaagccuuuag

SEQ ID NO: 2761585 - RNA, 19 nt, Artificial Sequence
  Description of Artificial Sequence: Synthetic oligonucleotide
ccgggcuggacgccgcauc

SEQ ID NO: 2761586 - RNA, 19 nt, Artificial Sequence
  Description of Artificial Sequence: Synthetic oligonucleotide
cccugcgcuccgugccgcg

SEQ ID NO: 2761587 - RNA, 19 nt, Artificial Sequence
  Description of Artificial Sequence: Synthetic oligonucleotide
gugccgcguucccgggcca

SEQ ID NO: 2761588 - RNA, 19 nt, Artificial Sequence
  Description of Artificial Sequence: Synthetic oligonucleotide
cguucccgggccagccggc

SEQ ID NO: 2761589 - RNA, 19 nt, Artificial Sequence
  Description of Artificial Sequence: Synthetic oligonucleotide
cgcguucccgggccagccg

SEQ ID NO: 2761590 - RNA, 19 nt, Artificial Sequence
  Description of Artificial Sequence: Synthetic oligonucleotide
ccgcguucccgggccagcc

SEQ ID NO: 2761591 - RNA, 19 nt, Artificial Sequence
  Description of Artificial Sequence: Synthetic oligonucleotide
ccgugccgcguucccgggc

SEQ ID NO: 2761592 - RNA, 19 nt, Artificial Sequence
  Description of Artificial Sequence: Synthetic oligonucleotide
ccuaacugcuugucucuuu

SEQ ID NO: 2761593 - RNA, 19 nt, Artificial Sequence
  Description of Artificial Sequence: Synthetic oligonucleotide
cgcaucccugcgcuccgug

SEQ ID NO: 2761594 - RNA, 19 nt, Artificial Sequence
  Description of Artificial Sequence: Synthetic oligonucleotide
gccgcguucccgggccagc

SEQ ID NO: 2761595 - RNA, 19 nt, Artificial Sequence
  Description of Artificial Sequence: Synthetic oligonucleotide
cgcuccgugccgcguuccc

SEQ ID NO: 2761596 - RNA, 19 nt, Artificial Sequence
  Description of Artificial Sequence: Synthetic oligonucleotide
gcauccaguguugcucuuu

SEQ ID NO: 2761597 - RNA, 19 nt, Artificial Sequence
  Description of Artificial Sequence: Synthetic oligonucleotide
gccagccggccgccgccgc

SEQ ID NO: 2761598 - RNA, 19 nt, Artificial Sequence
  Description of Artificial Sequence: Synthetic oligonucleotide
gcgcuccgugccgcguucc

SEQ ID NO: 2761599 - RNA, 19 nt, Artificial Sequence
  Description of Artificial Sequence: Synthetic oligonucleotide
gcgccacuuuccccaugaa

SEQ ID NO: 2761600 - RNA, 19 nt, Artificial Sequence
  Description of Artificial Sequence: Synthetic oligonucleotide
cgggccagccggccgccgc

SEQ ID NO: 2761601 - RNA, 19 nt, Artificial Sequence
  Description of Artificial Sequence: Synthetic oligonucleotide
cugcgcuccgugccgcguu

SEQ ID NO: 2761602 - RNA, 19 nt, Artificial Sequence
  Description of Artificial Sequence: Synthetic oligonucleotide
cccaagccuuuagcuugca

SEQ ID NO: 2761603 - RNA, 19 nt, Artificial Sequence
  Description of Artificial Sequence: Synthetic oligonucleotide
cccgggccagccggccgcc

SEQ ID NO: 2761604 - RNA, 19 nt, Artificial Sequence
  Description of Artificial Sequence: Synthetic oligonucleotide
ccagaacugcugguuccau

SEQ ID NO: 2761605 - RNA, 19 nt, Artificial Sequence
  Description of Artificial Sequence: Synthetic oligonucleotide
cgcuuguaccagucucggu

SEQ ID NO: 2761606 - RNA, 19 nt, Artificial Sequence
  Description of Artificial Sequence: Synthetic oligonucleotide
ccgggccagccggccgccg

SEQ ID NO: 2761607 - RNA, 19 nt, Artificial Sequence
  Description of Artificial Sequence: Synthetic oligonucleotide
ccugcgcuccgugccgcgu

SEQ ID NO: 2761608 - RNA, 19 nt, Artificial Sequence
  Description of Artificial Sequence: Synthetic oligonucleotide
cgagcgccacuuuccccau

SEQ ID NO: 2761609 - RNA, 19 nt, Artificial Sequence
  Description of Artificial Sequence: Synthetic oligonucleotide
ccgcaucccugcgcuccgu

SEQ ID NO: 2761610 - RNA, 19 nt, Artificial Sequence
  Description of Artificial Sequence: Synthetic oligonucleotide
aagaaaguaucucugagac

SEQ ID NO: 2761611 - RNA, 19 nt, Artificial Sequence
  Description of Artificial Sequence: Synthetic oligonucleotide
uugauaacgaagcagaaug

SEQ ID NO: 2761612 - RNA, 19 nt, Artificial Sequence
  Description of Artificial Sequence: Synthetic oligonucleotide
aaagcuucaacccaguccu

SEQ ID NO: 2761613 - RNA, 19 nt, Artificial Sequence
  Description of Artificial Sequence: Synthetic oligonucleotide
ucaucgagggcaaagaagc

SEQ ID NO: 2761614 - RNA, 19 nt, Artificial Sequence
  Description of Artificial Sequence: Synthetic oligonucleotide
cuugagaacaucuuugagc

SEQ ID NO: 2761615 - RNA, 19 nt, Artificial Sequence
  Description of Artificial Sequence: Synthetic oligonucleotide
ugguaaaagucaucgaggg

SEQ ID NO: 2761616 - RNA, 19 nt, Artificial Sequence
  Description of Artificial Sequence: Synthetic oligonucleotide
gagaucaccagacuugacg

SEQ ID NO: 2761617 - RNA, 19 nt, Artificial Sequence
  Description of Artificial Sequence: Synthetic oligonucleotide
cuuugagcaguauaguacg

SEQ ID NO: 2761618 - RNA, 19 nt, Artificial Sequence
  Description of Artificial Sequence: Synthetic oligonucleotide
ugaagaaaguaucucugag

SEQ ID NO: 2761619 - RNA, 19 nt, Artificial Sequence
  Description of Artificial Sequence: Synthetic oligonucleotide
uaagagaucaccagacuug

SEQ ID NO: 2761620 - RNA, 19 nt, Artificial Sequence
  Description of Artificial Sequence: Synthetic oligonucleotide
ucuuugagcaguauaguac

SEQ ID NO: 2761621 - RNA, 19 nt, Artificial Sequence
  Description of Artificial Sequence: Synthetic oligonucleotide
caguauaguacgcagaggc

SEQ ID NO: 2761622 - RNA, 19 nt, Artificial Sequence
  Description of Artificial Sequence: Synthetic oligonucleotide
gguacgguaaucuugcugg

SEQ ID NO: 2761623 - RNA, 19 nt, Artificial Sequence
  Description of Artificial Sequence: Synthetic oligonucleotide
uuugggguagcuaugcuca

SEQ ID NO: 2761624 - RNA, 19 nt, Artificial Sequence
  Description of Artificial Sequence: Synthetic oligonucleotide
augaucucagucuuguagg

SEQ ID NO: 2761625 - RNA, 19 nt, Artificial Sequence
  Description of Artificial Sequence: Synthetic oligonucleotide
ugauaacgaagcagaaugg

SEQ ID NO: 2761626 - RNA, 19 nt, Artificial Sequence
  Description of Artificial Sequence: Synthetic oligonucleotide
ucauuaagagaucaccaga

SEQ ID NO: 2761627 - RNA, 19 nt, Artificial Sequence
  Description of Artificial Sequence: Synthetic oligonucleotide
acucuuaaugacugagacc

SEQ ID NO: 2761628 - RNA, 19 nt, Artificial Sequence
  Description of Artificial Sequence: Synthetic oligonucleotide
agcagaauggaguuuuggg

SEQ ID NO: 2761629 - RNA, 19 nt, Artificial Sequence
  Description of Artificial Sequence: Synthetic oligonucleotide
uaacgaagcagaauggagu

SEQ ID NO: 2761630 - RNA, 19 nt, Artificial Sequence
  Description of Artificial Sequence: Synthetic oligonucleotide
cauuaagagaucaccagac

SEQ ID NO: 2761631 - RNA, 19 nt, Artificial Sequence
  Description of Artificial Sequence: Synthetic oligonucleotide
cagaugguaaaagucaucg

SEQ ID NO: 2761632 - RNA, 19 nt, Artificial Sequence
  Description of Artificial Sequence: Synthetic oligonucleotide
agcaguauaguacgcagag

SEQ ID NO: 2761633 - RNA, 19 nt, Artificial Sequence
  Description of Artificial Sequence: Synthetic oligonucleotide
guaaaagucaucgagggca

SEQ ID NO: 2761634 - RNA, 19 nt, Artificial Sequence
  Description of Artificial Sequence: Synthetic oligonucleotide
uugucccucauuaagagau

SEQ ID NO: 2761635 - RNA, 19 nt, Artificial Sequence
  Description of Artificial Sequence: Synthetic oligonucleotide
uuaaugacugagaccuccg

SEQ ID NO: 2761636 - RNA, 19 nt, Artificial Sequence
  Description of Artificial Sequence: Synthetic oligonucleotide
aaguaucucugagacaggg

SEQ ID NO: 2761637 - RNA, 19 nt, Artificial Sequence
  Description of Artificial Sequence: Synthetic oligonucleotide
gugguuaugauuucaaaca

SEQ ID NO: 2761638 - RNA, 19 nt, Artificial Sequence
  Description of Artificial Sequence: Synthetic oligonucleotide
uuaagagaucaccagacuu

SEQ ID NO: 2761639 - RNA, 19 nt, Artificial Sequence
  Description of Artificial Sequence: Synthetic oligonucleotide
aaagaagcgacguuuccaa

SEQ ID NO: 2761640 - RNA, 19 nt, Artificial Sequence
  Description of Artificial Sequence: Synthetic oligonucleotide
uuggguacgguaaucuugc

SEQ ID NO: 2761641 - RNA, 19 nt, Artificial Sequence
  Description of Artificial Sequence: Synthetic oligonucleotide
cuuguaggccaucugaggc

SEQ ID NO: 2761642 - RNA, 19 nt, Artificial Sequence
  Description of Artificial Sequence: Synthetic oligonucleotide
uuggcuugaagaaaguauc

SEQ ID NO: 2761643 - RNA, 19 nt, Artificial Sequence
  Description of Artificial Sequence: Synthetic oligonucleotide
caaagcuucaacccagucc

SEQ ID NO: 2761644 - RNA, 19 nt, Artificial Sequence
  Description of Artificial Sequence: Synthetic oligonucleotide
aaugacugagaccuccgca

SEQ ID NO: 2761645 - RNA, 19 nt, Artificial Sequence
  Description of Artificial Sequence: Synthetic oligonucleotide
cucauuaagagaucaccag

SEQ ID NO: 2761646 - RNA, 19 nt, Artificial Sequence
  Description of Artificial Sequence: Synthetic oligonucleotide
ugagcaguauaguacgcag

SEQ ID NO: 2761647 - RNA, 19 nt, Artificial Sequence
  Description of Artificial Sequence: Synthetic oligonucleotide
ucuugagaacaucuuugag

SEQ ID NO: 2761648 - RNA, 19 nt, Artificial Sequence
  Description of Artificial Sequence: Synthetic oligonucleotide
aacucuuaccucacauucc

SEQ ID NO: 2761649 - RNA, 19 nt, Artificial Sequence
  Description of Artificial Sequence: Synthetic oligonucleotide
aacagguugucccucauua

SEQ ID NO: 2761650 - RNA, 19 nt, Artificial Sequence
  Description of Artificial Sequence: Synthetic oligonucleotide
gacguuuccaacucuuacc

SEQ ID NO: 2761651 - RNA, 19 nt, Artificial Sequence
  Description of Artificial Sequence: Synthetic oligonucleotide
aguagccacucuuaaugac

SEQ ID NO: 2761652 - RNA, 19 nt, Artificial Sequence
  Description of Artificial Sequence: Synthetic oligonucleotide
agacagggcauugauaacg

SEQ ID NO: 2761653 - RNA, 19 nt, Artificial Sequence
  Description of Artificial Sequence: Synthetic oligonucleotide
aaagucaucgagggcaaag

SEQ ID NO: 2761654 - RNA, 19 nt, Artificial Sequence
  Description of Artificial Sequence: Synthetic oligonucleotide
cuugcuucacacaguagcc

SEQ ID NO: 2761655 - RNA, 19 nt, Artificial Sequence
  Description of Artificial Sequence: Synthetic oligonucleotide
ugaaguagcagaugguaaa

SEQ ID NO: 2761656 - RNA, 19 nt, Artificial Sequence
  Description of Artificial Sequence: Synthetic oligonucleotide
aguagcagaugguaaaagu

SEQ ID NO: 2761657 - RNA, 19 nt, Artificial Sequence
  Description of Artificial Sequence: Synthetic oligonucleotide
gaagaaaguaucucugaga

SEQ ID NO: 2761658 - RNA, 19 nt, Artificial Sequence
  Description of Artificial Sequence: Synthetic oligonucleotide
augacugagaccuccgcag

SEQ ID NO: 2761659 - RNA, 19 nt, Artificial Sequence
  Description of Artificial Sequence: Synthetic oligonucleotide
agaucuuucuggucauugg

SEQ ID NO: 2761660 - RNA, 19 nt, Artificial Sequence
  Description of Artificial Sequence: Synthetic oligonucleotide
agaucaccagacuugacga

SEQ ID NO: 2761661 - RNA, 19 nt, Artificial Sequence
  Description of Artificial Sequence: Synthetic oligonucleotide
cuuaaugacugagaccucc

SEQ ID NO: 2761662 - RNA, 19 nt, Artificial Sequence
  Description of Artificial Sequence: Synthetic oligonucleotide
aacaucuuugagcaguaua

SEQ ID NO: 2761663 - RNA, 19 nt, Artificial Sequence
  Description of Artificial Sequence: Synthetic oligonucleotide
uauaguacgcagaggcucu

SEQ ID NO: 2761664 - RNA, 19 nt, Artificial Sequence
  Description of Artificial Sequence: Synthetic oligonucleotide
aguuagguuucugagaacu

SEQ ID NO: 2761665 - RNA, 19 nt, Artificial Sequence
  Description of Artificial Sequence: Synthetic oligonucleotide
guuuccaacucuuaccuca

SEQ ID NO: 2761666 - RNA, 19 nt, Artificial Sequence
  Description of Artificial Sequence: Synthetic oligonucleotide
agaacuucaguggccaugg

SEQ ID NO: 2761667 - RNA, 19 nt, Artificial Sequence
  Description of Artificial Sequence: Synthetic oligonucleotide
uagguuucugagaacuuca

SEQ ID NO: 2761668 - RNA, 19 nt, Artificial Sequence
  Description of Artificial Sequence: Synthetic oligonucleotide
cacucuuaaugacugagac

SEQ ID NO: 2761669 - RNA, 19 nt, Artificial Sequence
  Description of Artificial Sequence: Synthetic oligonucleotide
cuuggguacgguaaucuug

SEQ ID NO: 2761670 - RNA, 19 nt, Artificial Sequence
  Description of Artificial Sequence: Synthetic oligonucleotide
caucccaccauucuggcug

SEQ ID NO: 2761671 - RNA, 19 nt, Artificial Sequence
  Description of Artificial Sequence: Synthetic oligonucleotide
uggaguuuuggguuucugc

SEQ ID NO: 2761672 - RNA, 19 nt, Artificial Sequence
  Description of Artificial Sequence: Synthetic oligonucleotide
guaucucugagacagggca

SEQ ID NO: 2761673 - RNA, 19 nt, Artificial Sequence
  Description of Artificial Sequence: Synthetic oligonucleotide
ugagaccuccgcaggaagg

SEQ ID NO: 2761674 - RNA, 19 nt, Artificial Sequence
  Description of Artificial Sequence: Synthetic oligonucleotide
aagaagcgacguuuccaac

SEQ ID NO: 2761675 - RNA, 19 nt, Artificial Sequence
  Description of Artificial Sequence: Synthetic oligonucleotide
agucuuguaggccaucuga

SEQ ID NO: 2761676 - RNA, 19 nt, Artificial Sequence
  Description of Artificial Sequence: Synthetic oligonucleotide
caacucuuaccucacauuc

SEQ ID NO: 2761677 - RNA, 19 nt, Artificial Sequence
  Description of Artificial Sequence: Synthetic oligonucleotide
gagcaguuagguuucugag

SEQ ID NO: 2761678 - RNA, 19 nt, Artificial Sequence
  Description of Artificial Sequence: Synthetic oligonucleotide
uugaaguagcagaugguaa

SEQ ID NO: 2761679 - RNA, 19 nt, Artificial Sequence
  Description of Artificial Sequence: Synthetic oligonucleotide
cagggcauugauaacgaag

SEQ ID NO: 2761680 - RNA, 19 nt, Artificial Sequence
  Description of Artificial Sequence: Synthetic oligonucleotide
aaggcgugagacccucggc

SEQ ID NO: 2761681 - RNA, 19 nt, Artificial Sequence
  Description of Artificial Sequence: Synthetic oligonucleotide
gucauuggcuugaagaaag

SEQ ID NO: 2761682 - RNA, 19 nt, Artificial Sequence
  Description of Artificial Sequence: Synthetic oligonucleotide
accagacuugacgagacac

SEQ ID NO: 2761683 - RNA, 19 nt, Artificial Sequence
  Description of Artificial Sequence: Synthetic oligonucleotide
aucucagucuuguaggcca

SEQ ID NO: 2761684 - RNA, 19 nt, Artificial Sequence
  Description of Artificial Sequence: Synthetic oligonucleotide
agaagcgacguuuccaacu

SEQ ID NO: 2761685 - RNA, 19 nt, Artificial Sequence
  Description of Artificial Sequence: Synthetic oligonucleotide
auuaagagaucaccagacu

SEQ ID NO: 2761686 - RNA, 19 nt, Artificial Sequence
  Description of Artificial Sequence: Synthetic oligonucleotide
ggugguuaugauuucaaac

SEQ ID NO: 2761687 - RNA, 19 nt, Artificial Sequence
  Description of Artificial Sequence: Synthetic oligonucleotide
acguuuccaacucuuaccu

SEQ ID NO: 2761688 - RNA, 19 nt, Artificial Sequence
  Description of Artificial Sequence: Synthetic oligonucleotide
uagccacucuuaaugacug

SEQ ID NO: 2761689 - RNA, 19 nt, Artificial Sequence
  Description of Artificial Sequence: Synthetic oligonucleotide
aagcagaauggaguuuugg

SEQ ID NO: 2761690 - RNA, 19 nt, Artificial Sequence
  Description of Artificial Sequence: Synthetic oligonucleotide
cuggucauuggcuugaaga

SEQ ID NO: 2761691 - RNA, 19 nt, Artificial Sequence
  Description of Artificial Sequence: Synthetic oligonucleotide
cucuuaaugacugagaccu

SEQ ID NO: 2761692 - RNA, 19 nt, Artificial Sequence
  Description of Artificial Sequence: Synthetic oligonucleotide
auaacgaagcagaauggag

SEQ ID NO: 2761693 - RNA, 19 nt, Artificial Sequence
  Description of Artificial Sequence: Synthetic oligonucleotide
uuaccucacauucccuugc

SEQ ID NO: 2761694 - RNA, 19 nt, Artificial Sequence
  Description of Artificial Sequence: Synthetic oligonucleotide
uuugagcaguauaguacgc

SEQ ID NO: 2761695 - RNA, 19 nt, Artificial Sequence
  Description of Artificial Sequence: Synthetic oligonucleotide
uugacgagacacucgugag

SEQ ID NO: 2761696 - RNA, 19 nt, Artificial Sequence
  Description of Artificial Sequence: Synthetic oligonucleotide
  modified_base (10)..(10): a, c, u, g, unknown or other
gcugaugggnguuugcacc

SEQ ID NO: 2761697 - RNA, 19 nt, Artificial Sequence
  Description of Artificial Sequence: Synthetic oligonucleotide
aaguagcagaugguaaaag

SEQ ID NO: 2761698 - RNA, 19 nt, Artificial Sequence
  Description of Artificial Sequence: Synthetic oligonucleotide
ucgagggcaaagaagcgac

SEQ ID NO: 2761699 - RNA, 19 nt, Artificial Sequence
  Description of Artificial Sequence: Synthetic oligonucleotide
ugaucucagucuuguaggc

SEQ ID NO: 2761700 - RNA, 19 nt, Artificial Sequence
  Description of Artificial Sequence: Synthetic oligonucleotide
gaaggcgugagacccucgg

SEQ ID NO: 2761701 - RNA, 19 nt, Artificial Sequence
  Description of Artificial Sequence: Synthetic oligonucleotide
ucugagacagggcauugau

SEQ ID NO: 2761702 - RNA, 19 nt, Artificial Sequence
  Description of Artificial Sequence: Synthetic oligonucleotide
gauaacgaagcagaaugga

SEQ ID NO: 2761703 - RNA, 19 nt, Artificial Sequence
  Description of Artificial Sequence: Synthetic oligonucleotide
aagagaucaccagacuuga

SEQ ID NO: 2761704 - RNA, 19 nt, Artificial Sequence
  Description of Artificial Sequence: Synthetic oligonucleotide
uaaugacugagaccuccgc

SEQ ID NO: 2761705 - RNA, 19 nt, Artificial Sequence
  Description of Artificial Sequence: Synthetic oligonucleotide
agucuugagaacaucuuug

SEQ ID NO: 2761706 - RNA, 19 nt, Artificial Sequence
  Description of Artificial Sequence: Synthetic oligonucleotide
  modified_base (3)..(3): a, c, u, g, unknown or other
ggnguuugcaccaccaucc

SEQ ID NO: 2761707 - RNA, 19 nt, Artificial Sequence
  Description of Artificial Sequence: Synthetic oligonucleotide
guuaugauuucaaacaggu

SEQ ID NO: 2761708 - RNA, 19 nt, Artificial Sequence
  Description of Artificial Sequence: Synthetic oligonucleotide
cagguugucccucauuaag

SEQ ID NO: 2761709 - RNA, 19 nt, Artificial Sequence
  Description of Artificial Sequence: Synthetic oligonucleotide
uccaacucuuaccucacau

SEQ ID NO: 2761710 - RNA, 19 nt, Artificial Sequence
  Description of Artificial Sequence: Synthetic oligonucleotide
ccuugcuucacacaguagc

SEQ ID NO: 2761711 - RNA, 19 nt, Artificial Sequence
  Description of Artificial Sequence: Synthetic oligonucleotide
acacucgugagucuugaga

SEQ ID NO: 2761712 - RNA, 19 nt, Artificial Sequence
  Description of Artificial Sequence: Synthetic oligonucleotide
agcaguuagguuucugaga

SEQ ID NO: 2761713 - RNA, 19 nt, Artificial Sequence
  Description of Artificial Sequence: Synthetic oligonucleotide
guagcagaugguaaaaguc

SEQ ID NO: 2761714 - RNA, 19 nt, Artificial Sequence
  Description of Artificial Sequence: Synthetic oligonucleotide
cuugacgagacacucguga

SEQ ID NO: 2761715 - RNA, 19 nt, Artificial Sequence
  Description of Artificial Sequence: Synthetic oligonucleotide
acucgugagucuugagaac

SEQ ID NO: 2761716 - RNA, 19 nt, Artificial Sequence
  Description of Artificial Sequence: Synthetic oligonucleotide
auuggcuugaagaaaguau

SEQ ID NO: 2761717 - RNA, 19 nt, Artificial Sequence
  Description of Artificial Sequence: Synthetic oligonucleotide
cuuaccucacauucccuug

SEQ ID NO: 2761718 - RNA, 19 nt, Artificial Sequence
  Description of Artificial Sequence: Synthetic oligonucleotide
  modified_base (7)..(7): a, c, u, g, unknown or other
gaugggnguuugcaccacc

SEQ ID NO: 2761719 - RNA, 19 nt, Artificial Sequence
  Description of Artificial Sequence: Synthetic oligonucleotide
gaagcgacguuuccaacuc

SEQ ID NO: 2761720 - RNA, 19 nt, Artificial Sequence
  Description of Artificial Sequence: Synthetic oligonucleotide
aucuuugagcaguauagua

SEQ ID NO: 2761721 - RNA, 19 nt, Artificial Sequence
  Description of Artificial Sequence: Synthetic oligonucleotide
cuuugggguagcuaugcuc

SEQ ID NO: 2761722 - RNA, 19 nt, Artificial Sequence
  Description of Artificial Sequence: Synthetic oligonucleotide
aguaucucugagacagggc

SEQ ID NO: 2761723 - RNA, 19 nt, Artificial Sequence
  Description of Artificial Sequence: Synthetic oligonucleotide
gguuaugauuucaaacagg

SEQ ID NO: 2761724 - RNA, 19 nt, Artificial Sequence
  Description of Artificial Sequence: Synthetic oligonucleotide
ucaccagacuugacgagac

SEQ ID NO: 2761725 - RNA, 19 nt, Artificial Sequence
  Description of Artificial Sequence: Synthetic oligonucleotide
ucaacccaguccuucagau

SEQ ID NO: 2761726 - RNA, 19 nt, Artificial Sequence
  Description of Artificial Sequence: Synthetic oligonucleotide
gaucaccagacuugacgag

SEQ ID NO: 2761727 - RNA, 19 nt, Artificial Sequence
  Description of Artificial Sequence: Synthetic oligonucleotide
ucuuaccucacauucccuu

SEQ ID NO: 2761728 - RNA, 19 nt, Artificial Sequence
  Description of Artificial Sequence: Synthetic oligonucleotide
guauaguacgcagaggcuc

SEQ ID NO: 2761729 - RNA, 19 nt, Artificial Sequence
  Description of Artificial Sequence: Synthetic oligonucleotide
aguuuuggguuucugcuuu

SEQ ID NO: 2761730 - RNA, 19 nt, Artificial Sequence
  Description of Artificial Sequence: Synthetic oligonucleotide
uuuccaacucuuaccucac

SEQ ID NO: 2761731 - RNA, 19 nt, Artificial Sequence
  Description of Artificial Sequence: Synthetic oligonucleotide
ugacgagacacucgugagu

SEQ ID NO: 2761732 - RNA, 19 nt, Artificial Sequence
  Description of Artificial Sequence: Synthetic oligonucleotide
agaaaguaucucugagaca

SEQ ID NO: 2761733 - RNA, 19 nt, Artificial Sequence
  Description of Artificial Sequence: Synthetic oligonucleotide
uucaacccaguccuucaga

SEQ ID NO: 2761734 - RNA, 19 nt, Artificial Sequence
  Description of Artificial Sequence: Synthetic oligonucleotide
uuguaggccaucugaggcu

SEQ ID NO: 2761735 - RNA, 19 nt, Artificial Sequence
  Description of Artificial Sequence: Synthetic oligonucleotide
gacgagacacucgugaguc

SEQ ID NO: 2761736 - RNA, 19 nt, Artificial Sequence
  Description of Artificial Sequence: Synthetic oligonucleotide
uugagcaguauaguacgca

SEQ ID NO: 2761737 - RNA, 19 nt, Artificial Sequence
  Description of Artificial Sequence: Synthetic oligonucleotide
aagucaucgagggcaaaga

SEQ ID NO: 2761738 - RNA, 19 nt, Artificial Sequence
  Description of Artificial Sequence: Synthetic oligonucleotide
acgcagaggcucucugucc

SEQ ID NO: 2761739 - RNA, 19 nt, Artificial Sequence
  Description of Artificial Sequence: Synthetic oligonucleotide
uuaugauuucaaacagguu

SEQ ID NO: 2761740 - RNA, 19 nt, Artificial Sequence
  Description of Artificial Sequence: Synthetic oligonucleotide
uacgcagaggcucucuguc

SEQ ID NO: 2761741 - RNA, 19 nt, Artificial Sequence
  Description of Artificial Sequence: Synthetic oligonucleotide
auugauaacgaagcagaau

SEQ ID NO: 2761742 - RNA, 19 nt, Artificial Sequence
  Description of Artificial Sequence: Synthetic oligonucleotide
cucucuguccugcucacac

SEQ ID NO: 2761743 - RNA, 19 nt, Artificial Sequence
  Description of Artificial Sequence: Synthetic oligonucleotide
agaugguaaaagucaucga

SEQ ID NO: 2761744 - RNA, 19 nt, Artificial Sequence
  Description of Artificial Sequence: Synthetic oligonucleotide
ggcauugauaacgaagcag

SEQ ID NO: 2761745 - RNA, 19 nt, Artificial Sequence
  Description of Artificial Sequence: Synthetic oligonucleotide
caucgagggcaaagaagcg

SEQ ID NO: 2761746 - RNA, 19 nt, Artificial Sequence
  Description of Artificial Sequence: Synthetic oligonucleotide
gucuugagaacaucuuuga

SEQ ID NO: 2761747 - RNA, 19 nt, Artificial Sequence
  Description of Artificial Sequence: Synthetic oligonucleotide
agaauggaguuuuggguuu

SEQ ID NO: 2761748 - RNA, 19 nt, Artificial Sequence
  Description of Artificial Sequence: Synthetic oligonucleotide
uucaguggccauggguacg

SEQ ID NO: 2761749 - RNA, 19 nt, Artificial Sequence
  Description of Artificial Sequence: Synthetic oligonucleotide
uaaucuugcuggcuugguu

SEQ ID NO: 2761750 - RNA, 19 nt, Artificial Sequence
  Description of Artificial Sequence: Synthetic oligonucleotide
ucauuggcuugaagaaagu

SEQ ID NO: 2761751 - RNA, 19 nt, Artificial Sequence
  Description of Artificial Sequence: Synthetic oligonucleotide
gagaacaucuuugagcagu

SEQ ID NO: 2761752 - RNA, 19 nt, Artificial Sequence
  Description of Artificial Sequence: Synthetic oligonucleotide
  modified_base (2)..(2): a, c, u, g, unknown or other
gnguuugcaccaccauccc

SEQ ID NO: 2761753 - RNA, 19 nt, Artificial Sequence
  Description of Artificial Sequence: Synthetic oligonucleotide
gaucucagucuuguaggcc

SEQ ID NO: 2761754 - RNA, 19 nt, Artificial Sequence
  Description of Artificial Sequence: Synthetic oligonucleotide
gguugggaggagcaguuag

SEQ ID NO: 2761755 - RNA, 19 nt, Artificial Sequence
  Description of Artificial Sequence: Synthetic oligonucleotide
aguacgcagaggcucucug

SEQ ID NO: 2761756 - RNA, 19 nt, Artificial Sequence
  Description of Artificial Sequence: Synthetic oligonucleotide
uugcuggcuugguucaaag

SEQ ID NO: 2761757 - RNA, 19 nt, Artificial Sequence
  Description of Artificial Sequence: Synthetic oligonucleotide
gcauugauaacgaagcaga

SEQ ID NO: 2761758 - RNA, 19 nt, Artificial Sequence
  Description of Artificial Sequence: Synthetic oligonucleotide
guccugcucacacuugaag

SEQ ID NO: 2761759 - RNA, 19 nt, Artificial Sequence
  Description of Artificial Sequence: Synthetic oligonucleotide
gucuuguaggccaucugag

SEQ ID NO: 2761760 - RNA, 19 nt, Artificial Sequence
  Description of Artificial Sequence: Synthetic oligonucleotide
uugggaggagcaguuaggu

SEQ ID NO: 2761761 - RNA, 19 nt, Artificial Sequence
  Description of Artificial Sequence: Synthetic oligonucleotide
aggcgugagacccucggcu

SEQ ID NO: 2761762 - RNA, 19 nt, Artificial Sequence
  Description of Artificial Sequence: Synthetic oligonucleotide
cacucgugagucuugagaa

SEQ ID NO: 2761763 - RNA, 19 nt, Artificial Sequence
  Description of Artificial Sequence: Synthetic oligonucleotide
gacuugacgagacacucgu

SEQ ID NO: 2761764 - RNA, 19 nt, Artificial Sequence
  Description of Artificial Sequence: Synthetic oligonucleotide
gguaaaagucaucgagggc

SEQ ID NO: 2761765 - RNA, 19 nt, Artificial Sequence
  Description of Artificial Sequence: Synthetic oligonucleotide
  modified_base (14)..(14): a, c, u, g, unknown or other
ucuggcugaugggnguuug

SEQ ID NO: 2761766 - RNA, 19 nt, Artificial Sequence
  Description of Artificial Sequence: Synthetic oligonucleotide
acgguaaucuugcuggcuu

SEQ ID NO: 2761767 - RNA, 19 nt, Artificial Sequence
  Description of Artificial Sequence: Synthetic oligonucleotide
cuucaguggccauggguac

SEQ ID NO: 2761768 - RNA, 19 nt, Artificial Sequence
  Description of Artificial Sequence: Synthetic oligonucleotide
cucacauucccuugcuuca

SEQ ID NO: 2761769 - RNA, 19 nt, Artificial Sequence
  Description of Artificial Sequence: Synthetic oligonucleotide
gagaccuccgcaggaaggc

SEQ ID NO: 2761770 - RNA, 19 nt, Artificial Sequence
  Description of Artificial Sequence: Synthetic oligonucleotide
agucaucgagggcaaagaa

SEQ ID NO: 2761771 - RNA, 19 nt, Artificial Sequence
  Description of Artificial Sequence: Synthetic oligonucleotide
ugcuggcuugguucaaagc

SEQ ID NO: 2761772 - RNA, 19 nt, Artificial Sequence
  Description of Artificial Sequence: Synthetic oligonucleotide
aaacagguugucccucauu

SEQ ID NO: 2761773 - RNA, 19 nt, Artificial Sequence
  Description of Artificial Sequence: Synthetic oligonucleotide
uucagaucuuucuggucau

SEQ ID NO: 2761774 - RNA, 19 nt, Artificial Sequence
  Description of Artificial Sequence: Synthetic oligonucleotide
cucggcuccagucccuucc

SEQ ID NO: 2761775 - RNA, 19 nt, Artificial Sequence
  Description of Artificial Sequence: Synthetic oligonucleotide
aucaccagacuugacgaga

SEQ ID NO: 2761776 - RNA, 19 nt, Artificial Sequence
  Description of Artificial Sequence: Synthetic oligonucleotide
caccauucuggcugauggg

SEQ ID NO: 2761777 - RNA, 19 nt, Artificial Sequence
  Description of Artificial Sequence: Synthetic oligonucleotide
ucccucauuaagagaucac

SEQ ID NO: 2761778 - RNA, 19 nt, Artificial Sequence
  Description of Artificial Sequence: Synthetic oligonucleotide
agacuugacgagacacucg

SEQ ID NO: 2761779 - RNA, 19 nt, Artificial Sequence
  Description of Artificial Sequence: Synthetic oligonucleotide
cuugaaguagcagauggua

SEQ ID NO: 2761780 - RNA, 19 nt, Artificial Sequence
  Description of Artificial Sequence: Synthetic oligonucleotide
aguauaguacgcagaggcu

SEQ ID NO: 2761781 - RNA, 19 nt, Artificial Sequence
  Description of Artificial Sequence: Synthetic oligonucleotide
ggagcaguuagguuucuga

SEQ ID NO: 2761782 - RNA, 19 nt, Artificial Sequence
  Description of Artificial Sequence: Synthetic oligonucleotide
aucgagggcaaagaagcga

SEQ ID NO: 2761783 - RNA, 19 nt, Artificial Sequence
  Description of Artificial Sequence: Synthetic oligonucleotide
caaagaagcgacguuucca

SEQ ID NO: 2761784 - RNA, 19 nt, Artificial Sequence
  Description of Artificial Sequence: Synthetic oligonucleotide
gcaggaaggcgugagaccc

SEQ ID NO: 2761785 - RNA, 19 nt, Artificial Sequence
  Description of Artificial Sequence: Synthetic oligonucleotide
ucuuaaugacugagaccuc

SEQ ID NO: 2761786 - RNA, 19 nt, Artificial Sequence
  Description of Artificial Sequence: Synthetic oligonucleotide
  modified_base (12)..(12): a, c, u, g, unknown or other
uggcugaugggnguuugca

SEQ ID NO: 2761787 - RNA, 19 nt, Artificial Sequence
  Description of Artificial Sequence: Synthetic oligonucleotide
aauggaguuuuggguuucu

SEQ ID NO: 2761788 - RNA, 19 nt, Artificial Sequence
  Description of Artificial Sequence: Synthetic oligonucleotide
gagacagggcauugauaac

SEQ ID NO: 2761789 - RNA, 19 nt, Artificial Sequence
  Description of Artificial Sequence: Synthetic oligonucleotide
cucgugagucuugagaaca

SEQ ID NO: 2761790 - RNA, 19 nt, Artificial Sequence
  Description of Artificial Sequence: Synthetic oligonucleotide
  modified_base (9)..(9): a, c, u, g, unknown or other
cugaugggnguuugcacca

SEQ ID NO: 2761791 - RNA, 19 nt, Artificial Sequence
  Description of Artificial Sequence: Synthetic oligonucleotide
gacacucgugagucuugag

SEQ ID NO: 2761792 - RNA, 19 nt, Artificial Sequence
  Description of Artificial Sequence: Synthetic oligonucleotide
cauugauaacgaagcagaa

SEQ ID NO: 2761793 - RNA, 19 nt, Artificial Sequence
  Description of Artificial Sequence: Synthetic oligonucleotide
agguugucccucauuaaga

SEQ ID NO: 2761794 - RNA, 19 nt, Artificial Sequence
  Description of Artificial Sequence: Synthetic oligonucleotide
aagcgacguuuccaacucu

SEQ ID NO: 2761795 - RNA, 19 nt, Artificial Sequence
  Description of Artificial Sequence: Synthetic oligonucleotide
gcuugaagaaaguaucucu

SEQ ID NO: 2761796 - RNA, 19 nt, Artificial Sequence
  Description of Artificial Sequence: Synthetic oligonucleotide
gaacuucaguggccauggg

SEQ ID NO: 2761797 - RNA, 19 nt, Artificial Sequence
  Description of Artificial Sequence: Synthetic oligonucleotide
guacgguaaucuugcuggc

SEQ ID NO: 2761798 - RNA, 19 nt, Artificial Sequence
  Description of Artificial Sequence: Synthetic oligonucleotide
ucgugagucuugagaacau

SEQ ID NO: 2761799 - RNA, 19 nt, Artificial Sequence
  Description of Artificial Sequence: Synthetic oligonucleotide
  modified_base (5)..(5): a, c, u, g, unknown or other
ugggnguuugcaccaccau

SEQ ID NO: 2761800 - RNA, 19 nt, Artificial Sequence
  Description of Artificial Sequence: Synthetic oligonucleotide
uuccaacucuuaccucaca

SEQ ID NO: 2761801 - RNA, 19 nt, Artificial Sequence
  Description of Artificial Sequence: Synthetic oligonucleotide
gacagggcauugauaacga

SEQ ID NO: 2761802 - RNA, 19 nt, Artificial Sequence
  Description of Artificial Sequence: Synthetic oligonucleotide
cugagaccuccgcaggaag

SEQ ID NO: 2761803 - RNA, 19 nt, Artificial Sequence
  Description of Artificial Sequence: Synthetic oligonucleotide
uacgguaaucuugcuggcu

SEQ ID NO: 2761804 - RNA, 19 nt, Artificial Sequence
  Description of Artificial Sequence: Synthetic oligonucleotide
ugucccucauuaagagauc

SEQ ID NO: 2761805 - RNA, 19 nt, Artificial Sequence
  Description of Artificial Sequence: Synthetic oligonucleotide
cccucauuaagagaucacc

SEQ ID NO: 2761806 - RNA, 19 nt, Artificial Sequence
  Description of Artificial Sequence: Synthetic oligonucleotide
  modified_base (4)..(4): a, c, u, g, unknown or other
gggnguuugcaccaccauc

SEQ ID NO: 2761807 - RNA, 19 nt, Artificial Sequence
  Description of Artificial Sequence: Synthetic oligonucleotide
  modified_base (13)..(13): a, c, u, g, unknown or other
cuggcugaugggnguuugc

SEQ ID NO: 2761808 - RNA, 19 nt, Artificial Sequence
  Description of Artificial Sequence: Synthetic oligonucleotide
ucucuguccugcucacacu

SEQ ID NO: 2761809 - RNA, 19 nt, Artificial Sequence
  Description of Artificial Sequence: Synthetic oligonucleotide
gaagcagaauggaguuuug

SEQ ID NO: 2761810 - RNA, 19 nt, Artificial Sequence
  Description of Artificial Sequence: Synthetic oligonucleotide
gacccucggcuccaguccc

SEQ ID NO: 2761811 - RNA, 19 nt, Artificial Sequence
  Description of Artificial Sequence: Synthetic oligonucleotide
agcagaugguaaaagucau

SEQ ID NO: 2761812 - RNA, 19 nt, Artificial Sequence
  Description of Artificial Sequence: Synthetic oligonucleotide
gacugagaccuccgcagga

SEQ ID NO: 2761813 - RNA, 19 nt, Artificial Sequence
  Description of Artificial Sequence: Synthetic oligonucleotide
ccucauuaagagaucacca

SEQ ID NO: 2761814 - RNA, 19 nt, Artificial Sequence
  Description of Artificial Sequence: Synthetic oligonucleotide
gcaaagaagcgacguuucc

SEQ ID NO: 2761815 - RNA, 19 nt, Artificial Sequence
  Description of Artificial Sequence: Synthetic oligonucleotide
acagguugucccucauuaa

SEQ ID NO: 2761816 - RNA, 19 nt, Artificial Sequence
  Description of Artificial Sequence: Synthetic oligonucleotide
agguuucugagaacuucag

SEQ ID NO: 2761817 - RNA, 19 nt, Artificial Sequence
  Description of Artificial Sequence: Synthetic oligonucleotide
uguccugcucacacuugaa

SEQ ID NO: 2761818 - RNA, 19 nt, Artificial Sequence
  Description of Artificial Sequence: Synthetic oligonucleotide
aggaaggcgugagacccuc

SEQ ID NO: 2761819 - RNA, 19 nt, Artificial Sequence
  Description of Artificial Sequence: Synthetic oligonucleotide
uccgcaggaaggcgugaga

SEQ ID NO: 2761820 - RNA, 19 nt, Artificial Sequence
  Description of Artificial Sequence: Synthetic oligonucleotide
ucucugagacagggcauug

SEQ ID NO: 2761821 - RNA, 19 nt, Artificial Sequence
  Description of Artificial Sequence: Synthetic oligonucleotide
ggguacgguaaucuugcug

SEQ ID NO: 2761822 - RNA, 19 nt, Artificial Sequence
  Description of Artificial Sequence: Synthetic oligonucleotide
gccacucuuaaugacugag

SEQ ID NO: 2761823 - RNA, 19 nt, Artificial Sequence
  Description of Artificial Sequence: Synthetic oligonucleotide
ucacauucccuugcuucac

SEQ ID NO: 2761824 - RNA, 19 nt, Artificial Sequence
  Description of Artificial Sequence: Synthetic oligonucleotide
ucucagucuuguaggccau

SEQ ID NO: 2761825 - RNA, 19 nt, Artificial Sequence
  Description of Artificial Sequence: Synthetic oligonucleotide
ugggguagcuaugcucacc

SEQ ID NO: 2761826 - RNA, 19 nt, Artificial Sequence
  Description of Artificial Sequence: Synthetic oligonucleotide
cacacuugaaguagcagau

SEQ ID NO: 2761827 - RNA, 19 nt, Artificial Sequence
  Description of Artificial Sequence: Synthetic oligonucleotide
gagcaguauaguacgcaga

SEQ ID NO: 2761828 - RNA, 19 nt, Artificial Sequence
  Description of Artificial Sequence: Synthetic oligonucleotide
agagaucaccagacuugac

SEQ ID NO: 2761829 - RNA, 19 nt, Artificial Sequence
  Description of Artificial Sequence: Synthetic oligonucleotide
cuuccugcccaucccacca

SEQ ID NO: 2761830 - RNA, 19 nt, Artificial Sequence
  Description of Artificial Sequence: Synthetic oligonucleotide
gaauggaguuuuggguuuc

SEQ ID NO: 2761831 - RNA, 19 nt, Artificial Sequence
  Description of Artificial Sequence: Synthetic oligonucleotide
auaguacgcagaggcucuc

SEQ ID NO: 2761832 - RNA, 19 nt, Artificial Sequence
  Description of Artificial Sequence: Synthetic oligonucleotide
ugucuggguugggaggagc

SEQ ID NO: 2761833 - RNA, 19 nt, Artificial Sequence
  Description of Artificial Sequence: Synthetic oligonucleotide
gucccucauuaagagauca

SEQ ID NO: 2761834 - RNA, 19 nt, Artificial Sequence
  Description of Artificial Sequence: Synthetic oligonucleotide
gagacacucgugagucuug

SEQ ID NO: 2761835 - RNA, 19 nt, Artificial Sequence
  Description of Artificial Sequence: Synthetic oligonucleotide
caacccaguccuucagauc

SEQ ID NO: 2761836 - RNA, 19 nt, Artificial Sequence
  Description of Artificial Sequence: Synthetic oligonucleotide
gaggugguuaugauuucaa

SEQ ID NO: 2761837 - RNA, 19 nt, Artificial Sequence
  Description of Artificial Sequence: Synthetic oligonucleotide
agaccuccgcaggaaggcg

SEQ ID NO: 2761838 - RNA, 19 nt, Artificial Sequence
  Description of Artificial Sequence: Synthetic oligonucleotide
guagccacucuuaaugacu

SEQ ID NO: 2761839 - RNA, 19 nt, Artificial Sequence
  Description of Artificial Sequence: Synthetic oligonucleotide
caguuagguuucugagaac

SEQ ID NO: 2761840 - RNA, 19 nt, Artificial Sequence
  Description of Artificial Sequence: Synthetic oligonucleotide
gggaggagcaguuagguuu

SEQ ID NO: 2761841 - RNA, 19 nt, Artificial Sequence
  Description of Artificial Sequence: Synthetic oligonucleotide
  modified_base (6)..(6): a, c, u, g, unknown or other
augggnguuugcaccacca

SEQ ID NO: 2761842 - RNA, 19 nt, Artificial Sequence
  Description of Artificial Sequence: Synthetic oligonucleotide
ugagaacuucaguggccau

SEQ ID NO: 2761843 - RNA, 19 nt, Artificial Sequence
  Description of Artificial Sequence: Synthetic oligonucleotide
aaaagucaucgagggcaaa

SEQ ID NO: 2761844 - RNA, 19 nt, Artificial Sequence
  Description of Artificial Sequence: Synthetic oligonucleotide
uugggguagcuaugcucac

SEQ ID NO: 2761845 - RNA, 19 nt, Artificial Sequence
  Description of Artificial Sequence: Synthetic oligonucleotide
gcaguauaguacgcagagg

SEQ ID NO: 2761846 - RNA, 19 nt, Artificial Sequence
  Description of Artificial Sequence: Synthetic oligonucleotide
uaggccaucugaggcuucu

SEQ ID NO: 2761847 - RNA, 19 nt, Artificial Sequence
  Description of Artificial Sequence: Synthetic oligonucleotide
cauucccuugcuucacaca

SEQ ID NO: 2761848 - RNA, 19 nt, Artificial Sequence
  Description of Artificial Sequence: Synthetic oligonucleotide
  modified_base (11)..(11): a, c, u, g, unknown or other
ggcugaugggnguuugcac

SEQ ID NO: 2761849 - RNA, 19 nt, Artificial Sequence
  Description of Artificial Sequence: Synthetic oligonucleotide
agacacucgugagucuuga

SEQ ID NO: 2761850 - RNA, 19 nt, Artificial Sequence
  Description of Artificial Sequence: Synthetic oligonucleotide
ucggcuccagucccuuccu

SEQ ID NO: 2761851 - RNA, 19 nt, Artificial Sequence
  Description of Artificial Sequence: Synthetic oligonucleotide
ggcuugaagaaaguaucuc

SEQ ID NO: 2761852 - RNA, 19 nt, Artificial Sequence
  Description of Artificial Sequence: Synthetic oligonucleotide
gagggcaaagaagcgacgu

SEQ ID NO: 2761853 - RNA, 19 nt, Artificial Sequence
  Description of Artificial Sequence: Synthetic oligonucleotide
ugggaggagcaguuagguu

SEQ ID NO: 2761854 - RNA, 19 nt, Artificial Sequence
  Description of Artificial Sequence: Synthetic oligonucleotide
  modified_base (16)..(16): a, c, u, g, unknown or other
auucuggcugaugggnguu

SEQ ID NO: 2761855 - RNA, 19 nt, Artificial Sequence
  Description of Artificial Sequence: Synthetic oligonucleotide
ggccaucugaggcuucuug

SEQ ID NO: 2761856 - RNA, 19 nt, Artificial Sequence
  Description of Artificial Sequence: Synthetic oligonucleotide
gaggcuucuugucuggguu

SEQ ID NO: 2761857 - RNA, 19 nt, Artificial Sequence
  Description of Artificial Sequence: Synthetic oligonucleotide
  modified_base (8)..(8): a, c, u, g, unknown or other
ugaugggnguuugcaccac

SEQ ID NO: 2761858 - RNA, 19 nt, Artificial Sequence
  Description of Artificial Sequence: Synthetic oligonucleotide
agccacucuuaaugacuga

SEQ ID NO: 2761859 - RNA, 19 nt, Artificial Sequence
  Description of Artificial Sequence: Synthetic oligonucleotide
gaguuuuggguuucugcuu

SEQ ID NO: 2761860 - RNA, 19 nt, Artificial Sequence
  Description of Artificial Sequence: Synthetic oligonucleotide
acgagacacucgugagucu

SEQ ID NO: 2761861 - RNA, 19 nt, Artificial Sequence
  Description of Artificial Sequence: Synthetic oligonucleotide
uaguacgcagaggcucucu

SEQ ID NO: 2761862 - RNA, 19 nt, Artificial Sequence
  Description of Artificial Sequence: Synthetic oligonucleotide
uggguacgguaaucuugcu

SEQ ID NO: 2761863 - RNA, 19 nt, Artificial Sequence
  Description of Artificial Sequence: Synthetic oligonucleotide
ugagacccucggcuccagu

SEQ ID NO: 2761864 - RNA, 19 nt, Artificial Sequence
  Description of Artificial Sequence: Synthetic oligonucleotide
cauuggcuugaagaaagua

SEQ ID NO: 2761865 - RNA, 19 nt, Artificial Sequence
  Description of Artificial Sequence: Synthetic oligonucleotide
aggagcaguuagguuucug

SEQ ID NO: 2761866 - RNA, 19 nt, Artificial Sequence
  Description of Artificial Sequence: Synthetic oligonucleotide
ggaggagcaguuagguuuc

SEQ ID NO: 2761867 - RNA, 19 nt, Artificial Sequence
  Description of Artificial Sequence: Synthetic oligonucleotide
cacauucccuugcuucaca

SEQ ID NO: 2761868 - RNA, 19 nt, Artificial Sequence
  Description of Artificial Sequence: Synthetic oligonucleotide
acuugacgagacacucgug

SEQ ID NO: 2761869 - RNA, 19 nt, Artificial Sequence
  Description of Artificial Sequence: Synthetic oligonucleotide
gguuucugagaacuucagu

SEQ ID NO: 2761870 - RNA, 19 nt, Artificial Sequence
  Description of Artificial Sequence: Synthetic oligonucleotide
agcgacguuuccaacucuu

SEQ ID NO: 2761871 - RNA, 19 nt, Artificial Sequence
  Description of Artificial Sequence: Synthetic oligonucleotide
uuucugcuuugggguagcu

SEQ ID NO: 2761872 - RNA, 19 nt, Artificial Sequence
  Description of Artificial Sequence: Synthetic oligonucleotide
uccugcccaucccaccauu

SEQ ID NO: 2761873 - RNA, 19 nt, Artificial Sequence
  Description of Artificial Sequence: Synthetic oligonucleotide
ggucauuggcuugaagaaa

SEQ ID NO: 2761874 - RNA, 19 nt, Artificial Sequence
  Description of Artificial Sequence: Synthetic oligonucleotide
gggguagcuaugcucaccu

SEQ ID NO: 2761875 - RNA, 19 nt, Artificial Sequence
  Description of Artificial Sequence: Synthetic oligonucleotide
cgacguuuccaacucuuac

SEQ ID NO: 2761876 - RNA, 19 nt, Artificial Sequence
  Description of Artificial Sequence: Synthetic oligonucleotide
caucuuugagcaguauagu

SEQ ID NO: 2761877 - RNA, 19 nt, Artificial Sequence
  Description of Artificial Sequence: Synthetic oligonucleotide
ggcgugagacccucggcuc

SEQ ID NO: 2761878 - RNA, 19 nt, Artificial Sequence
  Description of Artificial Sequence: Synthetic oligonucleotide
guacgcagaggcucucugu

SEQ ID NO: 2761879 - RNA, 19 nt, Artificial Sequence
  Description of Artificial Sequence: Synthetic oligonucleotide
gcgugagacccucggcucc

SEQ ID NO: 2761880 - RNA, 19 nt, Artificial Sequence
  Description of Artificial Sequence: Synthetic oligonucleotide
ccacucuuaaugacugaga

SEQ ID NO: 2761881 - RNA, 19 nt, Artificial Sequence
  Description of Artificial Sequence: Synthetic oligonucleotide
cccaucccaccauucuggc

SEQ ID NO: 2761882 - RNA, 19 nt, Artificial Sequence
  Description of Artificial Sequence: Synthetic oligonucleotide
cucugagacagggcauuga

SEQ ID NO: 2761883 - RNA, 19 nt, Artificial Sequence
  Description of Artificial Sequence: Synthetic oligonucleotide
uucuggucauuggcuugaa

SEQ ID NO: 2761884 - RNA, 19 nt, Artificial Sequence
  Description of Artificial Sequence: Synthetic oligonucleotide
  modified_base (15)..(15): a, c, u, g, unknown or other
uucuggcugaugggnguuu

SEQ ID NO: 2761885 - RNA, 19 nt, Artificial Sequence
  Description of Artificial Sequence: Synthetic oligonucleotide
cucuguccugcucacacuu

SEQ ID NO: 2761886 - RNA, 19 nt, Artificial Sequence
  Description of Artificial Sequence: Synthetic oligonucleotide
guaaucuugcuggcuuggu

SEQ ID NO: 2761887 - RNA, 19 nt, Artificial Sequence
  Description of Artificial Sequence: Synthetic oligonucleotide
cgagggcaaagaagcgacg

SEQ ID NO: 2761888 - RNA, 19 nt, Artificial Sequence
  Description of Artificial Sequence: Synthetic oligonucleotide
ccgcaggaaggcgugagac

SEQ ID NO: 2761889 - RNA, 19 nt, Artificial Sequence
  Description of Artificial Sequence: Synthetic oligonucleotide
ggcucucuguccugcucac

SEQ ID NO: 2761890 - RNA, 19 nt, Artificial Sequence
  Description of Artificial Sequence: Synthetic oligonucleotide
cccgaugaucucagucuug

SEQ ID NO: 2761891 - RNA, 19 nt, Artificial Sequence
  Description of Artificial Sequence: Synthetic oligonucleotide
caccagacuugacgagaca

SEQ ID NO: 2761892 - RNA, 19 nt, Artificial Sequence
  Description of Artificial Sequence: Synthetic oligonucleotide
gcuucuugucuggguuggg

SEQ ID NO: 2761893 - RNA, 19 nt, Artificial Sequence
  Description of Artificial Sequence: Synthetic oligonucleotide
guuagguuucugagaacuu

SEQ ID NO: 2761894 - RNA, 19 nt, Artificial Sequence
  Description of Artificial Sequence: Synthetic oligonucleotide
ggaaggcgugagacccucg

SEQ ID NO: 2761895 - RNA, 19 nt, Artificial Sequence
  Description of Artificial Sequence: Synthetic oligonucleotide
cucuuaccucacauucccu

SEQ ID NO: 2761896 - RNA, 19 nt, Artificial Sequence
  Description of Artificial Sequence: Synthetic oligonucleotide
cgguaaucuugcuggcuug

SEQ ID NO: 2761897 - RNA, 19 nt, Artificial Sequence
  Description of Artificial Sequence: Synthetic oligonucleotide
gaccuccgcaggaaggcgu

SEQ ID NO: 2761898 - RNA, 19 nt, Artificial Sequence
  Description of Artificial Sequence: Synthetic oligonucleotide
ccugcccaucccaccauuc

SEQ ID NO: 2761899 - RNA, 19 nt, Artificial Sequence
  Description of Artificial Sequence: Synthetic oligonucleotide
aagcuucaacccaguccuu

SEQ ID NO: 2761900 - RNA, 19 nt, Artificial Sequence
  Description of Artificial Sequence: Synthetic oligonucleotide
cccgccuuggguacgguaa

SEQ ID NO: 2761901 - RNA, 19 nt, Artificial Sequence
  Description of Artificial Sequence: Synthetic oligonucleotide
gaacaucuuugagcaguau

SEQ ID NO: 2761902 - RNA, 19 nt, Artificial Sequence
  Description of Artificial Sequence: Synthetic oligonucleotide
gugagacccucggcuccag

SEQ ID NO: 2761903 - RNA, 19 nt, Artificial Sequence
  Description of Artificial Sequence: Synthetic oligonucleotide
gggcaaagaagcgacguuu

SEQ ID NO: 2761904 - RNA, 19 nt, Artificial Sequence
  Description of Artificial Sequence: Synthetic oligonucleotide
ccagacuugacgagacacu

SEQ ID NO: 2761905 - RNA, 19 nt, Artificial Sequence
  Description of Artificial Sequence: Synthetic oligonucleotide
gccuuggguacgguaaucu

SEQ ID NO: 2761906 - RNA, 19 nt, Artificial Sequence
  Description of Artificial Sequence: Synthetic oligonucleotide
caggaaggcgugagacccu

SEQ ID NO: 2761907 - RNA, 19 nt, Artificial Sequence
  Description of Artificial Sequence: Synthetic oligonucleotide
ccaacucuuaccucacauu

SEQ ID NO: 2761908 - RNA, 19 nt, Artificial Sequence
  Description of Artificial Sequence: Synthetic oligonucleotide
acccaguccuucagaucuu

SEQ ID NO: 2761909 - RNA, 19 nt, Artificial Sequence
  Description of Artificial Sequence: Synthetic oligonucleotide
gaggagcaguuagguuucu

SEQ ID NO: 2761910 - RNA, 19 nt, Artificial Sequence
  Description of Artificial Sequence: Synthetic oligonucleotide
acccucggcuccagucccu

SEQ ID NO: 2761911 - RNA, 19 nt, Artificial Sequence
  Description of Artificial Sequence: Synthetic oligonucleotide
gcgacguuuccaacucuua

SEQ ID NO: 2761912 - RNA, 19 nt, Artificial Sequence
  Description of Artificial Sequence: Synthetic oligonucleotide
cgaagcagaauggaguuuu

SEQ ID NO: 2761913 - RNA, 19 nt, Artificial Sequence
  Description of Artificial Sequence: Synthetic oligonucleotide
ccuuggguacgguaaucuu

SEQ ID NO: 2761914 - RNA, 19 nt, Artificial Sequence
  Description of Artificial Sequence: Synthetic oligonucleotide
ccucggcuccagucccuuc

SEQ ID NO: 2761915 - RNA, 19 nt, Artificial Sequence
  Description of Artificial Sequence: Synthetic oligonucleotide
ggguugggaggagcaguua

SEQ ID NO: 2761916 - RNA, 19 nt, Artificial Sequence
  Description of Artificial Sequence: Synthetic oligonucleotide
ccaucccaccauucuggcu

SEQ ID NO: 2761917 - RNA, 19 nt, Artificial Sequence
  Description of Artificial Sequence: Synthetic oligonucleotide
cgugagacccucggcucca

SEQ ID NO: 2761918 - RNA, 19 nt, Artificial Sequence
  Description of Artificial Sequence: Synthetic oligonucleotide
ccccgaugaucucagucuu

SEQ ID NO: 2761919 - RNA, 19 nt, Artificial Sequence
  Description of Artificial Sequence: Synthetic oligonucleotide
cgccuuggguacgguaauc

SEQ ID NO: 2761920 - RNA, 19 nt, Artificial Sequence
  Description of Artificial Sequence: Synthetic oligonucleotide
cgagacacucgugagucuu

SEQ ID NO: 2761921 - RNA, 19 nt, Artificial Sequence
  Description of Artificial Sequence: Synthetic oligonucleotide
ccccgccuuggguacggua

SEQ ID NO: 2761922 - RNA, 19 nt, Artificial Sequence
  Description of Artificial Sequence: Synthetic oligonucleotide
ccuccgcaggaaggcguga

SEQ ID NO: 2761923 - RNA, 19 nt, Artificial Sequence
  Description of Artificial Sequence: Synthetic oligonucleotide
ccgccuuggguacgguaau

SEQ ID NO: 2761924 - RNA, 19 nt, Artificial Sequence
  Description of Artificial Sequence: Synthetic oligonucleotide
cccaguccuucagaucuuu

SEQ ID NO: 2761925 - RNA, 19 nt, Artificial Sequence
  Description of Artificial Sequence: Synthetic oligonucleotide
aauggcaaacuucacuagg

SEQ ID NO: 2761926 - RNA, 19 nt, Artificial Sequence
  Description of Artificial Sequence: Synthetic oligonucleotide
aguugcucgggucauaggc

SEQ ID NO: 2761927 - RNA, 19 nt, Artificial Sequence
  Description of Artificial Sequence: Synthetic oligonucleotide
aaguaaaugagugugguga

SEQ ID NO: 2761928 - RNA, 19 nt, Artificial Sequence
  Description of Artificial Sequence: Synthetic oligonucleotide
cuaacuuagucuuuggcag

SEQ ID NO: 2761929 - RNA, 19 nt, Artificial Sequence
  Description of Artificial Sequence: Synthetic oligonucleotide
cuuguguuggcugaaaucg

SEQ ID NO: 2761930 - RNA, 19 nt, Artificial Sequence
  Description of Artificial Sequence: Synthetic oligonucleotide
uaggguuucguucucuucg

SEQ ID NO: 2761931 - RNA, 19 nt, Artificial Sequence
  Description of Artificial Sequence: Synthetic oligonucleotide
aaucgaaaagcgcagcaug

SEQ ID NO: 2761932 - RNA, 19 nt, Artificial Sequence
  Description of Artificial Sequence: Synthetic oligonucleotide
uggaccacgggcaaggagg

SEQ ID NO: 2761933 - RNA, 19 nt, Artificial Sequence
  Description of Artificial Sequence: Synthetic oligonucleotide
acuaacuuagucuuuggca

SEQ ID NO: 2761934 - RNA, 19 nt, Artificial Sequence
  Description of Artificial Sequence: Synthetic oligonucleotide
agccuguuggcuuugggcc

SEQ ID NO: 2761935 - RNA, 19 nt, Artificial Sequence
  Description of Artificial Sequence: Synthetic oligonucleotide
gaugagcucaaguaaauga

SEQ ID NO: 2761936 - RNA, 19 nt, Artificial Sequence
  Description of Artificial Sequence: Synthetic oligonucleotide
ugcugugggacuaacuuag

SEQ ID NO: 2761937 - RNA, 19 nt, Artificial Sequence
  Description of Artificial Sequence: Synthetic oligonucleotide
uuggcugaaaucgaaaagc

SEQ ID NO: 2761938 - RNA, 19 nt, Artificial Sequence
  Description of Artificial Sequence: Synthetic oligonucleotide
uggcugaaaucgaaaagcg

SEQ ID NO: 2761939 - RNA, 19 nt, Artificial Sequence
  Description of Artificial Sequence: Synthetic oligonucleotide
aguaaaugaguguggugac

SEQ ID NO: 2761940 - RNA, 19 nt, Artificial Sequence
  Description of Artificial Sequence: Synthetic oligonucleotide
ugugggacuaacuuagucu

SEQ ID NO: 2761941 - RNA, 19 nt, Artificial Sequence
  Description of Artificial Sequence: Synthetic oligonucleotide
ggcagaaugagccuguugg

SEQ ID NO: 2761942 - RNA, 19 nt, Artificial Sequence
  Description of Artificial Sequence: Synthetic oligonucleotide
aaaagcgcagcaugcacug

SEQ ID NO: 2761943 - RNA, 19 nt, Artificial Sequence
  Description of Artificial Sequence: Synthetic oligonucleotide
gauacugguaguugcucgg

SEQ ID NO: 2761944 - RNA, 19 nt, Artificial Sequence
  Description of Artificial Sequence: Synthetic oligonucleotide
aaaugaguguggugacagc

SEQ ID NO: 2761945 - RNA, 19 nt, Artificial Sequence
  Description of Artificial Sequence: Synthetic oligonucleotide
uaaaugaguguggugacag

SEQ ID NO: 2761946 - RNA, 19 nt, Artificial Sequence
  Description of Artificial Sequence: Synthetic oligonucleotide
aagucuaggacuugcaguu

SEQ ID NO: 2761947 - RNA, 19 nt, Artificial Sequence
  Description of Artificial Sequence: Synthetic oligonucleotide
uucacuaggguuucguucu

SEQ ID NO: 2761948 - RNA, 19 nt, Artificial Sequence
  Description of Artificial Sequence: Synthetic oligonucleotide
gugacagcagauaacacgg

SEQ ID NO: 2761949 - RNA, 19 nt, Artificial Sequence
  Description of Artificial Sequence: Synthetic oligonucleotide
ggugacagcagauaacacg

SEQ ID NO: 2761950 - RNA, 19 nt, Artificial Sequence
  Description of Artificial Sequence: Synthetic oligonucleotide
gucaggacuggacagacag

SEQ ID NO: 2761951 - RNA, 19 nt, Artificial Sequence
  Description of Artificial Sequence: Synthetic oligonucleotide
aaugaguguggugacagca

SEQ ID NO: 2761952 - RNA, 19 nt, Artificial Sequence
  Description of Artificial Sequence: Synthetic oligonucleotide
aacacggucuccucgucag

SEQ ID NO: 2761953 - RNA, 19 nt, Artificial Sequence
  Description of Artificial Sequence: Synthetic oligonucleotide
ucauaggcgaaguuggcga

SEQ ID NO: 2761954 - RNA, 19 nt, Artificial Sequence
  Description of Artificial Sequence: Synthetic oligonucleotide
uaggaugugcuccuuguug

SEQ ID NO: 2761955 - RNA, 19 nt, Artificial Sequence
  Description of Artificial Sequence: Synthetic oligonucleotide
agacaguuggugaugagcg

SEQ ID NO: 2761956 - RNA, 19 nt, Artificial Sequence
  Description of Artificial Sequence: Synthetic oligonucleotide
uuucguucucuucggacag

SEQ ID NO: 2761957 - RNA, 19 nt, Artificial Sequence
  Description of Artificial Sequence: Synthetic oligonucleotide
agauaacacggucuccucg

SEQ ID NO: 2761958 - RNA, 19 nt, Artificial Sequence
  Description of Artificial Sequence: Synthetic oligonucleotide
ucccagggcagaaugagcc

SEQ ID NO: 2761959 - RNA, 19 nt, Artificial Sequence
  Description of Artificial Sequence: Synthetic oligonucleotide
cucaaguaaaugagugugg

SEQ ID NO: 2761960 - RNA, 19 nt, Artificial Sequence
  Description of Artificial Sequence: Synthetic oligonucleotide
uugcaguugccgcagauac

SEQ ID NO: 2761961 - RNA, 19 nt, Artificial Sequence
  Description of Artificial Sequence: Synthetic oligonucleotide
ucgaggaacaagucuagga

SEQ ID NO: 2761962 - RNA, 19 nt, Artificial Sequence
  Description of Artificial Sequence: Synthetic oligonucleotide
aaguuggcgagguuggcga

SEQ ID NO: 2761963 - RNA, 19 nt, Artificial Sequence
  Description of Artificial Sequence: Synthetic oligonucleotide
cuugaggucuucuuggauc

SEQ ID NO: 2761964 - RNA, 19 nt, Artificial Sequence
  Description of Artificial Sequence: Synthetic oligonucleotide
ugagcucaaguaaaugagu

SEQ ID NO: 2761965 - RNA, 19 nt, Artificial Sequence
  Description of Artificial Sequence: Synthetic oligonucleotide
cugaaaucgaaaagcgcag

SEQ ID NO: 2761966 - RNA, 19 nt, Artificial Sequence
  Description of Artificial Sequence: Synthetic oligonucleotide
aucgaaaagcgcagcaugc

SEQ ID NO: 2761967 - RNA, 19 nt, Artificial Sequence
  Description of Artificial Sequence: Synthetic oligonucleotide
guuggcugaaaucgaaaag

SEQ ID NO: 2761968 - RNA, 19 nt, Artificial Sequence
  Description of Artificial Sequence: Synthetic oligonucleotide
ucaaguaaaugaguguggu

SEQ ID NO: 2761969 - RNA, 19 nt, Artificial Sequence
  Description of Artificial Sequence: Synthetic oligonucleotide
uugaggucuucuuggauca

SEQ ID NO: 2761970 - RNA, 19 nt, Artificial Sequence
  Description of Artificial Sequence: Synthetic oligonucleotide
uguuggcugaaaucgaaaa

SEQ ID NO: 2761971 - RNA, 19 nt, Artificial Sequence
  Description of Artificial Sequence: Synthetic oligonucleotide
gaaaucgaaaagcgcagca

SEQ ID NO: 2761972 - RNA, 19 nt, Artificial Sequence
  Description of Artificial Sequence: Synthetic oligonucleotide
aaggaggugagcuccgggu

SEQ ID NO: 2761973 - RNA, 19 nt, Artificial Sequence
  Description of Artificial Sequence: Synthetic oligonucleotide
cuuagucuuuggcaguggg

SEQ ID NO: 2761974 - RNA, 19 nt, Artificial Sequence
  Description of Artificial Sequence: Synthetic oligonucleotide
guuggcgaggacuugcugc

SEQ ID NO: 2761975 - RNA, 19 nt, Artificial Sequence
  Description of Artificial Sequence: Synthetic oligonucleotide
ucggacagcgaaucgagga

SEQ ID NO: 2761976 - RNA, 19 nt, Artificial Sequence
  Description of Artificial Sequence: Synthetic oligonucleotide
gcagaaguccucuaggaag

SEQ ID NO: 2761977 - RNA, 19 nt, Artificial Sequence
  Description of Artificial Sequence: Synthetic oligonucleotide
augagcucaaguaaaugag

SEQ ID NO: 2761978 - RNA, 19 nt, Artificial Sequence
  Description of Artificial Sequence: Synthetic oligonucleotide
gagcucaaguaaaugagug

SEQ ID NO: 2761979 - RNA, 19 nt, Artificial Sequence
  Description of Artificial Sequence: Synthetic oligonucleotide
uugccgcagauacugguag

SEQ ID NO: 2761980 - RNA, 19 nt, Artificial Sequence
  Description of Artificial Sequence: Synthetic oligonucleotide
uuagucuuuggcaguggga

SEQ ID NO: 2761981 - RNA, 19 nt, Artificial Sequence
  Description of Artificial Sequence: Synthetic oligonucleotide
cuucacuaggguuucguuc

SEQ ID NO: 2761982 - RNA, 19 nt, Artificial Sequence
  Description of Artificial Sequence: Synthetic oligonucleotide
uguggugacagcagauaac

SEQ ID NO: 2761983 - RNA, 19 nt, Artificial Sequence
  Description of Artificial Sequence: Synthetic oligonucleotide
ggucuugaggucuucuugg

SEQ ID NO: 2761984 - RNA, 19 nt, Artificial Sequence
  Description of Artificial Sequence: Synthetic oligonucleotide
auggcaaacuucacuaggg

SEQ ID NO: 2761985 - RNA, 19 nt, Artificial Sequence
  Description of Artificial Sequence: Synthetic oligonucleotide
aacuuagucuuuggcagug

SEQ ID NO: 2761986 - RNA, 19 nt, Artificial Sequence
  Description of Artificial Sequence: Synthetic oligonucleotide
uaggacuugcaguugccgc

SEQ ID NO: 2761987 - RNA, 19 nt, Artificial Sequence
  Description of Artificial Sequence: Synthetic oligonucleotide
caugcacuggaccacgggc

SEQ ID NO: 2761988 - RNA, 19 nt, Artificial Sequence
  Description of Artificial Sequence: Synthetic oligonucleotide
uguguuggcugaaaucgaa

SEQ ID NO: 2761989 - RNA, 19 nt, Artificial Sequence
  Description of Artificial Sequence: Synthetic oligonucleotide
uccucgucaggacuggaca

SEQ ID NO: 2761990 - RNA, 19 nt, Artificial Sequence
  Description of Artificial Sequence: Synthetic oligonucleotide
cuucggacagcgaaucgag

SEQ ID NO: 2761991 - RNA, 19 nt, Artificial Sequence
  Description of Artificial Sequence: Synthetic oligonucleotide
ugaaaucgaaaagcgcagc

SEQ ID NO: 2761992 - RNA, 19 nt, Artificial Sequence
  Description of Artificial Sequence: Synthetic oligonucleotide
gagccuguuggcuuugggc

SEQ ID NO: 2761993 - RNA, 19 nt, Artificial Sequence
  Description of Artificial Sequence: Synthetic oligonucleotide
aggacuugcugcuuggcgu

SEQ ID NO: 2761994 - RNA, 19 nt, Artificial Sequence
  Description of Artificial Sequence: Synthetic oligonucleotide
aaaucgaaaagcgcagcau

SEQ ID NO: 2761995 - RNA, 19 nt, Artificial Sequence
  Description of Artificial Sequence: Synthetic oligonucleotide
guuucguucucuucggaca

SEQ ID NO: 2761996 - RNA, 19 nt, Artificial Sequence
  Description of Artificial Sequence: Synthetic oligonucleotide
gaaucgaggaacaagucua

SEQ ID NO: 2761997 - RNA, 19 nt, Artificial Sequence
  Description of Artificial Sequence: Synthetic oligonucleotide
gaacucggugaccagcgcc

SEQ ID NO: 2761998 - RNA, 19 nt, Artificial Sequence
  Description of Artificial Sequence: Synthetic oligonucleotide
aaucgaggaacaagucuag

SEQ ID NO: 2761999 - RNA, 19 nt, Artificial Sequence
  Description of Artificial Sequence: Synthetic oligonucleotide
agcucaaguaaaugagugu

SEQ ID NO: 2762000 - RNA, 19 nt, Artificial Sequence
  Description of Artificial Sequence: Synthetic oligonucleotide
acaguuggugaugagcgag

SEQ ID NO: 2762001 - RNA, 19 nt, Artificial Sequence
  Description of Artificial Sequence: Synthetic oligonucleotide
aagcgcagcaugcacugga

SEQ ID NO: 2762002 - RNA, 19 nt, Artificial Sequence
  Description of Artificial Sequence: Synthetic oligonucleotide
gaacaagucuaggacuugc

SEQ ID NO: 2762003 - RNA, 19 nt, Artificial Sequence
  Description of Artificial Sequence: Synthetic oligonucleotide
uuuggcagugggauuccca

SEQ ID NO: 2762004 - RNA, 19 nt, Artificial Sequence
  Description of Artificial Sequence: Synthetic oligonucleotide
ucuucggacagcgaaucga

SEQ ID NO: 2762005 - RNA, 19 nt, Artificial Sequence
  Description of Artificial Sequence: Synthetic oligonucleotide
agcgaaucgaggaacaagu

SEQ ID NO: 2762006 - RNA, 19 nt, Artificial Sequence
  Description of Artificial Sequence: Synthetic oligonucleotide
ucguucucuucggacagcg

SEQ ID NO: 2762007 - RNA, 19 nt, Artificial Sequence
  Description of Artificial Sequence: Synthetic oligonucleotide
aggguuucguucucuucgg

SEQ ID NO: 2762008 - RNA, 19 nt, Artificial Sequence
  Description of Artificial Sequence: Synthetic oligonucleotide
caaguaaaugaguguggug

SEQ ID NO: 2762009 - RNA, 19 nt, Artificial Sequence
  Description of Artificial Sequence: Synthetic oligonucleotide
gucauaggcgaaguuggcg

SEQ ID NO: 2762010 - RNA, 19 nt, Artificial Sequence
  Description of Artificial Sequence: Synthetic oligonucleotide
uucggacagcgaaucgagg

SEQ ID NO: 2762011 - RNA, 19 nt, Artificial Sequence
  Description of Artificial Sequence: Synthetic oligonucleotide
uggacagacaguuggugau

SEQ ID NO: 2762012 - RNA, 19 nt, Artificial Sequence
  Description of Artificial Sequence: Synthetic oligonucleotide
gcugaaaucgaaaagcgca

SEQ ID NO: 2762013 - RNA, 19 nt, Artificial Sequence
  Description of Artificial Sequence: Synthetic oligonucleotide
ucggucuccuggaacucgg

SEQ ID NO: 2762014 - RNA, 19 nt, Artificial Sequence
  Description of Artificial Sequence: Synthetic oligonucleotide
uaacuuagucuuuggcagu

SEQ ID NO: 2762015 - RNA, 19 nt, Artificial Sequence
  Description of Artificial Sequence: Synthetic oligonucleotide
caauggcaaacuucacuag

SEQ ID NO: 2762016 - RNA, 19 nt, Artificial Sequence
  Description of Artificial Sequence: Synthetic oligonucleotide
uuguguuggcugaaaucga

SEQ ID NO: 2762017 - RNA, 19 nt, Artificial Sequence
  Description of Artificial Sequence: Synthetic oligonucleotide
gcucaaguaaaugagugug

SEQ ID NO: 2762018 - RNA, 19 nt, Artificial Sequence
  Description of Artificial Sequence: Synthetic oligonucleotide
agaaugagccuguuggcuu

SEQ ID NO: 2762019 - RNA, 19 nt, Artificial Sequence
  Description of Artificial Sequence: Synthetic oligonucleotide
aggacuugcaguugccgca

SEQ ID NO: 2762020 - RNA, 19 nt, Artificial Sequence
  Description of Artificial Sequence: Synthetic oligonucleotide
guugcucgggucauaggcg

SEQ ID NO: 2762021 - RNA, 19 nt, Artificial Sequence
  Description of Artificial Sequence: Synthetic oligonucleotide
gaggucuucuuggaucagg

SEQ ID NO: 2762022 - RNA, 19 nt, Artificial Sequence
  Description of Artificial Sequence: Synthetic oligonucleotide
auucccagggcagaaugag

SEQ ID NO: 2762023 - RNA, 19 nt, Artificial Sequence
  Description of Artificial Sequence: Synthetic oligonucleotide
cuuguuggccuugucuggg

SEQ ID NO: 2762024 - RNA, 19 nt, Artificial Sequence
  Description of Artificial Sequence: Synthetic oligonucleotide
aacuucacuaggguuucgu

SEQ ID NO: 2762025 - RNA, 19 nt, Artificial Sequence
  Description of Artificial Sequence: Synthetic oligonucleotide
uuggcgaggacuugcugcu

SEQ ID NO: 2762026 - RNA, 19 nt, Artificial Sequence
  Description of Artificial Sequence: Synthetic oligonucleotide
uaacacggucuccucguca

SEQ ID NO: 2762027 - RNA, 19 nt, Artificial Sequence
  Description of Artificial Sequence: Synthetic oligonucleotide
uuccggagccuuguguugg

SEQ ID NO: 2762028 - RNA, 19 nt, Artificial Sequence
  Description of Artificial Sequence: Synthetic oligonucleotide
acagcagauaacacggucu

SEQ ID NO: 2762029 - RNA, 19 nt, Artificial Sequence
  Description of Artificial Sequence: Synthetic oligonucleotide
accggaugagcucaaguaa

SEQ ID NO: 2762030 - RNA, 19 nt, Artificial Sequence
  Description of Artificial Sequence: Synthetic oligonucleotide
ucuuggaucagggcugcug

SEQ ID NO: 2762031 - RNA, 19 nt, Artificial Sequence
  Description of Artificial Sequence: Synthetic oligonucleotide
gauaacacggucuccucgu

SEQ ID NO: 2762032 - RNA, 19 nt, Artificial Sequence
  Description of Artificial Sequence: Synthetic oligonucleotide
agcagauaacacggucucc

SEQ ID NO: 2762033 - RNA, 19 nt, Artificial Sequence
  Description of Artificial Sequence: Synthetic oligonucleotide
auaacacggucuccucguc

SEQ ID NO: 2762034 - RNA, 19 nt, Artificial Sequence
  Description of Artificial Sequence: Synthetic oligonucleotide
cauaggcgaaguuggcgag

SEQ ID NO: 2762035 - RNA, 19 nt, Artificial Sequence
  Description of Artificial Sequence: Synthetic oligonucleotide
gaggaacaagucuaggacu

SEQ ID NO: 2762036 - RNA, 19 nt, Artificial Sequence
  Description of Artificial Sequence: Synthetic oligonucleotide
guggugacagcagauaaca

SEQ ID NO: 2762037 - RNA, 19 nt, Artificial Sequence
  Description of Artificial Sequence: Synthetic oligonucleotide
aggucuucuuggaucaggg

SEQ ID NO: 2762038 - RNA, 19 nt, Artificial Sequence
  Description of Artificial Sequence: Synthetic oligonucleotide
uugcucgggucauaggcga

SEQ ID NO: 2762039 - RNA, 19 nt, Artificial Sequence
  Description of Artificial Sequence: Synthetic oligonucleotide
aguugccgcagauacuggu

SEQ ID NO: 2762040 - RNA, 19 nt, Artificial Sequence
  Description of Artificial Sequence: Synthetic oligonucleotide
guaguugcucgggucauag

SEQ ID NO: 2762041 - RNA, 19 nt, Artificial Sequence
  Description of Artificial Sequence: Synthetic oligonucleotide
uguuggccuugucugggca

SEQ ID NO: 2762042 - RNA, 19 nt, Artificial Sequence
  Description of Artificial Sequence: Synthetic oligonucleotide
aacaagucuaggacuugca

SEQ ID NO: 2762043 - RNA, 19 nt, Artificial Sequence
  Description of Artificial Sequence: Synthetic oligonucleotide
ucgaaaagcgcagcaugca

SEQ ID NO: 2762044 - RNA, 19 nt, Artificial Sequence
  Description of Artificial Sequence: Synthetic oligonucleotide
aacucggugaccagcgccu

SEQ ID NO: 2762045 - RNA, 19 nt, Artificial Sequence
  Description of Artificial Sequence: Synthetic oligonucleotide
auacugguaguugcucggg

SEQ ID NO: 2762046 - RNA, 19 nt, Artificial Sequence
  Description of Artificial Sequence: Synthetic oligonucleotide
cagcagauaacacggucuc

SEQ ID NO: 2762047 - RNA, 19 nt, Artificial Sequence
  Description of Artificial Sequence: Synthetic oligonucleotide
aaacuucacuaggguuucg

SEQ ID NO: 2762048 - RNA, 19 nt, Artificial Sequence
  Description of Artificial Sequence: Synthetic oligonucleotide
aaagcgcagcaugcacugg

SEQ ID NO: 2762049 - RNA, 19 nt, Artificial Sequence
  Description of Artificial Sequence: Synthetic oligonucleotide
uacugguaguugcucgggu

SEQ ID NO: 2762050 - RNA, 19 nt, Artificial Sequence
  Description of Artificial Sequence: Synthetic oligonucleotide
gucuuuggcagugggauuc

SEQ ID NO: 2762051 - RNA, 19 nt, Artificial Sequence
  Description of Artificial Sequence: Synthetic oligonucleotide
aucgaggaacaagucuagg

SEQ ID NO: 2762052 - RNA, 19 nt, Artificial Sequence
  Description of Artificial Sequence: Synthetic oligonucleotide
gagguuggcgaggacuugc

SEQ ID NO: 2762053 - RNA, 19 nt, Artificial Sequence
  Description of Artificial Sequence: Synthetic oligonucleotide
uaguugcucgggucauagg

SEQ ID NO: 2762054 - RNA, 19 nt, Artificial Sequence
  Description of Artificial Sequence: Synthetic oligonucleotide
cugugggacuaacuuaguc

SEQ ID NO: 2762055 - RNA, 19 nt, Artificial Sequence
  Description of Artificial Sequence: Synthetic oligonucleotide
gcaguugccgcagauacug

SEQ ID NO: 2762056 - RNA, 19 nt, Artificial Sequence
  Description of Artificial Sequence: Synthetic oligonucleotide
ggacuaacuuagucuuugg

SEQ ID NO: 2762057 - RNA, 19 nt, Artificial Sequence
  Description of Artificial Sequence: Synthetic oligonucleotide
ugacagcagauaacacggu

SEQ ID NO: 2762058 - RNA, 19 nt, Artificial Sequence
  Description of Artificial Sequence: Synthetic oligonucleotide
caaacuucacuaggguuuc

SEQ ID NO: 2762059 - RNA, 19 nt, Artificial Sequence
  Description of Artificial Sequence: Synthetic oligonucleotide
ucucuucggacagcgaauc

SEQ ID NO: 2762060 - RNA, 19 nt, Artificial Sequence
  Description of Artificial Sequence: Synthetic oligonucleotide
ggauucccagggcagaaug

SEQ ID NO: 2762061 - RNA, 19 nt, Artificial Sequence
  Description of Artificial Sequence: Synthetic oligonucleotide
cacuggaccacgggcaagg

SEQ ID NO: 2762062 - RNA, 19 nt, Artificial Sequence
  Description of Artificial Sequence: Synthetic oligonucleotide
aggcucggggagcagaagu

SEQ ID NO: 2762063 - RNA, 19 nt, Artificial Sequence
  Description of Artificial Sequence: Synthetic oligonucleotide
cuaggguuucguucucuuc

SEQ ID NO: 2762064 - RNA, 19 nt, Artificial Sequence
  Description of Artificial Sequence: Synthetic oligonucleotide
gguuucguucucuucggac

SEQ ID NO: 2762065 - RNA, 19 nt, Artificial Sequence
  Description of Artificial Sequence: Synthetic oligonucleotide
ucaggacuggacagacagu

SEQ ID NO: 2762066 - RNA, 19 nt, Artificial Sequence
  Description of Artificial Sequence: Synthetic oligonucleotide
cucuucggacagcgaaucg

SEQ ID NO: 2762067 - RNA, 19 nt, Artificial Sequence
  Description of Artificial Sequence: Synthetic oligonucleotide
acuuagucuuuggcagugg

SEQ ID NO: 2762068 - RNA, 19 nt, Artificial Sequence
  Description of Artificial Sequence: Synthetic oligonucleotide
gacagacaguuggugauga

SEQ ID NO: 2762069 - RNA, 19 nt, Artificial Sequence
  Description of Artificial Sequence: Synthetic oligonucleotide
ugcaguugccgcagauacu

SEQ ID NO: 2762070 - RNA, 19 nt, Artificial Sequence
  Description of Artificial Sequence: Synthetic oligonucleotide
uuggaucagggcugcugug

SEQ ID NO: 2762071 - RNA, 19 nt, Artificial Sequence
  Description of Artificial Sequence: Synthetic oligonucleotide
acgggcaaggaggugagcu

SEQ ID NO: 2762072 - RNA, 19 nt, Artificial Sequence
  Description of Artificial Sequence: Synthetic oligonucleotide
cuggaacucggugaccagc

SEQ ID NO: 2762073 - RNA, 19 nt, Artificial Sequence
  Description of Artificial Sequence: Synthetic oligonucleotide
gggagcagaaguccucuag

SEQ ID NO: 2762074 - RNA, 19 nt, Artificial Sequence
  Description of Artificial Sequence: Synthetic oligonucleotide
uuguuggccuugucugggc

SEQ ID NO: 2762075 - RNA, 19 nt, Artificial Sequence
  Description of Artificial Sequence: Synthetic oligonucleotide
ggaucagggcugcuguggg

SEQ ID NO: 2762076 - RNA, 19 nt, Artificial Sequence
  Description of Artificial Sequence: Synthetic oligonucleotide
cagcgaaucgaggaacaag

SEQ ID NO: 2762077 - RNA, 19 nt, Artificial Sequence
  Description of Artificial Sequence: Synthetic oligonucleotide
gaaaagcgcagcaugcacu

SEQ ID NO: 2762078 - RNA, 19 nt, Artificial Sequence
  Description of Artificial Sequence: Synthetic oligonucleotide
gacaguuggugaugagcga

SEQ ID NO: 2762079 - RNA, 19 nt, Artificial Sequence
  Description of Artificial Sequence: Synthetic oligonucleotide
aggaacaagucuaggacuu

SEQ ID NO: 2762080 - RNA, 19 nt, Artificial Sequence
  Description of Artificial Sequence: Synthetic oligonucleotide
ggcgaaguuggcgagguug

SEQ ID NO: 2762081 - RNA, 19 nt, Artificial Sequence
  Description of Artificial Sequence: Synthetic oligonucleotide
aaugagccuguuggcuuug

SEQ ID NO: 2762082 - RNA, 19 nt, Artificial Sequence
  Description of Artificial Sequence: Synthetic oligonucleotide
cugguaguugcucggguca

SEQ ID NO: 2762083 - RNA, 19 nt, Artificial Sequence
  Description of Artificial Sequence: Synthetic oligonucleotide
guguggugacagcagauaa

SEQ ID NO: 2762084 - RNA, 19 nt, Artificial Sequence
  Description of Artificial Sequence: Synthetic oligonucleotide
gggcacagguugcagaggc

SEQ ID NO: 2762085 - RNA, 19 nt, Artificial Sequence
  Description of Artificial Sequence: Synthetic oligonucleotide
acuucacuaggguuucguu

SEQ ID NO: 2762086 - RNA, 19 nt, Artificial Sequence
  Description of Artificial Sequence: Synthetic oligonucleotide
uaggcgaaguuggcgaggu

SEQ ID NO: 2762087 - RNA, 19 nt, Artificial Sequence
  Description of Artificial Sequence: Synthetic oligonucleotide
cgaggaacaagucuaggac

SEQ ID NO: 2762088 - RNA, 19 nt, Artificial Sequence
  Description of Artificial Sequence: Synthetic oligonucleotide
guuccggagccuuguguug

SEQ ID NO: 2762089 - RNA, 19 nt, Artificial Sequence
  Description of Artificial Sequence: Synthetic oligonucleotide
guaaaugaguguggugaca

SEQ ID NO: 2762090 - RNA, 19 nt, Artificial Sequence
  Description of Artificial Sequence: Synthetic oligonucleotide
cuguaggaugugcuccuug

SEQ ID NO: 2762091 - RNA, 19 nt, Artificial Sequence
  Description of Artificial Sequence: Synthetic oligonucleotide
gcagaaugagccuguuggc

SEQ ID NO: 2762092 - RNA, 19 nt, Artificial Sequence
  Description of Artificial Sequence: Synthetic oligonucleotide
gugagcuccgggugggagc

SEQ ID NO: 2762093 - RNA, 19 nt, Artificial Sequence
  Description of Artificial Sequence: Synthetic oligonucleotide
cuucuuggaucagggcugc

SEQ ID NO: 2762094 - RNA, 19 nt, Artificial Sequence
  Description of Artificial Sequence: Synthetic oligonucleotide
cagauaacacggucuccuc

SEQ ID NO: 2762095 - RNA, 19 nt, Artificial Sequence
  Description of Artificial Sequence: Synthetic oligonucleotide
gauucccagggcagaauga

SEQ ID NO: 2762096 - RNA, 19 nt, Artificial Sequence
  Description of Artificial Sequence: Synthetic oligonucleotide
gacagcgaaucgaggaaca

SEQ ID NO: 2762097 - RNA, 19 nt, Artificial Sequence
  Description of Artificial Sequence: Synthetic oligonucleotide
uugcugcuuggcgucuugg

SEQ ID NO: 2762098 - RNA, 19 nt, Artificial Sequence
  Description of Artificial Sequence: Synthetic oligonucleotide
cuccucgucaggacuggac

SEQ ID NO: 2762099 - RNA, 19 nt, Artificial Sequence
  Description of Artificial Sequence: Synthetic oligonucleotide
ccaauggcaaacuucacua

SEQ ID NO: 2762100 - RNA, 19 nt, Artificial Sequence
  Description of Artificial Sequence: Synthetic oligonucleotide
guuggcgagguuggcgagg

SEQ ID NO: 2762101 - RNA, 19 nt, Artificial Sequence
  Description of Artificial Sequence: Synthetic oligonucleotide
guuggccuugucugggcac

SEQ ID NO: 2762102 - RNA, 19 nt, Artificial Sequence
  Description of Artificial Sequence: Synthetic oligonucleotide
cucggucuccuggaacucg

SEQ ID NO: 2762103 - RNA, 19 nt, Artificial Sequence
  Description of Artificial Sequence: Synthetic oligonucleotide
ggcugaaaucgaaaagcgc

SEQ ID NO: 2762104 - RNA, 19 nt, Artificial Sequence
  Description of Artificial Sequence: Synthetic oligonucleotide
cuggaccacgggcaaggag

SEQ ID NO: 2762105 - RNA, 19 nt, Artificial Sequence
  Description of Artificial Sequence: Synthetic oligonucleotide
caccggaugagcucaagua

SEQ ID NO: 2762106 - RNA, 19 nt, Artificial Sequence
  Description of Artificial Sequence: Synthetic oligonucleotide
cagauacugguaguugcuc

SEQ ID NO: 2762107 - RNA, 19 nt, Artificial Sequence
  Description of Artificial Sequence: Synthetic oligonucleotide
gugggacuaacuuagucuu

SEQ ID NO: 2762108 - RNA, 19 nt, Artificial Sequence
  Description of Artificial Sequence: Synthetic oligonucleotide
ucggggagcagaaguccuc

SEQ ID NO: 2762109 - RNA, 19 nt, Artificial Sequence
  Description of Artificial Sequence: Synthetic oligonucleotide
aguguggugacagcagaua

SEQ ID NO: 2762110 - RNA, 19 nt, Artificial Sequence
  Description of Artificial Sequence: Synthetic oligonucleotide
acacggucuccucgucagg

SEQ ID NO: 2762111 - RNA, 19 nt, Artificial Sequence
  Description of Artificial Sequence: Synthetic oligonucleotide
caguugccgcagauacugg

SEQ ID NO: 2762112 - RNA, 19 nt, Artificial Sequence
  Description of Artificial Sequence: Synthetic oligonucleotide
ggaugagcucaaguaaaug

SEQ ID NO: 2762113 - RNA, 19 nt, Artificial Sequence
  Description of Artificial Sequence: Synthetic oligonucleotide
ccuuguguuggcugaaauc

SEQ ID NO: 2762114 - RNA, 19 nt, Artificial Sequence
  Description of Artificial Sequence: Synthetic oligonucleotide
augcacuggaccacgggca

SEQ ID NO: 2762115 - RNA, 19 nt, Artificial Sequence
  Description of Artificial Sequence: Synthetic oligonucleotide
gugaugagcgagaggcccc

SEQ ID NO: 2762116 - RNA, 19 nt, Artificial Sequence
  Description of Artificial Sequence: Synthetic oligonucleotide
agcgcagcaugcacuggac

SEQ ID NO: 2762117 - RNA, 19 nt, Artificial Sequence
  Description of Artificial Sequence: Synthetic oligonucleotide
gaucugggccagguuccgg

SEQ ID NO: 2762118 - RNA, 19 nt, Artificial Sequence
  Description of Artificial Sequence: Synthetic oligonucleotide
gcgaaguuggcgagguugg

SEQ ID NO: 2762119 - RNA, 19 nt, Artificial Sequence
  Description of Artificial Sequence: Synthetic oligonucleotide
ggcgucuuggcucucgguc

SEQ ID NO: 2762120 - RNA, 19 nt, Artificial Sequence
  Description of Artificial Sequence: Synthetic oligonucleotide
uggcucucggucuccugga

SEQ ID NO: 2762121 - RNA, 19 nt, Artificial Sequence
  Description of Artificial Sequence: Synthetic oligonucleotide
cuuggaucagggcugcugu

SEQ ID NO: 2762122 - RNA, 19 nt, Artificial Sequence
  Description of Artificial Sequence: Synthetic oligonucleotide
ucacuaggguuucguucuc

SEQ ID NO: 2762123 - RNA, 19 nt, Artificial Sequence
  Description of Artificial Sequence: Synthetic oligonucleotide
agucuaggacuugcaguug

SEQ ID NO: 2762124 - RNA, 19 nt, Artificial Sequence
  Description of Artificial Sequence: Synthetic oligonucleotide
ggucuucuuggaucagggc

SEQ ID NO: 2762125 - RNA, 19 nt, Artificial Sequence
  Description of Artificial Sequence: Synthetic oligonucleotide
ggaugugcuccuuguuggc

SEQ ID NO: 2762126 - RNA, 19 nt, Artificial Sequence
  Description of Artificial Sequence: Synthetic oligonucleotide
gaucagggcugcuguggga

SEQ ID NO: 2762127 - RNA, 19 nt, Artificial Sequence
  Description of Artificial Sequence: Synthetic oligonucleotide
gagccagcaccggaugagc

SEQ ID NO: 2762128 - RNA, 19 nt, Artificial Sequence
  Description of Artificial Sequence: Synthetic oligonucleotide
agccaccaggcucggggag

SEQ ID NO: 2762129 - RNA, 19 nt, Artificial Sequence
  Description of Artificial Sequence: Synthetic oligonucleotide
uccggagccuuguguuggc

SEQ ID NO: 2762130 - RNA, 19 nt, Artificial Sequence
  Description of Artificial Sequence: Synthetic oligonucleotide
ccgggugggagccagcacc

SEQ ID NO: 2762131 - RNA, 19 nt, Artificial Sequence
  Description of Artificial Sequence: Synthetic oligonucleotide
cucucggucuccuggaacu

SEQ ID NO: 2762132 - RNA, 19 nt, Artificial Sequence
  Description of Artificial Sequence: Synthetic oligonucleotide
cugggccagguuccggagc

SEQ ID NO: 2762133 - RNA, 19 nt, Artificial Sequence
  Description of Artificial Sequence: Synthetic oligonucleotide
ugggauucccagggcagaa

SEQ ID NO: 2762134 - RNA, 19 nt, Artificial Sequence
  Description of Artificial Sequence: Synthetic oligonucleotide
ggcgaggacuugcugcuug

SEQ ID NO: 2762135 - RNA, 19 nt, Artificial Sequence
  Description of Artificial Sequence: Synthetic oligonucleotide
gggcaaggaggugagcucc

SEQ ID NO: 2762136 - RNA, 19 nt, Artificial Sequence
  Description of Artificial Sequence: Synthetic oligonucleotide
gaaugagccuguuggcuuu

SEQ ID NO: 2762137 - RNA, 19 nt, Artificial Sequence
  Description of Artificial Sequence: Synthetic oligonucleotide
agcaugcacuggaccacgg

SEQ ID NO: 2762138 - RNA, 19 nt, Artificial Sequence
  Description of Artificial Sequence: Synthetic oligonucleotide
ccucgucaggacuggacag

SEQ ID NO: 2762139 - RNA, 19 nt, Artificial Sequence
  Description of Artificial Sequence: Synthetic oligonucleotide
ugugcuccuuguuggccuu

SEQ ID NO: 2762140 - RNA, 19 nt, Artificial Sequence
  Description of Artificial Sequence: Synthetic oligonucleotide
aggacuggacagacaguug

SEQ ID NO: 2762141 - RNA, 19 nt, Artificial Sequence
  Description of Artificial Sequence: Synthetic oligonucleotide
gcgaggacuugcugcuugg

SEQ ID NO: 2762142 - RNA, 19 nt, Artificial Sequence
  Description of Artificial Sequence: Synthetic oligonucleotide
ucgggucauaggcgaaguu

SEQ ID NO: 2762143 - RNA, 19 nt, Artificial Sequence
  Description of Artificial Sequence: Synthetic oligonucleotide
ggacagcgaaucgaggaac

SEQ ID NO: 2762144 - RNA, 19 nt, Artificial Sequence
  Description of Artificial Sequence: Synthetic oligonucleotide
cugcugugggacuaacuua

SEQ ID NO: 2762145 - RNA, 19 nt, Artificial Sequence
  Description of Artificial Sequence: Synthetic oligonucleotide
ugcucgggucauaggcgaa

SEQ ID NO: 2762146 - RNA, 19 nt, Artificial Sequence
  Description of Artificial Sequence: Synthetic oligonucleotide
gcaaacuucacuaggguuu

SEQ ID NO: 2762147 - RNA, 19 nt, Artificial Sequence
  Description of Artificial Sequence: Synthetic oligonucleotide
aguccucuaggaagaucug

SEQ ID NO: 2762148 - RNA, 19 nt, Artificial Sequence
  Description of Artificial Sequence: Synthetic oligonucleotide
uccgggugggagccagcac

SEQ ID NO: 2762149 - RNA, 19 nt, Artificial Sequence
  Description of Artificial Sequence: Synthetic oligonucleotide
ugguaguugcucgggucau

SEQ ID NO: 2762150 - RNA, 19 nt, Artificial Sequence
  Description of Artificial Sequence: Synthetic oligonucleotide
ggucuccucgucaggacug

SEQ ID NO: 2762151 - RNA, 19 nt, Artificial Sequence
  Description of Artificial Sequence: Synthetic oligonucleotide
ggacuugcaguugccgcag

SEQ ID NO: 2762152 - RNA, 19 nt, Artificial Sequence
  Description of Artificial Sequence: Synthetic oligonucleotide
acagcgaaucgaggaacaa

SEQ ID NO: 2762153 - RNA, 19 nt, Artificial Sequence
  Description of Artificial Sequence: Synthetic oligonucleotide
cgaaaagcgcagcaugcac

SEQ ID NO: 2762154 - RNA, 19 nt, Artificial Sequence
  Description of Artificial Sequence: Synthetic oligonucleotide
gcagauaacacggucuccu

SEQ ID NO: 2762155 - RNA, 19 nt, Artificial Sequence
  Description of Artificial Sequence: Synthetic oligonucleotide
ggacagacaguuggugaug

SEQ ID NO: 2762156 - RNA, 19 nt, Artificial Sequence
  Description of Artificial Sequence: Synthetic oligonucleotide
ugcuccuuguuggccuugu

SEQ ID NO: 2762157 - RNA, 19 nt, Artificial Sequence
  Description of Artificial Sequence: Synthetic oligonucleotide
ucucggucuccuggaacuc

SEQ ID NO: 2762158 - RNA, 19 nt, Artificial Sequence
  Description of Artificial Sequence: Synthetic oligonucleotide
agaaguccucuaggaagau

SEQ ID NO: 2762159 - RNA, 19 nt, Artificial Sequence
  Description of Artificial Sequence: Synthetic oligonucleotide
cagaaugagccuguuggcu

SEQ ID NO: 2762160 - RNA, 19 nt, Artificial Sequence
  Description of Artificial Sequence: Synthetic oligonucleotide
ggaacucggugaccagcgc

SEQ ID NO: 2762161 - RNA, 19 nt, Artificial Sequence
  Description of Artificial Sequence: Synthetic oligonucleotide
gguuggcgaggacuugcug

SEQ ID NO: 2762162 - RNA, 19 nt, Artificial Sequence
  Description of Artificial Sequence: Synthetic oligonucleotide
gcugcugugggacuaacuu

SEQ ID NO: 2762163 - RNA, 19 nt, Artificial Sequence
  Description of Artificial Sequence: Synthetic oligonucleotide
uggcgucuuggcucucggu

SEQ ID NO: 2762164 - RNA, 19 nt, Artificial Sequence
  Description of Artificial Sequence: Synthetic oligonucleotide
guguuggcugaaaucgaaa

SEQ ID NO: 2762165 - RNA, 19 nt, Artificial Sequence
  Description of Artificial Sequence: Synthetic oligonucleotide
agcuccgggugggagccag

SEQ ID NO: 2762166 - RNA, 19 nt, Artificial Sequence
  Description of Artificial Sequence: Synthetic oligonucleotide
guugccgcagauacuggua

SEQ ID NO: 2762167 - RNA, 19 nt, Artificial Sequence
  Description of Artificial Sequence: Synthetic oligonucleotide
uggccuugucugggcacag

SEQ ID NO: 2762168 - RNA, 19 nt, Artificial Sequence
  Description of Artificial Sequence: Synthetic oligonucleotide
gggcagaaugagccuguug

SEQ ID NO: 2762169 - RNA, 19 nt, Artificial Sequence
  Description of Artificial Sequence: Synthetic oligonucleotide
ggcaaggaggugagcuccg

SEQ ID NO: 2762170 - RNA, 19 nt, Artificial Sequence
  Description of Artificial Sequence: Synthetic oligonucleotide
cuugcaguugccgcagaua

SEQ ID NO: 2762171 - RNA, 19 nt, Artificial Sequence
  Description of Artificial Sequence: Synthetic oligonucleotide
gcucggggagcagaagucc

SEQ ID NO: 2762172 - RNA, 19 nt, Artificial Sequence
  Description of Artificial Sequence: Synthetic oligonucleotide
ucuccucgucaggacugga

SEQ ID NO: 2762173 - RNA, 19 nt, Artificial Sequence
  Description of Artificial Sequence: Synthetic oligonucleotide
agcaccggaugagcucaag

SEQ ID NO: 2762174 - RNA, 19 nt, Artificial Sequence
  Description of Artificial Sequence: Synthetic oligonucleotide
ggcaaacuucacuaggguu

SEQ ID NO: 2762175 - RNA, 19 nt, Artificial Sequence
  Description of Artificial Sequence: Synthetic oligonucleotide
agccagcaccggaugagcu

SEQ ID NO: 2762176 - RNA, 19 nt, Artificial Sequence
  Description of Artificial Sequence: Synthetic oligonucleotide
caggacuggacagacaguu

SEQ ID NO: 2762177 - RNA, 19 nt, Artificial Sequence
  Description of Artificial Sequence: Synthetic oligonucleotide
cgggucauaggcgaaguug

SEQ ID NO: 2762178 - RNA, 19 nt, Artificial Sequence
  Description of Artificial Sequence: Synthetic oligonucleotide
ccggaugagcucaaguaaa

SEQ ID NO: 2762179 - RNA, 19 nt, Artificial Sequence
  Description of Artificial Sequence: Synthetic oligonucleotide
cagguuccggagccuugug

SEQ ID NO: 2762180 - RNA, 19 nt, Artificial Sequence
  Description of Artificial Sequence: Synthetic oligonucleotide
agguuggcgaggacuugcu

SEQ ID NO: 2762181 - RNA, 19 nt, Artificial Sequence
  Description of Artificial Sequence: Synthetic oligonucleotide
gcucucggucuccuggaac

SEQ ID NO: 2762182 - RNA, 19 nt, Artificial Sequence
  Description of Artificial Sequence: Synthetic oligonucleotide
ccagggcagaaugagccug

SEQ ID NO: 2762183 - RNA, 19 nt, Artificial Sequence
  Description of Artificial Sequence: Synthetic oligonucleotide
gcagcaugcacuggaccac

SEQ ID NO: 2762184 - RNA, 19 nt, Artificial Sequence
  Description of Artificial Sequence: Synthetic oligonucleotide
gcucgggucauaggcgaag

SEQ ID NO: 2762185 - RNA, 19 nt, Artificial Sequence
  Description of Artificial Sequence: Synthetic oligonucleotide
cgcagcaugcacuggacca

SEQ ID NO: 2762186 - RNA, 19 nt, Artificial Sequence
  Description of Artificial Sequence: Synthetic oligonucleotide
gcgcagcaugcacuggacc

SEQ ID NO: 2762187 - RNA, 19 nt, Artificial Sequence
  Description of Artificial Sequence: Synthetic oligonucleotide
gguuccggagccuuguguu

SEQ ID NO: 2762188 - RNA, 19 nt, Artificial Sequence
  Description of Artificial Sequence: Synthetic oligonucleotide
gccagcaccggaugagcuc

SEQ ID NO: 2762189 - RNA, 19 nt, Artificial Sequence
  Description of Artificial Sequence: Synthetic oligonucleotide
cucggggagcagaaguccu

SEQ ID NO: 2762190 - RNA, 19 nt, Artificial Sequence
  Description of Artificial Sequence: Synthetic oligonucleotide
acuggaccacgggcaagga

SEQ ID NO: 2762191 - RNA, 19 nt, Artificial Sequence
  Description of Artificial Sequence: Synthetic oligonucleotide
gaguguggugacagcagau

SEQ ID NO: 2762192 - RNA, 19 nt, Artificial Sequence
  Description of Artificial Sequence: Synthetic oligonucleotide
cccaauggcaaacuucacu

SEQ ID NO: 2762193 - RNA, 19 nt, Artificial Sequence
  Description of Artificial Sequence: Synthetic oligonucleotide
guaggaugugcuccuuguu

SEQ ID NO: 2762194 - RNA, 19 nt, Artificial Sequence
  Description of Artificial Sequence: Synthetic oligonucleotide
ccuggaacucggugaccag

SEQ ID NO: 2762195 - RNA, 19 nt, Artificial Sequence
  Description of Artificial Sequence: Synthetic oligonucleotide
cagccaccaggcucgggga

SEQ ID NO: 2762196 - RNA, 19 nt, Artificial Sequence
  Description of Artificial Sequence: Synthetic oligonucleotide
ccacgggcaaggaggugag

SEQ ID NO: 2762197 - RNA, 19 nt, Artificial Sequence
  Description of Artificial Sequence: Synthetic oligonucleotide
gcgaaucgaggaacaaguc

SEQ ID NO: 2762198 - RNA, 19 nt, Artificial Sequence
  Description of Artificial Sequence: Synthetic oligonucleotide
cgggugggagccagcaccg

SEQ ID NO: 2762199 - RNA, 19 nt, Artificial Sequence
  Description of Artificial Sequence: Synthetic oligonucleotide
cgaaucgaggaacaagucu

SEQ ID NO: 2762200 - RNA, 19 nt, Artificial Sequence
  Description of Artificial Sequence: Synthetic oligonucleotide
ggcacagguugcagaggcc

SEQ ID NO: 2762201 - RNA, 19 nt, Artificial Sequence
  Description of Artificial Sequence: Synthetic oligonucleotide
ggcucggggagcagaaguc

SEQ ID NO: 2762202 - RNA, 19 nt, Artificial Sequence
  Description of Artificial Sequence: Synthetic oligonucleotide
ggguuucguucucuucgga

SEQ ID NO: 2762203 - RNA, 19 nt, Artificial Sequence
  Description of Artificial Sequence: Synthetic oligonucleotide
caggcucggggagcagaag

SEQ ID NO: 2762204 - RNA, 19 nt, Artificial Sequence
  Description of Artificial Sequence: Synthetic oligonucleotide
agccuuguguuggcugaaa

SEQ ID NO: 2762205 - RNA, 19 nt, Artificial Sequence
  Description of Artificial Sequence: Synthetic oligonucleotide
ccagcaccggaugagcuca

SEQ ID NO: 2762206 - RNA, 19 nt, Artificial Sequence
  Description of Artificial Sequence: Synthetic oligonucleotide
uggcgagguuggcgaggac

SEQ ID NO: 2762207 - RNA, 19 nt, Artificial Sequence
  Description of Artificial Sequence: Synthetic oligonucleotide
ggcgagguuggcgaggacu

SEQ ID NO: 2762208 - RNA, 19 nt, Artificial Sequence
  Description of Artificial Sequence: Synthetic oligonucleotide
cuccgggugggagccagca

SEQ ID NO: 2762209 - RNA, 19 nt, Artificial Sequence
  Description of Artificial Sequence: Synthetic oligonucleotide
ccgcagauacugguaguug

SEQ ID NO: 2762210 - RNA, 19 nt, Artificial Sequence
  Description of Artificial Sequence: Synthetic oligonucleotide
ggccuugucugggcacagg

SEQ ID NO: 2762211 - RNA, 19 nt, Artificial Sequence
  Description of Artificial Sequence: Synthetic oligonucleotide
ccccaauggcaaacuucac

SEQ ID NO: 2762212 - RNA, 19 nt, Artificial Sequence
  Description of Artificial Sequence: Synthetic oligonucleotide
gcaccggaugagcucaagu

SEQ ID NO: 2762213 - RNA, 19 nt, Artificial Sequence
  Description of Artificial Sequence: Synthetic oligonucleotide
agggcagaaugagccuguu

SEQ ID NO: 2762214 - RNA, 19 nt, Artificial Sequence
  Description of Artificial Sequence: Synthetic oligonucleotide
gacuugcugcuuggcgucu

SEQ ID NO: 2762215 - RNA, 19 nt, Artificial Sequence
  Description of Artificial Sequence: Synthetic oligonucleotide
aggcgaaguuggcgagguu

SEQ ID NO: 2762216 - RNA, 19 nt, Artificial Sequence
  Description of Artificial Sequence: Synthetic oligonucleotide
aggugagcuccggguggga

SEQ ID NO: 2762217 - RNA, 19 nt, Artificial Sequence
  Description of Artificial Sequence: Synthetic oligonucleotide
cacuaggguuucguucucu

SEQ ID NO: 2762218 - RNA, 19 nt, Artificial Sequence
  Description of Artificial Sequence: Synthetic oligonucleotide
gccagguuccggagccuug

SEQ ID NO: 2762219 - RNA, 19 nt, Artificial Sequence
  Description of Artificial Sequence: Synthetic oligonucleotide
gccuuguguuggcugaaau

SEQ ID NO: 2762220 - RNA, 19 nt, Artificial Sequence
  Description of Artificial Sequence: Synthetic oligonucleotide
uggcgaggacuugcugcuu

SEQ ID NO: 2762221 - RNA, 19 nt, Artificial Sequence
  Description of Artificial Sequence: Synthetic oligonucleotide
cccggccuguaggaugugc

SEQ ID NO: 2762222 - RNA, 19 nt, Artificial Sequence
  Description of Artificial Sequence: Synthetic oligonucleotide
ccaggcucggggagcagaa

SEQ ID NO: 2762223 - RNA, 19 nt, Artificial Sequence
  Description of Artificial Sequence: Synthetic oligonucleotide
cgaggacuugcugcuuggc

SEQ ID NO: 2762224 - RNA, 19 nt, Artificial Sequence
  Description of Artificial Sequence: Synthetic oligonucleotide
cggacagcgaaucgaggaa

SEQ ID NO: 2762225 - RNA, 19 nt, Artificial Sequence
  Description of Artificial Sequence: Synthetic oligonucleotide
ggaccacgggcaaggaggu

SEQ ID NO: 2762226 - RNA, 19 nt, Artificial Sequence
  Description of Artificial Sequence: Synthetic oligonucleotide
ggggagcagaaguccucua

SEQ ID NO: 2762227 - RNA, 19 nt, Artificial Sequence
  Description of Artificial Sequence: Synthetic oligonucleotide
ccggccuguaggaugugcu

SEQ ID NO: 2762228 - RNA, 19 nt, Artificial Sequence
  Description of Artificial Sequence: Synthetic oligonucleotide
cagcaccggaugagcucaa

SEQ ID NO: 2762229 - RNA, 19 nt, Artificial Sequence
  Description of Artificial Sequence: Synthetic oligonucleotide
gccgcagauacugguaguu

SEQ ID NO: 2762230 - RNA, 19 nt, Artificial Sequence
  Description of Artificial Sequence: Synthetic oligonucleotide
gggcugcugugggacuaac

SEQ ID NO: 2762231 - RNA, 19 nt, Artificial Sequence
  Description of Artificial Sequence: Synthetic oligonucleotide
cggaugagcucaaguaaau

SEQ ID NO: 2762232 - RNA, 19 nt, Artificial Sequence
  Description of Artificial Sequence: Synthetic oligonucleotide
cguucucuucggacagcga

SEQ ID NO: 2762233 - RNA, 19 nt, Artificial Sequence
  Description of Artificial Sequence: Synthetic oligonucleotide
cgagguuggcgaggacuug

SEQ ID NO: 2762234 - RNA, 19 nt, Artificial Sequence
  Description of Artificial Sequence: Synthetic oligonucleotide
cccagggcagaaugagccu

SEQ ID NO: 2762235 - RNA, 19 nt, Artificial Sequence
  Description of Artificial Sequence: Synthetic oligonucleotide
gggauucccagggcagaau

SEQ ID NO: 2762236 - RNA, 19 nt, Artificial Sequence
  Description of Artificial Sequence: Synthetic oligonucleotide
ccagguuccggagccuugu

SEQ ID NO: 2762237 - RNA, 19 nt, Artificial Sequence
  Description of Artificial Sequence: Synthetic oligonucleotide
cggucuccucgucaggacu

SEQ ID NO: 2762238 - RNA, 19 nt, Artificial Sequence
  Description of Artificial Sequence: Synthetic oligonucleotide
cggggagcagaaguccucu

SEQ ID NO: 2762239 - RNA, 19 nt, Artificial Sequence
  Description of Artificial Sequence: Synthetic oligonucleotide
cggugaccagcgccugcaa

SEQ ID NO: 2762240 - RNA, 19 nt, Artificial Sequence
  Description of Artificial Sequence: Synthetic oligonucleotide
ccggagccuuguguuggcu

SEQ ID NO: 2762241 - RNA, 19 nt, Artificial Sequence
  Description of Artificial Sequence: Synthetic oligonucleotide
ccccggccuguaggaugug

SEQ ID NO: 2762242 - RNA, 19 nt, Artificial Sequence
  Description of Artificial Sequence: Synthetic oligonucleotide
aaagugaaguggcuaaagc

SEQ ID NO: 2762243 - RNA, 19 nt, Artificial Sequence
  Description of Artificial Sequence: Synthetic oligonucleotide
uucauuuucaugauguggc

SEQ ID NO: 2762244 - RNA, 19 nt, Artificial Sequence
  Description of Artificial Sequence: Synthetic oligonucleotide
aaaaccuggcggcacagcc

SEQ ID NO: 2762245 - RNA, 19 nt, Artificial Sequence
  Description of Artificial Sequence: Synthetic oligonucleotide
cauaaagcggucgaaaucg

SEQ ID NO: 2762246 - RNA, 19 nt, Artificial Sequence
  Description of Artificial Sequence: Synthetic oligonucleotide
aagugaaguggcuaaagcu

SEQ ID NO: 2762247 - RNA, 19 nt, Artificial Sequence
  Description of Artificial Sequence: Synthetic oligonucleotide
aaagcggucgaaaucgcgc

SEQ ID NO: 2762248 - RNA, 19 nt, Artificial Sequence
  Description of Artificial Sequence: Synthetic oligonucleotide
aaacgauaccugcagcccg

SEQ ID NO: 2762249 - RNA, 19 nt, Artificial Sequence
  Description of Artificial Sequence: Synthetic oligonucleotide
ugaagaagcguuccaccgg

SEQ ID NO: 2762250 - RNA, 19 nt, Artificial Sequence
  Description of Artificial Sequence: Synthetic oligonucleotide
caugauguggcucucaguc

SEQ ID NO: 2762251 - RNA, 19 nt, Artificial Sequence
  Description of Artificial Sequence: Synthetic oligonucleotide
guuuccagaccccacaaag

SEQ ID NO: 2762252 - RNA, 19 nt, Artificial Sequence
  Description of Artificial Sequence: Synthetic oligonucleotide
ucgaaaucgcgcuccagcg

SEQ ID NO: 2762253 - RNA, 19 nt, Artificial Sequence
  Description of Artificial Sequence: Synthetic oligonucleotide
uucagcuucccuaucaguc

SEQ ID NO: 2762254 - RNA, 19 nt, Artificial Sequence
  Description of Artificial Sequence: Synthetic oligonucleotide
aaccuggcggcacagccac

SEQ ID NO: 2762255 - RNA, 19 nt, Artificial Sequence
  Description of Artificial Sequence: Synthetic oligonucleotide
aaguggcuaaagcugccgg

SEQ ID NO: 2762256 - RNA, 19 nt, Artificial Sequence
  Description of Artificial Sequence: Synthetic oligonucleotide
uacaccguggcgcaccgcg

SEQ ID NO: 2762257 - RNA, 19 nt, Artificial Sequence
  Description of Artificial Sequence: Synthetic oligonucleotide
gugaagaagcguuccaccg

SEQ ID NO: 2762258 - RNA, 19 nt, Artificial Sequence
  Description of Artificial Sequence: Synthetic oligonucleotide
cacgcagcgagucagggcg

SEQ ID NO: 2762259 - RNA, 19 nt, Artificial Sequence
  Description of Artificial Sequence: Synthetic oligonucleotide
uaaagcggucgaaaucgcg

SEQ ID NO: 2762260 - RNA, 19 nt, Artificial Sequence
  Description of Artificial Sequence: Synthetic oligonucleotide
uccgucaccaucacgaauc

SEQ ID NO: 2762261 - RNA, 19 nt, Artificial Sequence
  Description of Artificial Sequence: Synthetic oligonucleotide
uaaagcugccgguagcucc

SEQ ID NO: 2762262 - RNA, 19 nt, Artificial Sequence
  Description of Artificial Sequence: Synthetic oligonucleotide
agaagcguuccaccggagc

SEQ ID NO: 2762263 - RNA, 19 nt, Artificial Sequence
  Description of Artificial Sequence: Synthetic oligonucleotide
augauguggcucucagucc

SEQ ID NO: 2762264 - RNA, 19 nt, Artificial Sequence
  Description of Artificial Sequence: Synthetic oligonucleotide
aaccucgcagggcaggagg

SEQ ID NO: 2762265 - RNA, 19 nt, Artificial Sequence
  Description of Artificial Sequence: Synthetic oligonucleotide
ucaccugaaccucgcaggg

SEQ ID NO: 2762266 - RNA, 19 nt, Artificial Sequence
  Description of Artificial Sequence: Synthetic oligonucleotide
cucaccugaaccucgcagg

SEQ ID NO: 2762267 - RNA, 19 nt, Artificial Sequence
  Description of Artificial Sequence: Synthetic oligonucleotide
ucagcuucccuaucagucc

SEQ ID NO: 2762268 - RNA, 19 nt, Artificial Sequence
  Description of Artificial Sequence: Synthetic oligonucleotide
aaguggacacgcugcuuac

SEQ ID NO: 2762269 - RNA, 19 nt, Artificial Sequence
  Description of Artificial Sequence: Synthetic oligonucleotide
accccgaaacgauaccugc

SEQ ID NO: 2762270 - RNA, 19 nt, Artificial Sequence
  Description of Artificial Sequence: Synthetic oligonucleotide
agggaccguuuccagaccc

SEQ ID NO: 2762271 - RNA, 19 nt, Artificial Sequence
  Description of Artificial Sequence: Synthetic oligonucleotide
ugugaagggaucugugacu

SEQ ID NO: 2762272 - RNA, 19 nt, Artificial Sequence
  Description of Artificial Sequence: Synthetic oligonucleotide
gaaacgauaccugcagccc

SEQ ID NO: 2762273 - RNA, 19 nt, Artificial Sequence
  Description of Artificial Sequence: Synthetic oligonucleotide
uuuccagaccccacaaagu

SEQ ID NO: 2762274 - RNA, 19 nt, Artificial Sequence
  Description of Artificial Sequence: Synthetic oligonucleotide
ugcgugaaucgcugcagcg

SEQ ID NO: 2762275 - RNA, 19 nt, Artificial Sequence
  Description of Artificial Sequence: Synthetic oligonucleotide
agaaguucagcuucccuau

SEQ ID NO: 2762276 - RNA, 19 nt, Artificial Sequence
  Description of Artificial Sequence: Synthetic oligonucleotide
gucgaaaucgcgcuccagc

SEQ ID NO: 2762277 - RNA, 19 nt, Artificial Sequence
  Description of Artificial Sequence: Synthetic oligonucleotide
auaccugcagcccgucuac

SEQ ID NO: 2762278 - RNA, 19 nt, Artificial Sequence
  Description of Artificial Sequence: Synthetic oligonucleotide
ugugcacuuuggcauccgg

SEQ ID NO: 2762279 - RNA, 19 nt, Artificial Sequence
  Description of Artificial Sequence: Synthetic oligonucleotide
uucccuaucagucccucuc

SEQ ID NO: 2762280 - RNA, 19 nt, Artificial Sequence
  Description of Artificial Sequence: Synthetic oligonucleotide
gagaaguucagcuucccua

SEQ ID NO: 2762281 - RNA, 19 nt, Artificial Sequence
  Description of Artificial Sequence: Synthetic oligonucleotide
ugaaucgcugcagcgaggc

SEQ ID NO: 2762282 - RNA, 19 nt, Artificial Sequence
  Description of Artificial Sequence: Synthetic oligonucleotide
agcucuccaucccggacgc

SEQ ID NO: 2762283 - RNA, 19 nt, Artificial Sequence
  Description of Artificial Sequence: Synthetic oligonucleotide
ucauuuucaugauguggcu

SEQ ID NO: 2762284 - RNA, 19 nt, Artificial Sequence
  Description of Artificial Sequence: Synthetic oligonucleotide
aaccuagggccuugugcac

SEQ ID NO: 2762285 - RNA, 19 nt, Artificial Sequence
  Description of Artificial Sequence: Synthetic oligonucleotide
caagccgcgaccccgaaac

SEQ ID NO: 2762286 - RNA, 19 nt, Artificial Sequence
  Description of Artificial Sequence: Synthetic oligonucleotide
uuuggcauccgggccaggg

SEQ ID NO: 2762287 - RNA, 19 nt, Artificial Sequence
  Description of Artificial Sequence: Synthetic oligonucleotide
gaccccacaaagugaagug

SEQ ID NO: 2762288 - RNA, 19 nt, Artificial Sequence
  Description of Artificial Sequence: Synthetic oligonucleotide
aucugagcucuccaucccg

SEQ ID NO: 2762289 - RNA, 19 nt, Artificial Sequence
  Description of Artificial Sequence: Synthetic oligonucleotide
gaagaagcguuccaccgga

SEQ ID NO: 2762290 - RNA, 19 nt, Artificial Sequence
  Description of Artificial Sequence: Synthetic oligonucleotide
aagcggucgaaaucgcgcu

SEQ ID NO: 2762291 - RNA, 19 nt, Artificial Sequence
  Description of Artificial Sequence: Synthetic oligonucleotide
ggaggugcagcguagccgg

SEQ ID NO: 2762292 - RNA, 19 nt, Artificial Sequence
  Description of Artificial Sequence: Synthetic oligonucleotide
ucuuccguuuugucuuccg

SEQ ID NO: 2762293 - RNA, 19 nt, Artificial Sequence
  Description of Artificial Sequence: Synthetic oligonucleotide
agcccgucuacaccguggc

SEQ ID NO: 2762294 - RNA, 19 nt, Artificial Sequence
  Description of Artificial Sequence: Synthetic oligonucleotide
gaaguggcuaaagcugccg

SEQ ID NO: 2762295 - RNA, 19 nt, Artificial Sequence
  Description of Artificial Sequence: Synthetic oligonucleotide
ucuacaccguggcgcaccg

SEQ ID NO: 2762296 - RNA, 19 nt, Artificial Sequence
  Description of Artificial Sequence: Synthetic oligonucleotide
caaccuagggccuugugca

SEQ ID NO: 2762297 - RNA, 19 nt, Artificial Sequence
  Description of Artificial Sequence: Synthetic oligonucleotide
cugcagcccgucuacaccg

SEQ ID NO: 2762298 - RNA, 19 nt, Artificial Sequence
  Description of Artificial Sequence: Synthetic oligonucleotide
gugugaagggaucugugac

SEQ ID NO: 2762299 - RNA, 19 nt, Artificial Sequence
  Description of Artificial Sequence: Synthetic oligonucleotide
accugaaccucgcagggca

SEQ ID NO: 2762300 - RNA, 19 nt, Artificial Sequence
  Description of Artificial Sequence: Synthetic oligonucleotide
uccguuuugucuuccgcgu

SEQ ID NO: 2762301 - RNA, 19 nt, Artificial Sequence
  Description of Artificial Sequence: Synthetic oligonucleotide
accgcgggcgugaagaagc

SEQ ID NO: 2762302 - RNA, 19 nt, Artificial Sequence
  Description of Artificial Sequence: Synthetic oligonucleotide
uggcuaaagcugccgguag

SEQ ID NO: 2762303 - RNA, 19 nt, Artificial Sequence
  Description of Artificial Sequence: Synthetic oligonucleotide
acacgcugcuuacuguccg

SEQ ID NO: 2762304 - RNA, 19 nt, Artificial Sequence
  Description of Artificial Sequence: Synthetic oligonucleotide
caaagugaaguggcuaaag

SEQ ID NO: 2762305 - RNA, 19 nt, Artificial Sequence
  Description of Artificial Sequence: Synthetic oligonucleotide
acuguccgcggcuucaucu

SEQ ID NO: 2762306 - RNA, 19 nt, Artificial Sequence
  Description of Artificial Sequence: Synthetic oligonucleotide
gacgcuggcgggcucaggc

SEQ ID NO: 2762307 - RNA, 19 nt, Artificial Sequence
  Description of Artificial Sequence: Synthetic oligonucleotide
auaaagcggucgaaaucgc

SEQ ID NO: 2762308 - RNA, 19 nt, Artificial Sequence
  Description of Artificial Sequence: Synthetic oligonucleotide
gguagcucccauaaagcgg

SEQ ID NO: 2762309 - RNA, 19 nt, Artificial Sequence
  Description of Artificial Sequence: Synthetic oligonucleotide
accuccucgccccgcaagc

SEQ ID NO: 2762310 - RNA, 19 nt, Artificial Sequence
  Description of Artificial Sequence: Synthetic oligonucleotide
uagccggugcggcagcacg

SEQ ID NO: 2762311 - RNA, 19 nt, Artificial Sequence
  Description of Artificial Sequence: Synthetic oligonucleotide
ucaccaucacgaaucccga

SEQ ID NO: 2762312 - RNA, 19 nt, Artificial Sequence
  Description of Artificial Sequence: Synthetic oligonucleotide
accaucacgaaucccgaaa

SEQ ID NO: 2762313 - RNA, 19 nt, Artificial Sequence
  Description of Artificial Sequence: Synthetic oligonucleotide
ugugcgugaaucgcugcag

SEQ ID NO: 2762314 - RNA, 19 nt, Artificial Sequence
  Description of Artificial Sequence: Synthetic oligonucleotide
ucccuaucagucccucucc

SEQ ID NO: 2762315 - RNA, 19 nt, Artificial Sequence
  Description of Artificial Sequence: Synthetic oligonucleotide
cucucaguccucaggcacc

SEQ ID NO: 2762316 - RNA, 19 nt, Artificial Sequence
  Description of Artificial Sequence: Synthetic oligonucleotide
uggccggcucaccugaacc

SEQ ID NO: 2762317 - RNA, 19 nt, Artificial Sequence
  Description of Artificial Sequence: Synthetic oligonucleotide
cuuccguuuugucuuccgc

SEQ ID NO: 2762318 - RNA, 19 nt, Artificial Sequence
  Description of Artificial Sequence: Synthetic oligonucleotide
aggaggugcagcguagccg

SEQ ID NO: 2762319 - RNA, 19 nt, Artificial Sequence
  Description of Artificial Sequence: Synthetic oligonucleotide
accugcagcccgucuacac

SEQ ID NO: 2762320 - RNA, 19 nt, Artificial Sequence
  Description of Artificial Sequence: Synthetic oligonucleotide
gccgguagcucccauaaag

SEQ ID NO: 2762321 - RNA, 19 nt, Artificial Sequence
  Description of Artificial Sequence: Synthetic oligonucleotide
aguggcuaaagcugccggu

SEQ ID NO: 2762322 - RNA, 19 nt, Artificial Sequence
  Description of Artificial Sequence: Synthetic oligonucleotide
guggcucucaguccucagg

SEQ ID NO: 2762323 - RNA, 19 nt, Artificial Sequence
  Description of Artificial Sequence: Synthetic oligonucleotide
cacaaagugaaguggcuaa

SEQ ID NO: 2762324 - RNA, 19 nt, Artificial Sequence
  Description of Artificial Sequence: Synthetic oligonucleotide
ugagcucuccaucccggac

SEQ ID NO: 2762325 - RNA, 19 nt, Artificial Sequence
  Description of Artificial Sequence: Synthetic oligonucleotide
gaaaucgcgcuccagcggu

SEQ ID NO: 2762326 - RNA, 19 nt, Artificial Sequence
  Description of Artificial Sequence: Synthetic oligonucleotide
gcugggccaaccuagggcc

SEQ ID NO: 2762327 - RNA, 19 nt, Artificial Sequence
  Description of Artificial Sequence: Synthetic oligonucleotide
accguuuccagaccccaca

SEQ ID NO: 2762328 - RNA, 19 nt, Artificial Sequence
  Description of Artificial Sequence: Synthetic oligonucleotide
uggcauccgggccagggac

SEQ ID NO: 2762329 - RNA, 19 nt, Artificial Sequence
  Description of Artificial Sequence: Synthetic oligonucleotide
gaagcguuccaccggagcu

SEQ ID NO: 2762330 - RNA, 19 nt, Artificial Sequence
  Description of Artificial Sequence: Synthetic oligonucleotide
agaccccacaaagugaagu

SEQ ID NO: 2762331 - RNA, 19 nt, Artificial Sequence
  Description of Artificial Sequence: Synthetic oligonucleotide
cauuuucaugauguggcuc

SEQ ID NO: 2762332 - RNA, 19 nt, Artificial Sequence
  Description of Artificial Sequence: Synthetic oligonucleotide
uccucaggcaccugugcgu

SEQ ID NO: 2762333 - RNA, 19 nt, Artificial Sequence
  Description of Artificial Sequence: Synthetic oligonucleotide
aaucgcgcuccagcgguuc

SEQ ID NO: 2762334 - RNA, 19 nt, Artificial Sequence
  Description of Artificial Sequence: Synthetic oligonucleotide
aagcguuccaccggagcug

SEQ ID NO: 2762335 - RNA, 19 nt, Artificial Sequence
  Description of Artificial Sequence: Synthetic oligonucleotide
cgaaacgauaccugcagcc

SEQ ID NO: 2762336 - RNA, 19 nt, Artificial Sequence
  Description of Artificial Sequence: Synthetic oligonucleotide
cagcuucccuaucaguccc

SEQ ID NO: 2762337 - RNA, 19 nt, Artificial Sequence
  Description of Artificial Sequence: Synthetic oligonucleotide
ugcagcguagccggugcgg

SEQ ID NO: 2762338 - RNA, 19 nt, Artificial Sequence
  Description of Artificial Sequence: Synthetic oligonucleotide
agggcgcaaguggacacgc

SEQ ID NO: 2762339 - RNA, 19 nt, Artificial Sequence
  Description of Artificial Sequence: Synthetic oligonucleotide
uuuugucuuccgcgucccc

SEQ ID NO: 2762340 - RNA, 19 nt, Artificial Sequence
  Description of Artificial Sequence: Synthetic oligonucleotide
ggugcggcagcacgcagcg

SEQ ID NO: 2762341 - RNA, 19 nt, Artificial Sequence
  Description of Artificial Sequence: Synthetic oligonucleotide
cagucccucucccaucucc

SEQ ID NO: 2762342 - RNA, 19 nt, Artificial Sequence
  Description of Artificial Sequence: Synthetic oligonucleotide
ccaaccuagggccuugugc

SEQ ID NO: 2762343 - RNA, 19 nt, Artificial Sequence
  Description of Artificial Sequence: Synthetic oligonucleotide
ggcaccugugcgugaaucg

SEQ ID NO: 2762344 - RNA, 19 nt, Artificial Sequence
  Description of Artificial Sequence: Synthetic oligonucleotide
aacgauaccugcagcccgu

SEQ ID NO: 2762345 - RNA, 19 nt, Artificial Sequence
  Description of Artificial Sequence: Synthetic oligonucleotide
uuggcauccgggccaggga

SEQ ID NO: 2762346 - RNA, 19 nt, Artificial Sequence
  Description of Artificial Sequence: Synthetic oligonucleotide
aagccgcgaccccgaaacg

SEQ ID NO: 2762347 - RNA, 19 nt, Artificial Sequence
  Description of Artificial Sequence: Synthetic oligonucleotide
ucccauaaagcggucgaaa

SEQ ID NO: 2762348 - RNA, 19 nt, Artificial Sequence
  Description of Artificial Sequence: Synthetic oligonucleotide
uuccaccggagcuggccgg

SEQ ID NO: 2762349 - RNA, 19 nt, Artificial Sequence
  Description of Artificial Sequence: Synthetic oligonucleotide
agcggucgaaaucgcgcuc

SEQ ID NO: 2762350 - RNA, 19 nt, Artificial Sequence
  Description of Artificial Sequence: Synthetic oligonucleotide
agcucccauaaagcggucg

SEQ ID NO: 2762351 - RNA, 19 nt, Artificial Sequence
  Description of Artificial Sequence: Synthetic oligonucleotide
aucgcugcagcgaggcugg

SEQ ID NO: 2762352 - RNA, 19 nt, Artificial Sequence
  Description of Artificial Sequence: Synthetic oligonucleotide
cuugugcacuuuggcaucc

SEQ ID NO: 2762353 - RNA, 19 nt, Artificial Sequence
  Description of Artificial Sequence: Synthetic oligonucleotide
uggacacgcugcuuacugu

SEQ ID NO: 2762354 - RNA, 19 nt, Artificial Sequence
  Description of Artificial Sequence: Synthetic oligonucleotide
uguggcucucaguccucag

SEQ ID NO: 2762355 - RNA, 19 nt, Artificial Sequence
  Description of Artificial Sequence: Synthetic oligonucleotide
gacacgcugcuuacugucc

SEQ ID NO: 2762356 - RNA, 19 nt, Artificial Sequence
  Description of Artificial Sequence: Synthetic oligonucleotide
uccucgccccgcaagccgc

SEQ ID NO: 2762357 - RNA, 19 nt, Artificial Sequence
  Description of Artificial Sequence: Synthetic oligonucleotide
cagcccgucuacaccgugg

SEQ ID NO: 2762358 - RNA, 19 nt, Artificial Sequence
  Description of Artificial Sequence: Synthetic oligonucleotide
agcguuccaccggagcugg

SEQ ID NO: 2762359 - RNA, 19 nt, Artificial Sequence
  Description of Artificial Sequence: Synthetic oligonucleotide
uguccgcggcuucaucuga

SEQ ID NO: 2762360 - RNA, 19 nt, Artificial Sequence
  Description of Artificial Sequence: Synthetic oligonucleotide
caaguggacacgcugcuua

SEQ ID NO: 2762361 - RNA, 19 nt, Artificial Sequence
  Description of Artificial Sequence: Synthetic oligonucleotide
gaccccgaaacgauaccug

SEQ ID NO: 2762362 - RNA, 19 nt, Artificial Sequence
  Description of Artificial Sequence: Synthetic oligonucleotide
guagcucccauaaagcggu

SEQ ID NO: 2762363 - RNA, 19 nt, Artificial Sequence
  Description of Artificial Sequence: Synthetic oligonucleotide
aggcaccugugcgugaauc

SEQ ID NO: 2762364 - RNA, 19 nt, Artificial Sequence
  Description of Artificial Sequence: Synthetic oligonucleotide
ccccacaaagugaaguggc

SEQ ID NO: 2762365 - RNA, 19 nt, Artificial Sequence
  Description of Artificial Sequence: Synthetic oligonucleotide
agcacgcagcgagucaggg

SEQ ID NO: 2762366 - RNA, 19 nt, Artificial Sequence
  Description of Artificial Sequence: Synthetic oligonucleotide
ggcgggcucaggcaaaacc

SEQ ID NO: 2762367 - RNA, 19 nt, Artificial Sequence
  Description of Artificial Sequence: Synthetic oligonucleotide
gcucaccugaaccucgcag

SEQ ID NO: 2762368 - RNA, 19 nt, Artificial Sequence
  Description of Artificial Sequence: Synthetic oligonucleotide
gugcgugaaucgcugcagc

SEQ ID NO: 2762369 - RNA, 19 nt, Artificial Sequence
  Description of Artificial Sequence: Synthetic oligonucleotide
aagggaucugugacuuuca

SEQ ID NO: 2762370 - RNA, 19 nt, Artificial Sequence
  Description of Artificial Sequence: Synthetic oligonucleotide
ugaaccucgcagggcagga

SEQ ID NO: 2762371 - RNA, 19 nt, Artificial Sequence
  Description of Artificial Sequence: Synthetic oligonucleotide
ccagggaccguuuccagac

SEQ ID NO: 2762372 - RNA, 19 nt, Artificial Sequence
  Description of Artificial Sequence: Synthetic oligonucleotide
caggaggugcagcguagcc

SEQ ID NO: 2762373 - RNA, 19 nt, Artificial Sequence
  Description of Artificial Sequence: Synthetic oligonucleotide
gcugcuuacuguccgcggc

SEQ ID NO: 2762374 - RNA, 19 nt, Artificial Sequence
  Description of Artificial Sequence: Synthetic oligonucleotide
cacuuuggcauccgggcca

SEQ ID NO: 2762375 - RNA, 19 nt, Artificial Sequence
  Description of Artificial Sequence: Synthetic oligonucleotide
cucgcagggcaggaggugc

SEQ ID NO: 2762376 - RNA, 19 nt, Artificial Sequence
  Description of Artificial Sequence: Synthetic oligonucleotide
ggcugggccaaccuagggc

SEQ ID NO: 2762377 - RNA, 19 nt, Artificial Sequence
  Description of Artificial Sequence: Synthetic oligonucleotide
agucagggcgcaaguggac

SEQ ID NO: 2762378 - RNA, 19 nt, Artificial Sequence
  Description of Artificial Sequence: Synthetic oligonucleotide
accguggcgcaccgcgggc

SEQ ID NO: 2762379 - RNA, 19 nt, Artificial Sequence
  Description of Artificial Sequence: Synthetic oligonucleotide
gagucagggcgcaagugga

SEQ ID NO: 2762380 - RNA, 19 nt, Artificial Sequence
  Description of Artificial Sequence: Synthetic oligonucleotide
ggcgcaaguggacacgcug

SEQ ID NO: 2762381 - RNA, 19 nt, Artificial Sequence
  Description of Artificial Sequence: Synthetic oligonucleotide
ccauaaagcggucgaaauc

SEQ ID NO: 2762382 - RNA, 19 nt, Artificial Sequence
  Description of Artificial Sequence: Synthetic oligonucleotide
agcgagucagggcgcaagu

SEQ ID NO: 2762383 - RNA, 19 nt, Artificial Sequence
  Description of Artificial Sequence: Synthetic oligonucleotide
acaaagugaaguggcuaaa

SEQ ID NO: 2762384 - RNA, 19 nt, Artificial Sequence
  Description of Artificial Sequence: Synthetic oligonucleotide
uccgcggcuucaucugagc

SEQ ID NO: 2762385 - RNA, 19 nt, Artificial Sequence
  Description of Artificial Sequence: Synthetic oligonucleotide
cuccucgccccgcaagccg

SEQ ID NO: 2762386 - RNA, 19 nt, Artificial Sequence
  Description of Artificial Sequence: Synthetic oligonucleotide
cccgaaacgauaccugcag

SEQ ID NO: 2762387 - RNA, 19 nt, Artificial Sequence
  Description of Artificial Sequence: Synthetic oligonucleotide
cugaaccucgcagggcagg

SEQ ID NO: 2762388 - RNA, 19 nt, Artificial Sequence
  Description of Artificial Sequence: Synthetic oligonucleotide
cgugaagaagcguuccacc

SEQ ID NO: 2762389 - RNA, 19 nt, Artificial Sequence
  Description of Artificial Sequence: Synthetic oligonucleotide
uugugcacuuuggcauccg

SEQ ID NO: 2762390 - RNA, 19 nt, Artificial Sequence
  Description of Artificial Sequence: Synthetic oligonucleotide
cuguccgcggcuucaucug

SEQ ID NO: 2762391 - RNA, 19 nt, Artificial Sequence
  Description of Artificial Sequence: Synthetic oligonucleotide
agcguagccggugcggcag

SEQ ID NO: 2762392 - RNA, 19 nt, Artificial Sequence
  Description of Artificial Sequence: Synthetic oligonucleotide
cacgcugcuuacuguccgc

SEQ ID NO: 2762393 - RNA, 19 nt, Artificial Sequence
  Description of Artificial Sequence: Synthetic oligonucleotide
ccgguagcucccauaaagc

SEQ ID NO: 2762394 - RNA, 19 nt, Artificial Sequence
  Description of Artificial Sequence: Synthetic oligonucleotide
acgcugcuuacuguccgcg

SEQ ID NO: 2762395 - RNA, 19 nt, Artificial Sequence
  Description of Artificial Sequence: Synthetic oligonucleotide
cgguagcucccauaaagcg

SEQ ID NO: 2762396 - RNA, 19 nt, Artificial Sequence
  Description of Artificial Sequence: Synthetic oligonucleotide
gcucucaguccucaggcac

SEQ ID NO: 2762397 - RNA, 19 nt, Artificial Sequence
  Description of Artificial Sequence: Synthetic oligonucleotide
gucuacaccguggcgcacc

SEQ ID NO: 2762398 - RNA, 19 nt, Artificial Sequence
  Description of Artificial Sequence: Synthetic oligonucleotide
caguccucaggcaccugug

SEQ ID NO: 2762399 - RNA, 19 nt, Artificial Sequence
  Description of Artificial Sequence: Synthetic oligonucleotide
agcuggccggcucaccuga

SEQ ID NO: 2762400 - RNA, 19 nt, Artificial Sequence
  Description of Artificial Sequence: Synthetic oligonucleotide
ugggucucuuccguuuugu

SEQ ID NO: 2762401 - RNA, 19 nt, Artificial Sequence
  Description of Artificial Sequence: Synthetic oligonucleotide
ggacacgcugcuuacuguc

SEQ ID NO: 2762402 - RNA, 19 nt, Artificial Sequence
  Description of Artificial Sequence: Synthetic oligonucleotide
acuuuggcauccgggccag

SEQ ID NO: 2762403 - RNA, 19 nt, Artificial Sequence
  Description of Artificial Sequence: Synthetic oligonucleotide
ggugcagcguagccggugc

SEQ ID NO: 2762404 - RNA, 19 nt, Artificial Sequence
  Description of Artificial Sequence: Synthetic oligonucleotide
ggcuaaagcugccgguagc

SEQ ID NO: 2762405 - RNA, 19 nt, Artificial Sequence
  Description of Artificial Sequence: Synthetic oligonucleotide
caccguggcgcaccgcggg

SEQ ID NO: 2762406 - RNA, 19 nt, Artificial Sequence
  Description of Artificial Sequence: Synthetic oligonucleotide
cuuacuguccgcggcuuca

SEQ ID NO: 2762407 - RNA, 19 nt, Artificial Sequence
  Description of Artificial Sequence: Synthetic oligonucleotide
caucuccuccgucaccauc

SEQ ID NO: 2762408 - RNA, 19 nt, Artificial Sequence
  Description of Artificial Sequence: Synthetic oligonucleotide
ggccuugugcacuuuggca

SEQ ID NO: 2762409 - RNA, 19 nt, Artificial Sequence
  Description of Artificial Sequence: Synthetic oligonucleotide
cuaaagcugccgguagcuc

SEQ ID NO: 2762410 - RNA, 19 nt, Artificial Sequence
  Description of Artificial Sequence: Synthetic oligonucleotide
agcgaggcugggccaaccu

SEQ ID NO: 2762411 - RNA, 19 nt, Artificial Sequence
  Description of Artificial Sequence: Synthetic oligonucleotide
cccgucuacaccguggcgc

SEQ ID NO: 2762412 - RNA, 19 nt, Artificial Sequence
  Description of Artificial Sequence: Synthetic oligonucleotide
ggucucuuccguuuugucu

SEQ ID NO: 2762413 - RNA, 19 nt, Artificial Sequence
  Description of Artificial Sequence: Synthetic oligonucleotide
accugugcgugaaucgcug

SEQ ID NO: 2762414 - RNA, 19 nt, Artificial Sequence
  Description of Artificial Sequence: Synthetic oligonucleotide
cgugaaucgcugcagcgag

SEQ ID NO: 2762415 - RNA, 19 nt, Artificial Sequence
  Description of Artificial Sequence: Synthetic oligonucleotide
gaaccucgcagggcaggag

SEQ ID NO: 2762416 - RNA, 19 nt, Artificial Sequence
  Description of Artificial Sequence: Synthetic oligonucleotide
cugugcgugaaucgcugca

SEQ ID NO: 2762417 - RNA, 19 nt, Artificial Sequence
  Description of Artificial Sequence: Synthetic oligonucleotide
gggcucaggcaaaaccugg

SEQ ID NO: 2762418 - RNA, 19 nt, Artificial Sequence
  Description of Artificial Sequence: Synthetic oligonucleotide
cagaccccacaaagugaag

SEQ ID NO: 2762419 - RNA, 19 nt, Artificial Sequence
  Description of Artificial Sequence: Synthetic oligonucleotide
cagcacgcagcgagucagg

SEQ ID NO: 2762420 - RNA, 19 nt, Artificial Sequence
  Description of Artificial Sequence: Synthetic oligonucleotide
ccugcagcccgucuacacc

SEQ ID NO: 2762421 - RNA, 19 nt, Artificial Sequence
  Description of Artificial Sequence: Synthetic oligonucleotide
accuagggccuugugcacu

SEQ ID NO: 2762422 - RNA, 19 nt, Artificial Sequence
  Description of Artificial Sequence: Synthetic oligonucleotide
cugccgguagcucccauaa

SEQ ID NO: 2762423 - RNA, 19 nt, Artificial Sequence
  Description of Artificial Sequence: Synthetic oligonucleotide
gugcagcguagccggugcg

SEQ ID NO: 2762424 - RNA, 19 nt, Artificial Sequence
  Description of Artificial Sequence: Synthetic oligonucleotide
ugaagggaucugugacuuu

SEQ ID NO: 2762425 - RNA, 19 nt, Artificial Sequence
  Description of Artificial Sequence: Synthetic oligonucleotide
cagggcgcaaguggacacg

SEQ ID NO: 2762426 - RNA, 19 nt, Artificial Sequence
  Description of Artificial Sequence: Synthetic oligonucleotide
cuaucagucccucucccau

SEQ ID NO: 2762427 - RNA, 19 nt, Artificial Sequence
  Description of Artificial Sequence: Synthetic oligonucleotide
gcucccauaaagcggucga

SEQ ID NO: 2762428 - RNA, 19 nt, Artificial Sequence
  Description of Artificial Sequence: Synthetic oligonucleotide
ugcagcccgucuacaccgu

SEQ ID NO: 2762429 - RNA, 19 nt, Artificial Sequence
  Description of Artificial Sequence: Synthetic oligonucleotide
uacuguccgcggcuucauc

SEQ ID NO: 2762430 - RNA, 19 nt, Artificial Sequence
  Description of Artificial Sequence: Synthetic oligonucleotide
gucagggcgcaaguggaca

SEQ ID NO: 2762431 - RNA, 19 nt, Artificial Sequence
  Description of Artificial Sequence: Synthetic oligonucleotide
agucccucucccaucuccu

SEQ ID NO: 2762432 - RNA, 19 nt, Artificial Sequence
  Description of Artificial Sequence: Synthetic oligonucleotide
cagggaccguuuccagacc

SEQ ID NO: 2762433 - RNA, 19 nt, Artificial Sequence
  Description of Artificial Sequence: Synthetic oligonucleotide
cccgagaaguucagcuucc

SEQ ID NO: 2762434 - RNA, 19 nt, Artificial Sequence
  Description of Artificial Sequence: Synthetic oligonucleotide
agccgcgaccccgaaacga

SEQ ID NO: 2762435 - RNA, 19 nt, Artificial Sequence
  Description of Artificial Sequence: Synthetic oligonucleotide
cccucucccaucuccuccg

SEQ ID NO: 2762436 - RNA, 19 nt, Artificial Sequence
  Description of Artificial Sequence: Synthetic oligonucleotide
cagcgagucagggcgcaag

SEQ ID NO: 2762437 - RNA, 19 nt, Artificial Sequence
  Description of Artificial Sequence: Synthetic oligonucleotide
uccaccggagcuggccggc

SEQ ID NO: 2762438 - RNA, 19 nt, Artificial Sequence
  Description of Artificial Sequence: Synthetic oligonucleotide
caccugaaccucgcagggc

SEQ ID NO: 2762439 - RNA, 19 nt, Artificial Sequence
  Description of Artificial Sequence: Synthetic oligonucleotide
ccgaaacgauaccugcagc

SEQ ID NO: 2762440 - RNA, 19 nt, Artificial Sequence
  Description of Artificial Sequence: Synthetic oligonucleotide
guuccugggucucuuccgu

SEQ ID NO: 2762441 - RNA, 19 nt, Artificial Sequence
  Description of Artificial Sequence: Synthetic oligonucleotide
ccagaccccacaaagugaa

SEQ ID NO: 2762442 - RNA, 19 nt, Artificial Sequence
  Description of Artificial Sequence: Synthetic oligonucleotide
gaccguuuccagaccccac

SEQ ID NO: 2762443 - RNA, 19 nt, Artificial Sequence
  Description of Artificial Sequence: Synthetic oligonucleotide
acgauaccugcagcccguc

SEQ ID NO: 2762444 - RNA, 19 nt, Artificial Sequence
  Description of Artificial Sequence: Synthetic oligonucleotide
cgaaaucgcgcuccagcgg

SEQ ID NO: 2762445 - RNA, 19 nt, Artificial Sequence
  Description of Artificial Sequence: Synthetic oligonucleotide
aggugcagcguagccggug

SEQ ID NO: 2762446 - RNA, 19 nt, Artificial Sequence
  Description of Artificial Sequence: Synthetic oligonucleotide
gauguggcucucaguccuc

SEQ ID NO: 2762447 - RNA, 19 nt, Artificial Sequence
  Description of Artificial Sequence: Synthetic oligonucleotide
ccccgagaaguucagcuuc

SEQ ID NO: 2762448 - RNA, 19 nt, Artificial Sequence
  Description of Artificial Sequence: Synthetic oligonucleotide
ccuugugcacuuuggcauc

SEQ ID NO: 2762449 - RNA, 19 nt, Artificial Sequence
  Description of Artificial Sequence: Synthetic oligonucleotide
acgcuggcgggcucaggca

SEQ ID NO: 2762450 - RNA, 19 nt, Artificial Sequence
  Description of Artificial Sequence: Synthetic oligonucleotide
ugccgguagcucccauaaa

SEQ ID NO: 2762451 - RNA, 19 nt, Artificial Sequence
  Description of Artificial Sequence: Synthetic oligonucleotide
uuacuguccgcggcuucau

SEQ ID NO: 2762452 - RNA, 19 nt, Artificial Sequence
  Description of Artificial Sequence: Synthetic oligonucleotide
gccuugugcacuuuggcau

SEQ ID NO: 2762453 - RNA, 19 nt, Artificial Sequence
  Description of Artificial Sequence: Synthetic oligonucleotide
uuccugggucucuuccguu

SEQ ID NO: 2762454 - RNA, 19 nt, Artificial Sequence
  Description of Artificial Sequence: Synthetic oligonucleotide
gcgugaagaagcguuccac

SEQ ID NO: 2762455 - RNA, 19 nt, Artificial Sequence
  Description of Artificial Sequence: Synthetic oligonucleotide
cuggccggcucaccugaac

SEQ ID NO: 2762456 - RNA, 19 nt, Artificial Sequence
  Description of Artificial Sequence: Synthetic oligonucleotide
acgcagcgagucagggcgc

SEQ ID NO: 2762457 - RNA, 19 nt, Artificial Sequence
  Description of Artificial Sequence: Synthetic oligonucleotide
gcgcaaguggacacgcugc

SEQ ID NO: 2762458 - RNA, 19 nt, Artificial Sequence
  Description of Artificial Sequence: Synthetic oligonucleotide
gcggucgaaaucgcgcucc

SEQ ID NO: 2762459 - RNA, 19 nt, Artificial Sequence
  Description of Artificial Sequence: Synthetic oligonucleotide
gugaagggaucugugacuu

SEQ ID NO: 2762460 - RNA, 19 nt, Artificial Sequence
  Description of Artificial Sequence: Synthetic oligonucleotide
ggcgugaagaagcguucca

SEQ ID NO: 2762461 - RNA, 19 nt, Artificial Sequence
  Description of Artificial Sequence: Synthetic oligonucleotide
gcauccgggccagggaccg

SEQ ID NO: 2762462 - RNA, 19 nt, Artificial Sequence
  Description of Artificial Sequence: Synthetic oligonucleotide
cuccagcgguuccuggguc

SEQ ID NO: 2762463 - RNA, 19 nt, Artificial Sequence
  Description of Artificial Sequence: Synthetic oligonucleotide
guccgcggcuucaucugag

SEQ ID NO: 2762464 - RNA, 19 nt, Artificial Sequence
  Description of Artificial Sequence: Synthetic oligonucleotide
acaccguggcgcaccgcgg

SEQ ID NO: 2762465 - RNA, 19 nt, Artificial Sequence
  Description of Artificial Sequence: Synthetic oligonucleotide
ugcuuacuguccgcggcuu

SEQ ID NO: 2762466 - RNA, 19 nt, Artificial Sequence
  Description of Artificial Sequence: Synthetic oligonucleotide
ccugugcgugaaucgcugc

SEQ ID NO: 2762467 - RNA, 19 nt, Artificial Sequence
  Description of Artificial Sequence: Synthetic oligonucleotide
gcacgcagcgagucagggc

SEQ ID NO: 2762468 - RNA, 19 nt, Artificial Sequence
  Description of Artificial Sequence: Synthetic oligonucleotide
uaccugcagcccgucuaca

SEQ ID NO: 2762469 - RNA, 19 nt, Artificial Sequence
  Description of Artificial Sequence: Synthetic oligonucleotide
uagcucccauaaagcgguc

SEQ ID NO: 2762470 - RNA, 19 nt, Artificial Sequence
  Description of Artificial Sequence: Synthetic oligonucleotide
gggcgugaagaagcguucc

SEQ ID NO: 2762471 - RNA, 19 nt, Artificial Sequence
  Description of Artificial Sequence: Synthetic oligonucleotide
ggcaggaggugcagcguag

SEQ ID NO: 2762472 - RNA, 19 nt, Artificial Sequence
  Description of Artificial Sequence: Synthetic oligonucleotide
accucgcagggcaggaggu

SEQ ID NO: 2762473 - RNA, 19 nt, Artificial Sequence
  Description of Artificial Sequence: Synthetic oligonucleotide
ccaucacgaaucccgaaaa

SEQ ID NO: 2762474 - RNA, 19 nt, Artificial Sequence
  Description of Artificial Sequence: Synthetic oligonucleotide
cucucccaucuccuccguc

SEQ ID NO: 2762475 - RNA, 19 nt, Artificial Sequence
  Description of Artificial Sequence: Synthetic oligonucleotide
ccgucaccaucacgaaucc

SEQ ID NO: 2762476 - RNA, 19 nt, Artificial Sequence
  Description of Artificial Sequence: Synthetic oligonucleotide
ucgccccgcaagccgcgac

SEQ ID NO: 2762477 - RNA, 19 nt, Artificial Sequence
  Description of Artificial Sequence: Synthetic oligonucleotide
caccgcgggcgugaagaag

SEQ ID NO: 2762478 - RNA, 19 nt, Artificial Sequence
  Description of Artificial Sequence: Synthetic oligonucleotide
ccuaucagucccucuccca

SEQ ID NO: 2762479 - RNA, 19 nt, Artificial Sequence
  Description of Artificial Sequence: Synthetic oligonucleotide
gcagcguagccggugcggc

SEQ ID NO: 2762480 - RNA, 19 nt, Artificial Sequence
  Description of Artificial Sequence: Synthetic oligonucleotide
ggucgaaaucgcgcuccag

SEQ ID NO: 2762481 - RNA, 19 nt, Artificial Sequence
  Description of Artificial Sequence: Synthetic oligonucleotide
ccugaaccucgcagggcag

SEQ ID NO: 2762482 - RNA, 19 nt, Artificial Sequence
  Description of Artificial Sequence: Synthetic oligonucleotide
ggcucucaguccucaggca

SEQ ID NO: 2762483 - RNA, 19 nt, Artificial Sequence
  Description of Artificial Sequence: Synthetic oligonucleotide
gcgugaaucgcugcagcga

SEQ ID NO: 2762484 - RNA, 19 nt, Artificial Sequence
  Description of Artificial Sequence: Synthetic oligonucleotide
caccaucacgaaucccgaa

SEQ ID NO: 2762485 - RNA, 19 nt, Artificial Sequence
  Description of Artificial Sequence: Synthetic oligonucleotide
gcgaccccgaaacgauacc

SEQ ID NO: 2762486 - RNA, 19 nt, Artificial Sequence
  Description of Artificial Sequence: Synthetic oligonucleotide
cgcuccagcgguuccuggg

SEQ ID NO: 2762487 - RNA, 19 nt, Artificial Sequence
  Description of Artificial Sequence: Synthetic oligonucleotide
cgcgaccccgaaacgauac

SEQ ID NO: 2762488 - RNA, 19 nt, Artificial Sequence
  Description of Artificial Sequence: Synthetic oligonucleotide
ugggccaaccuagggccuu

SEQ ID NO: 2762489 - RNA, 19 nt, Artificial Sequence
  Description of Artificial Sequence: Synthetic oligonucleotide
uggcgcaccgcgggcguga

SEQ ID NO: 2762490 - RNA, 19 nt, Artificial Sequence
  Description of Artificial Sequence: Synthetic oligonucleotide
aagcugccgguagcuccca

SEQ ID NO: 2762491 - RNA, 19 nt, Artificial Sequence
  Description of Artificial Sequence: Synthetic oligonucleotide
cccgcaagccgcgaccccg

SEQ ID NO: 2762492 - RNA, 19 nt, Artificial Sequence
  Description of Artificial Sequence: Synthetic oligonucleotide
ggaccguuuccagacccca

SEQ ID NO: 2762493 - RNA, 19 nt, Artificial Sequence
  Description of Artificial Sequence: Synthetic oligonucleotide
agcuucccuaucagucccu

SEQ ID NO: 2762494 - RNA, 19 nt, Artificial Sequence
  Description of Artificial Sequence: Synthetic oligonucleotide
caccugugcgugaaucgcu

SEQ ID NO: 2762495 - RNA, 19 nt, Artificial Sequence
  Description of Artificial Sequence: Synthetic oligonucleotide
gggaccguuuccagacccc

SEQ ID NO: 2762496 - RNA, 19 nt, Artificial Sequence
  Description of Artificial Sequence: Synthetic oligonucleotide
gaaucgcugcagcgaggcu

SEQ ID NO: 2762497 - RNA, 19 nt, Artificial Sequence
  Description of Artificial Sequence: Synthetic oligonucleotide
cugcuuacuguccgcggcu

SEQ ID NO: 2762498 - RNA, 19 nt, Artificial Sequence
  Description of Artificial Sequence: Synthetic oligonucleotide
gcaggaggugcagcguagc

SEQ ID NO: 2762499 - RNA, 19 nt, Artificial Sequence
  Description of Artificial Sequence: Synthetic oligonucleotide
ggcagcacgcagcgaguca

SEQ ID NO: 2762500 - RNA, 19 nt, Artificial Sequence
  Description of Artificial Sequence: Synthetic oligonucleotide
ucccggacgcuggcgggcu

SEQ ID NO: 2762501 - RNA, 19 nt, Artificial Sequence
  Description of Artificial Sequence: Synthetic oligonucleotide
cucccauaaagcggucgaa

SEQ ID NO: 2762502 - RNA, 19 nt, Artificial Sequence
  Description of Artificial Sequence: Synthetic oligonucleotide
cagcgaggcugggccaacc

SEQ ID NO: 2762503 - RNA, 19 nt, Artificial Sequence
  Description of Artificial Sequence: Synthetic oligonucleotide
cugugacuuucauuuucau

SEQ ID NO: 2762504 - RNA, 19 nt, Artificial Sequence
  Description of Artificial Sequence: Synthetic oligonucleotide
gcccgucuacaccguggcg

SEQ ID NO: 2762505 - RNA, 19 nt, Artificial Sequence
  Description of Artificial Sequence: Synthetic oligonucleotide
cgguuccugggucucuucc

SEQ ID NO: 2762506 - RNA, 19 nt, Artificial Sequence
  Description of Artificial Sequence: Synthetic oligonucleotide
cgcggcuucaucugagcuc

SEQ ID NO: 2762507 - RNA, 19 nt, Artificial Sequence
  Description of Artificial Sequence: Synthetic oligonucleotide
ggcauccgggccagggacc

SEQ ID NO: 2762508 - RNA, 19 nt, Artificial Sequence
  Description of Artificial Sequence: Synthetic oligonucleotide
gcuuacuguccgcggcuuc

SEQ ID NO: 2762509 - RNA, 19 nt, Artificial Sequence
  Description of Artificial Sequence: Synthetic oligonucleotide
guagccggugcggcagcac

SEQ ID NO: 2762510 - RNA, 19 nt, Artificial Sequence
  Description of Artificial Sequence: Synthetic oligonucleotide
gcgagucagggcgcaagug

SEQ ID NO: 2762511 - RNA, 19 nt, Artificial Sequence
  Description of Artificial Sequence: Synthetic oligonucleotide
gccaaccuagggccuugug

SEQ ID NO: 2762512 - RNA, 19 nt, Artificial Sequence
  Description of Artificial Sequence: Synthetic oligonucleotide
cguuccaccggagcuggcc

SEQ ID NO: 2762513 - RNA, 19 nt, Artificial Sequence
  Description of Artificial Sequence: Synthetic oligonucleotide
agcgguuccugggucucuu

SEQ ID NO: 2762514 - RNA, 19 nt, Artificial Sequence
  Description of Artificial Sequence: Synthetic oligonucleotide
ccccgaaacgauaccugca

SEQ ID NO: 2762515 - RNA, 19 nt, Artificial Sequence
  Description of Artificial Sequence: Synthetic oligonucleotide
cagcguagccggugcggca

SEQ ID NO: 2762516 - RNA, 19 nt, Artificial Sequence
  Description of Artificial Sequence: Synthetic oligonucleotide
caccggagcuggccggcuc

SEQ ID NO: 2762517 - RNA, 19 nt, Artificial Sequence
  Description of Artificial Sequence: Synthetic oligonucleotide
cccauaaagcggucgaaau

SEQ ID NO: 2762518 - RNA, 19 nt, Artificial Sequence
  Description of Artificial Sequence: Synthetic oligonucleotide
auccgggccagggaccguu

SEQ ID NO: 2762519 - RNA, 19 nt, Artificial Sequence
  Description of Artificial Sequence: Synthetic oligonucleotide
cgcugcuuacuguccgcgg

SEQ ID NO: 2762520 - RNA, 19 nt, Artificial Sequence
  Description of Artificial Sequence: Synthetic oligonucleotide
ccguuuugucuuccgcguc

SEQ ID NO: 2762521 - RNA, 19 nt, Artificial Sequence
  Description of Artificial Sequence: Synthetic oligonucleotide
gcagcccgucuacaccgug

SEQ ID NO: 2762522 - RNA, 19 nt, Artificial Sequence
  Description of Artificial Sequence: Synthetic oligonucleotide
uccgggccagggaccguuu

SEQ ID NO: 2762523 - RNA, 19 nt, Artificial Sequence
  Description of Artificial Sequence: Synthetic oligonucleotide
cugcagcgaggcugggcca

SEQ ID NO: 2762524 - RNA, 19 nt, Artificial Sequence
  Description of Artificial Sequence: Synthetic oligonucleotide
ccgagaaguucagcuuccc

SEQ ID NO: 2762525 - RNA, 19 nt, Artificial Sequence
  Description of Artificial Sequence: Synthetic oligonucleotide
cuacaccguggcgcaccgc

SEQ ID NO: 2762526 - RNA, 19 nt, Artificial Sequence
  Description of Artificial Sequence: Synthetic oligonucleotide
ccgcgggcgugaagaagcg

SEQ ID NO: 2762527 - RNA, 19 nt, Artificial Sequence
  Description of Artificial Sequence: Synthetic oligonucleotide
cuggcggcacagccaccuc

SEQ ID NO: 2762528 - RNA, 19 nt, Artificial Sequence
  Description of Artificial Sequence: Synthetic oligonucleotide
ccgucuacaccguggcgca

SEQ ID NO: 2762529 - RNA, 19 nt, Artificial Sequence
  Description of Artificial Sequence: Synthetic oligonucleotide
uggcgggcucaggcaaaac

SEQ ID NO: 2762530 - RNA, 19 nt, Artificial Sequence
  Description of Artificial Sequence: Synthetic oligonucleotide
gggcaggaggugcagcgua

SEQ ID NO: 2762531 - RNA, 19 nt, Artificial Sequence
  Description of Artificial Sequence: Synthetic oligonucleotide
ccacaaagugaaguggcua

SEQ ID NO: 2762532 - RNA, 19 nt, Artificial Sequence
  Description of Artificial Sequence: Synthetic oligonucleotide
gcgcuccagcgguuccugg

SEQ ID NO: 2762533 - RNA, 19 nt, Artificial Sequence
  Description of Artificial Sequence: Synthetic oligonucleotide
gcuucccuaucagucccuc

SEQ ID NO: 2762534 - RNA, 19 nt, Artificial Sequence
  Description of Artificial Sequence: Synthetic oligonucleotide
agcugccgguagcucccau

SEQ ID NO: 2762535 - RNA, 19 nt, Artificial Sequence
  Description of Artificial Sequence: Synthetic oligonucleotide
cuccgucaccaucacgaau

SEQ ID NO: 2762536 - RNA, 19 nt, Artificial Sequence
  Description of Artificial Sequence: Synthetic oligonucleotide
ggcucaccugaaccucgca

SEQ ID NO: 2762537 - RNA, 19 nt, Artificial Sequence
  Description of Artificial Sequence: Synthetic oligonucleotide
cgggccagggaccguuucc

SEQ ID NO: 2762538 - RNA, 19 nt, Artificial Sequence
  Description of Artificial Sequence: Synthetic oligonucleotide
cccacaaagugaaguggcu

SEQ ID NO: 2762539 - RNA, 19 nt, Artificial Sequence
  Description of Artificial Sequence: Synthetic oligonucleotide
cgggcgugaagaagcguuc

SEQ ID NO: 2762540 - RNA, 19 nt, Artificial Sequence
  Description of Artificial Sequence: Synthetic oligonucleotide
ccucgccccgcaagccgcg

SEQ ID NO: 2762541 - RNA, 19 nt, Artificial Sequence
  Description of Artificial Sequence: Synthetic oligonucleotide
gccggcucaccugaaccuc

SEQ ID NO: 2762542 - RNA, 19 nt, Artificial Sequence
  Description of Artificial Sequence: Synthetic oligonucleotide
ccuccucgccccgcaagcc

SEQ ID NO: 2762543 - RNA, 19 nt, Artificial Sequence
  Description of Artificial Sequence: Synthetic oligonucleotide
cugggccaaccuagggccu

SEQ ID NO: 2762544 - RNA, 19 nt, Artificial Sequence
  Description of Artificial Sequence: Synthetic oligonucleotide
cuggcgggcucaggcaaaa

SEQ ID NO: 2762545 - RNA, 19 nt, Artificial Sequence
  Description of Artificial Sequence: Synthetic oligonucleotide
cgcaccgcgggcgugaaga

SEQ ID NO: 2762546 - RNA, 19 nt, Artificial Sequence
  Description of Artificial Sequence: Synthetic oligonucleotide
gggccaaccuagggccuug

SEQ ID NO: 2762547 - RNA, 19 nt, Artificial Sequence
  Description of Artificial Sequence: Synthetic oligonucleotide
ccguggcgcaccgcgggcg

SEQ ID NO: 2762548 - RNA, 19 nt, Artificial Sequence
  Description of Artificial Sequence: Synthetic oligonucleotide
gcguagccggugcggcagc

SEQ ID NO: 2762549 - RNA, 19 nt, Artificial Sequence
  Description of Artificial Sequence: Synthetic oligonucleotide
ccguuuccagaccccacaa

SEQ ID NO: 2762550 - RNA, 19 nt, Artificial Sequence
  Description of Artificial Sequence: Synthetic oligonucleotide
gcaagccgcgaccccgaaa

SEQ ID NO: 2762551 - RNA, 19 nt, Artificial Sequence
  Description of Artificial Sequence: Synthetic oligonucleotide
cgucaccaucacgaauccc

SEQ ID NO: 2762552 - RNA, 19 nt, Artificial Sequence
  Description of Artificial Sequence: Synthetic oligonucleotide
gcgguuccugggucucuuc

SEQ ID NO: 2762553 - RNA, 19 nt, Artificial Sequence
  Description of Artificial Sequence: Synthetic oligonucleotide
guggcgcaccgcgggcgug

SEQ ID NO: 2762554 - RNA, 19 nt, Artificial Sequence
  Description of Artificial Sequence: Synthetic oligonucleotide
ccucgcagggcaggaggug

SEQ ID NO: 2762555 - RNA, 19 nt, Artificial Sequence
  Description of Artificial Sequence: Synthetic oligonucleotide
ggacgcuggcgggcucagg

SEQ ID NO: 2762556 - RNA, 19 nt, Artificial Sequence
  Description of Artificial Sequence: Synthetic oligonucleotide
ccuccgucaccaucacgaa

SEQ ID NO: 2762557 - RNA, 19 nt, Artificial Sequence
  Description of Artificial Sequence: Synthetic oligonucleotide
gcgggcgugaagaagcguu

SEQ ID NO: 2762558 - RNA, 19 nt, Artificial Sequence
  Description of Artificial Sequence: Synthetic oligonucleotide
cgccccgcaagccgcgacc

SEQ ID NO: 2762559 - RNA, 19 nt, Artificial Sequence
  Description of Artificial Sequence: Synthetic oligonucleotide
ccggugcggcagcacgcag

SEQ ID NO: 2762560 - RNA, 19 nt, Artificial Sequence
  Description of Artificial Sequence: Synthetic oligonucleotide
cguuuccagaccccacaaa

SEQ ID NO: 2762561 - RNA, 19 nt, Artificial Sequence
  Description of Artificial Sequence: Synthetic oligonucleotide
gcaccgcgggcgugaagaa

SEQ ID NO: 2762562 - RNA, 19 nt, Artificial Sequence
  Description of Artificial Sequence: Synthetic oligonucleotide
gaggugcagcguagccggu

SEQ ID NO: 2762563 - RNA, 19 nt, Artificial Sequence
  Description of Artificial Sequence: Synthetic oligonucleotide
gcagcgaggcugggccaac

SEQ ID NO: 2762564 - RNA, 19 nt, Artificial Sequence
  Description of Artificial Sequence: Synthetic oligonucleotide
ccccgcaagccgcgacccc

SEQ ID NO: 2762565 - RNA, 19 nt, Artificial Sequence
  Description of Artificial Sequence: Synthetic oligonucleotide
ccgggccagggaccguuuc

SEQ ID NO: 2762566 - RNA, 19 nt, Artificial Sequence
  Description of Artificial Sequence: Synthetic oligonucleotide
ccuggcggcacagccaccu

SEQ ID NO: 2762567 - RNA, 19 nt, Artificial Sequence
  Description of Artificial Sequence: Synthetic oligonucleotide
gcuggcgggcucaggcaaa

SEQ ID NO: 2762568 - RNA, 19 nt, Artificial Sequence
  Description of Artificial Sequence: Synthetic oligonucleotide
gccgcgaccccgaaacgau

SEQ ID NO: 2762569 - RNA, 19 nt, Artificial Sequence
  Description of Artificial Sequence: Synthetic oligonucleotide
cucgccccgcaagccgcga

SEQ ID NO: 2762570 - RNA, 19 nt, Artificial Sequence
  Description of Artificial Sequence: Synthetic oligonucleotide
ccuagggccuugugcacuu

SEQ ID NO: 2762571 - RNA, 19 nt, Artificial Sequence
  Description of Artificial Sequence: Synthetic oligonucleotide
gcgcaccgcgggcgugaag

SEQ ID NO: 2762572 - RNA, 19 nt, Artificial Sequence
  Description of Artificial Sequence: Synthetic oligonucleotide
ccgcggcuucaucugagcu

SEQ ID NO: 2762573 - RNA, 19 nt, Artificial Sequence
  Description of Artificial Sequence: Synthetic oligonucleotide
cgaccccgaaacgauaccu

SEQ ID NO: 2762574 - RNA, 19 nt, Artificial Sequence
  Description of Artificial Sequence: Synthetic oligonucleotide
gcaaguggacacgcugcuu

SEQ ID NO: 2762575 - RNA, 19 nt, Artificial Sequence
  Description of Artificial Sequence: Synthetic oligonucleotide
cgcuggcgggcucaggcaa

SEQ ID NO: 2762576 - RNA, 19 nt, Artificial Sequence
  Description of Artificial Sequence: Synthetic oligonucleotide
cggcagcacgcagcgaguc

SEQ ID NO: 2762577 - RNA, 19 nt, Artificial Sequence
  Description of Artificial Sequence: Synthetic oligonucleotide
ccggagcuggccggcucac

SEQ ID NO: 2762578 - RNA, 19 nt, Artificial Sequence
  Description of Artificial Sequence: Synthetic oligonucleotide
cggucgaaaucgcgcucca

SEQ ID NO: 2762579 - RNA, 19 nt, Artificial Sequence
  Description of Artificial Sequence: Synthetic oligonucleotide
caggcaccugugcgugaau

SEQ ID NO: 2762580 - RNA, 19 nt, Artificial Sequence
  Description of Artificial Sequence: Synthetic oligonucleotide
gcguuccaccggagcuggc

SEQ ID NO: 2762581 - RNA, 19 nt, Artificial Sequence
  Description of Artificial Sequence: Synthetic oligonucleotide
ccggacgcuggcgggcuca

SEQ ID NO: 2762582 - RNA, 19 nt, Artificial Sequence
  Description of Artificial Sequence: Synthetic oligonucleotide
ccgcgaccccgaaacgaua

SEQ ID NO: 2762583 - RNA, 19 nt, Artificial Sequence
  Description of Artificial Sequence: Synthetic oligonucleotide
cgucuacaccguggcgcac

SEQ ID NO: 2762584 - RNA, 19 nt, Artificial Sequence
  Description of Artificial Sequence: Synthetic oligonucleotide
gcuggccggcucaccugaa

SEQ ID NO: 2762585 - RNA, 19 nt, Artificial Sequence
  Description of Artificial Sequence: Synthetic oligonucleotide
gggcgcaaguggacacgcu

SEQ ID NO: 2762586 - RNA, 19 nt, Artificial Sequence
  Description of Artificial Sequence: Synthetic oligonucleotide
cuagggccuugugcacuuu

SEQ ID NO: 2762587 - RNA, 19 nt, Artificial Sequence
  Description of Artificial Sequence: Synthetic oligonucleotide
ggccaaccuagggccuugu

SEQ ID NO: 2762588 - RNA, 19 nt, Artificial Sequence
  Description of Artificial Sequence: Synthetic oligonucleotide
cccggacgcuggcgggcuc

SEQ ID NO: 2762589 - RNA, 19 nt, Artificial Sequence
  Description of Artificial Sequence: Synthetic oligonucleotide
ggcgcaccgcgggcgugaa

SEQ ID NO: 2762590 - RNA, 19 nt, Artificial Sequence
  Description of Artificial Sequence: Synthetic oligonucleotide
cauccgggccagggaccgu

SEQ ID NO: 2762591 - RNA, 19 nt, Artificial Sequence
  Description of Artificial Sequence: Synthetic oligonucleotide
ccucucccaucuccuccgu

SEQ ID NO: 2762592 - RNA, 19 nt, Artificial Sequence
  Description of Artificial Sequence: Synthetic oligonucleotide
cguggcgcaccgcgggcgu

SEQ ID NO: 2762593 - RNA, 19 nt, Artificial Sequence
  Description of Artificial Sequence: Synthetic oligonucleotide
cgcaagccgcgaccccgaa

SEQ ID NO: 2762594 - RNA, 19 nt, Artificial Sequence
  Description of Artificial Sequence: Synthetic oligonucleotide
ccaccggagcuggccggcu

SEQ ID NO: 2762595 - RNA, 19 nt, Artificial Sequence
  Description of Artificial Sequence: Synthetic oligonucleotide
cgcgggcgugaagaagcgu

SEQ ID NO: 2762596 - RNA, 19 nt, Artificial Sequence
  Description of Artificial Sequence: Synthetic oligonucleotide
uauuacuuaacacagagca

SEQ ID NO: 2762597 - RNA, 19 nt, Artificial Sequence
  Description of Artificial Sequence: Synthetic oligonucleotide
agcuacuucaauuauagcc

SEQ ID NO: 2762598 - RNA, 19 nt, Artificial Sequence
  Description of Artificial Sequence: Synthetic oligonucleotide
aaugguacaacauuguaug

SEQ ID NO: 2762599 - RNA, 19 nt, Artificial Sequence
  Description of Artificial Sequence: Synthetic oligonucleotide
aaaaguguaagaaagagug

SEQ ID NO: 2762600 - RNA, 19 nt, Artificial Sequence
  Description of Artificial Sequence: Synthetic oligonucleotide
gaaccauuuaaauacaagg

SEQ ID NO: 2762601 - RNA, 19 nt, Artificial Sequence
  Description of Artificial Sequence: Synthetic oligonucleotide
ucuauuacuuaacacagag

SEQ ID NO: 2762602 - RNA, 19 nt, Artificial Sequence
  Description of Artificial Sequence: Synthetic oligonucleotide
uuaaauuggguaaaugaag

SEQ ID NO: 2762603 - RNA, 19 nt, Artificial Sequence
  Description of Artificial Sequence: Synthetic oligonucleotide
uuuauugaaauacugucca

SEQ ID NO: 2762604 - RNA, 19 nt, Artificial Sequence
  Description of Artificial Sequence: Synthetic oligonucleotide
uaaaugaaguugaaguugg

SEQ ID NO: 2762605 - RNA, 19 nt, Artificial Sequence
  Description of Artificial Sequence: Synthetic oligonucleotide
uuaaguaccaucacaagac

SEQ ID NO: 2762606 - RNA, 19 nt, Artificial Sequence
  Description of Artificial Sequence: Synthetic oligonucleotide
uuuuauugaaauacugucc

SEQ ID NO: 2762607 - RNA, 19 nt, Artificial Sequence
  Description of Artificial Sequence: Synthetic oligonucleotide
ucaauauacauuacuguag

SEQ ID NO: 2762608 - RNA, 19 nt, Artificial Sequence
  Description of Artificial Sequence: Synthetic oligonucleotide
aauauuucucuucugagaa

SEQ ID NO: 2762609 - RNA, 19 nt, Artificial Sequence
  Description of Artificial Sequence: Synthetic oligonucleotide
ucaauuauagcccggaacu

SEQ ID NO: 2762610 - RNA, 19 nt, Artificial Sequence
  Description of Artificial Sequence: Synthetic oligonucleotide
aagguuucaauauacauua

SEQ ID NO: 2762611 - RNA, 19 nt, Artificial Sequence
  Description of Artificial Sequence: Synthetic oligonucleotide
agagcaaauguucuuuucc

SEQ ID NO: 2762612 - RNA, 19 nt, Artificial Sequence
  Description of Artificial Sequence: Synthetic oligonucleotide
aaauucaggaucaauguag

SEQ ID NO: 2762613 - RNA, 19 nt, Artificial Sequence
  Description of Artificial Sequence: Synthetic oligonucleotide
uucaaaugguacaacauug

SEQ ID NO: 2762614 - RNA, 19 nt, Artificial Sequence
  Description of Artificial Sequence: Synthetic oligonucleotide
agugaugagaucaacauuc

SEQ ID NO: 2762615 - RNA, 19 nt, Artificial Sequence
  Description of Artificial Sequence: Synthetic oligonucleotide
uagaacugaguuuugaacc

SEQ ID NO: 2762616 - RNA, 19 nt, Artificial Sequence
  Description of Artificial Sequence: Synthetic oligonucleotide
ugaaauacuguccagcuuc

SEQ ID NO: 2762617 - RNA, 19 nt, Artificial Sequence
  Description of Artificial Sequence: Synthetic oligonucleotide
aaauacaagguuucaauau

SEQ ID NO: 2762618 - RNA, 19 nt, Artificial Sequence
  Description of Artificial Sequence: Synthetic oligonucleotide
uaaauuggguaaaugaagu

SEQ ID NO: 2762619 - RNA, 19 nt, Artificial Sequence
  Description of Artificial Sequence: Synthetic oligonucleotide
uauacauuacuguagaaua

SEQ ID NO: 2762620 - RNA, 19 nt, Artificial Sequence
  Description of Artificial Sequence: Synthetic oligonucleotide
ugcucuauuacuuaacaca

SEQ ID NO: 2762621 - RNA, 19 nt, Artificial Sequence
  Description of Artificial Sequence: Synthetic oligonucleotide
ugagaaagcacaauacaug

SEQ ID NO: 2762622 - RNA, 19 nt, Artificial Sequence
  Description of Artificial Sequence: Synthetic oligonucleotide
uuauugguuugucaguagg

SEQ ID NO: 2762623 - RNA, 19 nt, Artificial Sequence
  Description of Artificial Sequence: Synthetic oligonucleotide
uguagaauauuucucuucu

SEQ ID NO: 2762624 - RNA, 19 nt, Artificial Sequence
  Description of Artificial Sequence: Synthetic oligonucleotide
aauuggguaaaugaaguug

SEQ ID NO: 2762625 - RNA, 19 nt, Artificial Sequence
  Description of Artificial Sequence: Synthetic oligonucleotide
ucaggaucaauguagaaaa

SEQ ID NO: 2762626 - RNA, 19 nt, Artificial Sequence
  Description of Artificial Sequence: Synthetic oligonucleotide
uagaauauuucucuucuga

SEQ ID NO: 2762627 - RNA, 19 nt, Artificial Sequence
  Description of Artificial Sequence: Synthetic oligonucleotide
uuaaauacaagguuucaau

SEQ ID NO: 2762628 - RNA, 19 nt, Artificial Sequence
  Description of Artificial Sequence: Synthetic oligonucleotide
uaagaaagagugaugagau

SEQ ID NO: 2762629 - RNA, 19 nt, Artificial Sequence
  Description of Artificial Sequence: Synthetic oligonucleotide
ugaacaacauuccugcucu

SEQ ID NO: 2762630 - RNA, 19 nt, Artificial Sequence
  Description of Artificial Sequence: Synthetic oligonucleotide
aauuauagcccggaacugg

SEQ ID NO: 2762631 - RNA, 19 nt, Artificial Sequence
  Description of Artificial Sequence: Synthetic oligonucleotide
uuuacuagaacugaguuuu

SEQ ID NO: 2762632 - RNA, 19 nt, Artificial Sequence
  Description of Artificial Sequence: Synthetic oligonucleotide
augagaucaacauucacca

SEQ ID NO: 2762633 - RNA, 19 nt, Artificial Sequence
  Description of Artificial Sequence: Synthetic oligonucleotide
guugaaguuggaaagaaag

SEQ ID NO: 2762634 - RNA, 19 nt, Artificial Sequence
  Description of Artificial Sequence: Synthetic oligonucleotide
cauuguauguagaaauucc

SEQ ID NO: 2762635 - RNA, 19 nt, Artificial Sequence
  Description of Artificial Sequence: Synthetic oligonucleotide
ugaaguuggaaagaaagga

SEQ ID NO: 2762636 - RNA, 19 nt, Artificial Sequence
  Description of Artificial Sequence: Synthetic oligonucleotide
ucugagaaagcacaauaca

SEQ ID NO: 2762637 - RNA, 19 nt, Artificial Sequence
  Description of Artificial Sequence: Synthetic oligonucleotide
uuucaauauacauuacugu

SEQ ID NO: 2762638 - RNA, 19 nt, Artificial Sequence
  Description of Artificial Sequence: Synthetic oligonucleotide
aauacaugauuuuccaaaa

SEQ ID NO: 2762639 - RNA, 19 nt, Artificial Sequence
  Description of Artificial Sequence: Synthetic oligonucleotide
uauucucucagucuuaaau

SEQ ID NO: 2762640 - RNA, 19 nt, Artificial Sequence
  Description of Artificial Sequence: Synthetic oligonucleotide
aauuccaauuauugguuug

SEQ ID NO: 2762641 - RNA, 19 nt, Artificial Sequence
  Description of Artificial Sequence: Synthetic oligonucleotide
uucaauauacauuacugua

SEQ ID NO: 2762642 - RNA, 19 nt, Artificial Sequence
  Description of Artificial Sequence: Synthetic oligonucleotide
ugaagcaagucuuggaagc

SEQ ID NO: 2762643 - RNA, 19 nt, Artificial Sequence
  Description of Artificial Sequence: Synthetic oligonucleotide
gauucuuagcuuuauaaaa

SEQ ID NO: 2762644 - RNA, 19 nt, Artificial Sequence
  Description of Artificial Sequence: Synthetic oligonucleotide
uggauuaagccuuugcucu

SEQ ID NO: 2762645 - RNA, 19 nt, Artificial Sequence
  Description of Artificial Sequence: Synthetic oligonucleotide
uguggauuaagccuuugcu

SEQ ID NO: 2762646 - RNA, 19 nt, Artificial Sequence
  Description of Artificial Sequence: Synthetic oligonucleotide
uauguagaaauuccaauua

SEQ ID NO: 2762647 - RNA, 19 nt, Artificial Sequence
  Description of Artificial Sequence: Synthetic oligonucleotide
aauacaagguuucaauaua

SEQ ID NO: 2762648 - RNA, 19 nt, Artificial Sequence
  Description of Artificial Sequence: Synthetic oligonucleotide
aaaggagaaccauuuaaau

SEQ ID NO: 2762649 - RNA, 19 nt, Artificial Sequence
  Description of Artificial Sequence: Synthetic oligonucleotide
uucaauuauagcccggaac

SEQ ID NO: 2762650 - RNA, 19 nt, Artificial Sequence
  Description of Artificial Sequence: Synthetic oligonucleotide
guuucaauauacauuacug

SEQ ID NO: 2762651 - RNA, 19 nt, Artificial Sequence
  Description of Artificial Sequence: Synthetic oligonucleotide
agaaagagugaugagauca

SEQ ID NO: 2762652 - RNA, 19 nt, Artificial Sequence
  Description of Artificial Sequence: Synthetic oligonucleotide
uuucuuuacuagaacugag

SEQ ID NO: 2762653 - RNA, 19 nt, Artificial Sequence
  Description of Artificial Sequence: Synthetic oligonucleotide
uauaaaaugccagugcagu

SEQ ID NO: 2762654 - RNA, 19 nt, Artificial Sequence
  Description of Artificial Sequence: Synthetic oligonucleotide
guagaaauuccaauuauug

SEQ ID NO: 2762655 - RNA, 19 nt, Artificial Sequence
  Description of Artificial Sequence: Synthetic oligonucleotide
uacuguagaauauuucucu

SEQ ID NO: 2762656 - RNA, 19 nt, Artificial Sequence
  Description of Artificial Sequence: Synthetic oligonucleotide
uuugaaccuauucucucag

SEQ ID NO: 2762657 - RNA, 19 nt, Artificial Sequence
  Description of Artificial Sequence: Synthetic oligonucleotide
ugguuugucaguaggauuc

SEQ ID NO: 2762658 - RNA, 19 nt, Artificial Sequence
  Description of Artificial Sequence: Synthetic oligonucleotide
aguaccaucacaagacagc

SEQ ID NO: 2762659 - RNA, 19 nt, Artificial Sequence
  Description of Artificial Sequence: Synthetic oligonucleotide
uauugaaauacuguccagc

SEQ ID NO: 2762660 - RNA, 19 nt, Artificial Sequence
  Description of Artificial Sequence: Synthetic oligonucleotide
auugaaauacuguccagcu

SEQ ID NO: 2762661 - RNA, 19 nt, Artificial Sequence
  Description of Artificial Sequence: Synthetic oligonucleotide
uucucucagucuuaaauug

SEQ ID NO: 2762662 - RNA, 19 nt, Artificial Sequence
  Description of Artificial Sequence: Synthetic oligonucleotide
uuacuuaacacagagcaaa

SEQ ID NO: 2762663 - RNA, 19 nt, Artificial Sequence
  Description of Artificial Sequence: Synthetic oligonucleotide
gagaaagcacaauacauga

SEQ ID NO: 2762664 - RNA, 19 nt, Artificial Sequence
  Description of Artificial Sequence: Synthetic oligonucleotide
aaccauuuaaauacaaggu

SEQ ID NO: 2762665 - RNA, 19 nt, Artificial Sequence
  Description of Artificial Sequence: Synthetic oligonucleotide
ucucucagucuuaaauugg

SEQ ID NO: 2762666 - RNA, 19 nt, Artificial Sequence
  Description of Artificial Sequence: Synthetic oligonucleotide
uucuuagcuuuauaaaaug

SEQ ID NO: 2762667 - RNA, 19 nt, Artificial Sequence
  Description of Artificial Sequence: Synthetic oligonucleotide
ucagucuuaaauuggguaa

SEQ ID NO: 2762668 - RNA, 19 nt, Artificial Sequence
  Description of Artificial Sequence: Synthetic oligonucleotide
gaaguuggaaagaaaggag

SEQ ID NO: 2762669 - RNA, 19 nt, Artificial Sequence
  Description of Artificial Sequence: Synthetic oligonucleotide
ucugaagcaagucuuggaa

SEQ ID NO: 2762670 - RNA, 19 nt, Artificial Sequence
  Description of Artificial Sequence: Synthetic oligonucleotide
uugucaguaggauucuuag

SEQ ID NO: 2762671 - RNA, 19 nt, Artificial Sequence
  Description of Artificial Sequence: Synthetic oligonucleotide
aaggagaaccauuuaaaua

SEQ ID NO: 2762672 - RNA, 19 nt, Artificial Sequence
  Description of Artificial Sequence: Synthetic oligonucleotide
cauuuaaauacaagguuuc

SEQ ID NO: 2762673 - RNA, 19 nt, Artificial Sequence
  Description of Artificial Sequence: Synthetic oligonucleotide
uggcauaucuacuucuucc

SEQ ID NO: 2762674 - RNA, 19 nt, Artificial Sequence
  Description of Artificial Sequence: Synthetic oligonucleotide
uguauguagaaauuccaau

SEQ ID NO: 2762675 - RNA, 19 nt, Artificial Sequence
  Description of Artificial Sequence: Synthetic oligonucleotide
cuagaacugaguuuugaac

SEQ ID NO: 2762676 - RNA, 19 nt, Artificial Sequence
  Description of Artificial Sequence: Synthetic oligonucleotide
aagaaagagugaugagauc

SEQ ID NO: 2762677 - RNA, 19 nt, Artificial Sequence
  Description of Artificial Sequence: Synthetic oligonucleotide
uaacacagagcaaauguuc

SEQ ID NO: 2762678 - RNA, 19 nt, Artificial Sequence
  Description of Artificial Sequence: Synthetic oligonucleotide
uuuucuuuacuagaacuga

SEQ ID NO: 2762679 - RNA, 19 nt, Artificial Sequence
  Description of Artificial Sequence: Synthetic oligonucleotide
gaguuuugaaccuauucuc

SEQ ID NO: 2762680 - RNA, 19 nt, Artificial Sequence
  Description of Artificial Sequence: Synthetic oligonucleotide
uguaagaaagagugaugag

SEQ ID NO: 2762681 - RNA, 19 nt, Artificial Sequence
  Description of Artificial Sequence: Synthetic oligonucleotide
caacauucaccauucuugg

SEQ ID NO: 2762682 - RNA, 19 nt, Artificial Sequence
  Description of Artificial Sequence: Synthetic oligonucleotide
ucaaaugguacaacauugu

SEQ ID NO: 2762683 - RNA, 19 nt, Artificial Sequence
  Description of Artificial Sequence: Synthetic oligonucleotide
gaauauuucucuucugaga

SEQ ID NO: 2762684 - RNA, 19 nt, Artificial Sequence
  Description of Artificial Sequence: Synthetic oligonucleotide
aucuuuucuuuacuagaac

SEQ ID NO: 2762685 - RNA, 19 nt, Artificial Sequence
  Description of Artificial Sequence: Synthetic oligonucleotide
cuuaaauuggguaaaugaa

SEQ ID NO: 2762686 - RNA, 19 nt, Artificial Sequence
  Description of Artificial Sequence: Synthetic oligonucleotide
ucuuuacuagaacugaguu

SEQ ID NO: 2762687 - RNA, 19 nt, Artificial Sequence
  Description of Artificial Sequence: Synthetic oligonucleotide
acauuguauguagaaauuc

SEQ ID NO: 2762688 - RNA, 19 nt, Artificial Sequence
  Description of Artificial Sequence: Synthetic oligonucleotide
uggaucuucugcaaauuca

SEQ ID NO: 2762689 - RNA, 19 nt, Artificial Sequence
  Description of Artificial Sequence: Synthetic oligonucleotide
ugaaccuauucucucaguc

SEQ ID NO: 2762690 - RNA, 19 nt, Artificial Sequence
  Description of Artificial Sequence: Synthetic oligonucleotide
agcacaauacaugauuuuc

SEQ ID NO: 2762691 - RNA, 19 nt, Artificial Sequence
  Description of Artificial Sequence: Synthetic oligonucleotide
uaaauacaagguuucaaua

SEQ ID NO: 2762692 - RNA, 19 nt, Artificial Sequence
  Description of Artificial Sequence: Synthetic oligonucleotide
gguacaacauuguauguag

SEQ ID NO: 2762693 - RNA, 19 nt, Artificial Sequence
  Description of Artificial Sequence: Synthetic oligonucleotide
aucacaagacagcagcauc

SEQ ID NO: 2762694 - RNA, 19 nt, Artificial Sequence
  Description of Artificial Sequence: Synthetic oligonucleotide
agcaucuuuucuuuacuag

SEQ ID NO: 2762695 - RNA, 19 nt, Artificial Sequence
  Description of Artificial Sequence: Synthetic oligonucleotide
aaagagugaugagaucaac

SEQ ID NO: 2762696 - RNA, 19 nt, Artificial Sequence
  Description of Artificial Sequence: Synthetic oligonucleotide
aaucugaagcaagucuugg

SEQ ID NO: 2762697 - RNA, 19 nt, Artificial Sequence
  Description of Artificial Sequence: Synthetic oligonucleotide
agagugaugagaucaacau

SEQ ID NO: 2762698 - RNA, 19 nt, Artificial Sequence
  Description of Artificial Sequence: Synthetic oligonucleotide
ucacaagacagcagcaucu

SEQ ID NO: 2762699 - RNA, 19 nt, Artificial Sequence
  Description of Artificial Sequence: Synthetic oligonucleotide
cucucagucuuaaauuggg

SEQ ID NO: 2762700 - RNA, 19 nt, Artificial Sequence
  Description of Artificial Sequence: Synthetic oligonucleotide
uacaacauuguauguagaa

SEQ ID NO: 2762701 - RNA, 19 nt, Artificial Sequence
  Description of Artificial Sequence: Synthetic oligonucleotide
uguagaaauuccaauuauu

SEQ ID NO: 2762702 - RNA, 19 nt, Artificial Sequence
  Description of Artificial Sequence: Synthetic oligonucleotide
uucuuuacuagaacugagu

SEQ ID NO: 2762703 - RNA, 19 nt, Artificial Sequence
  Description of Artificial Sequence: Synthetic oligonucleotide
aaaugguacaacauuguau

SEQ ID NO: 2762704 - RNA, 19 nt, Artificial Sequence
  Description of Artificial Sequence: Synthetic oligonucleotide
aggauucuuagcuuuauaa

SEQ ID NO: 2762705 - RNA, 19 nt, Artificial Sequence
  Description of Artificial Sequence: Synthetic oligonucleotide
aagcacuguauuuuauuga

SEQ ID NO: 2762706 - RNA, 19 nt, Artificial Sequence
  Description of Artificial Sequence: Synthetic oligonucleotide
aaagaaaggagaaccauuu

SEQ ID NO: 2762707 - RNA, 19 nt, Artificial Sequence
  Description of Artificial Sequence: Synthetic oligonucleotide
uuguauguagaaauuccaa

SEQ ID NO: 2762708 - RNA, 19 nt, Artificial Sequence
  Description of Artificial Sequence: Synthetic oligonucleotide
ccaauuauugguuugucag

SEQ ID NO: 2762709 - RNA, 19 nt, Artificial Sequence
  Description of Artificial Sequence: Synthetic oligonucleotide
uuauugaaauacuguccag

SEQ ID NO: 2762710 - RNA, 19 nt, Artificial Sequence
  Description of Artificial Sequence: Synthetic oligonucleotide
cuacuucaauuauagcccg

SEQ ID NO: 2762711 - RNA, 19 nt, Artificial Sequence
  Description of Artificial Sequence: Synthetic oligonucleotide
aauuauugguuugucagua

SEQ ID NO: 2762712 - RNA, 19 nt, Artificial Sequence
  Description of Artificial Sequence: Synthetic oligonucleotide
ucacaaaucugaagcaagu

SEQ ID NO: 2762713 - RNA, 19 nt, Artificial Sequence
  Description of Artificial Sequence: Synthetic oligonucleotide
ucuuuuccugcccuuaagu

SEQ ID NO: 2762714 - RNA, 19 nt, Artificial Sequence
  Description of Artificial Sequence: Synthetic oligonucleotide
uuaacacagagcaaauguu

SEQ ID NO: 2762715 - RNA, 19 nt, Artificial Sequence
  Description of Artificial Sequence: Synthetic oligonucleotide
agaacugaguuuugaaccu

SEQ ID NO: 2762716 - RNA, 19 nt, Artificial Sequence
  Description of Artificial Sequence: Synthetic oligonucleotide
guaagaaagagugaugaga

SEQ ID NO: 2762717 - RNA, 19 nt, Artificial Sequence
  Description of Artificial Sequence: Synthetic oligonucleotide
uucaggaucaauguagaaa

SEQ ID NO: 2762718 - RNA, 19 nt, Artificial Sequence
  Description of Artificial Sequence: Synthetic oligonucleotide
aaccuauucucucagucuu

SEQ ID NO: 2762719 - RNA, 19 nt, Artificial Sequence
  Description of Artificial Sequence: Synthetic oligonucleotide
uccaauuauugguuuguca

SEQ ID NO: 2762720 - RNA, 19 nt, Artificial Sequence
  Description of Artificial Sequence: Synthetic oligonucleotide
auuauagcccggaacuggc

SEQ ID NO: 2762721 - RNA, 19 nt, Artificial Sequence
  Description of Artificial Sequence: Synthetic oligonucleotide
agaucaacauucaccauuc

SEQ ID NO: 2762722 - RNA, 19 nt, Artificial Sequence
  Description of Artificial Sequence: Synthetic oligonucleotide
cuauuacuuaacacagagc

SEQ ID NO: 2762723 - RNA, 19 nt, Artificial Sequence
  Description of Artificial Sequence: Synthetic oligonucleotide
auauacauuacuguagaau

SEQ ID NO: 2762724 - RNA, 19 nt, Artificial Sequence
  Description of Artificial Sequence: Synthetic oligonucleotide
acuugugcccuuccuuugc

SEQ ID NO: 2762725 - RNA, 19 nt, Artificial Sequence
  Description of Artificial Sequence: Synthetic oligonucleotide
auaucuacuucuuccugug

SEQ ID NO: 2762726 - RNA, 19 nt, Artificial Sequence
  Description of Artificial Sequence: Synthetic oligonucleotide
ucuucugcaaauucaggau

SEQ ID NO: 2762727 - RNA, 19 nt, Artificial Sequence
  Description of Artificial Sequence: Synthetic oligonucleotide
aaauuggguaaaugaaguu

SEQ ID NO: 2762728 - RNA, 19 nt, Artificial Sequence
  Description of Artificial Sequence: Synthetic oligonucleotide
aaauuccaauuauugguuu

SEQ ID NO: 2762729 - RNA, 19 nt, Artificial Sequence
  Description of Artificial Sequence: Synthetic oligonucleotide
uaagccuuugcucuucaaa

SEQ ID NO: 2762730 - RNA, 19 nt, Artificial Sequence
  Description of Artificial Sequence: Synthetic oligonucleotide
auuauugguuugucaguag

SEQ ID NO: 2762731 - RNA, 19 nt, Artificial Sequence
  Description of Artificial Sequence: Synthetic oligonucleotide
agcuucaaaugguacaaca

SEQ ID NO: 2762732 - RNA, 19 nt, Artificial Sequence
  Description of Artificial Sequence: Synthetic oligonucleotide
agcacuguauuuuauugaa

SEQ ID NO: 2762733 - RNA, 19 nt, Artificial Sequence
  Description of Artificial Sequence: Synthetic oligonucleotide
aacacagagcaaauguucu

SEQ ID NO: 2762734 - RNA, 19 nt, Artificial Sequence
  Description of Artificial Sequence: Synthetic oligonucleotide
cauuacuguagaauauuuc

SEQ ID NO: 2762735 - RNA, 19 nt, Artificial Sequence
  Description of Artificial Sequence: Synthetic oligonucleotide
aaucacaaaucugaagcaa

SEQ ID NO: 2762736 - RNA, 19 nt, Artificial Sequence
  Description of Artificial Sequence: Synthetic oligonucleotide
aauucaggaucaauguaga

SEQ ID NO: 2762737 - RNA, 19 nt, Artificial Sequence
  Description of Artificial Sequence: Synthetic oligonucleotide
gcuacuucaauuauagccc

SEQ ID NO: 2762738 - RNA, 19 nt, Artificial Sequence
  Description of Artificial Sequence: Synthetic oligonucleotide
uuugucaguaggauucuua

SEQ ID NO: 2762739 - RNA, 19 nt, Artificial Sequence
  Description of Artificial Sequence: Synthetic oligonucleotide
auuggguaaaugaaguuga

SEQ ID NO: 2762740 - RNA, 19 nt, Artificial Sequence
  Description of Artificial Sequence: Synthetic oligonucleotide
aaguaccaucacaagacag

SEQ ID NO: 2762741 - RNA, 19 nt, Artificial Sequence
  Description of Artificial Sequence: Synthetic oligonucleotide
aagagugaugagaucaaca

SEQ ID NO: 2762742 - RNA, 19 nt, Artificial Sequence
  Description of Artificial Sequence: Synthetic oligonucleotide
cugaagcaagucuuggaag

SEQ ID NO: 2762743 - RNA, 19 nt, Artificial Sequence
  Description of Artificial Sequence: Synthetic oligonucleotide
aaaucugaagcaagucuug

SEQ ID NO: 2762744 - RNA, 19 nt, Artificial Sequence
  Description of Artificial Sequence: Synthetic oligonucleotide
auucucucagucuuaaauu

SEQ ID NO: 2762745 - RNA, 19 nt, Artificial Sequence
  Description of Artificial Sequence: Synthetic oligonucleotide
uacuucaauuauagcccgg

SEQ ID NO: 2762746 - RNA, 19 nt, Artificial Sequence
  Description of Artificial Sequence: Synthetic oligonucleotide
agcaaauguucuuuuccug

SEQ ID NO: 2762747 - RNA, 19 nt, Artificial Sequence
  Description of Artificial Sequence: Synthetic oligonucleotide
gaacuggcaacuugugccc

SEQ ID NO: 2762748 - RNA, 19 nt, Artificial Sequence
  Description of Artificial Sequence: Synthetic oligonucleotide
aaagcacaauacaugauuu

SEQ ID NO: 2762749 - RNA, 19 nt, Artificial Sequence
  Description of Artificial Sequence: Synthetic oligonucleotide
uggguaaaugaaguugaag

SEQ ID NO: 2762750 - RNA, 19 nt, Artificial Sequence
  Description of Artificial Sequence: Synthetic oligonucleotide
auuguauguagaaauucca

SEQ ID NO: 2762751 - RNA, 19 nt, Artificial Sequence
  Description of Artificial Sequence: Synthetic oligonucleotide
ucuuggaucuucugcaaau

SEQ ID NO: 2762752 - RNA, 19 nt, Artificial Sequence
  Description of Artificial Sequence: Synthetic oligonucleotide
ugucaguaggauucuuagc

SEQ ID NO: 2762753 - RNA, 19 nt, Artificial Sequence
  Description of Artificial Sequence: Synthetic oligonucleotide
acuagaacugaguuuugaa

SEQ ID NO: 2762754 - RNA, 19 nt, Artificial Sequence
  Description of Artificial Sequence: Synthetic oligonucleotide
guggauuaagccuuugcuc

SEQ ID NO: 2762755 - RNA, 19 nt, Artificial Sequence
  Description of Artificial Sequence: Synthetic oligonucleotide
gaaaggagaaccauuuaaa

SEQ ID NO: 2762756 - RNA, 19 nt, Artificial Sequence
  Description of Artificial Sequence: Synthetic oligonucleotide
ugaugagaucaacauucac

SEQ ID NO: 2762757 - RNA, 19 nt, Artificial Sequence
  Description of Artificial Sequence: Synthetic oligonucleotide
gcaaauguucuuuuccugc

SEQ ID NO: 2762758 - RNA, 19 nt, Artificial Sequence
  Description of Artificial Sequence: Synthetic oligonucleotide
aacuugugcccuuccuuug

SEQ ID NO: 2762759 - RNA, 19 nt, Artificial Sequence
  Description of Artificial Sequence: Synthetic oligonucleotide
uucuuccuguggauuaagc

SEQ ID NO: 2762760 - RNA, 19 nt, Artificial Sequence
  Description of Artificial Sequence: Synthetic oligonucleotide
aaaguguaagaaagaguga

SEQ ID NO: 2762761 - RNA, 19 nt, Artificial Sequence
  Description of Artificial Sequence: Synthetic oligonucleotide
uaaaaugccagugcaguuu

SEQ ID NO: 2762762 - RNA, 19 nt, Artificial Sequence
  Description of Artificial Sequence: Synthetic oligonucleotide
ggguaaaugaaguugaagu

SEQ ID NO: 2762763 - RNA, 19 nt, Artificial Sequence
  Description of Artificial Sequence: Synthetic oligonucleotide
auucuuagcuuuauaaaau

SEQ ID NO: 2762764 - RNA, 19 nt, Artificial Sequence
  Description of Artificial Sequence: Synthetic oligonucleotide
aaguugaaguuggaaagaa

SEQ ID NO: 2762765 - RNA, 19 nt, Artificial Sequence
  Description of Artificial Sequence: Synthetic oligonucleotide
auuuaaauacaagguuuca

SEQ ID NO: 2762766 - RNA, 19 nt, Artificial Sequence
  Description of Artificial Sequence: Synthetic oligonucleotide
uauagcccggaacuggcaa

SEQ ID NO: 2762767 - RNA, 19 nt, Artificial Sequence
  Description of Artificial Sequence: Synthetic oligonucleotide
auagcccggaacuggcaac

SEQ ID NO: 2762768 - RNA, 19 nt, Artificial Sequence
  Description of Artificial Sequence: Synthetic oligonucleotide
ucucagucuuaaauugggu

SEQ ID NO: 2762769 - RNA, 19 nt, Artificial Sequence
  Description of Artificial Sequence: Synthetic oligonucleotide
uuccuguggauuaagccuu

SEQ ID NO: 2762770 - RNA, 19 nt, Artificial Sequence
  Description of Artificial Sequence: Synthetic oligonucleotide
aguuuugaaccuauucucu

SEQ ID NO: 2762771 - RNA, 19 nt, Artificial Sequence
  Description of Artificial Sequence: Synthetic oligonucleotide
ucaaagcagaagcacugua

SEQ ID NO: 2762772 - RNA, 19 nt, Artificial Sequence
  Description of Artificial Sequence: Synthetic oligonucleotide
gcucuauuacuuaacacag

SEQ ID NO: 2762773 - RNA, 19 nt, Artificial Sequence
  Description of Artificial Sequence: Synthetic oligonucleotide
aagcagaagcacuguauuu

SEQ ID NO: 2762774 - RNA, 19 nt, Artificial Sequence
  Description of Artificial Sequence: Synthetic oligonucleotide
agaagcacuguauuuuauu

SEQ ID NO: 2762775 - RNA, 19 nt, Artificial Sequence
  Description of Artificial Sequence: Synthetic oligonucleotide
aacauuguauguagaaauu

SEQ ID NO: 2762776 - RNA, 19 nt, Artificial Sequence
  Description of Artificial Sequence: Synthetic oligonucleotide
agcaagucuuggaagcuac

SEQ ID NO: 2762777 - RNA, 19 nt, Artificial Sequence
  Description of Artificial Sequence: Synthetic oligonucleotide
ucuacuucuuccuguggau

SEQ ID NO: 2762778 - RNA, 19 nt, Artificial Sequence
  Description of Artificial Sequence: Synthetic oligonucleotide
gaaguugaaguuggaaaga

SEQ ID NO: 2762779 - RNA, 19 nt, Artificial Sequence
  Description of Artificial Sequence: Synthetic oligonucleotide
acaacauuguauguagaaa

SEQ ID NO: 2762780 - RNA, 19 nt, Artificial Sequence
  Description of Artificial Sequence: Synthetic oligonucleotide
caucuuuucuuuacuagaa

SEQ ID NO: 2762781 - RNA, 19 nt, Artificial Sequence
  Description of Artificial Sequence: Synthetic oligonucleotide
auaaaaugccagugcaguu

SEQ ID NO: 2762782 - RNA, 19 nt, Artificial Sequence
  Description of Artificial Sequence: Synthetic oligonucleotide
aucugaagcaagucuugga

SEQ ID NO: 2762783 - RNA, 19 nt, Artificial Sequence
  Description of Artificial Sequence: Synthetic oligonucleotide
uacuagaacugaguuuuga

SEQ ID NO: 2762784 - RNA, 19 nt, Artificial Sequence
  Description of Artificial Sequence: Synthetic oligonucleotide
acuucaauuauagcccgga

SEQ ID NO: 2762785 - RNA, 19 nt, Artificial Sequence
  Description of Artificial Sequence: Synthetic oligonucleotide
acuuaacacagagcaaaug

SEQ ID NO: 2762786 - RNA, 19 nt, Artificial Sequence
  Description of Artificial Sequence: Synthetic oligonucleotide
cuguggauuaagccuuugc

SEQ ID NO: 2762787 - RNA, 19 nt, Artificial Sequence
  Description of Artificial Sequence: Synthetic oligonucleotide
caacauuguauguagaaau

SEQ ID NO: 2762788 - RNA, 19 nt, Artificial Sequence
  Description of Artificial Sequence: Synthetic oligonucleotide
acauuccugcucuauuacu

SEQ ID NO: 2762789 - RNA, 19 nt, Artificial Sequence
  Description of Artificial Sequence: Synthetic oligonucleotide
guauguagaaauuccaauu

SEQ ID NO: 2762790 - RNA, 19 nt, Artificial Sequence
  Description of Artificial Sequence: Synthetic oligonucleotide
ugguacaacauuguaugua

SEQ ID NO: 2762791 - RNA, 19 nt, Artificial Sequence
  Description of Artificial Sequence: Synthetic oligonucleotide
gagaucaacauucaccauu

SEQ ID NO: 2762792 - RNA, 19 nt, Artificial Sequence
  Description of Artificial Sequence: Synthetic oligonucleotide
uugaaauacuguccagcuu

SEQ ID NO: 2762793 - RNA, 19 nt, Artificial Sequence
  Description of Artificial Sequence: Synthetic oligonucleotide
uuauagcccggaacuggca

SEQ ID NO: 2762794 - RNA, 19 nt, Artificial Sequence
  Description of Artificial Sequence: Synthetic oligonucleotide
aguguaagaaagagugaug

SEQ ID NO: 2762795 - RNA, 19 nt, Artificial Sequence
  Description of Artificial Sequence: Synthetic oligonucleotide
uuacuagaacugaguuuug

SEQ ID NO: 2762796 - RNA, 19 nt, Artificial Sequence
  Description of Artificial Sequence: Synthetic oligonucleotide
ggaucuucugcaaauucag

SEQ ID NO: 2762797 - RNA, 19 nt, Artificial Sequence
  Description of Artificial Sequence: Synthetic oligonucleotide
aacaacauuccugcucuau

SEQ ID NO: 2762798 - RNA, 19 nt, Artificial Sequence
  Description of Artificial Sequence: Synthetic oligonucleotide
ugugcccuuccuuugcuuc

SEQ ID NO: 2762799 - RNA, 19 nt, Artificial Sequence
  Description of Artificial Sequence: Synthetic oligonucleotide
cugcccuuaaguaccauca

SEQ ID NO: 2762800 - RNA, 19 nt, Artificial Sequence
  Description of Artificial Sequence: Synthetic oligonucleotide
guuggaaagaaaggagaac

SEQ ID NO: 2762801 - RNA, 19 nt, Artificial Sequence
  Description of Artificial Sequence: Synthetic oligonucleotide
uccugcucuauuacuuaac

SEQ ID NO: 2762802 - RNA, 19 nt, Artificial Sequence
  Description of Artificial Sequence: Synthetic oligonucleotide
cuucugagaaagcacaaua

SEQ ID NO: 2762803 - RNA, 19 nt, Artificial Sequence
  Description of Artificial Sequence: Synthetic oligonucleotide
ucaguaggauucuuagcuu

SEQ ID NO: 2762804 - RNA, 19 nt, Artificial Sequence
  Description of Artificial Sequence: Synthetic oligonucleotide
cuuccuguggauuaagccu

SEQ ID NO: 2762805 - RNA, 19 nt, Artificial Sequence
  Description of Artificial Sequence: Synthetic oligonucleotide
cucagucuuaaauugggua

SEQ ID NO: 2762806 - RNA, 19 nt, Artificial Sequence
  Description of Artificial Sequence: Synthetic oligonucleotide
acaacauuccugcucuauu

SEQ ID NO: 2762807 - RNA, 19 nt, Artificial Sequence
  Description of Artificial Sequence: Synthetic oligonucleotide
gaaccuauucucucagucu

SEQ ID NO: 2762808 - RNA, 19 nt, Artificial Sequence
  Description of Artificial Sequence: Synthetic oligonucleotide
uuggguaaaugaaguugaa

SEQ ID NO: 2762809 - RNA, 19 nt, Artificial Sequence
  Description of Artificial Sequence: Synthetic oligonucleotide
gagcaaauguucuuuuccu

SEQ ID NO: 2762810 - RNA, 19 nt, Artificial Sequence
  Description of Artificial Sequence: Synthetic oligonucleotide
augguacaacauuguaugu

SEQ ID NO: 2762811 - RNA, 19 nt, Artificial Sequence
  Description of Artificial Sequence: Synthetic oligonucleotide
ccauucuuggaucuucugc

SEQ ID NO: 2762812 - RNA, 19 nt, Artificial Sequence
  Description of Artificial Sequence: Synthetic oligonucleotide
ggauucuuagcuuuauaaa

SEQ ID NO: 2762813 - RNA, 19 nt, Artificial Sequence
  Description of Artificial Sequence: Synthetic oligonucleotide
auuaagccuuugcucuuca

SEQ ID NO: 2762814 - RNA, 19 nt, Artificial Sequence
  Description of Artificial Sequence: Synthetic oligonucleotide
cugagaaagcacaauacau

SEQ ID NO: 2762815 - RNA, 19 nt, Artificial Sequence
  Description of Artificial Sequence: Synthetic oligonucleotide
ucuucugagaaagcacaau

SEQ ID NO: 2762816 - RNA, 19 nt, Artificial Sequence
  Description of Artificial Sequence: Synthetic oligonucleotide
caauuauagcccggaacug

SEQ ID NO: 2762817 - RNA, 19 nt, Artificial Sequence
  Description of Artificial Sequence: Synthetic oligonucleotide
cagagcaaauguucuuuuc

SEQ ID NO: 2762818 - RNA, 19 nt, Artificial Sequence
  Description of Artificial Sequence: Synthetic oligonucleotide
uaggauucuuagcuuuaua

SEQ ID NO: 2762819 - RNA, 19 nt, Artificial Sequence
  Description of Artificial Sequence: Synthetic oligonucleotide
gguuucaauauacauuacu

SEQ ID NO: 2762820 - RNA, 19 nt, Artificial Sequence
  Description of Artificial Sequence: Synthetic oligonucleotide
ugcccuuaaguaccaucac

SEQ ID NO: 2762821 - RNA, 19 nt, Artificial Sequence
  Description of Artificial Sequence: Synthetic oligonucleotide
cauaucuacuucuuccugu

SEQ ID NO: 2762822 - RNA, 19 nt, Artificial Sequence
  Description of Artificial Sequence: Synthetic oligonucleotide
uugaaccuauucucucagu

SEQ ID NO: 2762823 - RNA, 19 nt, Artificial Sequence
  Description of Artificial Sequence: Synthetic oligonucleotide
accauucuuggaucuucug

SEQ ID NO: 2762824 - RNA, 19 nt, Artificial Sequence
  Description of Artificial Sequence: Synthetic oligonucleotide
auuacuuaacacagagcaa

SEQ ID NO: 2762825 - RNA, 19 nt, Artificial Sequence
  Description of Artificial Sequence: Synthetic oligonucleotide
aacugaguuuugaaccuau

SEQ ID NO: 2762826 - RNA, 19 nt, Artificial Sequence
  Description of Artificial Sequence: Synthetic oligonucleotide
acagagcaaauguucuuuu

SEQ ID NO: 2762827 - RNA, 19 nt, Artificial Sequence
  Description of Artificial Sequence: Synthetic oligonucleotide
gauuaagccuuugcucuuc

SEQ ID NO: 2762828 - RNA, 19 nt, Artificial Sequence
  Description of Artificial Sequence: Synthetic oligonucleotide
gaaagagugaugagaucaa

SEQ ID NO: 2762829 - RNA, 19 nt, Artificial Sequence
  Description of Artificial Sequence: Synthetic oligonucleotide
caaauucaggaucaaugua

SEQ ID NO: 2762830 - RNA, 19 nt, Artificial Sequence
  Description of Artificial Sequence: Synthetic oligonucleotide
cuuuuccugcccuuaagua

SEQ ID NO: 2762831 - RNA, 19 nt, Artificial Sequence
  Description of Artificial Sequence: Synthetic oligonucleotide
caaaugguacaacauugua

SEQ ID NO: 2762832 - RNA, 19 nt, Artificial Sequence
  Description of Artificial Sequence: Synthetic oligonucleotide
ugagaucaacauucaccau

SEQ ID NO: 2762833 - RNA, 19 nt, Artificial Sequence
  Description of Artificial Sequence: Synthetic oligonucleotide
cucuauuacuuaacacaga

SEQ ID NO: 2762834 - RNA, 19 nt, Artificial Sequence
  Description of Artificial Sequence: Synthetic oligonucleotide
acauuacuguagaauauuu

SEQ ID NO: 2762835 - RNA, 19 nt, Artificial Sequence
  Description of Artificial Sequence: Synthetic oligonucleotide
cuggcauaucuacuucuuc

SEQ ID NO: 2762836 - RNA, 19 nt, Artificial Sequence
  Description of Artificial Sequence: Synthetic oligonucleotide
uguucuuuuccugcccuua

SEQ ID NO: 2762837 - RNA, 19 nt, Artificial Sequence
  Description of Artificial Sequence: Synthetic oligonucleotide
ccuuaaguaccaucacaag

SEQ ID NO: 2762838 - RNA, 19 nt, Artificial Sequence
  Description of Artificial Sequence: Synthetic oligonucleotide
cuucaaaugguacaacauu

SEQ ID NO: 2762839 - RNA, 19 nt, Artificial Sequence
  Description of Artificial Sequence: Synthetic oligonucleotide
caauuauugguuugucagu

SEQ ID NO: 2762840 - RNA, 19 nt, Artificial Sequence
  Description of Artificial Sequence: Synthetic oligonucleotide
gcauaucuacuucuuccug

SEQ ID NO: 2762841 - RNA, 19 nt, Artificial Sequence
  Description of Artificial Sequence: Synthetic oligonucleotide
uuaagccuuugcucuucaa

SEQ ID NO: 2762842 - RNA, 19 nt, Artificial Sequence
  Description of Artificial Sequence: Synthetic oligonucleotide
cuuuacuagaacugaguuu

SEQ ID NO: 2762843 - RNA, 19 nt, Artificial Sequence
  Description of Artificial Sequence: Synthetic oligonucleotide
agaaagcacaauacaugau

SEQ ID NO: 2762844 - RNA, 19 nt, Artificial Sequence
  Description of Artificial Sequence: Synthetic oligonucleotide
aguugaaguuggaaagaaa

SEQ ID NO: 2762845 - RNA, 19 nt, Artificial Sequence
  Description of Artificial Sequence: Synthetic oligonucleotide
aacuggcaacuugugcccu

SEQ ID NO: 2762846 - RNA, 19 nt, Artificial Sequence
  Description of Artificial Sequence: Synthetic oligonucleotide
caaagcagaagcacuguau

SEQ ID NO: 2762847 - RNA, 19 nt, Artificial Sequence
  Description of Artificial Sequence: Synthetic oligonucleotide
cccuuaaguaccaucacaa

SEQ ID NO: 2762848 - RNA, 19 nt, Artificial Sequence
  Description of Artificial Sequence: Synthetic oligonucleotide
guucuuuuccugcccuuaa

SEQ ID NO: 2762849 - RNA, 19 nt, Artificial Sequence
  Description of Artificial Sequence: Synthetic oligonucleotide
gugaugagaucaacauuca

SEQ ID NO: 2762850 - RNA, 19 nt, Artificial Sequence
  Description of Artificial Sequence: Synthetic oligonucleotide
cauuccugcucuauuacuu

SEQ ID NO: 2762851 - RNA, 19 nt, Artificial Sequence
  Description of Artificial Sequence: Synthetic oligonucleotide
gagugaugagaucaacauu

SEQ ID NO: 2762852 - RNA, 19 nt, Artificial Sequence
  Description of Artificial Sequence: Synthetic oligonucleotide
ccauuuaaauacaagguuu

SEQ ID NO: 2762853 - RNA, 19 nt, Artificial Sequence
  Description of Artificial Sequence: Synthetic oligonucleotide
cuucaauuauagcccggaa

SEQ ID NO: 2762854 - RNA, 19 nt, Artificial Sequence
  Description of Artificial Sequence: Synthetic oligonucleotide
aguaggauucuuagcuuua

SEQ ID NO: 2762855 - RNA, 19 nt, Artificial Sequence
  Description of Artificial Sequence: Synthetic oligonucleotide
gaagcaagucuuggaagcu

SEQ ID NO: 2762856 - RNA, 19 nt, Artificial Sequence
  Description of Artificial Sequence: Synthetic oligonucleotide
cagucuuaaauuggguaaa

SEQ ID NO: 2762857 - RNA, 19 nt, Artificial Sequence
  Description of Artificial Sequence: Synthetic oligonucleotide
aaaugccagugcaguuucu

SEQ ID NO: 2762858 - RNA, 19 nt, Artificial Sequence
  Description of Artificial Sequence: Synthetic oligonucleotide
ggcauaucuacuucuuccu

SEQ ID NO: 2762859 - RNA, 19 nt, Artificial Sequence
  Description of Artificial Sequence: Synthetic oligonucleotide
gcccuuaaguaccaucaca

SEQ ID NO: 2762860 - RNA, 19 nt, Artificial Sequence
  Description of Artificial Sequence: Synthetic oligonucleotide
cagcaucuuuucuuuacua

SEQ ID NO: 2762861 - RNA, 19 nt, Artificial Sequence
  Description of Artificial Sequence: Synthetic oligonucleotide
acuggcauaucuacuucuu

SEQ ID NO: 2762862 - RNA, 19 nt, Artificial Sequence
  Description of Artificial Sequence: Synthetic oligonucleotide
ggagaaccauuuaaauaca

SEQ ID NO: 2762863 - RNA, 19 nt, Artificial Sequence
  Description of Artificial Sequence: Synthetic oligonucleotide
uucaccauucuuggaucuu

SEQ ID NO: 2762864 - RNA, 19 nt, Artificial Sequence
  Description of Artificial Sequence: Synthetic oligonucleotide
guccagcuucaaaugguac

SEQ ID NO: 2762865 - RNA, 19 nt, Artificial Sequence
  Description of Artificial Sequence: Synthetic oligonucleotide
gaacugaguuuugaaccua

SEQ ID NO: 2762866 - RNA, 19 nt, Artificial Sequence
  Description of Artificial Sequence: Synthetic oligonucleotide
cagcuucaaaugguacaac

SEQ ID NO: 2762867 - RNA, 19 nt, Artificial Sequence
  Description of Artificial Sequence: Synthetic oligonucleotide
acuggcaacuugugcccuu

SEQ ID NO: 2762868 - RNA, 19 nt, Artificial Sequence
  Description of Artificial Sequence: Synthetic oligonucleotide
gcagaagcacuguauuuua

SEQ ID NO: 2762869 - RNA, 19 nt, Artificial Sequence
  Description of Artificial Sequence: Synthetic oligonucleotide
cacuggcauaucuacuucu

SEQ ID NO: 2762870 - RNA, 19 nt, Artificial Sequence
  Description of Artificial Sequence: Synthetic oligonucleotide
ccugcccuuaaguaccauc

SEQ ID NO: 2762871 - RNA, 19 nt, Artificial Sequence
  Description of Artificial Sequence: Synthetic oligonucleotide
cuauucucucagucuuaaa

SEQ ID NO: 2762872 - RNA, 19 nt, Artificial Sequence
  Description of Artificial Sequence: Synthetic oligonucleotide
ggaaagaaaggagaaccau

SEQ ID NO: 2762873 - RNA, 19 nt, Artificial Sequence
  Description of Artificial Sequence: Synthetic oligonucleotide
gcucuucaaagcagaagca

SEQ ID NO: 2762874 - RNA, 19 nt, Artificial Sequence
  Description of Artificial Sequence: Synthetic oligonucleotide
acugaguuuugaaccuauu

SEQ ID NO: 2762875 - RNA, 19 nt, Artificial Sequence
  Description of Artificial Sequence: Synthetic oligonucleotide
ugcccuuccuuugcuucaa

SEQ ID NO: 2762876 - RNA, 19 nt, Artificial Sequence
  Description of Artificial Sequence: Synthetic oligonucleotide
gaacaacauuccugcucua

SEQ ID NO: 2762877 - RNA, 19 nt, Artificial Sequence
  Description of Artificial Sequence: Synthetic oligonucleotide
ccaucacaagacagcagca

SEQ ID NO: 2762878 - RNA, 19 nt, Artificial Sequence
  Description of Artificial Sequence: Synthetic oligonucleotide
ccagcuucaaaugguacaa

SEQ ID NO: 2762879 - RNA, 19 nt, Artificial Sequence
  Description of Artificial Sequence: Synthetic oligonucleotide
cacagagcaaauguucuuu

SEQ ID NO: 2762880 - RNA, 19 nt, Artificial Sequence
  Description of Artificial Sequence: Synthetic oligonucleotide
caccauucuuggaucuucu

SEQ ID NO: 2762881 - RNA, 19 nt, Artificial Sequence
  Description of Artificial Sequence: Synthetic oligonucleotide
guaggauucuuagcuuuau

SEQ ID NO: 2762882 - RNA, 19 nt, Artificial Sequence
  Description of Artificial Sequence: Synthetic oligonucleotide
caucacaagacagcagcau

SEQ ID NO: 2762883 - RNA, 19 nt, Artificial Sequence
  Description of Artificial Sequence: Synthetic oligonucleotide
accuauucucucagucuua

SEQ ID NO: 2762884 - RNA, 19 nt, Artificial Sequence
  Description of Artificial Sequence: Synthetic oligonucleotide
gcccggaacuggcaacuug

SEQ ID NO: 2762885 - RNA, 19 nt, Artificial Sequence
  Description of Artificial Sequence: Synthetic oligonucleotide
caagucuuggaagcuacuu

SEQ ID NO: 2762886 - RNA, 19 nt, Artificial Sequence
  Description of Artificial Sequence: Synthetic oligonucleotide
cuugugcccuuccuuugcu

SEQ ID NO: 2762887 - RNA, 19 nt, Artificial Sequence
  Description of Artificial Sequence: Synthetic oligonucleotide
ccggaacuggcaacuugug

SEQ ID NO: 2762888 - RNA, 19 nt, Artificial Sequence
  Description of Artificial Sequence: Synthetic oligonucleotide
gcaacuugugcccuuccuu

SEQ ID NO: 2762889 - RNA, 19 nt, Artificial Sequence
  Description of Artificial Sequence: Synthetic oligonucleotide
cuuggaucuucugcaaauu

SEQ ID NO: 2762890 - RNA, 19 nt, Artificial Sequence
  Description of Artificial Sequence: Synthetic oligonucleotide
ccuauucucucagucuuaa

SEQ ID NO: 2762891 - RNA, 19 nt, Artificial Sequence
  Description of Artificial Sequence: Synthetic oligonucleotide
ggcaacuugugcccuuccu

SEQ ID NO: 2762892 - RNA, 19 nt, Artificial Sequence
  Description of Artificial Sequence: Synthetic oligonucleotide
ggauuaagccuuugcucuu

SEQ ID NO: 2762893 - RNA, 19 nt, Artificial Sequence
  Description of Artificial Sequence: Synthetic oligonucleotide
cccggaacuggcaacuugu

SEQ ID NO: 2762894 - RNA, 19 nt, Artificial Sequence
  Description of Artificial Sequence: Synthetic oligonucleotide
cugcaaauucaggaucaau

SEQ ID NO: 2762895 - RNA, 19 nt, Artificial Sequence
  Description of Artificial Sequence: Synthetic oligonucleotide
gguuugucaguaggauucu

SEQ ID NO: 2762896 - RNA, 19 nt, Artificial Sequence
  Description of Artificial Sequence: Synthetic oligonucleotide
cuacuucuuccuguggauu

SEQ ID NO: 2762897 - RNA, 19 nt, Artificial Sequence
  Description of Artificial Sequence: Synthetic oligonucleotide
uccugcccuuaaguaccau

SEQ ID NO: 2762898 - RNA, 19 nt, Artificial Sequence
  Description of Artificial Sequence: Synthetic oligonucleotide
cacaagacagcagcaucuu

SEQ ID NO: 2762899 - RNA, 19 nt, Artificial Sequence
  Description of Artificial Sequence: Synthetic oligonucleotide
guuugucaguaggauucuu

SEQ ID NO: 2762900 - RNA, 19 nt, Artificial Sequence
  Description of Artificial Sequence: Synthetic oligonucleotide
gcaagucuuggaagcuacu

SEQ ID NO: 2762901 - RNA, 19 nt, Artificial Sequence
  Description of Artificial Sequence: Synthetic oligonucleotide
gcccuuccuuugcuucaaa

SEQ ID NO: 2762902 - RNA, 19 nt, Artificial Sequence
  Description of Artificial Sequence: Synthetic oligonucleotide
ucuugaauuaaacuuacag

SEQ ID NO: 2762903 - RNA, 19 nt, Artificial Sequence
  Description of Artificial Sequence: Synthetic oligonucleotide
uacuccauaaccaagaacu

SEQ ID NO: 2762904 - RNA, 19 nt, Artificial Sequence
  Description of Artificial Sequence: Synthetic oligonucleotide
uugaauuaaacuuacaguc

SEQ ID NO: 2762905 - RNA, 19 nt, Artificial Sequence
  Description of Artificial Sequence: Synthetic oligonucleotide
aacuucaucgauuaguucu

SEQ ID NO: 2762906 - RNA, 19 nt, Artificial Sequence
  Description of Artificial Sequence: Synthetic oligonucleotide
acaagaaucauuuuguacu

SEQ ID NO: 2762907 - RNA, 19 nt, Artificial Sequence
  Description of Artificial Sequence: Synthetic oligonucleotide
  modified_base (12)..(12): a, c, u, g, unknown or other
aucaccaucacncaaaaga

SEQ ID NO: 2762908 - RNA, 19 nt, Artificial Sequence
  Description of Artificial Sequence: Synthetic oligonucleotide
auaaccaagaacuuggaga

SEQ ID NO: 2762909 - RNA, 19 nt, Artificial Sequence
  Description of Artificial Sequence: Synthetic oligonucleotide
aaaagacucaucuaguaaa

SEQ ID NO: 2762910 - RNA, 19 nt, Artificial Sequence
  Description of Artificial Sequence: Synthetic oligonucleotide
cuuuaggucaguucgaacc

SEQ ID NO: 2762911 - RNA, 19 nt, Artificial Sequence
  Description of Artificial Sequence: Synthetic oligonucleotide
ucuccuuugaaucugcuug

SEQ ID NO: 2762912 - RNA, 19 nt, Artificial Sequence
  Description of Artificial Sequence: Synthetic oligonucleotide
gaauuaaacuuacagucag

SEQ ID NO: 2762913 - RNA, 19 nt, Artificial Sequence
  Description of Artificial Sequence: Synthetic oligonucleotide
uaaccaagaacuuggagag

SEQ ID NO: 2762914 - RNA, 19 nt, Artificial Sequence
  Description of Artificial Sequence: Synthetic oligonucleotide
  modified_base (3)..(3): a, c, u, g, unknown or other
acncaaaagacucaucuag

SEQ ID NO: 2762915 - RNA, 19 nt, Artificial Sequence
  Description of Artificial Sequence: Synthetic oligonucleotide
cuuacagucagucccaacg

SEQ ID NO: 2762916 - RNA, 19 nt, Artificial Sequence
  Description of Artificial Sequence: Synthetic oligonucleotide
ugugucuuuacuuuucucc

SEQ ID NO: 2762917 - RNA, 19 nt, Artificial Sequence
  Description of Artificial Sequence: Synthetic oligonucleotide
aaccacaagaaucauuuug

SEQ ID NO: 2762918 - RNA, 19 nt, Artificial Sequence
  Description of Artificial Sequence: Synthetic oligonucleotide
cuuugaaucugcuuguagg

SEQ ID NO: 2762919 - RNA, 19 nt, Artificial Sequence
  Description of Artificial Sequence: Synthetic oligonucleotide
  modified_base (5)..(5): a, c, u, g, unknown or other
ucacncaaaagacucaucu

SEQ ID NO: 2762920 - RNA, 19 nt, Artificial Sequence
  Description of Artificial Sequence: Synthetic oligonucleotide
  modified_base (18)..(18): a, c, u, g, unknown or other
gacagaaucaccaucacnc

SEQ ID NO: 2762921 - RNA, 19 nt, Artificial Sequence
  Description of Artificial Sequence: Synthetic oligonucleotide
aauucccagggacaguucg

SEQ ID NO: 2762922 - RNA, 19 nt, Artificial Sequence
  Description of Artificial Sequence: Synthetic oligonucleotide
ugaauuaaacuuacaguca

SEQ ID NO: 2762923 - RNA, 19 nt, Artificial Sequence
  Description of Artificial Sequence: Synthetic oligonucleotide
auuaaacuuacagucaguc

SEQ ID NO: 2762924 - RNA, 19 nt, Artificial Sequence
  Description of Artificial Sequence: Synthetic oligonucleotide
ucaucgauuaguucuacug

SEQ ID NO: 2762925 - RNA, 19 nt, Artificial Sequence
  Description of Artificial Sequence: Synthetic oligonucleotide
uuugaaucugcuuguaggc

SEQ ID NO: 2762926 - RNA, 19 nt, Artificial Sequence
  Description of Artificial Sequence: Synthetic oligonucleotide
cucuuugagcacuugaggg

SEQ ID NO: 2762927 - RNA, 19 nt, Artificial Sequence
  Description of Artificial Sequence: Synthetic oligonucleotide
uuggccgguaacuucaucg

SEQ ID NO: 2762928 - RNA, 19 nt, Artificial Sequence
  Description of Artificial Sequence: Synthetic oligonucleotide
aggguuucuccuuugaauc

SEQ ID NO: 2762929 - RNA, 19 nt, Artificial Sequence
  Description of Artificial Sequence: Synthetic oligonucleotide
agcaucuugaauuaaacuu

SEQ ID NO: 2762930 - RNA, 19 nt, Artificial Sequence
  Description of Artificial Sequence: Synthetic oligonucleotide
uuuugcaugggucaguaau

SEQ ID NO: 2762931 - RNA, 19 nt, Artificial Sequence
  Description of Artificial Sequence: Synthetic oligonucleotide
aguucgaaccacaagaauc

SEQ ID NO: 2762932 - RNA, 19 nt, Artificial Sequence
  Description of Artificial Sequence: Synthetic oligonucleotide
uuaaacuuacagucagucc

SEQ ID NO: 2762933 - RNA, 19 nt, Artificial Sequence
  Description of Artificial Sequence: Synthetic oligonucleotide
aguacucccacucuuugag

SEQ ID NO: 2762934 - RNA, 19 nt, Artificial Sequence
  Description of Artificial Sequence: Synthetic oligonucleotide
  modified_base (11)..(11): a, c, u, g, unknown or other
ucaccaucacncaaaagac

SEQ ID NO: 2762935 - RNA, 19 nt, Artificial Sequence
  Description of Artificial Sequence: Synthetic oligonucleotide
uuuaggucaguucgaacca

SEQ ID NO: 2762936 - RNA, 19 nt, Artificial Sequence
  Description of Artificial Sequence: Synthetic oligonucleotide
aucauuuuguacuccccac

SEQ ID NO: 2762937 - RNA, 19 nt, Artificial Sequence
  Description of Artificial Sequence: Synthetic oligonucleotide
aaucugaguacguccagca

SEQ ID NO: 2762938 - RNA, 19 nt, Artificial Sequence
  Description of Artificial Sequence: Synthetic oligonucleotide
uucaaucugaguacgucca

SEQ ID NO: 2762939 - RNA, 19 nt, Artificial Sequence
  Description of Artificial Sequence: Synthetic oligonucleotide
  modified_base (9)..(9): a, c, u, g, unknown or other
accaucacncaaaagacuc

SEQ ID NO: 2762940 - RNA, 19 nt, Artificial Sequence
  Description of Artificial Sequence: Synthetic oligonucleotide
caucgauuaguucuacugg

SEQ ID NO: 2762941 - RNA, 19 nt, Artificial Sequence
  Description of Artificial Sequence: Synthetic oligonucleotide
gucaguucgaaccacaaga

SEQ ID NO: 2762942 - RNA, 19 nt, Artificial Sequence
  Description of Artificial Sequence: Synthetic oligonucleotide
acucuuugagcacuugagg

SEQ ID NO: 2762943 - RNA, 19 nt, Artificial Sequence
  Description of Artificial Sequence: Synthetic oligonucleotide
cuuguaggcagaaacagca

SEQ ID NO: 2762944 - RNA, 19 nt, Artificial Sequence
  Description of Artificial Sequence: Synthetic oligonucleotide
ucugaguacguccagcauc

SEQ ID NO: 2762945 - RNA, 19 nt, Artificial Sequence
  Description of Artificial Sequence: Synthetic oligonucleotide
uuucccaucuuuaggucag

SEQ ID NO: 2762946 - RNA, 19 nt, Artificial Sequence
  Description of Artificial Sequence: Synthetic oligonucleotide
aaagacucaucuaguaaag

SEQ ID NO: 2762947 - RNA, 19 nt, Artificial Sequence
  Description of Artificial Sequence: Synthetic oligonucleotide
aauucaaugagggugucuu

SEQ ID NO: 2762948 - RNA, 19 nt, Artificial Sequence
  Description of Artificial Sequence: Synthetic oligonucleotide
aggaugcuugcuucggucc

SEQ ID NO: 2762949 - RNA, 19 nt, Artificial Sequence
  Description of Artificial Sequence: Synthetic oligonucleotide
auacuccauaaccaagaac

SEQ ID NO: 2762950 - RNA, 19 nt, Artificial Sequence
  Description of Artificial Sequence: Synthetic oligonucleotide
guucaaucugaguacgucc

SEQ ID NO: 2762951 - RNA, 19 nt, Artificial Sequence
  Description of Artificial Sequence: Synthetic oligonucleotide
aagguuggccgguaacuuc

SEQ ID NO: 2762952 - RNA, 19 nt, Artificial Sequence
  Description of Artificial Sequence: Synthetic oligonucleotide
uuuuguacuccccacucuc

SEQ ID NO: 2762953 - RNA, 19 nt, Artificial Sequence
  Description of Artificial Sequence: Synthetic oligonucleotide
uuuucccaucuuuagguca

SEQ ID NO: 2762954 - RNA, 19 nt, Artificial Sequence
  Description of Artificial Sequence: Synthetic oligonucleotide
ccaucuuuaggucaguucg

SEQ ID NO: 2762955 - RNA, 19 nt, Artificial Sequence
  Description of Artificial Sequence: Synthetic oligonucleotide
uggaccaauucccagggac

SEQ ID NO: 2762956 - RNA, 19 nt, Artificial Sequence
  Description of Artificial Sequence: Synthetic oligonucleotide
ugggucaguaauucaauga

SEQ ID NO: 2762957 - RNA, 19 nt, Artificial Sequence
  Description of Artificial Sequence: Synthetic oligonucleotide
uucaucuggggcuuugacc

SEQ ID NO: 2762958 - RNA, 19 nt, Artificial Sequence
  Description of Artificial Sequence: Synthetic oligonucleotide
gaguguaccaggaugggcc

SEQ ID NO: 2762959 - RNA, 19 nt, Artificial Sequence
  Description of Artificial Sequence: Synthetic oligonucleotide
ugguccuggaccaauuccc

SEQ ID NO: 2762960 - RNA, 19 nt, Artificial Sequence
  Description of Artificial Sequence: Synthetic oligonucleotide
ucuuugagcacuugagggu

SEQ ID NO: 2762961 - RNA, 19 nt, Artificial Sequence
  Description of Artificial Sequence: Synthetic oligonucleotide
aucgauuaguucuacuggu

SEQ ID NO: 2762962 - RNA, 19 nt, Artificial Sequence
  Description of Artificial Sequence: Synthetic oligonucleotide
uuuaagguuggccgguaac

SEQ ID NO: 2762963 - RNA, 19 nt, Artificial Sequence
  Description of Artificial Sequence: Synthetic oligonucleotide
ugcuuguaggcagaaacag

SEQ ID NO: 2762964 - RNA, 19 nt, Artificial Sequence
  Description of Artificial Sequence: Synthetic oligonucleotide
ucauuuuguacuccccacu

SEQ ID NO: 2762965 - RNA, 19 nt, Artificial Sequence
  Description of Artificial Sequence: Synthetic oligonucleotide
caucuugaauuaaacuuac

SEQ ID NO: 2762966 - RNA, 19 nt, Artificial Sequence
  Description of Artificial Sequence: Synthetic oligonucleotide
aguaauucaaugagggugu

SEQ ID NO: 2762967 - RNA, 19 nt, Artificial Sequence
  Description of Artificial Sequence: Synthetic oligonucleotide
agcaaccuucccuuuuccc

SEQ ID NO: 2762968 - RNA, 19 nt, Artificial Sequence
  Description of Artificial Sequence: Synthetic oligonucleotide
cuugaauuaaacuuacagu

SEQ ID NO: 2762969 - RNA, 19 nt, Artificial Sequence
  Description of Artificial Sequence: Synthetic oligonucleotide
uacucccacucuuugagca

SEQ ID NO: 2762970 - RNA, 19 nt, Artificial Sequence
  Description of Artificial Sequence: Synthetic oligonucleotide
uuuguacuccccacucucc

SEQ ID NO: 2762971 - RNA, 19 nt, Artificial Sequence
  Description of Artificial Sequence: Synthetic oligonucleotide
agcaugggaacacugggca

SEQ ID NO: 2762972 - RNA, 19 nt, Artificial Sequence
  Description of Artificial Sequence: Synthetic oligonucleotide
agcugaguguaccaggaug

SEQ ID NO: 2762973 - RNA, 19 nt, Artificial Sequence
  Description of Artificial Sequence: Synthetic oligonucleotide
ucaguucgaaccacaagaa

SEQ ID NO: 2762974 - RNA, 19 nt, Artificial Sequence
  Description of Artificial Sequence: Synthetic oligonucleotide
aagcacaugccacaagcaa

SEQ ID NO: 2762975 - RNA, 19 nt, Artificial Sequence
  Description of Artificial Sequence: Synthetic oligonucleotide
agaaacagcagcaugggaa

SEQ ID NO: 2762976 - RNA, 19 nt, Artificial Sequence
  Description of Artificial Sequence: Synthetic oligonucleotide
caagaaucauuuuguacuc

SEQ ID NO: 2762977 - RNA, 19 nt, Artificial Sequence
  Description of Artificial Sequence: Synthetic oligonucleotide
cauaaccaagaacuuggag

SEQ ID NO: 2762978 - RNA, 19 nt, Artificial Sequence
  Description of Artificial Sequence: Synthetic oligonucleotide
agacucaucuaguaaaguu

SEQ ID NO: 2762979 - RNA, 19 nt, Artificial Sequence
  Description of Artificial Sequence: Synthetic oligonucleotide
ucaguaauucaaugagggu

SEQ ID NO: 2762980 - RNA, 19 nt, Artificial Sequence
  Description of Artificial Sequence: Synthetic oligonucleotide
caugccacaagcaacucca

SEQ ID NO: 2762981 - RNA, 19 nt, Artificial Sequence
  Description of Artificial Sequence: Synthetic oligonucleotide
gggucaguaauucaaugag

SEQ ID NO: 2762982 - RNA, 19 nt, Artificial Sequence
  Description of Artificial Sequence: Synthetic oligonucleotide
ucccuuguugaguucuggg

SEQ ID NO: 2762983 - RNA, 19 nt, Artificial Sequence
  Description of Artificial Sequence: Synthetic oligonucleotide
ucaaucugaguacguccag

SEQ ID NO: 2762984 - RNA, 19 nt, Artificial Sequence
  Description of Artificial Sequence: Synthetic oligonucleotide
guucuacugguccuggacc

SEQ ID NO: 2762985 - RNA, 19 nt, Artificial Sequence
  Description of Artificial Sequence: Synthetic oligonucleotide
uucuacugguccuggacca

SEQ ID NO: 2762986 - RNA, 19 nt, Artificial Sequence
  Description of Artificial Sequence: Synthetic oligonucleotide
uuuucucccuuguugaguu

SEQ ID NO: 2762987 - RNA, 19 nt, Artificial Sequence
  Description of Artificial Sequence: Synthetic oligonucleotide
uuuacuuuucucccuuguu

SEQ ID NO: 2762988 - RNA, 19 nt, Artificial Sequence
  Description of Artificial Sequence: Synthetic oligonucleotide
uuguaggcagaaacagcag

SEQ ID NO: 2762989 - RNA, 19 nt, Artificial Sequence
  Description of Artificial Sequence: Synthetic oligonucleotide
uuguacuccccacucuccc

SEQ ID NO: 2762990 - RNA, 19 nt, Artificial Sequence
  Description of Artificial Sequence: Synthetic oligonucleotide
uuugcaugggucaguaauu

SEQ ID NO: 2762991 - RNA, 19 nt, Artificial Sequence
  Description of Artificial Sequence: Synthetic oligonucleotide
accacaagaaucauuuugu

SEQ ID NO: 2762992 - RNA, 19 nt, Artificial Sequence
  Description of Artificial Sequence: Synthetic oligonucleotide
cagauacuccauaaccaag

SEQ ID NO: 2762993 - RNA, 19 nt, Artificial Sequence
  Description of Artificial Sequence: Synthetic oligonucleotide
ucccuuuucccaucuuuag

SEQ ID NO: 2762994 - RNA, 19 nt, Artificial Sequence
  Description of Artificial Sequence: Synthetic oligonucleotide
aauuaaacuuacagucagu

SEQ ID NO: 2762995 - RNA, 19 nt, Artificial Sequence
  Description of Artificial Sequence: Synthetic oligonucleotide
uuaguucuacugguccugg

SEQ ID NO: 2762996 - RNA, 19 nt, Artificial Sequence
  Description of Artificial Sequence: Synthetic oligonucleotide
cauuuuguacuccccacuc

SEQ ID NO: 2762997 - RNA, 19 nt, Artificial Sequence
  Description of Artificial Sequence: Synthetic oligonucleotide
  modified_base (14)..(14): a, c, u, g, unknown or other
gaaucaccaucacncaaaa

SEQ ID NO: 2762998 - RNA, 19 nt, Artificial Sequence
  Description of Artificial Sequence: Synthetic oligonucleotide
aguacguccagcaucuuga

SEQ ID NO: 2762999 - RNA, 19 nt, Artificial Sequence
  Description of Artificial Sequence: Synthetic oligonucleotide
agauacuccauaaccaaga

SEQ ID NO: 2763000 - RNA, 19 nt, Artificial Sequence
  Description of Artificial Sequence: Synthetic oligonucleotide
ugucuuuacuuuucucccu

SEQ ID NO: 2763001 - RNA, 19 nt, Artificial Sequence
  Description of Artificial Sequence: Synthetic oligonucleotide
guucgaaccacaagaauca

SEQ ID NO: 2763002 - RNA, 19 nt, Artificial Sequence
  Description of Artificial Sequence: Synthetic oligonucleotide
augggucaguaauucaaug

SEQ ID NO: 2763003 - RNA, 19 nt, Artificial Sequence
  Description of Artificial Sequence: Synthetic oligonucleotide
auuaguucuacugguccug

SEQ ID NO: 2763004 - RNA, 19 nt, Artificial Sequence
  Description of Artificial Sequence: Synthetic oligonucleotide
ucgauuaguucuacugguc

SEQ ID NO: 2763005 - RNA, 19 nt, Artificial Sequence
  Description of Artificial Sequence: Synthetic oligonucleotide
acuuuucucccuuguugag

SEQ ID NO: 2763006 - RNA, 19 nt, Artificial Sequence
  Description of Artificial Sequence: Synthetic oligonucleotide
ggccagauacuccauaacc

SEQ ID NO: 2763007 - RNA, 19 nt, Artificial Sequence
  Description of Artificial Sequence: Synthetic oligonucleotide
gaguacguccagcaucuug

SEQ ID NO: 2763008 - RNA, 19 nt, Artificial Sequence
  Description of Artificial Sequence: Synthetic oligonucleotide
  modified_base (17)..(17): a, c, u, g, unknown or other
acagaaucaccaucacnca

SEQ ID NO: 2763009 - RNA, 19 nt, Artificial Sequence
  Description of Artificial Sequence: Synthetic oligonucleotide
acugguccuggaccaauuc

SEQ ID NO: 2763010 - RNA, 19 nt, Artificial Sequence
  Description of Artificial Sequence: Synthetic oligonucleotide
acuuacagucagucccaac

SEQ ID NO: 2763011 - RNA, 19 nt, Artificial Sequence
  Description of Artificial Sequence: Synthetic oligonucleotide
uugaaucugcuuguaggca

SEQ ID NO: 2763012 - RNA, 19 nt, Artificial Sequence
  Description of Artificial Sequence: Synthetic oligonucleotide
acaguacucccacucuuug

SEQ ID NO: 2763013 - RNA, 19 nt, Artificial Sequence
  Description of Artificial Sequence: Synthetic oligonucleotide
agcaucccaagguggcccc

SEQ ID NO: 2763014 - RNA, 19 nt, Artificial Sequence
  Description of Artificial Sequence: Synthetic oligonucleotide
gaccaauucccagggacag

SEQ ID NO: 2763015 - RNA, 19 nt, Artificial Sequence
  Description of Artificial Sequence: Synthetic oligonucleotide
gcugaguguaccaggaugg

SEQ ID NO: 2763016 - RNA, 19 nt, Artificial Sequence
  Description of Artificial Sequence: Synthetic oligonucleotide
caguucgagagccugguuc

SEQ ID NO: 2763017 - RNA, 19 nt, Artificial Sequence
  Description of Artificial Sequence: Synthetic oligonucleotide
uuugggcuggccacaguac

SEQ ID NO: 2763018 - RNA, 19 nt, Artificial Sequence
  Description of Artificial Sequence: Synthetic oligonucleotide
uggggcuuugaccaccacu

SEQ ID NO: 2763019 - RNA, 19 nt, Artificial Sequence
  Description of Artificial Sequence: Synthetic oligonucleotide
uuuuaagguuggccgguaa

SEQ ID NO: 2763020 - RNA, 19 nt, Artificial Sequence
  Description of Artificial Sequence: Synthetic oligonucleotide
aaccuucccuuuucccauc

SEQ ID NO: 2763021 - RNA, 19 nt, Artificial Sequence
  Description of Artificial Sequence: Synthetic oligonucleotide
ucuuuaggucaguucgaac

SEQ ID NO: 2763022 - RNA, 19 nt, Artificial Sequence
  Description of Artificial Sequence: Synthetic oligonucleotide
ugaggguuucuccuuugaa

SEQ ID NO: 2763023 - RNA, 19 nt, Artificial Sequence
  Description of Artificial Sequence: Synthetic oligonucleotide
uguacuccccacucucccc

SEQ ID NO: 2763024 - RNA, 19 nt, Artificial Sequence
  Description of Artificial Sequence: Synthetic oligonucleotide
ccaagcacaugccacaagc

SEQ ID NO: 2763025 - RNA, 19 nt, Artificial Sequence
  Description of Artificial Sequence: Synthetic oligonucleotide
caaaagacucaucuaguaa

SEQ ID NO: 2763026 - RNA, 19 nt, Artificial Sequence
  Description of Artificial Sequence: Synthetic oligonucleotide
gcuuugaccaccacuuugg

SEQ ID NO: 2763027 - RNA, 19 nt, Artificial Sequence
  Description of Artificial Sequence: Synthetic oligonucleotide
uucaucgauuaguucuacu

SEQ ID NO: 2763028 - RNA, 19 nt, Artificial Sequence
  Description of Artificial Sequence: Synthetic oligonucleotide
ugaguguaccaggaugggc

SEQ ID NO: 2763029 - RNA, 19 nt, Artificial Sequence
  Description of Artificial Sequence: Synthetic oligonucleotide
cacaagcaacuccagcagc

SEQ ID NO: 2763030 - RNA, 19 nt, Artificial Sequence
  Description of Artificial Sequence: Synthetic oligonucleotide
agcagcaugggaacacugg

SEQ ID NO: 2763031 - RNA, 19 nt, Artificial Sequence
  Description of Artificial Sequence: Synthetic oligonucleotide
  modified_base (15)..(15): a, c, u, g, unknown or other
agaaucaccaucacncaaa

SEQ ID NO: 2763032 - RNA, 19 nt, Artificial Sequence
  Description of Artificial Sequence: Synthetic oligonucleotide
ucgagagccugguucaauc

SEQ ID NO: 2763033 - RNA, 19 nt, Artificial Sequence
  Description of Artificial Sequence: Synthetic oligonucleotide
cagcaugggaacacugggc

SEQ ID NO: 2763034 - RNA, 19 nt, Artificial Sequence
  Description of Artificial Sequence: Synthetic oligonucleotide
ugcaugggucaguaauuca

SEQ ID NO: 2763035 - RNA, 19 nt, Artificial Sequence
  Description of Artificial Sequence: Synthetic oligonucleotide
ugggccagauacuccauaa

SEQ ID NO: 2763036 - RNA, 19 nt, Artificial Sequence
  Description of Artificial Sequence: Synthetic oligonucleotide
caaucugaguacguccagc

SEQ ID NO: 2763037 - RNA, 19 nt, Artificial Sequence
  Description of Artificial Sequence: Synthetic oligonucleotide
acacugggcagcaaccuuc

SEQ ID NO: 2763038 - RNA, 19 nt, Artificial Sequence
  Description of Artificial Sequence: Synthetic oligonucleotide
aacacugggcagcaaccuu

SEQ ID NO: 2763039 - RNA, 19 nt, Artificial Sequence
  Description of Artificial Sequence: Synthetic oligonucleotide
uggccgguaacuucaucga

SEQ ID NO: 2763040 - RNA, 19 nt, Artificial Sequence
  Description of Artificial Sequence: Synthetic oligonucleotide
uaauucaaugagggugucu

SEQ ID NO: 2763041 - RNA, 19 nt, Artificial Sequence
  Description of Artificial Sequence: Synthetic oligonucleotide
uucgguccccaucucugug

SEQ ID NO: 2763042 - RNA, 19 nt, Artificial Sequence
  Description of Artificial Sequence: Synthetic oligonucleotide
aguguaccaggaugggcca

SEQ ID NO: 2763043 - RNA, 19 nt, Artificial Sequence
  Description of Artificial Sequence: Synthetic oligonucleotide
uugcaugggucaguaauuc

SEQ ID NO: 2763044 - RNA, 19 nt, Artificial Sequence
  Description of Artificial Sequence: Synthetic oligonucleotide
ugguucaaucugaguacgu

SEQ ID NO: 2763045 - RNA, 19 nt, Artificial Sequence
  Description of Artificial Sequence: Synthetic oligonucleotide
  modified_base (16)..(16): a, c, u, g, unknown or other
cagaaucaccaucacncaa

SEQ ID NO: 2763046 - RNA, 19 nt, Artificial Sequence
  Description of Artificial Sequence: Synthetic oligonucleotide
ugcuucgguccccaucucu

SEQ ID NO: 2763047 - RNA, 19 nt, Artificial Sequence
  Description of Artificial Sequence: Synthetic oligonucleotide
acucaucuaguaaaguuuu

SEQ ID NO: 2763048 - RNA, 19 nt, Artificial Sequence
  Description of Artificial Sequence: Synthetic oligonucleotide
aggaugggccagauacucc

SEQ ID NO: 2763049 - RNA, 19 nt, Artificial Sequence
  Description of Artificial Sequence: Synthetic oligonucleotide
ccugguucaaucugaguac

SEQ ID NO: 2763050 - RNA, 19 nt, Artificial Sequence
  Description of Artificial Sequence: Synthetic oligonucleotide
cccagggacaguucgagag

SEQ ID NO: 2763051 - RNA, 19 nt, Artificial Sequence
  Description of Artificial Sequence: Synthetic oligonucleotide
cuggccacaguacucccac

SEQ ID NO: 2763052 - RNA, 19 nt, Artificial Sequence
  Description of Artificial Sequence: Synthetic oligonucleotide
agcccaagcacaugccaca

SEQ ID NO: 2763053 - RNA, 19 nt, Artificial Sequence
  Description of Artificial Sequence: Synthetic oligonucleotide
cccuuguugaguucugggg

SEQ ID NO: 2763054 - RNA, 19 nt, Artificial Sequence
  Description of Artificial Sequence: Synthetic oligonucleotide
gaggguuucuccuuugaau

SEQ ID NO: 2763055 - RNA, 19 nt, Artificial Sequence
  Description of Artificial Sequence: Synthetic oligonucleotide
  modified_base (6)..(6): a, c, u, g, unknown or other
aucacncaaaagacucauc

SEQ ID NO: 2763056 - RNA, 19 nt, Artificial Sequence
  Description of Artificial Sequence: Synthetic oligonucleotide
uuaggucaguucgaaccac

SEQ ID NO: 2763057 - RNA, 19 nt, Artificial Sequence
  Description of Artificial Sequence: Synthetic oligonucleotide
gagcaucccaagguggccc

SEQ ID NO: 2763058 - RNA, 19 nt, Artificial Sequence
  Description of Artificial Sequence: Synthetic oligonucleotide
uguaccaggaugggccaga

SEQ ID NO: 2763059 - RNA, 19 nt, Artificial Sequence
  Description of Artificial Sequence: Synthetic oligonucleotide
caggaugcuugcuucgguc

SEQ ID NO: 2763060 - RNA, 19 nt, Artificial Sequence
  Description of Artificial Sequence: Synthetic oligonucleotide
cugcuuguaggcagaaaca

SEQ ID NO: 2763061 - RNA, 19 nt, Artificial Sequence
  Description of Artificial Sequence: Synthetic oligonucleotide
cuugcuucgguccccaucu

SEQ ID NO: 2763062 - RNA, 19 nt, Artificial Sequence
  Description of Artificial Sequence: Synthetic oligonucleotide
ccaagcugaguguaccagg

SEQ ID NO: 2763063 - RNA, 19 nt, Artificial Sequence
  Description of Artificial Sequence: Synthetic oligonucleotide
gguaacuucaucgauuagu

SEQ ID NO: 2763064 - RNA, 19 nt, Artificial Sequence
  Description of Artificial Sequence: Synthetic oligonucleotide
cacugggcagcaaccuucc

SEQ ID NO: 2763065 - RNA, 19 nt, Artificial Sequence
  Description of Artificial Sequence: Synthetic oligonucleotide
gcaaccuucccuuuuccca

SEQ ID NO: 2763066 - RNA, 19 nt, Artificial Sequence
  Description of Artificial Sequence: Synthetic oligonucleotide
gaugcuugcuucggucccc

SEQ ID NO: 2763067 - RNA, 19 nt, Artificial Sequence
  Description of Artificial Sequence: Synthetic oligonucleotide
aagcugaguguaccaggau

SEQ ID NO: 2763068 - RNA, 19 nt, Artificial Sequence
  Description of Artificial Sequence: Synthetic oligonucleotide
cgauuaguucuacuggucc

SEQ ID NO: 2763069 - RNA, 19 nt, Artificial Sequence
  Description of Artificial Sequence: Synthetic oligonucleotide
guacucccacucuuugagc

SEQ ID NO: 2763070 - RNA, 19 nt, Artificial Sequence
  Description of Artificial Sequence: Synthetic oligonucleotide
  modified_base (4)..(4): a, c, u, g, unknown or other
cacncaaaagacucaucua

SEQ ID NO: 2763071 - RNA, 19 nt, Artificial Sequence
  Description of Artificial Sequence: Synthetic oligonucleotide
caagcacaugccacaagca

SEQ ID NO: 2763072 - RNA, 19 nt, Artificial Sequence
  Description of Artificial Sequence: Synthetic oligonucleotide
ggucaguucgaaccacaag

SEQ ID NO: 2763073 - RNA, 19 nt, Artificial Sequence
  Description of Artificial Sequence: Synthetic oligonucleotide
gacucaucuaguaaaguuu

SEQ ID NO: 2763074 - RNA, 19 nt, Artificial Sequence
  Description of Artificial Sequence: Synthetic oligonucleotide
uaagguuggccgguaacuu

SEQ ID NO: 2763075 - RNA, 19 nt, Artificial Sequence
  Description of Artificial Sequence: Synthetic oligonucleotide
cugaguguaccaggauggg

SEQ ID NO: 2763076 - RNA, 19 nt, Artificial Sequence
  Description of Artificial Sequence: Synthetic oligonucleotide
caucuuuaggucaguucga

SEQ ID NO: 2763077 - RNA, 19 nt, Artificial Sequence
  Description of Artificial Sequence: Synthetic oligonucleotide
  modified_base (2)..(2): a, c, u, g, unknown or other
cncaaaagacucaucuagu

SEQ ID NO: 2763078 - RNA, 19 nt, Artificial Sequence
  Description of Artificial Sequence: Synthetic oligonucleotide
cugugucuuuacuuuucuc

SEQ ID NO: 2763079 - RNA, 19 nt, Artificial Sequence
  Description of Artificial Sequence: Synthetic oligonucleotide
gggaacacugggcagcaac

SEQ ID NO: 2763080 - RNA, 19 nt, Artificial Sequence
  Description of Artificial Sequence: Synthetic oligonucleotide
ccuggaccaauucccaggg

SEQ ID NO: 2763081 - RNA, 19 nt, Artificial Sequence
  Description of Artificial Sequence: Synthetic oligonucleotide
aucuuuaggucaguucgaa

SEQ ID NO: 2763082 - RNA, 19 nt, Artificial Sequence
  Description of Artificial Sequence: Synthetic oligonucleotide
ugggcuggccacaguacuc

SEQ ID NO: 2763083 - RNA, 19 nt, Artificial Sequence
  Description of Artificial Sequence: Synthetic oligonucleotide
uuugagcacuugaggguuu

SEQ ID NO: 2763084 - RNA, 19 nt, Artificial Sequence
  Description of Artificial Sequence: Synthetic oligonucleotide
agccaagcugaguguacca

SEQ ID NO: 2763085 - RNA, 19 nt, Artificial Sequence
  Description of Artificial Sequence: Synthetic oligonucleotide
gguuucuccuuugaaucug

SEQ ID NO: 2763086 - RNA, 19 nt, Artificial Sequence
  Description of Artificial Sequence: Synthetic oligonucleotide
agguuggccgguaacuuca

SEQ ID NO: 2763087 - RNA, 19 nt, Artificial Sequence
  Description of Artificial Sequence: Synthetic oligonucleotide
uacguccagcaucuugaau

SEQ ID NO: 2763088 - RNA, 19 nt, Artificial Sequence
  Description of Artificial Sequence: Synthetic oligonucleotide
ggaacacugggcagcaacc

SEQ ID NO: 2763089 - RNA, 19 nt, Artificial Sequence
  Description of Artificial Sequence: Synthetic oligonucleotide
gcaucuugaauuaaacuua

SEQ ID NO: 2763090 - RNA, 19 nt, Artificial Sequence
  Description of Artificial Sequence: Synthetic oligonucleotide
cuuugggcuggccacagua

SEQ ID NO: 2763091 - RNA, 19 nt, Artificial Sequence
  Description of Artificial Sequence: Synthetic oligonucleotide
  modified_base (10)..(10): a, c, u, g, unknown or other
caccaucacncaaaagacu

SEQ ID NO: 2763092 - RNA, 19 nt, Artificial Sequence
  Description of Artificial Sequence: Synthetic oligonucleotide
aucugaguacguccagcau

SEQ ID NO: 2763093 - RNA, 19 nt, Artificial Sequence
  Description of Artificial Sequence: Synthetic oligonucleotide
ccuuugaaucugcuuguag

SEQ ID NO: 2763094 - RNA, 19 nt, Artificial Sequence
  Description of Artificial Sequence: Synthetic oligonucleotide
gguucaaucugaguacguc

SEQ ID NO: 2763095 - RNA, 19 nt, Artificial Sequence
  Description of Artificial Sequence: Synthetic oligonucleotide
acuucaucgauuaguucua

SEQ ID NO: 2763096 - RNA, 19 nt, Artificial Sequence
  Description of Artificial Sequence: Synthetic oligonucleotide
aaucugcuuguaggcagaa

SEQ ID NO: 2763097 - RNA, 19 nt, Artificial Sequence
  Description of Artificial Sequence: Synthetic oligonucleotide
cucccuuguugaguucugg

SEQ ID NO: 2763098 - RNA, 19 nt, Artificial Sequence
  Description of Artificial Sequence: Synthetic oligonucleotide
cagcaaccuucccuuuucc

SEQ ID NO: 2763099 - RNA, 19 nt, Artificial Sequence
  Description of Artificial Sequence: Synthetic oligonucleotide
gagcacuugaggguuucuc

SEQ ID NO: 2763100 - RNA, 19 nt, Artificial Sequence
  Description of Artificial Sequence: Synthetic oligonucleotide
cuucaucgauuaguucuac

SEQ ID NO: 2763101 - RNA, 19 nt, Artificial Sequence
  Description of Artificial Sequence: Synthetic oligonucleotide
aacuuacagucagucccaa

SEQ ID NO: 2763102 - RNA, 19 nt, Artificial Sequence
  Description of Artificial Sequence: Synthetic oligonucleotide
gcuuguaggcagaaacagc

SEQ ID NO: 2763103 - RNA, 19 nt, Artificial Sequence
  Description of Artificial Sequence: Synthetic oligonucleotide
aucuugaauuaaacuuaca

SEQ ID NO: 2763104 - RNA, 19 nt, Artificial Sequence
  Description of Artificial Sequence: Synthetic oligonucleotide
cagcaucuugaauuaaacu

SEQ ID NO: 2763105 - RNA, 19 nt, Artificial Sequence
  Description of Artificial Sequence: Synthetic oligonucleotide
uacugguccuggaccaauu

SEQ ID NO: 2763106 - RNA, 19 nt, Artificial Sequence
  Description of Artificial Sequence: Synthetic oligonucleotide
accuucccuuuucccaucu

SEQ ID NO: 2763107 - RNA, 19 nt, Artificial Sequence
  Description of Artificial Sequence: Synthetic oligonucleotide
accaccacuuugggcuggc

SEQ ID NO: 2763108 - RNA, 19 nt, Artificial Sequence
  Description of Artificial Sequence: Synthetic oligonucleotide
uugagcacuugaggguuuc

SEQ ID NO: 2763109 - RNA, 19 nt, Artificial Sequence
  Description of Artificial Sequence: Synthetic oligonucleotide
uucgaaccacaagaaucau

SEQ ID NO: 2763110 - RNA, 19 nt, Artificial Sequence
  Description of Artificial Sequence: Synthetic oligonucleotide
ggggagcaucccaaggugg

SEQ ID NO: 2763111 - RNA, 19 nt, Artificial Sequence
  Description of Artificial Sequence: Synthetic oligonucleotide
caguacucccacucuuuga

SEQ ID NO: 2763112 - RNA, 19 nt, Artificial Sequence
  Description of Artificial Sequence: Synthetic oligonucleotide
uuucucccuuguugaguuc

SEQ ID NO: 2763113 - RNA, 19 nt, Artificial Sequence
  Description of Artificial Sequence: Synthetic oligonucleotide
ggacaguucgagagccugg

SEQ ID NO: 2763114 - RNA, 19 nt, Artificial Sequence
  Description of Artificial Sequence: Synthetic oligonucleotide
gcaugggaacacugggcag

SEQ ID NO: 2763115 - RNA, 19 nt, Artificial Sequence
  Description of Artificial Sequence: Synthetic oligonucleotide
ccagauacuccauaaccaa

SEQ ID NO: 2763116 - RNA, 19 nt, Artificial Sequence
  Description of Artificial Sequence: Synthetic oligonucleotide
agccugguucaaucugagu

SEQ ID NO: 2763117 - RNA, 19 nt, Artificial Sequence
  Description of Artificial Sequence: Synthetic oligonucleotide
caccacuuugggcuggcca

SEQ ID NO: 2763118 - RNA, 19 nt, Artificial Sequence
  Description of Artificial Sequence: Synthetic oligonucleotide
guaauucaaugaggguguc

SEQ ID NO: 2763119 - RNA, 19 nt, Artificial Sequence
  Description of Artificial Sequence: Synthetic oligonucleotide
ggccacaguacucccacuc

SEQ ID NO: 2763120 - RNA, 19 nt, Artificial Sequence
  Description of Artificial Sequence: Synthetic oligonucleotide
  modified_base (7)..(7): a, c, u, g, unknown or other
caucacncaaaagacucau

SEQ ID NO: 2763121 - RNA, 19 nt, Artificial Sequence
  Description of Artificial Sequence: Synthetic oligonucleotide
caucccaagguggccccgg

SEQ ID NO: 2763122 - RNA, 19 nt, Artificial Sequence
  Description of Artificial Sequence: Synthetic oligonucleotide
ucuacugguccuggaccaa

SEQ ID NO: 2763123 - RNA, 19 nt, Artificial Sequence
  Description of Artificial Sequence: Synthetic oligonucleotide
gaccaccacuuugggcugg

SEQ ID NO: 2763124 - RNA, 19 nt, Artificial Sequence
  Description of Artificial Sequence: Synthetic oligonucleotide
uccuuugaaucugcuugua

SEQ ID NO: 2763125 - RNA, 19 nt, Artificial Sequence
  Description of Artificial Sequence: Synthetic oligonucleotide
gggacaguucgagagccug

SEQ ID NO: 2763126 - RNA, 19 nt, Artificial Sequence
  Description of Artificial Sequence: Synthetic oligonucleotide
cccaucuuuaggucaguuc

SEQ ID NO: 2763127 - RNA, 19 nt, Artificial Sequence
  Description of Artificial Sequence: Synthetic oligonucleotide
gcagcaaccuucccuuuuc

SEQ ID NO: 2763128 - RNA, 19 nt, Artificial Sequence
  Description of Artificial Sequence: Synthetic oligonucleotide
gcaugggucaguaauucaa

SEQ ID NO: 2763129 - RNA, 19 nt, Artificial Sequence
  Description of Artificial Sequence: Synthetic oligonucleotide
augggccagauacuccaua

SEQ ID NO: 2763130 - RNA, 19 nt, Artificial Sequence
  Description of Artificial Sequence: Synthetic oligonucleotide
acuccauaaccaagaacuu

SEQ ID NO: 2763131 - RNA, 19 nt, Artificial Sequence
  Description of Artificial Sequence: Synthetic oligonucleotide
gggagcaucccaagguggc

SEQ ID NO: 2763132 - RNA, 19 nt, Artificial Sequence
  Description of Artificial Sequence: Synthetic oligonucleotide
gacaguucgagagccuggu

SEQ ID NO: 2763133 - RNA, 19 nt, Artificial Sequence
  Description of Artificial Sequence: Synthetic oligonucleotide
caucuggggcuuugaccac

SEQ ID NO: 2763134 - RNA, 19 nt, Artificial Sequence
  Description of Artificial Sequence: Synthetic oligonucleotide
caugggucaguaauucaau

SEQ ID NO: 2763135 - RNA, 19 nt, Artificial Sequence
  Description of Artificial Sequence: Synthetic oligonucleotide
ugagcacuugaggguuucu

SEQ ID NO: 2763136 - RNA, 19 nt, Artificial Sequence
  Description of Artificial Sequence: Synthetic oligonucleotide
gccaagcugaguguaccag

SEQ ID NO: 2763137 - RNA, 19 nt, Artificial Sequence
  Description of Artificial Sequence: Synthetic oligonucleotide
caagguggccccggaggcc

SEQ ID NO: 2763138 - RNA, 19 nt, Artificial Sequence
  Description of Artificial Sequence: Synthetic oligonucleotide
caucucugugucuuuacuu

SEQ ID NO: 2763139 - RNA, 19 nt, Artificial Sequence
  Description of Artificial Sequence: Synthetic oligonucleotide
ccccagcccaagcacaugc

SEQ ID NO: 2763140 - RNA, 19 nt, Artificial Sequence
  Description of Artificial Sequence: Synthetic oligonucleotide
gcuucgguccccaucucug

SEQ ID NO: 2763141 - RNA, 19 nt, Artificial Sequence
  Description of Artificial Sequence: Synthetic oligonucleotide
ggaccaauucccagggaca

SEQ ID NO: 2763142 - RNA, 19 nt, Artificial Sequence
  Description of Artificial Sequence: Synthetic oligonucleotide
caagcaacuccagcagcca

SEQ ID NO: 2763143 - RNA, 19 nt, Artificial Sequence
  Description of Artificial Sequence: Synthetic oligonucleotide
acuuugggcuggccacagu

SEQ ID NO: 2763144 - RNA, 19 nt, Artificial Sequence
  Description of Artificial Sequence: Synthetic oligonucleotide
cuuuucucccuuguugagu

SEQ ID NO: 2763145 - RNA, 19 nt, Artificial Sequence
  Description of Artificial Sequence: Synthetic oligonucleotide
aggucaguucgaaccacaa

SEQ ID NO: 2763146 - RNA, 19 nt, Artificial Sequence
  Description of Artificial Sequence: Synthetic oligonucleotide
caaccuucccuuuucccau

SEQ ID NO: 2763147 - RNA, 19 nt, Artificial Sequence
  Description of Artificial Sequence: Synthetic oligonucleotide
guuggccgguaacuucauc

SEQ ID NO: 2763148 - RNA, 19 nt, Artificial Sequence
  Description of Artificial Sequence: Synthetic oligonucleotide
cgaaccacaagaaucauuu

SEQ ID NO: 2763149 - RNA, 19 nt, Artificial Sequence
  Description of Artificial Sequence: Synthetic oligonucleotide
guacguccagcaucuugaa

SEQ ID NO: 2763150 - RNA, 19 nt, Artificial Sequence
  Description of Artificial Sequence: Synthetic oligonucleotide
gggccagauacuccauaac

SEQ ID NO: 2763151 - RNA, 19 nt, Artificial Sequence
  Description of Artificial Sequence: Synthetic oligonucleotide
acaguucgagagccugguu

SEQ ID NO: 2763152 - RNA, 19 nt, Artificial Sequence
  Description of Artificial Sequence: Synthetic oligonucleotide
ucccaucuuuaggucaguu

SEQ ID NO: 2763153 - RNA, 19 nt, Artificial Sequence
  Description of Artificial Sequence: Synthetic oligonucleotide
gggcuggccacaguacucc

SEQ ID NO: 2763154 - RNA, 19 nt, Artificial Sequence
  Description of Artificial Sequence: Synthetic oligonucleotide
guguaccaggaugggccag

SEQ ID NO: 2763155 - RNA, 19 nt, Artificial Sequence
  Description of Artificial Sequence: Synthetic oligonucleotide
ggagcaucccaagguggcc

SEQ ID NO: 2763156 - RNA, 19 nt, Artificial Sequence
  Description of Artificial Sequence: Synthetic oligonucleotide
uaccaggaugggccagaua

SEQ ID NO: 2763157 - RNA, 19 nt, Artificial Sequence
  Description of Artificial Sequence: Synthetic oligonucleotide
gcuugcuucgguccccauc

SEQ ID NO: 2763158 - RNA, 19 nt, Artificial Sequence
  Description of Artificial Sequence: Synthetic oligonucleotide
cuuugagcacuugaggguu

SEQ ID NO: 2763159 - RNA, 19 nt, Artificial Sequence
  Description of Artificial Sequence: Synthetic oligonucleotide
uucccaucuuuaggucagu

SEQ ID NO: 2763160 - RNA, 19 nt, Artificial Sequence
  Description of Artificial Sequence: Synthetic oligonucleotide
  modified_base (8)..(8): a, c, u, g, unknown or other
ccaucacncaaaagacuca

SEQ ID NO: 2763161 - RNA, 19 nt, Artificial Sequence
  Description of Artificial Sequence: Synthetic oligonucleotide
ccgguaacuucaucgauua

SEQ ID NO: 2763162 - RNA, 19 nt, Artificial Sequence
  Description of Artificial Sequence: Synthetic oligonucleotide
cccaucucugugucuuuac

SEQ ID NO: 2763163 - RNA, 19 nt, Artificial Sequence
  Description of Artificial Sequence: Synthetic oligonucleotide
ccauaaccaagaacuugga

SEQ ID NO: 2763164 - RNA, 19 nt, Artificial Sequence
  Description of Artificial Sequence: Synthetic oligonucleotide
gcacaugccacaagcaacu

SEQ ID NO: 2763165 - RNA, 19 nt, Artificial Sequence
  Description of Artificial Sequence: Synthetic oligonucleotide
cccaggaugcuugcuucgg

SEQ ID NO: 2763166 - RNA, 19 nt, Artificial Sequence
  Description of Artificial Sequence: Synthetic oligonucleotide
caguucgaaccacaagaau

SEQ ID NO: 2763167 - RNA, 19 nt, Artificial Sequence
  Description of Artificial Sequence: Synthetic oligonucleotide
cagucagucccaacguuuu

SEQ ID NO: 2763168 - RNA, 19 nt, Artificial Sequence
  Description of Artificial Sequence: Synthetic oligonucleotide
ggggcuuugaccaccacuu

SEQ ID NO: 2763169 - RNA, 19 nt, Artificial Sequence
  Description of Artificial Sequence: Synthetic oligonucleotide
cuucgguccccaucucugu

SEQ ID NO: 2763170 - RNA, 19 nt, Artificial Sequence
  Description of Artificial Sequence: Synthetic oligonucleotide
ccacaagaaucauuuugua

SEQ ID NO: 2763171 - RNA, 19 nt, Artificial Sequence
  Description of Artificial Sequence: Synthetic oligonucleotide
cuggaccaauucccaggga

SEQ ID NO: 2763172 - RNA, 19 nt, Artificial Sequence
  Description of Artificial Sequence: Synthetic oligonucleotide
gcagccaagcugaguguac

SEQ ID NO: 2763173 - RNA, 19 nt, Artificial Sequence
  Description of Artificial Sequence: Synthetic oligonucleotide
cccaagcacaugccacaag

SEQ ID NO: 2763174 - RNA, 19 nt, Artificial Sequence
  Description of Artificial Sequence: Synthetic oligonucleotide
ccagcccaagcacaugcca

SEQ ID NO: 2763175 - RNA, 19 nt, Artificial Sequence
  Description of Artificial Sequence: Synthetic oligonucleotide
cuggggcuuugaccaccac

SEQ ID NO: 2763176 - RNA, 19 nt, Artificial Sequence
  Description of Artificial Sequence: Synthetic oligonucleotide
ugggaacacugggcagcaa

SEQ ID NO: 2763177 - RNA, 19 nt, Artificial Sequence
  Description of Artificial Sequence: Synthetic oligonucleotide
guucgagagccugguucaa

SEQ ID NO: 2763178 - RNA, 19 nt, Artificial Sequence
  Description of Artificial Sequence: Synthetic oligonucleotide
ugaguacguccagcaucuu

SEQ ID NO: 2763179 - RNA, 19 nt, Artificial Sequence
  Description of Artificial Sequence: Synthetic oligonucleotide
guccagcaucuugaauuaa

SEQ ID NO: 2763180 - RNA, 19 nt, Artificial Sequence
  Description of Artificial Sequence: Synthetic oligonucleotide
gaugggccagauacuccau

SEQ ID NO: 2763181 - RNA, 19 nt, Artificial Sequence
  Description of Artificial Sequence: Synthetic oligonucleotide
gcaucccaagguggccccg

SEQ ID NO: 2763182 - RNA, 19 nt, Artificial Sequence
  Description of Artificial Sequence: Synthetic oligonucleotide
cagcagccaagcugagugu

SEQ ID NO: 2763183 - RNA, 19 nt, Artificial Sequence
  Description of Artificial Sequence: Synthetic oligonucleotide
cguccagcaucuugaauua

SEQ ID NO: 2763184 - RNA, 19 nt, Artificial Sequence
  Description of Artificial Sequence: Synthetic oligonucleotide
ccaucucugugucuuuacu

SEQ ID NO: 2763185 - RNA, 19 nt, Artificial Sequence
  Description of Artificial Sequence: Synthetic oligonucleotide
ggcagcaaccuucccuuuu

SEQ ID NO: 2763186 - RNA, 19 nt, Artificial Sequence
  Description of Artificial Sequence: Synthetic oligonucleotide
gccgguaacuucaucgauu

SEQ ID NO: 2763187 - RNA, 19 nt, Artificial Sequence
  Description of Artificial Sequence: Synthetic oligonucleotide
cuacugguccuggaccaau

SEQ ID NO: 2763188 - RNA, 19 nt, Artificial Sequence
  Description of Artificial Sequence: Synthetic oligonucleotide
ggccgguaacuucaucgau

SEQ ID NO: 2763189 - RNA, 19 nt, Artificial Sequence
  Description of Artificial Sequence: Synthetic oligonucleotide
guaccaggaugggccagau

SEQ ID NO: 2763190 - RNA, 19 nt, Artificial Sequence
  Description of Artificial Sequence: Synthetic oligonucleotide
gcccaagcacaugccacaa

SEQ ID NO: 2763191 - RNA, 19 nt, Artificial Sequence
  Description of Artificial Sequence: Synthetic oligonucleotide
ccacuuugggcuggccaca

SEQ ID NO: 2763192 - RNA, 19 nt, Artificial Sequence
  Description of Artificial Sequence: Synthetic oligonucleotide
ccaggaugcuugcuucggu

SEQ ID NO: 2763193 - RNA, 19 nt, Artificial Sequence
  Description of Artificial Sequence: Synthetic oligonucleotide
ccaccacuuugggcuggcc

SEQ ID NO: 2763194 - RNA, 19 nt, Artificial Sequence
  Description of Artificial Sequence: Synthetic oligonucleotide
gccccagcccaagcacaug

SEQ ID NO: 2763195 - RNA, 19 nt, Artificial Sequence
  Description of Artificial Sequence: Synthetic oligonucleotide
gggcuuugaccaccacuuu

SEQ ID NO: 2763196 - RNA, 19 nt, Artificial Sequence
  Description of Artificial Sequence: Synthetic oligonucleotide
gguuggccgguaacuucau

SEQ ID NO: 2763197 - RNA, 19 nt, Artificial Sequence
  Description of Artificial Sequence: Synthetic oligonucleotide
ccccaucucugugucuuua

SEQ ID NO: 2763198 - RNA, 19 nt, Artificial Sequence
  Description of Artificial Sequence: Synthetic oligonucleotide
ggccccagcccaagcacau

SEQ ID NO: 2763199 - RNA, 19 nt, Artificial Sequence
  Description of Artificial Sequence: Synthetic oligonucleotide
  modified_base (1)..(1): a, c, u, g, unknown or other
ncaaaagacucaucuagua

SEQ ID NO: 2763200 - RNA, 19 nt, Artificial Sequence
  Description of Artificial Sequence: Synthetic oligonucleotide
uuuauuguaaagauaaucc

SEQ ID NO: 2763201 - RNA, 19 nt, Artificial Sequence
  Description of Artificial Sequence: Synthetic oligonucleotide
acaaugaucauucuggacc

SEQ ID NO: 2763202 - RNA, 19 nt, Artificial Sequence
  Description of Artificial Sequence: Synthetic oligonucleotide
uuauuaauggagcaugugg

SEQ ID NO: 2763203 - RNA, 19 nt, Artificial Sequence
  Description of Artificial Sequence: Synthetic oligonucleotide
uuauagacgagugagaggg

SEQ ID NO: 2763204 - RNA, 19 nt, Artificial Sequence
  Description of Artificial Sequence: Synthetic oligonucleotide
ugcaguauauuuauuaagg

SEQ ID NO: 2763205 - RNA, 19 nt, Artificial Sequence
  Description of Artificial Sequence: Synthetic oligonucleotide
aaucuggggauauacuucc

SEQ ID NO: 2763206 - RNA, 19 nt, Artificial Sequence
  Description of Artificial Sequence: Synthetic oligonucleotide
aaaaggugacuuuaauagc

SEQ ID NO: 2763207 - RNA, 19 nt, Artificial Sequence
  Description of Artificial Sequence: Synthetic oligonucleotide
uguuuaauauacaauuucc

SEQ ID NO: 2763208 - RNA, 19 nt, Artificial Sequence
  Description of Artificial Sequence: Synthetic oligonucleotide
aucucaaaguuucugaggc

SEQ ID NO: 2763209 - RNA, 19 nt, Artificial Sequence
  Description of Artificial Sequence: Synthetic oligonucleotide
gaaauuauagacgagugag

SEQ ID NO: 2763210 - RNA, 19 nt, Artificial Sequence
  Description of Artificial Sequence: Synthetic oligonucleotide
aaagauaauccuuuugucu

SEQ ID NO: 2763211 - RNA, 19 nt, Artificial Sequence
  Description of Artificial Sequence: Synthetic oligonucleotide
aagauaauccuuuugucug

SEQ ID NO: 2763212 - RNA, 19 nt, Artificial Sequence
  Description of Artificial Sequence: Synthetic oligonucleotide
auauacuuccuuuagaaug

SEQ ID NO: 2763213 - RNA, 19 nt, Artificial Sequence
  Description of Artificial Sequence: Synthetic oligonucleotide
uuaagguuguuuaauauac

SEQ ID NO: 2763214 - RNA, 19 nt, Artificial Sequence
  Description of Artificial Sequence: Synthetic oligonucleotide
aaugcugugaaauuauaga

SEQ ID NO: 2763215 - RNA, 19 nt, Artificial Sequence
  Description of Artificial Sequence: Synthetic oligonucleotide
uccuuuauuguaaagauaa

SEQ ID NO: 2763216 - RNA, 19 nt, Artificial Sequence
  Description of Artificial Sequence: Synthetic oligonucleotide
aauuauagacgagugagag

SEQ ID NO: 2763217 - RNA, 19 nt, Artificial Sequence
  Description of Artificial Sequence: Synthetic oligonucleotide
uuuaauauacaauuuccac

SEQ ID NO: 2763218 - RNA, 19 nt, Artificial Sequence
  Description of Artificial Sequence: Synthetic oligonucleotide
uuaacuaccugcacgaccc

SEQ ID NO: 2763219 - RNA, 19 nt, Artificial Sequence
  Description of Artificial Sequence: Synthetic oligonucleotide
aguauauuuauuaagguug

SEQ ID NO: 2763220 - RNA, 19 nt, Artificial Sequence
  Description of Artificial Sequence: Synthetic oligonucleotide
gacuuuaauagcuaugcag

SEQ ID NO: 2763221 - RNA, 19 nt, Artificial Sequence
  Description of Artificial Sequence: Synthetic oligonucleotide
auagaggagauacaagugg

SEQ ID NO: 2763222 - RNA, 19 nt, Artificial Sequence
  Description of Artificial Sequence: Synthetic oligonucleotide
uuaauagcuaugcaggaca

SEQ ID NO: 2763223 - RNA, 19 nt, Artificial Sequence
  Description of Artificial Sequence: Synthetic oligonucleotide
ugucugacgacaaacagca

SEQ ID NO: 2763224 - RNA, 19 nt, Artificial Sequence
  Description of Artificial Sequence: Synthetic oligonucleotide
uauacuuccuuuagaaugc

SEQ ID NO: 2763225 - RNA, 19 nt, Artificial Sequence
  Description of Artificial Sequence: Synthetic oligonucleotide
uuuuggaaguccuuuauug

SEQ ID NO: 2763226 - RNA, 19 nt, Artificial Sequence
  Description of Artificial Sequence: Synthetic oligonucleotide
augugguuuaacuaccugc

SEQ ID NO: 2763227 - RNA, 19 nt, Artificial Sequence
  Description of Artificial Sequence: Synthetic oligonucleotide
ugcugugaaauuauagacg

SEQ ID NO: 2763228 - RNA, 19 nt, Artificial Sequence
  Description of Artificial Sequence: Synthetic oligonucleotide
uauuaauggagcauguggu

SEQ ID NO: 2763229 - RNA, 19 nt, Artificial Sequence
  Description of Artificial Sequence: Synthetic oligonucleotide
uacaauuuccacuugacau

SEQ ID NO: 2763230 - RNA, 19 nt, Artificial Sequence
  Description of Artificial Sequence: Synthetic oligonucleotide
ugguuuaacuaccugcacg

SEQ ID NO: 2763231 - RNA, 19 nt, Artificial Sequence
  Description of Artificial Sequence: Synthetic oligonucleotide
ucugacgacaaacagcagc

SEQ ID NO: 2763232 - RNA, 19 nt, Artificial Sequence
  Description of Artificial Sequence: Synthetic oligonucleotide
cugaccaagauacauagag

SEQ ID NO: 2763233 - RNA, 19 nt, Artificial Sequence
  Description of Artificial Sequence: Synthetic oligonucleotide
gauacaaguggccaucuag

SEQ ID NO: 2763234 - RNA, 19 nt, Artificial Sequence
  Description of Artificial Sequence: Synthetic oligonucleotide
uaauauacaauuuccacuu

SEQ ID NO: 2763235 - RNA, 19 nt, Artificial Sequence
  Description of Artificial Sequence: Synthetic oligonucleotide
aauuccauuucuucuugag

SEQ ID NO: 2763236 - RNA, 19 nt, Artificial Sequence
  Description of Artificial Sequence: Synthetic oligonucleotide
uauuuauuaagguuguuua

SEQ ID NO: 2763237 - RNA, 19 nt, Artificial Sequence
  Description of Artificial Sequence: Synthetic oligonucleotide
acauagaggagauacaagu

SEQ ID NO: 2763238 - RNA, 19 nt, Artificial Sequence
  Description of Artificial Sequence: Synthetic oligonucleotide
aauccuuuugucugacgac

SEQ ID NO: 2763239 - RNA, 19 nt, Artificial Sequence
  Description of Artificial Sequence: Synthetic oligonucleotide
ugagauauagguuuccuuc

SEQ ID NO: 2763240 - RNA, 19 nt, Artificial Sequence
  Description of Artificial Sequence: Synthetic oligonucleotide
uuauuguaaagauaauccu

SEQ ID NO: 2763241 - RNA, 19 nt, Artificial Sequence
  Description of Artificial Sequence: Synthetic oligonucleotide
uguaaagauaauccuuuug

SEQ ID NO: 2763242 - RNA, 19 nt, Artificial Sequence
  Description of Artificial Sequence: Synthetic oligonucleotide
uccacguuggauaaauucc

SEQ ID NO: 2763243 - RNA, 19 nt, Artificial Sequence
  Description of Artificial Sequence: Synthetic oligonucleotide
uaauccuuuugucugacga

SEQ ID NO: 2763244 - RNA, 19 nt, Artificial Sequence
  Description of Artificial Sequence: Synthetic oligonucleotide
uuugucugacgacaaacag

SEQ ID NO: 2763245 - RNA, 19 nt, Artificial Sequence
  Description of Artificial Sequence: Synthetic oligonucleotide
uuuaacuaccugcacgacc

SEQ ID NO: 2763246 - RNA, 19 nt, Artificial Sequence
  Description of Artificial Sequence: Synthetic oligonucleotide
ugugguuuaacuaccugca

SEQ ID NO: 2763247 - RNA, 19 nt, Artificial Sequence
  Description of Artificial Sequence: Synthetic oligonucleotide
uuggauaaauuccauuucu

SEQ ID NO: 2763248 - RNA, 19 nt, Artificial Sequence
  Description of Artificial Sequence: Synthetic oligonucleotide
ugugaaauuauagacgagu

SEQ ID NO: 2763249 - RNA, 19 nt, Artificial Sequence
  Description of Artificial Sequence: Synthetic oligonucleotide
ugaaauuauagacgaguga

SEQ ID NO: 2763250 - RNA, 19 nt, Artificial Sequence
  Description of Artificial Sequence: Synthetic oligonucleotide
uuuugcaguauauuuauua

SEQ ID NO: 2763251 - RNA, 19 nt, Artificial Sequence
  Description of Artificial Sequence: Synthetic oligonucleotide
aagguuguuuaauauacaa

SEQ ID NO: 2763252 - RNA, 19 nt, Artificial Sequence
  Description of Artificial Sequence: Synthetic oligonucleotide
ucagggaaccuuauuaaug

SEQ ID NO: 2763253 - RNA, 19 nt, Artificial Sequence
  Description of Artificial Sequence: Synthetic oligonucleotide
gaccaagauacauagagga

SEQ ID NO: 2763254 - RNA, 19 nt, Artificial Sequence
  Description of Artificial Sequence: Synthetic oligonucleotide
aaaggugacuuuaauagcu

SEQ ID NO: 2763255 - RNA, 19 nt, Artificial Sequence
  Description of Artificial Sequence: Synthetic oligonucleotide
agcuaugcaggacagcucg

SEQ ID NO: 2763256 - RNA, 19 nt, Artificial Sequence
  Description of Artificial Sequence: Synthetic oligonucleotide
ugaccaagauacauagagg

SEQ ID NO: 2763257 - RNA, 19 nt, Artificial Sequence
  Description of Artificial Sequence: Synthetic oligonucleotide
gaucucaaaguuucugagg

SEQ ID NO: 2763258 - RNA, 19 nt, Artificial Sequence
  Description of Artificial Sequence: Synthetic oligonucleotide
uauacaauuuccacuugac

SEQ ID NO: 2763259 - RNA, 19 nt, Artificial Sequence
  Description of Artificial Sequence: Synthetic oligonucleotide
aaaucuggggauauacuuc

SEQ ID NO: 2763260 - RNA, 19 nt, Artificial Sequence
  Description of Artificial Sequence: Synthetic oligonucleotide
uugcaguauauuuauuaag

SEQ ID NO: 2763261 - RNA, 19 nt, Artificial Sequence
  Description of Artificial Sequence: Synthetic oligonucleotide
uuuugucugacgacaaaca

SEQ ID NO: 2763262 - RNA, 19 nt, Artificial Sequence
  Description of Artificial Sequence: Synthetic oligonucleotide
uuaggauugucucuucugu

SEQ ID NO: 2763263 - RNA, 19 nt, Artificial Sequence
  Description of Artificial Sequence: Synthetic oligonucleotide
auuauagacgagugagagg

SEQ ID NO: 2763264 - RNA, 19 nt, Artificial Sequence
  Description of Artificial Sequence: Synthetic oligonucleotide
cuuuauuguaaagauaauc

SEQ ID NO: 2763265 - RNA, 19 nt, Artificial Sequence
  Description of Artificial Sequence: Synthetic oligonucleotide
uagaggagauacaaguggc

SEQ ID NO: 2763266 - RNA, 19 nt, Artificial Sequence
  Description of Artificial Sequence: Synthetic oligonucleotide
uugucugacgacaaacagc

SEQ ID NO: 2763267 - RNA, 19 nt, Artificial Sequence
  Description of Artificial Sequence: Synthetic oligonucleotide
aaguccuuuauuguaaaga

SEQ ID NO: 2763268 - RNA, 19 nt, Artificial Sequence
  Description of Artificial Sequence: Synthetic oligonucleotide
cugacgacaaacagcagcc

SEQ ID NO: 2763269 - RNA, 19 nt, Artificial Sequence
  Description of Artificial Sequence: Synthetic oligonucleotide
agcugaccaagauacauag

SEQ ID NO: 2763270 - RNA, 19 nt, Artificial Sequence
  Description of Artificial Sequence: Synthetic oligonucleotide
uuuaggauugucucuucug

SEQ ID NO: 2763271 - RNA, 19 nt, Artificial Sequence
  Description of Artificial Sequence: Synthetic oligonucleotide
agaucucaaaguuucugag

SEQ ID NO: 2763272 - RNA, 19 nt, Artificial Sequence
  Description of Artificial Sequence: Synthetic oligonucleotide
accugcacgacccugcugg

SEQ ID NO: 2763273 - RNA, 19 nt, Artificial Sequence
  Description of Artificial Sequence: Synthetic oligonucleotide
uuuauuaagguuguuuaau

SEQ ID NO: 2763274 - RNA, 19 nt, Artificial Sequence
  Description of Artificial Sequence: Synthetic oligonucleotide
aauauacaauuuccacuug

SEQ ID NO: 2763275 - RNA, 19 nt, Artificial Sequence
  Description of Artificial Sequence: Synthetic oligonucleotide
gagaggguagcccagaaga

SEQ ID NO: 2763276 - RNA, 19 nt, Artificial Sequence
  Description of Artificial Sequence: Synthetic oligonucleotide
uacauagaggagauacaag

SEQ ID NO: 2763277 - RNA, 19 nt, Artificial Sequence
  Description of Artificial Sequence: Synthetic oligonucleotide
uguauuucugagguaaugu

SEQ ID NO: 2763278 - RNA, 19 nt, Artificial Sequence
  Description of Artificial Sequence: Synthetic oligonucleotide
gugacuuuaauagcuaugc

SEQ ID NO: 2763279 - RNA, 19 nt, Artificial Sequence
  Description of Artificial Sequence: Synthetic oligonucleotide
uuuuaguauuucugcagug

SEQ ID NO: 2763280 - RNA, 19 nt, Artificial Sequence
  Description of Artificial Sequence: Synthetic oligonucleotide
auauacaauuuccacuuga

SEQ ID NO: 2763281 - RNA, 19 nt, Artificial Sequence
  Description of Artificial Sequence: Synthetic oligonucleotide
agcaaaucuggggauauac

SEQ ID NO: 2763282 - RNA, 19 nt, Artificial Sequence
  Description of Artificial Sequence: Synthetic oligonucleotide
ucuagaguuucuauacuuc

SEQ ID NO: 2763283 - RNA, 19 nt, Artificial Sequence
  Description of Artificial Sequence: Synthetic oligonucleotide
uuaguauuucugcaguguc

SEQ ID NO: 2763284 - RNA, 19 nt, Artificial Sequence
  Description of Artificial Sequence: Synthetic oligonucleotide
gaaugcugugaaauuauag

SEQ ID NO: 2763285 - RNA, 19 nt, Artificial Sequence
  Description of Artificial Sequence: Synthetic oligonucleotide
uuauuaagguuguuuaaua

SEQ ID NO: 2763286 - RNA, 19 nt, Artificial Sequence
  Description of Artificial Sequence: Synthetic oligonucleotide
uaauagcuaugcaggacag

SEQ ID NO: 2763287 - RNA, 19 nt, Artificial Sequence
  Description of Artificial Sequence: Synthetic oligonucleotide
uuuccuucuguauuucuga

SEQ ID NO: 2763288 - RNA, 19 nt, Artificial Sequence
  Description of Artificial Sequence: Synthetic oligonucleotide
uaugcaggacagcucgugg

SEQ ID NO: 2763289 - RNA, 19 nt, Artificial Sequence
  Description of Artificial Sequence: Synthetic oligonucleotide
gagcaugugguuuaacuac

SEQ ID NO: 2763290 - RNA, 19 nt, Artificial Sequence
  Description of Artificial Sequence: Synthetic oligonucleotide
guaaagauaauccuuuugu

SEQ ID NO: 2763291 - RNA, 19 nt, Artificial Sequence
  Description of Artificial Sequence: Synthetic oligonucleotide
uugacauuuuggaaguccu

SEQ ID NO: 2763292 - RNA, 19 nt, Artificial Sequence
  Description of Artificial Sequence: Synthetic oligonucleotide
auuaagguuguuuaauaua

SEQ ID NO: 2763293 - RNA, 19 nt, Artificial Sequence
  Description of Artificial Sequence: Synthetic oligonucleotide
aauagcuaugcaggacagc

SEQ ID NO: 2763294 - RNA, 19 nt, Artificial Sequence
  Description of Artificial Sequence: Synthetic oligonucleotide
uuuggaaguccuuuauugu

SEQ ID NO: 2763295 - RNA, 19 nt, Artificial Sequence
  Description of Artificial Sequence: Synthetic oligonucleotide
uucuggaccuccacguugg

SEQ ID NO: 2763296 - RNA, 19 nt, Artificial Sequence
  Description of Artificial Sequence: Synthetic oligonucleotide
uccuuuagaaugcugugaa

SEQ ID NO: 2763297 - RNA, 19 nt, Artificial Sequence
  Description of Artificial Sequence: Synthetic oligonucleotide
aguccuuuauuguaaagau

SEQ ID NO: 2763298 - RNA, 19 nt, Artificial Sequence
  Description of Artificial Sequence: Synthetic oligonucleotide
uuucugcagugucuggugg

SEQ ID NO: 2763299 - RNA, 19 nt, Artificial Sequence
  Description of Artificial Sequence: Synthetic oligonucleotide
uauuucugagguaauguuu

SEQ ID NO: 2763300 - RNA, 19 nt, Artificial Sequence
  Description of Artificial Sequence: Synthetic oligonucleotide
uucuguauuucugagguaa

SEQ ID NO: 2763301 - RNA, 19 nt, Artificial Sequence
  Description of Artificial Sequence: Synthetic oligonucleotide
cuugcugcccaucaugacc

SEQ ID NO: 2763302 - RNA, 19 nt, Artificial Sequence
  Description of Artificial Sequence: Synthetic oligonucleotide
cugaguuuaggauugucuc

SEQ ID NO: 2763303 - RNA, 19 nt, Artificial Sequence
  Description of Artificial Sequence: Synthetic oligonucleotide
ugucugguggcccuggaug

SEQ ID NO: 2763304 - RNA, 19 nt, Artificial Sequence
  Description of Artificial Sequence: Synthetic oligonucleotide
auuuccacuugacauuuug

SEQ ID NO: 2763305 - RNA, 19 nt, Artificial Sequence
  Description of Artificial Sequence: Synthetic oligonucleotide
uuuaguauuucugcagugu

SEQ ID NO: 2763306 - RNA, 19 nt, Artificial Sequence
  Description of Artificial Sequence: Synthetic oligonucleotide
aacagcagccacaaugauc

SEQ ID NO: 2763307 - RNA, 19 nt, Artificial Sequence
  Description of Artificial Sequence: Synthetic oligonucleotide
ugaggcacugaguuuagga

SEQ ID NO: 2763308 - RNA, 19 nt, Artificial Sequence
  Description of Artificial Sequence: Synthetic oligonucleotide
auugucucuucugucaggg

SEQ ID NO: 2763309 - RNA, 19 nt, Artificial Sequence
  Description of Artificial Sequence: Synthetic oligonucleotide
cauagaggagauacaagug

SEQ ID NO: 2763310 - RNA, 19 nt, Artificial Sequence
  Description of Artificial Sequence: Synthetic oligonucleotide
uacaaguggccaucuagag

SEQ ID NO: 2763311 - RNA, 19 nt, Artificial Sequence
  Description of Artificial Sequence: Synthetic oligonucleotide
ugcacgacccugcuggcgg

SEQ ID NO: 2763312 - RNA, 19 nt, Artificial Sequence
  Description of Artificial Sequence: Synthetic oligonucleotide
auagcuaugcaggacagcu

SEQ ID NO: 2763313 - RNA, 19 nt, Artificial Sequence
  Description of Artificial Sequence: Synthetic oligonucleotide
gaguuucuauacuucauuc

SEQ ID NO: 2763314 - RNA, 19 nt, Artificial Sequence
  Description of Artificial Sequence: Synthetic oligonucleotide
ugaguuuaggauugucucu

SEQ ID NO: 2763315 - RNA, 19 nt, Artificial Sequence
  Description of Artificial Sequence: Synthetic oligonucleotide
auuuauuaagguuguuuaa

SEQ ID NO: 2763316 - RNA, 19 nt, Artificial Sequence
  Description of Artificial Sequence: Synthetic oligonucleotide
augaucauucuggaccucc

SEQ ID NO: 2763317 - RNA, 19 nt, Artificial Sequence
  Description of Artificial Sequence: Synthetic oligonucleotide
uuuaauagcuaugcaggac

SEQ ID NO: 2763318 - RNA, 19 nt, Artificial Sequence
  Description of Artificial Sequence: Synthetic oligonucleotide
uaagguuguuuaauauaca

SEQ ID NO: 2763319 - RNA, 19 nt, Artificial Sequence
  Description of Artificial Sequence: Synthetic oligonucleotide
uuagaaugcugugaaauua

SEQ ID NO: 2763320 - RNA, 19 nt, Artificial Sequence
  Description of Artificial Sequence: Synthetic oligonucleotide
uggagcaugugguuuaacu

SEQ ID NO: 2763321 - RNA, 19 nt, Artificial Sequence
  Description of Artificial Sequence: Synthetic oligonucleotide
cuugacauuuuggaagucc

SEQ ID NO: 2763322 - RNA, 19 nt, Artificial Sequence
  Description of Artificial Sequence: Synthetic oligonucleotide
gccacaaugaucauucugg

SEQ ID NO: 2763323 - RNA, 19 nt, Artificial Sequence
  Description of Artificial Sequence: Synthetic oligonucleotide
agcccagaagaucucaaag

SEQ ID NO: 2763324 - RNA, 19 nt, Artificial Sequence
  Description of Artificial Sequence: Synthetic oligonucleotide
uaguauuucugcagugucu

SEQ ID NO: 2763325 - RNA, 19 nt, Artificial Sequence
  Description of Artificial Sequence: Synthetic oligonucleotide
aaauuauagacgagugaga

SEQ ID NO: 2763326 - RNA, 19 nt, Artificial Sequence
  Description of Artificial Sequence: Synthetic oligonucleotide
guuuaauauacaauuucca

SEQ ID NO: 2763327 - RNA, 19 nt, Artificial Sequence
  Description of Artificial Sequence: Synthetic oligonucleotide
auauuuauuaagguuguuu

SEQ ID NO: 2763328 - RNA, 19 nt, Artificial Sequence
  Description of Artificial Sequence: Synthetic oligonucleotide
uagaaugcugugaaauuau

SEQ ID NO: 2763329 - RNA, 19 nt, Artificial Sequence
  Description of Artificial Sequence: Synthetic oligonucleotide
aaauuccauuucuucuuga

SEQ ID NO: 2763330 - RNA, 19 nt, Artificial Sequence
  Description of Artificial Sequence: Synthetic oligonucleotide
gaaccuuauuaauggagca

SEQ ID NO: 2763331 - RNA, 19 nt, Artificial Sequence
  Description of Artificial Sequence: Synthetic oligonucleotide
aggauugucucuucuguca

SEQ ID NO: 2763332 - RNA, 19 nt, Artificial Sequence
  Description of Artificial Sequence: Synthetic oligonucleotide
auagguuuccuucuguauu

SEQ ID NO: 2763333 - RNA, 19 nt, Artificial Sequence
  Description of Artificial Sequence: Synthetic oligonucleotide
ugacuuuaauagcuaugca

SEQ ID NO: 2763334 - RNA, 19 nt, Artificial Sequence
  Description of Artificial Sequence: Synthetic oligonucleotide
gauugucucuucugucagg

SEQ ID NO: 2763335 - RNA, 19 nt, Artificial Sequence
  Description of Artificial Sequence: Synthetic oligonucleotide
accuuauuaauggagcaug

SEQ ID NO: 2763336 - RNA, 19 nt, Artificial Sequence
  Description of Artificial Sequence: Synthetic oligonucleotide
cuuuugucugacgacaaac

SEQ ID NO: 2763337 - RNA, 19 nt, Artificial Sequence
  Description of Artificial Sequence: Synthetic oligonucleotide
ugucagggaaccuuauuaa

SEQ ID NO: 2763338 - RNA, 19 nt, Artificial Sequence
  Description of Artificial Sequence: Synthetic oligonucleotide
uuucuauacuucauucuuu

SEQ ID NO: 2763339 - RNA, 19 nt, Artificial Sequence
  Description of Artificial Sequence: Synthetic oligonucleotide
uucuauacuucauucuuuu

SEQ ID NO: 2763340 - RNA, 19 nt, Artificial Sequence
  Description of Artificial Sequence: Synthetic oligonucleotide
agcaugugguuuaacuacc

SEQ ID NO: 2763341 - RNA, 19 nt, Artificial Sequence
  Description of Artificial Sequence: Synthetic oligonucleotide
gugaaauuauagacgagug

SEQ ID NO: 2763342 - RNA, 19 nt, Artificial Sequence
  Description of Artificial Sequence: Synthetic oligonucleotide
uagacgagugagaggguag

SEQ ID NO: 2763343 - RNA, 19 nt, Artificial Sequence
  Description of Artificial Sequence: Synthetic oligonucleotide
caaacagcagccacaauga

SEQ ID NO: 2763344 - RNA, 19 nt, Artificial Sequence
  Description of Artificial Sequence: Synthetic oligonucleotide
uauagguuuccuucuguau

SEQ ID NO: 2763345 - RNA, 19 nt, Artificial Sequence
  Description of Artificial Sequence: Synthetic oligonucleotide
agaggagauacaaguggcc

SEQ ID NO: 2763346 - RNA, 19 nt, Artificial Sequence
  Description of Artificial Sequence: Synthetic oligonucleotide
cucaaaguuucugaggcac

SEQ ID NO: 2763347 - RNA, 19 nt, Artificial Sequence
  Description of Artificial Sequence: Synthetic oligonucleotide
uuggaaguccuuuauugua

SEQ ID NO: 2763348 - RNA, 19 nt, Artificial Sequence
  Description of Artificial Sequence: Synthetic oligonucleotide
guuggauaaauuccauuuc

SEQ ID NO: 2763349 - RNA, 19 nt, Artificial Sequence
  Description of Artificial Sequence: Synthetic oligonucleotide
gcugugaaauuauagacga

SEQ ID NO: 2763350 - RNA, 19 nt, Artificial Sequence
  Description of Artificial Sequence: Synthetic oligonucleotide
uccacuugacauuuuggaa

SEQ ID NO: 2763351 - RNA, 19 nt, Artificial Sequence
  Description of Artificial Sequence: Synthetic oligonucleotide
ugcaggacagcucguggag

SEQ ID NO: 2763352 - RNA, 19 nt, Artificial Sequence
  Description of Artificial Sequence: Synthetic oligonucleotide
auuucugcagugucuggug

SEQ ID NO: 2763353 - RNA, 19 nt, Artificial Sequence
  Description of Artificial Sequence: Synthetic oligonucleotide
auacauagaggagauacaa

SEQ ID NO: 2763354 - RNA, 19 nt, Artificial Sequence
  Description of Artificial Sequence: Synthetic oligonucleotide
cuccacguuggauaaauuc

SEQ ID NO: 2763355 - RNA, 19 nt, Artificial Sequence
  Description of Artificial Sequence: Synthetic oligonucleotide
acuuccuuuagaaugcugu

SEQ ID NO: 2763356 - RNA, 19 nt, Artificial Sequence
  Description of Artificial Sequence: Synthetic oligonucleotide
cuagaguuucuauacuuca

SEQ ID NO: 2763357 - RNA, 19 nt, Artificial Sequence
  Description of Artificial Sequence: Synthetic oligonucleotide
ccacuugacauuuuggaag

SEQ ID NO: 2763358 - RNA, 19 nt, Artificial Sequence
  Description of Artificial Sequence: Synthetic oligonucleotide
gaagccaucuugcugccca

SEQ ID NO: 2763359 - RNA, 19 nt, Artificial Sequence
  Description of Artificial Sequence: Synthetic oligonucleotide
auucuggaccuccacguug

SEQ ID NO: 2763360 - RNA, 19 nt, Artificial Sequence
  Description of Artificial Sequence: Synthetic oligonucleotide
auaauccuuuugucugacg

SEQ ID NO: 2763361 - RNA, 19 nt, Artificial Sequence
  Description of Artificial Sequence: Synthetic oligonucleotide
acgagugagaggguagccc

SEQ ID NO: 2763362 - RNA, 19 nt, Artificial Sequence
  Description of Artificial Sequence: Synthetic oligonucleotide
uuccuucuguauuucugag

SEQ ID NO: 2763363 - RNA, 19 nt, Artificial Sequence
  Description of Artificial Sequence: Synthetic oligonucleotide
ugagaggguagcccagaag

SEQ ID NO: 2763364 - RNA, 19 nt, Artificial Sequence
  Description of Artificial Sequence: Synthetic oligonucleotide
aucuagaguuucuauacuu

SEQ ID NO: 2763365 - RNA, 19 nt, Artificial Sequence
  Description of Artificial Sequence: Synthetic oligonucleotide
uggaccuccacguuggaua

SEQ ID NO: 2763366 - RNA, 19 nt, Artificial Sequence
  Description of Artificial Sequence: Synthetic oligonucleotide
uauuucugcagugucuggu

SEQ ID NO: 2763367 - RNA, 19 nt, Artificial Sequence
  Description of Artificial Sequence: Synthetic oligonucleotide
ggauauacuuccuuuagaa

SEQ ID NO: 2763368 - RNA, 19 nt, Artificial Sequence
  Description of Artificial Sequence: Synthetic oligonucleotide
cuuccuuuagaaugcugug

SEQ ID NO: 2763369 - RNA, 19 nt, Artificial Sequence
  Description of Artificial Sequence: Synthetic oligonucleotide
gacgacaaacagcagccac

SEQ ID NO: 2763370 - RNA, 19 nt, Artificial Sequence
  Description of Artificial Sequence: Synthetic oligonucleotide
ggauaaauuccauuucuuc

SEQ ID NO: 2763371 - RNA, 19 nt, Artificial Sequence
  Description of Artificial Sequence: Synthetic oligonucleotide
acuaccugcacgacccugc

SEQ ID NO: 2763372 - RNA, 19 nt, Artificial Sequence
  Description of Artificial Sequence: Synthetic oligonucleotide
cuuuaauagcuaugcagga

SEQ ID NO: 2763373 - RNA, 19 nt, Artificial Sequence
  Description of Artificial Sequence: Synthetic oligonucleotide
auuaauggagcaugugguu

SEQ ID NO: 2763374 - RNA, 19 nt, Artificial Sequence
  Description of Artificial Sequence: Synthetic oligonucleotide
uagaguuucuauacuucau

SEQ ID NO: 2763375 - RNA, 19 nt, Artificial Sequence
  Description of Artificial Sequence: Synthetic oligonucleotide
gguuuaacuaccugcacga

SEQ ID NO: 2763376 - RNA, 19 nt, Artificial Sequence
  Description of Artificial Sequence: Synthetic oligonucleotide
ucaaaguuucugaggcacu

SEQ ID NO: 2763377 - RNA, 19 nt, Artificial Sequence
  Description of Artificial Sequence: Synthetic oligonucleotide
agccacaaugaucauucug

SEQ ID NO: 2763378 - RNA, 19 nt, Artificial Sequence
  Description of Artificial Sequence: Synthetic oligonucleotide
aguuuaggauugucucuuc

SEQ ID NO: 2763379 - RNA, 19 nt, Artificial Sequence
  Description of Artificial Sequence: Synthetic oligonucleotide
acaaguggccaucuagagu

SEQ ID NO: 2763380 - RNA, 19 nt, Artificial Sequence
  Description of Artificial Sequence: Synthetic oligonucleotide
gguuguuuaauauacaauu

SEQ ID NO: 2763381 - RNA, 19 nt, Artificial Sequence
  Description of Artificial Sequence: Synthetic oligonucleotide
ggaaccuuauuaauggagc

SEQ ID NO: 2763382 - RNA, 19 nt, Artificial Sequence
  Description of Artificial Sequence: Synthetic oligonucleotide
acugaguuuaggauugucu

SEQ ID NO: 2763383 - RNA, 19 nt, Artificial Sequence
  Description of Artificial Sequence: Synthetic oligonucleotide
uuccuuuagaaugcuguga

SEQ ID NO: 2763384 - RNA, 19 nt, Artificial Sequence
  Description of Artificial Sequence: Synthetic oligonucleotide
agacgagugagaggguagc

SEQ ID NO: 2763385 - RNA, 19 nt, Artificial Sequence
  Description of Artificial Sequence: Synthetic oligonucleotide
cuuauuaauggagcaugug

SEQ ID NO: 2763386 - RNA, 19 nt, Artificial Sequence
  Description of Artificial Sequence: Synthetic oligonucleotide
uucuugagauauagguuuc

SEQ ID NO: 2763387 - RNA, 19 nt, Artificial Sequence
  Description of Artificial Sequence: Synthetic oligonucleotide
ccaucuagaguuucuauac

SEQ ID NO: 2763388 - RNA, 19 nt, Artificial Sequence
  Description of Artificial Sequence: Synthetic oligonucleotide
ugaucauucuggaccucca

SEQ ID NO: 2763389 - RNA, 19 nt, Artificial Sequence
  Description of Artificial Sequence: Synthetic oligonucleotide
uggaugcaccagcaaaucu

SEQ ID NO: 2763390 - RNA, 19 nt, Artificial Sequence
  Description of Artificial Sequence: Synthetic oligonucleotide
uaauggagcaugugguuua

SEQ ID NO: 2763391 - RNA, 19 nt, Artificial Sequence
  Description of Artificial Sequence: Synthetic oligonucleotide
uucugaggcacugaguuua

SEQ ID NO: 2763392 - RNA, 19 nt, Artificial Sequence
  Description of Artificial Sequence: Synthetic oligonucleotide
aaccuuauuaauggagcau

SEQ ID NO: 2763393 - RNA, 19 nt, Artificial Sequence
  Description of Artificial Sequence: Synthetic oligonucleotide
uuaauggagcaugugguuu

SEQ ID NO: 2763394 - RNA, 19 nt, Artificial Sequence
  Description of Artificial Sequence: Synthetic oligonucleotide
ucuugagauauagguuucc

SEQ ID NO: 2763395 - RNA, 19 nt, Artificial Sequence
  Description of Artificial Sequence: Synthetic oligonucleotide
ucucaaaguuucugaggca

SEQ ID NO: 2763396 - RNA, 19 nt, Artificial Sequence
  Description of Artificial Sequence: Synthetic oligonucleotide
cuggcggaagccaucuugc

SEQ ID NO: 2763397 - RNA, 19 nt, Artificial Sequence
  Description of Artificial Sequence: Synthetic oligonucleotide
cacaaugaucauucuggac

SEQ ID NO: 2763398 - RNA, 19 nt, Artificial Sequence
  Description of Artificial Sequence: Synthetic oligonucleotide
guuuccuucuguauuucug

SEQ ID NO: 2763399 - RNA, 19 nt, Artificial Sequence
  Description of Artificial Sequence: Synthetic oligonucleotide
gauacauagaggagauaca

SEQ ID NO: 2763400 - RNA, 19 nt, Artificial Sequence
  Description of Artificial Sequence: Synthetic oligonucleotide
uugagauauagguuuccuu

SEQ ID NO: 2763401 - RNA, 19 nt, Artificial Sequence
  Description of Artificial Sequence: Synthetic oligonucleotide
auuucugagguaauguuuu

SEQ ID NO: 2763402 - RNA, 19 nt, Artificial Sequence
  Description of Artificial Sequence: Synthetic oligonucleotide
auauagguuuccuucugua

SEQ ID NO: 2763403 - RNA, 19 nt, Artificial Sequence
  Description of Artificial Sequence: Synthetic oligonucleotide
caucuugcugcccaucaug

SEQ ID NO: 2763404 - RNA, 19 nt, Artificial Sequence
  Description of Artificial Sequence: Synthetic oligonucleotide
auuuuggaaguccuuuauu

SEQ ID NO: 2763405 - RNA, 19 nt, Artificial Sequence
  Description of Artificial Sequence: Synthetic oligonucleotide
cuucuugagauauagguuu

SEQ ID NO: 2763406 - RNA, 19 nt, Artificial Sequence
  Description of Artificial Sequence: Synthetic oligonucleotide
aaugaucauucuggaccuc

SEQ ID NO: 2763407 - RNA, 19 nt, Artificial Sequence
  Description of Artificial Sequence: Synthetic oligonucleotide
aaaguuucugaggcacuga

SEQ ID NO: 2763408 - RNA, 19 nt, Artificial Sequence
  Description of Artificial Sequence: Synthetic oligonucleotide
uggagaagcugaccaagau

SEQ ID NO: 2763409 - RNA, 19 nt, Artificial Sequence
  Description of Artificial Sequence: Synthetic oligonucleotide
caaaguuucugaggcacug

SEQ ID NO: 2763410 - RNA, 19 nt, Artificial Sequence
  Description of Artificial Sequence: Synthetic oligonucleotide
gaggagauacaaguggcca

SEQ ID NO: 2763411 - RNA, 19 nt, Artificial Sequence
  Description of Artificial Sequence: Synthetic oligonucleotide
uacuuccuuuagaaugcug

SEQ ID NO: 2763412 - RNA, 19 nt, Artificial Sequence
  Description of Artificial Sequence: Synthetic oligonucleotide
auacaaguggccaucuaga

SEQ ID NO: 2763413 - RNA, 19 nt, Artificial Sequence
  Description of Artificial Sequence: Synthetic oligonucleotide
ucugaggcacugaguuuag

SEQ ID NO: 2763414 - RNA, 19 nt, Artificial Sequence
  Description of Artificial Sequence: Synthetic oligonucleotide
gauaauccuuuugucugac

SEQ ID NO: 2763415 - RNA, 19 nt, Artificial Sequence
  Description of Artificial Sequence: Synthetic oligonucleotide
ggggauauacuuccuuuag

SEQ ID NO: 2763416 - RNA, 19 nt, Artificial Sequence
  Description of Artificial Sequence: Synthetic oligonucleotide
gagauauagguuuccuucu

SEQ ID NO: 2763417 - RNA, 19 nt, Artificial Sequence
  Description of Artificial Sequence: Synthetic oligonucleotide
auccuuuugucugacgaca

SEQ ID NO: 2763418 - RNA, 19 nt, Artificial Sequence
  Description of Artificial Sequence: Synthetic oligonucleotide
cucguggagaagcugacca

SEQ ID NO: 2763419 - RNA, 19 nt, Artificial Sequence
  Description of Artificial Sequence: Synthetic oligonucleotide
guuucugaggcacugaguu

SEQ ID NO: 2763420 - RNA, 19 nt, Artificial Sequence
  Description of Artificial Sequence: Synthetic oligonucleotide
ucuguauuucugagguaau

SEQ ID NO: 2763421 - RNA, 19 nt, Artificial Sequence
  Description of Artificial Sequence: Synthetic oligonucleotide
uaggauugucucuucuguc

SEQ ID NO: 2763422 - RNA, 19 nt, Artificial Sequence
  Description of Artificial Sequence: Synthetic oligonucleotide
caaguggccaucuagaguu

SEQ ID NO: 2763423 - RNA, 19 nt, Artificial Sequence
  Description of Artificial Sequence: Synthetic oligonucleotide
ucuucugucagggaaccuu

SEQ ID NO: 2763424 - RNA, 19 nt, Artificial Sequence
  Description of Artificial Sequence: Synthetic oligonucleotide
acauuuuggaaguccuuua

SEQ ID NO: 2763425 - RNA, 19 nt, Artificial Sequence
  Description of Artificial Sequence: Synthetic oligonucleotide
accaagauacauagaggag

SEQ ID NO: 2763426 - RNA, 19 nt, Artificial Sequence
  Description of Artificial Sequence: Synthetic oligonucleotide
gaucauucuggaccuccac

SEQ ID NO: 2763427 - RNA, 19 nt, Artificial Sequence
  Description of Artificial Sequence: Synthetic oligonucleotide
cugugaaauuauagacgag

SEQ ID NO: 2763428 - RNA, 19 nt, Artificial Sequence
  Description of Artificial Sequence: Synthetic oligonucleotide
uccuuuugucugacgacaa

SEQ ID NO: 2763429 - RNA, 19 nt, Artificial Sequence
  Description of Artificial Sequence: Synthetic oligonucleotide
uggggauauacuuccuuua

SEQ ID NO: 2763430 - RNA, 19 nt, Artificial Sequence
  Description of Artificial Sequence: Synthetic oligonucleotide
ucuggggauauacuuccuu

SEQ ID NO: 2763431 - RNA, 19 nt, Artificial Sequence
  Description of Artificial Sequence: Synthetic oligonucleotide
gauauacuuccuuuagaau

SEQ ID NO: 2763432 - RNA, 19 nt, Artificial Sequence
  Description of Artificial Sequence: Synthetic oligonucleotide
caugugguuuaacuaccug

SEQ ID NO: 2763433 - RNA, 19 nt, Artificial Sequence
  Description of Artificial Sequence: Synthetic oligonucleotide
aggguagcccagaagaucu

SEQ ID NO: 2763434 - RNA, 19 nt, Artificial Sequence
  Description of Artificial Sequence: Synthetic oligonucleotide
aggagauacaaguggccau

SEQ ID NO: 2763435 - RNA, 19 nt, Artificial Sequence
  Description of Artificial Sequence: Synthetic oligonucleotide
gggaaccuuauuaauggag

SEQ ID NO: 2763436 - RNA, 19 nt, Artificial Sequence
  Description of Artificial Sequence: Synthetic oligonucleotide
ggauugucucuucugucag

SEQ ID NO: 2763437 - RNA, 19 nt, Artificial Sequence
  Description of Artificial Sequence: Synthetic oligonucleotide
aggcacugaguuuaggauu

SEQ ID NO: 2763438 - RNA, 19 nt, Artificial Sequence
  Description of Artificial Sequence: Synthetic oligonucleotide
cuguauuucugagguaaug

SEQ ID NO: 2763439 - RNA, 19 nt, Artificial Sequence
  Description of Artificial Sequence: Synthetic oligonucleotide
gucugguggcccuggaugc

SEQ ID NO: 2763440 - RNA, 19 nt, Artificial Sequence
  Description of Artificial Sequence: Synthetic oligonucleotide
augcaggacagcucgugga

SEQ ID NO: 2763441 - RNA, 19 nt, Artificial Sequence
  Description of Artificial Sequence: Synthetic oligonucleotide
aggugacuuuaauagcuau

SEQ ID NO: 2763442 - RNA, 19 nt, Artificial Sequence
  Description of Artificial Sequence: Synthetic oligonucleotide
cuuuagaaugcugugaaau

SEQ ID NO: 2763443 - RNA, 19 nt, Artificial Sequence
  Description of Artificial Sequence: Synthetic oligonucleotide
cugucagggaaccuuauua

SEQ ID NO: 2763444 - RNA, 19 nt, Artificial Sequence
  Description of Artificial Sequence: Synthetic oligonucleotide
uauagacgagugagagggu

SEQ ID NO: 2763445 - RNA, 19 nt, Artificial Sequence
  Description of Artificial Sequence: Synthetic oligonucleotide
ugacauuuuggaaguccuu

SEQ ID NO: 2763446 - RNA, 19 nt, Artificial Sequence
  Description of Artificial Sequence: Synthetic oligonucleotide
agggaaccuuauuaaugga

SEQ ID NO: 2763447 - RNA, 19 nt, Artificial Sequence
  Description of Artificial Sequence: Synthetic oligonucleotide
ucugucagggaaccuuauu

SEQ ID NO: 2763448 - RNA, 19 nt, Artificial Sequence
  Description of Artificial Sequence: Synthetic oligonucleotide
aggggcagcuuccggggcg

SEQ ID NO: 2763449 - RNA, 19 nt, Artificial Sequence
  Description of Artificial Sequence: Synthetic oligonucleotide
aacuaccugcacgacccug

SEQ ID NO: 2763450 - RNA, 19 nt, Artificial Sequence
  Description of Artificial Sequence: Synthetic oligonucleotide
ggcacugaguuuaggauug

SEQ ID NO: 2763451 - RNA, 19 nt, Artificial Sequence
  Description of Artificial Sequence: Synthetic oligonucleotide
gcagccacaaugaucauuc

SEQ ID NO: 2763452 - RNA, 19 nt, Artificial Sequence
  Description of Artificial Sequence: Synthetic oligonucleotide
ucuugcugcccaucaugac

SEQ ID NO: 2763453 - RNA, 19 nt, Artificial Sequence
  Description of Artificial Sequence: Synthetic oligonucleotide
ugcagugucugguggcccu

SEQ ID NO: 2763454 - RNA, 19 nt, Artificial Sequence
  Description of Artificial Sequence: Synthetic oligonucleotide
guauauuuauuaagguugu

SEQ ID NO: 2763455 - RNA, 19 nt, Artificial Sequence
  Description of Artificial Sequence: Synthetic oligonucleotide
caguauauuuauuaagguu

SEQ ID NO: 2763456 - RNA, 19 nt, Artificial Sequence
  Description of Artificial Sequence: Synthetic oligonucleotide
uauauuuauuaagguuguu

SEQ ID NO: 2763457 - RNA, 19 nt, Artificial Sequence
  Description of Artificial Sequence: Synthetic oligonucleotide
caaaucuggggauauacuu

SEQ ID NO: 2763458 - RNA, 19 nt, Artificial Sequence
  Description of Artificial Sequence: Synthetic oligonucleotide
acgacaaacagcagccaca

SEQ ID NO: 2763459 - RNA, 19 nt, Artificial Sequence
  Description of Artificial Sequence: Synthetic oligonucleotide
aguggccaucuagaguuuc

SEQ ID NO: 2763460 - RNA, 19 nt, Artificial Sequence
  Description of Artificial Sequence: Synthetic oligonucleotide
gaggguagcccagaagauc

SEQ ID NO: 2763461 - RNA, 19 nt, Artificial Sequence
  Description of Artificial Sequence: Synthetic oligonucleotide
caaugaucauucuggaccu

SEQ ID NO: 2763462 - RNA, 19 nt, Artificial Sequence
  Description of Artificial Sequence: Synthetic oligonucleotide
acguuggauaaauuccauu

SEQ ID NO: 2763463 - RNA, 19 nt, Artificial Sequence
  Description of Artificial Sequence: Synthetic oligonucleotide
gugguuuaacuaccugcac

SEQ ID NO: 2763464 - RNA, 19 nt, Artificial Sequence
  Description of Artificial Sequence: Synthetic oligonucleotide
gcaccagcaaaucugggga

SEQ ID NO: 2763465 - RNA, 19 nt, Artificial Sequence
  Description of Artificial Sequence: Synthetic oligonucleotide
caagauacauagaggagau

SEQ ID NO: 2763466 - RNA, 19 nt, Artificial Sequence
  Description of Artificial Sequence: Synthetic oligonucleotide
uagcccagaagaucucaaa

SEQ ID NO: 2763467 - RNA, 19 nt, Artificial Sequence
  Description of Artificial Sequence: Synthetic oligonucleotide
aagcugaccaagauacaua

SEQ ID NO: 2763468 - RNA, 19 nt, Artificial Sequence
  Description of Artificial Sequence: Synthetic oligonucleotide
ccaagauacauagaggaga

SEQ ID NO: 2763469 - RNA, 19 nt, Artificial Sequence
  Description of Artificial Sequence: Synthetic oligonucleotide
cuaugcaggacagcucgug

SEQ ID NO: 2763470 - RNA, 19 nt, Artificial Sequence
  Description of Artificial Sequence: Synthetic oligonucleotide
uuucugaggcacugaguuu

SEQ ID NO: 2763471 - RNA, 19 nt, Artificial Sequence
  Description of Artificial Sequence: Synthetic oligonucleotide
aaggugacuuuaauagcua

SEQ ID NO: 2763472 - RNA, 19 nt, Artificial Sequence
  Description of Artificial Sequence: Synthetic oligonucleotide
auagacgagugagagggua

SEQ ID NO: 2763473 - RNA, 19 nt, Artificial Sequence
  Description of Artificial Sequence: Synthetic oligonucleotide
aucuugcugcccaucauga

SEQ ID NO: 2763474 - RNA, 19 nt, Artificial Sequence
  Description of Artificial Sequence: Synthetic oligonucleotide
aauggagcaugugguuuaa

SEQ ID NO: 2763475 - RNA, 19 nt, Artificial Sequence
  Description of Artificial Sequence: Synthetic oligonucleotide
gacgagugagaggguagcc

SEQ ID NO: 2763476 - RNA, 19 nt, Artificial Sequence
  Description of Artificial Sequence: Synthetic oligonucleotide
gaggcacugaguuuaggau

SEQ ID NO: 2763477 - RNA, 19 nt, Artificial Sequence
  Description of Artificial Sequence: Synthetic oligonucleotide
ggagcaugugguuuaacua

SEQ ID NO: 2763478 - RNA, 19 nt, Artificial Sequence
  Description of Artificial Sequence: Synthetic oligonucleotide
ucguggagaagcugaccaa

SEQ ID NO: 2763479 - RNA, 19 nt, Artificial Sequence
  Description of Artificial Sequence: Synthetic oligonucleotide
gcuggcggaagccaucuug

SEQ ID NO: 2763480 - RNA, 19 nt, Artificial Sequence
  Description of Artificial Sequence: Synthetic oligonucleotide
gggauauacuuccuuuaga

SEQ ID NO: 2763481 - RNA, 19 nt, Artificial Sequence
  Description of Artificial Sequence: Synthetic oligonucleotide
guuguuuaauauacaauuu

SEQ ID NO: 2763482 - RNA, 19 nt, Artificial Sequence
  Description of Artificial Sequence: Synthetic oligonucleotide
guauuucugagguaauguu

SEQ ID NO: 2763483 - RNA, 19 nt, Artificial Sequence
  Description of Artificial Sequence: Synthetic oligonucleotide
gacauuuuggaaguccuuu

SEQ ID NO: 2763484 - RNA, 19 nt, Artificial Sequence
  Description of Artificial Sequence: Synthetic oligonucleotide
cacuugacauuuuggaagu

SEQ ID NO: 2763485 - RNA, 19 nt, Artificial Sequence
  Description of Artificial Sequence: Synthetic oligonucleotide
gcaguauauuuauuaaggu

SEQ ID NO: 2763486 - RNA, 19 nt, Artificial Sequence
  Description of Artificial Sequence: Synthetic oligonucleotide
uucugucagggaaccuuau

SEQ ID NO: 2763487 - RNA, 19 nt, Artificial Sequence
  Description of Artificial Sequence: Synthetic oligonucleotide
uugucucuucugucaggga

SEQ ID NO: 2763488 - RNA, 19 nt, Artificial Sequence
  Description of Artificial Sequence: Synthetic oligonucleotide
cagcucguggagaagcuga

SEQ ID NO: 2763489 - RNA, 19 nt, Artificial Sequence
  Description of Artificial Sequence: Synthetic oligonucleotide
guuuaggauugucucuucu

SEQ ID NO: 2763490 - RNA, 19 nt, Artificial Sequence
  Description of Artificial Sequence: Synthetic oligonucleotide
agcucguggagaagcugac

SEQ ID NO: 2763491 - RNA, 19 nt, Artificial Sequence
  Description of Artificial Sequence: Synthetic oligonucleotide
ugacgacaaacagcagcca

SEQ ID NO: 2763492 - RNA, 19 nt, Artificial Sequence
  Description of Artificial Sequence: Synthetic oligonucleotide
gagugagaggguagcccag

SEQ ID NO: 2763493 - RNA, 19 nt, Artificial Sequence
  Description of Artificial Sequence: Synthetic oligonucleotide
ggacagcucguggagaagc

SEQ ID NO: 2763494 - RNA, 19 nt, Artificial Sequence
  Description of Artificial Sequence: Synthetic oligonucleotide
accuccacguuggauaaau

SEQ ID NO: 2763495 - RNA, 19 nt, Artificial Sequence
  Description of Artificial Sequence: Synthetic oligonucleotide
uaacuaccugcacgacccu

SEQ ID NO: 2763496 - RNA, 19 nt, Artificial Sequence
  Description of Artificial Sequence: Synthetic oligonucleotide
guuuaacuaccugcacgac

SEQ ID NO: 2763497 - RNA, 19 nt, Artificial Sequence
  Description of Artificial Sequence: Synthetic oligonucleotide
ggagaagcugaccaagaua

SEQ ID NO: 2763498 - RNA, 19 nt, Artificial Sequence
  Description of Artificial Sequence: Synthetic oligonucleotide
gcaggggcagcuuccgggg

SEQ ID NO: 2763499 - RNA, 19 nt, Artificial Sequence
  Description of Artificial Sequence: Synthetic oligonucleotide
ggagauacaaguggccauc

SEQ ID NO: 2763500 - RNA, 19 nt, Artificial Sequence
  Description of Artificial Sequence: Synthetic oligonucleotide
aagauacauagaggagaua

SEQ ID NO: 2763501 - RNA, 19 nt, Artificial Sequence
  Description of Artificial Sequence: Synthetic oligonucleotide
auacuuccuuuagaaugcu

SEQ ID NO: 2763502 - RNA, 19 nt, Artificial Sequence
  Description of Artificial Sequence: Synthetic oligonucleotide
ccuucuguauuucugaggu

SEQ ID NO: 2763503 - RNA, 19 nt, Artificial Sequence
  Description of Artificial Sequence: Synthetic oligonucleotide
agugagaggguagcccaga

SEQ ID NO: 2763504 - RNA, 19 nt, Artificial Sequence
  Description of Artificial Sequence: Synthetic oligonucleotide
cuucugucagggaaccuua

SEQ ID NO: 2763505 - RNA, 19 nt, Artificial Sequence
  Description of Artificial Sequence: Synthetic oligonucleotide
agauacaaguggccaucua

SEQ ID NO: 2763506 - RNA, 19 nt, Artificial Sequence
  Description of Artificial Sequence: Synthetic oligonucleotide
gaguuuaggauugucucuu

SEQ ID NO: 2763507 - RNA, 19 nt, Artificial Sequence
  Description of Artificial Sequence: Synthetic oligonucleotide
gacccugcuggcggaagcc

SEQ ID NO: 2763508 - RNA, 19 nt, Artificial Sequence
  Description of Artificial Sequence: Synthetic oligonucleotide
uaccugcacgacccugcug

SEQ ID NO: 2763509 - RNA, 19 nt, Artificial Sequence
  Description of Artificial Sequence: Synthetic oligonucleotide
auggagcaugugguuuaac

SEQ ID NO: 2763510 - RNA, 19 nt, Artificial Sequence
  Description of Artificial Sequence: Synthetic oligonucleotide
acagcucguggagaagcug

SEQ ID NO: 2763511 - RNA, 19 nt, Artificial Sequence
  Description of Artificial Sequence: Synthetic oligonucleotide
gccaucuagaguuucuaua

SEQ ID NO: 2763512 - RNA, 19 nt, Artificial Sequence
  Description of Artificial Sequence: Synthetic oligonucleotide
agaaugcugugaaauuaua

SEQ ID NO: 2763513 - RNA, 19 nt, Artificial Sequence
  Description of Artificial Sequence: Synthetic oligonucleotide
ccacguuggauaaauucca

SEQ ID NO: 2763514 - RNA, 19 nt, Artificial Sequence
  Description of Artificial Sequence: Synthetic oligonucleotide
ggaaguccuuuauuguaaa

SEQ ID NO: 2763515 - RNA, 19 nt, Artificial Sequence
  Description of Artificial Sequence: Synthetic oligonucleotide
ucugguggcccuggaugca

SEQ ID NO: 2763516 - RNA, 19 nt, Artificial Sequence
  Description of Artificial Sequence: Synthetic oligonucleotide
cauuuuggaaguccuuuau

SEQ ID NO: 2763517 - RNA, 19 nt, Artificial Sequence
  Description of Artificial Sequence: Synthetic oligonucleotide
ucuggaccuccacguugga

SEQ ID NO: 2763518 - RNA, 19 nt, Artificial Sequence
  Description of Artificial Sequence: Synthetic oligonucleotide
gucagggaaccuuauuaau

SEQ ID NO: 2763519 - RNA, 19 nt, Artificial Sequence
  Description of Artificial Sequence: Synthetic oligonucleotide
cugaggcacugaguuuagg

SEQ ID NO: 2763520 - RNA, 19 nt, Artificial Sequence
  Description of Artificial Sequence: Synthetic oligonucleotide
uggccaucuagaguuucua

SEQ ID NO: 2763521 - RNA, 19 nt, Artificial Sequence
  Description of Artificial Sequence: Synthetic oligonucleotide
cuugagauauagguuuccu

SEQ ID NO: 2763522 - RNA, 19 nt, Artificial Sequence
  Description of Artificial Sequence: Synthetic oligonucleotide
agaggguagcccagaagau

SEQ ID NO: 2763523 - RNA, 19 nt, Artificial Sequence
  Description of Artificial Sequence: Synthetic oligonucleotide
guggagaagcugaccaaga

SEQ ID NO: 2763524 - RNA, 19 nt, Artificial Sequence
  Description of Artificial Sequence: Synthetic oligonucleotide
caucuagaguuucuauacu

SEQ ID NO: 2763525 - RNA, 19 nt, Artificial Sequence
  Description of Artificial Sequence: Synthetic oligonucleotide
guccuuuauuguaaagaua

SEQ ID NO: 2763526 - RNA, 19 nt, Artificial Sequence
  Description of Artificial Sequence: Synthetic oligonucleotide
cacugaguuuaggauuguc

SEQ ID NO: 2763527 - RNA, 19 nt, Artificial Sequence
  Description of Artificial Sequence: Synthetic oligonucleotide
agugucugguggcccugga

SEQ ID NO: 2763528 - RNA, 19 nt, Artificial Sequence
  Description of Artificial Sequence: Synthetic oligonucleotide
aauuuccacuugacauuuu

SEQ ID NO: 2763529 - RNA, 19 nt, Artificial Sequence
  Description of Artificial Sequence: Synthetic oligonucleotide
aggacagcucguggagaag

SEQ ID NO: 2763530 - RNA, 19 nt, Artificial Sequence
  Description of Artificial Sequence: Synthetic oligonucleotide
cugcacgacccugcuggcg

SEQ ID NO: 2763531 - RNA, 19 nt, Artificial Sequence
  Description of Artificial Sequence: Synthetic oligonucleotide
accagcaaaucuggggaua

SEQ ID NO: 2763532 - RNA, 19 nt, Artificial Sequence
  Description of Artificial Sequence: Synthetic oligonucleotide
ugcugcccaucaugacccc

SEQ ID NO: 2763533 - RNA, 19 nt, Artificial Sequence
  Description of Artificial Sequence: Synthetic oligonucleotide
gagauacaaguggccaucu

SEQ ID NO: 2763534 - RNA, 19 nt, Artificial Sequence
  Description of Artificial Sequence: Synthetic oligonucleotide
gcccagaagaucucaaagu

SEQ ID NO: 2763535 - RNA, 19 nt, Artificial Sequence
  Description of Artificial Sequence: Synthetic oligonucleotide
cuggggauauacuuccuuu

SEQ ID NO: 2763536 - RNA, 19 nt, Artificial Sequence
  Description of Artificial Sequence: Synthetic oligonucleotide
gugagaggguagcccagaa

SEQ ID NO: 2763537 - RNA, 19 nt, Artificial Sequence
  Description of Artificial Sequence: Synthetic oligonucleotide
gguagcccagaagaucuca

SEQ ID NO: 2763538 - RNA, 19 nt, Artificial Sequence
  Description of Artificial Sequence: Synthetic oligonucleotide
cagugucugguggcccugg

SEQ ID NO: 2763539 - RNA, 19 nt, Artificial Sequence
  Description of Artificial Sequence: Synthetic oligonucleotide
guagcccagaagaucucaa

SEQ ID NO: 2763540 - RNA, 19 nt, Artificial Sequence
  Description of Artificial Sequence: Synthetic oligonucleotide
caauuuccacuugacauuu

SEQ ID NO: 2763541 - RNA, 19 nt, Artificial Sequence
  Description of Artificial Sequence: Synthetic oligonucleotide
ccacaaugaucauucugga

SEQ ID NO: 2763542 - RNA, 19 nt, Artificial Sequence
  Description of Artificial Sequence: Synthetic oligonucleotide
ggaccuccacguuggauaa

SEQ ID NO: 2763543 - RNA, 19 nt, Artificial Sequence
  Description of Artificial Sequence: Synthetic oligonucleotide
caggggcagcuuccggggc

SEQ ID NO: 2763544 - RNA, 19 nt, Artificial Sequence
  Description of Artificial Sequence: Synthetic oligonucleotide
cguuggauaaauuccauuu

SEQ ID NO: 2763545 - RNA, 19 nt, Artificial Sequence
  Description of Artificial Sequence: Synthetic oligonucleotide
gucugacgacaaacagcag

SEQ ID NO: 2763546 - RNA, 19 nt, Artificial Sequence
  Description of Artificial Sequence: Synthetic oligonucleotide
gguuuccuucuguauuucu

SEQ ID NO: 2763547 - RNA, 19 nt, Artificial Sequence
  Description of Artificial Sequence: Synthetic oligonucleotide
aucuggggauauacuuccu

SEQ ID NO: 2763548 - RNA, 19 nt, Artificial Sequence
  Description of Artificial Sequence: Synthetic oligonucleotide
ccuuauuaauggagcaugu

SEQ ID NO: 2763549 - RNA, 19 nt, Artificial Sequence
  Description of Artificial Sequence: Synthetic oligonucleotide
acgacccugcuggcggaag

SEQ ID NO: 2763550 - RNA, 19 nt, Artificial Sequence
  Description of Artificial Sequence: Synthetic oligonucleotide
cacguuggauaaauuccau

SEQ ID NO: 2763551 - RNA, 19 nt, Artificial Sequence
  Description of Artificial Sequence: Synthetic oligonucleotide
aaguggccaucuagaguuu

SEQ ID NO: 2763552 - RNA, 19 nt, Artificial Sequence
  Description of Artificial Sequence: Synthetic oligonucleotide
guggcccuggaugcaccag

SEQ ID NO: 2763553 - RNA, 19 nt, Artificial Sequence
  Description of Artificial Sequence: Synthetic oligonucleotide
acccugcuggcggaagcca

SEQ ID NO: 2763554 - RNA, 19 nt, Artificial Sequence
  Description of Artificial Sequence: Synthetic oligonucleotide
gcaaaucuggggauauacu

SEQ ID NO: 2763555 - RNA, 19 nt, Artificial Sequence
  Description of Artificial Sequence: Synthetic oligonucleotide
cccuggaugcaccagcaaa

SEQ ID NO: 2763556 - RNA, 19 nt, Artificial Sequence
  Description of Artificial Sequence: Synthetic oligonucleotide
gcucguggagaagcugacc

SEQ ID NO: 2763557 - RNA, 19 nt, Artificial Sequence
  Description of Artificial Sequence: Synthetic oligonucleotide
cccagaagaucucaaaguu

SEQ ID NO: 2763558 - RNA, 19 nt, Artificial Sequence
  Description of Artificial Sequence: Synthetic oligonucleotide
ccuuuagaaugcugugaaa

SEQ ID NO: 2763559 - RNA, 19 nt, Artificial Sequence
  Description of Artificial Sequence: Synthetic oligonucleotide
gguggcccuggaugcacca

SEQ ID NO: 2763560 - RNA, 19 nt, Artificial Sequence
  Description of Artificial Sequence: Synthetic oligonucleotide
ccuggaugcaccagcaaau

SEQ ID NO: 2763561 - RNA, 19 nt, Artificial Sequence
  Description of Artificial Sequence: Synthetic oligonucleotide
ugcuggcggaagccaucuu

SEQ ID NO: 2763562 - RNA, 19 nt, Artificial Sequence
  Description of Artificial Sequence: Synthetic oligonucleotide
ccugcuggcggaagccauc

SEQ ID NO: 2763563 - RNA, 19 nt, Artificial Sequence
  Description of Artificial Sequence: Synthetic oligonucleotide
ccauuucuucuugagauau

SEQ ID NO: 2763564 - RNA, 19 nt, Artificial Sequence
  Description of Artificial Sequence: Synthetic oligonucleotide
guggccaucuagaguuucu

SEQ ID NO: 2763565 - RNA, 19 nt, Artificial Sequence
  Description of Artificial Sequence: Synthetic oligonucleotide
gacaaacagcagccacaau

SEQ ID NO: 2763566 - RNA, 19 nt, Artificial Sequence
  Description of Artificial Sequence: Synthetic oligonucleotide
ccagaagaucucaaaguuu

SEQ ID NO: 2763567 - RNA, 19 nt, Artificial Sequence
  Description of Artificial Sequence: Synthetic oligonucleotide
gcugaccaagauacauaga

SEQ ID NO: 2763568 - RNA, 19 nt, Artificial Sequence
  Description of Artificial Sequence: Synthetic oligonucleotide
ccugcacgacccugcuggc

SEQ ID NO: 2763569 - RNA, 19 nt, Artificial Sequence
  Description of Artificial Sequence: Synthetic oligonucleotide
caccagcaaaucuggggau

SEQ ID NO: 2763570 - RNA, 19 nt, Artificial Sequence
  Description of Artificial Sequence: Synthetic oligonucleotide
cuaccugcacgacccugcu

SEQ ID NO: 2763571 - RNA, 19 nt, Artificial Sequence
  Description of Artificial Sequence: Synthetic oligonucleotide
cauucuggaccuccacguu

SEQ ID NO: 2763572 - RNA, 19 nt, Artificial Sequence
  Description of Artificial Sequence: Synthetic oligonucleotide
ggccaucuagaguuucuau

SEQ ID NO: 2763573 - RNA, 19 nt, Artificial Sequence
  Description of Artificial Sequence: Synthetic oligonucleotide
gcaggacagcucguggaga

SEQ ID NO: 2763574 - RNA, 19 nt, Artificial Sequence
  Description of Artificial Sequence: Synthetic oligonucleotide
ccuuuugucugacgacaaa

SEQ ID NO: 2763575 - RNA, 19 nt, Artificial Sequence
  Description of Artificial Sequence: Synthetic oligonucleotide
gugucugguggcccuggau

SEQ ID NO: 2763576 - RNA, 19 nt, Artificial Sequence
  Description of Artificial Sequence: Synthetic oligonucleotide
gcagcuuccggggcgcaga

SEQ ID NO: 2763577 - RNA, 19 nt, Artificial Sequence
  Description of Artificial Sequence: Synthetic oligonucleotide
ccuuuauuguaaagauaau

SEQ ID NO: 2763578 - RNA, 19 nt, Artificial Sequence
  Description of Artificial Sequence: Synthetic oligonucleotide
gcaugugguuuaacuaccu

SEQ ID NO: 2763579 - RNA, 19 nt, Artificial Sequence
  Description of Artificial Sequence: Synthetic oligonucleotide
ggggcagcuuccggggcgc

SEQ ID NO: 2763580 - RNA, 19 nt, Artificial Sequence
  Description of Artificial Sequence: Synthetic oligonucleotide
ggcagcuuccggggcgcag

SEQ ID NO: 2763581 - RNA, 19 nt, Artificial Sequence
  Description of Artificial Sequence: Synthetic oligonucleotide
gcagugucugguggcccug

SEQ ID NO: 2763582 - RNA, 19 nt, Artificial Sequence
  Description of Artificial Sequence: Synthetic oligonucleotide
cgacccugcuggcggaagc

SEQ ID NO: 2763583 - RNA, 19 nt, Artificial Sequence
  Description of Artificial Sequence: Synthetic oligonucleotide
cugcuggcggaagccaucu

SEQ ID NO: 2763584 - RNA, 19 nt, Artificial Sequence
  Description of Artificial Sequence: Synthetic oligonucleotide
gaccuccacguuggauaaa

SEQ ID NO: 2763585 - RNA, 19 nt, Artificial Sequence
  Description of Artificial Sequence: Synthetic oligonucleotide
cagccacaaugaucauucu

SEQ ID NO: 2763586 - RNA, 19 nt, Artificial Sequence
  Description of Artificial Sequence: Synthetic oligonucleotide
cagcaaaucuggggauaua

SEQ ID NO: 2763587 - RNA, 19 nt, Artificial Sequence
  Description of Artificial Sequence: Synthetic oligonucleotide
ggguagcccagaagaucuc

SEQ ID NO: 2763588 - RNA, 19 nt, Artificial Sequence
  Description of Artificial Sequence: Synthetic oligonucleotide
gcacgacccugcuggcgga

SEQ ID NO: 2763589 - RNA, 19 nt, Artificial Sequence
  Description of Artificial Sequence: Synthetic oligonucleotide
cuggaccuccacguuggau

SEQ ID NO: 2763590 - RNA, 19 nt, Artificial Sequence
  Description of Artificial Sequence: Synthetic oligonucleotide
cucuucugucagggaaccu

SEQ ID NO: 2763591 - RNA, 19 nt, Artificial Sequence
  Description of Artificial Sequence: Synthetic oligonucleotide
gcuaugcaggacagcucgu

SEQ ID NO: 2763592 - RNA, 19 nt, Artificial Sequence
  Description of Artificial Sequence: Synthetic oligonucleotide
cacgacccugcuggcggaa

SEQ ID NO: 2763593 - RNA, 19 nt, Artificial Sequence
  Description of Artificial Sequence: Synthetic oligonucleotide
gcacugaguuuaggauugu

SEQ ID NO: 2763594 - RNA, 19 nt, Artificial Sequence
  Description of Artificial Sequence: Synthetic oligonucleotide
cagcagccacaaugaucau

SEQ ID NO: 2763595 - RNA, 19 nt, Artificial Sequence
  Description of Artificial Sequence: Synthetic oligonucleotide
cccugcuggcggaagccau

SEQ ID NO: 2763596 - RNA, 19 nt, Artificial Sequence
  Description of Artificial Sequence: Synthetic oligonucleotide
ccuccacguuggauaaauu

SEQ ID NO: 2763597 - RNA, 19 nt, Artificial Sequence
  Description of Artificial Sequence: Synthetic oligonucleotide
ccccgagcaggggcagcuu

SEQ ID NO: 2763598 - RNA, 19 nt, Artificial Sequence
  Description of Artificial Sequence: Synthetic oligonucleotide
aaauacggccaccauggcc

SEQ ID NO: 2763599 - RNA, 19 nt, Artificial Sequence
  Description of Artificial Sequence: Synthetic oligonucleotide
uucuucaccacccucugcg

SEQ ID NO: 2763600 - RNA, 19 nt, Artificial Sequence
  Description of Artificial Sequence: Synthetic oligonucleotide
aucgcuauccagcugaccg

SEQ ID NO: 2763601 - RNA, 19 nt, Artificial Sequence
  Description of Artificial Sequence: Synthetic oligonucleotide
gaaggugaaguccaccugg

SEQ ID NO: 2763602 - RNA, 19 nt, Artificial Sequence
  Description of Artificial Sequence: Synthetic oligonucleotide
acaaauacggccaccaugg

SEQ ID NO: 2763603 - RNA, 19 nt, Artificial Sequence
  Description of Artificial Sequence: Synthetic oligonucleotide
agcaccgacagcuucaccg

SEQ ID NO: 2763604 - RNA, 19 nt, Artificial Sequence
  Description of Artificial Sequence: Synthetic oligonucleotide
aaccgucgcaaacugggcc

SEQ ID NO: 2763605 - RNA, 19 nt, Artificial Sequence
  Description of Artificial Sequence: Synthetic oligonucleotide
uccgguaggguucugcugg

SEQ ID NO: 2763606 - RNA, 19 nt, Artificial Sequence
  Description of Artificial Sequence: Synthetic oligonucleotide
aauacggccaccauggccu

SEQ ID NO: 2763607 - RNA, 19 nt, Artificial Sequence
  Description of Artificial Sequence: Synthetic oligonucleotide
ucagaugccgcccucgucc

SEQ ID NO: 2763608 - RNA, 19 nt, Artificial Sequence
  Description of Artificial Sequence: Synthetic oligonucleotide
aaaguggccgaagacgugg

SEQ ID NO: 2763609 - RNA, 19 nt, Artificial Sequence
  Description of Artificial Sequence: Synthetic oligonucleotide
uccaggaucucgcugcugg

SEQ ID NO: 2763610 - RNA, 19 nt, Artificial Sequence
  Description of Artificial Sequence: Synthetic oligonucleotide
cuugguacaguucauccag

SEQ ID NO: 2763611 - RNA, 19 nt, Artificial Sequence
  Description of Artificial Sequence: Synthetic oligonucleotide
uuacugaggacuuucuucu

SEQ ID NO: 2763612 - RNA, 19 nt, Artificial Sequence
  Description of Artificial Sequence: Synthetic oligonucleotide
uacaguucauccaggaucu

SEQ ID NO: 2763613 - RNA, 19 nt, Artificial Sequence
  Description of Artificial Sequence: Synthetic oligonucleotide
gaagacgugguugaugcgg

SEQ ID NO: 2763614 - RNA, 19 nt, Artificial Sequence
  Description of Artificial Sequence: Synthetic oligonucleotide
cuuacugaggacuuucuuc

SEQ ID NO: 2763615 - RNA, 19 nt, Artificial Sequence
  Description of Artificial Sequence: Synthetic oligonucleotide
gugucguccacaaauacgg

SEQ ID NO: 2763616 - RNA, 19 nt, Artificial Sequence
  Description of Artificial Sequence: Synthetic oligonucleotide
aagcugagggcugucaugg

SEQ ID NO: 2763617 - RNA, 19 nt, Artificial Sequence
  Description of Artificial Sequence: Synthetic oligonucleotide
cugaagguguccaugggcc

SEQ ID NO: 2763618 - RNA, 19 nt, Artificial Sequence
  Description of Artificial Sequence: Synthetic oligonucleotide
acugaggacuuucuucugg

SEQ ID NO: 2763619 - RNA, 19 nt, Artificial Sequence
  Description of Artificial Sequence: Synthetic oligonucleotide
aggcucuucgugcugaagg

SEQ ID NO: 2763620 - RNA, 19 nt, Artificial Sequence
  Description of Artificial Sequence: Synthetic oligonucleotide
ucguccacaaauacggcca

SEQ ID NO: 2763621 - RNA, 19 nt, Artificial Sequence
  Description of Artificial Sequence: Synthetic oligonucleotide
aucccugcacuccagcagc

SEQ ID NO: 2763622 - RNA, 19 nt, Artificial Sequence
  Description of Artificial Sequence: Synthetic oligonucleotide
gaggccaucuuacugagga

SEQ ID NO: 2763623 - RNA, 19 nt, Artificial Sequence
  Description of Artificial Sequence: Synthetic oligonucleotide
uucuucugggccugcaggg

SEQ ID NO: 2763624 - RNA, 19 nt, Artificial Sequence
  Description of Artificial Sequence: Synthetic oligonucleotide
uuggaggccaucuuacuga

SEQ ID NO: 2763625 - RNA, 19 nt, Artificial Sequence
  Description of Artificial Sequence: Synthetic oligonucleotide
aagacgugguugaugcggc

SEQ ID NO: 2763626 - RNA, 19 nt, Artificial Sequence
  Description of Artificial Sequence: Synthetic oligonucleotide
agggccaggcucuucgugc

SEQ ID NO: 2763627 - RNA, 19 nt, Artificial Sequence
  Description of Artificial Sequence: Synthetic oligonucleotide
ucgccguuggcaaaguggc

SEQ ID NO: 2763628 - RNA, 19 nt, Artificial Sequence
  Description of Artificial Sequence: Synthetic oligonucleotide
ugcugggcuguacagcgcg

SEQ ID NO: 2763629 - RNA, 19 nt, Artificial Sequence
  Description of Artificial Sequence: Synthetic oligonucleotide
ugaugcagcagaucccugc

SEQ ID NO: 2763630 - RNA, 19 nt, Artificial Sequence
  Description of Artificial Sequence: Synthetic oligonucleotide
ugaggugcgugccuguggc

SEQ ID NO: 2763631 - RNA, 19 nt, Artificial Sequence
  Description of Artificial Sequence: Synthetic oligonucleotide
cacaaauacggccaccaug

SEQ ID NO: 2763632 - RNA, 19 nt, Artificial Sequence
  Description of Artificial Sequence: Synthetic oligonucleotide
cugaggacuuucuucuggg

SEQ ID NO: 2763633 - RNA, 19 nt, Artificial Sequence
  Description of Artificial Sequence: Synthetic oligonucleotide
ugggacuuggcagugaggu

SEQ ID NO: 2763634 - RNA, 19 nt, Artificial Sequence
  Description of Artificial Sequence: Synthetic oligonucleotide
guugaugcggccaugggac

SEQ ID NO: 2763635 - RNA, 19 nt, Artificial Sequence
  Description of Artificial Sequence: Synthetic oligonucleotide
cagcucaucgcuauccagc

SEQ ID NO: 2763636 - RNA, 19 nt, Artificial Sequence
  Description of Artificial Sequence: Synthetic oligonucleotide
gucguccacaaauacggcc

SEQ ID NO: 2763637 - RNA, 19 nt, Artificial Sequence
  Description of Artificial Sequence: Synthetic oligonucleotide
gugcugaagguguccaugg

SEQ ID NO: 2763638 - RNA, 19 nt, Artificial Sequence
  Description of Artificial Sequence: Synthetic oligonucleotide
uacagcgcggccaggaagu

SEQ ID NO: 2763639 - RNA, 19 nt, Artificial Sequence
  Description of Artificial Sequence: Synthetic oligonucleotide
ucguccagcauccucccga

SEQ ID NO: 2763640 - RNA, 19 nt, Artificial Sequence
  Description of Artificial Sequence: Synthetic oligonucleotide
ggcaaaguggccgaagacg

SEQ ID NO: 2763641 - RNA, 19 nt, Artificial Sequence
  Description of Artificial Sequence: Synthetic oligonucleotide
ggaaccgucgcaaacuggg

SEQ ID NO: 2763642 - RNA, 19 nt, Artificial Sequence
  Description of Artificial Sequence: Synthetic oligonucleotide
ucgcuauccagcugaccgg

SEQ ID NO: 2763643 - RNA, 19 nt, Artificial Sequence
  Description of Artificial Sequence: Synthetic oligonucleotide
gaggccgucgcagaugcgg

SEQ ID NO: 2763644 - RNA, 19 nt, Artificial Sequence
  Description of Artificial Sequence: Synthetic oligonucleotide
uccaccugguggaagcuga

SEQ ID NO: 2763645 - RNA, 19 nt, Artificial Sequence
  Description of Artificial Sequence: Synthetic oligonucleotide
uggaaccgucgcaaacugg

SEQ ID NO: 2763646 - RNA, 19 nt, Artificial Sequence
  Description of Artificial Sequence: Synthetic oligonucleotide
cucaucgcuauccagcuga

SEQ ID NO: 2763647 - RNA, 19 nt, Artificial Sequence
  Description of Artificial Sequence: Synthetic oligonucleotide
ugaagguguccaugggccc

SEQ ID NO: 2763648 - RNA, 19 nt, Artificial Sequence
  Description of Artificial Sequence: Synthetic oligonucleotide
gucgccguuggcaaagugg

SEQ ID NO: 2763649 - RNA, 19 nt, Artificial Sequence
  Description of Artificial Sequence: Synthetic oligonucleotide
ggccugaugcagcagaucc

SEQ ID NO: 2763650 - RNA, 19 nt, Artificial Sequence
  Description of Artificial Sequence: Synthetic oligonucleotide
gaagucgccguuggcaaag

SEQ ID NO: 2763651 - RNA, 19 nt, Artificial Sequence
  Description of Artificial Sequence: Synthetic oligonucleotide
uggaggccaucuuacugag

SEQ ID NO: 2763652 - RNA, 19 nt, Artificial Sequence
  Description of Artificial Sequence: Synthetic oligonucleotide
cuccuugguggcuugguac

SEQ ID NO: 2763653 - RNA, 19 nt, Artificial Sequence
  Description of Artificial Sequence: Synthetic oligonucleotide
agcgcggccaggaagucgc

SEQ ID NO: 2763654 - RNA, 19 nt, Artificial Sequence
  Description of Artificial Sequence: Synthetic oligonucleotide
cuauccagcugaccggccc

SEQ ID NO: 2763655 - RNA, 19 nt, Artificial Sequence
  Description of Artificial Sequence: Synthetic oligonucleotide
uggugucguccacaaauac

SEQ ID NO: 2763656 - RNA, 19 nt, Artificial Sequence
  Description of Artificial Sequence: Synthetic oligonucleotide
agcucaucgcuauccagcu

SEQ ID NO: 2763657 - RNA, 19 nt, Artificial Sequence
  Description of Artificial Sequence: Synthetic oligonucleotide
gguggcuugguacaguuca

SEQ ID NO: 2763658 - RNA, 19 nt, Artificial Sequence
  Description of Artificial Sequence: Synthetic oligonucleotide
ccgaagacgugguugaugc

SEQ ID NO: 2763659 - RNA, 19 nt, Artificial Sequence
  Description of Artificial Sequence: Synthetic oligonucleotide
ggugucguccacaaauacg

SEQ ID NO: 2763660 - RNA, 19 nt, Artificial Sequence
  Description of Artificial Sequence: Synthetic oligonucleotide
cugcgggugaacuccuugg

SEQ ID NO: 2763661 - RNA, 19 nt, Artificial Sequence
  Description of Artificial Sequence: Synthetic oligonucleotide
agcacucgccggucgaagg

SEQ ID NO: 2763662 - RNA, 19 nt, Artificial Sequence
  Description of Artificial Sequence: Synthetic oligonucleotide
ugucguccacaaauacggc

SEQ ID NO: 2763663 - RNA, 19 nt, Artificial Sequence
  Description of Artificial Sequence: Synthetic oligonucleotide
agacgugguugaugcggcc

SEQ ID NO: 2763664 - RNA, 19 nt, Artificial Sequence
  Description of Artificial Sequence: Synthetic oligonucleotide
ggcuugguacaguucaucc

SEQ ID NO: 2763665 - RNA, 19 nt, Artificial Sequence
  Description of Artificial Sequence: Synthetic oligonucleotide
aggaucucgcugcuggugu

SEQ ID NO: 2763666 - RNA, 19 nt, Artificial Sequence
  Description of Artificial Sequence: Synthetic oligonucleotide
guaggguucugcugggcug

SEQ ID NO: 2763667 - RNA, 19 nt, Artificial Sequence
  Description of Artificial Sequence: Synthetic oligonucleotide
uggcaaaguggccgaagac

SEQ ID NO: 2763668 - RNA, 19 nt, Artificial Sequence
  Description of Artificial Sequence: Synthetic oligonucleotide
augcggugcaggugucucc

SEQ ID NO: 2763669 - RNA, 19 nt, Artificial Sequence
  Description of Artificial Sequence: Synthetic oligonucleotide
cagacugcgcauccggccc

SEQ ID NO: 2763670 - RNA, 19 nt, Artificial Sequence
  Description of Artificial Sequence: Synthetic oligonucleotide
ucuccgguaggguucugcu

SEQ ID NO: 2763671 - RNA, 19 nt, Artificial Sequence
  Description of Artificial Sequence: Synthetic oligonucleotide
accgucgcaaacugggcca

SEQ ID NO: 2763672 - RNA, 19 nt, Artificial Sequence
  Description of Artificial Sequence: Synthetic oligonucleotide
guacagcgcggccaggaag

SEQ ID NO: 2763673 - RNA, 19 nt, Artificial Sequence
  Description of Artificial Sequence: Synthetic oligonucleotide
agaucccugcacuccagca

SEQ ID NO: 2763674 - RNA, 19 nt, Artificial Sequence
  Description of Artificial Sequence: Synthetic oligonucleotide
ugucauggccagacugcgc

SEQ ID NO: 2763675 - RNA, 19 nt, Artificial Sequence
  Description of Artificial Sequence: Synthetic oligonucleotide
aggaagucgccguuggcaa

SEQ ID NO: 2763676 - RNA, 19 nt, Artificial Sequence
  Description of Artificial Sequence: Synthetic oligonucleotide
agcagaucccugcacucca

SEQ ID NO: 2763677 - RNA, 19 nt, Artificial Sequence
  Description of Artificial Sequence: Synthetic oligonucleotide
aggccaucuuacugaggac

SEQ ID NO: 2763678 - RNA, 19 nt, Artificial Sequence
  Description of Artificial Sequence: Synthetic oligonucleotide
ugcgggugaacuccuuggu

SEQ ID NO: 2763679 - RNA, 19 nt, Artificial Sequence
  Description of Artificial Sequence: Synthetic oligonucleotide
cugucauggccagacugcg

SEQ ID NO: 2763680 - RNA, 19 nt, Artificial Sequence
  Description of Artificial Sequence: Synthetic oligonucleotide
ugaacuccuugguggcuug

SEQ ID NO: 2763681 - RNA, 19 nt, Artificial Sequence
  Description of Artificial Sequence: Synthetic oligonucleotide
uacugaggacuuucuucug

SEQ ID NO: 2763682 - RNA, 19 nt, Artificial Sequence
  Description of Artificial Sequence: Synthetic oligonucleotide
uucgugcugaaggugucca

SEQ ID NO: 2763683 - RNA, 19 nt, Artificial Sequence
  Description of Artificial Sequence: Synthetic oligonucleotide
uucugcugggcuguacagc

SEQ ID NO: 2763684 - RNA, 19 nt, Artificial Sequence
  Description of Artificial Sequence: Synthetic oligonucleotide
gacuuggcagugaggugcg

SEQ ID NO: 2763685 - RNA, 19 nt, Artificial Sequence
  Description of Artificial Sequence: Synthetic oligonucleotide
caccagguucuucaccacc

SEQ ID NO: 2763686 - RNA, 19 nt, Artificial Sequence
  Description of Artificial Sequence: Synthetic oligonucleotide
ucuucgugcugaagguguc

SEQ ID NO: 2763687 - RNA, 19 nt, Artificial Sequence
  Description of Artificial Sequence: Synthetic oligonucleotide
cuggaaccgucgcaaacug

SEQ ID NO: 2763688 - RNA, 19 nt, Artificial Sequence
  Description of Artificial Sequence: Synthetic oligonucleotide
agcugagggcugucauggc

SEQ ID NO: 2763689 - RNA, 19 nt, Artificial Sequence
  Description of Artificial Sequence: Synthetic oligonucleotide
gugaggugcgugccugugg

SEQ ID NO: 2763690 - RNA, 19 nt, Artificial Sequence
  Description of Artificial Sequence: Synthetic oligonucleotide
gccguuggcaaaguggccg

SEQ ID NO: 2763691 - RNA, 19 nt, Artificial Sequence
  Description of Artificial Sequence: Synthetic oligonucleotide
uguacagcgcggccaggaa

SEQ ID NO: 2763692 - RNA, 19 nt, Artificial Sequence
  Description of Artificial Sequence: Synthetic oligonucleotide
ugggcuguacagcgcggcc

SEQ ID NO: 2763693 - RNA, 19 nt, Artificial Sequence
  Description of Artificial Sequence: Synthetic oligonucleotide
gucgcagaugcggugcagg

SEQ ID NO: 2763694 - RNA, 19 nt, Artificial Sequence
  Description of Artificial Sequence: Synthetic oligonucleotide
uugguggcuugguacaguu

SEQ ID NO: 2763695 - RNA, 19 nt, Artificial Sequence
  Description of Artificial Sequence: Synthetic oligonucleotide
cgggugaacuccuuggugg

SEQ ID NO: 2763696 - RNA, 19 nt, Artificial Sequence
  Description of Artificial Sequence: Synthetic oligonucleotide
ugcgcauccggcccuggaa

SEQ ID NO: 2763697 - RNA, 19 nt, Artificial Sequence
  Description of Artificial Sequence: Synthetic oligonucleotide
gguugaugcggccauggga

SEQ ID NO: 2763698 - RNA, 19 nt, Artificial Sequence
  Description of Artificial Sequence: Synthetic oligonucleotide
cugaccggcccgcagcagc

SEQ ID NO: 2763699 - RNA, 19 nt, Artificial Sequence
  Description of Artificial Sequence: Synthetic oligonucleotide
ucaucgcuauccagcugac

SEQ ID NO: 2763700 - RNA, 19 nt, Artificial Sequence
  Description of Artificial Sequence: Synthetic oligonucleotide
caaaguggccgaagacgug

SEQ ID NO: 2763701 - RNA, 19 nt, Artificial Sequence
  Description of Artificial Sequence: Synthetic oligonucleotide
guuggcaaaguggccgaag

SEQ ID NO: 2763702 - RNA, 19 nt, Artificial Sequence
  Description of Artificial Sequence: Synthetic oligonucleotide
accggcccgcagcagcacc

SEQ ID NO: 2763703 - RNA, 19 nt, Artificial Sequence
  Description of Artificial Sequence: Synthetic oligonucleotide
caaauacggccaccauggc

SEQ ID NO: 2763704 - RNA, 19 nt, Artificial Sequence
  Description of Artificial Sequence: Synthetic oligonucleotide
gaugccgcccucguccagc

SEQ ID NO: 2763705 - RNA, 19 nt, Artificial Sequence
  Description of Artificial Sequence: Synthetic oligonucleotide
ucgcagaugcggugcaggu

SEQ ID NO: 2763706 - RNA, 19 nt, Artificial Sequence
  Description of Artificial Sequence: Synthetic oligonucleotide
cuuggcagugaggugcgug

SEQ ID NO: 2763707 - RNA, 19 nt, Artificial Sequence
  Description of Artificial Sequence: Synthetic oligonucleotide
aacuccuugguggcuuggu

SEQ ID NO: 2763708 - RNA, 19 nt, Artificial Sequence
  Description of Artificial Sequence: Synthetic oligonucleotide
ugccuguggccugaugcag

SEQ ID NO: 2763709 - RNA, 19 nt, Artificial Sequence
  Description of Artificial Sequence: Synthetic oligonucleotide
uaggguucugcugggcugu

SEQ ID NO: 2763710 - RNA, 19 nt, Artificial Sequence
  Description of Artificial Sequence: Synthetic oligonucleotide
acggccaccauggccuugg

SEQ ID NO: 2763711 - RNA, 19 nt, Artificial Sequence
  Description of Artificial Sequence: Synthetic oligonucleotide
gcugagggcugucauggcc

SEQ ID NO: 2763712 - RNA, 19 nt, Artificial Sequence
  Description of Artificial Sequence: Synthetic oligonucleotide
gaaccgucgcaaacugggc

SEQ ID NO: 2763713 - RNA, 19 nt, Artificial Sequence
  Description of Artificial Sequence: Synthetic oligonucleotide
cccucguccagcauccucc

SEQ ID NO: 2763714 - RNA, 19 nt, Artificial Sequence
  Description of Artificial Sequence: Synthetic oligonucleotide
aggucagaugccgcccucg

SEQ ID NO: 2763715 - RNA, 19 nt, Artificial Sequence
  Description of Artificial Sequence: Synthetic oligonucleotide
aagguguccaugggcccug

SEQ ID NO: 2763716 - RNA, 19 nt, Artificial Sequence
  Description of Artificial Sequence: Synthetic oligonucleotide
cuucgugcugaaggugucc

SEQ ID NO: 2763717 - RNA, 19 nt, Artificial Sequence
  Description of Artificial Sequence: Synthetic oligonucleotide
gaugcggugcaggugucuc

SEQ ID NO: 2763718 - RNA, 19 nt, Artificial Sequence
  Description of Artificial Sequence: Synthetic oligonucleotide
uugaugcggccaugggacu

SEQ ID NO: 2763719 - RNA, 19 nt, Artificial Sequence
  Description of Artificial Sequence: Synthetic oligonucleotide
gucgaaggugaaguccacc

SEQ ID NO: 2763720 - RNA, 19 nt, Artificial Sequence
  Description of Artificial Sequence: Synthetic oligonucleotide
caggaagucgccguuggca

SEQ ID NO: 2763721 - RNA, 19 nt, Artificial Sequence
  Description of Artificial Sequence: Synthetic oligonucleotide
cuucaccgccaccuucacc

SEQ ID NO: 2763722 - RNA, 19 nt, Artificial Sequence
  Description of Artificial Sequence: Synthetic oligonucleotide
ggccagacugcgcauccgg

SEQ ID NO: 2763723 - RNA, 19 nt, Artificial Sequence
  Description of Artificial Sequence: Synthetic oligonucleotide
agcuucaccgccaccuuca

SEQ ID NO: 2763724 - RNA, 19 nt, Artificial Sequence
  Description of Artificial Sequence: Synthetic oligonucleotide
cagcagaucccugcacucc

SEQ ID NO: 2763725 - RNA, 19 nt, Artificial Sequence
  Description of Artificial Sequence: Synthetic oligonucleotide
gaacuccuugguggcuugg

SEQ ID NO: 2763726 - RNA, 19 nt, Artificial Sequence
  Description of Artificial Sequence: Synthetic oligonucleotide
gcugucauggccagacugc

SEQ ID NO: 2763727 - RNA, 19 nt, Artificial Sequence
  Description of Artificial Sequence: Synthetic oligonucleotide
gguucugcugggcuguaca

SEQ ID NO: 2763728 - RNA, 19 nt, Artificial Sequence
  Description of Artificial Sequence: Synthetic oligonucleotide
gggugaacuccuugguggc

SEQ ID NO: 2763729 - RNA, 19 nt, Artificial Sequence
  Description of Artificial Sequence: Synthetic oligonucleotide
gcuugguacaguucaucca

SEQ ID NO: 2763730 - RNA, 19 nt, Artificial Sequence
  Description of Artificial Sequence: Synthetic oligonucleotide
gacgugguugaugcggcca

SEQ ID NO: 2763731 - RNA, 19 nt, Artificial Sequence
  Description of Artificial Sequence: Synthetic oligonucleotide
cucuucgugcugaaggugu

SEQ ID NO: 2763732 - RNA, 19 nt, Artificial Sequence
  Description of Artificial Sequence: Synthetic oligonucleotide
aucuuacugaggacuuucu

SEQ ID NO: 2763733 - RNA, 19 nt, Artificial Sequence
  Description of Artificial Sequence: Synthetic oligonucleotide
cuccgguaggguucugcug

SEQ ID NO: 2763734 - RNA, 19 nt, Artificial Sequence
  Description of Artificial Sequence: Synthetic oligonucleotide
ucgcaaacugggccagcuc

SEQ ID NO: 2763735 - RNA, 19 nt, Artificial Sequence
  Description of Artificial Sequence: Synthetic oligonucleotide
acgugguugaugcggccau

SEQ ID NO: 2763736 - RNA, 19 nt, Artificial Sequence
  Description of Artificial Sequence: Synthetic oligonucleotide
ggcuguacagcgcggccag

SEQ ID NO: 2763737 - RNA, 19 nt, Artificial Sequence
  Description of Artificial Sequence: Synthetic oligonucleotide
aggugcgugccuguggccu

SEQ ID NO: 2763738 - RNA, 19 nt, Artificial Sequence
  Description of Artificial Sequence: Synthetic oligonucleotide
agcugaccggcccgcagca

SEQ ID NO: 2763739 - RNA, 19 nt, Artificial Sequence
  Description of Artificial Sequence: Synthetic oligonucleotide
ugguggcuugguacaguuc

SEQ ID NO: 2763740 - RNA, 19 nt, Artificial Sequence
  Description of Artificial Sequence: Synthetic oligonucleotide
agugaggugcgugccugug

SEQ ID NO: 2763741 - RNA, 19 nt, Artificial Sequence
  Description of Artificial Sequence: Synthetic oligonucleotide
caccgacagcuucaccgcc

SEQ ID NO: 2763742 - RNA, 19 nt, Artificial Sequence
  Description of Artificial Sequence: Synthetic oligonucleotide
cugaugcagcagaucccug

SEQ ID NO: 2763743 - RNA, 19 nt, Artificial Sequence
  Description of Artificial Sequence: Synthetic oligonucleotide
gcagaugcggugcaggugu

SEQ ID NO: 2763744 - RNA, 19 nt, Artificial Sequence
  Description of Artificial Sequence: Synthetic oligonucleotide
gaggugcgugccuguggcc

SEQ ID NO: 2763745 - RNA, 19 nt, Artificial Sequence
  Description of Artificial Sequence: Synthetic oligonucleotide
caggaucucgcugcuggug

SEQ ID NO: 2763746 - RNA, 19 nt, Artificial Sequence
  Description of Artificial Sequence: Synthetic oligonucleotide
agacugcgcauccggcccu

SEQ ID NO: 2763747 - RNA, 19 nt, Artificial Sequence
  Description of Artificial Sequence: Synthetic oligonucleotide
aaguggccgaagacguggu

SEQ ID NO: 2763748 - RNA, 19 nt, Artificial Sequence
  Description of Artificial Sequence: Synthetic oligonucleotide
uggccagacugcgcauccg

SEQ ID NO: 2763749 - RNA, 19 nt, Artificial Sequence
  Description of Artificial Sequence: Synthetic oligonucleotide
uccggcugcgggugaacuc

SEQ ID NO: 2763750 - RNA, 19 nt, Artificial Sequence
  Description of Artificial Sequence: Synthetic oligonucleotide
ggugucuccgguaggguuc

SEQ ID NO: 2763751 - RNA, 19 nt, Artificial Sequence
  Description of Artificial Sequence: Synthetic oligonucleotide
gucuccgguaggguucugc

SEQ ID NO: 2763752 - RNA, 19 nt, Artificial Sequence
  Description of Artificial Sequence: Synthetic oligonucleotide
cauccucccgaggccgucg

SEQ ID NO: 2763753 - RNA, 19 nt, Artificial Sequence
  Description of Artificial Sequence: Synthetic oligonucleotide
caucgcuauccagcugacc

SEQ ID NO: 2763754 - RNA, 19 nt, Artificial Sequence
  Description of Artificial Sequence: Synthetic oligonucleotide
ucgccggucgaaggugaag

SEQ ID NO: 2763755 - RNA, 19 nt, Artificial Sequence
  Description of Artificial Sequence: Synthetic oligonucleotide
gcugcgggugaacuccuug

SEQ ID NO: 2763756 - RNA, 19 nt, Artificial Sequence
  Description of Artificial Sequence: Synthetic oligonucleotide
gcggccaugggacuuggca

SEQ ID NO: 2763757 - RNA, 19 nt, Artificial Sequence
  Description of Artificial Sequence: Synthetic oligonucleotide
gaagguguccaugggcccu

SEQ ID NO: 2763758 - RNA, 19 nt, Artificial Sequence
  Description of Artificial Sequence: Synthetic oligonucleotide
ugaugcggccaugggacuu

SEQ ID NO: 2763759 - RNA, 19 nt, Artificial Sequence
  Description of Artificial Sequence: Synthetic oligonucleotide
ggccagcucaucgcuaucc

SEQ ID NO: 2763760 - RNA, 19 nt, Artificial Sequence
  Description of Artificial Sequence: Synthetic oligonucleotide
cagggccaggcucuucgug

SEQ ID NO: 2763761 - RNA, 19 nt, Artificial Sequence
  Description of Artificial Sequence: Synthetic oligonucleotide
ucgugcugaagguguccau

SEQ ID NO: 2763762 - RNA, 19 nt, Artificial Sequence
  Description of Artificial Sequence: Synthetic oligonucleotide
uuccggcugcgggugaacu

SEQ ID NO: 2763763 - RNA, 19 nt, Artificial Sequence
  Description of Artificial Sequence: Synthetic oligonucleotide
guccacaaauacggccacc

SEQ ID NO: 2763764 - RNA, 19 nt, Artificial Sequence
  Description of Artificial Sequence: Synthetic oligonucleotide
gucagaugccgcccucguc

SEQ ID NO: 2763765 - RNA, 19 nt, Artificial Sequence
  Description of Artificial Sequence: Synthetic oligonucleotide
guccagcauccucccgagg

SEQ ID NO: 2763766 - RNA, 19 nt, Artificial Sequence
  Description of Artificial Sequence: Synthetic oligonucleotide
cugguggaagcugagggcu

SEQ ID NO: 2763767 - RNA, 19 nt, Artificial Sequence
  Description of Artificial Sequence: Synthetic oligonucleotide
gcaaaguggccgaagacgu

SEQ ID NO: 2763768 - RNA, 19 nt, Artificial Sequence
  Description of Artificial Sequence: Synthetic oligonucleotide
uggccuuggaggccaucuu

SEQ ID NO: 2763769 - RNA, 19 nt, Artificial Sequence
  Description of Artificial Sequence: Synthetic oligonucleotide
aagucgccguuggcaaagu

SEQ ID NO: 2763770 - RNA, 19 nt, Artificial Sequence
  Description of Artificial Sequence: Synthetic oligonucleotide
ccgaggccgucgcagaugc

SEQ ID NO: 2763771 - RNA, 19 nt, Artificial Sequence
  Description of Artificial Sequence: Synthetic oligonucleotide
agccccgcggccagcacuc

SEQ ID NO: 2763772 - RNA, 19 nt, Artificial Sequence
  Description of Artificial Sequence: Synthetic oligonucleotide
ccggucgaaggugaagucc

SEQ ID NO: 2763773 - RNA, 19 nt, Artificial Sequence
  Description of Artificial Sequence: Synthetic oligonucleotide
cacucgccggucgaaggug

SEQ ID NO: 2763774 - RNA, 19 nt, Artificial Sequence
  Description of Artificial Sequence: Synthetic oligonucleotide
accgacagcuucaccgcca

SEQ ID NO: 2763775 - RNA, 19 nt, Artificial Sequence
  Description of Artificial Sequence: Synthetic oligonucleotide
aguccaccugguggaagcu

SEQ ID NO: 2763776 - RNA, 19 nt, Artificial Sequence
  Description of Artificial Sequence: Synthetic oligonucleotide
ucccgaggccgucgcagau

SEQ ID NO: 2763777 - RNA, 19 nt, Artificial Sequence
  Description of Artificial Sequence: Synthetic oligonucleotide
ugcuggugucguccacaaa

SEQ ID NO: 2763778 - RNA, 19 nt, Artificial Sequence
  Description of Artificial Sequence: Synthetic oligonucleotide
agaugcggugcaggugucu

SEQ ID NO: 2763779 - RNA, 19 nt, Artificial Sequence
  Description of Artificial Sequence: Synthetic oligonucleotide
cuguacagcgcggccagga

SEQ ID NO: 2763780 - RNA, 19 nt, Artificial Sequence
  Description of Artificial Sequence: Synthetic oligonucleotide
cacccucugcgccuccuuc

SEQ ID NO: 2763781 - RNA, 19 nt, Artificial Sequence
  Description of Artificial Sequence: Synthetic oligonucleotide
gcagugaggugcgugccug

SEQ ID NO: 2763782 - RNA, 19 nt, Artificial Sequence
  Description of Artificial Sequence: Synthetic oligonucleotide
acagcgcggccaggaaguc

SEQ ID NO: 2763783 - RNA, 19 nt, Artificial Sequence
  Description of Artificial Sequence: Synthetic oligonucleotide
agguguccaugggcccugc

SEQ ID NO: 2763784 - RNA, 19 nt, Artificial Sequence
  Description of Artificial Sequence: Synthetic oligonucleotide
guccaccugguggaagcug

SEQ ID NO: 2763785 - RNA, 19 nt, Artificial Sequence
  Description of Artificial Sequence: Synthetic oligonucleotide
ugcggccaugggacuuggc

SEQ ID NO: 2763786 - RNA, 19 nt, Artificial Sequence
  Description of Artificial Sequence: Synthetic oligonucleotide
gcauccggcccuggaaccg

SEQ ID NO: 2763787 - RNA, 19 nt, Artificial Sequence
  Description of Artificial Sequence: Synthetic oligonucleotide
cagcgcggccaggaagucg

SEQ ID NO: 2763788 - RNA, 19 nt, Artificial Sequence
  Description of Artificial Sequence: Synthetic oligonucleotide
cggccaugggacuuggcag

SEQ ID NO: 2763789 - RNA, 19 nt, Artificial Sequence
  Description of Artificial Sequence: Synthetic oligonucleotide
cuccuuccggcugcgggug

SEQ ID NO: 2763790 - RNA, 19 nt, Artificial Sequence
  Description of Artificial Sequence: Synthetic oligonucleotide
gccuuggaggccaucuuac

SEQ ID NO: 2763791 - RNA, 19 nt, Artificial Sequence
  Description of Artificial Sequence: Synthetic oligonucleotide
cagcacucgccggucgaag

SEQ ID NO: 2763792 - RNA, 19 nt, Artificial Sequence
  Description of Artificial Sequence: Synthetic oligonucleotide
ggccaucuuacugaggacu

SEQ ID NO: 2763793 - RNA, 19 nt, Artificial Sequence
  Description of Artificial Sequence: Synthetic oligonucleotide
gccgaagacgugguugaug

SEQ ID NO: 2763794 - RNA, 19 nt, Artificial Sequence
  Description of Artificial Sequence: Synthetic oligonucleotide
ggugcgugccuguggccug

SEQ ID NO: 2763795 - RNA, 19 nt, Artificial Sequence
  Description of Artificial Sequence: Synthetic oligonucleotide
gguacaguucauccaggau

SEQ ID NO: 2763796 - RNA, 19 nt, Artificial Sequence
  Description of Artificial Sequence: Synthetic oligonucleotide
gcucuucgugcugaaggug

SEQ ID NO: 2763797 - RNA, 19 nt, Artificial Sequence
  Description of Artificial Sequence: Synthetic oligonucleotide
aucucgcugcuggugucgu

SEQ ID NO: 2763798 - RNA, 19 nt, Artificial Sequence
  Description of Artificial Sequence: Synthetic oligonucleotide
gcgcauccggcccuggaac

SEQ ID NO: 2763799 - RNA, 19 nt, Artificial Sequence
  Description of Artificial Sequence: Synthetic oligonucleotide
acucgccggucgaagguga

SEQ ID NO: 2763800 - RNA, 19 nt, Artificial Sequence
  Description of Artificial Sequence: Synthetic oligonucleotide
ggcucuucgugcugaaggu

SEQ ID NO: 2763801 - RNA, 19 nt, Artificial Sequence
  Description of Artificial Sequence: Synthetic oligonucleotide
augcggccaugggacuugg

SEQ ID NO: 2763802 - RNA, 19 nt, Artificial Sequence
  Description of Artificial Sequence: Synthetic oligonucleotide
gccugaugcagcagauccc

SEQ ID NO: 2763803 - RNA, 19 nt, Artificial Sequence
  Description of Artificial Sequence: Synthetic oligonucleotide
cccucugcgccuccuuccg

SEQ ID NO: 2763804 - RNA, 19 nt, Artificial Sequence
  Description of Artificial Sequence: Synthetic oligonucleotide
ccgcccucguccagcaucc

SEQ ID NO: 2763805 - RNA, 19 nt, Artificial Sequence
  Description of Artificial Sequence: Synthetic oligonucleotide
ggaggccaucuuacugagg

SEQ ID NO: 2763806 - RNA, 19 nt, Artificial Sequence
  Description of Artificial Sequence: Synthetic oligonucleotide
ggccagcacucgccggucg

SEQ ID NO: 2763807 - RNA, 19 nt, Artificial Sequence
  Description of Artificial Sequence: Synthetic oligonucleotide
ggaucucgcugcugguguc

SEQ ID NO: 2763808 - RNA, 19 nt, Artificial Sequence
  Description of Artificial Sequence: Synthetic oligonucleotide
gccgcccucguccagcauc

SEQ ID NO: 2763809 - RNA, 19 nt, Artificial Sequence
  Description of Artificial Sequence: Synthetic oligonucleotide
auccaggaucucgcugcug

SEQ ID NO: 2763810 - RNA, 19 nt, Artificial Sequence
  Description of Artificial Sequence: Synthetic oligonucleotide
gccgucgcagaugcggugc

SEQ ID NO: 2763811 - RNA, 19 nt, Artificial Sequence
  Description of Artificial Sequence: Synthetic oligonucleotide
cccuggaaccgucgcaaac

SEQ ID NO: 2763812 - RNA, 19 nt, Artificial Sequence
  Description of Artificial Sequence: Synthetic oligonucleotide
ggugcaggugucuccggua

SEQ ID NO: 2763813 - RNA, 19 nt, Artificial Sequence
  Description of Artificial Sequence: Synthetic oligonucleotide
acugcgcauccggcccugg

SEQ ID NO: 2763814 - RNA, 19 nt, Artificial Sequence
  Description of Artificial Sequence: Synthetic oligonucleotide
gucgcaaacugggccagcu

SEQ ID NO: 2763815 - RNA, 19 nt, Artificial Sequence
  Description of Artificial Sequence: Synthetic oligonucleotide
ggccaugggacuuggcagu

SEQ ID NO: 2763816 - RNA, 19 nt, Artificial Sequence
  Description of Artificial Sequence: Synthetic oligonucleotide
ggccuuggaggccaucuua

SEQ ID NO: 2763817 - RNA, 19 nt, Artificial Sequence
  Description of Artificial Sequence: Synthetic oligonucleotide
cgaagacgugguugaugcg

SEQ ID NO: 2763818 - RNA, 19 nt, Artificial Sequence
  Description of Artificial Sequence: Synthetic oligonucleotide
auacggccaccauggccuu

SEQ ID NO: 2763819 - RNA, 19 nt, Artificial Sequence
  Description of Artificial Sequence: Synthetic oligonucleotide
aggccgucgcagaugcggu

SEQ ID NO: 2763820 - RNA, 19 nt, Artificial Sequence
  Description of Artificial Sequence: Synthetic oligonucleotide
ccgguaggguucugcuggg

SEQ ID NO: 2763821 - RNA, 19 nt, Artificial Sequence
  Description of Artificial Sequence: Synthetic oligonucleotide
ccaggaagucgccguuggc

SEQ ID NO: 2763822 - RNA, 19 nt, Artificial Sequence
  Description of Artificial Sequence: Synthetic oligonucleotide
gcagaucccugcacuccag

SEQ ID NO: 2763823 - RNA, 19 nt, Artificial Sequence
  Description of Artificial Sequence: Synthetic oligonucleotide
ggaagcugagggcugucau

SEQ ID NO: 2763824 - RNA, 19 nt, Artificial Sequence
  Description of Artificial Sequence: Synthetic oligonucleotide
ggaagucgccguuggcaaa

SEQ ID NO: 2763825 - RNA, 19 nt, Artificial Sequence
  Description of Artificial Sequence: Synthetic oligonucleotide
gccuguggccugaugcagc

SEQ ID NO: 2763826 - RNA, 19 nt, Artificial Sequence
  Description of Artificial Sequence: Synthetic oligonucleotide
gcugcuggugucguccaca

SEQ ID NO: 2763827 - RNA, 19 nt, Artificial Sequence
  Description of Artificial Sequence: Synthetic oligonucleotide
cuuccggcugcgggugaac

SEQ ID NO: 2763828 - RNA, 19 nt, Artificial Sequence
  Description of Artificial Sequence: Synthetic oligonucleotide
ccuugguggcuugguacag

SEQ ID NO: 2763829 - RNA, 19 nt, Artificial Sequence
  Description of Artificial Sequence: Synthetic oligonucleotide
gccagacugcgcauccggc

SEQ ID NO: 2763830 - RNA, 19 nt, Artificial Sequence
  Description of Artificial Sequence: Synthetic oligonucleotide
ccaccugguggaagcugag

SEQ ID NO: 2763831 - RNA, 19 nt, Artificial Sequence
  Description of Artificial Sequence: Synthetic oligonucleotide
gcugggcuguacagcgcgg

SEQ ID NO: 2763832 - RNA, 19 nt, Artificial Sequence
  Description of Artificial Sequence: Synthetic oligonucleotide
ccgacagcuucaccgccac

SEQ ID NO: 2763833 - RNA, 19 nt, Artificial Sequence
  Description of Artificial Sequence: Synthetic oligonucleotide
cgcauccggcccuggaacc

SEQ ID NO: 2763834 - RNA, 19 nt, Artificial Sequence
  Description of Artificial Sequence: Synthetic oligonucleotide
cgcuauccagcugaccggc

SEQ ID NO: 2763835 - RNA, 19 nt, Artificial Sequence
  Description of Artificial Sequence: Synthetic oligonucleotide
gccggucgaaggugaaguc

SEQ ID NO: 2763836 - RNA, 19 nt, Artificial Sequence
  Description of Artificial Sequence: Synthetic oligonucleotide
ggccgucgcagaugcggug

SEQ ID NO: 2763837 - RNA, 19 nt, Artificial Sequence
  Description of Artificial Sequence: Synthetic oligonucleotide
ggucgaaggugaaguccac

SEQ ID NO: 2763838 - RNA, 19 nt, Artificial Sequence
  Description of Artificial Sequence: Synthetic oligonucleotide
gccaugggacuuggcagug

SEQ ID NO: 2763839 - RNA, 19 nt, Artificial Sequence
  Description of Artificial Sequence: Synthetic oligonucleotide
gggcuguacagcgcggcca

SEQ ID NO: 2763840 - RNA, 19 nt, Artificial Sequence
  Description of Artificial Sequence: Synthetic oligonucleotide
gcuauccagcugaccggcc

SEQ ID NO: 2763841 - RNA, 19 nt, Artificial Sequence
  Description of Artificial Sequence: Synthetic oligonucleotide
gcagcaccgacagcuucac

SEQ ID NO: 2763842 - RNA, 19 nt, Artificial Sequence
  Description of Artificial Sequence: Synthetic oligonucleotide
gcggugcaggugucuccgg

SEQ ID NO: 2763843 - RNA, 19 nt, Artificial Sequence
  Description of Artificial Sequence: Synthetic oligonucleotide
cuugguggcuugguacagu

SEQ ID NO: 2763844 - RNA, 19 nt, Artificial Sequence
  Description of Artificial Sequence: Synthetic oligonucleotide
ccucugcgccuccuuccgg

SEQ ID NO: 2763845 - RNA, 19 nt, Artificial Sequence
  Description of Artificial Sequence: Synthetic oligonucleotide
ccuggaaccgucgcaaacu

SEQ ID NO: 2763846 - RNA, 19 nt, Artificial Sequence
  Description of Artificial Sequence: Synthetic oligonucleotide
cugcgcauccggcccugga

SEQ ID NO: 2763847 - RNA, 19 nt, Artificial Sequence
  Description of Artificial Sequence: Synthetic oligonucleotide
gccaggcucuucgugcuga

SEQ ID NO: 2763848 - RNA, 19 nt, Artificial Sequence
  Description of Artificial Sequence: Synthetic oligonucleotide
gcuguacagcgcggccagg

SEQ ID NO: 2763849 - RNA, 19 nt, Artificial Sequence
  Description of Artificial Sequence: Synthetic oligonucleotide
ugucuccgguaggguucug

SEQ ID NO: 2763850 - RNA, 19 nt, Artificial Sequence
  Description of Artificial Sequence: Synthetic oligonucleotide
cucgccggucgaaggugaa

SEQ ID NO: 2763851 - RNA, 19 nt, Artificial Sequence
  Description of Artificial Sequence: Synthetic oligonucleotide
ggucagaugccgcccucgu

SEQ ID NO: 2763852 - RNA, 19 nt, Artificial Sequence
  Description of Artificial Sequence: Synthetic oligonucleotide
gccagcacucgccggucga

SEQ ID NO: 2763853 - RNA, 19 nt, Artificial Sequence
  Description of Artificial Sequence: Synthetic oligonucleotide
ccguuggcaaaguggccga

SEQ ID NO: 2763854 - RNA, 19 nt, Artificial Sequence
  Description of Artificial Sequence: Synthetic oligonucleotide
ccggcccuggaaccgucgc

SEQ ID NO: 2763855 - RNA, 19 nt, Artificial Sequence
  Description of Artificial Sequence: Synthetic oligonucleotide
gugucuccgguaggguucu

SEQ ID NO: 2763856 - RNA, 19 nt, Artificial Sequence
  Description of Artificial Sequence: Synthetic oligonucleotide
gaccggcccgcagcagcac

SEQ ID NO: 2763857 - RNA, 19 nt, Artificial Sequence
  Description of Artificial Sequence: Synthetic oligonucleotide
gcacucgccggucgaaggu

SEQ ID NO: 2763858 - RNA, 19 nt, Artificial Sequence
  Description of Artificial Sequence: Synthetic oligonucleotide
ccgcggccagcacucgccg

SEQ ID NO: 2763859 - RNA, 19 nt, Artificial Sequence
  Description of Artificial Sequence: Synthetic oligonucleotide
ccgucgcaaacugggccag

SEQ ID NO: 2763860 - RNA, 19 nt, Artificial Sequence
  Description of Artificial Sequence: Synthetic oligonucleotide
ugccgcccucguccagcau

SEQ ID NO: 2763861 - RNA, 19 nt, Artificial Sequence
  Description of Artificial Sequence: Synthetic oligonucleotide
gugcgugccuguggccuga

SEQ ID NO: 2763862 - RNA, 19 nt, Artificial Sequence
  Description of Artificial Sequence: Synthetic oligonucleotide
cgccguuggcaaaguggcc

SEQ ID NO: 2763863 - RNA, 19 nt, Artificial Sequence
  Description of Artificial Sequence: Synthetic oligonucleotide
cagugaggugcgugccugu

SEQ ID NO: 2763864 - RNA, 19 nt, Artificial Sequence
  Description of Artificial Sequence: Synthetic oligonucleotide
ggguucugcugggcuguac

SEQ ID NO: 2763865 - RNA, 19 nt, Artificial Sequence
  Description of Artificial Sequence: Synthetic oligonucleotide
cgcagaugcggugcaggug

SEQ ID NO: 2763866 - RNA, 19 nt, Artificial Sequence
  Description of Artificial Sequence: Synthetic oligonucleotide
gccaucuuacugaggacuu

SEQ ID NO: 2763867 - RNA, 19 nt, Artificial Sequence
  Description of Artificial Sequence: Synthetic oligonucleotide
gcggccagcacucgccggu

SEQ ID NO: 2763868 - RNA, 19 nt, Artificial Sequence
  Description of Artificial Sequence: Synthetic oligonucleotide
gggccagcucaucgcuauc

SEQ ID NO: 2763869 - RNA, 19 nt, Artificial Sequence
  Description of Artificial Sequence: Synthetic oligonucleotide
cccgaggccgucgcagaug

SEQ ID NO: 2763870 - RNA, 19 nt, Artificial Sequence
  Description of Artificial Sequence: Synthetic oligonucleotide
ugcgugccuguggccugau

SEQ ID NO: 2763871 - RNA, 19 nt, Artificial Sequence
  Description of Artificial Sequence: Synthetic oligonucleotide
ccuccuuccggcugcgggu

SEQ ID NO: 2763872 - RNA, 19 nt, Artificial Sequence
  Description of Artificial Sequence: Synthetic oligonucleotide
cagccccgcggccagcacu

SEQ ID NO: 2763873 - RNA, 19 nt, Artificial Sequence
  Description of Artificial Sequence: Synthetic oligonucleotide
caggugucuccgguagggu

SEQ ID NO: 2763874 - RNA, 19 nt, Artificial Sequence
  Description of Artificial Sequence: Synthetic oligonucleotide
aggguucugcugggcugua

SEQ ID NO: 2763875 - RNA, 19 nt, Artificial Sequence
  Description of Artificial Sequence: Synthetic oligonucleotide
cauccggcccuggaaccgu

SEQ ID NO: 2763876 - RNA, 19 nt, Artificial Sequence
  Description of Artificial Sequence: Synthetic oligonucleotide
gcgugccuguggccugaug

SEQ ID NO: 2763877 - RNA, 19 nt, Artificial Sequence
  Description of Artificial Sequence: Synthetic oligonucleotide
cgcggccagcacucgccgg

SEQ ID NO: 2763878 - RNA, 19 nt, Artificial Sequence
  Description of Artificial Sequence: Synthetic oligonucleotide
gcccuggaaccgucgcaaa

SEQ ID NO: 2763879 - RNA, 19 nt, Artificial Sequence
  Description of Artificial Sequence: Synthetic oligonucleotide
cgcggccaggaagucgccg

SEQ ID NO: 2763880 - RNA, 19 nt, Artificial Sequence
  Description of Artificial Sequence: Synthetic oligonucleotide
ccccgcggccagcacucgc

SEQ ID NO: 2763881 - RNA, 19 nt, Artificial Sequence
  Description of Artificial Sequence: Synthetic oligonucleotide
cgacagcuucaccgccacc

SEQ ID NO: 2763882 - RNA, 19 nt, Artificial Sequence
  Description of Artificial Sequence: Synthetic oligonucleotide
ccaggucagaugccgcccu

SEQ ID NO: 2763883 - RNA, 19 nt, Artificial Sequence
  Description of Artificial Sequence: Synthetic oligonucleotide
cgaggccgucgcagaugcg

SEQ ID NO: 2763884 - RNA, 19 nt, Artificial Sequence
  Description of Artificial Sequence: Synthetic oligonucleotide
cgucgcagaugcggugcag

SEQ ID NO: 2763885 - RNA, 19 nt, Artificial Sequence
  Description of Artificial Sequence: Synthetic oligonucleotide
cgguaggguucugcugggc

SEQ ID NO: 2763886 - RNA, 19 nt, Artificial Sequence
  Description of Artificial Sequence: Synthetic oligonucleotide
ccgucgcagaugcggugca

SEQ ID NO: 2763887 - RNA, 19 nt, Artificial Sequence
  Description of Artificial Sequence: Synthetic oligonucleotide
gcgccuccuuccggcugcg

SEQ ID NO: 2763888 - RNA, 19 nt, Artificial Sequence
  Description of Artificial Sequence: Synthetic oligonucleotide
cgucgcaaacugggccagc

SEQ ID NO: 2763889 - RNA, 19 nt, Artificial Sequence
  Description of Artificial Sequence: Synthetic oligonucleotide
gggcugucauggccagacu

SEQ ID NO: 2763890 - RNA, 19 nt, Artificial Sequence
  Description of Artificial Sequence: Synthetic oligonucleotide
ccagcacucgccggucgaa

SEQ ID NO: 2763891 - RNA, 19 nt, Artificial Sequence
  Description of Artificial Sequence: Synthetic oligonucleotide
cgccggucgaaggugaagu

SEQ ID NO: 2763892 - RNA, 19 nt, Artificial Sequence
  Description of Artificial Sequence: Synthetic oligonucleotide
gccccgcggccagcacucg

SEQ ID NO: 2763893 - RNA, 19 nt, Artificial Sequence
  Description of Artificial Sequence: Synthetic oligonucleotide
gcgcggccaggaagucgcc

SEQ ID NO: 2763894 - RNA, 19 nt, Artificial Sequence
  Description of Artificial Sequence: Synthetic oligonucleotide
cggugcaggugucuccggu

SEQ ID NO: 2763895 - RNA, 19 nt, Artificial Sequence
  Description of Artificial Sequence: Synthetic oligonucleotide
cgccuccuuccggcugcgg

SEQ ID NO: 2763896 - RNA, 19 nt, Artificial Sequence
  Description of Artificial Sequence: Synthetic oligonucleotide
ggcugcgggugaacuccuu

SEQ ID NO: 2763897 - RNA, 19 nt, Artificial Sequence
  Description of Artificial Sequence: Synthetic oligonucleotide
ccacccucugcgccuccuu

SEQ ID NO: 2763898 - RNA, 19 nt, Artificial Sequence
  Description of Artificial Sequence: Synthetic oligonucleotide
cggccaccauggccuugga

SEQ ID NO: 2763899 - RNA, 19 nt, Artificial Sequence
  Description of Artificial Sequence: Synthetic oligonucleotide
aaaauggaaaacugagggc

SEQ ID NO: 2763900 - RNA, 19 nt, Artificial Sequence
  Description of Artificial Sequence: Synthetic oligonucleotide
acuaacagcuccuugacuc

SEQ ID NO: 2763901 - RNA, 19 nt, Artificial Sequence
  Description of Artificial Sequence: Synthetic oligonucleotide
acagucaacuaacagcucc

SEQ ID NO: 2763902 - RNA, 19 nt, Artificial Sequence
  Description of Artificial Sequence: Synthetic oligonucleotide
uaacagucaacuaacagcu

SEQ ID NO: 2763903 - RNA, 19 nt, Artificial Sequence
  Description of Artificial Sequence: Synthetic oligonucleotide
guaacagucaacuaacagc

SEQ ID NO: 2763904 - RNA, 19 nt, Artificial Sequence
  Description of Artificial Sequence: Synthetic oligonucleotide
aaauggaaaacugagggca

SEQ ID NO: 2763905 - RNA, 19 nt, Artificial Sequence
  Description of Artificial Sequence: Synthetic oligonucleotide
aucaucacuuuccaugucc

SEQ ID NO: 2763906 - RNA, 19 nt, Artificial Sequence
  Description of Artificial Sequence: Synthetic oligonucleotide
uuuguaacagucaacuaac

SEQ ID NO: 2763907 - RNA, 19 nt, Artificial Sequence
  Description of Artificial Sequence: Synthetic oligonucleotide
uguaacagucaacuaacag

SEQ ID NO: 2763908 - RNA, 19 nt, Artificial Sequence
  Description of Artificial Sequence: Synthetic oligonucleotide
aagggaagugccccuaggc

SEQ ID NO: 2763909 - RNA, 19 nt, Artificial Sequence
  Description of Artificial Sequence: Synthetic oligonucleotide
ucaacuaacagcuccuuga

SEQ ID NO: 2763910 - RNA, 19 nt, Artificial Sequence
  Description of Artificial Sequence: Synthetic oligonucleotide
aguucauccacaucuaucu

SEQ ID NO: 2763911 - RNA, 19 nt, Artificial Sequence
  Description of Artificial Sequence: Synthetic oligonucleotide
agucccaucaguuuaauaa

SEQ ID NO: 2763912 - RNA, 19 nt, Artificial Sequence
  Description of Artificial Sequence: Synthetic oligonucleotide
agaugaaggccucaguggg

SEQ ID NO: 2763913 - RNA, 19 nt, Artificial Sequence
  Description of Artificial Sequence: Synthetic oligonucleotide
gagaugaaggccucagugg

SEQ ID NO: 2763914 - RNA, 19 nt, Artificial Sequence
  Description of Artificial Sequence: Synthetic oligonucleotide
agagaugaaggccucagug

SEQ ID NO: 2763915 - RNA, 19 nt, Artificial Sequence
  Description of Artificial Sequence: Synthetic oligonucleotide
aaaacugagggcaagggaa

SEQ ID NO: 2763916 - RNA, 19 nt, Artificial Sequence
  Description of Artificial Sequence: Synthetic oligonucleotide
auccacaucuaucuccagc

SEQ ID NO: 2763917 - RNA, 19 nt, Artificial Sequence
  Description of Artificial Sequence: Synthetic oligonucleotide
guuuguaacagucaacuaa

SEQ ID NO: 2763918 - RNA, 19 nt, Artificial Sequence
  Description of Artificial Sequence: Synthetic oligonucleotide
uauugcuguugcuacgagg

SEQ ID NO: 2763919 - RNA, 19 nt, Artificial Sequence
  Description of Artificial Sequence: Synthetic oligonucleotide
caguuuaauaacaauaaaa

SEQ ID NO: 2763920 - RNA, 19 nt, Artificial Sequence
  Description of Artificial Sequence: Synthetic oligonucleotide
agcuccuugacucuagcag

SEQ ID NO: 2763921 - RNA, 19 nt, Artificial Sequence
  Description of Artificial Sequence: Synthetic oligonucleotide
uggaaucuccucuuccugg

SEQ ID NO: 2763922 - RNA, 19 nt, Artificial Sequence
  Description of Artificial Sequence: Synthetic oligonucleotide
ucaguuuaauaacaauaaa

SEQ ID NO: 2763923 - RNA, 19 nt, Artificial Sequence
  Description of Artificial Sequence: Synthetic oligonucleotide
uucccuugccgucucaccg

SEQ ID NO: 2763924 - RNA, 19 nt, Artificial Sequence
  Description of Artificial Sequence: Synthetic oligonucleotide
uccacaucuaucuccagcu

SEQ ID NO: 2763925 - RNA, 19 nt, Artificial Sequence
  Description of Artificial Sequence: Synthetic oligonucleotide
cacuccuccagguugaggc

SEQ ID NO: 2763926 - RNA, 19 nt, Artificial Sequence
  Description of Artificial Sequence: Synthetic oligonucleotide
uugcggucguacuugacgg

SEQ ID NO: 2763927 - RNA, 19 nt, Artificial Sequence
  Description of Artificial Sequence: Synthetic oligonucleotide
ucauccacaucuaucucca

SEQ ID NO: 2763928 - RNA, 19 nt, Artificial Sequence
  Description of Artificial Sequence: Synthetic oligonucleotide
cuugcggucguacuugacg

SEQ ID NO: 2763929 - RNA, 19 nt, Artificial Sequence
  Description of Artificial Sequence: Synthetic oligonucleotide
uaagauccacuccuccagg

SEQ ID NO: 2763930 - RNA, 19 nt, Artificial Sequence
  Description of Artificial Sequence: Synthetic oligonucleotide
ucacuuuccauguccaaga

SEQ ID NO: 2763931 - RNA, 19 nt, Artificial Sequence
  Description of Artificial Sequence: Synthetic oligonucleotide
agugagcuguucuaagauc

SEQ ID NO: 2763932 - RNA, 19 nt, Artificial Sequence
  Description of Artificial Sequence: Synthetic oligonucleotide
uguccaagaguucauccac

SEQ ID NO: 2763933 - RNA, 19 nt, Artificial Sequence
  Description of Artificial Sequence: Synthetic oligonucleotide
uucgccugcagccccaggg

SEQ ID NO: 2763934 - RNA, 19 nt, Artificial Sequence
  Description of Artificial Sequence: Synthetic oligonucleotide
aagugagcuguucuaagau

SEQ ID NO: 2763935 - RNA, 19 nt, Artificial Sequence
  Description of Artificial Sequence: Synthetic oligonucleotide
uguucauggcgccaggccu

SEQ ID NO: 2763936 - RNA, 19 nt, Artificial Sequence
  Description of Artificial Sequence: Synthetic oligonucleotide
uucuaagauccacuccucc

SEQ ID NO: 2763937 - RNA, 19 nt, Artificial Sequence
  Description of Artificial Sequence: Synthetic oligonucleotide
ucuaucuccagcucuggaa

SEQ ID NO: 2763938 - RNA, 19 nt, Artificial Sequence
  Description of Artificial Sequence: Synthetic oligonucleotide
ucguacuugacggugaccu

SEQ ID NO: 2763939 - RNA, 19 nt, Artificial Sequence
  Description of Artificial Sequence: Synthetic oligonucleotide
aucaguuuaauaacaauaa

SEQ ID NO: 2763940 - RNA, 19 nt, Artificial Sequence
  Description of Artificial Sequence: Synthetic oligonucleotide
gauccacuccuccagguug

SEQ ID NO: 2763941 - RNA, 19 nt, Artificial Sequence
  Description of Artificial Sequence: Synthetic oligonucleotide
caucaguuuaauaacaaua

SEQ ID NO: 2763942 - RNA, 19 nt, Artificial Sequence
  Description of Artificial Sequence: Synthetic oligonucleotide
agucguagagacaagugag

SEQ ID NO: 2763943 - RNA, 19 nt, Artificial Sequence
  Description of Artificial Sequence: Synthetic oligonucleotide
ucagcuucugcaugccccg

SEQ ID NO: 2763944 - RNA, 19 nt, Artificial Sequence
  Description of Artificial Sequence: Synthetic oligonucleotide
ucuggaaucuccucuuccu

SEQ ID NO: 2763945 - RNA, 19 nt, Artificial Sequence
  Description of Artificial Sequence: Synthetic oligonucleotide
gugagcuguucuaagaucc

SEQ ID NO: 2763946 - RNA, 19 nt, Artificial Sequence
  Description of Artificial Sequence: Synthetic oligonucleotide
auugcuguugcuacgaggu

SEQ ID NO: 2763947 - RNA, 19 nt, Artificial Sequence
  Description of Artificial Sequence: Synthetic oligonucleotide
uguccugugggagccaugg

SEQ ID NO: 2763948 - RNA, 19 nt, Artificial Sequence
  Description of Artificial Sequence: Synthetic oligonucleotide
gacccuacuucuucugggg

SEQ ID NO: 2763949 - RNA, 19 nt, Artificial Sequence
  Description of Artificial Sequence: Synthetic oligonucleotide
acaagugagcuguucuaag

SEQ ID NO: 2763950 - RNA, 19 nt, Artificial Sequence
  Description of Artificial Sequence: Synthetic oligonucleotide
gaaaacugagggcaaggga

SEQ ID NO: 2763951 - RNA, 19 nt, Artificial Sequence
  Description of Artificial Sequence: Synthetic oligonucleotide
caccgggccaucaucaucc

SEQ ID NO: 2763952 - RNA, 19 nt, Artificial Sequence
  Description of Artificial Sequence: Synthetic oligonucleotide
uggaaaacugagggcaagg

SEQ ID NO: 2763953 - RNA, 19 nt, Artificial Sequence
  Description of Artificial Sequence: Synthetic oligonucleotide
aucacuuuccauguccaag

SEQ ID NO: 2763954 - RNA, 19 nt, Artificial Sequence
  Description of Artificial Sequence: Synthetic oligonucleotide
aacuaacagcuccuugacu

SEQ ID NO: 2763955 - RNA, 19 nt, Artificial Sequence
  Description of Artificial Sequence: Synthetic oligonucleotide
cuugacucuagcagcccgg

SEQ ID NO: 2763956 - RNA, 19 nt, Artificial Sequence
  Description of Artificial Sequence: Synthetic oligonucleotide
uguugcuacgagguugggg

SEQ ID NO: 2763957 - RNA, 19 nt, Artificial Sequence
  Description of Artificial Sequence: Synthetic oligonucleotide
agggcaagggaagugcccc

SEQ ID NO: 2763958 - RNA, 19 nt, Artificial Sequence
  Description of Artificial Sequence: Synthetic oligonucleotide
ucucaccgggccaucauca

SEQ ID NO: 2763959 - RNA, 19 nt, Artificial Sequence
  Description of Artificial Sequence: Synthetic oligonucleotide
cuuccuggcagucguagag

SEQ ID NO: 2763960 - RNA, 19 nt, Artificial Sequence
  Description of Artificial Sequence: Synthetic oligonucleotide
uuguaacagucaacuaaca

SEQ ID NO: 2763961 - RNA, 19 nt, Artificial Sequence
  Description of Artificial Sequence: Synthetic oligonucleotide
aaacugagggcaagggaag

SEQ ID NO: 2763962 - RNA, 19 nt, Artificial Sequence
  Description of Artificial Sequence: Synthetic oligonucleotide
ugggucaggacccuacuuc

SEQ ID NO: 2763963 - RNA, 19 nt, Artificial Sequence
  Description of Artificial Sequence: Synthetic oligonucleotide
auguccaagaguucaucca

SEQ ID NO: 2763964 - RNA, 19 nt, Artificial Sequence
  Description of Artificial Sequence: Synthetic oligonucleotide
gcagcgauuguccuguggg

SEQ ID NO: 2763965 - RNA, 19 nt, Artificial Sequence
  Description of Artificial Sequence: Synthetic oligonucleotide
uacuugacggugaccuucc

SEQ ID NO: 2763966 - RNA, 19 nt, Artificial Sequence
  Description of Artificial Sequence: Synthetic oligonucleotide
ugcuguugcuacgagguug

SEQ ID NO: 2763967 - RNA, 19 nt, Artificial Sequence
  Description of Artificial Sequence: Synthetic oligonucleotide
uugacggugaccuucccuu

SEQ ID NO: 2763968 - RNA, 19 nt, Artificial Sequence
  Description of Artificial Sequence: Synthetic oligonucleotide
uuccguagcuccuugcggu

SEQ ID NO: 2763969 - RNA, 19 nt, Artificial Sequence
  Description of Artificial Sequence: Synthetic oligonucleotide
uccugugggagccaugguc

SEQ ID NO: 2763970 - RNA, 19 nt, Artificial Sequence
  Description of Artificial Sequence: Synthetic oligonucleotide
aggacccuacuucuucugg

SEQ ID NO: 2763971 - RNA, 19 nt, Artificial Sequence
  Description of Artificial Sequence: Synthetic oligonucleotide
ugagggcaagggaagugcc

SEQ ID NO: 2763972 - RNA, 19 nt, Artificial Sequence
  Description of Artificial Sequence: Synthetic oligonucleotide
gucccaucaguuuaauaac

SEQ ID NO: 2763973 - RNA, 19 nt, Artificial Sequence
  Description of Artificial Sequence: Synthetic oligonucleotide
acggugaccuucccuugcc

SEQ ID NO: 2763974 - RNA, 19 nt, Artificial Sequence
  Description of Artificial Sequence: Synthetic oligonucleotide
cuccuugacucuagcagcc

SEQ ID NO: 2763975 - RNA, 19 nt, Artificial Sequence
  Description of Artificial Sequence: Synthetic oligonucleotide
uccagguugaggcgcuucc

SEQ ID NO: 2763976 - RNA, 19 nt, Artificial Sequence
  Description of Artificial Sequence: Synthetic oligonucleotide
cuugccgucucaccgggcc

SEQ ID NO: 2763977 - RNA, 19 nt, Artificial Sequence
  Description of Artificial Sequence: Synthetic oligonucleotide
ggucaucugggucaggacc

SEQ ID NO: 2763978 - RNA, 19 nt, Artificial Sequence
  Description of Artificial Sequence: Synthetic oligonucleotide
uccucuuccuggcagucgu

SEQ ID NO: 2763979 - RNA, 19 nt, Artificial Sequence
  Description of Artificial Sequence: Synthetic oligonucleotide
agccauggucaucuggguc

SEQ ID NO: 2763980 - RNA, 19 nt, Artificial Sequence
  Description of Artificial Sequence: Synthetic oligonucleotide
cuuccguagcuccuugcgg

SEQ ID NO: 2763981 - RNA, 19 nt, Artificial Sequence
  Description of Artificial Sequence: Synthetic oligonucleotide
ugagcuguucuaagaucca

SEQ ID NO: 2763982 - RNA, 19 nt, Artificial Sequence
  Description of Artificial Sequence: Synthetic oligonucleotide
cuguucuaagauccacucc

SEQ ID NO: 2763983 - RNA, 19 nt, Artificial Sequence
  Description of Artificial Sequence: Synthetic oligonucleotide
caacuaacagcuccuugac

SEQ ID NO: 2763984 - RNA, 19 nt, Artificial Sequence
  Description of Artificial Sequence: Synthetic oligonucleotide
uggguuuguaacagucaac

SEQ ID NO: 2763985 - RNA, 19 nt, Artificial Sequence
  Description of Artificial Sequence: Synthetic oligonucleotide
cucaguggguuuguaacag

SEQ ID NO: 2763986 - RNA, 19 nt, Artificial Sequence
  Description of Artificial Sequence: Synthetic oligonucleotide
aaaagucccaucaguuuaa

SEQ ID NO: 2763987 - RNA, 19 nt, Artificial Sequence
  Description of Artificial Sequence: Synthetic oligonucleotide
agggaagugccccuaggca

SEQ ID NO: 2763988 - RNA, 19 nt, Artificial Sequence
  Description of Artificial Sequence: Synthetic oligonucleotide
caugccccggaucuugucc

SEQ ID NO: 2763989 - RNA, 19 nt, Artificial Sequence
  Description of Artificial Sequence: Synthetic oligonucleotide
cucuggaaucuccucuucc

SEQ ID NO: 2763990 - RNA, 19 nt, Artificial Sequence
  Description of Artificial Sequence: Synthetic oligonucleotide
gggaagugccccuaggcag

SEQ ID NO: 2763991 - RNA, 19 nt, Artificial Sequence
  Description of Artificial Sequence: Synthetic oligonucleotide
caguggguuuguaacaguc

SEQ ID NO: 2763992 - RNA, 19 nt, Artificial Sequence
  Description of Artificial Sequence: Synthetic oligonucleotide
uccaagaguucauccacau

SEQ ID NO: 2763993 - RNA, 19 nt, Artificial Sequence
  Description of Artificial Sequence: Synthetic oligonucleotide
gucaacuaacagcuccuug

SEQ ID NO: 2763994 - RNA, 19 nt, Artificial Sequence
  Description of Artificial Sequence: Synthetic oligonucleotide
uugacucuagcagcccggg

SEQ ID NO: 2763995 - RNA, 19 nt, Artificial Sequence
  Description of Artificial Sequence: Synthetic oligonucleotide
ucccuugccgucucaccgg

SEQ ID NO: 2763996 - RNA, 19 nt, Artificial Sequence
  Description of Artificial Sequence: Synthetic oligonucleotide
acuuuccauguccaagagu

SEQ ID NO: 2763997 - RNA, 19 nt, Artificial Sequence
  Description of Artificial Sequence: Synthetic oligonucleotide
uuguccagcaggccagaga

SEQ ID NO: 2763998 - RNA, 19 nt, Artificial Sequence
  Description of Artificial Sequence: Synthetic oligonucleotide
ucaggacccuacuucuucu

SEQ ID NO: 2763999 - RNA, 19 nt, Artificial Sequence
  Description of Artificial Sequence: Synthetic oligonucleotide
ucgccugcagccccagggg

SEQ ID NO: 2764000 - RNA, 19 nt, Artificial Sequence
  Description of Artificial Sequence: Synthetic oligonucleotide
gucaucugggucaggaccc

SEQ ID NO: 2764001 - RNA, 19 nt, Artificial Sequence
  Description of Artificial Sequence: Synthetic oligonucleotide
agcgauuguccugugggag

SEQ ID NO: 2764002 - RNA, 19 nt, Artificial Sequence
  Description of Artificial Sequence: Synthetic oligonucleotide
aauggaaaacugagggcaa

SEQ ID NO: 2764003 - RNA, 19 nt, Artificial Sequence
  Description of Artificial Sequence: Synthetic oligonucleotide
cuguucauggcgccaggcc

SEQ ID NO: 2764004 - RNA, 19 nt, Artificial Sequence
  Description of Artificial Sequence: Synthetic oligonucleotide
acuccuccagguugaggcg

SEQ ID NO: 2764005 - RNA, 19 nt, Artificial Sequence
  Description of Artificial Sequence: Synthetic oligonucleotide
ggaaaacugagggcaaggg

SEQ ID NO: 2764006 - RNA, 19 nt, Artificial Sequence
  Description of Artificial Sequence: Synthetic oligonucleotide
uccccgguauugcuguugc

SEQ ID NO: 2764007 - RNA, 19 nt, Artificial Sequence
  Description of Artificial Sequence: Synthetic oligonucleotide
guaucaucacuuuccaugu

SEQ ID NO: 2764008 - RNA, 19 nt, Artificial Sequence
  Description of Artificial Sequence: Synthetic oligonucleotide
aacagucaacuaacagcuc

SEQ ID NO: 2764009 - RNA, 19 nt, Artificial Sequence
  Description of Artificial Sequence: Synthetic oligonucleotide
gacucuagcagcccgggua

SEQ ID NO: 2764010 - RNA, 19 nt, Artificial Sequence
  Description of Artificial Sequence: Synthetic oligonucleotide
uccuggcagucguagagac

SEQ ID NO: 2764011 - RNA, 19 nt, Artificial Sequence
  Description of Artificial Sequence: Synthetic oligonucleotide
ccggguaucaucacuuucc

SEQ ID NO: 2764012 - RNA, 19 nt, Artificial Sequence
  Description of Artificial Sequence: Synthetic oligonucleotide
gaguucauccacaucuauc

SEQ ID NO: 2764013 - RNA, 19 nt, Artificial Sequence
  Description of Artificial Sequence: Synthetic oligonucleotide
caagugagcuguucuaaga

SEQ ID NO: 2764014 - RNA, 19 nt, Artificial Sequence
  Description of Artificial Sequence: Synthetic oligonucleotide
agcaggccagagaugaagg

SEQ ID NO: 2764015 - RNA, 19 nt, Artificial Sequence
  Description of Artificial Sequence: Synthetic oligonucleotide
uucuggggugugcucagcu

SEQ ID NO: 2764016 - RNA, 19 nt, Artificial Sequence
  Description of Artificial Sequence: Synthetic oligonucleotide
guggguuuguaacagucaa

SEQ ID NO: 2764017 - RNA, 19 nt, Artificial Sequence
  Description of Artificial Sequence: Synthetic oligonucleotide
gaggcgcuuccguagcucc

SEQ ID NO: 2764018 - RNA, 19 nt, Artificial Sequence
  Description of Artificial Sequence: Synthetic oligonucleotide
gacggugaccuucccuugc

SEQ ID NO: 2764019 - RNA, 19 nt, Artificial Sequence
  Description of Artificial Sequence: Synthetic oligonucleotide
gaucccuguucauggcgcc

SEQ ID NO: 2764020 - RNA, 19 nt, Artificial Sequence
  Description of Artificial Sequence: Synthetic oligonucleotide
uuuccauguccaagaguuc

SEQ ID NO: 2764021 - RNA, 19 nt, Artificial Sequence
  Description of Artificial Sequence: Synthetic oligonucleotide
agaguucauccacaucuau

SEQ ID NO: 2764022 - RNA, 19 nt, Artificial Sequence
  Description of Artificial Sequence: Synthetic oligonucleotide
caagggaagugccccuagg

SEQ ID NO: 2764023 - RNA, 19 nt, Artificial Sequence
  Description of Artificial Sequence: Synthetic oligonucleotide
gguugaggcgcuuccguag

SEQ ID NO: 2764024 - RNA, 19 nt, Artificial Sequence
  Description of Artificial Sequence: Synthetic oligonucleotide
ucuagcagcccggguauca

SEQ ID NO: 2764025 - RNA, 19 nt, Artificial Sequence
  Description of Artificial Sequence: Synthetic oligonucleotide
gcuccuugacucuagcagc

SEQ ID NO: 2764026 - RNA, 19 nt, Artificial Sequence
  Description of Artificial Sequence: Synthetic oligonucleotide
cuggaaucuccucuuccug

SEQ ID NO: 2764027 - RNA, 19 nt, Artificial Sequence
  Description of Artificial Sequence: Synthetic oligonucleotide
gucguagagacaagugagc

SEQ ID NO: 2764028 - RNA, 19 nt, Artificial Sequence
  Description of Artificial Sequence: Synthetic oligonucleotide
aacagcuccuugacucuag

SEQ ID NO: 2764029 - RNA, 19 nt, Artificial Sequence
  Description of Artificial Sequence: Synthetic oligonucleotide
auggaaaacugagggcaag

SEQ ID NO: 2764030 - RNA, 19 nt, Artificial Sequence
  Description of Artificial Sequence: Synthetic oligonucleotide
ggaaucuccucuuccuggc

SEQ ID NO: 2764031 - RNA, 19 nt, Artificial Sequence
  Description of Artificial Sequence: Synthetic oligonucleotide
acuugacggugaccuuccc

SEQ ID NO: 2764032 - RNA, 19 nt, Artificial Sequence
  Description of Artificial Sequence: Synthetic oligonucleotide
gugcucagcuucugcaugc

SEQ ID NO: 2764033 - RNA, 19 nt, Artificial Sequence
  Description of Artificial Sequence: Synthetic oligonucleotide
uaucaucacuuuccauguc

SEQ ID NO: 2764034 - RNA, 19 nt, Artificial Sequence
  Description of Artificial Sequence: Synthetic oligonucleotide
ucaguggguuuguaacagu

SEQ ID NO: 2764035 - RNA, 19 nt, Artificial Sequence
  Description of Artificial Sequence: Synthetic oligonucleotide
uccauguccaagaguucau

SEQ ID NO: 2764036 - RNA, 19 nt, Artificial Sequence
  Description of Artificial Sequence: Synthetic oligonucleotide
gcuuccguagcuccuugcg

SEQ ID NO: 2764037 - RNA, 19 nt, Artificial Sequence
  Description of Artificial Sequence: Synthetic oligonucleotide
ucuuccuggcagucguaga

SEQ ID NO: 2764038 - RNA, 19 nt, Artificial Sequence
  Description of Artificial Sequence: Synthetic oligonucleotide
auggucaucugggucagga

SEQ ID NO: 2764039 - RNA, 19 nt, Artificial Sequence
  Description of Artificial Sequence: Synthetic oligonucleotide
guauugcuguugcuacgag

SEQ ID NO: 2764040 - RNA, 19 nt, Artificial Sequence
  Description of Artificial Sequence: Synthetic oligonucleotide
gccaucaucauccgcgccc

SEQ ID NO: 2764041 - RNA, 19 nt, Artificial Sequence
  Description of Artificial Sequence: Synthetic oligonucleotide
acucuagcagcccggguau

SEQ ID NO: 2764042 - RNA, 19 nt, Artificial Sequence
  Description of Artificial Sequence: Synthetic oligonucleotide
aucuuguccagcaggccag

SEQ ID NO: 2764043 - RNA, 19 nt, Artificial Sequence
  Description of Artificial Sequence: Synthetic oligonucleotide
cuggcagucguagagacaa

SEQ ID NO: 2764044 - RNA, 19 nt, Artificial Sequence
  Description of Artificial Sequence: Synthetic oligonucleotide
cuucccuugccgucucacc

SEQ ID NO: 2764045 - RNA, 19 nt, Artificial Sequence
  Description of Artificial Sequence: Synthetic oligonucleotide
cacuuuccauguccaagag

SEQ ID NO: 2764046 - RNA, 19 nt, Artificial Sequence
  Description of Artificial Sequence: Synthetic oligonucleotide
gucaggacccuacuucuuc

SEQ ID NO: 2764047 - RNA, 19 nt, Artificial Sequence
  Description of Artificial Sequence: Synthetic oligonucleotide
gcuguucuaagauccacuc

SEQ ID NO: 2764048 - RNA, 19 nt, Artificial Sequence
  Description of Artificial Sequence: Synthetic oligonucleotide
uaucuccagcucuggaauc

SEQ ID NO: 2764049 - RNA, 19 nt, Artificial Sequence
  Description of Artificial Sequence: Synthetic oligonucleotide
gacaagugagcuguucuaa

SEQ ID NO: 2764050 - RNA, 19 nt, Artificial Sequence
  Description of Artificial Sequence: Synthetic oligonucleotide
cuggggugugcucagcuuc

SEQ ID NO: 2764051 - RNA, 19 nt, Artificial Sequence
  Description of Artificial Sequence: Synthetic oligonucleotide
aucuaucuccagcucugga

SEQ ID NO: 2764052 - RNA, 19 nt, Artificial Sequence
  Description of Artificial Sequence: Synthetic oligonucleotide
aacugagggcaagggaagu

SEQ ID NO: 2764053 - RNA, 19 nt, Artificial Sequence
  Description of Artificial Sequence: Synthetic oligonucleotide
guacuugacggugaccuuc

SEQ ID NO: 2764054 - RNA, 19 nt, Artificial Sequence
  Description of Artificial Sequence: Synthetic oligonucleotide
aagucccaucaguuuaaua

SEQ ID NO: 2764055 - RNA, 19 nt, Artificial Sequence
  Description of Artificial Sequence: Synthetic oligonucleotide
aucugggucaggacccuac

SEQ ID NO: 2764056 - RNA, 19 nt, Artificial Sequence
  Description of Artificial Sequence: Synthetic oligonucleotide
ugcaggguccccgguauug

SEQ ID NO: 2764057 - RNA, 19 nt, Artificial Sequence
  Description of Artificial Sequence: Synthetic oligonucleotide
gggaucccuguucauggcg

SEQ ID NO: 2764058 - RNA, 19 nt, Artificial Sequence
  Description of Artificial Sequence: Synthetic oligonucleotide
gccucaguggguuuguaac

SEQ ID NO: 2764059 - RNA, 19 nt, Artificial Sequence
  Description of Artificial Sequence: Synthetic oligonucleotide
gcuguugcuacgagguugg

SEQ ID NO: 2764060 - RNA, 19 nt, Artificial Sequence
  Description of Artificial Sequence: Synthetic oligonucleotide
ugacggugaccuucccuug

SEQ ID NO: 2764061 - RNA, 19 nt, Artificial Sequence
  Description of Artificial Sequence: Synthetic oligonucleotide
aggccagagaugaaggccu

SEQ ID NO: 2764062 - RNA, 19 nt, Artificial Sequence
  Description of Artificial Sequence: Synthetic oligonucleotide
cgggccaucaucauccgcg

SEQ ID NO: 2764063 - RNA, 19 nt, Artificial Sequence
  Description of Artificial Sequence: Synthetic oligonucleotide
gccauggucaucuggguca

SEQ ID NO: 2764064 - RNA, 19 nt, Artificial Sequence
  Description of Artificial Sequence: Synthetic oligonucleotide
ucccuguucauggcgccag

SEQ ID NO: 2764065 - RNA, 19 nt, Artificial Sequence
  Description of Artificial Sequence: Synthetic oligonucleotide
acugagggcaagggaagug

SEQ ID NO: 2764066 - RNA, 19 nt, Artificial Sequence
  Description of Artificial Sequence: Synthetic oligonucleotide
cuccagcucuggaaucucc

SEQ ID NO: 2764067 - RNA, 19 nt, Artificial Sequence
  Description of Artificial Sequence: Synthetic oligonucleotide
ucaccgggccaucaucauc

SEQ ID NO: 2764068 - RNA, 19 nt, Artificial Sequence
  Description of Artificial Sequence: Synthetic oligonucleotide
agcuguucuaagauccacu

SEQ ID NO: 2764069 - RNA, 19 nt, Artificial Sequence
  Description of Artificial Sequence: Synthetic oligonucleotide
ggaagugccccuaggcagg

SEQ ID NO: 2764070 - RNA, 19 nt, Artificial Sequence
  Description of Artificial Sequence: Synthetic oligonucleotide
aagaguucauccacaucua

SEQ ID NO: 2764071 - RNA, 19 nt, Artificial Sequence
  Description of Artificial Sequence: Synthetic oligonucleotide
uggucaucugggucaggac

SEQ ID NO: 2764072 - RNA, 19 nt, Artificial Sequence
  Description of Artificial Sequence: Synthetic oligonucleotide
gagcuguucuaagauccac

SEQ ID NO: 2764073 - RNA, 19 nt, Artificial Sequence
  Description of Artificial Sequence: Synthetic oligonucleotide
ggugugcucagcuucugca

SEQ ID NO: 2764074 - RNA, 19 nt, Artificial Sequence
  Description of Artificial Sequence: Synthetic oligonucleotide
gaagugccccuaggcaggg

SEQ ID NO: 2764075 - RNA, 19 nt, Artificial Sequence
  Description of Artificial Sequence: Synthetic oligonucleotide
caucuaucuccagcucugg

SEQ ID NO: 2764076 - RNA, 19 nt, Artificial Sequence
  Description of Artificial Sequence: Synthetic oligonucleotide
ugaccuucccuugccgucu

SEQ ID NO: 2764077 - RNA, 19 nt, Artificial Sequence
  Description of Artificial Sequence: Synthetic oligonucleotide
cucuuccuggcagucguag

SEQ ID NO: 2764078 - RNA, 19 nt, Artificial Sequence
  Description of Artificial Sequence: Synthetic oligonucleotide
auggcgccaggccuggcug

SEQ ID NO: 2764079 - RNA, 19 nt, Artificial Sequence
  Description of Artificial Sequence: Synthetic oligonucleotide
aaagucccaucaguuuaau

SEQ ID NO: 2764080 - RNA, 19 nt, Artificial Sequence
  Description of Artificial Sequence: Synthetic oligonucleotide
agcucuggaaucuccucuu

SEQ ID NO: 2764081 - RNA, 19 nt, Artificial Sequence
  Description of Artificial Sequence: Synthetic oligonucleotide
gaaucuccucuuccuggca

SEQ ID NO: 2764082 - RNA, 19 nt, Artificial Sequence
  Description of Artificial Sequence: Synthetic oligonucleotide
cuggcugcaggguccccgg

SEQ ID NO: 2764083 - RNA, 19 nt, Artificial Sequence
  Description of Artificial Sequence: Synthetic oligonucleotide
acccuacuucuucuggggu

SEQ ID NO: 2764084 - RNA, 19 nt, Artificial Sequence
  Description of Artificial Sequence: Synthetic oligonucleotide
gagggcaagggaagugccc

SEQ ID NO: 2764085 - RNA, 19 nt, Artificial Sequence
  Description of Artificial Sequence: Synthetic oligonucleotide
uacuucuucuggggugugc

SEQ ID NO: 2764086 - RNA, 19 nt, Artificial Sequence
  Description of Artificial Sequence: Synthetic oligonucleotide
agcuccuugcggucguacu

SEQ ID NO: 2764087 - RNA, 19 nt, Artificial Sequence
  Description of Artificial Sequence: Synthetic oligonucleotide
gguauugcuguugcuacga

SEQ ID NO: 2764088 - RNA, 19 nt, Artificial Sequence
  Description of Artificial Sequence: Synthetic oligonucleotide
agcagcccggguaucauca

SEQ ID NO: 2764089 - RNA, 19 nt, Artificial Sequence
  Description of Artificial Sequence: Synthetic oligonucleotide
ggguuuguaacagucaacu

SEQ ID NO: 2764090 - RNA, 19 nt, Artificial Sequence
  Description of Artificial Sequence: Synthetic oligonucleotide
gugaccuucccuugccguc

SEQ ID NO: 2764091 - RNA, 19 nt, Artificial Sequence
  Description of Artificial Sequence: Synthetic oligonucleotide
aggccuggcugcagggucc

SEQ ID NO: 2764092 - RNA, 19 nt, Artificial Sequence
  Description of Artificial Sequence: Synthetic oligonucleotide
uccuccagguugaggcgcu

SEQ ID NO: 2764093 - RNA, 19 nt, Artificial Sequence
  Description of Artificial Sequence: Synthetic oligonucleotide
ccuugacucuagcagcccg

SEQ ID NO: 2764094 - RNA, 19 nt, Artificial Sequence
  Description of Artificial Sequence: Synthetic oligonucleotide
uccuugcggucguacuuga

SEQ ID NO: 2764095 - RNA, 19 nt, Artificial Sequence
  Description of Artificial Sequence: Synthetic oligonucleotide
ugacucuagcagcccgggu

SEQ ID NO: 2764096 - RNA, 19 nt, Artificial Sequence
  Description of Artificial Sequence: Synthetic oligonucleotide
cuccuugcggucguacuug

SEQ ID NO: 2764097 - RNA, 19 nt, Artificial Sequence
  Description of Artificial Sequence: Synthetic oligonucleotide
uccuugacucuagcagccc

SEQ ID NO: 2764098 - RNA, 19 nt, Artificial Sequence
  Description of Artificial Sequence: Synthetic oligonucleotide
cacaucuaucuccagcucu

SEQ ID NO: 2764099 - RNA, 19 nt, Artificial Sequence
  Description of Artificial Sequence: Synthetic oligonucleotide
caggacccuacuucuucug

SEQ ID NO: 2764100 - RNA, 19 nt, Artificial Sequence
  Description of Artificial Sequence: Synthetic oligonucleotide
ugcaugccccggaucuugu

SEQ ID NO: 2764101 - RNA, 19 nt, Artificial Sequence
  Description of Artificial Sequence: Synthetic oligonucleotide
augaaggccucaguggguu

SEQ ID NO: 2764102 - RNA, 19 nt, Artificial Sequence
  Description of Artificial Sequence: Synthetic oligonucleotide
cuccuccagguugaggcgc

SEQ ID NO: 2764103 - RNA, 19 nt, Artificial Sequence
  Description of Artificial Sequence: Synthetic oligonucleotide
agcuucugcaugccccgga

SEQ ID NO: 2764104 - RNA, 19 nt, Artificial Sequence
  Description of Artificial Sequence: Synthetic oligonucleotide
ccgguauugcuguugcuac

SEQ ID NO: 2764105 - RNA, 19 nt, Artificial Sequence
  Description of Artificial Sequence: Synthetic oligonucleotide
uggcagucguagagacaag

SEQ ID NO: 2764106 - RNA, 19 nt, Artificial Sequence
  Description of Artificial Sequence: Synthetic oligonucleotide
ucuggggugugcucagcuu

SEQ ID NO: 2764107 - RNA, 19 nt, Artificial Sequence
  Description of Artificial Sequence: Synthetic oligonucleotide
gcgauuguccugugggagc

SEQ ID NO: 2764108 - RNA, 19 nt, Artificial Sequence
  Description of Artificial Sequence: Synthetic oligonucleotide
uugccgucucaccgggcca

SEQ ID NO: 2764109 - RNA, 19 nt, Artificial Sequence
  Description of Artificial Sequence: Synthetic oligonucleotide
ugcggucguacuugacggu

SEQ ID NO: 2764110 - RNA, 19 nt, Artificial Sequence
  Description of Artificial Sequence: Synthetic oligonucleotide
ugcucagcuucugcaugcc

SEQ ID NO: 2764111 - RNA, 19 nt, Artificial Sequence
  Description of Artificial Sequence: Synthetic oligonucleotide
guucuaagauccacuccuc

SEQ ID NO: 2764112 - RNA, 19 nt, Artificial Sequence
  Description of Artificial Sequence: Synthetic oligonucleotide
ggaucccuguucauggcgc

SEQ ID NO: 2764113 - RNA, 19 nt, Artificial Sequence
  Description of Artificial Sequence: Synthetic oligonucleotide
cuaucuccagcucuggaau

SEQ ID NO: 2764114 - RNA, 19 nt, Artificial Sequence
  Description of Artificial Sequence: Synthetic oligonucleotide
cauccacaucuaucuccag

SEQ ID NO: 2764115 - RNA, 19 nt, Artificial Sequence
  Description of Artificial Sequence: Synthetic oligonucleotide
ggcagcgauuguccugugg

SEQ ID NO: 2764116 - RNA, 19 nt, Artificial Sequence
  Description of Artificial Sequence: Synthetic oligonucleotide
agguugaggcgcuuccgua

SEQ ID NO: 2764117 - RNA, 19 nt, Artificial Sequence
  Description of Artificial Sequence: Synthetic oligonucleotide
aaggccucaguggguuugu

SEQ ID NO: 2764118 - RNA, 19 nt, Artificial Sequence
  Description of Artificial Sequence: Synthetic oligonucleotide
gcaggccagagaugaaggc

SEQ ID NO: 2764119 - RNA, 19 nt, Artificial Sequence
  Description of Artificial Sequence: Synthetic oligonucleotide
accgggccaucaucauccg

SEQ ID NO: 2764120 - RNA, 19 nt, Artificial Sequence
  Description of Artificial Sequence: Synthetic oligonucleotide
gucucaccgggccaucauc

SEQ ID NO: 2764121 - RNA, 19 nt, Artificial Sequence
  Description of Artificial Sequence: Synthetic oligonucleotide
gcagucguagagacaagug

SEQ ID NO: 2764122 - RNA, 19 nt, Artificial Sequence
  Description of Artificial Sequence: Synthetic oligonucleotide
uaacagcuccuugacucua

SEQ ID NO: 2764123 - RNA, 19 nt, Artificial Sequence
  Description of Artificial Sequence: Synthetic oligonucleotide
cuccucuuccuggcagucg

SEQ ID NO: 2764124 - RNA, 19 nt, Artificial Sequence
  Description of Artificial Sequence: Synthetic oligonucleotide
cuaacagcuccuugacucu

SEQ ID NO: 2764125 - RNA, 19 nt, Artificial Sequence
  Description of Artificial Sequence: Synthetic oligonucleotide
ugccccggaucuuguccag

SEQ ID NO: 2764126 - RNA, 19 nt, Artificial Sequence
  Description of Artificial Sequence: Synthetic oligonucleotide
uugcuguugcuacgagguu

SEQ ID NO: 2764127 - RNA, 19 nt, Artificial Sequence
  Description of Artificial Sequence: Synthetic oligonucleotide
ucaucugggucaggacccu

SEQ ID NO: 2764128 - RNA, 19 nt, Artificial Sequence
  Description of Artificial Sequence: Synthetic oligonucleotide
cuucugcaugccccggauc

SEQ ID NO: 2764129 - RNA, 19 nt, Artificial Sequence
  Description of Artificial Sequence: Synthetic oligonucleotide
ugaggcgcuuccguagcuc

SEQ ID NO: 2764130 - RNA, 19 nt, Artificial Sequence
  Description of Artificial Sequence: Synthetic oligonucleotide
cugcaugccccggaucuug

SEQ ID NO: 2764131 - RNA, 19 nt, Artificial Sequence
  Description of Artificial Sequence: Synthetic oligonucleotide
cggaucuuguccagcaggc

SEQ ID NO: 2764132 - RNA, 19 nt, Artificial Sequence
  Description of Artificial Sequence: Synthetic oligonucleotide
guccaagaguucauccaca

SEQ ID NO: 2764133 - RNA, 19 nt, Artificial Sequence
  Description of Artificial Sequence: Synthetic oligonucleotide
gugggagccauggucaucu

SEQ ID NO: 2764134 - RNA, 19 nt, Artificial Sequence
  Description of Artificial Sequence: Synthetic oligonucleotide
cagucaacuaacagcuccu

SEQ ID NO: 2764135 - RNA, 19 nt, Artificial Sequence
  Description of Artificial Sequence: Synthetic oligonucleotide
auuguccugugggagccau

SEQ ID NO: 2764136 - RNA, 19 nt, Artificial Sequence
  Description of Artificial Sequence: Synthetic oligonucleotide
gcaagggaagugccccuag

SEQ ID NO: 2764137 - RNA, 19 nt, Artificial Sequence
  Description of Artificial Sequence: Synthetic oligonucleotide
uagcagcccggguaucauc

SEQ ID NO: 2764138 - RNA, 19 nt, Artificial Sequence
  Description of Artificial Sequence: Synthetic oligonucleotide
gguuuguaacagucaacua

SEQ ID NO: 2764139 - RNA, 19 nt, Artificial Sequence
  Description of Artificial Sequence: Synthetic oligonucleotide
ggucguacuugacggugac

SEQ ID NO: 2764140 - RNA, 19 nt, Artificial Sequence
  Description of Artificial Sequence: Synthetic oligonucleotide
agucaacuaacagcuccuu

SEQ ID NO: 2764141 - RNA, 19 nt, Artificial Sequence
  Description of Artificial Sequence: Synthetic oligonucleotide
auccacuccuccagguuga

SEQ ID NO: 2764142 - RNA, 19 nt, Artificial Sequence
  Description of Artificial Sequence: Synthetic oligonucleotide
uagagacaagugagcuguu

SEQ ID NO: 2764143 - RNA, 19 nt, Artificial Sequence
  Description of Artificial Sequence: Synthetic oligonucleotide
cagcgauuguccuguggga

SEQ ID NO: 2764144 - RNA, 19 nt, Artificial Sequence
  Description of Artificial Sequence: Synthetic oligonucleotide
gucguacuugacggugacc

SEQ ID NO: 2764145 - RNA, 19 nt, Artificial Sequence
  Description of Artificial Sequence: Synthetic oligonucleotide
ugugggagccauggucauc

SEQ ID NO: 2764146 - RNA, 19 nt, Artificial Sequence
  Description of Artificial Sequence: Synthetic oligonucleotide
caucacuuuccauguccaa

SEQ ID NO: 2764147 - RNA, 19 nt, Artificial Sequence
  Description of Artificial Sequence: Synthetic oligonucleotide
uccacuccuccagguugag

SEQ ID NO: 2764148 - RNA, 19 nt, Artificial Sequence
  Description of Artificial Sequence: Synthetic oligonucleotide
gaugaaggccucagugggu

SEQ ID NO: 2764149 - RNA, 19 nt, Artificial Sequence
  Description of Artificial Sequence: Synthetic oligonucleotide
ugaaggccucaguggguuu

SEQ ID NO: 2764150 - RNA, 19 nt, Artificial Sequence
  Description of Artificial Sequence: Synthetic oligonucleotide
ccuaggcaggggcacgggg

SEQ ID NO: 2764151 - RNA, 19 nt, Artificial Sequence
  Description of Artificial Sequence: Synthetic oligonucleotide
gggccaucaucauccgcgc

SEQ ID NO: 2764152 - RNA, 19 nt, Artificial Sequence
  Description of Artificial Sequence: Synthetic oligonucleotide
cuugacggugaccuucccu

SEQ ID NO: 2764153 - RNA, 19 nt, Artificial Sequence
  Description of Artificial Sequence: Synthetic oligonucleotide
gggugugcucagcuucugc

SEQ ID NO: 2764154 - RNA, 19 nt, Artificial Sequence
  Description of Artificial Sequence: Synthetic oligonucleotide
cccaucaguuuaauaacaa

SEQ ID NO: 2764155 - RNA, 19 nt, Artificial Sequence
  Description of Artificial Sequence: Synthetic oligonucleotide
aggguccccgguauugcug

SEQ ID NO: 2764156 - RNA, 19 nt, Artificial Sequence
  Description of Artificial Sequence: Synthetic oligonucleotide
ugccccuaggcaggggcac

SEQ ID NO: 2764157 - RNA, 19 nt, Artificial Sequence
  Description of Artificial Sequence: Synthetic oligonucleotide
uagcuccuugcggucguac

SEQ ID NO: 2764158 - RNA, 19 nt, Artificial Sequence
  Description of Artificial Sequence: Synthetic oligonucleotide
agcccggguaucaucacuu

SEQ ID NO: 2764159 - RNA, 19 nt, Artificial Sequence
  Description of Artificial Sequence: Synthetic oligonucleotide
guccccgguauugcuguug

SEQ ID NO: 2764160 - RNA, 19 nt, Artificial Sequence
  Description of Artificial Sequence: Synthetic oligonucleotide
ggggaucccuguucauggc

SEQ ID NO: 2764161 - RNA, 19 nt, Artificial Sequence
  Description of Artificial Sequence: Synthetic oligonucleotide
ugggagccauggucaucug

SEQ ID NO: 2764162 - RNA, 19 nt, Artificial Sequence
  Description of Artificial Sequence: Synthetic oligonucleotide
cuucuggggugugcucagc

SEQ ID NO: 2764163 - RNA, 19 nt, Artificial Sequence
  Description of Artificial Sequence: Synthetic oligonucleotide
cuucgccugcagccccagg

SEQ ID NO: 2764164 - RNA, 19 nt, Artificial Sequence
  Description of Artificial Sequence: Synthetic oligonucleotide
gcucagcuucugcaugccc

SEQ ID NO: 2764165 - RNA, 19 nt, Artificial Sequence
  Description of Artificial Sequence: Synthetic oligonucleotide
cgguauugcuguugcuacg

SEQ ID NO: 2764166 - RNA, 19 nt, Artificial Sequence
  Description of Artificial Sequence: Synthetic oligonucleotide
ccaagaguucauccacauc

SEQ ID NO: 2764167 - RNA, 19 nt, Artificial Sequence
  Description of Artificial Sequence: Synthetic oligonucleotide
aucccuguucauggcgcca

SEQ ID NO: 2764168 - RNA, 19 nt, Artificial Sequence
  Description of Artificial Sequence: Synthetic oligonucleotide
ucugcaugccccggaucuu

SEQ ID NO: 2764169 - RNA, 19 nt, Artificial Sequence
  Description of Artificial Sequence: Synthetic oligonucleotide
gccaggccuggcugcaggg

SEQ ID NO: 2764170 - RNA, 19 nt, Artificial Sequence
  Description of Artificial Sequence: Synthetic oligonucleotide
gcggucguacuugacggug

SEQ ID NO: 2764171 - RNA, 19 nt, Artificial Sequence
  Description of Artificial Sequence: Synthetic oligonucleotide
gaccuucccuugccgucuc

SEQ ID NO: 2764172 - RNA, 19 nt, Artificial Sequence
  Description of Artificial Sequence: Synthetic oligonucleotide
gauuguccugugggagcca

SEQ ID NO: 2764173 - RNA, 19 nt, Artificial Sequence
  Description of Artificial Sequence: Synthetic oligonucleotide
cgauuguccugugggagcc

SEQ ID NO: 2764174 - RNA, 19 nt, Artificial Sequence
  Description of Artificial Sequence: Synthetic oligonucleotide
cuguugcuacgagguuggg

SEQ ID NO: 2764175 - RNA, 19 nt, Artificial Sequence
  Description of Artificial Sequence: Synthetic oligonucleotide
ggggacucuggaaguagac

SEQ ID NO: 2764176 - RNA, 19 nt, Artificial Sequence
  Description of Artificial Sequence: Synthetic oligonucleotide
gggucaggacccuacuucu

SEQ ID NO: 2764177 - RNA, 19 nt, Artificial Sequence
  Description of Artificial Sequence: Synthetic oligonucleotide
cauggucaucugggucagg

SEQ ID NO: 2764178 - RNA, 19 nt, Artificial Sequence
  Description of Artificial Sequence: Synthetic oligonucleotide
cagcuucugcaugccccgg

SEQ ID NO: 2764179 - RNA, 19 nt, Artificial Sequence
  Description of Artificial Sequence: Synthetic oligonucleotide
cuacuucuucuggggugug

SEQ ID NO: 2764180 - RNA, 19 nt, Artificial Sequence
  Description of Artificial Sequence: Synthetic oligonucleotide
ggugaccuucccuugccgu

SEQ ID NO: 2764181 - RNA, 19 nt, Artificial Sequence
  Description of Artificial Sequence: Synthetic oligonucleotide
ccagguugaggcgcuuccg

SEQ ID NO: 2764182 - RNA, 19 nt, Artificial Sequence
  Description of Artificial Sequence: Synthetic oligonucleotide
ccuguucauggcgccaggc

SEQ ID NO: 2764183 - RNA, 19 nt, Artificial Sequence
  Description of Artificial Sequence: Synthetic oligonucleotide
ggccaucaucauccgcgcc

SEQ ID NO: 2764184 - RNA, 19 nt, Artificial Sequence
  Description of Artificial Sequence: Synthetic oligonucleotide
uggcugcaggguccccggu

SEQ ID NO: 2764185 - RNA, 19 nt, Artificial Sequence
  Description of Artificial Sequence: Synthetic oligonucleotide
cagguugaggcgcuuccgu

SEQ ID NO: 2764186 - RNA, 19 nt, Artificial Sequence
  Description of Artificial Sequence: Synthetic oligonucleotide
cccuugccgucucaccggg

SEQ ID NO: 2764187 - RNA, 19 nt, Artificial Sequence
  Description of Artificial Sequence: Synthetic oligonucleotide
gcucuggaaucuccucuuc

SEQ ID NO: 2764188 - RNA, 19 nt, Artificial Sequence
  Description of Artificial Sequence: Synthetic oligonucleotide
ggccucaguggguuuguaa

SEQ ID NO: 2764189 - RNA, 19 nt, Artificial Sequence
  Description of Artificial Sequence: Synthetic oligonucleotide
cccggguaucaucacuuuc

SEQ ID NO: 2764190 - RNA, 19 nt, Artificial Sequence
  Description of Artificial Sequence: Synthetic oligonucleotide
ggccuucgccugcagcccc

SEQ ID NO: 2764191 - RNA, 19 nt, Artificial Sequence
  Description of Artificial Sequence: Synthetic oligonucleotide
gcaggguccccgguauugc

SEQ ID NO: 2764192 - RNA, 19 nt, Artificial Sequence
  Description of Artificial Sequence: Synthetic oligonucleotide
ccacaucuaucuccagcuc

SEQ ID NO: 2764193 - RNA, 19 nt, Artificial Sequence
  Description of Artificial Sequence: Synthetic oligonucleotide
ggcagucguagagacaagu

SEQ ID NO: 2764194 - RNA, 19 nt, Artificial Sequence
  Description of Artificial Sequence: Synthetic oligonucleotide
accuucccuugccgucuca

SEQ ID NO: 2764195 - RNA, 19 nt, Artificial Sequence
  Description of Artificial Sequence: Synthetic oligonucleotide
ccaucaguuuaauaacaau

SEQ ID NO: 2764196 - RNA, 19 nt, Artificial Sequence
  Description of Artificial Sequence: Synthetic oligonucleotide
ccauggucaucugggucag

SEQ ID NO: 2764197 - RNA, 19 nt, Artificial Sequence
  Description of Artificial Sequence: Synthetic oligonucleotide
ccguagcuccuugcggucg

SEQ ID NO: 2764198 - RNA, 19 nt, Artificial Sequence
  Description of Artificial Sequence: Synthetic oligonucleotide
cauggcgccaggccuggcu

SEQ ID NO: 2764199 - RNA, 19 nt, Artificial Sequence
  Description of Artificial Sequence: Synthetic oligonucleotide
cccggaucuuguccagcag

SEQ ID NO: 2764200 - RNA, 19 nt, Artificial Sequence
  Description of Artificial Sequence: Synthetic oligonucleotide
ggggcagcgauuguccugu

SEQ ID NO: 2764201 - RNA, 19 nt, Artificial Sequence
  Description of Artificial Sequence: Synthetic oligonucleotide
cucuagcagcccggguauc

SEQ ID NO: 2764202 - RNA, 19 nt, Artificial Sequence
  Description of Artificial Sequence: Synthetic oligonucleotide
gggccuucgccugcagccc

SEQ ID NO: 2764203 - RNA, 19 nt, Artificial Sequence
  Description of Artificial Sequence: Synthetic oligonucleotide
ggguccccgguauugcugu

SEQ ID NO: 2764204 - RNA, 19 nt, Artificial Sequence
  Description of Artificial Sequence: Synthetic oligonucleotide
cccuguucauggcgccagg

SEQ ID NO: 2764205 - RNA, 19 nt, Artificial Sequence
  Description of Artificial Sequence: Synthetic oligonucleotide
ccuucccuugccgucucac

SEQ ID NO: 2764206 - RNA, 19 nt, Artificial Sequence
  Description of Artificial Sequence: Synthetic oligonucleotide
aggcgcuuccguagcuccu

SEQ ID NO: 2764207 - RNA, 19 nt, Artificial Sequence
  Description of Artificial Sequence: Synthetic oligonucleotide
ccuugcggucguacuugac

SEQ ID NO: 2764208 - RNA, 19 nt, Artificial Sequence
  Description of Artificial Sequence: Synthetic oligonucleotide
cccgguauugcuguugcua

SEQ ID NO: 2764209 - RNA, 19 nt, Artificial Sequence
  Description of Artificial Sequence: Synthetic oligonucleotide
ccacuccuccagguugagg

SEQ ID NO: 2764210 - RNA, 19 nt, Artificial Sequence
  Description of Artificial Sequence: Synthetic oligonucleotide
cggugaccuucccuugccg

SEQ ID NO: 2764211 - RNA, 19 nt, Artificial Sequence
  Description of Artificial Sequence: Synthetic oligonucleotide
cggguaucaucacuuucca

SEQ ID NO: 2764212 - RNA, 19 nt, Artificial Sequence
  Description of Artificial Sequence: Synthetic oligonucleotide
caggguccccgguauugcu

SEQ ID NO: 2764213 - RNA, 19 nt, Artificial Sequence
  Description of Artificial Sequence: Synthetic oligonucleotide
gcgcuuccguagcuccuug

SEQ ID NO: 2764214 - RNA, 19 nt, Artificial Sequence
  Description of Artificial Sequence: Synthetic oligonucleotide
gcaugccccggaucuuguc

SEQ ID NO: 2764215 - RNA, 19 nt, Artificial Sequence
  Description of Artificial Sequence: Synthetic oligonucleotide
gccccuaggcaggggcacg

SEQ ID NO: 2764216 - RNA, 19 nt, Artificial Sequence
  Description of Artificial Sequence: Synthetic oligonucleotide
ccuggcagucguagagaca

SEQ ID NO: 2764217 - RNA, 19 nt, Artificial Sequence
  Description of Artificial Sequence: Synthetic oligonucleotide
ccccuaggcaggggcacgg

SEQ ID NO: 2764218 - RNA, 19 nt, Artificial Sequence
  Description of Artificial Sequence: Synthetic oligonucleotide
cagcccggguaucaucacu

SEQ ID NO: 2764219 - RNA, 19 nt, Artificial Sequence
  Description of Artificial Sequence: Synthetic oligonucleotide
gcugcaggguccccgguau

SEQ ID NO: 2764220 - RNA, 19 nt, Artificial Sequence
  Description of Artificial Sequence: Synthetic oligonucleotide
ggguaucaucacuuuccau

SEQ ID NO: 2764221 - RNA, 19 nt, Artificial Sequence
  Description of Artificial Sequence: Synthetic oligonucleotide
ccgggccaucaucauccgc

SEQ ID NO: 2764222 - RNA, 19 nt, Artificial Sequence
  Description of Artificial Sequence: Synthetic oligonucleotide
cugggucaggacccuacuu

SEQ ID NO: 2764223 - RNA, 19 nt, Artificial Sequence
  Description of Artificial Sequence: Synthetic oligonucleotide
cgcuuccguagcuccuugc

SEQ ID NO: 2764224 - RNA, 19 nt, Artificial Sequence
  Description of Artificial Sequence: Synthetic oligonucleotide
ggggugugcucagcuucug

SEQ ID NO: 2764225 - RNA, 19 nt, Artificial Sequence
  Description of Artificial Sequence: Synthetic oligonucleotide
ggcugcaggguccccggua

SEQ ID NO: 2764226 - RNA, 19 nt, Artificial Sequence
  Description of Artificial Sequence: Synthetic oligonucleotide
ccuugccgucucaccgggc

SEQ ID NO: 2764227 - RNA, 19 nt, Artificial Sequence
  Description of Artificial Sequence: Synthetic oligonucleotide
cucaccgggccaucaucau

SEQ ID NO: 2764228 - RNA, 19 nt, Artificial Sequence
  Description of Artificial Sequence: Synthetic oligonucleotide
gccagagaugaaggccuca

SEQ ID NO: 2764229 - RNA, 19 nt, Artificial Sequence
  Description of Artificial Sequence: Synthetic oligonucleotide
gcuccuugcggucguacuu

SEQ ID NO: 2764230 - RNA, 19 nt, Artificial Sequence
  Description of Artificial Sequence: Synthetic oligonucleotide
cugugggagccauggucau

SEQ ID NO: 2764231 - RNA, 19 nt, Artificial Sequence
  Description of Artificial Sequence: Synthetic oligonucleotide
ggccagagaugaaggccuc

SEQ ID NO: 2764232 - RNA, 19 nt, Artificial Sequence
  Description of Artificial Sequence: Synthetic oligonucleotide
ggcaagggaagugccccua

SEQ ID NO: 2764233 - RNA, 19 nt, Artificial Sequence
  Description of Artificial Sequence: Synthetic oligonucleotide
ggccuggcugcaggguccc

SEQ ID NO: 2764234 - RNA, 19 nt, Artificial Sequence
  Description of Artificial Sequence: Synthetic oligonucleotide
guccugugggagccauggu

SEQ ID NO: 2764235 - RNA, 19 nt, Artificial Sequence
  Description of Artificial Sequence: Synthetic oligonucleotide
cuagcagcccggguaucau

SEQ ID NO: 2764236 - RNA, 19 nt, Artificial Sequence
  Description of Artificial Sequence: Synthetic oligonucleotide
cggucguacuugacgguga

SEQ ID NO: 2764237 - RNA, 19 nt, Artificial Sequence
  Description of Artificial Sequence: Synthetic oligonucleotide
gccccggaucuuguccagc

SEQ ID NO: 2764238 - RNA, 19 nt, Artificial Sequence
  Description of Artificial Sequence: Synthetic oligonucleotide
cccuaggcaggggcacggg

SEQ ID NO: 2764239 - RNA, 19 nt, Artificial Sequence
  Description of Artificial Sequence: Synthetic oligonucleotide
gggcaagggaagugccccu

SEQ ID NO: 2764240 - RNA, 19 nt, Artificial Sequence
  Description of Artificial Sequence: Synthetic oligonucleotide
aggccucaguggguuugua

SEQ ID NO: 2764241 - RNA, 19 nt, Artificial Sequence
  Description of Artificial Sequence: Synthetic oligonucleotide
guagcuccuugcggucgua

SEQ ID NO: 2764242 - RNA, 19 nt, Artificial Sequence
  Description of Artificial Sequence: Synthetic oligonucleotide
caucugggucaggacccua

SEQ ID NO: 2764243 - RNA, 19 nt, Artificial Sequence
  Description of Artificial Sequence: Synthetic oligonucleotide
gggcagcgauuguccugug

SEQ ID NO: 2764244 - RNA, 19 nt, Artificial Sequence
  Description of Artificial Sequence: Synthetic oligonucleotide
ggcgccaggccuggcugca

SEQ ID NO: 2764245 - RNA, 19 nt, Artificial Sequence
  Description of Artificial Sequence: Synthetic oligonucleotide
ccuucgccugcagccccag

SEQ ID NO: 2764246 - RNA, 19 nt, Artificial Sequence
  Description of Artificial Sequence: Synthetic oligonucleotide
ccagcaggccagagaugaa

SEQ ID NO: 2764247 - RNA, 19 nt, Artificial Sequence
  Description of Artificial Sequence: Synthetic oligonucleotide
ggucaggacccuacuucuu

SEQ ID NO: 2764248 - RNA, 19 nt, Artificial Sequence
  Description of Artificial Sequence: Synthetic oligonucleotide
gccuucgccugcagcccca

SEQ ID NO: 2764249 - RNA, 19 nt, Artificial Sequence
  Description of Artificial Sequence: Synthetic oligonucleotide
gcgccaggccuggcugcag

SEQ ID NO: 2764250 - RNA, 19 nt, Artificial Sequence
  Description of Artificial Sequence: Synthetic oligonucleotide
ccucuuccuggcagucgua

SEQ ID NO: 2764251 - RNA, 19 nt, Artificial Sequence
  Description of Artificial Sequence: Synthetic oligonucleotide
gcccggguaucaucacuuu

SEQ ID NO: 2764252 - RNA, 19 nt, Artificial Sequence
  Description of Artificial Sequence: Synthetic oligonucleotide
ccgucucaccgggccauca

SEQ ID NO: 2764253 - RNA, 19 nt, Artificial Sequence
  Description of Artificial Sequence: Synthetic oligonucleotide
cugcaggguccccgguauu

SEQ ID NO: 2764254 - RNA, 19 nt, Artificial Sequence
  Description of Artificial Sequence: Synthetic oligonucleotide
cguagcuccuugcggucgu

SEQ ID NO: 2764255 - RNA, 19 nt, Artificial Sequence
  Description of Artificial Sequence: Synthetic oligonucleotide
gccgucucaccgggccauc

SEQ ID NO: 2764256 - RNA, 19 nt, Artificial Sequence
  Description of Artificial Sequence: Synthetic oligonucleotide
cccgggccuucgccugcag

SEQ ID NO: 2764257 - RNA, 19 nt, Artificial Sequence
  Description of Artificial Sequence: Synthetic oligonucleotide
gccuggcugcagggucccc

SEQ ID NO: 2764258 - RNA, 19 nt, Artificial Sequence
  Description of Artificial Sequence: Synthetic oligonucleotide
gguccccgguauugcuguu

SEQ ID NO: 2764259 - RNA, 19 nt, Artificial Sequence
  Description of Artificial Sequence: Synthetic oligonucleotide
ccccgguauugcuguugcu

SEQ ID NO: 2764260 - RNA, 19 nt, Artificial Sequence
  Description of Artificial Sequence: Synthetic oligonucleotide
cgucucaccgggccaucau

SEQ ID NO: 2764261 - RNA, 19 nt, Artificial Sequence
  Description of Artificial Sequence: Synthetic oligonucleotide
ccccgggccuucgccugca

SEQ ID NO: 2764262 - RNA, 19 nt, Artificial Sequence
  Description of Artificial Sequence: Synthetic oligonucleotide
ccuccagguugaggcgcuu

SEQ ID NO: 2764263 - RNA, 19 nt, Artificial Sequence
  Description of Artificial Sequence: Synthetic oligonucleotide
aaaauugaagugugugccc

SEQ ID NO: 2764264 - RNA, 19 nt, Artificial Sequence
  Description of Artificial Sequence: Synthetic oligonucleotide
uuuuacaaagucaauagaa

SEQ ID NO: 2764265 - RNA, 19 nt, Artificial Sequence
  Description of Artificial Sequence: Synthetic oligonucleotide
ugauugaacagauuaauua

SEQ ID NO: 2764266 - RNA, 19 nt, Artificial Sequence
  Description of Artificial Sequence: Synthetic oligonucleotide
uuaaacucgauauccaggu

SEQ ID NO: 2764267 - RNA, 19 nt, Artificial Sequence
  Description of Artificial Sequence: Synthetic oligonucleotide
agacgcucgcccuagaacc

SEQ ID NO: 2764268 - RNA, 19 nt, Artificial Sequence
  Description of Artificial Sequence: Synthetic oligonucleotide
uagucaguucuuuucaagg

SEQ ID NO: 2764269 - RNA, 19 nt, Artificial Sequence
  Description of Artificial Sequence: Synthetic oligonucleotide
cuuaaacucgauauccagg

SEQ ID NO: 2764270 - RNA, 19 nt, Artificial Sequence
  Description of Artificial Sequence: Synthetic oligonucleotide
uuuacaaagucaauagaau

SEQ ID NO: 2764271 - RNA, 19 nt, Artificial Sequence
  Description of Artificial Sequence: Synthetic oligonucleotide
uugaacagauuaauuaacu

SEQ ID NO: 2764272 - RNA, 19 nt, Artificial Sequence
  Description of Artificial Sequence: Synthetic oligonucleotide
gauugaacagauuaauuaa

SEQ ID NO: 2764273 - RNA, 19 nt, Artificial Sequence
  Description of Artificial Sequence: Synthetic oligonucleotide
ucaguucuuuucaagguug

SEQ ID NO: 2764274 - RNA, 19 nt, Artificial Sequence
  Description of Artificial Sequence: Synthetic oligonucleotide
uccuucuuuaaucuccucc

SEQ ID NO: 2764275 - RNA, 19 nt, Artificial Sequence
  Description of Artificial Sequence: Synthetic oligonucleotide
auugaacagauuaauuaac

SEQ ID NO: 2764276 - RNA, 19 nt, Artificial Sequence
  Description of Artificial Sequence: Synthetic oligonucleotide
aacuagucaguucuuuuca

SEQ ID NO: 2764277 - RNA, 19 nt, Artificial Sequence
  Description of Artificial Sequence: Synthetic oligonucleotide
uuuugauugaacagauuaa

SEQ ID NO: 2764278 - RNA, 19 nt, Artificial Sequence
  Description of Artificial Sequence: Synthetic oligonucleotide
aucuccuuaaacucgauau

SEQ ID NO: 2764279 - RNA, 19 nt, Artificial Sequence
  Description of Artificial Sequence: Synthetic oligonucleotide
uuacaaagucaauagaauu

SEQ ID NO: 2764280 - RNA, 19 nt, Artificial Sequence
  Description of Artificial Sequence: Synthetic oligonucleotide
ucuuuucaagguugcaucc

SEQ ID NO: 2764281 - RNA, 19 nt, Artificial Sequence
  Description of Artificial Sequence: Synthetic oligonucleotide
uuugauugaacagauuaau

SEQ ID NO: 2764282 - RNA, 19 nt, Artificial Sequence
  Description of Artificial Sequence: Synthetic oligonucleotide
gauuccaccgccaucuucc

SEQ ID NO: 2764283 - RNA, 19 nt, Artificial Sequence
  Description of Artificial Sequence: Synthetic oligonucleotide
uucuuuucaagguugcauc

SEQ ID NO: 2764284 - RNA, 19 nt, Artificial Sequence
  Description of Artificial Sequence: Synthetic oligonucleotide
uccaccgccaucuuccucc

SEQ ID NO: 2764285 - RNA, 19 nt, Artificial Sequence
  Description of Artificial Sequence: Synthetic oligonucleotide
cuccuuaaacucgauaucc

SEQ ID NO: 2764286 - RNA, 19 nt, Artificial Sequence
  Description of Artificial Sequence: Synthetic oligonucleotide
aaauugaagugugugcccu

SEQ ID NO: 2764287 - RNA, 19 nt, Artificial Sequence
  Description of Artificial Sequence: Synthetic oligonucleotide
ugaacagauuaauuaacuu

SEQ ID NO: 2764288 - RNA, 19 nt, Artificial Sequence
  Description of Artificial Sequence: Synthetic oligonucleotide
cuagucaguucuuuucaag

SEQ ID NO: 2764289 - RNA, 19 nt, Artificial Sequence
  Description of Artificial Sequence: Synthetic oligonucleotide
agucaguucuuuucaaggu

SEQ ID NO: 2764290 - RNA, 19 nt, Artificial Sequence
  Description of Artificial Sequence: Synthetic oligonucleotide
uccuuaaacucgauaucca

SEQ ID NO: 2764291 - RNA, 19 nt, Artificial Sequence
  Description of Artificial Sequence: Synthetic oligonucleotide
aacgcgcgauuccaccgcc

SEQ ID NO: 2764292 - RNA, 19 nt, Artificial Sequence
  Description of Artificial Sequence: Synthetic oligonucleotide
ucuccuuaaacucgauauc

SEQ ID NO: 2764293 - RNA, 19 nt, Artificial Sequence
  Description of Artificial Sequence: Synthetic oligonucleotide
ugccaaucuccuuaaacuc

SEQ ID NO: 2764294 - RNA, 19 nt, Artificial Sequence
  Description of Artificial Sequence: Synthetic oligonucleotide
guaacgcgcgauuccaccg

SEQ ID NO: 2764295 - RNA, 19 nt, Artificial Sequence
  Description of Artificial Sequence: Synthetic oligonucleotide
aaucuccuuaaacucgaua

SEQ ID NO: 2764296 - RNA, 19 nt, Artificial Sequence
  Description of Artificial Sequence: Synthetic oligonucleotide
gaggaacucguccauccug

SEQ ID NO: 2764297 - RNA, 19 nt, Artificial Sequence
  Description of Artificial Sequence: Synthetic oligonucleotide
agcggggcaggucuucucg

SEQ ID NO: 2764298 - RNA, 19 nt, Artificial Sequence
  Description of Artificial Sequence: Synthetic oligonucleotide
caguucuuuucaagguugc

SEQ ID NO: 2764299 - RNA, 19 nt, Artificial Sequence
  Description of Artificial Sequence: Synthetic oligonucleotide
uaacgcgcgauuccaccgc

SEQ ID NO: 2764300 - RNA, 19 nt, Artificial Sequence
  Description of Artificial Sequence: Synthetic oligonucleotide
ucgggcuccuucuuuaauc

SEQ ID NO: 2764301 - RNA, 19 nt, Artificial Sequence
  Description of Artificial Sequence: Synthetic oligonucleotide
uaaacucgauauccagguc

SEQ ID NO: 2764302 - RNA, 19 nt, Artificial Sequence
  Description of Artificial Sequence: Synthetic oligonucleotide
gagacgcucgcccuagaac

SEQ ID NO: 2764303 - RNA, 19 nt, Artificial Sequence
  Description of Artificial Sequence: Synthetic oligonucleotide
aauugaagugugugcccuu

SEQ ID NO: 2764304 - RNA, 19 nt, Artificial Sequence
  Description of Artificial Sequence: Synthetic oligonucleotide
ccuuaaacucgauauccag

SEQ ID NO: 2764305 - RNA, 19 nt, Artificial Sequence
  Description of Artificial Sequence: Synthetic oligonucleotide
acuagucaguucuuuucaa

SEQ ID NO: 2764306 - RNA, 19 nt, Artificial Sequence
  Description of Artificial Sequence: Synthetic oligonucleotide
gccaaucuccuuaaacucg

SEQ ID NO: 2764307 - RNA, 19 nt, Artificial Sequence
  Description of Artificial Sequence: Synthetic oligonucleotide
cugccaaucuccuuaaacu

SEQ ID NO: 2764308 - RNA, 19 nt, Artificial Sequence
  Description of Artificial Sequence: Synthetic oligonucleotide
gggaggaacucguccaucc

SEQ ID NO: 2764309 - RNA, 19 nt, Artificial Sequence
  Description of Artificial Sequence: Synthetic oligonucleotide
ucgcccuagaaccuccgau

SEQ ID NO: 2764310 - RNA, 19 nt, Artificial Sequence
  Description of Artificial Sequence: Synthetic oligonucleotide
ggcuccuucuuuaaucucc

SEQ ID NO: 2764311 - RNA, 19 nt, Artificial Sequence
  Description of Artificial Sequence: Synthetic oligonucleotide
aguucuuuucaagguugca

SEQ ID NO: 2764312 - RNA, 19 nt, Artificial Sequence
  Description of Artificial Sequence: Synthetic oligonucleotide
cuuuucaagguugcaucca

SEQ ID NO: 2764313 - RNA, 19 nt, Artificial Sequence
  Description of Artificial Sequence: Synthetic oligonucleotide
gcccuagaaccuccgaucc

SEQ ID NO: 2764314 - RNA, 19 nt, Artificial Sequence
  Description of Artificial Sequence: Synthetic oligonucleotide
ucggcccgggagacgcucg

SEQ ID NO: 2764315 - RNA, 19 nt, Artificial Sequence
  Description of Artificial Sequence: Synthetic oligonucleotide
guucuuuucaagguugcau

SEQ ID NO: 2764316 - RNA, 19 nt, Artificial Sequence
  Description of Artificial Sequence: Synthetic oligonucleotide
ucccgcgggaggaacucgu

SEQ ID NO: 2764317 - RNA, 19 nt, Artificial Sequence
  Description of Artificial Sequence: Synthetic oligonucleotide
auuccaccgccaucuuccu

SEQ ID NO: 2764318 - RNA, 19 nt, Artificial Sequence
  Description of Artificial Sequence: Synthetic oligonucleotide
gucaguucuuuucaagguu

SEQ ID NO: 2764319 - RNA, 19 nt, Artificial Sequence
  Description of Artificial Sequence: Synthetic oligonucleotide
ucucgggcuccuucuuuaa

SEQ ID NO: 2764320 - RNA, 19 nt, Artificial Sequence
  Description of Artificial Sequence: Synthetic oligonucleotide
ccaaucuccuuaaacucga

SEQ ID NO: 2764321 - RNA, 19 nt, Artificial Sequence
  Description of Artificial Sequence: Synthetic oligonucleotide
cuuuaaucuccuccugggu

SEQ ID NO: 2764322 - RNA, 19 nt, Artificial Sequence
  Description of Artificial Sequence: Synthetic oligonucleotide
agcaggagcggggcagguc

SEQ ID NO: 2764323 - RNA, 19 nt, Artificial Sequence
  Description of Artificial Sequence: Synthetic oligonucleotide
acguucccgcgggaggaac

SEQ ID NO: 2764324 - RNA, 19 nt, Artificial Sequence
  Description of Artificial Sequence: Synthetic oligonucleotide
uuccaccgccaucuuccuc

SEQ ID NO: 2764325 - RNA, 19 nt, Artificial Sequence
  Description of Artificial Sequence: Synthetic oligonucleotide
cuccuucuuuaaucuccuc

SEQ ID NO: 2764326 - RNA, 19 nt, Artificial Sequence
  Description of Artificial Sequence: Synthetic oligonucleotide
acgcucgcccuagaaccuc

SEQ ID NO: 2764327 - RNA, 19 nt, Artificial Sequence
  Description of Artificial Sequence: Synthetic oligonucleotide
aggagcggggcaggucuuc

SEQ ID NO: 2764328 - RNA, 19 nt, Artificial Sequence
  Description of Artificial Sequence: Synthetic oligonucleotide
gagcggggcaggucuucuc

SEQ ID NO: 2764329 - RNA, 19 nt, Artificial Sequence
  Description of Artificial Sequence: Synthetic oligonucleotide
gcaggagcggggcaggucu

SEQ ID NO: 2764330 - RNA, 19 nt, Artificial Sequence
  Description of Artificial Sequence: Synthetic oligonucleotide
cccuagaaccuccgauccc

SEQ ID NO: 2764331 - RNA, 19 nt, Artificial Sequence
  Description of Artificial Sequence: Synthetic oligonucleotide
guucccgcgggaggaacuc

SEQ ID NO: 2764332 - RNA, 19 nt, Artificial Sequence
  Description of Artificial Sequence: Synthetic oligonucleotide
ggagacgcucgcccuagaa

SEQ ID NO: 2764333 - RNA, 19 nt, Artificial Sequence
  Description of Artificial Sequence: Synthetic oligonucleotide
cgcccuagaaccuccgauc

SEQ ID NO: 2764334 - RNA, 19 nt, Artificial Sequence
  Description of Artificial Sequence: Synthetic oligonucleotide
gcccgggagacgcucgccc

SEQ ID NO: 2764335 - RNA, 19 nt, Artificial Sequence
  Description of Artificial Sequence: Synthetic oligonucleotide
ccgcgggaggaacucgucc

SEQ ID NO: 2764336 - RNA, 19 nt, Artificial Sequence
  Description of Artificial Sequence: Synthetic oligonucleotide
cucgcccuagaaccuccga

SEQ ID NO: 2764337 - RNA, 19 nt, Artificial Sequence
  Description of Artificial Sequence: Synthetic oligonucleotide
gacgcucgcccuagaaccu

SEQ ID NO: 2764338 - RNA, 19 nt, Artificial Sequence
  Description of Artificial Sequence: Synthetic oligonucleotide
ggaggaacucguccauccu

SEQ ID NO: 2764339 - RNA, 19 nt, Artificial Sequence
  Description of Artificial Sequence: Synthetic oligonucleotide
cggggcaggucuucucgcg

SEQ ID NO: 2764340 - RNA, 19 nt, Artificial Sequence
  Description of Artificial Sequence: Synthetic oligonucleotide
gcucgcccuagaaccuccg

SEQ ID NO: 2764341 - RNA, 19 nt, Artificial Sequence
  Description of Artificial Sequence: Synthetic oligonucleotide
caaucuccuuaaacucgau

SEQ ID NO: 2764342 - RNA, 19 nt, Artificial Sequence
  Description of Artificial Sequence: Synthetic oligonucleotide
gcuccuucuuuaaucuccu

SEQ ID NO: 2764343 - RNA, 19 nt, Artificial Sequence
  Description of Artificial Sequence: Synthetic oligonucleotide
cgcgggaggaacucgucca

SEQ ID NO: 2764344 - RNA, 19 nt, Artificial Sequence
  Description of Artificial Sequence: Synthetic oligonucleotide
cgauuccaccgccaucuuc

SEQ ID NO: 2764345 - RNA, 19 nt, Artificial Sequence
  Description of Artificial Sequence: Synthetic oligonucleotide
cgcucgcccuagaaccucc

SEQ ID NO: 2764346 - RNA, 19 nt, Artificial Sequence
  Description of Artificial Sequence: Synthetic oligonucleotide
acgcgcgauuccaccgcca

SEQ ID NO: 2764347 - RNA, 19 nt, Artificial Sequence
  Description of Artificial Sequence: Synthetic oligonucleotide
cgcgauuccaccgccaucu

SEQ ID NO: 2764348 - RNA, 19 nt, Artificial Sequence
  Description of Artificial Sequence: Synthetic oligonucleotide
gcgcgauuccaccgccauc

SEQ ID NO: 2764349 - RNA, 19 nt, Artificial Sequence
  Description of Artificial Sequence: Synthetic oligonucleotide
cgggcuccuucuuuaaucu

SEQ ID NO: 2764350 - RNA, 19 nt, Artificial Sequence
  Description of Artificial Sequence: Synthetic oligonucleotide
cccgcgggaggaacucguc

SEQ ID NO: 2764351 - RNA, 19 nt, Artificial Sequence
  Description of Artificial Sequence: Synthetic oligonucleotide
ggcccgggagacgcucgcc

SEQ ID NO: 2764352 - RNA, 19 nt, Artificial Sequence
  Description of Artificial Sequence: Synthetic oligonucleotide
cacguucccgcgggaggaa

SEQ ID NO: 2764353 - RNA, 19 nt, Artificial Sequence
  Description of Artificial Sequence: Synthetic oligonucleotide
gggagacgcucgcccuaga

SEQ ID NO: 2764354 - RNA, 19 nt, Artificial Sequence
  Description of Artificial Sequence: Synthetic oligonucleotide
cgggagacgcucgcccuag

SEQ ID NO: 2764355 - RNA, 19 nt, Artificial Sequence
  Description of Artificial Sequence: Synthetic oligonucleotide
gcgggaggaacucguccau

SEQ ID NO: 2764356 - RNA, 19 nt, Artificial Sequence
  Description of Artificial Sequence: Synthetic oligonucleotide
ggagcggggcaggucuucu

SEQ ID NO: 2764357 - RNA, 19 nt, Artificial Sequence
  Description of Artificial Sequence: Synthetic oligonucleotide
cgggaggaacucguccauc

SEQ ID NO: 2764358 - RNA, 19 nt, Artificial Sequence
  Description of Artificial Sequence: Synthetic oligonucleotide
caggagcggggcaggucuu

SEQ ID NO: 2764359 - RNA, 19 nt, Artificial Sequence
  Description of Artificial Sequence: Synthetic oligonucleotide
cggcccgggagacgcucgc

SEQ ID NO: 2764360 - RNA, 19 nt, Artificial Sequence
  Description of Artificial Sequence: Synthetic oligonucleotide
cccgggagacgcucgcccu

SEQ ID NO: 2764361 - RNA, 19 nt, Artificial Sequence
  Description of Artificial Sequence: Synthetic oligonucleotide
ccgggagacgcucgcccua

SEQ ID NO: 2764362 - RNA, 19 nt, Artificial Sequence
  Description of Artificial Sequence: Synthetic oligonucleotide
cagcaggagcggggcaggu

SEQ ID NO: 2764363 - RNA, 19 nt, Artificial Sequence
  Description of Artificial Sequence: Synthetic oligonucleotide
cguucccgcgggaggaacu

SEQ ID NO: 2764364 - RNA, 19 nt, Artificial Sequence
  Description of Artificial Sequence: Synthetic oligonucleotide
ccaccgccaucuuccuccu

SEQ ID NO: 2764365 - RNA, 19 nt, Artificial Sequence
  Description of Artificial Sequence: Synthetic oligonucleotide
gcgauuccaccgccaucuu

SEQ ID NO: 2764366 - RNA, 19 nt, Artificial Sequence
  Description of Artificial Sequence: Synthetic oligonucleotide
cgcgcgauuccaccgccau

SEQ ID NO: 2764367 - RNA, 19 nt, Artificial Sequence
  Description of Artificial Sequence: Synthetic oligonucleotide
gauaugaagauccacauug

SEQ ID NO: 2764368 - RNA, 19 nt, Artificial Sequence
  Description of Artificial Sequence: Synthetic oligonucleotide
gaaaacgagacauugaaag

SEQ ID NO: 2764369 - RNA, 19 nt, Artificial Sequence
  Description of Artificial Sequence: Synthetic oligonucleotide
aaauugaccacaccaacgg

SEQ ID NO: 2764370 - RNA, 19 nt, Artificial Sequence
  Description of Artificial Sequence: Synthetic oligonucleotide
aaaacgagacauugaaagc

SEQ ID NO: 2764371 - RNA, 19 nt, Artificial Sequence
  Description of Artificial Sequence: Synthetic oligonucleotide
ugaagauccacauuggaag

SEQ ID NO: 2764372 - RNA, 19 nt, Artificial Sequence
  Description of Artificial Sequence: Synthetic oligonucleotide
uguaacauacauuugaaaa

SEQ ID NO: 2764373 - RNA, 19 nt, Artificial Sequence
  Description of Artificial Sequence: Synthetic oligonucleotide
uaaauugaccacaccaacg

SEQ ID NO: 2764374 - RNA, 19 nt, Artificial Sequence
  Description of Artificial Sequence: Synthetic oligonucleotide
uaacauacauuugaaaacg

SEQ ID NO: 2764375 - RNA, 19 nt, Artificial Sequence
  Description of Artificial Sequence: Synthetic oligonucleotide
uaguaaauugaccacacca

SEQ ID NO: 2764376 - RNA, 19 nt, Artificial Sequence
  Description of Artificial Sequence: Synthetic oligonucleotide
ugugcuaaaguuccggagg

SEQ ID NO: 2764377 - RNA, 19 nt, Artificial Sequence
  Description of Artificial Sequence: Synthetic oligonucleotide
auucuuagauaagugagcc

SEQ ID NO: 2764378 - RNA, 19 nt, Artificial Sequence
  Description of Artificial Sequence: Synthetic oligonucleotide
ucugaauccgacuugguug

SEQ ID NO: 2764379 - RNA, 19 nt, Artificial Sequence
  Description of Artificial Sequence: Synthetic oligonucleotide
aagaaggaacuguugcagc

SEQ ID NO: 2764380 - RNA, 19 nt, Artificial Sequence
  Description of Artificial Sequence: Synthetic oligonucleotide
auugaaagcuuuuggagag

SEQ ID NO: 2764381 - RNA, 19 nt, Artificial Sequence
  Description of Artificial Sequence: Synthetic oligonucleotide
ucuuagauaagugagccug

SEQ ID NO: 2764382 - RNA, 19 nt, Artificial Sequence
  Description of Artificial Sequence: Synthetic oligonucleotide
ucugaaacaagccuccgca

SEQ ID NO: 2764383 - RNA, 19 nt, Artificial Sequence
  Description of Artificial Sequence: Synthetic oligonucleotide
acaggcagaauccaagugg

SEQ ID NO: 2764384 - RNA, 19 nt, Artificial Sequence
  Description of Artificial Sequence: Synthetic oligonucleotide
uauucuuagauaagugagc

SEQ ID NO: 2764385 - RNA, 19 nt, Artificial Sequence
  Description of Artificial Sequence: Synthetic oligonucleotide
acauugaaagcuuuuggag

SEQ ID NO: 2764386 - RNA, 19 nt, Artificial Sequence
  Description of Artificial Sequence: Synthetic oligonucleotide
uugaaaacgagacauugaa

SEQ ID NO: 2764387 - RNA, 19 nt, Artificial Sequence
  Description of Artificial Sequence: Synthetic oligonucleotide
aauccgacuugguuggugg

SEQ ID NO: 2764388 - RNA, 19 nt, Artificial Sequence
  Description of Artificial Sequence: Synthetic oligonucleotide
guaacauacauuugaaaac

SEQ ID NO: 2764389 - RNA, 19 nt, Artificial Sequence
  Description of Artificial Sequence: Synthetic oligonucleotide
aaguugucggaauccaggg

SEQ ID NO: 2764390 - RNA, 19 nt, Artificial Sequence
  Description of Artificial Sequence: Synthetic oligonucleotide
gagaagaaggaacuguugc

SEQ ID NO: 2764391 - RNA, 19 nt, Artificial Sequence
  Description of Artificial Sequence: Synthetic oligonucleotide
aaaguugucggaauccagg

SEQ ID NO: 2764392 - RNA, 19 nt, Artificial Sequence
  Description of Artificial Sequence: Synthetic oligonucleotide
aaacgagacauugaaagcu

SEQ ID NO: 2764393 - RNA, 19 nt, Artificial Sequence
  Description of Artificial Sequence: Synthetic oligonucleotide
uggacccagacuaacacag

SEQ ID NO: 2764394 - RNA, 19 nt, Artificial Sequence
  Description of Artificial Sequence: Synthetic oligonucleotide
agaucaggaaaccacagga

SEQ ID NO: 2764395 - RNA, 19 nt, Artificial Sequence
  Description of Artificial Sequence: Synthetic oligonucleotide
agacauugaaagcuuuugg

SEQ ID NO: 2764396 - RNA, 19 nt, Artificial Sequence
  Description of Artificial Sequence: Synthetic oligonucleotide
aaggauggcaguugucacg

SEQ ID NO: 2764397 - RNA, 19 nt, Artificial Sequence
  Description of Artificial Sequence: Synthetic oligonucleotide
uauuaguaaauugaccaca

SEQ ID NO: 2764398 - RNA, 19 nt, Artificial Sequence
  Description of Artificial Sequence: Synthetic oligonucleotide
uuugaaaacgagacauuga

SEQ ID NO: 2764399 - RNA, 19 nt, Artificial Sequence
  Description of Artificial Sequence: Synthetic oligonucleotide
uccgcauauucuuagauaa

SEQ ID NO: 2764400 - RNA, 19 nt, Artificial Sequence
  Description of Artificial Sequence: Synthetic oligonucleotide
agcagauucugggagaggc

SEQ ID NO: 2764401 - RNA, 19 nt, Artificial Sequence
  Description of Artificial Sequence: Synthetic oligonucleotide
aaccaaacugaugugcacg

SEQ ID NO: 2764402 - RNA, 19 nt, Artificial Sequence
  Description of Artificial Sequence: Synthetic oligonucleotide
aguugucacgaacauacag

SEQ ID NO: 2764403 - RNA, 19 nt, Artificial Sequence
  Description of Artificial Sequence: Synthetic oligonucleotide
agugagaucaggaaaccac

SEQ ID NO: 2764404 - RNA, 19 nt, Artificial Sequence
  Description of Artificial Sequence: Synthetic oligonucleotide
uauccggcaaaguugucgg

SEQ ID NO: 2764405 - RNA, 19 nt, Artificial Sequence
  Description of Artificial Sequence: Synthetic oligonucleotide
acugaugugcacgaacugc

SEQ ID NO: 2764406 - RNA, 19 nt, Artificial Sequence
  Description of Artificial Sequence: Synthetic oligonucleotide
uacagaucugaaacaagcc

SEQ ID NO: 2764407 - RNA, 19 nt, Artificial Sequence
  Description of Artificial Sequence: Synthetic oligonucleotide
cacauuggaagcuggaccc

SEQ ID NO: 2764408 - RNA, 19 nt, Artificial Sequence
  Description of Artificial Sequence: Synthetic oligonucleotide
agauaagugagccuggcaa

SEQ ID NO: 2764409 - RNA, 19 nt, Artificial Sequence
  Description of Artificial Sequence: Synthetic oligonucleotide
aacaagccuccgcauauuc

SEQ ID NO: 2764410 - RNA, 19 nt, Artificial Sequence
  Description of Artificial Sequence: Synthetic oligonucleotide
gacauugaaagcuuuugga

SEQ ID NO: 2764411 - RNA, 19 nt, Artificial Sequence
  Description of Artificial Sequence: Synthetic oligonucleotide
ggaucaucagcacagauac

SEQ ID NO: 2764412 - RNA, 19 nt, Artificial Sequence
  Description of Artificial Sequence: Synthetic oligonucleotide
augaggcuggagcacagcc

SEQ ID NO: 2764413 - RNA, 19 nt, Artificial Sequence
  Description of Artificial Sequence: Synthetic oligonucleotide
uguguaacauacauuugaa

SEQ ID NO: 2764414 - RNA, 19 nt, Artificial Sequence
  Description of Artificial Sequence: Synthetic oligonucleotide
acagaucugaaacaagccu

SEQ ID NO: 2764415 - RNA, 19 nt, Artificial Sequence
  Description of Artificial Sequence: Synthetic oligonucleotide
cauauucuuagauaaguga

SEQ ID NO: 2764416 - RNA, 19 nt, Artificial Sequence
  Description of Artificial Sequence: Synthetic oligonucleotide
uaugaagauccacauugga

SEQ ID NO: 2764417 - RNA, 19 nt, Artificial Sequence
  Description of Artificial Sequence: Synthetic oligonucleotide
aggcccaugaggcuggagc

SEQ ID NO: 2764418 - RNA, 19 nt, Artificial Sequence
  Description of Artificial Sequence: Synthetic oligonucleotide
agagaacaagagaagaagg

SEQ ID NO: 2764419 - RNA, 19 nt, Artificial Sequence
  Description of Artificial Sequence: Synthetic oligonucleotide
cacuauuaguaaauugacc

SEQ ID NO: 2764420 - RNA, 19 nt, Artificial Sequence
  Description of Artificial Sequence: Synthetic oligonucleotide
ugagaucaggaaaccacag

SEQ ID NO: 2764421 - RNA, 19 nt, Artificial Sequence
  Description of Artificial Sequence: Synthetic oligonucleotide
cuauuaguaaauugaccac

SEQ ID NO: 2764422 - RNA, 19 nt, Artificial Sequence
  Description of Artificial Sequence: Synthetic oligonucleotide
gaagauccacauuggaagc

SEQ ID NO: 2764423 - RNA, 19 nt, Artificial Sequence
  Description of Artificial Sequence: Synthetic oligonucleotide
acagauacagcucggacaa

SEQ ID NO: 2764424 - RNA, 19 nt, Artificial Sequence
  Description of Artificial Sequence: Synthetic oligonucleotide
cugaauccgacuugguugg

SEQ ID NO: 2764425 - RNA, 19 nt, Artificial Sequence
  Description of Artificial Sequence: Synthetic oligonucleotide
gagggcaacggauaugaag

SEQ ID NO: 2764426 - RNA, 19 nt, Artificial Sequence
  Description of Artificial Sequence: Synthetic oligonucleotide
agaucugaaacaagccucc

SEQ ID NO: 2764427 - RNA, 19 nt, Artificial Sequence
  Description of Artificial Sequence: Synthetic oligonucleotide
uacagcucggacaaagugu

SEQ ID NO: 2764428 - RNA, 19 nt, Artificial Sequence
  Description of Artificial Sequence: Synthetic oligonucleotide
gagaucaggaaaccacagg

SEQ ID NO: 2764429 - RNA, 19 nt, Artificial Sequence
  Description of Artificial Sequence: Synthetic oligonucleotide
aaagcuuuuggagagcaaa

SEQ ID NO: 2764430 - RNA, 19 nt, Artificial Sequence
  Description of Artificial Sequence: Synthetic oligonucleotide
aacggauaugaagauccac

SEQ ID NO: 2764431 - RNA, 19 nt, Artificial Sequence
  Description of Artificial Sequence: Synthetic oligonucleotide
uuaguaaauugaccacacc

SEQ ID NO: 2764432 - RNA, 19 nt, Artificial Sequence
  Description of Artificial Sequence: Synthetic oligonucleotide
cuuagauaagugagccugg

SEQ ID NO: 2764433 - RNA, 19 nt, Artificial Sequence
  Description of Artificial Sequence: Synthetic oligonucleotide
agaagaaggaacuguugca

SEQ ID NO: 2764434 - RNA, 19 nt, Artificial Sequence
  Description of Artificial Sequence: Synthetic oligonucleotide
aguagagaacaagagaaga

SEQ ID NO: 2764435 - RNA, 19 nt, Artificial Sequence
  Description of Artificial Sequence: Synthetic oligonucleotide
guaaauugaccacaccaac

SEQ ID NO: 2764436 - RNA, 19 nt, Artificial Sequence
  Description of Artificial Sequence: Synthetic oligonucleotide
aaaucuccacuauuaguaa

SEQ ID NO: 2764437 - RNA, 19 nt, Artificial Sequence
  Description of Artificial Sequence: Synthetic oligonucleotide
gauaagugagccuggcaac

SEQ ID NO: 2764438 - RNA, 19 nt, Artificial Sequence
  Description of Artificial Sequence: Synthetic oligonucleotide
cuggcaacucucuuggacc

SEQ ID NO: 2764439 - RNA, 19 nt, Artificial Sequence
  Description of Artificial Sequence: Synthetic oligonucleotide
uuugaaaggauggcaguug

SEQ ID NO: 2764440 - RNA, 19 nt, Artificial Sequence
  Description of Artificial Sequence: Synthetic oligonucleotide
gaaaggauggcaguuguca

SEQ ID NO: 2764441 - RNA, 19 nt, Artificial Sequence
  Description of Artificial Sequence: Synthetic oligonucleotide
cagaucugaaacaagccuc

SEQ ID NO: 2764442 - RNA, 19 nt, Artificial Sequence
  Description of Artificial Sequence: Synthetic oligonucleotide
cauugaaagcuuuuggaga

SEQ ID NO: 2764443 - RNA, 19 nt, Artificial Sequence
  Description of Artificial Sequence: Synthetic oligonucleotide
auacagcucggacaaagug

SEQ ID NO: 2764444 - RNA, 19 nt, Artificial Sequence
  Description of Artificial Sequence: Synthetic oligonucleotide
uugaaaggauggcaguugu

SEQ ID NO: 2764445 - RNA, 19 nt, Artificial Sequence
  Description of Artificial Sequence: Synthetic oligonucleotide
uugucacgaacauacagau

SEQ ID NO: 2764446 - RNA, 19 nt, Artificial Sequence
  Description of Artificial Sequence: Synthetic oligonucleotide
accacaggaccccaccagc

SEQ ID NO: 2764447 - RNA, 19 nt, Artificial Sequence
  Description of Artificial Sequence: Synthetic oligonucleotide
ugaaaacgagacauugaaa

SEQ ID NO: 2764448 - RNA, 19 nt, Artificial Sequence
  Description of Artificial Sequence: Synthetic oligonucleotide
ugguauccggcaaaguugu

SEQ ID NO: 2764449 - RNA, 19 nt, Artificial Sequence
  Description of Artificial Sequence: Synthetic oligonucleotide
aaucuccacuauuaguaaa

SEQ ID NO: 2764450 - RNA, 19 nt, Artificial Sequence
  Description of Artificial Sequence: Synthetic oligonucleotide
aacugaugugcacgaacug

SEQ ID NO: 2764451 - RNA, 19 nt, Artificial Sequence
  Description of Artificial Sequence: Synthetic oligonucleotide
agaaacaccuucugagugu

SEQ ID NO: 2764452 - RNA, 19 nt, Artificial Sequence
  Description of Artificial Sequence: Synthetic oligonucleotide
gaaaccacaggaccccacc

SEQ ID NO: 2764453 - RNA, 19 nt, Artificial Sequence
  Description of Artificial Sequence: Synthetic oligonucleotide
acaggaccccaccagcagc

SEQ ID NO: 2764454 - RNA, 19 nt, Artificial Sequence
  Description of Artificial Sequence: Synthetic oligonucleotide
cacaccaacggagacaggc

SEQ ID NO: 2764455 - RNA, 19 nt, Artificial Sequence
  Description of Artificial Sequence: Synthetic oligonucleotide
acagaaacaccuucugagu

SEQ ID NO: 2764456 - RNA, 19 nt, Artificial Sequence
  Description of Artificial Sequence: Synthetic oligonucleotide
guugucggaauccagggga

SEQ ID NO: 2764457 - RNA, 19 nt, Artificial Sequence
  Description of Artificial Sequence: Synthetic oligonucleotide
guauccggcaaaguugucg

SEQ ID NO: 2764458 - RNA, 19 nt, Artificial Sequence
  Description of Artificial Sequence: Synthetic oligonucleotide
gagacauugaaagcuuuug

SEQ ID NO: 2764459 - RNA, 19 nt, Artificial Sequence
  Description of Artificial Sequence: Synthetic oligonucleotide
augugcacgaacugcaacu

SEQ ID NO: 2764460 - RNA, 19 nt, Artificial Sequence
  Description of Artificial Sequence: Synthetic oligonucleotide
gacccagacuaacacagug

SEQ ID NO: 2764461 - RNA, 19 nt, Artificial Sequence
  Description of Artificial Sequence: Synthetic oligonucleotide
gugcuaaaguuccggaggg

SEQ ID NO: 2764462 - RNA, 19 nt, Artificial Sequence
  Description of Artificial Sequence: Synthetic oligonucleotide
caaacugaugugcacgaac

SEQ ID NO: 2764463 - RNA, 19 nt, Artificial Sequence
  Description of Artificial Sequence: Synthetic oligonucleotide
agauacagcucggacaaag

SEQ ID NO: 2764464 - RNA, 19 nt, Artificial Sequence
  Description of Artificial Sequence: Synthetic oligonucleotide
aguugucggaauccagggg

SEQ ID NO: 2764465 - RNA, 19 nt, Artificial Sequence
  Description of Artificial Sequence: Synthetic oligonucleotide
ugaaagcuuuuggagagca

SEQ ID NO: 2764466 - RNA, 19 nt, Artificial Sequence
  Description of Artificial Sequence: Synthetic oligonucleotide
gcaacggauaugaagaucc

SEQ ID NO: 2764467 - RNA, 19 nt, Artificial Sequence
  Description of Artificial Sequence: Synthetic oligonucleotide
acauacauuugaaaacgag

SEQ ID NO: 2764468 - RNA, 19 nt, Artificial Sequence
  Description of Artificial Sequence: Synthetic oligonucleotide
agcuaacugcuccugaaca

SEQ ID NO: 2764469 - RNA, 19 nt, Artificial Sequence
  Description of Artificial Sequence: Synthetic oligonucleotide
agggcaacggauaugaaga

SEQ ID NO: 2764470 - RNA, 19 nt, Artificial Sequence
  Description of Artificial Sequence: Synthetic oligonucleotide
aauccaggggagcggagca

SEQ ID NO: 2764471 - RNA, 19 nt, Artificial Sequence
  Description of Artificial Sequence: Synthetic oligonucleotide
ugaaacaagccuccgcaua

SEQ ID NO: 2764472 - RNA, 19 nt, Artificial Sequence
  Description of Artificial Sequence: Synthetic oligonucleotide
cagaaacaccuucugagug

SEQ ID NO: 2764473 - RNA, 19 nt, Artificial Sequence
  Description of Artificial Sequence: Synthetic oligonucleotide
acggagacaggcagaaucc

SEQ ID NO: 2764474 - RNA, 19 nt, Artificial Sequence
  Description of Artificial Sequence: Synthetic oligonucleotide
gcaguugucacgaacauac

SEQ ID NO: 2764475 - RNA, 19 nt, Artificial Sequence
  Description of Artificial Sequence: Synthetic oligonucleotide
auaugaagauccacauugg

SEQ ID NO: 2764476 - RNA, 19 nt, Artificial Sequence
  Description of Artificial Sequence: Synthetic oligonucleotide
cugggagaggcccaugagg

SEQ ID NO: 2764477 - RNA, 19 nt, Artificial Sequence
  Description of Artificial Sequence: Synthetic oligonucleotide
aaaguuccggagggcaacg

SEQ ID NO: 2764478 - RNA, 19 nt, Artificial Sequence
  Description of Artificial Sequence: Synthetic oligonucleotide
caguagagaacaagagaag

SEQ ID NO: 2764479 - RNA, 19 nt, Artificial Sequence
  Description of Artificial Sequence: Synthetic oligonucleotide
gauggcaguugucacgaac

SEQ ID NO: 2764480 - RNA, 19 nt, Artificial Sequence
  Description of Artificial Sequence: Synthetic oligonucleotide
aguaaauugaccacaccaa

SEQ ID NO: 2764481 - RNA, 19 nt, Artificial Sequence
  Description of Artificial Sequence: Synthetic oligonucleotide
agaacaagagaagaaggaa

SEQ ID NO: 2764482 - RNA, 19 nt, Artificial Sequence
  Description of Artificial Sequence: Synthetic oligonucleotide
ucggacaaaguguguaaca

SEQ ID NO: 2764483 - RNA, 19 nt, Artificial Sequence
  Description of Artificial Sequence: Synthetic oligonucleotide
gaacagaaacaccuucuga

SEQ ID NO: 2764484 - RNA, 19 nt, Artificial Sequence
  Description of Artificial Sequence: Synthetic oligonucleotide
uagauaagugagccuggca

SEQ ID NO: 2764485 - RNA, 19 nt, Artificial Sequence
  Description of Artificial Sequence: Synthetic oligonucleotide
uggaccaaccaaacugaug

SEQ ID NO: 2764486 - RNA, 19 nt, Artificial Sequence
  Description of Artificial Sequence: Synthetic oligonucleotide
aaguggaguccacugcagu

SEQ ID NO: 2764487 - RNA, 19 nt, Artificial Sequence
  Description of Artificial Sequence: Synthetic oligonucleotide
ucucuuggaccaaccaaac

SEQ ID NO: 2764488 - RNA, 19 nt, Artificial Sequence
  Description of Artificial Sequence: Synthetic oligonucleotide
gaaacaccuucugagugug

SEQ ID NO: 2764489 - RNA, 19 nt, Artificial Sequence
  Description of Artificial Sequence: Synthetic oligonucleotide
gaugugcacgaacugcaac

SEQ ID NO: 2764490 - RNA, 19 nt, Artificial Sequence
  Description of Artificial Sequence: Synthetic oligonucleotide
aacauacauuugaaaacga

SEQ ID NO: 2764491 - RNA, 19 nt, Artificial Sequence
  Description of Artificial Sequence: Synthetic oligonucleotide
aagugagccuggcaacucu

SEQ ID NO: 2764492 - RNA, 19 nt, Artificial Sequence
  Description of Artificial Sequence: Synthetic oligonucleotide
guugucacgaacauacaga

SEQ ID NO: 2764493 - RNA, 19 nt, Artificial Sequence
  Description of Artificial Sequence: Synthetic oligonucleotide
cuuggaccaaccaaacuga

SEQ ID NO: 2764494 - RNA, 19 nt, Artificial Sequence
  Description of Artificial Sequence: Synthetic oligonucleotide
gucucugaauccgacuugg

SEQ ID NO: 2764495 - RNA, 19 nt, Artificial Sequence
  Description of Artificial Sequence: Synthetic oligonucleotide
cacagauacagcucggaca

SEQ ID NO: 2764496 - RNA, 19 nt, Artificial Sequence
  Description of Artificial Sequence: Synthetic oligonucleotide
ucugggagaggcccaugag

SEQ ID NO: 2764497 - RNA, 19 nt, Artificial Sequence
  Description of Artificial Sequence: Synthetic oligonucleotide
acggauaugaagauccaca

SEQ ID NO: 2764498 - RNA, 19 nt, Artificial Sequence
  Description of Artificial Sequence: Synthetic oligonucleotide
uggaguccacugcagugag

SEQ ID NO: 2764499 - RNA, 19 nt, Artificial Sequence
  Description of Artificial Sequence: Synthetic oligonucleotide
aagauccacauuggaagcu

SEQ ID NO: 2764500 - RNA, 19 nt, Artificial Sequence
  Description of Artificial Sequence: Synthetic oligonucleotide
ggaccaaccaaacugaugu

SEQ ID NO: 2764501 - RNA, 19 nt, Artificial Sequence
  Description of Artificial Sequence: Synthetic oligonucleotide
uucuuagauaagugagccu

SEQ ID NO: 2764502 - RNA, 19 nt, Artificial Sequence
  Description of Artificial Sequence: Synthetic oligonucleotide
gugguauccggcaaaguug

SEQ ID NO: 2764503 - RNA, 19 nt, Artificial Sequence
  Description of Artificial Sequence: Synthetic oligonucleotide
cagauucugggagaggccc

SEQ ID NO: 2764504 - RNA, 19 nt, Artificial Sequence
  Description of Artificial Sequence: Synthetic oligonucleotide
ggaacuguugcagccaccg

SEQ ID NO: 2764505 - RNA, 19 nt, Artificial Sequence
  Description of Artificial Sequence: Synthetic oligonucleotide
aauccaaguggaguccacu

SEQ ID NO: 2764506 - RNA, 19 nt, Artificial Sequence
  Description of Artificial Sequence: Synthetic oligonucleotide
aaaguguguaacauacauu

SEQ ID NO: 2764507 - RNA, 19 nt, Artificial Sequence
  Description of Artificial Sequence: Synthetic oligonucleotide
guugcagccaccgggauca

SEQ ID NO: 2764508 - RNA, 19 nt, Artificial Sequence
  Description of Artificial Sequence: Synthetic oligonucleotide
uaacugcuccugaacagaa

SEQ ID NO: 2764509 - RNA, 19 nt, Artificial Sequence
  Description of Artificial Sequence: Synthetic oligonucleotide
guccacugcagugagauca

SEQ ID NO: 2764510 - RNA, 19 nt, Artificial Sequence
  Description of Artificial Sequence: Synthetic oligonucleotide
gaucaggaaaccacaggac

SEQ ID NO: 2764511 - RNA, 19 nt, Artificial Sequence
  Description of Artificial Sequence: Synthetic oligonucleotide
aagcuggacccagacuaac

SEQ ID NO: 2764512 - RNA, 19 nt, Artificial Sequence
  Description of Artificial Sequence: Synthetic oligonucleotide
gauccacauuggaagcugg

SEQ ID NO: 2764513 - RNA, 19 nt, Artificial Sequence
  Description of Artificial Sequence: Synthetic oligonucleotide
acagcucggacaaagugug

SEQ ID NO: 2764514 - RNA, 19 nt, Artificial Sequence
  Description of Artificial Sequence: Synthetic oligonucleotide
acucucuuggaccaaccaa

SEQ ID NO: 2764515 - RNA, 19 nt, Artificial Sequence
  Description of Artificial Sequence: Synthetic oligonucleotide
accgggaucaucagcacag

SEQ ID NO: 2764516 - RNA, 19 nt, Artificial Sequence
  Description of Artificial Sequence: Synthetic oligonucleotide
uggcaacucucuuggacca

SEQ ID NO: 2764517 - RNA, 19 nt, Artificial Sequence
  Description of Artificial Sequence: Synthetic oligonucleotide
acaagagaagaaggaacug

SEQ ID NO: 2764518 - RNA, 19 nt, Artificial Sequence
  Description of Artificial Sequence: Synthetic oligonucleotide
cugaugugcacgaacugca

SEQ ID NO: 2764519 - RNA, 19 nt, Artificial Sequence
  Description of Artificial Sequence: Synthetic oligonucleotide
gucggaauccaggggagcg

SEQ ID NO: 2764520 - RNA, 19 nt, Artificial Sequence
  Description of Artificial Sequence: Synthetic oligonucleotide
gaucugaaacaagccuccg

SEQ ID NO: 2764521 - RNA, 19 nt, Artificial Sequence
  Description of Artificial Sequence: Synthetic oligonucleotide
uggcuuugaaaggauggca

SEQ ID NO: 2764522 - RNA, 19 nt, Artificial Sequence
  Description of Artificial Sequence: Synthetic oligonucleotide
accuucugagugugcugcc

SEQ ID NO: 2764523 - RNA, 19 nt, Artificial Sequence
  Description of Artificial Sequence: Synthetic oligonucleotide
auaagugagccuggcaacu

SEQ ID NO: 2764524 - RNA, 19 nt, Artificial Sequence
  Description of Artificial Sequence: Synthetic oligonucleotide
ugaaaggauggcaguuguc

SEQ ID NO: 2764525 - RNA, 19 nt, Artificial Sequence
  Description of Artificial Sequence: Synthetic oligonucleotide
gaacuguugcagccaccgg

SEQ ID NO: 2764526 - RNA, 19 nt, Artificial Sequence
  Description of Artificial Sequence: Synthetic oligonucleotide
agccaccgggaucaucagc

SEQ ID NO: 2764527 - RNA, 19 nt, Artificial Sequence
  Description of Artificial Sequence: Synthetic oligonucleotide
ccacuauuaguaaauugac

SEQ ID NO: 2764528 - RNA, 19 nt, Artificial Sequence
  Description of Artificial Sequence: Synthetic oligonucleotide
ugguuggugguauccggca

SEQ ID NO: 2764529 - RNA, 19 nt, Artificial Sequence
  Description of Artificial Sequence: Synthetic oligonucleotide
uccacauuggaagcuggac

SEQ ID NO: 2764530 - RNA, 19 nt, Artificial Sequence
  Description of Artificial Sequence: Synthetic oligonucleotide
ugccccugugcuaaaguuc

SEQ ID NO: 2764531 - RNA, 19 nt, Artificial Sequence
  Description of Artificial Sequence: Synthetic oligonucleotide
acccagacuaacacagugg

SEQ ID NO: 2764532 - RNA, 19 nt, Artificial Sequence
  Description of Artificial Sequence: Synthetic oligonucleotide
caaaguguguaacauacau

SEQ ID NO: 2764533 - RNA, 19 nt, Artificial Sequence
  Description of Artificial Sequence: Synthetic oligonucleotide
caaccaaacugaugugcac

SEQ ID NO: 2764534 - RNA, 19 nt, Artificial Sequence
  Description of Artificial Sequence: Synthetic oligonucleotide
uuggugguauccggcaaag

SEQ ID NO: 2764535 - RNA, 19 nt, Artificial Sequence
  Description of Artificial Sequence: Synthetic oligonucleotide
ggcuuugaaaggauggcag

SEQ ID NO: 2764536 - RNA, 19 nt, Artificial Sequence
  Description of Artificial Sequence: Synthetic oligonucleotide
caccuucugagugugcugc

SEQ ID NO: 2764537 - RNA, 19 nt, Artificial Sequence
  Description of Artificial Sequence: Synthetic oligonucleotide
agccaguagagaacaagag

SEQ ID NO: 2764538 - RNA, 19 nt, Artificial Sequence
  Description of Artificial Sequence: Synthetic oligonucleotide
gaaacaagccuccgcauau

SEQ ID NO: 2764539 - RNA, 19 nt, Artificial Sequence
  Description of Artificial Sequence: Synthetic oligonucleotide
caccaacggagacaggcag

SEQ ID NO: 2764540 - RNA, 19 nt, Artificial Sequence
  Description of Artificial Sequence: Synthetic oligonucleotide
agauccacauuggaagcug

SEQ ID NO: 2764541 - RNA, 19 nt, Artificial Sequence
  Description of Artificial Sequence: Synthetic oligonucleotide
uguugcagccaccgggauc

SEQ ID NO: 2764542 - RNA, 19 nt, Artificial Sequence
  Description of Artificial Sequence: Synthetic oligonucleotide
ccacauuggaagcuggacc

SEQ ID NO: 2764543 - RNA, 19 nt, Artificial Sequence
  Description of Artificial Sequence: Synthetic oligonucleotide
caggcagaauccaagugga

SEQ ID NO: 2764544 - RNA, 19 nt, Artificial Sequence
  Description of Artificial Sequence: Synthetic oligonucleotide
ugaccacaccaacggagac

SEQ ID NO: 2764545 - RNA, 19 nt, Artificial Sequence
  Description of Artificial Sequence: Synthetic oligonucleotide
ugucacgaacauacagauc

SEQ ID NO: 2764546 - RNA, 19 nt, Artificial Sequence
  Description of Artificial Sequence: Synthetic oligonucleotide
cccagacuaacacaguggc

SEQ ID NO: 2764547 - RNA, 19 nt, Artificial Sequence
  Description of Artificial Sequence: Synthetic oligonucleotide
ugaugugcacgaacugcaa

SEQ ID NO: 2764548 - RNA, 19 nt, Artificial Sequence
  Description of Artificial Sequence: Synthetic oligonucleotide
aggauggcaguugucacga

SEQ ID NO: 2764549 - RNA, 19 nt, Artificial Sequence
  Description of Artificial Sequence: Synthetic oligonucleotide
caggaaaccacaggacccc

SEQ ID NO: 2764550 - RNA, 19 nt, Artificial Sequence
  Description of Artificial Sequence: Synthetic oligonucleotide
gaccaaccaaacugaugug

SEQ ID NO: 2764551 - RNA, 19 nt, Artificial Sequence
  Description of Artificial Sequence: Synthetic oligonucleotide
agccuccgcauauucuuag

SEQ ID NO: 2764552 - RNA, 19 nt, Artificial Sequence
  Description of Artificial Sequence: Synthetic oligonucleotide
aacgagacauugaaagcuu

SEQ ID NO: 2764553 - RNA, 19 nt, Artificial Sequence
  Description of Artificial Sequence: Synthetic oligonucleotide
guguaacauacauuugaaa

SEQ ID NO: 2764554 - RNA, 19 nt, Artificial Sequence
  Description of Artificial Sequence: Synthetic oligonucleotide
ucggaauccaggggagcgg

SEQ ID NO: 2764555 - RNA, 19 nt, Artificial Sequence
  Description of Artificial Sequence: Synthetic oligonucleotide
cagaauccaaguggagucc

SEQ ID NO: 2764556 - RNA, 19 nt, Artificial Sequence
  Description of Artificial Sequence: Synthetic oligonucleotide
aagcuuuuggagagcaaaa

SEQ ID NO: 2764557 - RNA, 19 nt, Artificial Sequence
  Description of Artificial Sequence: Synthetic oligonucleotide
uugaaagcuuuuggagagc

SEQ ID NO: 2764558 - RNA, 19 nt, Artificial Sequence
  Description of Artificial Sequence: Synthetic oligonucleotide
gcauauucuuagauaagug

SEQ ID NO: 2764559 - RNA, 19 nt, Artificial Sequence
  Description of Artificial Sequence: Synthetic oligonucleotide
caacucucuuggaccaacc

SEQ ID NO: 2764560 - RNA, 19 nt, Artificial Sequence
  Description of Artificial Sequence: Synthetic oligonucleotide
guggcuuugaaaggauggc

SEQ ID NO: 2764561 - RNA, 19 nt, Artificial Sequence
  Description of Artificial Sequence: Synthetic oligonucleotide
acuaacacaguggcuuuga

SEQ ID NO: 2764562 - RNA, 19 nt, Artificial Sequence
  Description of Artificial Sequence: Synthetic oligonucleotide
aaguuccggagggcaacgg

SEQ ID NO: 2764563 - RNA, 19 nt, Artificial Sequence
  Description of Artificial Sequence: Synthetic oligonucleotide
aucuccacuauuaguaaau

SEQ ID NO: 2764564 - RNA, 19 nt, Artificial Sequence
  Description of Artificial Sequence: Synthetic oligonucleotide
gaaggaacuguugcagcca

SEQ ID NO: 2764565 - RNA, 19 nt, Artificial Sequence
  Description of Artificial Sequence: Synthetic oligonucleotide
gugagaucaggaaaccaca

SEQ ID NO: 2764566 - RNA, 19 nt, Artificial Sequence
  Description of Artificial Sequence: Synthetic oligonucleotide
gaauccgacuugguuggug

SEQ ID NO: 2764567 - RNA, 19 nt, Artificial Sequence
  Description of Artificial Sequence: Synthetic oligonucleotide
aguuccggagggcaacgga

SEQ ID NO: 2764568 - RNA, 19 nt, Artificial Sequence
  Description of Artificial Sequence: Synthetic oligonucleotide
uuggaccaaccaaacugau

SEQ ID NO: 2764569 - RNA, 19 nt, Artificial Sequence
  Description of Artificial Sequence: Synthetic oligonucleotide
agaauccaaguggagucca

SEQ ID NO: 2764570 - RNA, 19 nt, Artificial Sequence
  Description of Artificial Sequence: Synthetic oligonucleotide
uccggcaaaguugucggaa

SEQ ID NO: 2764571 - RNA, 19 nt, Artificial Sequence
  Description of Artificial Sequence: Synthetic oligonucleotide
agcagcuaacugcuccuga

SEQ ID NO: 2764572 - RNA, 19 nt, Artificial Sequence
  Description of Artificial Sequence: Synthetic oligonucleotide
cauuggaagcuggacccag

SEQ ID NO: 2764573 - RNA, 19 nt, Artificial Sequence
  Description of Artificial Sequence: Synthetic oligonucleotide
ggagcggagcagcagauuc

SEQ ID NO: 2764574 - RNA, 19 nt, Artificial Sequence
  Description of Artificial Sequence: Synthetic oligonucleotide
ucucugaauccgacuuggu

SEQ ID NO: 2764575 - RNA, 19 nt, Artificial Sequence
  Description of Artificial Sequence: Synthetic oligonucleotide
cucggacaaaguguguaac

SEQ ID NO: 2764576 - RNA, 19 nt, Artificial Sequence
  Description of Artificial Sequence: Synthetic oligonucleotide
caguggcuuugaaaggaug

SEQ ID NO: 2764577 - RNA, 19 nt, Artificial Sequence
  Description of Artificial Sequence: Synthetic oligonucleotide
gagaggcccaugaggcugg

SEQ ID NO: 2764578 - RNA, 19 nt, Artificial Sequence
  Description of Artificial Sequence: Synthetic oligonucleotide
cacaguggcuuugaaagga

SEQ ID NO: 2764579 - RNA, 19 nt, Artificial Sequence
  Description of Artificial Sequence: Synthetic oligonucleotide
cuaacugcuccugaacaga

SEQ ID NO: 2764580 - RNA, 19 nt, Artificial Sequence
  Description of Artificial Sequence: Synthetic oligonucleotide
gacuaacacaguggcuuug

SEQ ID NO: 2764581 - RNA, 19 nt, Artificial Sequence
  Description of Artificial Sequence: Synthetic oligonucleotide
uccggagggcaacggauau

SEQ ID NO: 2764582 - RNA, 19 nt, Artificial Sequence
  Description of Artificial Sequence: Synthetic oligonucleotide
ugcuaaaguuccggagggc

SEQ ID NO: 2764583 - RNA, 19 nt, Artificial Sequence
  Description of Artificial Sequence: Synthetic oligonucleotide
agugagccuggcaacucuc

SEQ ID NO: 2764584 - RNA, 19 nt, Artificial Sequence
  Description of Artificial Sequence: Synthetic oligonucleotide
cacaggaccccaccagcag

SEQ ID NO: 2764585 - RNA, 19 nt, Artificial Sequence
  Description of Artificial Sequence: Synthetic oligonucleotide
agacuaacacaguggcuuu

SEQ ID NO: 2764586 - RNA, 19 nt, Artificial Sequence
  Description of Artificial Sequence: Synthetic oligonucleotide
cuaaaguuccggagggcaa

SEQ ID NO: 2764587 - RNA, 19 nt, Artificial Sequence
  Description of Artificial Sequence: Synthetic oligonucleotide
uccaggggagcggagcagc

SEQ ID NO: 2764588 - RNA, 19 nt, Artificial Sequence
  Description of Artificial Sequence: Synthetic oligonucleotide
aguccacugcagugagauc

SEQ ID NO: 2764589 - RNA, 19 nt, Artificial Sequence
  Description of Artificial Sequence: Synthetic oligonucleotide
ucuccacuauuaguaaauu

SEQ ID NO: 2764590 - RNA, 19 nt, Artificial Sequence
  Description of Artificial Sequence: Synthetic oligonucleotide
agcggagcagcagauucug

SEQ ID NO: 2764591 - RNA, 19 nt, Artificial Sequence
  Description of Artificial Sequence: Synthetic oligonucleotide
cagcacagauacagcucgg

SEQ ID NO: 2764592 - RNA, 19 nt, Artificial Sequence
  Description of Artificial Sequence: Synthetic oligonucleotide
guuggugguauccggcaaa

SEQ ID NO: 2764593 - RNA, 19 nt, Artificial Sequence
  Description of Artificial Sequence: Synthetic oligonucleotide
ugucggaauccaggggagc

SEQ ID NO: 2764594 - RNA, 19 nt, Artificial Sequence
  Description of Artificial Sequence: Synthetic oligonucleotide
acgaacauacagaucugaa

SEQ ID NO: 2764595 - RNA, 19 nt, Artificial Sequence
  Description of Artificial Sequence: Synthetic oligonucleotide
gaccacaccaacggagaca

SEQ ID NO: 2764596 - RNA, 19 nt, Artificial Sequence
  Description of Artificial Sequence: Synthetic oligonucleotide
gcuaaaguuccggagggca

SEQ ID NO: 2764597 - RNA, 19 nt, Artificial Sequence
  Description of Artificial Sequence: Synthetic oligonucleotide
ccuggcaacucucuuggac

SEQ ID NO: 2764598 - RNA, 19 nt, Artificial Sequence
  Description of Artificial Sequence: Synthetic oligonucleotide
cuggacccagacuaacaca

SEQ ID NO: 2764599 - RNA, 19 nt, Artificial Sequence
  Description of Artificial Sequence: Synthetic oligonucleotide
cagacuaacacaguggcuu

SEQ ID NO: 2764600 - RNA, 19 nt, Artificial Sequence
  Description of Artificial Sequence: Synthetic oligonucleotide
gaauccaaguggaguccac

SEQ ID NO: 2764601 - RNA, 19 nt, Artificial Sequence
  Description of Artificial Sequence: Synthetic oligonucleotide
ggucucugaauccgacuug

SEQ ID NO: 2764602 - RNA, 19 nt, Artificial Sequence
  Description of Artificial Sequence: Synthetic oligonucleotide
agcucggacaaagugugua

SEQ ID NO: 2764603 - RNA, 19 nt, Artificial Sequence
  Description of Artificial Sequence: Synthetic oligonucleotide
acaagccuccgcauauucu

SEQ ID NO: 2764604 - RNA, 19 nt, Artificial Sequence
  Description of Artificial Sequence: Synthetic oligonucleotide
cuccgcauauucuuagaua

SEQ ID NO: 2764605 - RNA, 19 nt, Artificial Sequence
  Description of Artificial Sequence: Synthetic oligonucleotide
cacgaacauacagaucuga

SEQ ID NO: 2764606 - RNA, 19 nt, Artificial Sequence
  Description of Artificial Sequence: Synthetic oligonucleotide
gccccugugcuaaaguucc

SEQ ID NO: 2764607 - RNA, 19 nt, Artificial Sequence
  Description of Artificial Sequence: Synthetic oligonucleotide
gaccccaccagcagcuaac

SEQ ID NO: 2764608 - RNA, 19 nt, Artificial Sequence
  Description of Artificial Sequence: Synthetic oligonucleotide
ccaaccaaacugaugugca

SEQ ID NO: 2764609 - RNA, 19 nt, Artificial Sequence
  Description of Artificial Sequence: Synthetic oligonucleotide
gcacagauacagcucggac

SEQ ID NO: 2764610 - RNA, 19 nt, Artificial Sequence
  Description of Artificial Sequence: Synthetic oligonucleotide
ggugguauccggcaaaguu

SEQ ID NO: 2764611 - RNA, 19 nt, Artificial Sequence
  Description of Artificial Sequence: Synthetic oligonucleotide
acaccaacggagacaggca

SEQ ID NO: 2764612 - RNA, 19 nt, Artificial Sequence
  Description of Artificial Sequence: Synthetic oligonucleotide
caacggauaugaagaucca

SEQ ID NO: 2764613 - RNA, 19 nt, Artificial Sequence
  Description of Artificial Sequence: Synthetic oligonucleotide
gauacagcucggacaaagu

SEQ ID NO: 2764614 - RNA, 19 nt, Artificial Sequence
  Description of Artificial Sequence: Synthetic oligonucleotide
gcagccaccgggaucauca

SEQ ID NO: 2764615 - RNA, 19 nt, Artificial Sequence
  Description of Artificial Sequence: Synthetic oligonucleotide
aacugcuccugaacagaaa

SEQ ID NO: 2764616 - RNA, 19 nt, Artificial Sequence
  Description of Artificial Sequence: Synthetic oligonucleotide
acauuggaagcuggaccca

SEQ ID NO: 2764617 - RNA, 19 nt, Artificial Sequence
  Description of Artificial Sequence: Synthetic oligonucleotide
uccgacuugguugguggua

SEQ ID NO: 2764618 - RNA, 19 nt, Artificial Sequence
  Description of Artificial Sequence: Synthetic oligonucleotide
gccaccgggaucaucagca

SEQ ID NO: 2764619 - RNA, 19 nt, Artificial Sequence
  Description of Artificial Sequence: Synthetic oligonucleotide
gaaagcuuuuggagagcaa

SEQ ID NO: 2764620 - RNA, 19 nt, Artificial Sequence
  Description of Artificial Sequence: Synthetic oligonucleotide
agcuggacccagacuaaca

SEQ ID NO: 2764621 - RNA, 19 nt, Artificial Sequence
  Description of Artificial Sequence: Synthetic oligonucleotide
gugcacgaacugcaacuuc

SEQ ID NO: 2764622 - RNA, 19 nt, Artificial Sequence
  Description of Artificial Sequence: Synthetic oligonucleotide
caagccuccgcauauucuu

SEQ ID NO: 2764623 - RNA, 19 nt, Artificial Sequence
  Description of Artificial Sequence: Synthetic oligonucleotide
ugcugccccugugcuaaag

SEQ ID NO: 2764624 - RNA, 19 nt, Artificial Sequence
  Description of Artificial Sequence: Synthetic oligonucleotide
agauucugggagaggccca

SEQ ID NO: 2764625 - RNA, 19 nt, Artificial Sequence
  Description of Artificial Sequence: Synthetic oligonucleotide
ggcccaugaggcuggagca

SEQ ID NO: 2764626 - RNA, 19 nt, Artificial Sequence
  Description of Artificial Sequence: Synthetic oligonucleotide
auccggcaaaguugucgga

SEQ ID NO: 2764627 - RNA, 19 nt, Artificial Sequence
  Description of Artificial Sequence: Synthetic oligonucleotide
cauuugaaaacgagacauu

SEQ ID NO: 2764628 - RNA, 19 nt, Artificial Sequence
  Description of Artificial Sequence: Synthetic oligonucleotide
ccgcauauucuuagauaag

SEQ ID NO: 2764629 - RNA, 19 nt, Artificial Sequence
  Description of Artificial Sequence: Synthetic oligonucleotide
accaacggagacaggcaga

SEQ ID NO: 2764630 - RNA, 19 nt, Artificial Sequence
  Description of Artificial Sequence: Synthetic oligonucleotide
aggcagaauccaaguggag

SEQ ID NO: 2764631 - RNA, 19 nt, Artificial Sequence
  Description of Artificial Sequence: Synthetic oligonucleotide
acaguggcuuugaaaggau

SEQ ID NO: 2764632 - RNA, 19 nt, Artificial Sequence
  Description of Artificial Sequence: Synthetic oligonucleotide
cuaacacaguggcuuugaa

SEQ ID NO: 2764633 - RNA, 19 nt, Artificial Sequence
  Description of Artificial Sequence: Synthetic oligonucleotide
gggaucaucagcacagaua

SEQ ID NO: 2764634 - RNA, 19 nt, Artificial Sequence
  Description of Artificial Sequence: Synthetic oligonucleotide
cagugagaucaggaaacca

SEQ ID NO: 2764635 - RNA, 19 nt, Artificial Sequence
  Description of Artificial Sequence: Synthetic oligonucleotide
ggcagaauccaaguggagu

SEQ ID NO: 2764636 - RNA, 19 nt, Artificial Sequence
  Description of Artificial Sequence: Synthetic oligonucleotide
aagccuccgcauauucuua

SEQ ID NO: 2764637 - RNA, 19 nt, Artificial Sequence
  Description of Artificial Sequence: Synthetic oligonucleotide
gcagcuaacugcuccugaa

SEQ ID NO: 2764638 - RNA, 19 nt, Artificial Sequence
  Description of Artificial Sequence: Synthetic oligonucleotide
cccugugcuaaaguuccgg

SEQ ID NO: 2764639 - RNA, 19 nt, Artificial Sequence
  Description of Artificial Sequence: Synthetic oligonucleotide
cgaacauacagaucugaaa

SEQ ID NO: 2764640 - RNA, 19 nt, Artificial Sequence
  Description of Artificial Sequence: Synthetic oligonucleotide
caguugucacgaacauaca

SEQ ID NO: 2764641 - RNA, 19 nt, Artificial Sequence
  Description of Artificial Sequence: Synthetic oligonucleotide
cuuugaaaggauggcaguu

SEQ ID NO: 2764642 - RNA, 19 nt, Artificial Sequence
  Description of Artificial Sequence: Synthetic oligonucleotide
cagcagauucugggagagg

SEQ ID NO: 2764643 - RNA, 19 nt, Artificial Sequence
  Description of Artificial Sequence: Synthetic oligonucleotide
uggugguauccggcaaagu

SEQ ID NO: 2764644 - RNA, 19 nt, Artificial Sequence
  Description of Artificial Sequence: Synthetic oligonucleotide
auccaggggagcggagcag

SEQ ID NO: 2764645 - RNA, 19 nt, Artificial Sequence
  Description of Artificial Sequence: Synthetic oligonucleotide
ggcaacggauaugaagauc

SEQ ID NO: 2764646 - RNA, 19 nt, Artificial Sequence
  Description of Artificial Sequence: Synthetic oligonucleotide
gcagauucugggagaggcc

SEQ ID NO: 2764647 - RNA, 19 nt, Artificial Sequence
  Description of Artificial Sequence: Synthetic oligonucleotide
caccgggaucaucagcaca

SEQ ID NO: 2764648 - RNA, 19 nt, Artificial Sequence
  Description of Artificial Sequence: Synthetic oligonucleotide
gcacagccaguagagaaca

SEQ ID NO: 2764649 - RNA, 19 nt, Artificial Sequence
  Description of Artificial Sequence: Synthetic oligonucleotide
ugaauccgacuugguuggu

SEQ ID NO: 2764650 - RNA, 19 nt, Artificial Sequence
  Description of Artificial Sequence: Synthetic oligonucleotide
acgagacauugaaagcuuu

SEQ ID NO: 2764651 - RNA, 19 nt, Artificial Sequence
  Description of Artificial Sequence: Synthetic oligonucleotide
cucugaauccgacuugguu

SEQ ID NO: 2764652 - RNA, 19 nt, Artificial Sequence
  Description of Artificial Sequence: Synthetic oligonucleotide
cagccaccgggaucaucag

SEQ ID NO: 2764653 - RNA, 19 nt, Artificial Sequence
  Description of Artificial Sequence: Synthetic oligonucleotide
gcaacucucuuggaccaac

SEQ ID NO: 2764654 - RNA, 19 nt, Artificial Sequence
  Description of Artificial Sequence: Synthetic oligonucleotide
gcucggacaaaguguguaa

SEQ ID NO: 2764655 - RNA, 19 nt, Artificial Sequence
  Description of Artificial Sequence: Synthetic oligonucleotide
ccugugcuaaaguuccgga

SEQ ID NO: 2764656 - RNA, 19 nt, Artificial Sequence
  Description of Artificial Sequence: Synthetic oligonucleotide
cucuuggaccaaccaaacu

SEQ ID NO: 2764657 - RNA, 19 nt, Artificial Sequence
  Description of Artificial Sequence: Synthetic oligonucleotide
ccuucugagugugcugccc

SEQ ID NO: 2764658 - RNA, 19 nt, Artificial Sequence
  Description of Artificial Sequence: Synthetic oligonucleotide
gguuggugguauccggcaa

SEQ ID NO: 2764659 - RNA, 19 nt, Artificial Sequence
  Description of Artificial Sequence: Synthetic oligonucleotide
cugaaacaagccuccgcau

SEQ ID NO: 2764660 - RNA, 19 nt, Artificial Sequence
  Description of Artificial Sequence: Synthetic oligonucleotide
accccaccagcagcuaacu

SEQ ID NO: 2764661 - RNA, 19 nt, Artificial Sequence
  Description of Artificial Sequence: Synthetic oligonucleotide
caggaccccaccagcagcu

SEQ ID NO: 2764662 - RNA, 19 nt, Artificial Sequence
  Description of Artificial Sequence: Synthetic oligonucleotide
guuccggagggcaacggau

SEQ ID NO: 2764663 - RNA, 19 nt, Artificial Sequence
  Description of Artificial Sequence: Synthetic oligonucleotide
gaggcccaugaggcuggag

SEQ ID NO: 2764664 - RNA, 19 nt, Artificial Sequence
  Description of Artificial Sequence: Synthetic oligonucleotide
ccacaggaccccaccagca

SEQ ID NO: 2764665 - RNA, 19 nt, Artificial Sequence
  Description of Artificial Sequence: Synthetic oligonucleotide
ggagcacagccaguagaga

SEQ ID NO: 2764666 - RNA, 19 nt, Artificial Sequence
  Description of Artificial Sequence: Synthetic oligonucleotide
cacagccaguagagaacaa

SEQ ID NO: 2764667 - RNA, 19 nt, Artificial Sequence
  Description of Artificial Sequence: Synthetic oligonucleotide
ccaacggagacaggcagaa

SEQ ID NO: 2764668 - RNA, 19 nt, Artificial Sequence
  Description of Artificial Sequence: Synthetic oligonucleotide
gccuccgcauauucuuaga

SEQ ID NO: 2764669 - RNA, 19 nt, Artificial Sequence
  Description of Artificial Sequence: Synthetic oligonucleotide
ccccugugcuaaaguuccg

SEQ ID NO: 2764670 - RNA, 19 nt, Artificial Sequence
  Description of Artificial Sequence: Synthetic oligonucleotide
cugccccugugcuaaaguu

SEQ ID NO: 2764671 - RNA, 19 nt, Artificial Sequence
  Description of Artificial Sequence: Synthetic oligonucleotide
cggagggcaacggauauga

SEQ ID NO: 2764672 - RNA, 19 nt, Artificial Sequence
  Description of Artificial Sequence: Synthetic oligonucleotide
gugugcugccccugugcua

SEQ ID NO: 2764673 - RNA, 19 nt, Artificial Sequence
  Description of Artificial Sequence: Synthetic oligonucleotide
ccaccgggaucaucagcac

SEQ ID NO: 2764674 - RNA, 19 nt, Artificial Sequence
  Description of Artificial Sequence: Synthetic oligonucleotide
gugagccuggcaacucucu

SEQ ID NO: 2764675 - RNA, 19 nt, Artificial Sequence
  Description of Artificial Sequence: Synthetic oligonucleotide
cggcaaaguugucggaauc

SEQ ID NO: 2764676 - RNA, 19 nt, Artificial Sequence
  Description of Artificial Sequence: Synthetic oligonucleotide
cggauaugaagauccacau

SEQ ID NO: 2764677 - RNA, 19 nt, Artificial Sequence
  Description of Artificial Sequence: Synthetic oligonucleotide
gcugccccugugcuaaagu

SEQ ID NO: 2764678 - RNA, 19 nt, Artificial Sequence
  Description of Artificial Sequence: Synthetic oligonucleotide
gggcaacggauaugaagau

SEQ ID NO: 2764679 - RNA, 19 nt, Artificial Sequence
  Description of Artificial Sequence: Synthetic oligonucleotide
ccagacuaacacaguggcu

SEQ ID NO: 2764680 - RNA, 19 nt, Artificial Sequence
  Description of Artificial Sequence: Synthetic oligonucleotide
gguauccggcaaaguuguc

SEQ ID NO: 2764681 - RNA, 19 nt, Artificial Sequence
  Description of Artificial Sequence: Synthetic oligonucleotide
ccccaccagcagcuaacug

SEQ ID NO: 2764682 - RNA, 19 nt, Artificial Sequence
  Description of Artificial Sequence: Synthetic oligonucleotide
ccacaccaacggagacagg

SEQ ID NO: 2764683 - RNA, 19 nt, Artificial Sequence
  Description of Artificial Sequence: Synthetic oligonucleotide
ccuccgcauauucuuagau

SEQ ID NO: 2764684 - RNA, 19 nt, Artificial Sequence
  Description of Artificial Sequence: Synthetic oligonucleotide
ggaguccacugcagugaga

SEQ ID NO: 2764685 - RNA, 19 nt, Artificial Sequence
  Description of Artificial Sequence: Synthetic oligonucleotide
cagcucggacaaagugugu

SEQ ID NO: 2764686 - RNA, 19 nt, Artificial Sequence
  Description of Artificial Sequence: Synthetic oligonucleotide
cagauacagcucggacaaa

SEQ ID NO: 2764687 - RNA, 19 nt, Artificial Sequence
  Description of Artificial Sequence: Synthetic oligonucleotide
aggaccccaccagcagcua

SEQ ID NO: 2764688 - RNA, 19 nt, Artificial Sequence
  Description of Artificial Sequence: Synthetic oligonucleotide
ccggagggcaacggauaug

SEQ ID NO: 2764689 - RNA, 19 nt, Artificial Sequence
  Description of Artificial Sequence: Synthetic oligonucleotide
cuguugcagccaccgggau

SEQ ID NO: 2764690 - RNA, 19 nt, Artificial Sequence
  Description of Artificial Sequence: Synthetic oligonucleotide
gccuggcaacucucuugga

SEQ ID NO: 2764691 - RNA, 19 nt, Artificial Sequence
  Description of Artificial Sequence: Synthetic oligonucleotide
cgacuugguuggugguauc

SEQ ID NO: 2764692 - RNA, 19 nt, Artificial Sequence
  Description of Artificial Sequence: Synthetic oligonucleotide
ggacccagacuaacacagu

SEQ ID NO: 2764693 - RNA, 19 nt, Artificial Sequence
  Description of Artificial Sequence: Synthetic oligonucleotide
ccggcaaaguugucggaau

SEQ ID NO: 2764694 - RNA, 19 nt, Artificial Sequence
  Description of Artificial Sequence: Synthetic oligonucleotide
ggagggcaacggauaugaa

SEQ ID NO: 2764695 - RNA, 19 nt, Artificial Sequence
  Description of Artificial Sequence: Synthetic oligonucleotide
gugcugccccugugcuaaa

SEQ ID NO: 2764696 - RNA, 19 nt, Artificial Sequence
  Description of Artificial Sequence: Synthetic oligonucleotide
ccgacuugguuggugguau

SEQ ID NO: 2764697 - RNA, 19 nt, Artificial Sequence
  Description of Artificial Sequence: Synthetic oligonucleotide
ccgggaucaucagcacaga

SEQ ID NO: 2764698 - RNA, 19 nt, Artificial Sequence
  Description of Artificial Sequence: Synthetic oligonucleotide
gggagcggagcagcagauu

SEQ ID NO: 2764699 - RNA, 19 nt, Artificial Sequence
  Description of Artificial Sequence: Synthetic oligonucleotide
aucaccauguuacacaugc

SEQ ID NO: 2764700 - RNA, 19 nt, Artificial Sequence
  Description of Artificial Sequence: Synthetic oligonucleotide
aaacauguaguucucaaug

SEQ ID NO: 2764701 - RNA, 19 nt, Artificial Sequence
  Description of Artificial Sequence: Synthetic oligonucleotide
auucccaucagccaggaac

SEQ ID NO: 2764702 - RNA, 19 nt, Artificial Sequence
  Description of Artificial Sequence: Synthetic oligonucleotide
agccucauaguucugaagc

SEQ ID NO: 2764703 - RNA, 19 nt, Artificial Sequence
  Description of Artificial Sequence: Synthetic oligonucleotide
uuguugaucaccauguuac

SEQ ID NO: 2764704 - RNA, 19 nt, Artificial Sequence
  Description of Artificial Sequence: Synthetic oligonucleotide
caugguuucaaacauguag

SEQ ID NO: 2764705 - RNA, 19 nt, Artificial Sequence
  Description of Artificial Sequence: Synthetic oligonucleotide
auaguucugaagcccaucc

SEQ ID NO: 2764706 - RNA, 19 nt, Artificial Sequence
  Description of Artificial Sequence: Synthetic oligonucleotide
aaaucuucugccuaaguuu

SEQ ID NO: 2764707 - RNA, 19 nt, Artificial Sequence
  Description of Artificial Sequence: Synthetic oligonucleotide
ugucacugcgcccagacag

SEQ ID NO: 2764708 - RNA, 19 nt, Artificial Sequence
  Description of Artificial Sequence: Synthetic oligonucleotide
aucugugcccuccaaagcc

SEQ ID NO: 2764709 - RNA, 19 nt, Artificial Sequence
  Description of Artificial Sequence: Synthetic oligonucleotide
aaaaucuucugccuaaguu

SEQ ID NO: 2764710 - RNA, 19 nt, Artificial Sequence
  Description of Artificial Sequence: Synthetic oligonucleotide
auuagagacagccgcaauc

SEQ ID NO: 2764711 - RNA, 19 nt, Artificial Sequence
  Description of Artificial Sequence: Synthetic oligonucleotide
ugaaccuccuuguugauca

SEQ ID NO: 2764712 - RNA, 19 nt, Artificial Sequence
  Description of Artificial Sequence: Synthetic oligonucleotide
cuaaguuugucacugcgcc

SEQ ID NO: 2764713 - RNA, 19 nt, Artificial Sequence
  Description of Artificial Sequence: Synthetic oligonucleotide
aaggccuucuccuugaaaa

SEQ ID NO: 2764714 - RNA, 19 nt, Artificial Sequence
  Description of Artificial Sequence: Synthetic oligonucleotide
uccuugaaaaucuucugcc

SEQ ID NO: 2764715 - RNA, 19 nt, Artificial Sequence
  Description of Artificial Sequence: Synthetic oligonucleotide
uagacggucauucccauca

SEQ ID NO: 2764716 - RNA, 19 nt, Artificial Sequence
  Description of Artificial Sequence: Synthetic oligonucleotide
aacauguaguucucaaugu

SEQ ID NO: 2764717 - RNA, 19 nt, Artificial Sequence
  Description of Artificial Sequence: Synthetic oligonucleotide
ucaaugucuggcaaggccu

SEQ ID NO: 2764718 - RNA, 19 nt, Artificial Sequence
  Description of Artificial Sequence: Synthetic oligonucleotide
guuggugagaccuaggaga

SEQ ID NO: 2764719 - RNA, 19 nt, Artificial Sequence
  Description of Artificial Sequence: Synthetic oligonucleotide
ucuggauuagagacagccg

SEQ ID NO: 2764720 - RNA, 19 nt, Artificial Sequence
  Description of Artificial Sequence: Synthetic oligonucleotide
cuggauuagagacagccgc

SEQ ID NO: 2764721 - RNA, 19 nt, Artificial Sequence
  Description of Artificial Sequence: Synthetic oligonucleotide
aguuuguccauccucccuc

SEQ ID NO: 2764722 - RNA, 19 nt, Artificial Sequence
  Description of Artificial Sequence: Synthetic oligonucleotide
cauucugucaguuugucca

SEQ ID NO: 2764723 - RNA, 19 nt, Artificial Sequence
  Description of Artificial Sequence: Synthetic oligonucleotide
uugaucaccauguuacaca

SEQ ID NO: 2764724 - RNA, 19 nt, Artificial Sequence
  Description of Artificial Sequence: Synthetic oligonucleotide
cuucauacacccuuucccc

SEQ ID NO: 2764725 - RNA, 19 nt, Artificial Sequence
  Description of Artificial Sequence: Synthetic oligonucleotide
acauguaguucucaauguc

SEQ ID NO: 2764726 - RNA, 19 nt, Artificial Sequence
  Description of Artificial Sequence: Synthetic oligonucleotide
uccuuguugaucaccaugu

SEQ ID NO: 2764727 - RNA, 19 nt, Artificial Sequence
  Description of Artificial Sequence: Synthetic oligonucleotide
uccaggagacucacgaggg

SEQ ID NO: 2764728 - RNA, 19 nt, Artificial Sequence
  Description of Artificial Sequence: Synthetic oligonucleotide
guuucaaacauguaguucu

SEQ ID NO: 2764729 - RNA, 19 nt, Artificial Sequence
  Description of Artificial Sequence: Synthetic oligonucleotide
accuaggagagccucauag

SEQ ID NO: 2764730 - RNA, 19 nt, Artificial Sequence
  Description of Artificial Sequence: Synthetic oligonucleotide
auccaggagacucacgagg

SEQ ID NO: 2764731 - RNA, 19 nt, Artificial Sequence
  Description of Artificial Sequence: Synthetic oligonucleotide
cuugccaacaucugugccc

SEQ ID NO: 2764732 - RNA, 19 nt, Artificial Sequence
  Description of Artificial Sequence: Synthetic oligonucleotide
uguaguucucaaugucugg

SEQ ID NO: 2764733 - RNA, 19 nt, Artificial Sequence
  Description of Artificial Sequence: Synthetic oligonucleotide
aaucuuggcuaguccgugg

SEQ ID NO: 2764734 - RNA, 19 nt, Artificial Sequence
  Description of Artificial Sequence: Synthetic oligonucleotide
uucucaaugucuggcaagg

SEQ ID NO: 2764735 - RNA, 19 nt, Artificial Sequence
  Description of Artificial Sequence: Synthetic oligonucleotide
acaucugugcccuccaaag

SEQ ID NO: 2764736 - RNA, 19 nt, Artificial Sequence
  Description of Artificial Sequence: Synthetic oligonucleotide
uuggugagaccuaggagag

SEQ ID NO: 2764737 - RNA, 19 nt, Artificial Sequence
  Description of Artificial Sequence: Synthetic oligonucleotide
aaucuucugccuaaguuug

SEQ ID NO: 2764738 - RNA, 19 nt, Artificial Sequence
  Description of Artificial Sequence: Synthetic oligonucleotide
uguccauccucccucuccg

SEQ ID NO: 2764739 - RNA, 19 nt, Artificial Sequence
  Description of Artificial Sequence: Synthetic oligonucleotide
uucccaucagccaggaacc

SEQ ID NO: 2764740 - RNA, 19 nt, Artificial Sequence
  Description of Artificial Sequence: Synthetic oligonucleotide
uccugaaccuccuuguuga

SEQ ID NO: 2764741 - RNA, 19 nt, Artificial Sequence
  Description of Artificial Sequence: Synthetic oligonucleotide
aguucugaagcccaucccu

SEQ ID NO: 2764742 - RNA, 19 nt, Artificial Sequence
  Description of Artificial Sequence: Synthetic oligonucleotide
ucaaacauguaguucucaa

SEQ ID NO: 2764743 - RNA, 19 nt, Artificial Sequence
  Description of Artificial Sequence: Synthetic oligonucleotide
acaugcauucaguggcugc

SEQ ID NO: 2764744 - RNA, 19 nt, Artificial Sequence
  Description of Artificial Sequence: Synthetic oligonucleotide
uuagagacagccgcaaucu

SEQ ID NO: 2764745 - RNA, 19 nt, Artificial Sequence
  Description of Artificial Sequence: Synthetic oligonucleotide
gagacagccgcaaucuugg

SEQ ID NO: 2764746 - RNA, 19 nt, Artificial Sequence
  Description of Artificial Sequence: Synthetic oligonucleotide
cucaaugucuggcaaggcc

SEQ ID NO: 2764747 - RNA, 19 nt, Artificial Sequence
  Description of Artificial Sequence: Synthetic oligonucleotide
acggucauucccaucagcc

SEQ ID NO: 2764748 - RNA, 19 nt, Artificial Sequence
  Description of Artificial Sequence: Synthetic oligonucleotide
uugaaaaucuucugccuaa

SEQ ID NO: 2764749 - RNA, 19 nt, Artificial Sequence
  Description of Artificial Sequence: Synthetic oligonucleotide
aaguuugucacugcgccca

SEQ ID NO: 2764750 - RNA, 19 nt, Artificial Sequence
  Description of Artificial Sequence: Synthetic oligonucleotide
gucuggauuagagacagcc

SEQ ID NO: 2764751 - RNA, 19 nt, Artificial Sequence
  Description of Artificial Sequence: Synthetic oligonucleotide
uuugucacugcgcccagac

SEQ ID NO: 2764752 - RNA, 19 nt, Artificial Sequence
  Description of Artificial Sequence: Synthetic oligonucleotide
aggagagccucauaguucu

SEQ ID NO: 2764753 - RNA, 19 nt, Artificial Sequence
  Description of Artificial Sequence: Synthetic oligonucleotide
uguguauccaggagacuca

SEQ ID NO: 2764754 - RNA, 19 nt, Artificial Sequence
  Description of Artificial Sequence: Synthetic oligonucleotide
ucugucaguuuguccaucc

SEQ ID NO: 2764755 - RNA, 19 nt, Artificial Sequence
  Description of Artificial Sequence: Synthetic oligonucleotide
guauccaggagacucacga

SEQ ID NO: 2764756 - RNA, 19 nt, Artificial Sequence
  Description of Artificial Sequence: Synthetic oligonucleotide
acaccaccagcuuuagacg

SEQ ID NO: 2764757 - RNA, 19 nt, Artificial Sequence
  Description of Artificial Sequence: Synthetic oligonucleotide
ucauacacccuuuccccag

SEQ ID NO: 2764758 - RNA, 19 nt, Artificial Sequence
  Description of Artificial Sequence: Synthetic oligonucleotide
accuugccaacaucugugc

SEQ ID NO: 2764759 - RNA, 19 nt, Artificial Sequence
  Description of Artificial Sequence: Synthetic oligonucleotide
uucugccuaaguuugucac

SEQ ID NO: 2764760 - RNA, 19 nt, Artificial Sequence
  Description of Artificial Sequence: Synthetic oligonucleotide
acugcgcccagacagguug

SEQ ID NO: 2764761 - RNA, 19 nt, Artificial Sequence
  Description of Artificial Sequence: Synthetic oligonucleotide
augucuggauuagagacag

SEQ ID NO: 2764762 - RNA, 19 nt, Artificial Sequence
  Description of Artificial Sequence: Synthetic oligonucleotide
augguuucaaacauguagu

SEQ ID NO: 2764763 - RNA, 19 nt, Artificial Sequence
  Description of Artificial Sequence: Synthetic oligonucleotide
cucuguguauccaggagac

SEQ ID NO: 2764764 - RNA, 19 nt, Artificial Sequence
  Description of Artificial Sequence: Synthetic oligonucleotide
ugucaguuuguccauccuc

SEQ ID NO: 2764765 - RNA, 19 nt, Artificial Sequence
  Description of Artificial Sequence: Synthetic oligonucleotide
uggucaugguuucaaacau

SEQ ID NO: 2764766 - RNA, 19 nt, Artificial Sequence
  Description of Artificial Sequence: Synthetic oligonucleotide
uggauuagagacagccgca

SEQ ID NO: 2764767 - RNA, 19 nt, Artificial Sequence
  Description of Artificial Sequence: Synthetic oligonucleotide
auguuacacaugcauucag

SEQ ID NO: 2764768 - RNA, 19 nt, Artificial Sequence
  Description of Artificial Sequence: Synthetic oligonucleotide
aucuuggcuaguccguggg

SEQ ID NO: 2764769 - RNA, 19 nt, Artificial Sequence
  Description of Artificial Sequence: Synthetic oligonucleotide
aaccuccuuguugaucacc

SEQ ID NO: 2764770 - RNA, 19 nt, Artificial Sequence
  Description of Artificial Sequence: Synthetic oligonucleotide
uuguccauccucccucucc

SEQ ID NO: 2764771 - RNA, 19 nt, Artificial Sequence
  Description of Artificial Sequence: Synthetic oligonucleotide
ugaucaccauguuacacau

SEQ ID NO: 2764772 - RNA, 19 nt, Artificial Sequence
  Description of Artificial Sequence: Synthetic oligonucleotide
gucaguuuguccauccucc

SEQ ID NO: 2764773 - RNA, 19 nt, Artificial Sequence
  Description of Artificial Sequence: Synthetic oligonucleotide
cuuuagacggucauuccca

SEQ ID NO: 2764774 - RNA, 19 nt, Artificial Sequence
  Description of Artificial Sequence: Synthetic oligonucleotide
caccaccagcuuuagacgg

SEQ ID NO: 2764775 - RNA, 19 nt, Artificial Sequence
  Description of Artificial Sequence: Synthetic oligonucleotide
uguauccaggagacucacg

SEQ ID NO: 2764776 - RNA, 19 nt, Artificial Sequence
  Description of Artificial Sequence: Synthetic oligonucleotide
ucaccuugccaacaucugu

SEQ ID NO: 2764777 - RNA, 19 nt, Artificial Sequence
  Description of Artificial Sequence: Synthetic oligonucleotide
guaguucucaaugucuggc

SEQ ID NO: 2764778 - RNA, 19 nt, Artificial Sequence
  Description of Artificial Sequence: Synthetic oligonucleotide
uaaguuugucacugcgccc

SEQ ID NO: 2764779 - RNA, 19 nt, Artificial Sequence
  Description of Artificial Sequence: Synthetic oligonucleotide
ugaaaaucuucugccuaag

SEQ ID NO: 2764780 - RNA, 19 nt, Artificial Sequence
  Description of Artificial Sequence: Synthetic oligonucleotide
uucaccuugccaacaucug

SEQ ID NO: 2764781 - RNA, 19 nt, Artificial Sequence
  Description of Artificial Sequence: Synthetic oligonucleotide
aacaucugugcccuccaaa

SEQ ID NO: 2764782 - RNA, 19 nt, Artificial Sequence
  Description of Artificial Sequence: Synthetic oligonucleotide
uucauacacccuuucccca

SEQ ID NO: 2764783 - RNA, 19 nt, Artificial Sequence
  Description of Artificial Sequence: Synthetic oligonucleotide
uuucaaacauguaguucuc

SEQ ID NO: 2764784 - RNA, 19 nt, Artificial Sequence
  Description of Artificial Sequence: Synthetic oligonucleotide
uaggagagccucauaguuc

SEQ ID NO: 2764785 - RNA, 19 nt, Artificial Sequence
  Description of Artificial Sequence: Synthetic oligonucleotide
guucucaaugucuggcaag

SEQ ID NO: 2764786 - RNA, 19 nt, Artificial Sequence
  Description of Artificial Sequence: Synthetic oligonucleotide
ggucauucccaucagccag

SEQ ID NO: 2764787 - RNA, 19 nt, Artificial Sequence
  Description of Artificial Sequence: Synthetic oligonucleotide
cuggucaugguuucaaaca

SEQ ID NO: 2764788 - RNA, 19 nt, Artificial Sequence
  Description of Artificial Sequence: Synthetic oligonucleotide
uauccaggagacucacgag

SEQ ID NO: 2764789 - RNA, 19 nt, Artificial Sequence
  Description of Artificial Sequence: Synthetic oligonucleotide
uaguucugaagcccauccc

SEQ ID NO: 2764790 - RNA, 19 nt, Artificial Sequence
  Description of Artificial Sequence: Synthetic oligonucleotide
agacagguuggugagaccu

SEQ ID NO: 2764791 - RNA, 19 nt, Artificial Sequence
  Description of Artificial Sequence: Synthetic oligonucleotide
acagccgcaaucuuggcua

SEQ ID NO: 2764792 - RNA, 19 nt, Artificial Sequence
  Description of Artificial Sequence: Synthetic oligonucleotide
aagcccaucccucugugua

SEQ ID NO: 2764793 - RNA, 19 nt, Artificial Sequence
  Description of Artificial Sequence: Synthetic oligonucleotide
cuguguauccaggagacuc

SEQ ID NO: 2764794 - RNA, 19 nt, Artificial Sequence
  Description of Artificial Sequence: Synthetic oligonucleotide
uccgcagagcaacaccacc

SEQ ID NO: 2764795 - RNA, 19 nt, Artificial Sequence
  Description of Artificial Sequence: Synthetic oligonucleotide
caugcauucaguggcugcc

SEQ ID NO: 2764796 - RNA, 19 nt, Artificial Sequence
  Description of Artificial Sequence: Synthetic oligonucleotide
ucugugcccuccaaagcca

SEQ ID NO: 2764797 - RNA, 19 nt, Artificial Sequence
  Description of Artificial Sequence: Synthetic oligonucleotide
gguggcugcauucugucag

SEQ ID NO: 2764798 - RNA, 19 nt, Artificial Sequence
  Description of Artificial Sequence: Synthetic oligonucleotide
uguugaucaccauguuaca

SEQ ID NO: 2764799 - RNA, 19 nt, Artificial Sequence
  Description of Artificial Sequence: Synthetic oligonucleotide
uucaguggcugccugccgu

SEQ ID NO: 2764800 - RNA, 19 nt, Artificial Sequence
  Description of Artificial Sequence: Synthetic oligonucleotide
ucugccuaaguuugucacu

SEQ ID NO: 2764801 - RNA, 19 nt, Artificial Sequence
  Description of Artificial Sequence: Synthetic oligonucleotide
caccuugccaacaucugug

SEQ ID NO: 2764802 - RNA, 19 nt, Artificial Sequence
  Description of Artificial Sequence: Synthetic oligonucleotide
agguuggugagaccuagga

SEQ ID NO: 2764803 - RNA, 19 nt, Artificial Sequence
  Description of Artificial Sequence: Synthetic oligonucleotide
aaggcgaugucuggauuag

SEQ ID NO: 2764804 - RNA, 19 nt, Artificial Sequence
  Description of Artificial Sequence: Synthetic oligonucleotide
cacuucauacacccuuucc

SEQ ID NO: 2764805 - RNA, 19 nt, Artificial Sequence
  Description of Artificial Sequence: Synthetic oligonucleotide
ggugagaccuaggagagcc

SEQ ID NO: 2764806 - RNA, 19 nt, Artificial Sequence
  Description of Artificial Sequence: Synthetic oligonucleotide
auguaguucucaaugucug

SEQ ID NO: 2764807 - RNA, 19 nt, Artificial Sequence
  Description of Artificial Sequence: Synthetic oligonucleotide
cuccuuguugaucaccaug

SEQ ID NO: 2764808 - RNA, 19 nt, Artificial Sequence
  Description of Artificial Sequence: Synthetic oligonucleotide
uuuguggguggcugcauuc

SEQ ID NO: 2764809 - RNA, 19 nt, Artificial Sequence
  Description of Artificial Sequence: Synthetic oligonucleotide
gcuuuagacggucauuccc

SEQ ID NO: 2764810 - RNA, 19 nt, Artificial Sequence
  Description of Artificial Sequence: Synthetic oligonucleotide
aguucucaaugucuggcaa

SEQ ID NO: 2764811 - RNA, 19 nt, Artificial Sequence
  Description of Artificial Sequence: Synthetic oligonucleotide
caggaaccucuccugaacc

SEQ ID NO: 2764812 - RNA, 19 nt, Artificial Sequence
  Description of Artificial Sequence: Synthetic oligonucleotide
aggagacucacgaggggcc

SEQ ID NO: 2764813 - RNA, 19 nt, Artificial Sequence
  Description of Artificial Sequence: Synthetic oligonucleotide
uucaaacauguaguucuca

SEQ ID NO: 2764814 - RNA, 19 nt, Artificial Sequence
  Description of Artificial Sequence: Synthetic oligonucleotide
ccauguuacacaugcauuc

SEQ ID NO: 2764815 - RNA, 19 nt, Artificial Sequence
  Description of Artificial Sequence: Synthetic oligonucleotide
aguggcugccugccguagc

SEQ ID NO: 2764816 - RNA, 19 nt, Artificial Sequence
  Description of Artificial Sequence: Synthetic oligonucleotide
ugaagcccaucccucugug

SEQ ID NO: 2764817 - RNA, 19 nt, Artificial Sequence
  Description of Artificial Sequence: Synthetic oligonucleotide
guugaucaccauguuacac

SEQ ID NO: 2764818 - RNA, 19 nt, Artificial Sequence
  Description of Artificial Sequence: Synthetic oligonucleotide
cucauaguucugaagccca

SEQ ID NO: 2764819 - RNA, 19 nt, Artificial Sequence
  Description of Artificial Sequence: Synthetic oligonucleotide
uucugaagcccaucccucu

SEQ ID NO: 2764820 - RNA, 19 nt, Artificial Sequence
  Description of Artificial Sequence: Synthetic oligonucleotide
ugguuucaaacauguaguu

SEQ ID NO: 2764821 - RNA, 19 nt, Artificial Sequence
  Description of Artificial Sequence: Synthetic oligonucleotide
caucccucuguguauccag

SEQ ID NO: 2764822 - RNA, 19 nt, Artificial Sequence
  Description of Artificial Sequence: Synthetic oligonucleotide
gaugucuggauuagagaca

SEQ ID NO: 2764823 - RNA, 19 nt, Artificial Sequence
  Description of Artificial Sequence: Synthetic oligonucleotide
aaugucuggcaaggccuuc

SEQ ID NO: 2764824 - RNA, 19 nt, Artificial Sequence
  Description of Artificial Sequence: Synthetic oligonucleotide
cgaugucuggauuagagac

SEQ ID NO: 2764825 - RNA, 19 nt, Artificial Sequence
  Description of Artificial Sequence: Synthetic oligonucleotide
ugcauucaguggcugccug

SEQ ID NO: 2764826 - RNA, 19 nt, Artificial Sequence
  Description of Artificial Sequence: Synthetic oligonucleotide
uguggguggcugcauucug

SEQ ID NO: 2764827 - RNA, 19 nt, Artificial Sequence
  Description of Artificial Sequence: Synthetic oligonucleotide
gagccucauaguucugaag

SEQ ID NO: 2764828 - RNA, 19 nt, Artificial Sequence
  Description of Artificial Sequence: Synthetic oligonucleotide
cauucaguggcugccugcc

SEQ ID NO: 2764829 - RNA, 19 nt, Artificial Sequence
  Description of Artificial Sequence: Synthetic oligonucleotide
gaaggcgaugucuggauua

SEQ ID NO: 2764830 - RNA, 19 nt, Artificial Sequence
  Description of Artificial Sequence: Synthetic oligonucleotide
cugccuaaguuugucacug

SEQ ID NO: 2764831 - RNA, 19 nt, Artificial Sequence
  Description of Artificial Sequence: Synthetic oligonucleotide
cagcuuuagacggucauuc

SEQ ID NO: 2764832 - RNA, 19 nt, Artificial Sequence
  Description of Artificial Sequence: Synthetic oligonucleotide
caucugugcccuccaaagc

SEQ ID NO: 2764833 - RNA, 19 nt, Artificial Sequence
  Description of Artificial Sequence: Synthetic oligonucleotide
uugccaacaucugugcccu

SEQ ID NO: 2764834 - RNA, 19 nt, Artificial Sequence
  Description of Artificial Sequence: Synthetic oligonucleotide
uccauccucccucuccgca

SEQ ID NO: 2764835 - RNA, 19 nt, Artificial Sequence
  Description of Artificial Sequence: Synthetic oligonucleotide
cauguaguucucaaugucu

SEQ ID NO: 2764836 - RNA, 19 nt, Artificial Sequence
  Description of Artificial Sequence: Synthetic oligonucleotide
gccuaaguuugucacugcg

SEQ ID NO: 2764837 - RNA, 19 nt, Artificial Sequence
  Description of Artificial Sequence: Synthetic oligonucleotide
ugugcccuccaaagccagg

SEQ ID NO: 2764838 - RNA, 19 nt, Artificial Sequence
  Description of Artificial Sequence: Synthetic oligonucleotide
uuuagacggucauucccau

SEQ ID NO: 2764839 - RNA, 19 nt, Artificial Sequence
  Description of Artificial Sequence: Synthetic oligonucleotide
auacacccuuuccccaggg

SEQ ID NO: 2764840 - RNA, 19 nt, Artificial Sequence
  Description of Artificial Sequence: Synthetic oligonucleotide
ucuuggcuaguccgugggc

SEQ ID NO: 2764841 - RNA, 19 nt, Artificial Sequence
  Description of Artificial Sequence: Synthetic oligonucleotide
ugggcugccuucaccuugc

SEQ ID NO: 2764842 - RNA, 19 nt, Artificial Sequence
  Description of Artificial Sequence: Synthetic oligonucleotide
acagguuggugagaccuag

SEQ ID NO: 2764843 - RNA, 19 nt, Artificial Sequence
  Description of Artificial Sequence: Synthetic oligonucleotide
gaaccucuccugaaccucc

SEQ ID NO: 2764844 - RNA, 19 nt, Artificial Sequence
  Description of Artificial Sequence: Synthetic oligonucleotide
gguuggugagaccuaggag

SEQ ID NO: 2764845 - RNA, 19 nt, Artificial Sequence
  Description of Artificial Sequence: Synthetic oligonucleotide
cuccugaaccuccuuguug

SEQ ID NO: 2764846 - RNA, 19 nt, Artificial Sequence
  Description of Artificial Sequence: Synthetic oligonucleotide
caggagacucacgaggggc

SEQ ID NO: 2764847 - RNA, 19 nt, Artificial Sequence
  Description of Artificial Sequence: Synthetic oligonucleotide
gacggucauucccaucagc

SEQ ID NO: 2764848 - RNA, 19 nt, Artificial Sequence
  Description of Artificial Sequence: Synthetic oligonucleotide
uuggcuaguccgugggcug

SEQ ID NO: 2764849 - RNA, 19 nt, Artificial Sequence
  Description of Artificial Sequence: Synthetic oligonucleotide
uggcaaggccuucuccuug

SEQ ID NO: 2764850 - RNA, 19 nt, Artificial Sequence
  Description of Artificial Sequence: Synthetic oligonucleotide
ccuaaguuugucacugcgc

SEQ ID NO: 2764851 - RNA, 19 nt, Artificial Sequence
  Description of Artificial Sequence: Synthetic oligonucleotide
uuuuguggguggcugcauu

SEQ ID NO: 2764852 - RNA, 19 nt, Artificial Sequence
  Description of Artificial Sequence: Synthetic oligonucleotide
aggaaccucuccugaaccu

SEQ ID NO: 2764853 - RNA, 19 nt, Artificial Sequence
  Description of Artificial Sequence: Synthetic oligonucleotide
ucauaguucugaagcccau

SEQ ID NO: 2764854 - RNA, 19 nt, Artificial Sequence
  Description of Artificial Sequence: Synthetic oligonucleotide
ugcccuccaaagccagggg

SEQ ID NO: 2764855 - RNA, 19 nt, Artificial Sequence
  Description of Artificial Sequence: Synthetic oligonucleotide
auucaguggcugccugccg

SEQ ID NO: 2764856 - RNA, 19 nt, Artificial Sequence
  Description of Artificial Sequence: Synthetic oligonucleotide
ucaccauguuacacaugca

SEQ ID NO: 2764857 - RNA, 19 nt, Artificial Sequence
  Description of Artificial Sequence: Synthetic oligonucleotide
cucuccgcagagcaacacc

SEQ ID NO: 2764858 - RNA, 19 nt, Artificial Sequence
  Description of Artificial Sequence: Synthetic oligonucleotide
gucauucccaucagccagg

SEQ ID NO: 2764859 - RNA, 19 nt, Artificial Sequence
  Description of Artificial Sequence: Synthetic oligonucleotide
gcugccuucaccuugccaa

SEQ ID NO: 2764860 - RNA, 19 nt, Artificial Sequence
  Description of Artificial Sequence: Synthetic oligonucleotide
cuuguugaucaccauguua

SEQ ID NO: 2764861 - RNA, 19 nt, Artificial Sequence
  Description of Artificial Sequence: Synthetic oligonucleotide
agacagccgcaaucuuggc

SEQ ID NO: 2764862 - RNA, 19 nt, Artificial Sequence
  Description of Artificial Sequence: Synthetic oligonucleotide
cagagcaacaccaccagcu

SEQ ID NO: 2764863 - RNA, 19 nt, Artificial Sequence
  Description of Artificial Sequence: Synthetic oligonucleotide
acccuuuccccagggaagg

SEQ ID NO: 2764864 - RNA, 19 nt, Artificial Sequence
  Description of Artificial Sequence: Synthetic oligonucleotide
ggcgaugucuggauuagag

SEQ ID NO: 2764865 - RNA, 19 nt, Artificial Sequence
  Description of Artificial Sequence: Synthetic oligonucleotide
ugagaccuaggagagccuc

SEQ ID NO: 2764866 - RNA, 19 nt, Artificial Sequence
  Description of Artificial Sequence: Synthetic oligonucleotide
cuucaccuugccaacaucu

SEQ ID NO: 2764867 - RNA, 19 nt, Artificial Sequence
  Description of Artificial Sequence: Synthetic oligonucleotide
agagccucauaguucugaa

SEQ ID NO: 2764868 - RNA, 19 nt, Artificial Sequence
  Description of Artificial Sequence: Synthetic oligonucleotide
ucccucuguguauccagga

SEQ ID NO: 2764869 - RNA, 19 nt, Artificial Sequence
  Description of Artificial Sequence: Synthetic oligonucleotide
auucugucaguuuguccau

SEQ ID NO: 2764870 - RNA, 19 nt, Artificial Sequence
  Description of Artificial Sequence: Synthetic oligonucleotide
gaaaaucuucugccuaagu

SEQ ID NO: 2764871 - RNA, 19 nt, Artificial Sequence
  Description of Artificial Sequence: Synthetic oligonucleotide
cgcaaucuuggcuaguccg

SEQ ID NO: 2764872 - RNA, 19 nt, Artificial Sequence
  Description of Artificial Sequence: Synthetic oligonucleotide
ucaugguuucaaacaugua

SEQ ID NO: 2764873 - RNA, 19 nt, Artificial Sequence
  Description of Artificial Sequence: Synthetic oligonucleotide
gucaugguuucaaacaugu

SEQ ID NO: 2764874 - RNA, 19 nt, Artificial Sequence
  Description of Artificial Sequence: Synthetic oligonucleotide
cgcaccacuucauacaccc

SEQ ID NO: 2764875 - RNA, 19 nt, Artificial Sequence
  Description of Artificial Sequence: Synthetic oligonucleotide
accagcuuuagacggucau

SEQ ID NO: 2764876 - RNA, 19 nt, Artificial Sequence
  Description of Artificial Sequence: Synthetic oligonucleotide
cagggaaggcgaugucugg

SEQ ID NO: 2764877 - RNA, 19 nt, Artificial Sequence
  Description of Artificial Sequence: Synthetic oligonucleotide
uccgugggcugccuucacc

SEQ ID NO: 2764878 - RNA, 19 nt, Artificial Sequence
  Description of Artificial Sequence: Synthetic oligonucleotide
agagcaacaccaccagcuu

SEQ ID NO: 2764879 - RNA, 19 nt, Artificial Sequence
  Description of Artificial Sequence: Synthetic oligonucleotide
gcuggucaugguuucaaac

SEQ ID NO: 2764880 - RNA, 19 nt, Artificial Sequence
  Description of Artificial Sequence: Synthetic oligonucleotide
ugccuaaguuugucacugc

SEQ ID NO: 2764881 - RNA, 19 nt, Artificial Sequence
  Description of Artificial Sequence: Synthetic oligonucleotide
cauguuacacaugcauuca

SEQ ID NO: 2764882 - RNA, 19 nt, Artificial Sequence
  Description of Artificial Sequence: Synthetic oligonucleotide
aguuugucacugcgcccag

SEQ ID NO: 2764883 - RNA, 19 nt, Artificial Sequence
  Description of Artificial Sequence: Synthetic oligonucleotide
uuagacggucauucccauc

SEQ ID NO: 2764884 - RNA, 19 nt, Artificial Sequence
  Description of Artificial Sequence: Synthetic oligonucleotide
ucccucuccgcagagcaac

SEQ ID NO: 2764885 - RNA, 19 nt, Artificial Sequence
  Description of Artificial Sequence: Synthetic oligonucleotide
caaucuuggcuaguccgug

SEQ ID NO: 2764886 - RNA, 19 nt, Artificial Sequence
  Description of Artificial Sequence: Synthetic oligonucleotide
gccucauaguucugaagcc

SEQ ID NO: 2764887 - RNA, 19 nt, Artificial Sequence
  Description of Artificial Sequence: Synthetic oligonucleotide
ugcauucugucaguuuguc

SEQ ID NO: 2764888 - RNA, 19 nt, Artificial Sequence
  Description of Artificial Sequence: Synthetic oligonucleotide
uggguggcugcauucuguc

SEQ ID NO: 2764889 - RNA, 19 nt, Artificial Sequence
  Description of Artificial Sequence: Synthetic oligonucleotide
agacggucauucccaucag

SEQ ID NO: 2764890 - RNA, 19 nt, Artificial Sequence
  Description of Artificial Sequence: Synthetic oligonucleotide
cuuuccccagggaaggcga

SEQ ID NO: 2764891 - RNA, 19 nt, Artificial Sequence
  Description of Artificial Sequence: Synthetic oligonucleotide
ucuccugaaccuccuuguu

SEQ ID NO: 2764892 - RNA, 19 nt, Artificial Sequence
  Description of Artificial Sequence: Synthetic oligonucleotide
cauaguucugaagcccauc

SEQ ID NO: 2764893 - RNA, 19 nt, Artificial Sequence
  Description of Artificial Sequence: Synthetic oligonucleotide
gucacugcgcccagacagg

SEQ ID NO: 2764894 - RNA, 19 nt, Artificial Sequence
  Description of Artificial Sequence: Synthetic oligonucleotide
cugccguagcuggucaugg

SEQ ID NO: 2764895 - RNA, 19 nt, Artificial Sequence
  Description of Artificial Sequence: Synthetic oligonucleotide
accauguuacacaugcauu

SEQ ID NO: 2764896 - RNA, 19 nt, Artificial Sequence
  Description of Artificial Sequence: Synthetic oligonucleotide
aucccucuguguauccagg

SEQ ID NO: 2764897 - RNA, 19 nt, Artificial Sequence
  Description of Artificial Sequence: Synthetic oligonucleotide
gcauucugucaguuugucc

SEQ ID NO: 2764898 - RNA, 19 nt, Artificial Sequence
  Description of Artificial Sequence: Synthetic oligonucleotide
ugucuggauuagagacagc

SEQ ID NO: 2764899 - RNA, 19 nt, Artificial Sequence
  Description of Artificial Sequence: Synthetic oligonucleotide
uccccagggaaggcgaugu

SEQ ID NO: 2764900 - RNA, 19 nt, Artificial Sequence
  Description of Artificial Sequence: Synthetic oligonucleotide
uuguggguggcugcauucu

SEQ ID NO: 2764901 - RNA, 19 nt, Artificial Sequence
  Description of Artificial Sequence: Synthetic oligonucleotide
ugucuggcaaggccuucuc

SEQ ID NO: 2764902 - RNA, 19 nt, Artificial Sequence
  Description of Artificial Sequence: Synthetic oligonucleotide
uaguccgugggcugccuuc

SEQ ID NO: 2764903 - RNA, 19 nt, Artificial Sequence
  Description of Artificial Sequence: Synthetic oligonucleotide
cugugcccuccaaagccag

SEQ ID NO: 2764904 - RNA, 19 nt, Artificial Sequence
  Description of Artificial Sequence: Synthetic oligonucleotide
ccucauaguucugaagccc

SEQ ID NO: 2764905 - RNA, 19 nt, Artificial Sequence
  Description of Artificial Sequence: Synthetic oligonucleotide
cagccaggaaccucuccug

SEQ ID NO: 2764906 - RNA, 19 nt, Artificial Sequence
  Description of Artificial Sequence: Synthetic oligonucleotide
guucugaagcccaucccuc

SEQ ID NO: 2764907 - RNA, 19 nt, Artificial Sequence
  Description of Artificial Sequence: Synthetic oligonucleotide
ucauucccaucagccagga

SEQ ID NO: 2764908 - RNA, 19 nt, Artificial Sequence
  Description of Artificial Sequence: Synthetic oligonucleotide
gacagccgcaaucuuggcu

SEQ ID NO: 2764909 - RNA, 19 nt, Artificial Sequence
  Description of Artificial Sequence: Synthetic oligonucleotide
uuuguccauccucccucuc

SEQ ID NO: 2764910 - RNA, 19 nt, Artificial Sequence
  Description of Artificial Sequence: Synthetic oligonucleotide
ccagggaaggcgaugucug

SEQ ID NO: 2764911 - RNA, 19 nt, Artificial Sequence
  Description of Artificial Sequence: Synthetic oligonucleotide
uagcuggucaugguuucaa

SEQ ID NO: 2764912 - RNA, 19 nt, Artificial Sequence
  Description of Artificial Sequence: Synthetic oligonucleotide
ugccugccguagcugguca

SEQ ID NO: 2764913 - RNA, 19 nt, Artificial Sequence
  Description of Artificial Sequence: Synthetic oligonucleotide
cagacagguuggugagacc

SEQ ID NO: 2764914 - RNA, 19 nt, Artificial Sequence
  Description of Artificial Sequence: Synthetic oligonucleotide
cuaggagagccucauaguu

SEQ ID NO: 2764915 - RNA, 19 nt, Artificial Sequence
  Description of Artificial Sequence: Synthetic oligonucleotide
gaucaccauguuacacaug

SEQ ID NO: 2764916 - RNA, 19 nt, Artificial Sequence
  Description of Artificial Sequence: Synthetic oligonucleotide
caaacauguaguucucaau

SEQ ID NO: 2764917 - RNA, 19 nt, Artificial Sequence
  Description of Artificial Sequence: Synthetic oligonucleotide
agggaaggcgaugucugga

SEQ ID NO: 2764918 - RNA, 19 nt, Artificial Sequence
  Description of Artificial Sequence: Synthetic oligonucleotide
uagagacagccgcaaucuu

SEQ ID NO: 2764919 - RNA, 19 nt, Artificial Sequence
  Description of Artificial Sequence: Synthetic oligonucleotide
cucacgaggggccgcacca

SEQ ID NO: 2764920 - RNA, 19 nt, Artificial Sequence
  Description of Artificial Sequence: Synthetic oligonucleotide
ggucaugguuucaaacaug

SEQ ID NO: 2764921 - RNA, 19 nt, Artificial Sequence
  Description of Artificial Sequence: Synthetic oligonucleotide
caccauguuacacaugcau

SEQ ID NO: 2764922 - RNA, 19 nt, Artificial Sequence
  Description of Artificial Sequence: Synthetic oligonucleotide
cugaaccuccuuguugauc

SEQ ID NO: 2764923 - RNA, 19 nt, Artificial Sequence
  Description of Artificial Sequence: Synthetic oligonucleotide
gaaccuccuuguugaucac

SEQ ID NO: 2764924 - RNA, 19 nt, Artificial Sequence
  Description of Artificial Sequence: Synthetic oligonucleotide
uggcuaguccgugggcugc

SEQ ID NO: 2764925 - RNA, 19 nt, Artificial Sequence
  Description of Artificial Sequence: Synthetic oligonucleotide
cuccgcagagcaacaccac

SEQ ID NO: 2764926 - RNA, 19 nt, Artificial Sequence
  Description of Artificial Sequence: Synthetic oligonucleotide
augucuggcaaggccuucu

SEQ ID NO: 2764927 - RNA, 19 nt, Artificial Sequence
  Description of Artificial Sequence: Synthetic oligonucleotide
uuuccccagggaaggcgau

SEQ ID NO: 2764928 - RNA, 19 nt, Artificial Sequence
  Description of Artificial Sequence: Synthetic oligonucleotide
guguauccaggagacucac

SEQ ID NO: 2764929 - RNA, 19 nt, Artificial Sequence
  Description of Artificial Sequence: Synthetic oligonucleotide
ucaguggcugccugccgua

SEQ ID NO: 2764930 - RNA, 19 nt, Artificial Sequence
  Description of Artificial Sequence: Synthetic oligonucleotide
agcuggucaugguuucaaa

SEQ ID NO: 2764931 - RNA, 19 nt, Artificial Sequence
  Description of Artificial Sequence: Synthetic oligonucleotide
gauuagagacagccgcaau

SEQ ID NO: 2764932 - RNA, 19 nt, Artificial Sequence
  Description of Artificial Sequence: Synthetic oligonucleotide
cugcgcccagacagguugg

SEQ ID NO: 2764933 - RNA, 19 nt, Artificial Sequence
  Description of Artificial Sequence: Synthetic oligonucleotide
gcauucaguggcugccugc

SEQ ID NO: 2764934 - RNA, 19 nt, Artificial Sequence
  Description of Artificial Sequence: Synthetic oligonucleotide
uucugucaguuuguccauc

SEQ ID NO: 2764935 - RNA, 19 nt, Artificial Sequence
  Description of Artificial Sequence: Synthetic oligonucleotide
agaccuaggagagccucau

SEQ ID NO: 2764936 - RNA, 19 nt, Artificial Sequence
  Description of Artificial Sequence: Synthetic oligonucleotide
gcccagacagguuggugag

SEQ ID NO: 2764937 - RNA, 19 nt, Artificial Sequence
  Description of Artificial Sequence: Synthetic oligonucleotide
gagaccuaggagagccuca

SEQ ID NO: 2764938 - RNA, 19 nt, Artificial Sequence
  Description of Artificial Sequence: Synthetic oligonucleotide
cacaugcauucaguggcug

SEQ ID NO: 2764939 - RNA, 19 nt, Artificial Sequence
  Description of Artificial Sequence: Synthetic oligonucleotide
agcccaucccucuguguau

SEQ ID NO: 2764940 - RNA, 19 nt, Artificial Sequence
  Description of Artificial Sequence: Synthetic oligonucleotide
ugccuucaccuugccaaca

SEQ ID NO: 2764941 - RNA, 19 nt, Artificial Sequence
  Description of Artificial Sequence: Synthetic oligonucleotide
ccagacagguuggugagac

SEQ ID NO: 2764942 - RNA, 19 nt, Artificial Sequence
  Description of Artificial Sequence: Synthetic oligonucleotide
ugccguagcuggucauggu

SEQ ID NO: 2764943 - RNA, 19 nt, Artificial Sequence
  Description of Artificial Sequence: Synthetic oligonucleotide
ggagacucacgaggggccg

SEQ ID NO: 2764944 - RNA, 19 nt, Artificial Sequence
  Description of Artificial Sequence: Synthetic oligonucleotide
uggugagaccuaggagagc

SEQ ID NO: 2764945 - RNA, 19 nt, Artificial Sequence
  Description of Artificial Sequence: Synthetic oligonucleotide
gagacucacgaggggccgc

SEQ ID NO: 2764946 - RNA, 19 nt, Artificial Sequence
  Description of Artificial Sequence: Synthetic oligonucleotide
gcgaugucuggauuagaga

SEQ ID NO: 2764947 - RNA, 19 nt, Artificial Sequence
  Description of Artificial Sequence: Synthetic oligonucleotide
aaccucuccugaaccuccu

SEQ ID NO: 2764948 - RNA, 19 nt, Artificial Sequence
  Description of Artificial Sequence: Synthetic oligonucleotide
ccucuguguauccaggaga

SEQ ID NO: 2764949 - RNA, 19 nt, Artificial Sequence
  Description of Artificial Sequence: Synthetic oligonucleotide
gcagagcaacaccaccagc

SEQ ID NO: 2764950 - RNA, 19 nt, Artificial Sequence
  Description of Artificial Sequence: Synthetic oligonucleotide
uuccccagggaaggcgaug

SEQ ID NO: 2764951 - RNA, 19 nt, Artificial Sequence
  Description of Artificial Sequence: Synthetic oligonucleotide
augcauucaguggcugccu

SEQ ID NO: 2764952 - RNA, 19 nt, Artificial Sequence
  Description of Artificial Sequence: Synthetic oligonucleotide
cagccgcaaucuuggcuag

SEQ ID NO: 2764953 - RNA, 19 nt, Artificial Sequence
  Description of Artificial Sequence: Synthetic oligonucleotide
gccgcaccacuucauacac

SEQ ID NO: 2764954 - RNA, 19 nt, Artificial Sequence
  Description of Artificial Sequence: Synthetic oligonucleotide
ccuugccaacaucugugcc

SEQ ID NO: 2764955 - RNA, 19 nt, Artificial Sequence
  Description of Artificial Sequence: Synthetic oligonucleotide
cucuccugaaccuccuugu

SEQ ID NO: 2764956 - RNA, 19 nt, Artificial Sequence
  Description of Artificial Sequence: Synthetic oligonucleotide
ggccgcaccacuucauaca

SEQ ID NO: 2764957 - RNA, 19 nt, Artificial Sequence
  Description of Artificial Sequence: Synthetic oligonucleotide
auccucccucuccgcagag

SEQ ID NO: 2764958 - RNA, 19 nt, Artificial Sequence
  Description of Artificial Sequence: Synthetic oligonucleotide
ccucuccugaaccuccuug

SEQ ID NO: 2764959 - RNA, 19 nt, Artificial Sequence
  Description of Artificial Sequence: Synthetic oligonucleotide
aguccgugggcugccuuca

SEQ ID NO: 2764960 - RNA, 19 nt, Artificial Sequence
  Description of Artificial Sequence: Synthetic oligonucleotide
ggaaccucuccugaaccuc

SEQ ID NO: 2764961 - RNA, 19 nt, Artificial Sequence
  Description of Artificial Sequence: Synthetic oligonucleotide
guuuguccauccucccucu

SEQ ID NO: 2764962 - RNA, 19 nt, Artificial Sequence
  Description of Artificial Sequence: Synthetic oligonucleotide
cuuggcuaguccgugggcu

SEQ ID NO: 2764963 - RNA, 19 nt, Artificial Sequence
  Description of Artificial Sequence: Synthetic oligonucleotide
ccaggagacucacgagggg

SEQ ID NO: 2764964 - RNA, 19 nt, Artificial Sequence
  Description of Artificial Sequence: Synthetic oligonucleotide
caucagccaggaaccucuc

SEQ ID NO: 2764965 - RNA, 19 nt, Artificial Sequence
  Description of Artificial Sequence: Synthetic oligonucleotide
accaccagcuuuagacggu

SEQ ID NO: 2764966 - RNA, 19 nt, Artificial Sequence
  Description of Artificial Sequence: Synthetic oligonucleotide
agacucacgaggggccgca

SEQ ID NO: 2764967 - RNA, 19 nt, Artificial Sequence
  Description of Artificial Sequence: Synthetic oligonucleotide
aucuucugccuaaguuugu

SEQ ID NO: 2764968 - RNA, 19 nt, Artificial Sequence
  Description of Artificial Sequence: Synthetic oligonucleotide
ccauccucccucuccgcag

SEQ ID NO: 2764969 - RNA, 19 nt, Artificial Sequence
  Description of Artificial Sequence: Synthetic oligonucleotide
ggcaaggccuucuccuuga

SEQ ID NO: 2764970 - RNA, 19 nt, Artificial Sequence
  Description of Artificial Sequence: Synthetic oligonucleotide
ggauuagagacagccgcaa

SEQ ID NO: 2764971 - RNA, 19 nt, Artificial Sequence
  Description of Artificial Sequence: Synthetic oligonucleotide
ucccaucagccaggaaccu

SEQ ID NO: 2764972 - RNA, 19 nt, Artificial Sequence
  Description of Artificial Sequence: Synthetic oligonucleotide
caccacuucauacacccuu

SEQ ID NO: 2764973 - RNA, 19 nt, Artificial Sequence
  Description of Artificial Sequence: Synthetic oligonucleotide
guagcuggucaugguuuca

SEQ ID NO: 2764974 - RNA, 19 nt, Artificial Sequence
  Description of Artificial Sequence: Synthetic oligonucleotide
gagcaacaccaccagcuuu

SEQ ID NO: 2764975 - RNA, 19 nt, Artificial Sequence
  Description of Artificial Sequence: Synthetic oligonucleotide
gggccgcaccacuucauac

SEQ ID NO: 2764976 - RNA, 19 nt, Artificial Sequence
  Description of Artificial Sequence: Synthetic oligonucleotide
cauccucccucuccgcaga

SEQ ID NO: 2764977 - RNA, 19 nt, Artificial Sequence
  Description of Artificial Sequence: Synthetic oligonucleotide
ucacgaggggccgcaccac

SEQ ID NO: 2764978 - RNA, 19 nt, Artificial Sequence
  Description of Artificial Sequence: Synthetic oligonucleotide
caaggccuucuccuugaaa

SEQ ID NO: 2764979 - RNA, 19 nt, Artificial Sequence
  Description of Artificial Sequence: Synthetic oligonucleotide
ccgcagagcaacaccacca

SEQ ID NO: 2764980 - RNA, 19 nt, Artificial Sequence
  Description of Artificial Sequence: Synthetic oligonucleotide
guggcugccugccguagcu

SEQ ID NO: 2764981 - RNA, 19 nt, Artificial Sequence
  Description of Artificial Sequence: Synthetic oligonucleotide
ccuugaaaaucuucugccu

SEQ ID NO: 2764982 - RNA, 19 nt, Artificial Sequence
  Description of Artificial Sequence: Synthetic oligonucleotide
gacagguuggugagaccua

SEQ ID NO: 2764983 - RNA, 19 nt, Artificial Sequence
  Description of Artificial Sequence: Synthetic oligonucleotide
ccgcaaucuuggcuagucc

SEQ ID NO: 2764984 - RNA, 19 nt, Artificial Sequence
  Description of Artificial Sequence: Synthetic oligonucleotide
ccaucagccaggaaccucu

SEQ ID NO: 2764985 - RNA, 19 nt, Artificial Sequence
  Description of Artificial Sequence: Synthetic oligonucleotide
uggcugccugccguagcug

SEQ ID NO: 2764986 - RNA, 19 nt, Artificial Sequence
  Description of Artificial Sequence: Synthetic oligonucleotide
cgcagagcaacaccaccag

SEQ ID NO: 2764987 - RNA, 19 nt, Artificial Sequence
  Description of Artificial Sequence: Synthetic oligonucleotide
caguuuguccauccucccu

SEQ ID NO: 2764988 - RNA, 19 nt, Artificial Sequence
  Description of Artificial Sequence: Synthetic oligonucleotide
gcaacaccaccagcuuuag

SEQ ID NO: 2764989 - RNA, 19 nt, Artificial Sequence
  Description of Artificial Sequence: Synthetic oligonucleotide
cugccugccguagcugguc

SEQ ID NO: 2764990 - RNA, 19 nt, Artificial Sequence
  Description of Artificial Sequence: Synthetic oligonucleotide
cguagcuggucaugguuuc

SEQ ID NO: 2764991 - RNA, 19 nt, Artificial Sequence
  Description of Artificial Sequence: Synthetic oligonucleotide
cugaagcccaucccucugu

SEQ ID NO: 2764992 - RNA, 19 nt, Artificial Sequence
  Description of Artificial Sequence: Synthetic oligonucleotide
gccgcaaucuuggcuaguc

SEQ ID NO: 2764993 - RNA, 19 nt, Artificial Sequence
  Description of Artificial Sequence: Synthetic oligonucleotide
caacaccaccagcuuuaga

SEQ ID NO: 2764994 - RNA, 19 nt, Artificial Sequence
  Description of Artificial Sequence: Synthetic oligonucleotide
guggcugcauucugucagu

SEQ ID NO: 2764995 - RNA, 19 nt, Artificial Sequence
  Description of Artificial Sequence: Synthetic oligonucleotide
uggcugcauucugucaguu

SEQ ID NO: 2764996 - RNA, 19 nt, Artificial Sequence
  Description of Artificial Sequence: Synthetic oligonucleotide
caguggcugccugccguag

SEQ ID NO: 2764997 - RNA, 19 nt, Artificial Sequence
  Description of Artificial Sequence: Synthetic oligonucleotide
ccacuucauacacccuuuc

SEQ ID NO: 2764998 - RNA, 19 nt, Artificial Sequence
  Description of Artificial Sequence: Synthetic oligonucleotide
caacaucugugcccuccaa

SEQ ID NO: 2764999 - RNA, 19 nt, Artificial Sequence
  Description of Artificial Sequence: Synthetic oligonucleotide
gaccuaggagagccucaua

SEQ ID NO: 2765000 - RNA, 19 nt, Artificial Sequence
  Description of Artificial Sequence: Synthetic oligonucleotide
cccaucccucuguguaucc

SEQ ID NO: 2765001 - RNA, 19 nt, Artificial Sequence
  Description of Artificial Sequence: Synthetic oligonucleotide
guuugucacugcgcccaga

SEQ ID NO: 2765002 - RNA, 19 nt, Artificial Sequence
  Description of Artificial Sequence: Synthetic oligonucleotide
aggcgaugucuggauuaga

SEQ ID NO: 2765003 - RNA, 19 nt, Artificial Sequence
  Description of Artificial Sequence: Synthetic oligonucleotide
gcaaucuuggcuaguccgu

SEQ ID NO: 2765004 - RNA, 19 nt, Artificial Sequence
  Description of Artificial Sequence: Synthetic oligonucleotide
cgcccagacagguugguga

SEQ ID NO: 2765005 - RNA, 19 nt, Artificial Sequence
  Description of Artificial Sequence: Synthetic oligonucleotide
ggguggcugcauucuguca

SEQ ID NO: 2765006 - RNA, 19 nt, Artificial Sequence
  Description of Artificial Sequence: Synthetic oligonucleotide
guggguggcugcauucugu

SEQ ID NO: 2765007 - RNA, 19 nt, Artificial Sequence
  Description of Artificial Sequence: Synthetic oligonucleotide
ccgcaccacuucauacacc

SEQ ID NO: 2765008 - RNA, 19 nt, Artificial Sequence
  Description of Artificial Sequence: Synthetic oligonucleotide
ccaacaucugugcccucca

SEQ ID NO: 2765009 - RNA, 19 nt, Artificial Sequence
  Description of Artificial Sequence: Synthetic oligonucleotide
ccuaggagagccucauagu

SEQ ID NO: 2765010 - RNA, 19 nt, Artificial Sequence
  Description of Artificial Sequence: Synthetic oligonucleotide
gggaaggcgaugucuggau

SEQ ID NO: 2765011 - RNA, 19 nt, Artificial Sequence
  Description of Artificial Sequence: Synthetic oligonucleotide
gacucacgaggggccgcac

SEQ ID NO: 2765012 - RNA, 19 nt, Artificial Sequence
  Description of Artificial Sequence: Synthetic oligonucleotide
ggcugccuucaccuugcca

SEQ ID NO: 2765013 - RNA, 19 nt, Artificial Sequence
  Description of Artificial Sequence: Synthetic oligonucleotide
ugccaacaucugugcccuc

SEQ ID NO: 2765014 - RNA, 19 nt, Artificial Sequence
  Description of Artificial Sequence: Synthetic oligonucleotide
agccgcaaucuuggcuagu

SEQ ID NO: 2765015 - RNA, 19 nt, Artificial Sequence
  Description of Artificial Sequence: Synthetic oligonucleotide
guccgugggcugccuucac

SEQ ID NO: 2765016 - RNA, 19 nt, Artificial Sequence
  Description of Artificial Sequence: Synthetic oligonucleotide
ggcuaguccgugggcugcc

SEQ ID NO: 2765017 - RNA, 19 nt, Artificial Sequence
  Description of Artificial Sequence: Synthetic oligonucleotide
cuggcaaggccuucuccuu

SEQ ID NO: 2765018 - RNA, 19 nt, Artificial Sequence
  Description of Artificial Sequence: Synthetic oligonucleotide
cucccucuccgcagagcaa

SEQ ID NO: 2765019 - RNA, 19 nt, Artificial Sequence
  Description of Artificial Sequence: Synthetic oligonucleotide
cggucauucccaucagcca

SEQ ID NO: 2765020 - RNA, 19 nt, Artificial Sequence
  Description of Artificial Sequence: Synthetic oligonucleotide
acgaggggccgcaccacuu

SEQ ID NO: 2765021 - RNA, 19 nt, Artificial Sequence
  Description of Artificial Sequence: Synthetic oligonucleotide
cccaucagccaggaaccuc

SEQ ID NO: 2765022 - RNA, 19 nt, Artificial Sequence
  Description of Artificial Sequence: Synthetic oligonucleotide
cauucccaucagccaggaa

SEQ ID NO: 2765023 - RNA, 19 nt, Artificial Sequence
  Description of Artificial Sequence: Synthetic oligonucleotide
gccguagcuggucaugguu

SEQ ID NO: 2765024 - RNA, 19 nt, Artificial Sequence
  Description of Artificial Sequence: Synthetic oligonucleotide
gcccaucccucuguguauc

SEQ ID NO: 2765025 - RNA, 19 nt, Artificial Sequence
  Description of Artificial Sequence: Synthetic oligonucleotide
ggaaggcgaugucuggauu

SEQ ID NO: 2765026 - RNA, 19 nt, Artificial Sequence
  Description of Artificial Sequence: Synthetic oligonucleotide
ccucuccgcagagcaacac

SEQ ID NO: 2765027 - RNA, 19 nt, Artificial Sequence
  Description of Artificial Sequence: Synthetic oligonucleotide
aggggccgcaccacuucau

SEQ ID NO: 2765028 - RNA, 19 nt, Artificial Sequence
  Description of Artificial Sequence: Synthetic oligonucleotide
cacgaggggccgcaccacu

SEQ ID NO: 2765029 - RNA, 19 nt, Artificial Sequence
  Description of Artificial Sequence: Synthetic oligonucleotide
ggggccgcaccacuucaua

SEQ ID NO: 2765030 - RNA, 19 nt, Artificial Sequence
  Description of Artificial Sequence: Synthetic oligonucleotide
gugagaccuaggagagccu

SEQ ID NO: 2765031 - RNA, 19 nt, Artificial Sequence
  Description of Artificial Sequence: Synthetic oligonucleotide
ccgugggcugccuucaccu

SEQ ID NO: 2765032 - RNA, 19 nt, Artificial Sequence
  Description of Artificial Sequence: Synthetic oligonucleotide
gccuucaccuugccaacau

SEQ ID NO: 2765033 - RNA, 19 nt, Artificial Sequence
  Description of Artificial Sequence: Synthetic oligonucleotide
gcgcccagacagguuggug

SEQ ID NO: 2765034 - RNA, 19 nt, Artificial Sequence
  Description of Artificial Sequence: Synthetic oligonucleotide
ggcugcauucugucaguuu

SEQ ID NO: 2765035 - RNA, 19 nt, Artificial Sequence
  Description of Artificial Sequence: Synthetic oligonucleotide
gcaaggccuucuccuugaa

SEQ ID NO: 2765036 - RNA, 19 nt, Artificial Sequence
  Description of Artificial Sequence: Synthetic oligonucleotide
gggcugccuucaccuugcc

SEQ ID NO: 2765037 - RNA, 19 nt, Artificial Sequence
  Description of Artificial Sequence: Synthetic oligonucleotide
cgaggggccgcaccacuuc

SEQ ID NO: 2765038 - RNA, 19 nt, Artificial Sequence
  Description of Artificial Sequence: Synthetic oligonucleotide
ccguagcuggucaugguuu

SEQ ID NO: 2765039 - RNA, 19 nt, Artificial Sequence
  Description of Artificial Sequence: Synthetic oligonucleotide
ccaucccucuguguaucca

SEQ ID NO: 2765040 - RNA, 19 nt, Artificial Sequence
  Description of Artificial Sequence: Synthetic oligonucleotide
cccagggaaggcgaugucu

SEQ ID NO: 2765041 - RNA, 19 nt, Artificial Sequence
  Description of Artificial Sequence: Synthetic oligonucleotide
cuaguccgugggcugccuu

SEQ ID NO: 2765042 - RNA, 19 nt, Artificial Sequence
  Description of Artificial Sequence: Synthetic oligonucleotide
cccucuccgcagagcaaca

SEQ ID NO: 2765043 - RNA, 19 nt, Artificial Sequence
  Description of Artificial Sequence: Synthetic oligonucleotide
ccccagggaaggcgauguc

SEQ ID NO: 2765044 - RNA, 19 nt, Artificial Sequence
  Description of Artificial Sequence: Synthetic oligonucleotide
ccuuguugaucaccauguu

SEQ ID NO: 2765045 - RNA, 19 nt, Artificial Sequence
  Description of Artificial Sequence: Synthetic oligonucleotide
cacugcgcccagacagguu

SEQ ID NO: 2765046 - RNA, 19 nt, Artificial Sequence
  Description of Artificial Sequence: Synthetic oligonucleotide
cccagacagguuggugaga

SEQ ID NO: 2765047 - RNA, 19 nt, Artificial Sequence
  Description of Artificial Sequence: Synthetic oligonucleotide
ccagcuuuagacggucauu

SEQ ID NO: 2765048 - RNA, 19 nt, Artificial Sequence
  Description of Artificial Sequence: Synthetic oligonucleotide
gcugccugccguagcuggu

SEQ ID NO: 2765049 - RNA, 19 nt, Artificial Sequence
  Description of Artificial Sequence: Synthetic oligonucleotide
gcaccacuucauacacccu

SEQ ID NO: 2765050 - RNA, 19 nt, Artificial Sequence
  Description of Artificial Sequence: Synthetic oligonucleotide
gcuaguccgugggcugccu

SEQ ID NO: 2765051 - RNA, 19 nt, Artificial Sequence
  Description of Artificial Sequence: Synthetic oligonucleotide
gccugccguagcuggucau

SEQ ID NO: 2765052 - RNA, 19 nt, Artificial Sequence
  Description of Artificial Sequence: Synthetic oligonucleotide
cgugggcugccuucaccuu

SEQ ID NO: 2765053 - RNA, 19 nt, Artificial Sequence
  Description of Artificial Sequence: Synthetic oligonucleotide
uuuaaagcaaucaagaaca

SEQ ID NO: 2765054 - RNA, 19 nt, Artificial Sequence
  Description of Artificial Sequence: Synthetic oligonucleotide
agaacauuaagguuugagg

SEQ ID NO: 2765055 - RNA, 19 nt, Artificial Sequence
  Description of Artificial Sequence: Synthetic oligonucleotide
uucuuuaaagcaaucaaga

SEQ ID NO: 2765056 - RNA, 19 nt, Artificial Sequence
  Description of Artificial Sequence: Synthetic oligonucleotide
aaucucaggcuacacacac

SEQ ID NO: 2765057 - RNA, 19 nt, Artificial Sequence
  Description of Artificial Sequence: Synthetic oligonucleotide
ugaaaugcuucuuuaaagc

SEQ ID NO: 2765058 - RNA, 19 nt, Artificial Sequence
  Description of Artificial Sequence: Synthetic oligonucleotide
ugugcuuuagccuuagcag

SEQ ID NO: 2765059 - RNA, 19 nt, Artificial Sequence
  Description of Artificial Sequence: Synthetic oligonucleotide
uaagguuugaggauguagc

SEQ ID NO: 2765060 - RNA, 19 nt, Artificial Sequence
  Description of Artificial Sequence: Synthetic oligonucleotide
cuuuaaagcaaucaagaac

SEQ ID NO: 2765061 - RNA, 19 nt, Artificial Sequence
  Description of Artificial Sequence: Synthetic oligonucleotide
uuugcuuucacugacuggc

SEQ ID NO: 2765062 - RNA, 19 nt, Artificial Sequence
  Description of Artificial Sequence: Synthetic oligonucleotide
gaacauuaagguuugagga

SEQ ID NO: 2765063 - RNA, 19 nt, Artificial Sequence
  Description of Artificial Sequence: Synthetic oligonucleotide
aaucagaugaaaugcuucu

SEQ ID NO: 2765064 - RNA, 19 nt, Artificial Sequence
  Description of Artificial Sequence: Synthetic oligonucleotide
ugaggauguagcucaaugg

SEQ ID NO: 2765065 - RNA, 19 nt, Artificial Sequence
  Description of Artificial Sequence: Synthetic oligonucleotide
augaaaugcuucuuuaaag

SEQ ID NO: 2765066 - RNA, 19 nt, Artificial Sequence
  Description of Artificial Sequence: Synthetic oligonucleotide
cuucuuuaaagcaaucaag

SEQ ID NO: 2765067 - RNA, 19 nt, Artificial Sequence
  Description of Artificial Sequence: Synthetic oligonucleotide
ucaaucucaggcuacacac

SEQ ID NO: 2765068 - RNA, 19 nt, Artificial Sequence
  Description of Artificial Sequence: Synthetic oligonucleotide
ucaggcuacacacacacac

SEQ ID NO: 2765069 - RNA, 19 nt, Artificial Sequence
  Description of Artificial Sequence: Synthetic oligonucleotide
uuuugcaaagcccugaguu

SEQ ID NO: 2765070 - RNA, 19 nt, Artificial Sequence
  Description of Artificial Sequence: Synthetic oligonucleotide
aacuuugguuucucuagac

SEQ ID NO: 2765071 - RNA, 19 nt, Artificial Sequence
  Description of Artificial Sequence: Synthetic oligonucleotide
ucacaggcaaggaagauga

SEQ ID NO: 2765072 - RNA, 19 nt, Artificial Sequence
  Description of Artificial Sequence: Synthetic oligonucleotide
aacgguagccagcucuucc

SEQ ID NO: 2765073 - RNA, 19 nt, Artificial Sequence
  Description of Artificial Sequence: Synthetic oligonucleotide
uuagcagcuaucuaacuac

SEQ ID NO: 2765074 - RNA, 19 nt, Artificial Sequence
  Description of Artificial Sequence: Synthetic oligonucleotide
aaagcccugaguucaaucu

SEQ ID NO: 2765075 - RNA, 19 nt, Artificial Sequence
  Description of Artificial Sequence: Synthetic oligonucleotide
uacacacacacacacacac

SEQ ID NO: 2765076 - RNA, 19 nt, Artificial Sequence
  Description of Artificial Sequence: Synthetic oligonucleotide
agccaaucagaugaaaugc

SEQ ID NO: 2765077 - RNA, 19 nt, Artificial Sequence
  Description of Artificial Sequence: Synthetic oligonucleotide
accaaugccugcuuugagc

SEQ ID NO: 2765078 - RNA, 19 nt, Artificial Sequence
  Description of Artificial Sequence: Synthetic oligonucleotide
aagaacauuaagguuugag

SEQ ID NO: 2765079 - RNA, 19 nt, Artificial Sequence
  Description of Artificial Sequence: Synthetic oligonucleotide
aacauuaagguuugaggau

SEQ ID NO: 2765080 - RNA, 19 nt, Artificial Sequence
  Description of Artificial Sequence: Synthetic oligonucleotide
uaucuaacuacuccucuug

SEQ ID NO: 2765081 - RNA, 19 nt, Artificial Sequence
  Description of Artificial Sequence: Synthetic oligonucleotide
gcaaucaagaacauuaagg

SEQ ID NO: 2765082 - RNA, 19 nt, Artificial Sequence
  Description of Artificial Sequence: Synthetic oligonucleotide
acucucacauacuucuccc

SEQ ID NO: 2765083 - RNA, 19 nt, Artificial Sequence
  Description of Artificial Sequence: Synthetic oligonucleotide
ucaagaacauuaagguuug

SEQ ID NO: 2765084 - RNA, 19 nt, Artificial Sequence
  Description of Artificial Sequence: Synthetic oligonucleotide
ucuguagcagagaucacca

SEQ ID NO: 2765085 - RNA, 19 nt, Artificial Sequence
  Description of Artificial Sequence: Synthetic oligonucleotide
ugagcagcucaucacaggc

SEQ ID NO: 2765086 - RNA, 19 nt, Artificial Sequence
  Description of Artificial Sequence: Synthetic oligonucleotide
uugaggauguagcucaaug

SEQ ID NO: 2765087 - RNA, 19 nt, Artificial Sequence
  Description of Artificial Sequence: Synthetic oligonucleotide
augacugccaauccucugg

SEQ ID NO: 2765088 - RNA, 19 nt, Artificial Sequence
  Description of Artificial Sequence: Synthetic oligonucleotide
auccucuggccacauaugc

SEQ ID NO: 2765089 - RNA, 19 nt, Artificial Sequence
  Description of Artificial Sequence: Synthetic oligonucleotide
aaucaagaacauuaagguu

SEQ ID NO: 2765090 - RNA, 19 nt, Artificial Sequence
  Description of Artificial Sequence: Synthetic oligonucleotide
ugcacuauuuuguccacag

SEQ ID NO: 2765091 - RNA, 19 nt, Artificial Sequence
  Description of Artificial Sequence: Synthetic oligonucleotide
gagccagccaaucagauga

SEQ ID NO: 2765092 - RNA, 19 nt, Artificial Sequence
  Description of Artificial Sequence: Synthetic oligonucleotide
acuuugguuucucuagacg

SEQ ID NO: 2765093 - RNA, 19 nt, Artificial Sequence
  Description of Artificial Sequence: Synthetic oligonucleotide
ucucaggcuacacacacac

SEQ ID NO: 2765094 - RNA, 19 nt, Artificial Sequence
  Description of Artificial Sequence: Synthetic oligonucleotide
aagaugacugccaauccuc

SEQ ID NO: 2765095 - RNA, 19 nt, Artificial Sequence
  Description of Artificial Sequence: Synthetic oligonucleotide
aggaagaugacugccaauc

SEQ ID NO: 2765096 - RNA, 19 nt, Artificial Sequence
  Description of Artificial Sequence: Synthetic oligonucleotide
uuaagguuugaggauguag

SEQ ID NO: 2765097 - RNA, 19 nt, Artificial Sequence
  Description of Artificial Sequence: Synthetic oligonucleotide
gaaaugcuucuuuaaagca

SEQ ID NO: 2765098 - RNA, 19 nt, Artificial Sequence
  Description of Artificial Sequence: Synthetic oligonucleotide
cugaucacuguucagacuc

SEQ ID NO: 2765099 - RNA, 19 nt, Artificial Sequence
  Description of Artificial Sequence: Synthetic oligonucleotide
ucuuuaaagcaaucaagaa

SEQ ID NO: 2765100 - RNA, 19 nt, Artificial Sequence
  Description of Artificial Sequence: Synthetic oligonucleotide
aucuaacuacuccucuugc

SEQ ID NO: 2765101 - RNA, 19 nt, Artificial Sequence
  Description of Artificial Sequence: Synthetic oligonucleotide
ucuggggugugcuuuagcc

SEQ ID NO: 2765102 - RNA, 19 nt, Artificial Sequence
  Description of Artificial Sequence: Synthetic oligonucleotide
gagaaagccuaccaugagc

SEQ ID NO: 2765103 - RNA, 19 nt, Artificial Sequence
  Description of Artificial Sequence: Synthetic oligonucleotide
caggcaaggaagaugacug

SEQ ID NO: 2765104 - RNA, 19 nt, Artificial Sequence
  Description of Artificial Sequence: Synthetic oligonucleotide
ucuuugcuuucacugacug

SEQ ID NO: 2765105 - RNA, 19 nt, Artificial Sequence
  Description of Artificial Sequence: Synthetic oligonucleotide
aucaagaacauuaagguuu

SEQ ID NO: 2765106 - RNA, 19 nt, Artificial Sequence
  Description of Artificial Sequence: Synthetic oligonucleotide
aagguuugaggauguagcu

SEQ ID NO: 2765107 - RNA, 19 nt, Artificial Sequence
  Description of Artificial Sequence: Synthetic oligonucleotide
uuugguuucucuagacgug

SEQ ID NO: 2765108 - RNA, 19 nt, Artificial Sequence
  Description of Artificial Sequence: Synthetic oligonucleotide
aggcuacacacacacacac

SEQ ID NO: 2765109 - RNA, 19 nt, Artificial Sequence
  Description of Artificial Sequence: Synthetic oligonucleotide
uucaaucucaggcuacaca

SEQ ID NO: 2765110 - RNA, 19 nt, Artificial Sequence
  Description of Artificial Sequence: Synthetic oligonucleotide
cuuugagccagccaaucag

SEQ ID NO: 2765111 - RNA, 19 nt, Artificial Sequence
  Description of Artificial Sequence: Synthetic oligonucleotide
ucacuguucagacucggcu

SEQ ID NO: 2765112 - RNA, 19 nt, Artificial Sequence
  Description of Artificial Sequence: Synthetic oligonucleotide
aaugccugcuuugagccag

SEQ ID NO: 2765113 - RNA, 19 nt, Artificial Sequence
  Description of Artificial Sequence: Synthetic oligonucleotide
auacuucuccccuuucaac

SEQ ID NO: 2765114 - RNA, 19 nt, Artificial Sequence
  Description of Artificial Sequence: Synthetic oligonucleotide
uaacuacuccucuugcucc

SEQ ID NO: 2765115 - RNA, 19 nt, Artificial Sequence
  Description of Artificial Sequence: Synthetic oligonucleotide
agcaaucaagaacauuaag

SEQ ID NO: 2765116 - RNA, 19 nt, Artificial Sequence
  Description of Artificial Sequence: Synthetic oligonucleotide
uucuguagcagagaucacc

SEQ ID NO: 2765117 - RNA, 19 nt, Artificial Sequence
  Description of Artificial Sequence: Synthetic oligonucleotide
ugugccaccggcuccaggc

SEQ ID NO: 2765118 - RNA, 19 nt, Artificial Sequence
  Description of Artificial Sequence: Synthetic oligonucleotide
ccugaguucaaucucaggc

SEQ ID NO: 2765119 - RNA, 19 nt, Artificial Sequence
  Description of Artificial Sequence: Synthetic oligonucleotide
cacacacacacacacacac

SEQ ID NO: 2765120 - RNA, 19 nt, Artificial Sequence
  Description of Artificial Sequence: Synthetic oligonucleotide
caaucaagaacauuaaggu

SEQ ID NO: 2765121 - RNA, 19 nt, Artificial Sequence
  Description of Artificial Sequence: Synthetic oligonucleotide
uauuuuguccacaggugaa

SEQ ID NO: 2765122 - RNA, 19 nt, Artificial Sequence
  Description of Artificial Sequence: Synthetic oligonucleotide
ucagaugaaaugcuucuuu

SEQ ID NO: 2765123 - RNA, 19 nt, Artificial Sequence
  Description of Artificial Sequence: Synthetic oligonucleotide
ugagaaagccuaccaugag

SEQ ID NO: 2765124 - RNA, 19 nt, Artificial Sequence
  Description of Artificial Sequence: Synthetic oligonucleotide
cuaacuacuccucuugcuc

SEQ ID NO: 2765125 - RNA, 19 nt, Artificial Sequence
  Description of Artificial Sequence: Synthetic oligonucleotide
uuagcugucgggaacggua

SEQ ID NO: 2765126 - RNA, 19 nt, Artificial Sequence
  Description of Artificial Sequence: Synthetic oligonucleotide
aaugcuucuuuaaagcaau

SEQ ID NO: 2765127 - RNA, 19 nt, Artificial Sequence
  Description of Artificial Sequence: Synthetic oligonucleotide
uuugagccagccaaucaga

SEQ ID NO: 2765128 - RNA, 19 nt, Artificial Sequence
  Description of Artificial Sequence: Synthetic oligonucleotide
ucucacauacuucuccccu

SEQ ID NO: 2765129 - RNA, 19 nt, Artificial Sequence
  Description of Artificial Sequence: Synthetic oligonucleotide
ugacugaucacuguucaga

SEQ ID NO: 2765130 - RNA, 19 nt, Artificial Sequence
  Description of Artificial Sequence: Synthetic oligonucleotide
caaucagaugaaaugcuuc

SEQ ID NO: 2765131 - RNA, 19 nt, Artificial Sequence
  Description of Artificial Sequence: Synthetic oligonucleotide
guuucucuagacgugacug

SEQ ID NO: 2765132 - RNA, 19 nt, Artificial Sequence
  Description of Artificial Sequence: Synthetic oligonucleotide
acucuuagcugucgggaac

SEQ ID NO: 2765133 - RNA, 19 nt, Artificial Sequence
  Description of Artificial Sequence: Synthetic oligonucleotide
ucucuuugcuuucacugac

SEQ ID NO: 2765134 - RNA, 19 nt, Artificial Sequence
  Description of Artificial Sequence: Synthetic oligonucleotide
acauuaagguuugaggaug

SEQ ID NO: 2765135 - RNA, 19 nt, Artificial Sequence
  Description of Artificial Sequence: Synthetic oligonucleotide
uuguccacaggugaaaacu

SEQ ID NO: 2765136 - RNA, 19 nt, Artificial Sequence
  Description of Artificial Sequence: Synthetic oligonucleotide
aaaugcuucuuuaaagcaa

SEQ ID NO: 2765137 - RNA, 19 nt, Artificial Sequence
  Description of Artificial Sequence: Synthetic oligonucleotide
ucuaacuacuccucuugcu

SEQ ID NO: 2765138 - RNA, 19 nt, Artificial Sequence
  Description of Artificial Sequence: Synthetic oligonucleotide
agcucuuccaccugagcag

SEQ ID NO: 2765139 - RNA, 19 nt, Artificial Sequence
  Description of Artificial Sequence: Synthetic oligonucleotide
uuugcaaagcccugaguuc

SEQ ID NO: 2765140 - RNA, 19 nt, Artificial Sequence
  Description of Artificial Sequence: Synthetic oligonucleotide
cagccaaucagaugaaaug

SEQ ID NO: 2765141 - RNA, 19 nt, Artificial Sequence
  Description of Artificial Sequence: Synthetic oligonucleotide
ugaucacuguucagacucg

SEQ ID NO: 2765142 - RNA, 19 nt, Artificial Sequence
  Description of Artificial Sequence: Synthetic oligonucleotide
agagaucaccaaugccugc

SEQ ID NO: 2765143 - RNA, 19 nt, Artificial Sequence
  Description of Artificial Sequence: Synthetic oligonucleotide
gugcuuuagccuuagcagc

SEQ ID NO: 2765144 - RNA, 19 nt, Artificial Sequence
  Description of Artificial Sequence: Synthetic oligonucleotide
ucaguuugcagcagccgca

SEQ ID NO: 2765145 - RNA, 19 nt, Artificial Sequence
  Description of Artificial Sequence: Synthetic oligonucleotide
ugaguucaaucucaggcua

SEQ ID NO: 2765146 - RNA, 19 nt, Artificial Sequence
  Description of Artificial Sequence: Synthetic oligonucleotide
uccacaggugaaaacucug

SEQ ID NO: 2765147 - RNA, 19 nt, Artificial Sequence
  Description of Artificial Sequence: Synthetic oligonucleotide
cacacacacacacacacuc

SEQ ID NO: 2765148 - RNA, 19 nt, Artificial Sequence
  Description of Artificial Sequence: Synthetic oligonucleotide
uagacgugacugaucacug

SEQ ID NO: 2765149 - RNA, 19 nt, Artificial Sequence
  Description of Artificial Sequence: Synthetic oligonucleotide
agccuuagcagcuaucuaa

SEQ ID NO: 2765150 - RNA, 19 nt, Artificial Sequence
  Description of Artificial Sequence: Synthetic oligonucleotide
ugcuucuuuaaagcaauca

SEQ ID NO: 2765151 - RNA, 19 nt, Artificial Sequence
  Description of Artificial Sequence: Synthetic oligonucleotide
gacugaucacuguucagac

SEQ ID NO: 2765152 - RNA, 19 nt, Artificial Sequence
  Description of Artificial Sequence: Synthetic oligonucleotide
acugccaauccucuggcca

SEQ ID NO: 2765153 - RNA, 19 nt, Artificial Sequence
  Description of Artificial Sequence: Synthetic oligonucleotide
gucaguuugcagcagccgc

SEQ ID NO: 2765154 - RNA, 19 nt, Artificial Sequence
  Description of Artificial Sequence: Synthetic oligonucleotide
guagcagagaucaccaaug

SEQ ID NO: 2765155 - RNA, 19 nt, Artificial Sequence
  Description of Artificial Sequence: Synthetic oligonucleotide
uccccuuucaacuuugguu

SEQ ID NO: 2765156 - RNA, 19 nt, Artificial Sequence
  Description of Artificial Sequence: Synthetic oligonucleotide
aggcaaggaagaugacugc

SEQ ID NO: 2765157 - RNA, 19 nt, Artificial Sequence
  Description of Artificial Sequence: Synthetic oligonucleotide
acauaugccccugucaucu

SEQ ID NO: 2765158 - RNA, 19 nt, Artificial Sequence
  Description of Artificial Sequence: Synthetic oligonucleotide
ucgacucuuagcugucggg

SEQ ID NO: 2765159 - RNA, 19 nt, Artificial Sequence
  Description of Artificial Sequence: Synthetic oligonucleotide
cuauuuuguccacagguga

SEQ ID NO: 2765160 - RNA, 19 nt, Artificial Sequence
  Description of Artificial Sequence: Synthetic oligonucleotide
agaugaaaugcuucuuuaa

SEQ ID NO: 2765161 - RNA, 19 nt, Artificial Sequence
  Description of Artificial Sequence: Synthetic oligonucleotide
gguuugaggauguagcuca

SEQ ID NO: 2765162 - RNA, 19 nt, Artificial Sequence
  Description of Artificial Sequence: Synthetic oligonucleotide
cuuugcuuucacugacugg

SEQ ID NO: 2765163 - RNA, 19 nt, Artificial Sequence
  Description of Artificial Sequence: Synthetic oligonucleotide
acuauuuuguccacaggug

SEQ ID NO: 2765164 - RNA, 19 nt, Artificial Sequence
  Description of Artificial Sequence: Synthetic oligonucleotide
cacucucacauacuucucc

SEQ ID NO: 2765165 - RNA, 19 nt, Artificial Sequence
  Description of Artificial Sequence: Synthetic oligonucleotide
uuucucuagacgugacuga

SEQ ID NO: 2765166 - RNA, 19 nt, Artificial Sequence
  Description of Artificial Sequence: Synthetic oligonucleotide
gcagcuaucuaacuacucc

SEQ ID NO: 2765167 - RNA, 19 nt, Artificial Sequence
  Description of Artificial Sequence: Synthetic oligonucleotide
cucuagacgugacugauca

SEQ ID NO: 2765168 - RNA, 19 nt, Artificial Sequence
  Description of Artificial Sequence: Synthetic oligonucleotide
uggcucugcacuauuuugu

SEQ ID NO: 2765169 - RNA, 19 nt, Artificial Sequence
  Description of Artificial Sequence: Synthetic oligonucleotide
gcuacacacacacacacac

SEQ ID NO: 2765170 - RNA, 19 nt, Artificial Sequence
  Description of Artificial Sequence: Synthetic oligonucleotide
gugugcuuuagccuuagca

SEQ ID NO: 2765171 - RNA, 19 nt, Artificial Sequence
  Description of Artificial Sequence: Synthetic oligonucleotide
cucugcacuauuuugucca

SEQ ID NO: 2765172 - RNA, 19 nt, Artificial Sequence
  Description of Artificial Sequence: Synthetic oligonucleotide
ggcgcagucaguuugcagc

SEQ ID NO: 2765173 - RNA, 19 nt, Artificial Sequence
  Description of Artificial Sequence: Synthetic oligonucleotide
ggauguagcucaaugguag

SEQ ID NO: 2765174 - RNA, 19 nt, Artificial Sequence
  Description of Artificial Sequence: Synthetic oligonucleotide
gcugagaaagccuaccaug

SEQ ID NO: 2765175 - RNA, 19 nt, Artificial Sequence
  Description of Artificial Sequence: Synthetic oligonucleotide
aacuacuccucuugcuccu

SEQ ID NO: 2765176 - RNA, 19 nt, Artificial Sequence
  Description of Artificial Sequence: Synthetic oligonucleotide
cagagaucaccaaugccug

SEQ ID NO: 2765177 - RNA, 19 nt, Artificial Sequence
  Description of Artificial Sequence: Synthetic oligonucleotide
acauacuucuccccuuuca

SEQ ID NO: 2765178 - RNA, 19 nt, Artificial Sequence
  Description of Artificial Sequence: Synthetic oligonucleotide
uccucuggccacauaugcc

SEQ ID NO: 2765179 - RNA, 19 nt, Artificial Sequence
  Description of Artificial Sequence: Synthetic oligonucleotide
cugagaaagccuaccauga

SEQ ID NO: 2765180 - RNA, 19 nt, Artificial Sequence
  Description of Artificial Sequence: Synthetic oligonucleotide
uagcugucgggaacgguag

SEQ ID NO: 2765181 - RNA, 19 nt, Artificial Sequence
  Description of Artificial Sequence: Synthetic oligonucleotide
aagccuaccaugagcagcu

SEQ ID NO: 2765182 - RNA, 19 nt, Artificial Sequence
  Description of Artificial Sequence: Synthetic oligonucleotide
gaggauguagcucaauggu

SEQ ID NO: 2765183 - RNA, 19 nt, Artificial Sequence
  Description of Artificial Sequence: Synthetic oligonucleotide
cuuugguuucucuagacgu

SEQ ID NO: 2765184 - RNA, 19 nt, Artificial Sequence
  Description of Artificial Sequence: Synthetic oligonucleotide
ucucugcugagaaagccua

SEQ ID NO: 2765185 - RNA, 19 nt, Artificial Sequence
  Description of Artificial Sequence: Synthetic oligonucleotide
ugacugccaauccucuggc

SEQ ID NO: 2765186 - RNA, 19 nt, Artificial Sequence
  Description of Artificial Sequence: Synthetic oligonucleotide
aggugaaaacucuggggug

SEQ ID NO: 2765187 - RNA, 19 nt, Artificial Sequence
  Description of Artificial Sequence: Synthetic oligonucleotide
agguuugaggauguagcuc

SEQ ID NO: 2765188 - RNA, 19 nt, Artificial Sequence
  Description of Artificial Sequence: Synthetic oligonucleotide
uugccuggcuuuugcaaag

SEQ ID NO: 2765189 - RNA, 19 nt, Artificial Sequence
  Description of Artificial Sequence: Synthetic oligonucleotide
gaaagccuaccaugagcag

SEQ ID NO: 2765190 - RNA, 19 nt, Artificial Sequence
  Description of Artificial Sequence: Synthetic oligonucleotide
aucacaggcaaggaagaug

SEQ ID NO: 2765191 - RNA, 19 nt, Artificial Sequence
  Description of Artificial Sequence: Synthetic oligonucleotide
uugguuucucuagacguga

SEQ ID NO: 2765192 - RNA, 19 nt, Artificial Sequence
  Description of Artificial Sequence: Synthetic oligonucleotide
agcagcuuucuguagcaga

SEQ ID NO: 2765193 - RNA, 19 nt, Artificial Sequence
  Description of Artificial Sequence: Synthetic oligonucleotide
ugcugagaaagccuaccau

SEQ ID NO: 2765194 - RNA, 19 nt, Artificial Sequence
  Description of Artificial Sequence: Synthetic oligonucleotide
cagcucaucacaggcaagg

SEQ ID NO: 2765195 - RNA, 19 nt, Artificial Sequence
  Description of Artificial Sequence: Synthetic oligonucleotide
gaucacuguucagacucgg

SEQ ID NO: 2765196 - RNA, 19 nt, Artificial Sequence
  Description of Artificial Sequence: Synthetic oligonucleotide
gaugacugccaauccucug

SEQ ID NO: 2765197 - RNA, 19 nt, Artificial Sequence
  Description of Artificial Sequence: Synthetic oligonucleotide
ccaaugccugcuuugagcc

SEQ ID NO: 2765198 - RNA, 19 nt, Artificial Sequence
  Description of Artificial Sequence: Synthetic oligonucleotide
accugagcagcucaucaca

SEQ ID NO: 2765199 - RNA, 19 nt, Artificial Sequence
  Description of Artificial Sequence: Synthetic oligonucleotide
ugucgggaacgguagccag

SEQ ID NO: 2765200 - RNA, 19 nt, Artificial Sequence
  Description of Artificial Sequence: Synthetic oligonucleotide
cuggcucugcacuauuuug

SEQ ID NO: 2765201 - RNA, 19 nt, Artificial Sequence
  Description of Artificial Sequence: Synthetic oligonucleotide
agcagcucaucacaggcaa

SEQ ID NO: 2765202 - RNA, 19 nt, Artificial Sequence
  Description of Artificial Sequence: Synthetic oligonucleotide
uaugccccugucaucucug

SEQ ID NO: 2765203 - RNA, 19 nt, Artificial Sequence
  Description of Artificial Sequence: Synthetic oligonucleotide
aaaacucuggggugugcuu

SEQ ID NO: 2765204 - RNA, 19 nt, Artificial Sequence
  Description of Artificial Sequence: Synthetic oligonucleotide
gaagaugacugccaauccu

SEQ ID NO: 2765205 - RNA, 19 nt, Artificial Sequence
  Description of Artificial Sequence: Synthetic oligonucleotide
cacuauuuuguccacaggu

SEQ ID NO: 2765206 - RNA, 19 nt, Artificial Sequence
  Description of Artificial Sequence: Synthetic oligonucleotide
cucuuagcugucgggaacg

SEQ ID NO: 2765207 - RNA, 19 nt, Artificial Sequence
  Description of Artificial Sequence: Synthetic oligonucleotide
cagucaguuugcagcagcc

SEQ ID NO: 2765208 - RNA, 19 nt, Artificial Sequence
  Description of Artificial Sequence: Synthetic oligonucleotide
cugagcagcucaucacagg

SEQ ID NO: 2765209 - RNA, 19 nt, Artificial Sequence
  Description of Artificial Sequence: Synthetic oligonucleotide
accugugugccaccggcuc

SEQ ID NO: 2765210 - RNA, 19 nt, Artificial Sequence
  Description of Artificial Sequence: Synthetic oligonucleotide
acaggcaaggaagaugacu

SEQ ID NO: 2765211 - RNA, 19 nt, Artificial Sequence
  Description of Artificial Sequence: Synthetic oligonucleotide
uuuagccuuagcagcuauc

SEQ ID NO: 2765212 - RNA, 19 nt, Artificial Sequence
  Description of Artificial Sequence: Synthetic oligonucleotide
agcuaucuaacuacuccuc

SEQ ID NO: 2765213 - RNA, 19 nt, Artificial Sequence
  Description of Artificial Sequence: Synthetic oligonucleotide
cacacacacacacucucac

SEQ ID NO: 2765214 - RNA, 19 nt, Artificial Sequence
  Description of Artificial Sequence: Synthetic oligonucleotide
cuuagcagcuaucuaacua

SEQ ID NO: 2765215 - RNA, 19 nt, Artificial Sequence
  Description of Artificial Sequence: Synthetic oligonucleotide
aaggaagaugacugccaau

SEQ ID NO: 2765216 - RNA, 19 nt, Artificial Sequence
  Description of Artificial Sequence: Synthetic oligonucleotide
cacacacacacacacucuc

SEQ ID NO: 2765217 - RNA, 19 nt, Artificial Sequence
  Description of Artificial Sequence: Synthetic oligonucleotide
cucucacauacuucucccc

SEQ ID NO: 2765218 - RNA, 19 nt, Artificial Sequence
  Description of Artificial Sequence: Synthetic oligonucleotide
uggggugugcuuuagccuu

SEQ ID NO: 2765219 - RNA, 19 nt, Artificial Sequence
  Description of Artificial Sequence: Synthetic oligonucleotide
ucuccccuuucaacuuugg

SEQ ID NO: 2765220 - RNA, 19 nt, Artificial Sequence
  Description of Artificial Sequence: Synthetic oligonucleotide
uagcagcuaucuaacuacu

SEQ ID NO: 2765221 - RNA, 19 nt, Artificial Sequence
  Description of Artificial Sequence: Synthetic oligonucleotide
uacuccucuugcuccuccg

SEQ ID NO: 2765222 - RNA, 19 nt, Artificial Sequence
  Description of Artificial Sequence: Synthetic oligonucleotide
uucuccccuuucaacuuug

SEQ ID NO: 2765223 - RNA, 19 nt, Artificial Sequence
  Description of Artificial Sequence: Synthetic oligonucleotide
uuuuguccacaggugaaaa

SEQ ID NO: 2765224 - RNA, 19 nt, Artificial Sequence
  Description of Artificial Sequence: Synthetic oligonucleotide
gauguagcucaaugguaga

SEQ ID NO: 2765225 - RNA, 19 nt, Artificial Sequence
  Description of Artificial Sequence: Synthetic oligonucleotide
uaccaugagcagcuuucug

SEQ ID NO: 2765226 - RNA, 19 nt, Artificial Sequence
  Description of Artificial Sequence: Synthetic oligonucleotide
cacacucucacauacuucu

SEQ ID NO: 2765227 - RNA, 19 nt, Artificial Sequence
  Description of Artificial Sequence: Synthetic oligonucleotide
agucaguuugcagcagccg

SEQ ID NO: 2765228 - RNA, 19 nt, Artificial Sequence
  Description of Artificial Sequence: Synthetic oligonucleotide
acugaucacuguucagacu

SEQ ID NO: 2765229 - RNA, 19 nt, Artificial Sequence
  Description of Artificial Sequence: Synthetic oligonucleotide
aucacuguucagacucggc

SEQ ID NO: 2765230 - RNA, 19 nt, Artificial Sequence
  Description of Artificial Sequence: Synthetic oligonucleotide
cuccggagcaccugugugc

SEQ ID NO: 2765231 - RNA, 19 nt, Artificial Sequence
  Description of Artificial Sequence: Synthetic oligonucleotide
aauccucuggccacauaug

SEQ ID NO: 2765232 - RNA, 19 nt, Artificial Sequence
  Description of Artificial Sequence: Synthetic oligonucleotide
caugagcagcuuucuguag

SEQ ID NO: 2765233 - RNA, 19 nt, Artificial Sequence
  Description of Artificial Sequence: Synthetic oligonucleotide
gcuucuuuaaagcaaucaa

SEQ ID NO: 2765234 - RNA, 19 nt, Artificial Sequence
  Description of Artificial Sequence: Synthetic oligonucleotide
aagcaaucaagaacauuaa

SEQ ID NO: 2765235 - RNA, 19 nt, Artificial Sequence
  Description of Artificial Sequence: Synthetic oligonucleotide
ucaccaaugccugcuuuga

SEQ ID NO: 2765236 - RNA, 19 nt, Artificial Sequence
  Description of Artificial Sequence: Synthetic oligonucleotide
ugcuuucacugacuggcuc

SEQ ID NO: 2765237 - RNA, 19 nt, Artificial Sequence
  Description of Artificial Sequence: Synthetic oligonucleotide
ucacauacuucuccccuuu

SEQ ID NO: 2765238 - RNA, 19 nt, Artificial Sequence
  Description of Artificial Sequence: Synthetic oligonucleotide
ggaagaugacugccaaucc

SEQ ID NO: 2765239 - RNA, 19 nt, Artificial Sequence
  Description of Artificial Sequence: Synthetic oligonucleotide
caaagcccugaguucaauc

SEQ ID NO: 2765240 - RNA, 19 nt, Artificial Sequence
  Description of Artificial Sequence: Synthetic oligonucleotide
ccucuggccacauaugccc

SEQ ID NO: 2765241 - RNA, 19 nt, Artificial Sequence
  Description of Artificial Sequence: Synthetic oligonucleotide
auaugccccugucaucucu

SEQ ID NO: 2765242 - RNA, 19 nt, Artificial Sequence
  Description of Artificial Sequence: Synthetic oligonucleotide
agacucggcuuucucuuug

SEQ ID NO: 2765243 - RNA, 19 nt, Artificial Sequence
  Description of Artificial Sequence: Synthetic oligonucleotide
agcugucgggaacgguagc

SEQ ID NO: 2765244 - RNA, 19 nt, Artificial Sequence
  Description of Artificial Sequence: Synthetic oligonucleotide
uucucuagacgugacugau

SEQ ID NO: 2765245 - RNA, 19 nt, Artificial Sequence
  Description of Artificial Sequence: Synthetic oligonucleotide
ucugcacuauuuuguccac

SEQ ID NO: 2765246 - RNA, 19 nt, Artificial Sequence
  Description of Artificial Sequence: Synthetic oligonucleotide
ucuuagcugucgggaacgg

SEQ ID NO: 2765247 - RNA, 19 nt, Artificial Sequence
  Description of Artificial Sequence: Synthetic oligonucleotide
ucucuagacgugacugauc

SEQ ID NO: 2765248 - RNA, 19 nt, Artificial Sequence
  Description of Artificial Sequence: Synthetic oligonucleotide
aaacucuggggugugcuuu

SEQ ID NO: 2765249 - RNA, 19 nt, Artificial Sequence
  Description of Artificial Sequence: Synthetic oligonucleotide
aguucaaucucaggcuaca

SEQ ID NO: 2765250 - RNA, 19 nt, Artificial Sequence
  Description of Artificial Sequence: Synthetic oligonucleotide
caggugaaaacucuggggu

SEQ ID NO: 2765251 - RNA, 19 nt, Artificial Sequence
  Description of Artificial Sequence: Synthetic oligonucleotide
acacacacacacucucaca

SEQ ID NO: 2765252 - RNA, 19 nt, Artificial Sequence
  Description of Artificial Sequence: Synthetic oligonucleotide
gugacugaucacuguucag

SEQ ID NO: 2765253 - RNA, 19 nt, Artificial Sequence
  Description of Artificial Sequence: Synthetic oligonucleotide
augccccugucaucucugc

SEQ ID NO: 2765254 - RNA, 19 nt, Artificial Sequence
  Description of Artificial Sequence: Synthetic oligonucleotide
acgguagccagcucuucca

SEQ ID NO: 2765255 - RNA, 19 nt, Artificial Sequence
  Description of Artificial Sequence: Synthetic oligonucleotide
accggcuccaggcgcaguc

SEQ ID NO: 2765256 - RNA, 19 nt, Artificial Sequence
  Description of Artificial Sequence: Synthetic oligonucleotide
uggcuuuugcaaagcccug

SEQ ID NO: 2765257 - RNA, 19 nt, Artificial Sequence
  Description of Artificial Sequence: Synthetic oligonucleotide
cagcucuuccaccugagca

SEQ ID NO: 2765258 - RNA, 19 nt, Artificial Sequence
  Description of Artificial Sequence: Synthetic oligonucleotide
gacucggcuuucucuuugc

SEQ ID NO: 2765259 - RNA, 19 nt, Artificial Sequence
  Description of Artificial Sequence: Synthetic oligonucleotide
uccggagcaccugugugcc

SEQ ID NO: 2765260 - RNA, 19 nt, Artificial Sequence
  Description of Artificial Sequence: Synthetic oligonucleotide
uugcuuucacugacuggcu

SEQ ID NO: 2765261 - RNA, 19 nt, Artificial Sequence
  Description of Artificial Sequence: Synthetic oligonucleotide
acacacucucacauacuuc

SEQ ID NO: 2765262 - RNA, 19 nt, Artificial Sequence
  Description of Artificial Sequence: Synthetic oligonucleotide
ugguuucucuagacgugac

SEQ ID NO: 2765263 - RNA, 19 nt, Artificial Sequence
  Description of Artificial Sequence: Synthetic oligonucleotide
auuuuguccacaggugaaa

SEQ ID NO: 2765264 - RNA, 19 nt, Artificial Sequence
  Description of Artificial Sequence: Synthetic oligonucleotide
agcagcuaucuaacuacuc

SEQ ID NO: 2765265 - RNA, 19 nt, Artificial Sequence
  Description of Artificial Sequence: Synthetic oligonucleotide
ucgggaacgguagccagcu

SEQ ID NO: 2765266 - RNA, 19 nt, Artificial Sequence
  Description of Artificial Sequence: Synthetic oligonucleotide
ccuaccaugagcagcuuuc

SEQ ID NO: 2765267 - RNA, 19 nt, Artificial Sequence
  Description of Artificial Sequence: Synthetic oligonucleotide
ugaaaacucuggggugugc

SEQ ID NO: 2765268 - RNA, 19 nt, Artificial Sequence
  Description of Artificial Sequence: Synthetic oligonucleotide
ccacaggugaaaacucugg

SEQ ID NO: 2765269 - RNA, 19 nt, Artificial Sequence
  Description of Artificial Sequence: Synthetic oligonucleotide
acuggcucugcacuauuuu

SEQ ID NO: 2765270 - RNA, 19 nt, Artificial Sequence
  Description of Artificial Sequence: Synthetic oligonucleotide
gcuuuugcaaagcccugag

SEQ ID NO: 2765271 - RNA, 19 nt, Artificial Sequence
  Description of Artificial Sequence: Synthetic oligonucleotide
gcagcuuucuguagcagag

SEQ ID NO: 2765272 - RNA, 19 nt, Artificial Sequence
  Description of Artificial Sequence: Synthetic oligonucleotide
gacucuuagcugucgggaa

SEQ ID NO: 2765273 - RNA, 19 nt, Artificial Sequence
  Description of Artificial Sequence: Synthetic oligonucleotide
acgugacugaucacuguuc

SEQ ID NO: 2765274 - RNA, 19 nt, Artificial Sequence
  Description of Artificial Sequence: Synthetic oligonucleotide
cuugccuggcuuuugcaaa

SEQ ID NO: 2765275 - RNA, 19 nt, Artificial Sequence
  Description of Artificial Sequence: Synthetic oligonucleotide
uuucuguagcagagaucac

SEQ ID NO: 2765276 - RNA, 19 nt, Artificial Sequence
  Description of Artificial Sequence: Synthetic oligonucleotide
agacgugacugaucacugu

SEQ ID NO: 2765277 - RNA, 19 nt, Artificial Sequence
  Description of Artificial Sequence: Synthetic oligonucleotide
ugucaucucugcugagaaa

SEQ ID NO: 2765278 - RNA, 19 nt, Artificial Sequence
  Description of Artificial Sequence: Synthetic oligonucleotide
acuucuccccuuucaacuu

SEQ ID NO: 2765279 - RNA, 19 nt, Artificial Sequence
  Description of Artificial Sequence: Synthetic oligonucleotide
cuuucaacuuugguuucuc

SEQ ID NO: 2765280 - RNA, 19 nt, Artificial Sequence
  Description of Artificial Sequence: Synthetic oligonucleotide
guuugcagcagccgcagcu

SEQ ID NO: 2765281 - RNA, 19 nt, Artificial Sequence
  Description of Artificial Sequence: Synthetic oligonucleotide
ucuagacgugacugaucac

SEQ ID NO: 2765282 - RNA, 19 nt, Artificial Sequence
  Description of Artificial Sequence: Synthetic oligonucleotide
gcagagaucaccaaugccu

SEQ ID NO: 2765283 - RNA, 19 nt, Artificial Sequence
  Description of Artificial Sequence: Synthetic oligonucleotide
aacucuggggugugcuuua

SEQ ID NO: 2765284 - RNA, 19 nt, Artificial Sequence
  Description of Artificial Sequence: Synthetic oligonucleotide
cuagacgugacugaucacu

SEQ ID NO: 2765285 - RNA, 19 nt, Artificial Sequence
  Description of Artificial Sequence: Synthetic oligonucleotide
caccugagcagcucaucac

SEQ ID NO: 2765286 - RNA, 19 nt, Artificial Sequence
  Description of Artificial Sequence: Synthetic oligonucleotide
ucuggccacauaugccccu

SEQ ID NO: 2765287 - RNA, 19 nt, Artificial Sequence
  Description of Artificial Sequence: Synthetic oligonucleotide
ggcaaggaagaugacugcc

SEQ ID NO: 2765288 - RNA, 19 nt, Artificial Sequence
  Description of Artificial Sequence: Synthetic oligonucleotide
gacugccaauccucuggcc

SEQ ID NO: 2765289 - RNA, 19 nt, Artificial Sequence
  Description of Artificial Sequence: Synthetic oligonucleotide
uccuccggagcaccugugu

SEQ ID NO: 2765290 - RNA, 19 nt, Artificial Sequence
  Description of Artificial Sequence: Synthetic oligonucleotide
caacuuugguuucucuaga

SEQ ID NO: 2765291 - RNA, 19 nt, Artificial Sequence
  Description of Artificial Sequence: Synthetic oligonucleotide
caaggaagaugacugccaa

SEQ ID NO: 2765292 - RNA, 19 nt, Artificial Sequence
  Description of Artificial Sequence: Synthetic oligonucleotide
ccugcuuugagccagccaa

SEQ ID NO: 2765293 - RNA, 19 nt, Artificial Sequence
  Description of Artificial Sequence: Synthetic oligonucleotide
agcaccugugugccaccgg

SEQ ID NO: 2765294 - RNA, 19 nt, Artificial Sequence
  Description of Artificial Sequence: Synthetic oligonucleotide
cacauaugccccugucauc

SEQ ID NO: 2765295 - RNA, 19 nt, Artificial Sequence
  Description of Artificial Sequence: Synthetic oligonucleotide
acugacuggcucugcacua

SEQ ID NO: 2765296 - RNA, 19 nt, Artificial Sequence
  Description of Artificial Sequence: Synthetic oligonucleotide
uguucagacucggcuuucu

SEQ ID NO: 2765297 - RNA, 19 nt, Artificial Sequence
  Description of Artificial Sequence: Synthetic oligonucleotide
cuacacacacacacacaca

SEQ ID NO: 2765298 - RNA, 19 nt, Artificial Sequence
  Description of Artificial Sequence: Synthetic oligonucleotide
ugcuuugagccagccaauc

SEQ ID NO: 2765299 - RNA, 19 nt, Artificial Sequence
  Description of Artificial Sequence: Synthetic oligonucleotide
gaaaacucuggggugugcu

SEQ ID NO: 2765300 - RNA, 19 nt, Artificial Sequence
  Description of Artificial Sequence: Synthetic oligonucleotide
caaucucaggcuacacaca

SEQ ID NO: 2765301 - RNA, 19 nt, Artificial Sequence
  Description of Artificial Sequence: Synthetic oligonucleotide
cugucaucucugcugagaa

SEQ ID NO: 2765302 - RNA, 19 nt, Artificial Sequence
  Description of Artificial Sequence: Synthetic oligonucleotide
agaugacugccaauccucu

SEQ ID NO: 2765303 - RNA, 19 nt, Artificial Sequence
  Description of Artificial Sequence: Synthetic oligonucleotide
gcagucaguuugcagcagc

SEQ ID NO: 2765304 - RNA, 19 nt, Artificial Sequence
  Description of Artificial Sequence: Synthetic oligonucleotide
ugccaccggcuccaggcgc

SEQ ID NO: 2765305 - RNA, 19 nt, Artificial Sequence
  Description of Artificial Sequence: Synthetic oligonucleotide
gcacuauuuuguccacagg

SEQ ID NO: 2765306 - RNA, 19 nt, Artificial Sequence
  Description of Artificial Sequence: Synthetic oligonucleotide
uagccuuagcagcuaucua

SEQ ID NO: 2765307 - RNA, 19 nt, Artificial Sequence
  Description of Artificial Sequence: Synthetic oligonucleotide
caauccucuggccacauau

SEQ ID NO: 2765308 - RNA, 19 nt, Artificial Sequence
  Description of Artificial Sequence: Synthetic oligonucleotide
caccaaugccugcuuugag

SEQ ID NO: 2765309 - RNA, 19 nt, Artificial Sequence
  Description of Artificial Sequence: Synthetic oligonucleotide
gagaucaccaaugccugcu

SEQ ID NO: 2765310 - RNA, 19 nt, Artificial Sequence
  Description of Artificial Sequence: Synthetic oligonucleotide
agcccugaguucaaucuca

SEQ ID NO: 2765311 - RNA, 19 nt, Artificial Sequence
  Description of Artificial Sequence: Synthetic oligonucleotide
cagcuaucuaacuacuccu

SEQ ID NO: 2765312 - RNA, 19 nt, Artificial Sequence
  Description of Artificial Sequence: Synthetic oligonucleotide
uuugaggauguagcucaau

SEQ ID NO: 2765313 - RNA, 19 nt, Artificial Sequence
  Description of Artificial Sequence: Synthetic oligonucleotide
aggcgcagucaguuugcag

SEQ ID NO: 2765314 - RNA, 19 nt, Artificial Sequence
  Description of Artificial Sequence: Synthetic oligonucleotide
augcuucuuuaaagcaauc

SEQ ID NO: 2765315 - RNA, 19 nt, Artificial Sequence
  Description of Artificial Sequence: Synthetic oligonucleotide
caggcuacacacacacaca

SEQ ID NO: 2765316 - RNA, 19 nt, Artificial Sequence
  Description of Artificial Sequence: Synthetic oligonucleotide
gcucugcacuauuuugucc

SEQ ID NO: 2765317 - RNA, 19 nt, Artificial Sequence
  Description of Artificial Sequence: Synthetic oligonucleotide
cugcugagaaagccuacca

SEQ ID NO: 2765318 - RNA, 19 nt, Artificial Sequence
  Description of Artificial Sequence: Synthetic oligonucleotide
aucagaugaaaugcuucuu

SEQ ID NO: 2765319 - RNA, 19 nt, Artificial Sequence
  Description of Artificial Sequence: Synthetic oligonucleotide
acucggcuuucucuuugcu

SEQ ID NO: 2765320 - RNA, 19 nt, Artificial Sequence
  Description of Artificial Sequence: Synthetic oligonucleotide
agagugcuugccuggcuuu

SEQ ID NO: 2765321 - RNA, 19 nt, Artificial Sequence
  Description of Artificial Sequence: Synthetic oligonucleotide
acacucucacauacuucuc

SEQ ID NO: 2765322 - RNA, 19 nt, Artificial Sequence
  Description of Artificial Sequence: Synthetic oligonucleotide
gagcaccugugugccaccg

SEQ ID NO: 2765323 - RNA, 19 nt, Artificial Sequence
  Description of Artificial Sequence: Synthetic oligonucleotide
cauuaagguuugaggaugu

SEQ ID NO: 2765324 - RNA, 19 nt, Artificial Sequence
  Description of Artificial Sequence: Synthetic oligonucleotide
aggauguagcucaauggua

SEQ ID NO: 2765325 - RNA, 19 nt, Artificial Sequence
  Description of Artificial Sequence: Synthetic oligonucleotide
ucuuccaccugagcagcuc

SEQ ID NO: 2765326 - RNA, 19 nt, Artificial Sequence
  Description of Artificial Sequence: Synthetic oligonucleotide
ugccccugucaucucugcu

SEQ ID NO: 2765327 - RNA, 19 nt, Artificial Sequence
  Description of Artificial Sequence: Synthetic oligonucleotide
gacgugacugaucacuguu

SEQ ID NO: 2765328 - RNA, 19 nt, Artificial Sequence
  Description of Artificial Sequence: Synthetic oligonucleotide
cuuccaccugagcagcuca

SEQ ID NO: 2765329 - RNA, 19 nt, Artificial Sequence
  Description of Artificial Sequence: Synthetic oligonucleotide
gugaaaacucuggggugug

SEQ ID NO: 2765330 - RNA, 19 nt, Artificial Sequence
  Description of Artificial Sequence: Synthetic oligonucleotide
acuacuccucuugcuccuc

SEQ ID NO: 2765331 - RNA, 19 nt, Artificial Sequence
  Description of Artificial Sequence: Synthetic oligonucleotide
gccccugucaucucugcug

SEQ ID NO: 2765332 - RNA, 19 nt, Artificial Sequence
  Description of Artificial Sequence: Synthetic oligonucleotide
guucagacucggcuuucuc

SEQ ID NO: 2765333 - RNA, 19 nt, Artificial Sequence
  Description of Artificial Sequence: Synthetic oligonucleotide
acacacacacacacucuca

SEQ ID NO: 2765334 - RNA, 19 nt, Artificial Sequence
  Description of Artificial Sequence: Synthetic oligonucleotide
acacacacacacacacucu

SEQ ID NO: 2765335 - RNA, 19 nt, Artificial Sequence
  Description of Artificial Sequence: Synthetic oligonucleotide
guucaaucucaggcuacac

SEQ ID NO: 2765336 - RNA, 19 nt, Artificial Sequence
  Description of Artificial Sequence: Synthetic oligonucleotide
cucuggggugugcuuuagc

SEQ ID NO: 2765337 - RNA, 19 nt, Artificial Sequence
  Description of Artificial Sequence: Synthetic oligonucleotide
gugccaccggcuccaggcg

SEQ ID NO: 2765338 - RNA, 19 nt, Artificial Sequence
  Description of Artificial Sequence: Synthetic oligonucleotide
ggcucugcacuauuuuguc

SEQ ID NO: 2765339 - RNA, 19 nt, Artificial Sequence
  Description of Artificial Sequence: Synthetic oligonucleotide
ugccuggcuuuugcaaagc

SEQ ID NO: 2765340 - RNA, 19 nt, Artificial Sequence
  Description of Artificial Sequence: Synthetic oligonucleotide
cacauacuucuccccuuuc

SEQ ID NO: 2765341 - RNA, 19 nt, Artificial Sequence
  Description of Artificial Sequence: Synthetic oligonucleotide
agcucaucacaggcaagga

SEQ ID NO: 2765342 - RNA, 19 nt, Artificial Sequence
  Description of Artificial Sequence: Synthetic oligonucleotide
gagcagcucaucacaggca

SEQ ID NO: 2765343 - RNA, 19 nt, Artificial Sequence
  Description of Artificial Sequence: Synthetic oligonucleotide
acacacacacacacacaca

SEQ ID NO: 2765344 - RNA, 19 nt, Artificial Sequence
  Description of Artificial Sequence: Synthetic oligonucleotide
acacacacacacacacacu

SEQ ID NO: 2765345 - RNA, 19 nt, Artificial Sequence
  Description of Artificial Sequence: Synthetic oligonucleotide
gcuuugagccagccaauca

SEQ ID NO: 2765346 - RNA, 19 nt, Artificial Sequence
  Description of Artificial Sequence: Synthetic oligonucleotide
cuaucuaacuacuccucuu

SEQ ID NO: 2765347 - RNA, 19 nt, Artificial Sequence
  Description of Artificial Sequence: Synthetic oligonucleotide
gucgggaacgguagccagc

SEQ ID NO: 2765348 - RNA, 19 nt, Artificial Sequence
  Description of Artificial Sequence: Synthetic oligonucleotide
ugacuggcucugcacuauu

SEQ ID NO: 2765349 - RNA, 19 nt, Artificial Sequence
  Description of Artificial Sequence: Synthetic oligonucleotide
gggaacgguagccagcucu

SEQ ID NO: 2765350 - RNA, 19 nt, Artificial Sequence
  Description of Artificial Sequence: Synthetic oligonucleotide
gccacauaugccccuguca

SEQ ID NO: 2765351 - RNA, 19 nt, Artificial Sequence
  Description of Artificial Sequence: Synthetic oligonucleotide
gcugucgggaacgguagcc

SEQ ID NO: 2765352 - RNA, 19 nt, Artificial Sequence
  Description of Artificial Sequence: Synthetic oligonucleotide
cucuugcuccuccggagca

SEQ ID NO: 2765353 - RNA, 19 nt, Artificial Sequence
  Description of Artificial Sequence: Synthetic oligonucleotide
cauaugccccugucaucuc

SEQ ID NO: 2765354 - RNA, 19 nt, Artificial Sequence
  Description of Artificial Sequence: Synthetic oligonucleotide
gcuaucuaacuacuccucu

SEQ ID NO: 2765355 - RNA, 19 nt, Artificial Sequence
  Description of Artificial Sequence: Synthetic oligonucleotide
ugccaauccucuggccaca

SEQ ID NO: 2765356 - RNA, 19 nt, Artificial Sequence
  Description of Artificial Sequence: Synthetic oligonucleotide
auuaagguuugaggaugua

SEQ ID NO: 2765357 - RNA, 19 nt, Artificial Sequence
  Description of Artificial Sequence: Synthetic oligonucleotide
gcaaggaagaugacugcca

SEQ ID NO: 2765358 - RNA, 19 nt, Artificial Sequence
  Description of Artificial Sequence: Synthetic oligonucleotide
cacaggcaaggaagaugac

SEQ ID NO: 2765359 - RNA, 19 nt, Artificial Sequence
  Description of Artificial Sequence: Synthetic oligonucleotide
gccuuagcagcuaucuaac

SEQ ID NO: 2765360 - RNA, 19 nt, Artificial Sequence
  Description of Artificial Sequence: Synthetic oligonucleotide
uccaccugagcagcucauc

SEQ ID NO: 2765361 - RNA, 19 nt, Artificial Sequence
  Description of Artificial Sequence: Synthetic oligonucleotide
ggugaaaacucuggggugu

SEQ ID NO: 2765362 - RNA, 19 nt, Artificial Sequence
  Description of Artificial Sequence: Synthetic oligonucleotide
gcuuucucuuugcuuucac

SEQ ID NO: 2765363 - RNA, 19 nt, Artificial Sequence
  Description of Artificial Sequence: Synthetic oligonucleotide
augccugcuuugagccagc

SEQ ID NO: 2765364 - RNA, 19 nt, Artificial Sequence
  Description of Artificial Sequence: Synthetic oligonucleotide
gcucaucacaggcaaggaa

SEQ ID NO: 2765365 - RNA, 19 nt, Artificial Sequence
  Description of Artificial Sequence: Synthetic oligonucleotide
caaugccugcuuugagcca

SEQ ID NO: 2765366 - RNA, 19 nt, Artificial Sequence
  Description of Artificial Sequence: Synthetic oligonucleotide
gccuggcuuuugcaaagcc

SEQ ID NO: 2765367 - RNA, 19 nt, Artificial Sequence
  Description of Artificial Sequence: Synthetic oligonucleotide
aucucaggcuacacacaca

SEQ ID NO: 2765368 - RNA, 19 nt, Artificial Sequence
  Description of Artificial Sequence: Synthetic oligonucleotide
ccucuugcuccuccggagc

SEQ ID NO: 2765369 - RNA, 19 nt, Artificial Sequence
  Description of Artificial Sequence: Synthetic oligonucleotide
acucuggggugugcuuuag

SEQ ID NO: 2765370 - RNA, 19 nt, Artificial Sequence
  Description of Artificial Sequence: Synthetic oligonucleotide
cccugaguucaaucucagg

SEQ ID NO: 2765371 - RNA, 19 nt, Artificial Sequence
  Description of Artificial Sequence: Synthetic oligonucleotide
cacugacuggcucugcacu

SEQ ID NO: 2765372 - RNA, 19 nt, Artificial Sequence
  Description of Artificial Sequence: Synthetic oligonucleotide
gaacgguagccagcucuuc

SEQ ID NO: 2765373 - RNA, 19 nt, Artificial Sequence
  Description of Artificial Sequence: Synthetic oligonucleotide
cuuuugcaaagcccugagu

SEQ ID NO: 2765374 - RNA, 19 nt, Artificial Sequence
  Description of Artificial Sequence: Synthetic oligonucleotide
gaucaccaaugccugcuuu

SEQ ID NO: 2765375 - RNA, 19 nt, Artificial Sequence
  Description of Artificial Sequence: Synthetic oligonucleotide
cucuuugcuuucacugacu

SEQ ID NO: 2765376 - RNA, 19 nt, Artificial Sequence
  Description of Artificial Sequence: Synthetic oligonucleotide
ggcuuuugcaaagcccuga

SEQ ID NO: 2765377 - RNA, 19 nt, Artificial Sequence
  Description of Artificial Sequence: Synthetic oligonucleotide
ccugugugccaccggcucc

SEQ ID NO: 2765378 - RNA, 19 nt, Artificial Sequence
  Description of Artificial Sequence: Synthetic oligonucleotide
gcgcagucaguuugcagca

SEQ ID NO: 2765379 - RNA, 19 nt, Artificial Sequence
  Description of Artificial Sequence: Synthetic oligonucleotide
gguuucucuagacgugacu

SEQ ID NO: 2765380 - RNA, 19 nt, Artificial Sequence
  Description of Artificial Sequence: Synthetic oligonucleotide
cacuguucagacucggcuu

SEQ ID NO: 2765381 - RNA, 19 nt, Artificial Sequence
  Description of Artificial Sequence: Synthetic oligonucleotide
cuguagcagagaucaccaa

SEQ ID NO: 2765382 - RNA, 19 nt, Artificial Sequence
  Description of Artificial Sequence: Synthetic oligonucleotide
cugucgggaacgguagcca

SEQ ID NO: 2765383 - RNA, 19 nt, Artificial Sequence
  Description of Artificial Sequence: Synthetic oligonucleotide
cuccuccggagcaccugug

SEQ ID NO: 2765384 - RNA, 19 nt, Artificial Sequence
  Description of Artificial Sequence: Synthetic oligonucleotide
ugugugccaccggcuccag

SEQ ID NO: 2765385 - RNA, 19 nt, Artificial Sequence
  Description of Artificial Sequence: Synthetic oligonucleotide
cuguucagacucggcuuuc

SEQ ID NO: 2765386 - RNA, 19 nt, Artificial Sequence
  Description of Artificial Sequence: Synthetic oligonucleotide
guccacaggugaaaacucu

SEQ ID NO: 2765387 - RNA, 19 nt, Artificial Sequence
  Description of Artificial Sequence: Synthetic oligonucleotide
cgugacugaucacuguuca

SEQ ID NO: 2765388 - RNA, 19 nt, Artificial Sequence
  Description of Artificial Sequence: Synthetic oligonucleotide
ccccuuucaacuuugguuu

SEQ ID NO: 2765389 - RNA, 19 nt, Artificial Sequence
  Description of Artificial Sequence: Synthetic oligonucleotide
ccaccugagcagcucauca

SEQ ID NO: 2765390 - RNA, 19 nt, Artificial Sequence
  Description of Artificial Sequence: Synthetic oligonucleotide
cugugugccaccggcucca

SEQ ID NO: 2765391 - RNA, 19 nt, Artificial Sequence
  Description of Artificial Sequence: Synthetic oligonucleotide
cugcacuauuuuguccaca

SEQ ID NO: 2765392 - RNA, 19 nt, Artificial Sequence
  Description of Artificial Sequence: Synthetic oligonucleotide
gcuuucuguagcagagauc

SEQ ID NO: 2765393 - RNA, 19 nt, Artificial Sequence
  Description of Artificial Sequence: Synthetic oligonucleotide
ggugugcuuuagccuuagc

SEQ ID NO: 2765394 - RNA, 19 nt, Artificial Sequence
  Description of Artificial Sequence: Synthetic oligonucleotide
cuuuagccuuagcagcuau

SEQ ID NO: 2765395 - RNA, 19 nt, Artificial Sequence
  Description of Artificial Sequence: Synthetic oligonucleotide
guuugaggauguagcucaa

SEQ ID NO: 2765396 - RNA, 19 nt, Artificial Sequence
  Description of Artificial Sequence: Synthetic oligonucleotide
ccuccggagcaccugugug

SEQ ID NO: 2765397 - RNA, 19 nt, Artificial Sequence
  Description of Artificial Sequence: Synthetic oligonucleotide
cucacauacuucuccccuu

SEQ ID NO: 2765398 - RNA, 19 nt, Artificial Sequence
  Description of Artificial Sequence: Synthetic oligonucleotide
ggagcaccugugugccacc

SEQ ID NO: 2765399 - RNA, 19 nt, Artificial Sequence
  Description of Artificial Sequence: Synthetic oligonucleotide
ggccacauaugccccuguc

SEQ ID NO: 2765400 - RNA, 19 nt, Artificial Sequence
  Description of Artificial Sequence: Synthetic oligonucleotide
gccaaucagaugaaaugcu

SEQ ID NO: 2765401 - RNA, 19 nt, Artificial Sequence
  Description of Artificial Sequence: Synthetic oligonucleotide
cccuuucaacuuugguuuc

SEQ ID NO: 2765402 - RNA, 19 nt, Artificial Sequence
  Description of Artificial Sequence: Synthetic oligonucleotide
ggcuacacacacacacaca

SEQ ID NO: 2765403 - RNA, 19 nt, Artificial Sequence
  Description of Artificial Sequence: Synthetic oligonucleotide
caagaacauuaagguuuga

SEQ ID NO: 2765404 - RNA, 19 nt, Artificial Sequence
  Description of Artificial Sequence: Synthetic oligonucleotide
cucggcuuucucuuugcuu

SEQ ID NO: 2765405 - RNA, 19 nt, Artificial Sequence
  Description of Artificial Sequence: Synthetic oligonucleotide
ccagccaaucagaugaaau

SEQ ID NO: 2765406 - RNA, 19 nt, Artificial Sequence
  Description of Artificial Sequence: Synthetic oligonucleotide
gcccugaguucaaucucag

SEQ ID NO: 2765407 - RNA, 19 nt, Artificial Sequence
  Description of Artificial Sequence: Synthetic oligonucleotide
gcagcucaucacaggcaag

SEQ ID NO: 2765408 - RNA, 19 nt, Artificial Sequence
  Description of Artificial Sequence: Synthetic oligonucleotide
ccugucaucucugcugaga

SEQ ID NO: 2765409 - RNA, 19 nt, Artificial Sequence
  Description of Artificial Sequence: Synthetic oligonucleotide
cuaccaugagcagcuuucu

SEQ ID NO: 2765410 - RNA, 19 nt, Artificial Sequence
  Description of Artificial Sequence: Synthetic oligonucleotide
gggugugcuuuagccuuag

SEQ ID NO: 2765411 - RNA, 19 nt, Artificial Sequence
  Description of Artificial Sequence: Synthetic oligonucleotide
cuccccuuucaacuuuggu

SEQ ID NO: 2765412 - RNA, 19 nt, Artificial Sequence
  Description of Artificial Sequence: Synthetic oligonucleotide
ccaaucagaugaaaugcuu

SEQ ID NO: 2765413 - RNA, 19 nt, Artificial Sequence
  Description of Artificial Sequence: Synthetic oligonucleotide
ggcuuucucuuugcuuuca

SEQ ID NO: 2765414 - RNA, 19 nt, Artificial Sequence
  Description of Artificial Sequence: Synthetic oligonucleotide
ccccugucaucucugcuga

SEQ ID NO: 2765415 - RNA, 19 nt, Artificial Sequence
  Description of Artificial Sequence: Synthetic oligonucleotide
cuuagcugucgggaacggu

SEQ ID NO: 2765416 - RNA, 19 nt, Artificial Sequence
  Description of Artificial Sequence: Synthetic oligonucleotide
gacuggcucugcacuauuu

SEQ ID NO: 2765417 - RNA, 19 nt, Artificial Sequence
  Description of Artificial Sequence: Synthetic oligonucleotide
agccagccaaucagaugaa

SEQ ID NO: 2765418 - RNA, 19 nt, Artificial Sequence
  Description of Artificial Sequence: Synthetic oligonucleotide
cugcuuugagccagccaau

SEQ ID NO: 2765419 - RNA, 19 nt, Artificial Sequence
  Description of Artificial Sequence: Synthetic oligonucleotide
gccugcuuugagccagcca

SEQ ID NO: 2765420 - RNA, 19 nt, Artificial Sequence
  Description of Artificial Sequence: Synthetic oligonucleotide
cggagcaccugugugccac

SEQ ID NO: 2765421 - RNA, 19 nt, Artificial Sequence
  Description of Artificial Sequence: Synthetic oligonucleotide
cgacucuuagcugucggga

SEQ ID NO: 2765422 - RNA, 19 nt, Artificial Sequence
  Description of Artificial Sequence: Synthetic oligonucleotide
caggcgcagucaguuugca

SEQ ID NO: 2765423 - RNA, 19 nt, Artificial Sequence
  Description of Artificial Sequence: Synthetic oligonucleotide
caccugugugccaccggcu

SEQ ID NO: 2765424 - RNA, 19 nt, Artificial Sequence
  Description of Artificial Sequence: Synthetic oligonucleotide
ccuuagcagcuaucuaacu

SEQ ID NO: 2765425 - RNA, 19 nt, Artificial Sequence
  Description of Artificial Sequence: Synthetic oligonucleotide
cccugucaucucugcugag

SEQ ID NO: 2765426 - RNA, 19 nt, Artificial Sequence
  Description of Artificial Sequence: Synthetic oligonucleotide
cugacuggcucugcacuau

SEQ ID NO: 2765427 - RNA, 19 nt, Artificial Sequence
  Description of Artificial Sequence: Synthetic oligonucleotide
gcuccuccggagcaccugu

SEQ ID NO: 2765428 - RNA, 19 nt, Artificial Sequence
  Description of Artificial Sequence: Synthetic oligonucleotide
cagacucggcuuucucuuu

SEQ ID NO: 2765429 - RNA, 19 nt, Artificial Sequence
  Description of Artificial Sequence: Synthetic oligonucleotide
ggaacgguagccagcucuu

SEQ ID NO: 2765430 - RNA, 19 nt, Artificial Sequence
  Description of Artificial Sequence: Synthetic oligonucleotide
gccagccaaucagaugaaa

SEQ ID NO: 2765431 - RNA, 19 nt, Artificial Sequence
  Description of Artificial Sequence: Synthetic oligonucleotide
ccuuucaacuuugguuucu

SEQ ID NO: 2765432 - RNA, 19 nt, Artificial Sequence
  Description of Artificial Sequence: Synthetic oligonucleotide
gccaccggcuccaggcgca

SEQ ID NO: 2765433 - RNA, 19 nt, Artificial Sequence
  Description of Artificial Sequence: Synthetic oligonucleotide
cggcuccaggcgcagucag

SEQ ID NO: 2765434 - RNA, 19 nt, Artificial Sequence
  Description of Artificial Sequence: Synthetic oligonucleotide
agccuaccaugagcagcuu

SEQ ID NO: 2765435 - RNA, 19 nt, Artificial Sequence
  Description of Artificial Sequence: Synthetic oligonucleotide
cgcagucaguuugcagcag

SEQ ID NO: 2765436 - RNA, 19 nt, Artificial Sequence
  Description of Artificial Sequence: Synthetic oligonucleotide
gccuaccaugagcagcuuu

SEQ ID NO: 2765437 - RNA, 19 nt, Artificial Sequence
  Description of Artificial Sequence: Synthetic oligonucleotide
cuccaggcgcagucaguuu

SEQ ID NO: 2765438 - RNA, 19 nt, Artificial Sequence
  Description of Artificial Sequence: Synthetic oligonucleotide
ggggugugcuuuagccuua

SEQ ID NO: 2765439 - RNA, 19 nt, Artificial Sequence
  Description of Artificial Sequence: Synthetic oligonucleotide
ccaccggcuccaggcgcag

SEQ ID NO: 2765440 - RNA, 19 nt, Artificial Sequence
  Description of Artificial Sequence: Synthetic oligonucleotide
ccaauccucuggccacaua

SEQ ID NO: 2765441 - RNA, 19 nt, Artificial Sequence
  Description of Artificial Sequence: Synthetic oligonucleotide
ggcuccaggcgcagucagu

SEQ ID NO: 2765442 - RNA, 19 nt, Artificial Sequence
  Description of Artificial Sequence: Synthetic oligonucleotide
ccggcuccaggcgcaguca

SEQ ID NO: 2765443 - RNA, 19 nt, Artificial Sequence
  Description of Artificial Sequence: Synthetic oligonucleotide
ccggagcaccugugugcca

SEQ ID NO: 2765444 - RNA, 19 nt, Artificial Sequence
  Description of Artificial Sequence: Synthetic oligonucleotide
gccaauccucuggccacau

SEQ ID NO: 2765445 - RNA, 19 nt, Artificial Sequence
  Description of Artificial Sequence: Synthetic oligonucleotide
cgggaacgguagccagcuc

SEQ ID NO: 2765446 - RNA, 19 nt, Artificial Sequence
  Description of Artificial Sequence: Synthetic oligonucleotide
caccggcuccaggcgcagu

SEQ ID NO: 2765447 - RNA, 19 nt, Artificial Sequence
  Description of Artificial Sequence: Synthetic oligonucleotide
aauggcuaaauuuuagugc

SEQ ID NO: 2765448 - RNA, 19 nt, Artificial Sequence
  Description of Artificial Sequence: Synthetic oligonucleotide
aauucuccccuuuauagcc

SEQ ID NO: 2765449 - RNA, 19 nt, Artificial Sequence
  Description of Artificial Sequence: Synthetic oligonucleotide
gaagacauuguucagauag

SEQ ID NO: 2765450 - RNA, 19 nt, Artificial Sequence
  Description of Artificial Sequence: Synthetic oligonucleotide
aaaauucuccccuuuauag

SEQ ID NO: 2765451 - RNA, 19 nt, Artificial Sequence
  Description of Artificial Sequence: Synthetic oligonucleotide
aauuauaauuuacagauua

SEQ ID NO: 2765452 - RNA, 19 nt, Artificial Sequence
  Description of Artificial Sequence: Synthetic oligonucleotide
uuauuuucagcuuuucucg

SEQ ID NO: 2765453 - RNA, 19 nt, Artificial Sequence
  Description of Artificial Sequence: Synthetic oligonucleotide
aagccaauugaacaaacac

SEQ ID NO: 2765454 - RNA, 19 nt, Artificial Sequence
  Description of Artificial Sequence: Synthetic oligonucleotide
auggcuaaauuuuagugcc

SEQ ID NO: 2765455 - RNA, 19 nt, Artificial Sequence
  Description of Artificial Sequence: Synthetic oligonucleotide
aaauucuccccuuuauagc

SEQ ID NO: 2765456 - RNA, 19 nt, Artificial Sequence
  Description of Artificial Sequence: Synthetic oligonucleotide
aaacugaagacauuguuca

SEQ ID NO: 2765457 - RNA, 19 nt, Artificial Sequence
  Description of Artificial Sequence: Synthetic oligonucleotide
ugcuucuucaggaacaugg

SEQ ID NO: 2765458 - RNA, 19 nt, Artificial Sequence
  Description of Artificial Sequence: Synthetic oligonucleotide
uuugcaauuauaauuuaca

SEQ ID NO: 2765459 - RNA, 19 nt, Artificial Sequence
  Description of Artificial Sequence: Synthetic oligonucleotide
uauucaacaagccaauuga

SEQ ID NO: 2765460 - RNA, 19 nt, Artificial Sequence
  Description of Artificial Sequence: Synthetic oligonucleotide
ugcauauuuauuuucagcu

SEQ ID NO: 2765461 - RNA, 19 nt, Artificial Sequence
  Description of Artificial Sequence: Synthetic oligonucleotide
uuauuuugcaauuauaauu

SEQ ID NO: 2765462 - RNA, 19 nt, Artificial Sequence
  Description of Artificial Sequence: Synthetic oligonucleotide
uauuuugcaauuauaauuu

SEQ ID NO: 2765463 - RNA, 19 nt, Artificial Sequence
  Description of Artificial Sequence: Synthetic oligonucleotide
gaagagacaacucgcaccg

SEQ ID NO: 2765464 - RNA, 19 nt, Artificial Sequence
  Description of Artificial Sequence: Synthetic oligonucleotide
aguucuaugcauuuucuuc

SEQ ID NO: 2765465 - RNA, 19 nt, Artificial Sequence
  Description of Artificial Sequence: Synthetic oligonucleotide
ucaacaagccaauugaaca

SEQ ID NO: 2765466 - RNA, 19 nt, Artificial Sequence
  Description of Artificial Sequence: Synthetic oligonucleotide
aacacaucuauccaaauuu

SEQ ID NO: 2765467 - RNA, 19 nt, Artificial Sequence
  Description of Artificial Sequence: Synthetic oligonucleotide
uuaacuaaaugccuauuca

SEQ ID NO: 2765468 - RNA, 19 nt, Artificial Sequence
  Description of Artificial Sequence: Synthetic oligonucleotide
aagaguuugugacaaaggu

SEQ ID NO: 2765469 - RNA, 19 nt, Artificial Sequence
  Description of Artificial Sequence: Synthetic oligonucleotide
uuuucagagucuuuagggg

SEQ ID NO: 2765470 - RNA, 19 nt, Artificial Sequence
  Description of Artificial Sequence: Synthetic oligonucleotide
accauguucacacaggaag

SEQ ID NO: 2765471 - RNA, 19 nt, Artificial Sequence
  Description of Artificial Sequence: Synthetic oligonucleotide
acauuguucagauaguucu

SEQ ID NO: 2765472 - RNA, 19 nt, Artificial Sequence
  Description of Artificial Sequence: Synthetic oligonucleotide
ucgacgaacacgaugaaga

SEQ ID NO: 2765473 - RNA, 19 nt, Artificial Sequence
  Description of Artificial Sequence: Synthetic oligonucleotide
ugaagaauucuccaaugcc

SEQ ID NO: 2765474 - RNA, 19 nt, Artificial Sequence
  Description of Artificial Sequence: Synthetic oligonucleotide
accuaaguaaacugaagac

SEQ ID NO: 2765475 - RNA, 19 nt, Artificial Sequence
  Description of Artificial Sequence: Synthetic oligonucleotide
uuuugaauggcuaaauuuu

SEQ ID NO: 2765476 - RNA, 19 nt, Artificial Sequence
  Description of Artificial Sequence: Synthetic oligonucleotide
aacuaaaugccuauucaac

SEQ ID NO: 2765477 - RNA, 19 nt, Artificial Sequence
  Description of Artificial Sequence: Synthetic oligonucleotide
uuugugacaaagguggagg

SEQ ID NO: 2765478 - RNA, 19 nt, Artificial Sequence
  Description of Artificial Sequence: Synthetic oligonucleotide
uguucagauaguucuaugc

SEQ ID NO: 2765479 - RNA, 19 nt, Artificial Sequence
  Description of Artificial Sequence: Synthetic oligonucleotide
aaaugccuauucaacaagc

SEQ ID NO: 2765480 - RNA, 19 nt, Artificial Sequence
  Description of Artificial Sequence: Synthetic oligonucleotide
acaacucgcaccgacaucc

SEQ ID NO: 2765481 - RNA, 19 nt, Artificial Sequence
  Description of Artificial Sequence: Synthetic oligonucleotide
acguagucugcuuuggucc

SEQ ID NO: 2765482 - RNA, 19 nt, Artificial Sequence
  Description of Artificial Sequence: Synthetic oligonucleotide
gaauggcuaaauuuuagug

SEQ ID NO: 2765483 - RNA, 19 nt, Artificial Sequence
  Description of Artificial Sequence: Synthetic oligonucleotide
uugcaauuauaauuuacag

SEQ ID NO: 2765484 - RNA, 19 nt, Artificial Sequence
  Description of Artificial Sequence: Synthetic oligonucleotide
uuaggggacagccugaaga

SEQ ID NO: 2765485 - RNA, 19 nt, Artificial Sequence
  Description of Artificial Sequence: Synthetic oligonucleotide
ugcaauuauaauuuacaga

SEQ ID NO: 2765486 - RNA, 19 nt, Artificial Sequence
  Description of Artificial Sequence: Synthetic oligonucleotide
uaaacugaagacauuguuc

SEQ ID NO: 2765487 - RNA, 19 nt, Artificial Sequence
  Description of Artificial Sequence: Synthetic oligonucleotide
uucucgacgaacacgauga

SEQ ID NO: 2765488 - RNA, 19 nt, Artificial Sequence
  Description of Artificial Sequence: Synthetic oligonucleotide
aacguagucugcuuugguc

SEQ ID NO: 2765489 - RNA, 19 nt, Artificial Sequence
  Description of Artificial Sequence: Synthetic oligonucleotide
uaccuaaguaaacugaaga

SEQ ID NO: 2765490 - RNA, 19 nt, Artificial Sequence
  Description of Artificial Sequence: Synthetic oligonucleotide
uuuucagcuuuucucgacg

SEQ ID NO: 2765491 - RNA, 19 nt, Artificial Sequence
  Description of Artificial Sequence: Synthetic oligonucleotide
uguucacacaggaagagac

SEQ ID NO: 2765492 - RNA, 19 nt, Artificial Sequence
  Description of Artificial Sequence: Synthetic oligonucleotide
aucuauccaaauuugcauc

SEQ ID NO: 2765493 - RNA, 19 nt, Artificial Sequence
  Description of Artificial Sequence: Synthetic oligonucleotide
aaugccuauucaacaagcc

SEQ ID NO: 2765494 - RNA, 19 nt, Artificial Sequence
  Description of Artificial Sequence: Synthetic oligonucleotide
uuugcuguuccuaagccac

SEQ ID NO: 2765495 - RNA, 19 nt, Artificial Sequence
  Description of Artificial Sequence: Synthetic oligonucleotide
aguauaccuaaguaaacug

SEQ ID NO: 2765496 - RNA, 19 nt, Artificial Sequence
  Description of Artificial Sequence: Synthetic oligonucleotide
ucuauccaaauuugcaucc

SEQ ID NO: 2765497 - RNA, 19 nt, Artificial Sequence
  Description of Artificial Sequence: Synthetic oligonucleotide
uuuugcaauuauaauuuac

SEQ ID NO: 2765498 - RNA, 19 nt, Artificial Sequence
  Description of Artificial Sequence: Synthetic oligonucleotide
acuaaaugccuauucaaca

SEQ ID NO: 2765499 - RNA, 19 nt, Artificial Sequence
  Description of Artificial Sequence: Synthetic oligonucleotide
aaacuggauucccuccugc

SEQ ID NO: 2765500 - RNA, 19 nt, Artificial Sequence
  Description of Artificial Sequence: Synthetic oligonucleotide
uaaaugccuauucaacaag

SEQ ID NO: 2765501 - RNA, 19 nt, Artificial Sequence
  Description of Artificial Sequence: Synthetic oligonucleotide
uucuucaggaacaugguuc

SEQ ID NO: 2765502 - RNA, 19 nt, Artificial Sequence
  Description of Artificial Sequence: Synthetic oligonucleotide
uugaauggcuaaauuuuag

SEQ ID NO: 2765503 - RNA, 19 nt, Artificial Sequence
  Description of Artificial Sequence: Synthetic oligonucleotide
gauaguucuaugcauuuuc

SEQ ID NO: 2765504 - RNA, 19 nt, Artificial Sequence
  Description of Artificial Sequence: Synthetic oligonucleotide
uuugcaucccaguauaccu

SEQ ID NO: 2765505 - RNA, 19 nt, Artificial Sequence
  Description of Artificial Sequence: Synthetic oligonucleotide
ugcauuuucuucaucugug

SEQ ID NO: 2765506 - RNA, 19 nt, Artificial Sequence
  Description of Artificial Sequence: Synthetic oligonucleotide
gagccaagcaccuuccugg

SEQ ID NO: 2765507 - RNA, 19 nt, Artificial Sequence
  Description of Artificial Sequence: Synthetic oligonucleotide
aaauuugcaucccaguaua

SEQ ID NO: 2765508 - RNA, 19 nt, Artificial Sequence
  Description of Artificial Sequence: Synthetic oligonucleotide
cacaggaagagacaacucg

SEQ ID NO: 2765509 - RNA, 19 nt, Artificial Sequence
  Description of Artificial Sequence: Synthetic oligonucleotide
ucuguaggcucccggaacg

SEQ ID NO: 2765510 - RNA, 19 nt, Artificial Sequence
  Description of Artificial Sequence: Synthetic oligonucleotide
ugaagaguuugugacaaag

SEQ ID NO: 2765511 - RNA, 19 nt, Artificial Sequence
  Description of Artificial Sequence: Synthetic oligonucleotide
ugugugaucagguugcaaa

SEQ ID NO: 2765512 - RNA, 19 nt, Artificial Sequence
  Description of Artificial Sequence: Synthetic oligonucleotide
ugccuauucaacaagccaa

SEQ ID NO: 2765513 - RNA, 19 nt, Artificial Sequence
  Description of Artificial Sequence: Synthetic oligonucleotide
uucaacaagccaauugaac

SEQ ID NO: 2765514 - RNA, 19 nt, Artificial Sequence
  Description of Artificial Sequence: Synthetic oligonucleotide
uuucagagucuuuagggga

SEQ ID NO: 2765515 - RNA, 19 nt, Artificial Sequence
  Description of Artificial Sequence: Synthetic oligonucleotide
cuuaacuaaaugccuauuc

SEQ ID NO: 2765516 - RNA, 19 nt, Artificial Sequence
  Description of Artificial Sequence: Synthetic oligonucleotide
auuugcaucccaguauacc

SEQ ID NO: 2765517 - RNA, 19 nt, Artificial Sequence
  Description of Artificial Sequence: Synthetic oligonucleotide
ucugcuuugguccgcacca

SEQ ID NO: 2765518 - RNA, 19 nt, Artificial Sequence
  Description of Artificial Sequence: Synthetic oligonucleotide
cuauucaacaagccaauug

SEQ ID NO: 2765519 - RNA, 19 nt, Artificial Sequence
  Description of Artificial Sequence: Synthetic oligonucleotide
gaaaccaccacuuuucugu

SEQ ID NO: 2765520 - RNA, 19 nt, Artificial Sequence
  Description of Artificial Sequence: Synthetic oligonucleotide
auuuucagcuuuucucgac

SEQ ID NO: 2765521 - RNA, 19 nt, Artificial Sequence
  Description of Artificial Sequence: Synthetic oligonucleotide
agagacaacucgcaccgac

SEQ ID NO: 2765522 - RNA, 19 nt, Artificial Sequence
  Description of Artificial Sequence: Synthetic oligonucleotide
uuauaauuuacagauuaua

SEQ ID NO: 2765523 - RNA, 19 nt, Artificial Sequence
  Description of Artificial Sequence: Synthetic oligonucleotide
uaacuaaaugccuauucaa

SEQ ID NO: 2765524 - RNA, 19 nt, Artificial Sequence
  Description of Artificial Sequence: Synthetic oligonucleotide
ucuuugcuguuccuaagcc

SEQ ID NO: 2765525 - RNA, 19 nt, Artificial Sequence
  Description of Artificial Sequence: Synthetic oligonucleotide
ugaauggcuaaauuuuagu

SEQ ID NO: 2765526 - RNA, 19 nt, Artificial Sequence
  Description of Artificial Sequence: Synthetic oligonucleotide
aaacacaucuauccaaauu

SEQ ID NO: 2765527 - RNA, 19 nt, Artificial Sequence
  Description of Artificial Sequence: Synthetic oligonucleotide
uuugccacuuuggaguugg

SEQ ID NO: 2765528 - RNA, 19 nt, Artificial Sequence
  Description of Artificial Sequence: Synthetic oligonucleotide
gaagaguuugugacaaagg

SEQ ID NO: 2765529 - RNA, 19 nt, Artificial Sequence
  Description of Artificial Sequence: Synthetic oligonucleotide
uuucucgacgaacacgaug

SEQ ID NO: 2765530 - RNA, 19 nt, Artificial Sequence
  Description of Artificial Sequence: Synthetic oligonucleotide
acaggaagagacaacucgc

SEQ ID NO: 2765531 - RNA, 19 nt, Artificial Sequence
  Description of Artificial Sequence: Synthetic oligonucleotide
uccugcauauuuauuuuca

SEQ ID NO: 2765532 - RNA, 19 nt, Artificial Sequence
  Description of Artificial Sequence: Synthetic oligonucleotide
aucugugugaucagguugc

SEQ ID NO: 2765533 - RNA, 19 nt, Artificial Sequence
  Description of Artificial Sequence: Synthetic oligonucleotide
auugaacaaacacaucuau

SEQ ID NO: 2765534 - RNA, 19 nt, Artificial Sequence
  Description of Artificial Sequence: Synthetic oligonucleotide
aaggacaugguuuucucuu

SEQ ID NO: 2765535 - RNA, 19 nt, Artificial Sequence
  Description of Artificial Sequence: Synthetic oligonucleotide
uuugaauggcuaaauuuua

SEQ ID NO: 2765536 - RNA, 19 nt, Artificial Sequence
  Description of Artificial Sequence: Synthetic oligonucleotide
agccaguugcuuuugaaug

SEQ ID NO: 2765537 - RNA, 19 nt, Artificial Sequence
  Description of Artificial Sequence: Synthetic oligonucleotide
cuuuucucgacgaacacga

SEQ ID NO: 2765538 - RNA, 19 nt, Artificial Sequence
  Description of Artificial Sequence: Synthetic oligonucleotide
cugcauauuuauuuucagc

SEQ ID NO: 2765539 - RNA, 19 nt, Artificial Sequence
  Description of Artificial Sequence: Synthetic oligonucleotide
cugaagaauucuccaaugc

SEQ ID NO: 2765540 - RNA, 19 nt, Artificial Sequence
  Description of Artificial Sequence: Synthetic oligonucleotide
aaaggacaugguuuucucu

SEQ ID NO: 2765541 - RNA, 19 nt, Artificial Sequence
  Description of Artificial Sequence: Synthetic oligonucleotide
agguggaggagccaagcac

SEQ ID NO: 2765542 - RNA, 19 nt, Artificial Sequence
  Description of Artificial Sequence: Synthetic oligonucleotide
acagccugaagaauucucc

SEQ ID NO: 2765543 - RNA, 19 nt, Artificial Sequence
  Description of Artificial Sequence: Synthetic oligonucleotide
cagguugcaaaggacaugg

SEQ ID NO: 2765544 - RNA, 19 nt, Artificial Sequence
  Description of Artificial Sequence: Synthetic oligonucleotide
gagucuuuaggggacagcc

SEQ ID NO: 2765545 - RNA, 19 nt, Artificial Sequence
  Description of Artificial Sequence: Synthetic oligonucleotide
acacaaacuggauucccuc

SEQ ID NO: 2765546 - RNA, 19 nt, Artificial Sequence
  Description of Artificial Sequence: Synthetic oligonucleotide
caauugaacaaacacaucu

SEQ ID NO: 2765547 - RNA, 19 nt, Artificial Sequence
  Description of Artificial Sequence: Synthetic oligonucleotide
aggaagagacaacucgcac

SEQ ID NO: 2765548 - RNA, 19 nt, Artificial Sequence
  Description of Artificial Sequence: Synthetic oligonucleotide
uugaacaaacacaucuauc

SEQ ID NO: 2765549 - RNA, 19 nt, Artificial Sequence
  Description of Artificial Sequence: Synthetic oligonucleotide
uuuucuguaggcucccgga

SEQ ID NO: 2765550 - RNA, 19 nt, Artificial Sequence
  Description of Artificial Sequence: Synthetic oligonucleotide
ucagauaguucuaugcauu

SEQ ID NO: 2765551 - RNA, 19 nt, Artificial Sequence
  Description of Artificial Sequence: Synthetic oligonucleotide
aacugaagacauuguucag

SEQ ID NO: 2765552 - RNA, 19 nt, Artificial Sequence
  Description of Artificial Sequence: Synthetic oligonucleotide
guucuaugcauuuucuuca

SEQ ID NO: 2765553 - RNA, 19 nt, Artificial Sequence
  Description of Artificial Sequence: Synthetic oligonucleotide
guuccuaagccacugcacc

SEQ ID NO: 2765554 - RNA, 19 nt, Artificial Sequence
  Description of Artificial Sequence: Synthetic oligonucleotide
ugugaucagguugcaaagg

SEQ ID NO: 2765555 - RNA, 19 nt, Artificial Sequence
  Description of Artificial Sequence: Synthetic oligonucleotide
uucagauaguucuaugcau

SEQ ID NO: 2765556 - RNA, 19 nt, Artificial Sequence
  Description of Artificial Sequence: Synthetic oligonucleotide
cacaucuauccaaauuugc

SEQ ID NO: 2765557 - RNA, 19 nt, Artificial Sequence
  Description of Artificial Sequence: Synthetic oligonucleotide
uuuauagccaguugcuuuu

SEQ ID NO: 2765558 - RNA, 19 nt, Artificial Sequence
  Description of Artificial Sequence: Synthetic oligonucleotide
uucaucugugugaucaggu

SEQ ID NO: 2765559 - RNA, 19 nt, Artificial Sequence
  Description of Artificial Sequence: Synthetic oligonucleotide
uauccaaauuugcauccca

SEQ ID NO: 2765560 - RNA, 19 nt, Artificial Sequence
  Description of Artificial Sequence: Synthetic oligonucleotide
ugacaaagguggaggagcc

SEQ ID NO: 2765561 - RNA, 19 nt, Artificial Sequence
  Description of Artificial Sequence: Synthetic oligonucleotide
uucagagucuuuaggggac

SEQ ID NO: 2765562 - RNA, 19 nt, Artificial Sequence
  Description of Artificial Sequence: Synthetic oligonucleotide
agccacugcacccugcuuc

SEQ ID NO: 2765563 - RNA, 19 nt, Artificial Sequence
  Description of Artificial Sequence: Synthetic oligonucleotide
gccacuuuggaguugggcg

SEQ ID NO: 2765564 - RNA, 19 nt, Artificial Sequence
  Description of Artificial Sequence: Synthetic oligonucleotide
ucccaguauaccuaaguaa

SEQ ID NO: 2765565 - RNA, 19 nt, Artificial Sequence
  Description of Artificial Sequence: Synthetic oligonucleotide
gucuuuaggggacagccug

SEQ ID NO: 2765566 - RNA, 19 nt, Artificial Sequence
  Description of Artificial Sequence: Synthetic oligonucleotide
guucagauaguucuaugca

SEQ ID NO: 2765567 - RNA, 19 nt, Artificial Sequence
  Description of Artificial Sequence: Synthetic oligonucleotide
aauuugcaucccaguauac

SEQ ID NO: 2765568 - RNA, 19 nt, Artificial Sequence
  Description of Artificial Sequence: Synthetic oligonucleotide
gaugaagaguuugugacaa

SEQ ID NO: 2765569 - RNA, 19 nt, Artificial Sequence
  Description of Artificial Sequence: Synthetic oligonucleotide
uguuccuaagccacugcac

SEQ ID NO: 2765570 - RNA, 19 nt, Artificial Sequence
  Description of Artificial Sequence: Synthetic oligonucleotide
uugguccgcaccauguuca

SEQ ID NO: 2765571 - RNA, 19 nt, Artificial Sequence
  Description of Artificial Sequence: Synthetic oligonucleotide
ggaagagacaacucgcacc

SEQ ID NO: 2765572 - RNA, 19 nt, Artificial Sequence
  Description of Artificial Sequence: Synthetic oligonucleotide
uccaaauuugcaucccagu

SEQ ID NO: 2765573 - RNA, 19 nt, Artificial Sequence
  Description of Artificial Sequence: Synthetic oligonucleotide
ugaucagguugcaaaggac

SEQ ID NO: 2765574 - RNA, 19 nt, Artificial Sequence
  Description of Artificial Sequence: Synthetic oligonucleotide
aauugaacaaacacaucua

SEQ ID NO: 2765575 - RNA, 19 nt, Artificial Sequence
  Description of Artificial Sequence: Synthetic oligonucleotide
augcauuuucuucaucugu

SEQ ID NO: 2765576 - RNA, 19 nt, Artificial Sequence
  Description of Artificial Sequence: Synthetic oligonucleotide
gaucagguugcaaaggaca

SEQ ID NO: 2765577 - RNA, 19 nt, Artificial Sequence
  Description of Artificial Sequence: Synthetic oligonucleotide
caucugugugaucagguug

SEQ ID NO: 2765578 - RNA, 19 nt, Artificial Sequence
  Description of Artificial Sequence: Synthetic oligonucleotide
guuuucucuuugcuguucc

SEQ ID NO: 2765579 - RNA, 19 nt, Artificial Sequence
  Description of Artificial Sequence: Synthetic oligonucleotide
cuaaguaaacugaagacau

SEQ ID NO: 2765580 - RNA, 19 nt, Artificial Sequence
  Description of Artificial Sequence: Synthetic oligonucleotide
aggaacaugguucucuuuu

SEQ ID NO: 2765581 - RNA, 19 nt, Artificial Sequence
  Description of Artificial Sequence: Synthetic oligonucleotide
aacacgaugaagaguuugu

SEQ ID NO: 2765582 - RNA, 19 nt, Artificial Sequence
  Description of Artificial Sequence: Synthetic oligonucleotide
gugacaaagguggaggagc

SEQ ID NO: 2765583 - RNA, 19 nt, Artificial Sequence
  Description of Artificial Sequence: Synthetic oligonucleotide
augccuauucaacaagcca

SEQ ID NO: 2765584 - RNA, 19 nt, Artificial Sequence
  Description of Artificial Sequence: Synthetic oligonucleotide
uucacacaggaagagacaa

SEQ ID NO: 2765585 - RNA, 19 nt, Artificial Sequence
  Description of Artificial Sequence: Synthetic oligonucleotide
cucuuugcuguuccuaagc

SEQ ID NO: 2765586 - RNA, 19 nt, Artificial Sequence
  Description of Artificial Sequence: Synthetic oligonucleotide
cuaaaugccuauucaacaa

SEQ ID NO: 2765587 - RNA, 19 nt, Artificial Sequence
  Description of Artificial Sequence: Synthetic oligonucleotide
uucaggaacaugguucucu

SEQ ID NO: 2765588 - RNA, 19 nt, Artificial Sequence
  Description of Artificial Sequence: Synthetic oligonucleotide
cacaaacuggauucccucc

SEQ ID NO: 2765589 - RNA, 19 nt, Artificial Sequence
  Description of Artificial Sequence: Synthetic oligonucleotide
acaucuauccaaauuugca

SEQ ID NO: 2765590 - RNA, 19 nt, Artificial Sequence
  Description of Artificial Sequence: Synthetic oligonucleotide
agcuuuucucgacgaacac

SEQ ID NO: 2765591 - RNA, 19 nt, Artificial Sequence
  Description of Artificial Sequence: Synthetic oligonucleotide
gacaugguuuucucuuugc

SEQ ID NO: 2765592 - RNA, 19 nt, Artificial Sequence
  Description of Artificial Sequence: Synthetic oligonucleotide
agaguuugugacaaaggug

SEQ ID NO: 2765593 - RNA, 19 nt, Artificial Sequence
  Description of Artificial Sequence: Synthetic oligonucleotide
cuuuucuguaggcucccgg

SEQ ID NO: 2765594 - RNA, 19 nt, Artificial Sequence
  Description of Artificial Sequence: Synthetic oligonucleotide
ucgagaaaccaccacuuuu

SEQ ID NO: 2765595 - RNA, 19 nt, Artificial Sequence
  Description of Artificial Sequence: Synthetic oligonucleotide
acugaagacauuguucaga

SEQ ID NO: 2765596 - RNA, 19 nt, Artificial Sequence
  Description of Artificial Sequence: Synthetic oligonucleotide
acgaacacgaugaagaguu

SEQ ID NO: 2765597 - RNA, 19 nt, Artificial Sequence
  Description of Artificial Sequence: Synthetic oligonucleotide
uucucuuugcuguuccuaa

SEQ ID NO: 2765598 - RNA, 19 nt, Artificial Sequence
  Description of Artificial Sequence: Synthetic oligonucleotide
gaagaauucuccaaugccu

SEQ ID NO: 2765599 - RNA, 19 nt, Artificial Sequence
  Description of Artificial Sequence: Synthetic oligonucleotide
ucagcuuuucucgacgaac

SEQ ID NO: 2765600 - RNA, 19 nt, Artificial Sequence
  Description of Artificial Sequence: Synthetic oligonucleotide
aacuggauucccuccugca

SEQ ID NO: 2765601 - RNA, 19 nt, Artificial Sequence
  Description of Artificial Sequence: Synthetic oligonucleotide
ugugacaaagguggaggag

SEQ ID NO: 2765602 - RNA, 19 nt, Artificial Sequence
  Description of Artificial Sequence: Synthetic oligonucleotide
uuccuaagccacugcaccc

SEQ ID NO: 2765603 - RNA, 19 nt, Artificial Sequence
  Description of Artificial Sequence: Synthetic oligonucleotide
uuucagcuuuucucgacga

SEQ ID NO: 2765604 - RNA, 19 nt, Artificial Sequence
  Description of Artificial Sequence: Synthetic oligonucleotide
gaacacgaugaagaguuug

SEQ ID NO: 2765605 - RNA, 19 nt, Artificial Sequence
  Description of Artificial Sequence: Synthetic oligonucleotide
uuugguccgcaccauguuc

SEQ ID NO: 2765606 - RNA, 19 nt, Artificial Sequence
  Description of Artificial Sequence: Synthetic oligonucleotide
ugcacccugcuucuucagg

SEQ ID NO: 2765607 - RNA, 19 nt, Artificial Sequence
  Description of Artificial Sequence: Synthetic oligonucleotide
ucucuuugcuguuccuaag

SEQ ID NO: 2765608 - RNA, 19 nt, Artificial Sequence
  Description of Artificial Sequence: Synthetic oligonucleotide
agccaauugaacaaacaca

SEQ ID NO: 2765609 - RNA, 19 nt, Artificial Sequence
  Description of Artificial Sequence: Synthetic oligonucleotide
uuguucagauaguucuaug

SEQ ID NO: 2765610 - RNA, 19 nt, Artificial Sequence
  Description of Artificial Sequence: Synthetic oligonucleotide
uuuggaguugggcgcacac

SEQ ID NO: 2765611 - RNA, 19 nt, Artificial Sequence
  Description of Artificial Sequence: Synthetic oligonucleotide
ucuucaucugugugaucag

SEQ ID NO: 2765612 - RNA, 19 nt, Artificial Sequence
  Description of Artificial Sequence: Synthetic oligonucleotide
agaaaccaccacuuuucug

SEQ ID NO: 2765613 - RNA, 19 nt, Artificial Sequence
  Description of Artificial Sequence: Synthetic oligonucleotide
uucuguaggcucccggaac

SEQ ID NO: 2765614 - RNA, 19 nt, Artificial Sequence
  Description of Artificial Sequence: Synthetic oligonucleotide
uugugacaaagguggagga

SEQ ID NO: 2765615 - RNA, 19 nt, Artificial Sequence
  Description of Artificial Sequence: Synthetic oligonucleotide
ucuuuaggggacagccuga

SEQ ID NO: 2765616 - RNA, 19 nt, Artificial Sequence
  Description of Artificial Sequence: Synthetic oligonucleotide
acaagccaauugaacaaac

SEQ ID NO: 2765617 - RNA, 19 nt, Artificial Sequence
  Description of Artificial Sequence: Synthetic oligonucleotide
guugcuuuugaauggcuaa

SEQ ID NO: 2765618 - RNA, 19 nt, Artificial Sequence
  Description of Artificial Sequence: Synthetic oligonucleotide
aacaagccaauugaacaaa

SEQ ID NO: 2765619 - RNA, 19 nt, Artificial Sequence
  Description of Artificial Sequence: Synthetic oligonucleotide
uaagccacugcacccugcu

SEQ ID NO: 2765620 - RNA, 19 nt, Artificial Sequence
  Description of Artificial Sequence: Synthetic oligonucleotide
uugcaaaggacaugguuuu

SEQ ID NO: 2765621 - RNA, 19 nt, Artificial Sequence
  Description of Artificial Sequence: Synthetic oligonucleotide
cauguucacacaggaagag

SEQ ID NO: 2765622 - RNA, 19 nt, Artificial Sequence
  Description of Artificial Sequence: Synthetic oligonucleotide
aagaauucuccaaugccuu

SEQ ID NO: 2765623 - RNA, 19 nt, Artificial Sequence
  Description of Artificial Sequence: Synthetic oligonucleotide
guuugugacaaagguggag

SEQ ID NO: 2765624 - RNA, 19 nt, Artificial Sequence
  Description of Artificial Sequence: Synthetic oligonucleotide
guccgcaccauguucacac

SEQ ID NO: 2765625 - RNA, 19 nt, Artificial Sequence
  Description of Artificial Sequence: Synthetic oligonucleotide
uuucuguaggcucccggaa

SEQ ID NO: 2765626 - RNA, 19 nt, Artificial Sequence
  Description of Artificial Sequence: Synthetic oligonucleotide
uuuaggggacagccugaag

SEQ ID NO: 2765627 - RNA, 19 nt, Artificial Sequence
  Description of Artificial Sequence: Synthetic oligonucleotide
cuuuugaauggcuaaauuu

SEQ ID NO: 2765628 - RNA, 19 nt, Artificial Sequence
  Description of Artificial Sequence: Synthetic oligonucleotide
uggcuaaauuuuagugccc

SEQ ID NO: 2765629 - RNA, 19 nt, Artificial Sequence
  Description of Artificial Sequence: Synthetic oligonucleotide
uucuccccuuuauagccag

SEQ ID NO: 2765630 - RNA, 19 nt, Artificial Sequence
  Description of Artificial Sequence: Synthetic oligonucleotide
uauagccaguugcuuuuga

SEQ ID NO: 2765631 - RNA, 19 nt, Artificial Sequence
  Description of Artificial Sequence: Synthetic oligonucleotide
auaccuaaguaaacugaag

SEQ ID NO: 2765632 - RNA, 19 nt, Artificial Sequence
  Description of Artificial Sequence: Synthetic oligonucleotide
uaggggacagccugaagaa

SEQ ID NO: 2765633 - RNA, 19 nt, Artificial Sequence
  Description of Artificial Sequence: Synthetic oligonucleotide
ugggcgcacacaaacugga

SEQ ID NO: 2765634 - RNA, 19 nt, Artificial Sequence
  Description of Artificial Sequence: Synthetic oligonucleotide
uagccaguugcuuuugaau

SEQ ID NO: 2765635 - RNA, 19 nt, Artificial Sequence
  Description of Artificial Sequence: Synthetic oligonucleotide
gugaucagguugcaaagga

SEQ ID NO: 2765636 - RNA, 19 nt, Artificial Sequence
  Description of Artificial Sequence: Synthetic oligonucleotide
uaaguaaacugaagacauu

SEQ ID NO: 2765637 - RNA, 19 nt, Artificial Sequence
  Description of Artificial Sequence: Synthetic oligonucleotide
gccaguugcuuuugaaugg

SEQ ID NO: 2765638 - RNA, 19 nt, Artificial Sequence
  Description of Artificial Sequence: Synthetic oligonucleotide
gacauuguucagauaguuc

SEQ ID NO: 2765639 - RNA, 19 nt, Artificial Sequence
  Description of Artificial Sequence: Synthetic oligonucleotide
agagucuuuaggggacagc

SEQ ID NO: 2765640 - RNA, 19 nt, Artificial Sequence
  Description of Artificial Sequence: Synthetic oligonucleotide
caaaggacaugguuuucuc

SEQ ID NO: 2765641 - RNA, 19 nt, Artificial Sequence
  Description of Artificial Sequence: Synthetic oligonucleotide
aagacauuguucagauagu

SEQ ID NO: 2765642 - RNA, 19 nt, Artificial Sequence
  Description of Artificial Sequence: Synthetic oligonucleotide
auuuugcaauuauaauuua

SEQ ID NO: 2765643 - RNA, 19 nt, Artificial Sequence
  Description of Artificial Sequence: Synthetic oligonucleotide
acccugcuucuucaggaac

SEQ ID NO: 2765644 - RNA, 19 nt, Artificial Sequence
  Description of Artificial Sequence: Synthetic oligonucleotide
agacaacucgcaccgacau

SEQ ID NO: 2765645 - RNA, 19 nt, Artificial Sequence
  Description of Artificial Sequence: Synthetic oligonucleotide
caacaagccaauugaacaa

SEQ ID NO: 2765646 - RNA, 19 nt, Artificial Sequence
  Description of Artificial Sequence: Synthetic oligonucleotide
cacgaugaagaguuuguga

SEQ ID NO: 2765647 - RNA, 19 nt, Artificial Sequence
  Description of Artificial Sequence: Synthetic oligonucleotide
ucuaugcauuuucuucauc

SEQ ID NO: 2765648 - RNA, 19 nt, Artificial Sequence
  Description of Artificial Sequence: Synthetic oligonucleotide
uccccuuuauagccaguug

SEQ ID NO: 2765649 - RNA, 19 nt, Artificial Sequence
  Description of Artificial Sequence: Synthetic oligonucleotide
ugcaucccaguauaccuaa

SEQ ID NO: 2765650 - RNA, 19 nt, Artificial Sequence
  Description of Artificial Sequence: Synthetic oligonucleotide
aucccaguauaccuaagua

SEQ ID NO: 2765651 - RNA, 19 nt, Artificial Sequence
  Description of Artificial Sequence: Synthetic oligonucleotide
ucacacaggaagagacaac

SEQ ID NO: 2765652 - RNA, 19 nt, Artificial Sequence
  Description of Artificial Sequence: Synthetic oligonucleotide
acaaacacaucuauccaaa

SEQ ID NO: 2765653 - RNA, 19 nt, Artificial Sequence
  Description of Artificial Sequence: Synthetic oligonucleotide
uucuaugcauuuucuucau

SEQ ID NO: 2765654 - RNA, 19 nt, Artificial Sequence
  Description of Artificial Sequence: Synthetic oligonucleotide
auagccaguugcuuuugaa

SEQ ID NO: 2765655 - RNA, 19 nt, Artificial Sequence
  Description of Artificial Sequence: Synthetic oligonucleotide
acacaucuauccaaauuug

SEQ ID NO: 2765656 - RNA, 19 nt, Artificial Sequence
  Description of Artificial Sequence: Synthetic oligonucleotide
auaguucuaugcauuuucu

SEQ ID NO: 2765657 - RNA, 19 nt, Artificial Sequence
  Description of Artificial Sequence: Synthetic oligonucleotide
cuauccaaauuugcauccc

SEQ ID NO: 2765658 - RNA, 19 nt, Artificial Sequence
  Description of Artificial Sequence: Synthetic oligonucleotide
cuuugcuguuccuaagcca

SEQ ID NO: 2765659 - RNA, 19 nt, Artificial Sequence
  Description of Artificial Sequence: Synthetic oligonucleotide
ucagguugcaaaggacaug

SEQ ID NO: 2765660 - RNA, 19 nt, Artificial Sequence
  Description of Artificial Sequence: Synthetic oligonucleotide
uuuucucuuugcuguuccu

SEQ ID NO: 2765661 - RNA, 19 nt, Artificial Sequence
  Description of Artificial Sequence: Synthetic oligonucleotide
aaaccaccacuuuucugua

SEQ ID NO: 2765662 - RNA, 19 nt, Artificial Sequence
  Description of Artificial Sequence: Synthetic oligonucleotide
agccaagcaccuuccuggg

SEQ ID NO: 2765663 - RNA, 19 nt, Artificial Sequence
  Description of Artificial Sequence: Synthetic oligonucleotide
ucaucugugugaucagguu

SEQ ID NO: 2765664 - RNA, 19 nt, Artificial Sequence
  Description of Artificial Sequence: Synthetic oligonucleotide
uaguucuaugcauuuucuu

SEQ ID NO: 2765665 - RNA, 19 nt, Artificial Sequence
  Description of Artificial Sequence: Synthetic oligonucleotide
caagccaauugaacaaaca

SEQ ID NO: 2765666 - RNA, 19 nt, Artificial Sequence
  Description of Artificial Sequence: Synthetic oligonucleotide
cauauuuauuuucagcuuu

SEQ ID NO: 2765667 - RNA, 19 nt, Artificial Sequence
  Description of Artificial Sequence: Synthetic oligonucleotide
uugcaucccaguauaccua

SEQ ID NO: 2765668 - RNA, 19 nt, Artificial Sequence
  Description of Artificial Sequence: Synthetic oligonucleotide
ugcuuugguccgcaccaug

SEQ ID NO: 2765669 - RNA, 19 nt, Artificial Sequence
  Description of Artificial Sequence: Synthetic oligonucleotide
cuccugcauauuuauuuuc

SEQ ID NO: 2765670 - RNA, 19 nt, Artificial Sequence
  Description of Artificial Sequence: Synthetic oligonucleotide
acugcacccugcuucuuca

SEQ ID NO: 2765671 - RNA, 19 nt, Artificial Sequence
  Description of Artificial Sequence: Synthetic oligonucleotide
acaaagguggaggagccaa

SEQ ID NO: 2765672 - RNA, 19 nt, Artificial Sequence
  Description of Artificial Sequence: Synthetic oligonucleotide
ccccuuuauagccaguugc

SEQ ID NO: 2765673 - RNA, 19 nt, Artificial Sequence
  Description of Artificial Sequence: Synthetic oligonucleotide
caaagguggaggagccaag

SEQ ID NO: 2765674 - RNA, 19 nt, Artificial Sequence
  Description of Artificial Sequence: Synthetic oligonucleotide
gcuuuucucgacgaacacg

SEQ ID NO: 2765675 - RNA, 19 nt, Artificial Sequence
  Description of Artificial Sequence: Synthetic oligonucleotide
ugcuuuugaauggcuaaau

SEQ ID NO: 2765676 - RNA, 19 nt, Artificial Sequence
  Description of Artificial Sequence: Synthetic oligonucleotide
uggauucccuccugcauau

SEQ ID NO: 2765677 - RNA, 19 nt, Artificial Sequence
  Description of Artificial Sequence: Synthetic oligonucleotide
ucaggaacaugguucucuu

SEQ ID NO: 2765678 - RNA, 19 nt, Artificial Sequence
  Description of Artificial Sequence: Synthetic oligonucleotide
uucagcuuuucucgacgaa

SEQ ID NO: 2765679 - RNA, 19 nt, Artificial Sequence
  Description of Artificial Sequence: Synthetic oligonucleotide
ggcuaaauuuuagugcccc

SEQ ID NO: 2765680 - RNA, 19 nt, Artificial Sequence
  Description of Artificial Sequence: Synthetic oligonucleotide
cagcuuuucucgacgaaca

SEQ ID NO: 2765681 - RNA, 19 nt, Artificial Sequence
  Description of Artificial Sequence: Synthetic oligonucleotide
guaaacugaagacauuguu

SEQ ID NO: 2765682 - RNA, 19 nt, Artificial Sequence
  Description of Artificial Sequence: Synthetic oligonucleotide
uuucucuuugcuguuccua

SEQ ID NO: 2765683 - RNA, 19 nt, Artificial Sequence
  Description of Artificial Sequence: Synthetic oligonucleotide
ugcuguuccuaagccacug

SEQ ID NO: 2765684 - RNA, 19 nt, Artificial Sequence
  Description of Artificial Sequence: Synthetic oligonucleotide
gucugcuuugguccgcacc

SEQ ID NO: 2765685 - RNA, 19 nt, Artificial Sequence
  Description of Artificial Sequence: Synthetic oligonucleotide
gguggaggagccaagcacc

SEQ ID NO: 2765686 - RNA, 19 nt, Artificial Sequence
  Description of Artificial Sequence: Synthetic oligonucleotide
guugcaaaggacaugguuu

SEQ ID NO: 2765687 - RNA, 19 nt, Artificial Sequence
  Description of Artificial Sequence: Synthetic oligonucleotide
uuauagccaguugcuuuug

SEQ ID NO: 2765688 - RNA, 19 nt, Artificial Sequence
  Description of Artificial Sequence: Synthetic oligonucleotide
agccugaagaauucuccaa

SEQ ID NO: 2765689 - RNA, 19 nt, Artificial Sequence
  Description of Artificial Sequence: Synthetic oligonucleotide
acacgaugaagaguuugug

SEQ ID NO: 2765690 - RNA, 19 nt, Artificial Sequence
  Description of Artificial Sequence: Synthetic oligonucleotide
uugcuuuugaauggcuaaa

SEQ ID NO: 2765691 - RNA, 19 nt, Artificial Sequence
  Description of Artificial Sequence: Synthetic oligonucleotide
agacauuguucagauaguu

SEQ ID NO: 2765692 - RNA, 19 nt, Artificial Sequence
  Description of Artificial Sequence: Synthetic oligonucleotide
uucccuccugcauauuuau

SEQ ID NO: 2765693 - RNA, 19 nt, Artificial Sequence
  Description of Artificial Sequence: Synthetic oligonucleotide
guaggcucccggaacguag

SEQ ID NO: 2765694 - RNA, 19 nt, Artificial Sequence
  Description of Artificial Sequence: Synthetic oligonucleotide
ugccacuuuggaguugggc

SEQ ID NO: 2765695 - RNA, 19 nt, Artificial Sequence
  Description of Artificial Sequence: Synthetic oligonucleotide
caucuauccaaauuugcau

SEQ ID NO: 2765696 - RNA, 19 nt, Artificial Sequence
  Description of Artificial Sequence: Synthetic oligonucleotide
cucgacgaacacgaugaag

SEQ ID NO: 2765697 - RNA, 19 nt, Artificial Sequence
  Description of Artificial Sequence: Synthetic oligonucleotide
uccuaagccacugcacccu

SEQ ID NO: 2765698 - RNA, 19 nt, Artificial Sequence
  Description of Artificial Sequence: Synthetic oligonucleotide
ccugaagaauucuccaaug

SEQ ID NO: 2765699 - RNA, 19 nt, Artificial Sequence
  Description of Artificial Sequence: Synthetic oligonucleotide
acacaggaagagacaacuc

SEQ ID NO: 2765700 - RNA, 19 nt, Artificial Sequence
  Description of Artificial Sequence: Synthetic oligonucleotide
ccugcauauuuauuuucag

SEQ ID NO: 2765701 - RNA, 19 nt, Artificial Sequence
  Description of Artificial Sequence: Synthetic oligonucleotide
caggaagagacaacucgca

SEQ ID NO: 2765702 - RNA, 19 nt, Artificial Sequence
  Description of Artificial Sequence: Synthetic oligonucleotide
gacagccugaagaauucuc

SEQ ID NO: 2765703 - RNA, 19 nt, Artificial Sequence
  Description of Artificial Sequence: Synthetic oligonucleotide
gcgcacacaaacuggauuc

SEQ ID NO: 2765704 - RNA, 19 nt, Artificial Sequence
  Description of Artificial Sequence: Synthetic oligonucleotide
auucaacaagccaauugaa

SEQ ID NO: 2765705 - RNA, 19 nt, Artificial Sequence
  Description of Artificial Sequence: Synthetic oligonucleotide
cuaagccacugcacccugc

SEQ ID NO: 2765706 - RNA, 19 nt, Artificial Sequence
  Description of Artificial Sequence: Synthetic oligonucleotide
caaauuugcaucccaguau

SEQ ID NO: 2765707 - RNA, 19 nt, Artificial Sequence
  Description of Artificial Sequence: Synthetic oligonucleotide
ucagagucuuuaggggaca

SEQ ID NO: 2765708 - RNA, 19 nt, Artificial Sequence
  Description of Artificial Sequence: Synthetic oligonucleotide
cuuuauagccaguugcuuu

SEQ ID NO: 2765709 - RNA, 19 nt, Artificial Sequence
  Description of Artificial Sequence: Synthetic oligonucleotide
uaggcucccggaacguagu

SEQ ID NO: 2765710 - RNA, 19 nt, Artificial Sequence
  Description of Artificial Sequence: Synthetic oligonucleotide
ccacuuuggaguugggcgc

SEQ ID NO: 2765711 - RNA, 19 nt, Artificial Sequence
  Description of Artificial Sequence: Synthetic oligonucleotide
cccaguauaccuaaguaaa

SEQ ID NO: 2765712 - RNA, 19 nt, Artificial Sequence
  Description of Artificial Sequence: Synthetic oligonucleotide
ggaacguagucugcuuugg

SEQ ID NO: 2765713 - RNA, 19 nt, Artificial Sequence
  Description of Artificial Sequence: Synthetic oligonucleotide
cuguuccuaagccacugca

SEQ ID NO: 2765714 - RNA, 19 nt, Artificial Sequence
  Description of Artificial Sequence: Synthetic oligonucleotide
ggaggagccaagcaccuuc

SEQ ID NO: 2765715 - RNA, 19 nt, Artificial Sequence
  Description of Artificial Sequence: Synthetic oligonucleotide
auguucacacaggaagaga

SEQ ID NO: 2765716 - RNA, 19 nt, Artificial Sequence
  Description of Artificial Sequence: Synthetic oligonucleotide
ggagccaagcaccuuccug

SEQ ID NO: 2765717 - RNA, 19 nt, Artificial Sequence
  Description of Artificial Sequence: Synthetic oligonucleotide
aucagguugcaaaggacau

SEQ ID NO: 2765718 - RNA, 19 nt, Artificial Sequence
  Description of Artificial Sequence: Synthetic oligonucleotide
ccaguauaccuaaguaaac

SEQ ID NO: 2765719 - RNA, 19 nt, Artificial Sequence
  Description of Artificial Sequence: Synthetic oligonucleotide
uugcuguuccuaagccacu

SEQ ID NO: 2765720 - RNA, 19 nt, Artificial Sequence
  Description of Artificial Sequence: Synthetic oligonucleotide
cgagaaaccaccacuuuuc

SEQ ID NO: 2765721 - RNA, 19 nt, Artificial Sequence
  Description of Artificial Sequence: Synthetic oligonucleotide
uuggaguugggcgcacaca

SEQ ID NO: 2765722 - RNA, 19 nt, Artificial Sequence
  Description of Artificial Sequence: Synthetic oligonucleotide
cugaagacauuguucagau

SEQ ID NO: 2765723 - RNA, 19 nt, Artificial Sequence
  Description of Artificial Sequence: Synthetic oligonucleotide
ugaagacauuguucagaua

SEQ ID NO: 2765724 - RNA, 19 nt, Artificial Sequence
  Description of Artificial Sequence: Synthetic oligonucleotide
ggacaugguuuucucuuug

SEQ ID NO: 2765725 - RNA, 19 nt, Artificial Sequence
  Description of Artificial Sequence: Synthetic oligonucleotide
aggacaugguuuucucuuu

SEQ ID NO: 2765726 - RNA, 19 nt, Artificial Sequence
  Description of Artificial Sequence: Synthetic oligonucleotide
uuuucucgacgaacacgau

SEQ ID NO: 2765727 - RNA, 19 nt, Artificial Sequence
  Description of Artificial Sequence: Synthetic oligonucleotide
gcucccggaacguagucug

SEQ ID NO: 2765728 - RNA, 19 nt, Artificial Sequence
  Description of Artificial Sequence: Synthetic oligonucleotide
aguugcuuuugaauggcua

SEQ ID NO: 2765729 - RNA, 19 nt, Artificial Sequence
  Description of Artificial Sequence: Synthetic oligonucleotide
acuuuucuguaggcucccg

SEQ ID NO: 2765730 - RNA, 19 nt, Artificial Sequence
  Description of Artificial Sequence: Synthetic oligonucleotide
gaggagccaagcaccuucc

SEQ ID NO: 2765731 - RNA, 19 nt, Artificial Sequence
  Description of Artificial Sequence: Synthetic oligonucleotide
gagaaaccaccacuuuucu

SEQ ID NO: 2765732 - RNA, 19 nt, Artificial Sequence
  Description of Artificial Sequence: Synthetic oligonucleotide
gagacaacucgcaccgaca

SEQ ID NO: 2765733 - RNA, 19 nt, Artificial Sequence
  Description of Artificial Sequence: Synthetic oligonucleotide
gacaacucgcaccgacauc

SEQ ID NO: 2765734 - RNA, 19 nt, Artificial Sequence
  Description of Artificial Sequence: Synthetic oligonucleotide
caguauaccuaaguaaacu

SEQ ID NO: 2765735 - RNA, 19 nt, Artificial Sequence
  Description of Artificial Sequence: Synthetic oligonucleotide
cauuguucagauaguucua

SEQ ID NO: 2765736 - RNA, 19 nt, Artificial Sequence
  Description of Artificial Sequence: Synthetic oligonucleotide
agucugcuuugguccgcac

SEQ ID NO: 2765737 - RNA, 19 nt, Artificial Sequence
  Description of Artificial Sequence: Synthetic oligonucleotide
cacacaggaagagacaacu

SEQ ID NO: 2765738 - RNA, 19 nt, Artificial Sequence
  Description of Artificial Sequence: Synthetic oligonucleotide
uuuugccacuuuggaguug

SEQ ID NO: 2765739 - RNA, 19 nt, Artificial Sequence
  Description of Artificial Sequence: Synthetic oligonucleotide
gauucccuccugcauauuu

SEQ ID NO: 2765740 - RNA, 19 nt, Artificial Sequence
  Description of Artificial Sequence: Synthetic oligonucleotide
gccaauugaacaaacacau

SEQ ID NO: 2765741 - RNA, 19 nt, Artificial Sequence
  Description of Artificial Sequence: Synthetic oligonucleotide
agauaguucuaugcauuuu

SEQ ID NO: 2765742 - RNA, 19 nt, Artificial Sequence
  Description of Artificial Sequence: Synthetic oligonucleotide
ucucgacgaacacgaugaa

SEQ ID NO: 2765743 - RNA, 19 nt, Artificial Sequence
  Description of Artificial Sequence: Synthetic oligonucleotide
guucacacaggaagagaca

SEQ ID NO: 2765744 - RNA, 19 nt, Artificial Sequence
  Description of Artificial Sequence: Synthetic oligonucleotide
aguugggcgcacacaaacu

SEQ ID NO: 2765745 - RNA, 19 nt, Artificial Sequence
  Description of Artificial Sequence: Synthetic oligonucleotide
ucugugugaucagguugca

SEQ ID NO: 2765746 - RNA, 19 nt, Artificial Sequence
  Description of Artificial Sequence: Synthetic oligonucleotide
ucccggaacguagucugcu

SEQ ID NO: 2765747 - RNA, 19 nt, Artificial Sequence
  Description of Artificial Sequence: Synthetic oligonucleotide
cuggauucccuccugcaua

SEQ ID NO: 2765748 - RNA, 19 nt, Artificial Sequence
  Description of Artificial Sequence: Synthetic oligonucleotide
aguuugugacaaaggugga

SEQ ID NO: 2765749 - RNA, 19 nt, Artificial Sequence
  Description of Artificial Sequence: Synthetic oligonucleotide
agucuuuaggggacagccu

SEQ ID NO: 2765750 - RNA, 19 nt, Artificial Sequence
  Description of Artificial Sequence: Synthetic oligonucleotide
augaagaguuugugacaaa

SEQ ID NO: 2765751 - RNA, 19 nt, Artificial Sequence
  Description of Artificial Sequence: Synthetic oligonucleotide
uagucugcuuugguccgca

SEQ ID NO: 2765752 - RNA, 19 nt, Artificial Sequence
  Description of Artificial Sequence: Synthetic oligonucleotide
caacucgcaccgacauccc

SEQ ID NO: 2765753 - RNA, 19 nt, Artificial Sequence
  Description of Artificial Sequence: Synthetic oligonucleotide
aggcucccggaacguaguc

SEQ ID NO: 2765754 - RNA, 19 nt, Artificial Sequence
  Description of Artificial Sequence: Synthetic oligonucleotide
cacugcacccugcuucuuc

SEQ ID NO: 2765755 - RNA, 19 nt, Artificial Sequence
  Description of Artificial Sequence: Synthetic oligonucleotide
ugcaaaggacaugguuuuc

SEQ ID NO: 2765756 - RNA, 19 nt, Artificial Sequence
  Description of Artificial Sequence: Synthetic oligonucleotide
uccgcaccauguucacaca

SEQ ID NO: 2765757 - RNA, 19 nt, Artificial Sequence
  Description of Artificial Sequence: Synthetic oligonucleotide
caucccaguauaccuaagu

SEQ ID NO: 2765758 - RNA, 19 nt, Artificial Sequence
  Description of Artificial Sequence: Synthetic oligonucleotide
cagagucuuuaggggacag

SEQ ID NO: 2765759 - RNA, 19 nt, Artificial Sequence
  Description of Artificial Sequence: Synthetic oligonucleotide
ccaauugaacaaacacauc

SEQ ID NO: 2765760 - RNA, 19 nt, Artificial Sequence
  Description of Artificial Sequence: Synthetic oligonucleotide
gacgaacacgaugaagagu

SEQ ID NO: 2765761 - RNA, 19 nt, Artificial Sequence
  Description of Artificial Sequence: Synthetic oligonucleotide
auucuccccuuuauagcca

SEQ ID NO: 2765762 - RNA, 19 nt, Artificial Sequence
  Description of Artificial Sequence: Synthetic oligonucleotide
ccauguucacacaggaaga

SEQ ID NO: 2765763 - RNA, 19 nt, Artificial Sequence
  Description of Artificial Sequence: Synthetic oligonucleotide
gaacguagucugcuuuggu

SEQ ID NO: 2765764 - RNA, 19 nt, Artificial Sequence
  Description of Artificial Sequence: Synthetic oligonucleotide
ccaguugcuuuugaauggc

SEQ ID NO: 2765765 - RNA, 19 nt, Artificial Sequence
  Description of Artificial Sequence: Synthetic oligonucleotide
cucccggaacguagucugc

SEQ ID NO: 2765766 - RNA, 19 nt, Artificial Sequence
  Description of Artificial Sequence: Synthetic oligonucleotide
ucuccccuuuauagccagu

SEQ ID NO: 2765767 - RNA, 19 nt, Artificial Sequence
  Description of Artificial Sequence: Synthetic oligonucleotide
aagagacaacucgcaccga

SEQ ID NO: 2765768 - RNA, 19 nt, Artificial Sequence
  Description of Artificial Sequence: Synthetic oligonucleotide
ugguccgcaccauguucac

SEQ ID NO: 2765769 - RNA, 19 nt, Artificial Sequence
  Description of Artificial Sequence: Synthetic oligonucleotide
caauuauaauuuacagauu

SEQ ID NO: 2765770 - RNA, 19 nt, Artificial Sequence
  Description of Artificial Sequence: Synthetic oligonucleotide
gcacccugcuucuucagga

SEQ ID NO: 2765771 - RNA, 19 nt, Artificial Sequence
  Description of Artificial Sequence: Synthetic oligonucleotide
ggcucgagaaaccaccacu

SEQ ID NO: 2765772 - RNA, 19 nt, Artificial Sequence
  Description of Artificial Sequence: Synthetic oligonucleotide
uguaggcucccggaacgua

SEQ ID NO: 2765773 - RNA, 19 nt, Artificial Sequence
  Description of Artificial Sequence: Synthetic oligonucleotide
cgcaccauguucacacagg

SEQ ID NO: 2765774 - RNA, 19 nt, Artificial Sequence
  Description of Artificial Sequence: Synthetic oligonucleotide
aggagccaagcaccuuccu

SEQ ID NO: 2765775 - RNA, 19 nt, Artificial Sequence
  Description of Artificial Sequence: Synthetic oligonucleotide
gcuguuccuaagccacugc

SEQ ID NO: 2765776 - RNA, 19 nt, Artificial Sequence
  Description of Artificial Sequence: Synthetic oligonucleotide
ucccuccugcauauuuauu

SEQ ID NO: 2765777 - RNA, 19 nt, Artificial Sequence
  Description of Artificial Sequence: Synthetic oligonucleotide
aagccacugcacccugcuu

SEQ ID NO: 2765778 - RNA, 19 nt, Artificial Sequence
  Description of Artificial Sequence: Synthetic oligonucleotide
cugcacccugcuucuucag

SEQ ID NO: 2765779 - RNA, 19 nt, Artificial Sequence
  Description of Artificial Sequence: Synthetic oligonucleotide
gcacacaaacuggauuccc

SEQ ID NO: 2765780 - RNA, 19 nt, Artificial Sequence
  Description of Artificial Sequence: Synthetic oligonucleotide
gguugcaaaggacaugguu

SEQ ID NO: 2765781 - RNA, 19 nt, Artificial Sequence
  Description of Artificial Sequence: Synthetic oligonucleotide
cgacgaacacgaugaagag

SEQ ID NO: 2765782 - RNA, 19 nt, Artificial Sequence
  Description of Artificial Sequence: Synthetic oligonucleotide
ccaccacuuuucuguaggc

SEQ ID NO: 2765783 - RNA, 19 nt, Artificial Sequence
  Description of Artificial Sequence: Synthetic oligonucleotide
caccauguucacacaggaa

SEQ ID NO: 2765784 - RNA, 19 nt, Artificial Sequence
  Description of Artificial Sequence: Synthetic oligonucleotide
gguuuucucuuugcuguuc

SEQ ID NO: 2765785 - RNA, 19 nt, Artificial Sequence
  Description of Artificial Sequence: Synthetic oligonucleotide
gcauauuuauuuucagcuu

SEQ ID NO: 2765786 - RNA, 19 nt, Artificial Sequence
  Description of Artificial Sequence: Synthetic oligonucleotide
cuuuaggggacagccugaa

SEQ ID NO: 2765787 - RNA, 19 nt, Artificial Sequence
  Description of Artificial Sequence: Synthetic oligonucleotide
caaacacaucuauccaaau

SEQ ID NO: 2765788 - RNA, 19 nt, Artificial Sequence
  Description of Artificial Sequence: Synthetic oligonucleotide
gggacagccugaagaauuc

SEQ ID NO: 2765789 - RNA, 19 nt, Artificial Sequence
  Description of Artificial Sequence: Synthetic oligonucleotide
cacuuuggaguugggcgca

SEQ ID NO: 2765790 - RNA, 19 nt, Artificial Sequence
  Description of Artificial Sequence: Synthetic oligonucleotide
cuucuucaggaacaugguu

SEQ ID NO: 2765791 - RNA, 19 nt, Artificial Sequence
  Description of Artificial Sequence: Synthetic oligonucleotide
cuucaggaacaugguucuc

SEQ ID NO: 2765792 - RNA, 19 nt, Artificial Sequence
  Description of Artificial Sequence: Synthetic oligonucleotide
gcaaaggacaugguuuucu

SEQ ID NO: 2765793 - RNA, 19 nt, Artificial Sequence
  Description of Artificial Sequence: Synthetic oligonucleotide
ccgcaccauguucacacag

SEQ ID NO: 2765794 - RNA, 19 nt, Artificial Sequence
  Description of Artificial Sequence: Synthetic oligonucleotide
cggaacguagucugcuuug

SEQ ID NO: 2765795 - RNA, 19 nt, Artificial Sequence
  Description of Artificial Sequence: Synthetic oligonucleotide
cugcuucuucaggaacaug

SEQ ID NO: 2765796 - RNA, 19 nt, Artificial Sequence
  Description of Artificial Sequence: Synthetic oligonucleotide
aggggacagccugaagaau

SEQ ID NO: 2765797 - RNA, 19 nt, Artificial Sequence
  Description of Artificial Sequence: Synthetic oligonucleotide
gcuuuugaauggcuaaauu

SEQ ID NO: 2765798 - RNA, 19 nt, Artificial Sequence
  Description of Artificial Sequence: Synthetic oligonucleotide
gccugaagaauucuccaau

SEQ ID NO: 2765799 - RNA, 19 nt, Artificial Sequence
  Description of Artificial Sequence: Synthetic oligonucleotide
cgaugaagaguuugugaca

SEQ ID NO: 2765800 - RNA, 19 nt, Artificial Sequence
  Description of Artificial Sequence: Synthetic oligonucleotide
cacccugcuucuucaggaa

SEQ ID NO: 2765801 - RNA, 19 nt, Artificial Sequence
  Description of Artificial Sequence: Synthetic oligonucleotide
gggcucgagaaaccaccac

SEQ ID NO: 2765802 - RNA, 19 nt, Artificial Sequence
  Description of Artificial Sequence: Synthetic oligonucleotide
ccuaagccacugcacccug

SEQ ID NO: 2765803 - RNA, 19 nt, Artificial Sequence
  Description of Artificial Sequence: Synthetic oligonucleotide
ccccuuaacuaaaugccua

SEQ ID NO: 2765804 - RNA, 19 nt, Artificial Sequence
  Description of Artificial Sequence: Synthetic oligonucleotide
caguugcuuuugaauggcu

SEQ ID NO: 2765805 - RNA, 19 nt, Artificial Sequence
  Description of Artificial Sequence: Synthetic oligonucleotide
cccuuuauagccaguugcu

SEQ ID NO: 2765806 - RNA, 19 nt, Artificial Sequence
  Description of Artificial Sequence: Synthetic oligonucleotide
agguugcaaaggacauggu

SEQ ID NO: 2765807 - RNA, 19 nt, Artificial Sequence
  Description of Artificial Sequence: Synthetic oligonucleotide
cuuuggaguugggcgcaca

SEQ ID NO: 2765808 - RNA, 19 nt, Artificial Sequence
  Description of Artificial Sequence: Synthetic oligonucleotide
cccuccugcauauuuauuu

SEQ ID NO: 2765809 - RNA, 19 nt, Artificial Sequence
  Description of Artificial Sequence: Synthetic oligonucleotide
uggaggagccaagcaccuu

SEQ ID NO: 2765810 - RNA, 19 nt, Artificial Sequence
  Description of Artificial Sequence: Synthetic oligonucleotide
ggcgcacacaaacuggauu

SEQ ID NO: 2765811 - RNA, 19 nt, Artificial Sequence
  Description of Artificial Sequence: Synthetic oligonucleotide
gcaucccaguauaccuaag

SEQ ID NO: 2765812 - RNA, 19 nt, Artificial Sequence
  Description of Artificial Sequence: Synthetic oligonucleotide
cgcacacaaacuggauucc

SEQ ID NO: 2765813 - RNA, 19 nt, Artificial Sequence
  Description of Artificial Sequence: Synthetic oligonucleotide
cuuugguccgcaccauguu

SEQ ID NO: 2765814 - RNA, 19 nt, Artificial Sequence
  Description of Artificial Sequence: Synthetic oligonucleotide
gcuuugguccgcaccaugu

SEQ ID NO: 2765815 - RNA, 19 nt, Artificial Sequence
  Description of Artificial Sequence: Synthetic oligonucleotide
cucgagaaaccaccacuuu

SEQ ID NO: 2765816 - RNA, 19 nt, Artificial Sequence
  Description of Artificial Sequence: Synthetic oligonucleotide
gcuucuucaggaacauggu

SEQ ID NO: 2765817 - RNA, 19 nt, Artificial Sequence
  Description of Artificial Sequence: Synthetic oligonucleotide
cugugugaucagguugcaa

SEQ ID NO: 2765818 - RNA, 19 nt, Artificial Sequence
  Description of Artificial Sequence: Synthetic oligonucleotide
ggggacagccugaagaauu

SEQ ID NO: 2765819 - RNA, 19 nt, Artificial Sequence
  Description of Artificial Sequence: Synthetic oligonucleotide
ggggcucgagaaaccacca

SEQ ID NO: 2765820 - RNA, 19 nt, Artificial Sequence
  Description of Artificial Sequence: Synthetic oligonucleotide
gccacugcacccugcuucu

SEQ ID NO: 2765821 - RNA, 19 nt, Artificial Sequence
  Description of Artificial Sequence: Synthetic oligonucleotide
cccuuaacuaaaugccuau

SEQ ID NO: 2765822 - RNA, 19 nt, Artificial Sequence
  Description of Artificial Sequence: Synthetic oligonucleotide
cuccccuuuauagccaguu

SEQ ID NO: 2765823 - RNA, 19 nt, Artificial Sequence
  Description of Artificial Sequence: Synthetic oligonucleotide
gcucgagaaaccaccacuu

SEQ ID NO: 2765824 - RNA, 19 nt, Artificial Sequence
  Description of Artificial Sequence: Synthetic oligonucleotide
ccuccugcauauuuauuuu

SEQ ID NO: 2765825 - RNA, 19 nt, Artificial Sequence
  Description of Artificial Sequence: Synthetic oligonucleotide
caggaacaugguucucuuu

SEQ ID NO: 2765826 - RNA, 19 nt, Artificial Sequence
  Description of Artificial Sequence: Synthetic oligonucleotide
gguccgcaccauguucaca

SEQ ID NO: 2765827 - RNA, 19 nt, Artificial Sequence
  Description of Artificial Sequence: Synthetic oligonucleotide
ggcucccggaacguagucu

SEQ ID NO: 2765828 - RNA, 19 nt, Artificial Sequence
  Description of Artificial Sequence: Synthetic oligonucleotide
ccuuuauagccaguugcuu

SEQ ID NO: 2765829 - RNA, 19 nt, Artificial Sequence
  Description of Artificial Sequence: Synthetic oligonucleotide
ccuuaacuaaaugccuauu

SEQ ID NO: 2765830 - RNA, 19 nt, Artificial Sequence
  Description of Artificial Sequence: Synthetic oligonucleotide
ccggaacguagucugcuuu

SEQ ID NO: 2765831 - RNA, 19 nt, Artificial Sequence
  Description of Artificial Sequence: Synthetic oligonucleotide
ccuauucaacaagccaauu

SEQ ID NO: 2765832 - RNA, 19 nt, Artificial Sequence
  Description of Artificial Sequence: Synthetic oligonucleotide
cugcuuugguccgcaccau

SEQ ID NO: 2765833 - RNA, 19 nt, Artificial Sequence
  Description of Artificial Sequence: Synthetic oligonucleotide
gggcgcacacaaacuggau

SEQ ID NO: 2765834 - RNA, 19 nt, Artificial Sequence
  Description of Artificial Sequence: Synthetic oligonucleotide
cgaacacgaugaagaguuu

SEQ ID NO: 2765835 - RNA, 19 nt, Artificial Sequence
  Description of Artificial Sequence: Synthetic oligonucleotide
ggauucccuccugcauauu

SEQ ID NO: 2765836 - RNA, 19 nt, Artificial Sequence
  Description of Artificial Sequence: Synthetic oligonucleotide
ccacugcacccugcuucuu

SEQ ID NO: 2765837 - RNA, 19 nt, Artificial Sequence
  Description of Artificial Sequence: Synthetic oligonucleotide
uuucauaugacuaacagag

SEQ ID NO: 2765838 - RNA, 19 nt, Artificial Sequence
  Description of Artificial Sequence: Synthetic oligonucleotide
agaauuugcauuuaauucc

SEQ ID NO: 2765839 - RNA, 19 nt, Artificial Sequence
  Description of Artificial Sequence: Synthetic oligonucleotide
auauuaacuacgcaaaugc

SEQ ID NO: 2765840 - RNA, 19 nt, Artificial Sequence
  Description of Artificial Sequence: Synthetic oligonucleotide
auuuauuuccuuuuagucc

SEQ ID NO: 2765841 - RNA, 19 nt, Artificial Sequence
  Description of Artificial Sequence: Synthetic oligonucleotide
uguacaaauaugaacauug

SEQ ID NO: 2765842 - RNA, 19 nt, Artificial Sequence
  Description of Artificial Sequence: Synthetic oligonucleotide
aaauauguaagucacaaau

SEQ ID NO: 2765843 - RNA, 19 nt, Artificial Sequence
  Description of Artificial Sequence: Synthetic oligonucleotide
aaaagcagaacuuaaguca

SEQ ID NO: 2765844 - RNA, 19 nt, Artificial Sequence
  Description of Artificial Sequence: Synthetic oligonucleotide
aacucuauaacuaauauca

SEQ ID NO: 2765845 - RNA, 19 nt, Artificial Sequence
  Description of Artificial Sequence: Synthetic oligonucleotide
ucuauaacuaauaucaagu

SEQ ID NO: 2765846 - RNA, 19 nt, Artificial Sequence
  Description of Artificial Sequence: Synthetic oligonucleotide
uuuuaaauuccucuaagug

SEQ ID NO: 2765847 - RNA, 19 nt, Artificial Sequence
  Description of Artificial Sequence: Synthetic oligonucleotide
ucacaaaugacuauuaacu

SEQ ID NO: 2765848 - RNA, 19 nt, Artificial Sequence
  Description of Artificial Sequence: Synthetic oligonucleotide
uuuauuacuacucuugggu

SEQ ID NO: 2765849 - RNA, 19 nt, Artificial Sequence
  Description of Artificial Sequence: Synthetic oligonucleotide
uuaacuauauuaacuacgc

SEQ ID NO: 2765850 - RNA, 19 nt, Artificial Sequence
  Description of Artificial Sequence: Synthetic oligonucleotide
ugaacuaagaaauauguaa

SEQ ID NO: 2765851 - RNA, 19 nt, Artificial Sequence
  Description of Artificial Sequence: Synthetic oligonucleotide
aguaugguuaaugaaaagc

SEQ ID NO: 2765852 - RNA, 19 nt, Artificial Sequence
  Description of Artificial Sequence: Synthetic oligonucleotide
uaagcuauguaucuguucc

SEQ ID NO: 2765853 - RNA, 19 nt, Artificial Sequence
  Description of Artificial Sequence: Synthetic oligonucleotide
aagagaaugaaauaccuau

SEQ ID NO: 2765854 - RNA, 19 nt, Artificial Sequence
  Description of Artificial Sequence: Synthetic oligonucleotide
ucaguguucauuuauuucc

SEQ ID NO: 2765855 - RNA, 19 nt, Artificial Sequence
  Description of Artificial Sequence: Synthetic oligonucleotide
aaacucuauaacuaauauc

SEQ ID NO: 2765856 - RNA, 19 nt, Artificial Sequence
  Description of Artificial Sequence: Synthetic oligonucleotide
uuaaagggaagaaagguga

SEQ ID NO: 2765857 - RNA, 19 nt, Artificial Sequence
  Description of Artificial Sequence: Synthetic oligonucleotide
uaagaaauauguaagucac

SEQ ID NO: 2765858 - RNA, 19 nt, Artificial Sequence
  Description of Artificial Sequence: Synthetic oligonucleotide
uaacuaauaucaaguaugg

SEQ ID NO: 2765859 - RNA, 19 nt, Artificial Sequence
  Description of Artificial Sequence: Synthetic oligonucleotide
ugaacaagguuucauauga

SEQ ID NO: 2765860 - RNA, 19 nt, Artificial Sequence
  Description of Artificial Sequence: Synthetic oligonucleotide
uuuccuuuuaguccaauag

SEQ ID NO: 2765861 - RNA, 19 nt, Artificial Sequence
  Description of Artificial Sequence: Synthetic oligonucleotide
augacuauuaacuauauua

SEQ ID NO: 2765862 - RNA, 19 nt, Artificial Sequence
  Description of Artificial Sequence: Synthetic oligonucleotide
aacaagagaaugaaauacc

SEQ ID NO: 2765863 - RNA, 19 nt, Artificial Sequence
  Description of Artificial Sequence: Synthetic oligonucleotide
ucaaguaugguuaaugaaa

SEQ ID NO: 2765864 - RNA, 19 nt, Artificial Sequence
  Description of Artificial Sequence: Synthetic oligonucleotide
acacauaccaugcuaacac

SEQ ID NO: 2765865 - RNA, 19 nt, Artificial Sequence
  Description of Artificial Sequence: Synthetic oligonucleotide
acagauuuguguuaaaucu

SEQ ID NO: 2765866 - RNA, 19 nt, Artificial Sequence
  Description of Artificial Sequence: Synthetic oligonucleotide
ugaacauugcaguauuugg

SEQ ID NO: 2765867 - RNA, 19 nt, Artificial Sequence
  Description of Artificial Sequence: Synthetic oligonucleotide
ucagaauacacauaccaug

SEQ ID NO: 2765868 - RNA, 19 nt, Artificial Sequence
  Description of Artificial Sequence: Synthetic oligonucleotide
aaugcuaagcuauguaucu

SEQ ID NO: 2765869 - RNA, 19 nt, Artificial Sequence
  Description of Artificial Sequence: Synthetic oligonucleotide
acuaauaucaaguaugguu

SEQ ID NO: 2765870 - RNA, 19 nt, Artificial Sequence
  Description of Artificial Sequence: Synthetic oligonucleotide
caucuuaaagggaagaaag

SEQ ID NO: 2765871 - RNA, 19 nt, Artificial Sequence
  Description of Artificial Sequence: Synthetic oligonucleotide
auauguaagucacaaauga

SEQ ID NO: 2765872 - RNA, 19 nt, Artificial Sequence
  Description of Artificial Sequence: Synthetic oligonucleotide
aaugaaauaccuaugcuga

SEQ ID NO: 2765873 - RNA, 19 nt, Artificial Sequence
  Description of Artificial Sequence: Synthetic oligonucleotide
auaacuaauaucaaguaug

SEQ ID NO: 2765874 - RNA, 19 nt, Artificial Sequence
  Description of Artificial Sequence: Synthetic oligonucleotide
ucuucagugacucuguaga

SEQ ID NO: 2765875 - RNA, 19 nt, Artificial Sequence
  Description of Artificial Sequence: Synthetic oligonucleotide
auuaacuauauuaacuacg

SEQ ID NO: 2765876 - RNA, 19 nt, Artificial Sequence
  Description of Artificial Sequence: Synthetic oligonucleotide
gagaaugaaauaccuaugc

SEQ ID NO: 2765877 - RNA, 19 nt, Artificial Sequence
  Description of Artificial Sequence: Synthetic oligonucleotide
agaaaggugauauuguugu

SEQ ID NO: 2765878 - RNA, 19 nt, Artificial Sequence
  Description of Artificial Sequence: Synthetic oligonucleotide
ucuguuaugaaugcuaagc

SEQ ID NO: 2765879 - RNA, 19 nt, Artificial Sequence
  Description of Artificial Sequence: Synthetic oligonucleotide
uuaacuacgcaaaugcaac

SEQ ID NO: 2765880 - RNA, 19 nt, Artificial Sequence
  Description of Artificial Sequence: Synthetic oligonucleotide
uuuuauuacuacucuuggg

SEQ ID NO: 2765881 - RNA, 19 nt, Artificial Sequence
  Description of Artificial Sequence: Synthetic oligonucleotide
aacacuguuaaaugccuag

SEQ ID NO: 2765882 - RNA, 19 nt, Artificial Sequence
  Description of Artificial Sequence: Synthetic oligonucleotide
uuaaauuccucuaaguguu

SEQ ID NO: 2765883 - RNA, 19 nt, Artificial Sequence
  Description of Artificial Sequence: Synthetic oligonucleotide
aaugauaacaagagaauga

SEQ ID NO: 2765884 - RNA, 19 nt, Artificial Sequence
  Description of Artificial Sequence: Synthetic oligonucleotide
gucaugauaaggaagauug

SEQ ID NO: 2765885 - RNA, 19 nt, Artificial Sequence
  Description of Artificial Sequence: Synthetic oligonucleotide
aaugaacaagguuucauau

SEQ ID NO: 2765886 - RNA, 19 nt, Artificial Sequence
  Description of Artificial Sequence: Synthetic oligonucleotide
aacuaagaaauauguaagu

SEQ ID NO: 2765887 - RNA, 19 nt, Artificial Sequence
  Description of Artificial Sequence: Synthetic oligonucleotide
aacuuaagucaugauaagg

SEQ ID NO: 2765888 - RNA, 19 nt, Artificial Sequence
  Description of Artificial Sequence: Synthetic oligonucleotide
gaagauuguacaaauauga

SEQ ID NO: 2765889 - RNA, 19 nt, Artificial Sequence
  Description of Artificial Sequence: Synthetic oligonucleotide
cuauguaucuguuccaacc

SEQ ID NO: 2765890 - RNA, 19 nt, Artificial Sequence
  Description of Artificial Sequence: Synthetic oligonucleotide
uguuaaaucuguuaugaau

SEQ ID NO: 2765891 - RNA, 19 nt, Artificial Sequence
  Description of Artificial Sequence: Synthetic oligonucleotide
gaacuaagaaauauguaag

SEQ ID NO: 2765892 - RNA, 19 nt, Artificial Sequence
  Description of Artificial Sequence: Synthetic oligonucleotide
uauaacuaauaucaaguau

SEQ ID NO: 2765893 - RNA, 19 nt, Artificial Sequence
  Description of Artificial Sequence: Synthetic oligonucleotide
ugacuauuaacuauauuaa

SEQ ID NO: 2765894 - RNA, 19 nt, Artificial Sequence
  Description of Artificial Sequence: Synthetic oligonucleotide
uguguuaaaucuguuauga

SEQ ID NO: 2765895 - RNA, 19 nt, Artificial Sequence
  Description of Artificial Sequence: Synthetic oligonucleotide
gugugugccaucuuaaagg

SEQ ID NO: 2765896 - RNA, 19 nt, Artificial Sequence
  Description of Artificial Sequence: Synthetic oligonucleotide
ucuaaguguuuauauaugu

SEQ ID NO: 2765897 - RNA, 19 nt, Artificial Sequence
  Description of Artificial Sequence: Synthetic oligonucleotide
aaauucuucagugacucug

SEQ ID NO: 2765898 - RNA, 19 nt, Artificial Sequence
  Description of Artificial Sequence: Synthetic oligonucleotide
uuaaaucuguuaugaaugc

SEQ ID NO: 2765899 - RNA, 19 nt, Artificial Sequence
  Description of Artificial Sequence: Synthetic oligonucleotide
uaacaagagaaugaaauac

SEQ ID NO: 2765900 - RNA, 19 nt, Artificial Sequence
  Description of Artificial Sequence: Synthetic oligonucleotide
ugauaaggaagauuguaca

SEQ ID NO: 2765901 - RNA, 19 nt, Artificial Sequence
  Description of Artificial Sequence: Synthetic oligonucleotide
acuaagaaauauguaaguc

SEQ ID NO: 2765902 - RNA, 19 nt, Artificial Sequence
  Description of Artificial Sequence: Synthetic oligonucleotide
ucuuggguaacuuuuaaau

SEQ ID NO: 2765903 - RNA, 19 nt, Artificial Sequence
  Description of Artificial Sequence: Synthetic oligonucleotide
aacaagguuucauaugacu

SEQ ID NO: 2765904 - RNA, 19 nt, Artificial Sequence
  Description of Artificial Sequence: Synthetic oligonucleotide
uuccucagaauacacauac

SEQ ID NO: 2765905 - RNA, 19 nt, Artificial Sequence
  Description of Artificial Sequence: Synthetic oligonucleotide
cuguuaaaugccuagauca

SEQ ID NO: 2765906 - RNA, 19 nt, Artificial Sequence
  Description of Artificial Sequence: Synthetic oligonucleotide
acuguuaaaugccuagauc

SEQ ID NO: 2765907 - RNA, 19 nt, Artificial Sequence
  Description of Artificial Sequence: Synthetic oligonucleotide
ugugugccaucuuaaaggg

SEQ ID NO: 2765908 - RNA, 19 nt, Artificial Sequence
  Description of Artificial Sequence: Synthetic oligonucleotide
gaaaagcagaacuuaaguc

SEQ ID NO: 2765909 - RNA, 19 nt, Artificial Sequence
  Description of Artificial Sequence: Synthetic oligonucleotide
cuuaaagggaagaaaggug

SEQ ID NO: 2765910 - RNA, 19 nt, Artificial Sequence
  Description of Artificial Sequence: Synthetic oligonucleotide
aauauguaagucacaaaug

SEQ ID NO: 2765911 - RNA, 19 nt, Artificial Sequence
  Description of Artificial Sequence: Synthetic oligonucleotide
uauauuaacuacgcaaaug

SEQ ID NO: 2765912 - RNA, 19 nt, Artificial Sequence
  Description of Artificial Sequence: Synthetic oligonucleotide
ugugccaucuuaaagggaa

SEQ ID NO: 2765913 - RNA, 19 nt, Artificial Sequence
  Description of Artificial Sequence: Synthetic oligonucleotide
uguuaaaugccuagaucag

SEQ ID NO: 2765914 - RNA, 19 nt, Artificial Sequence
  Description of Artificial Sequence: Synthetic oligonucleotide
cagaauacacauaccaugc

SEQ ID NO: 2765915 - RNA, 19 nt, Artificial Sequence
  Description of Artificial Sequence: Synthetic oligonucleotide
cuaagaaauauguaaguca

SEQ ID NO: 2765916 - RNA, 19 nt, Artificial Sequence
  Description of Artificial Sequence: Synthetic oligonucleotide
cuaacagagguaaggaggc

SEQ ID NO: 2765917 - RNA, 19 nt, Artificial Sequence
  Description of Artificial Sequence: Synthetic oligonucleotide
acuauuaacuauauuaacu

SEQ ID NO: 2765918 - RNA, 19 nt, Artificial Sequence
  Description of Artificial Sequence: Synthetic oligonucleotide
cucuauaacuaauaucaag

SEQ ID NO: 2765919 - RNA, 19 nt, Artificial Sequence
  Description of Artificial Sequence: Synthetic oligonucleotide
ucauuuauuuccuuuuagu

SEQ ID NO: 2765920 - RNA, 19 nt, Artificial Sequence
  Description of Artificial Sequence: Synthetic oligonucleotide
uauuaacuauauuaacuac

SEQ ID NO: 2765921 - RNA, 19 nt, Artificial Sequence
  Description of Artificial Sequence: Synthetic oligonucleotide
ugugugugccaucuuaaag

SEQ ID NO: 2765922 - RNA, 19 nt, Artificial Sequence
  Description of Artificial Sequence: Synthetic oligonucleotide
guuuauauaugugugugcc

SEQ ID NO: 2765923 - RNA, 19 nt, Artificial Sequence
  Description of Artificial Sequence: Synthetic oligonucleotide
aggaagauuguacaaauau

SEQ ID NO: 2765924 - RNA, 19 nt, Artificial Sequence
  Description of Artificial Sequence: Synthetic oligonucleotide
uccuuuuaguccaauagaa

SEQ ID NO: 2765925 - RNA, 19 nt, Artificial Sequence
  Description of Artificial Sequence: Synthetic oligonucleotide
uggguaacuuuuaaauucc

SEQ ID NO: 2765926 - RNA, 19 nt, Artificial Sequence
  Description of Artificial Sequence: Synthetic oligonucleotide
agaacuuaagucaugauaa

SEQ ID NO: 2765927 - RNA, 19 nt, Artificial Sequence
  Description of Artificial Sequence: Synthetic oligonucleotide
augauaaggaagauuguac

SEQ ID NO: 2765928 - RNA, 19 nt, Artificial Sequence
  Description of Artificial Sequence: Synthetic oligonucleotide
aagguuucauaugacuaac

SEQ ID NO: 2765929 - RNA, 19 nt, Artificial Sequence
  Description of Artificial Sequence: Synthetic oligonucleotide
ugguuaaugaaaagcagaa

SEQ ID NO: 2765930 - RNA, 19 nt, Artificial Sequence
  Description of Artificial Sequence: Synthetic oligonucleotide
aauaugaacauugcaguau

SEQ ID NO: 2765931 - RNA, 19 nt, Artificial Sequence
  Description of Artificial Sequence: Synthetic oligonucleotide
ugcauuuaauuccucagaa

SEQ ID NO: 2765932 - RNA, 19 nt, Artificial Sequence
  Description of Artificial Sequence: Synthetic oligonucleotide
aacuuuuaaauuccucuaa

SEQ ID NO: 2765933 - RNA, 19 nt, Artificial Sequence
  Description of Artificial Sequence: Synthetic oligonucleotide
uguaucuguuccaaccugc

SEQ ID NO: 2765934 - RNA, 19 nt, Artificial Sequence
  Description of Artificial Sequence: Synthetic oligonucleotide
uauguaagucacaaaugac

SEQ ID NO: 2765935 - RNA, 19 nt, Artificial Sequence
  Description of Artificial Sequence: Synthetic oligonucleotide
ucagugacucuguagagga

SEQ ID NO: 2765936 - RNA, 19 nt, Artificial Sequence
  Description of Artificial Sequence: Synthetic oligonucleotide
augacuaacagagguaagg

SEQ ID NO: 2765937 - RNA, 19 nt, Artificial Sequence
  Description of Artificial Sequence: Synthetic oligonucleotide
uauguaucuguuccaaccu

SEQ ID NO: 2765938 - RNA, 19 nt, Artificial Sequence
  Description of Artificial Sequence: Synthetic oligonucleotide
cuaauaucaaguaugguua

SEQ ID NO: 2765939 - RNA, 19 nt, Artificial Sequence
  Description of Artificial Sequence: Synthetic oligonucleotide
acaaaugacuauuaacuau

SEQ ID NO: 2765940 - RNA, 19 nt, Artificial Sequence
  Description of Artificial Sequence: Synthetic oligonucleotide
uguuuauauaugugugugc

SEQ ID NO: 2765941 - RNA, 19 nt, Artificial Sequence
  Description of Artificial Sequence: Synthetic oligonucleotide
uuccuuuuaguccaauaga

SEQ ID NO: 2765942 - RNA, 19 nt, Artificial Sequence
  Description of Artificial Sequence: Synthetic oligonucleotide
cuuuuaguccaauagaaaa

SEQ ID NO: 2765943 - RNA, 19 nt, Artificial Sequence
  Description of Artificial Sequence: Synthetic oligonucleotide
ugcuaacacuguuaaaugc

SEQ ID NO: 2765944 - RNA, 19 nt, Artificial Sequence
  Description of Artificial Sequence: Synthetic oligonucleotide
aaauaugaacauugcagua

SEQ ID NO: 2765945 - RNA, 19 nt, Artificial Sequence
  Description of Artificial Sequence: Synthetic oligonucleotide
aaugccuagaucaguguuc

SEQ ID NO: 2765946 - RNA, 19 nt, Artificial Sequence
  Description of Artificial Sequence: Synthetic oligonucleotide
ugaaugcuaagcuauguau

SEQ ID NO: 2765947 - RNA, 19 nt, Artificial Sequence
  Description of Artificial Sequence: Synthetic oligonucleotide
cuuccuuuuauuacuacuc

SEQ ID NO: 2765948 - RNA, 19 nt, Artificial Sequence
  Description of Artificial Sequence: Synthetic oligonucleotide
uauuaacuacgcaaaugca

SEQ ID NO: 2765949 - RNA, 19 nt, Artificial Sequence
  Description of Artificial Sequence: Synthetic oligonucleotide
gauaacaagagaaugaaau

SEQ ID NO: 2765950 - RNA, 19 nt, Artificial Sequence
  Description of Artificial Sequence: Synthetic oligonucleotide
gacuauuaacuauauuaac

SEQ ID NO: 2765951 - RNA, 19 nt, Artificial Sequence
  Description of Artificial Sequence: Synthetic oligonucleotide
uucauaugacuaacagagg

SEQ ID NO: 2765952 - RNA, 19 nt, Artificial Sequence
  Description of Artificial Sequence: Synthetic oligonucleotide
aaguaugguuaaugaaaag

SEQ ID NO: 2765953 - RNA, 19 nt, Artificial Sequence
  Description of Artificial Sequence: Synthetic oligonucleotide
aaguguuuauauaugugug

SEQ ID NO: 2765954 - RNA, 19 nt, Artificial Sequence
  Description of Artificial Sequence: Synthetic oligonucleotide
ugcugaacuaagaaauaug

SEQ ID NO: 2765955 - RNA, 19 nt, Artificial Sequence
  Description of Artificial Sequence: Synthetic oligonucleotide
uacagauuuguguuaaauc

SEQ ID NO: 2765956 - RNA, 19 nt, Artificial Sequence
  Description of Artificial Sequence: Synthetic oligonucleotide
agaaauauguaagucacaa

SEQ ID NO: 2765957 - RNA, 19 nt, Artificial Sequence
  Description of Artificial Sequence: Synthetic oligonucleotide
aguguuuauauaugugugu

SEQ ID NO: 2765958 - RNA, 19 nt, Artificial Sequence
  Description of Artificial Sequence: Synthetic oligonucleotide
cuaaguguuuauauaugug

SEQ ID NO: 2765959 - RNA, 19 nt, Artificial Sequence
  Description of Artificial Sequence: Synthetic oligonucleotide
auuugcauuuaauuccuca

SEQ ID NO: 2765960 - RNA, 19 nt, Artificial Sequence
  Description of Artificial Sequence: Synthetic oligonucleotide
uaauuccucagaauacaca

SEQ ID NO: 2765961 - RNA, 19 nt, Artificial Sequence
  Description of Artificial Sequence: Synthetic oligonucleotide
uaaggaagauuguacaaau

SEQ ID NO: 2765962 - RNA, 19 nt, Artificial Sequence
  Description of Artificial Sequence: Synthetic oligonucleotide
acuuaagucaugauaagga

SEQ ID NO: 2765963 - RNA, 19 nt, Artificial Sequence
  Description of Artificial Sequence: Synthetic oligonucleotide
accaaugauaacaagagaa

SEQ ID NO: 2765964 - RNA, 19 nt, Artificial Sequence
  Description of Artificial Sequence: Synthetic oligonucleotide
aauacacauaccaugcuaa

SEQ ID NO: 2765965 - RNA, 19 nt, Artificial Sequence
  Description of Artificial Sequence: Synthetic oligonucleotide
agaaugaaauaccuaugcu

SEQ ID NO: 2765966 - RNA, 19 nt, Artificial Sequence
  Description of Artificial Sequence: Synthetic oligonucleotide
guaacuuuuaaauuccucu

SEQ ID NO: 2765967 - RNA, 19 nt, Artificial Sequence
  Description of Artificial Sequence: Synthetic oligonucleotide
uugcauuuaauuccucaga

SEQ ID NO: 2765968 - RNA, 19 nt, Artificial Sequence
  Description of Artificial Sequence: Synthetic oligonucleotide
cauuuaauuccucagaaua

SEQ ID NO: 2765969 - RNA, 19 nt, Artificial Sequence
  Description of Artificial Sequence: Synthetic oligonucleotide
gacuaacagagguaaggag

SEQ ID NO: 2765970 - RNA, 19 nt, Artificial Sequence
  Description of Artificial Sequence: Synthetic oligonucleotide
auaucaaguaugguuaaug

SEQ ID NO: 2765971 - RNA, 19 nt, Artificial Sequence
  Description of Artificial Sequence: Synthetic oligonucleotide
aauaccuaugcugaacuaa

SEQ ID NO: 2765972 - RNA, 19 nt, Artificial Sequence
  Description of Artificial Sequence: Synthetic oligonucleotide
gguuucauaugacuaacag

SEQ ID NO: 2765973 - RNA, 19 nt, Artificial Sequence
  Description of Artificial Sequence: Synthetic oligonucleotide
auacacauaccaugcuaac

SEQ ID NO: 2765974 - RNA, 19 nt, Artificial Sequence
  Description of Artificial Sequence: Synthetic oligonucleotide
uagaggauagugaccacca

SEQ ID NO: 2765975 - RNA, 19 nt, Artificial Sequence
  Description of Artificial Sequence: Synthetic oligonucleotide
uauuacuacucuuggguaa

SEQ ID NO: 2765976 - RNA, 19 nt, Artificial Sequence
  Description of Artificial Sequence: Synthetic oligonucleotide
uucagugacucuguagagg

SEQ ID NO: 2765977 - RNA, 19 nt, Artificial Sequence
  Description of Artificial Sequence: Synthetic oligonucleotide
auaacaagagaaugaaaua

SEQ ID NO: 2765978 - RNA, 19 nt, Artificial Sequence
  Description of Artificial Sequence: Synthetic oligonucleotide
uguuaugaaugcuaagcua

SEQ ID NO: 2765979 - RNA, 19 nt, Artificial Sequence
  Description of Artificial Sequence: Synthetic oligonucleotide
caaugauaacaagagaaug

SEQ ID NO: 2765980 - RNA, 19 nt, Artificial Sequence
  Description of Artificial Sequence: Synthetic oligonucleotide
guaugguuaaugaaaagca

SEQ ID NO: 2765981 - RNA, 19 nt, Artificial Sequence
  Description of Artificial Sequence: Synthetic oligonucleotide
uuguguuaaaucuguuaug

SEQ ID NO: 2765982 - RNA, 19 nt, Artificial Sequence
  Description of Artificial Sequence: Synthetic oligonucleotide
auuacuacucuuggguaac

SEQ ID NO: 2765983 - RNA, 19 nt, Artificial Sequence
  Description of Artificial Sequence: Synthetic oligonucleotide
uaacuuuuaaauuccucua

SEQ ID NO: 2765984 - RNA, 19 nt, Artificial Sequence
  Description of Artificial Sequence: Synthetic oligonucleotide
uuccuuuuauuacuacucu

SEQ ID NO: 2765985 - RNA, 19 nt, Artificial Sequence
  Description of Artificial Sequence: Synthetic oligonucleotide
gauaaggaagauuguacaa

SEQ ID NO: 2765986 - RNA, 19 nt, Artificial Sequence
  Description of Artificial Sequence: Synthetic oligonucleotide
aaaugccuagaucaguguu

SEQ ID NO: 2765987 - RNA, 19 nt, Artificial Sequence
  Description of Artificial Sequence: Synthetic oligonucleotide
uagaucaguguucauuuau

SEQ ID NO: 2765988 - RNA, 19 nt, Artificial Sequence
  Description of Artificial Sequence: Synthetic oligonucleotide
uaugacuaacagagguaag

SEQ ID NO: 2765989 - RNA, 19 nt, Artificial Sequence
  Description of Artificial Sequence: Synthetic oligonucleotide
guuucauaugacuaacaga

SEQ ID NO: 2765990 - RNA, 19 nt, Artificial Sequence
  Description of Artificial Sequence: Synthetic oligonucleotide
acuauauuaacuacgcaaa

SEQ ID NO: 2765991 - RNA, 19 nt, Artificial Sequence
  Description of Artificial Sequence: Synthetic oligonucleotide
uaacuauauuaacuacgca

SEQ ID NO: 2765992 - RNA, 19 nt, Artificial Sequence
  Description of Artificial Sequence: Synthetic oligonucleotide
ugcuaagcuauguaucugu

SEQ ID NO: 2765993 - RNA, 19 nt, Artificial Sequence
  Description of Artificial Sequence: Synthetic oligonucleotide
uuuuacagauuuguguuaa

SEQ ID NO: 2765994 - RNA, 19 nt, Artificial Sequence
  Description of Artificial Sequence: Synthetic oligonucleotide
cagauuuguguuaaaucug

SEQ ID NO: 2765995 - RNA, 19 nt, Artificial Sequence
  Description of Artificial Sequence: Synthetic oligonucleotide
gugaccaccaaugauaaca

SEQ ID NO: 2765996 - RNA, 19 nt, Artificial Sequence
  Description of Artificial Sequence: Synthetic oligonucleotide
ucuguuccaaccugcuucc

SEQ ID NO: 2765997 - RNA, 19 nt, Artificial Sequence
  Description of Artificial Sequence: Synthetic oligonucleotide
aucuuaaagggaagaaagg

SEQ ID NO: 2765998 - RNA, 19 nt, Artificial Sequence
  Description of Artificial Sequence: Synthetic oligonucleotide
uucuucagugacucuguag

SEQ ID NO: 2765999 - RNA, 19 nt, Artificial Sequence
  Description of Artificial Sequence: Synthetic oligonucleotide
uuauuacuacucuugggua

SEQ ID NO: 2766000 - RNA, 19 nt, Artificial Sequence
  Description of Artificial Sequence: Synthetic oligonucleotide
augcuaacacuguuaaaug

SEQ ID NO: 2766001 - RNA, 19 nt, Artificial Sequence
  Description of Artificial Sequence: Synthetic oligonucleotide
aaagcagaacuuaagucau

SEQ ID NO: 2766002 - RNA, 19 nt, Artificial Sequence
  Description of Artificial Sequence: Synthetic oligonucleotide
ugaaauaccuaugcugaac

SEQ ID NO: 2766003 - RNA, 19 nt, Artificial Sequence
  Description of Artificial Sequence: Synthetic oligonucleotide
uaacuacgcaaaugcaacc

SEQ ID NO: 2766004 - RNA, 19 nt, Artificial Sequence
  Description of Artificial Sequence: Synthetic oligonucleotide
aacuacgcaaaugcaacca

SEQ ID NO: 2766005 - RNA, 19 nt, Artificial Sequence
  Description of Artificial Sequence: Synthetic oligonucleotide
aauuccucuaaguguuuau

SEQ ID NO: 2766006 - RNA, 19 nt, Artificial Sequence
  Description of Artificial Sequence: Synthetic oligonucleotide
cucuaaguguuuauauaug

SEQ ID NO: 2766007 - RNA, 19 nt, Artificial Sequence
  Description of Artificial Sequence: Synthetic oligonucleotide
uaugugugugccaucuuaa

SEQ ID NO: 2766008 - RNA, 19 nt, Artificial Sequence
  Description of Artificial Sequence: Synthetic oligonucleotide
auuaacuacgcaaaugcaa

SEQ ID NO: 2766009 - RNA, 19 nt, Artificial Sequence
  Description of Artificial Sequence: Synthetic oligonucleotide
ugauaacaagagaaugaaa

SEQ ID NO: 2766010 - RNA, 19 nt, Artificial Sequence
  Description of Artificial Sequence: Synthetic oligonucleotide
aucaaguaugguuaaugaa

SEQ ID NO: 2766011 - RNA, 19 nt, Artificial Sequence
  Description of Artificial Sequence: Synthetic oligonucleotide
auaugacuaacagagguaa

SEQ ID NO: 2766012 - RNA, 19 nt, Artificial Sequence
  Description of Artificial Sequence: Synthetic oligonucleotide
aaaauucuucagugacucu

SEQ ID NO: 2766013 - RNA, 19 nt, Artificial Sequence
  Description of Artificial Sequence: Synthetic oligonucleotide
aacagagguaaggaggcca

SEQ ID NO: 2766014 - RNA, 19 nt, Artificial Sequence
  Description of Artificial Sequence: Synthetic oligonucleotide
uaagucacaaaugacuauu

SEQ ID NO: 2766015 - RNA, 19 nt, Artificial Sequence
  Description of Artificial Sequence: Synthetic oligonucleotide
augaacauugcaguauuug

SEQ ID NO: 2766016 - RNA, 19 nt, Artificial Sequence
  Description of Artificial Sequence: Synthetic oligonucleotide
caaaugacuauuaacuaua

SEQ ID NO: 2766017 - RNA, 19 nt, Artificial Sequence
  Description of Artificial Sequence: Synthetic oligonucleotide
caaauaugaacauugcagu

SEQ ID NO: 2766018 - RNA, 19 nt, Artificial Sequence
  Description of Artificial Sequence: Synthetic oligonucleotide
aggauagugaccaccaaug

SEQ ID NO: 2766019 - RNA, 19 nt, Artificial Sequence
  Description of Artificial Sequence: Synthetic oligonucleotide
uacgcaaaugcaaccauuu

SEQ ID NO: 2766020 - RNA, 19 nt, Artificial Sequence
  Description of Artificial Sequence: Synthetic oligonucleotide
gaaugcuaagcuauguauc

SEQ ID NO: 2766021 - RNA, 19 nt, Artificial Sequence
  Description of Artificial Sequence: Synthetic oligonucleotide
agugcuguugaagaauuug

SEQ ID NO: 2766022 - RNA, 19 nt, Artificial Sequence
  Description of Artificial Sequence: Synthetic oligonucleotide
uaauaucaaguaugguuaa

SEQ ID NO: 2766023 - RNA, 19 nt, Artificial Sequence
  Description of Artificial Sequence: Synthetic oligonucleotide
gaaugaacaagguuucaua

SEQ ID NO: 2766024 - RNA, 19 nt, Artificial Sequence
  Description of Artificial Sequence: Synthetic oligonucleotide
auauaugugugugccaucu

SEQ ID NO: 2766025 - RNA, 19 nt, Artificial Sequence
  Description of Artificial Sequence: Synthetic oligonucleotide
acaagagaaugaaauaccu

SEQ ID NO: 2766026 - RNA, 19 nt, Artificial Sequence
  Description of Artificial Sequence: Synthetic oligonucleotide
augauaacaagagaaugaa

SEQ ID NO: 2766027 - RNA, 19 nt, Artificial Sequence
  Description of Artificial Sequence: Synthetic oligonucleotide
uaugaaugcuaagcuaugu

SEQ ID NO: 2766028 - RNA, 19 nt, Artificial Sequence
  Description of Artificial Sequence: Synthetic oligonucleotide
gaauacacauaccaugcua

SEQ ID NO: 2766029 - RNA, 19 nt, Artificial Sequence
  Description of Artificial Sequence: Synthetic oligonucleotide
accaccaaugauaacaaga

SEQ ID NO: 2766030 - RNA, 19 nt, Artificial Sequence
  Description of Artificial Sequence: Synthetic oligonucleotide
uaugcugaacuaagaaaua

SEQ ID NO: 2766031 - RNA, 19 nt, Artificial Sequence
  Description of Artificial Sequence: Synthetic oligonucleotide
uagugaccaccaaugauaa

SEQ ID NO: 2766032 - RNA, 19 nt, Artificial Sequence
  Description of Artificial Sequence: Synthetic oligonucleotide
auaugaacauugcaguauu

SEQ ID NO: 2766033 - RNA, 19 nt, Artificial Sequence
  Description of Artificial Sequence: Synthetic oligonucleotide
auaaggaagauuguacaaa

SEQ ID NO: 2766034 - RNA, 19 nt, Artificial Sequence
  Description of Artificial Sequence: Synthetic oligonucleotide
aaucuguuaugaaugcuaa

SEQ ID NO: 2766035 - RNA, 19 nt, Artificial Sequence
  Description of Artificial Sequence: Synthetic oligonucleotide
ucaugauaaggaagauugu

SEQ ID NO: 2766036 - RNA, 19 nt, Artificial Sequence
  Description of Artificial Sequence: Synthetic oligonucleotide
caaguaugguuaaugaaaa

SEQ ID NO: 2766037 - RNA, 19 nt, Artificial Sequence
  Description of Artificial Sequence: Synthetic oligonucleotide
cuuaagucaugauaaggaa

SEQ ID NO: 2766038 - RNA, 19 nt, Artificial Sequence
  Description of Artificial Sequence: Synthetic oligonucleotide
agauuuguguuaaaucugu

SEQ ID NO: 2766039 - RNA, 19 nt, Artificial Sequence
  Description of Artificial Sequence: Synthetic oligonucleotide
uuacagauuuguguuaaau

SEQ ID NO: 2766040 - RNA, 19 nt, Artificial Sequence
  Description of Artificial Sequence: Synthetic oligonucleotide
auaccuaugcugaacuaag

SEQ ID NO: 2766041 - RNA, 19 nt, Artificial Sequence
  Description of Artificial Sequence: Synthetic oligonucleotide
gggaagaaaggugauauug

SEQ ID NO: 2766042 - RNA, 19 nt, Artificial Sequence
  Description of Artificial Sequence: Synthetic oligonucleotide
ccaccaaugauaacaagag

SEQ ID NO: 2766043 - RNA, 19 nt, Artificial Sequence
  Description of Artificial Sequence: Synthetic oligonucleotide
agaauacacauaccaugcu

SEQ ID NO: 2766044 - RNA, 19 nt, Artificial Sequence
  Description of Artificial Sequence: Synthetic oligonucleotide
gagguaaggaggccagugc

SEQ ID NO: 2766045 - RNA, 19 nt, Artificial Sequence
  Description of Artificial Sequence: Synthetic oligonucleotide
uaaaugccuagaucagugu

SEQ ID NO: 2766046 - RNA, 19 nt, Artificial Sequence
  Description of Artificial Sequence: Synthetic oligonucleotide
uaaaucuguuaugaaugcu

SEQ ID NO: 2766047 - RNA, 19 nt, Artificial Sequence
  Description of Artificial Sequence: Synthetic oligonucleotide
auaugugugugccaucuua

SEQ ID NO: 2766048 - RNA, 19 nt, Artificial Sequence
  Description of Artificial Sequence: Synthetic oligonucleotide
accaugcuaacacuguuaa

SEQ ID NO: 2766049 - RNA, 19 nt, Artificial Sequence
  Description of Artificial Sequence: Synthetic oligonucleotide
cuaagcuauguaucuguuc

SEQ ID NO: 2766050 - RNA, 19 nt, Artificial Sequence
  Description of Artificial Sequence: Synthetic oligonucleotide
accuaugcugaacuaagaa

SEQ ID NO: 2766051 - RNA, 19 nt, Artificial Sequence
  Description of Artificial Sequence: Synthetic oligonucleotide
aagcuauguaucuguucca

SEQ ID NO: 2766052 - RNA, 19 nt, Artificial Sequence
  Description of Artificial Sequence: Synthetic oligonucleotide
uaaagggaagaaaggugau

SEQ ID NO: 2766053 - RNA, 19 nt, Artificial Sequence
  Description of Artificial Sequence: Synthetic oligonucleotide
aaauaccuaugcugaacua

SEQ ID NO: 2766054 - RNA, 19 nt, Artificial Sequence
  Description of Artificial Sequence: Synthetic oligonucleotide
auguaucuguuccaaccug

SEQ ID NO: 2766055 - RNA, 19 nt, Artificial Sequence
  Description of Artificial Sequence: Synthetic oligonucleotide
aucuguuaugaaugcuaag

SEQ ID NO: 2766056 - RNA, 19 nt, Artificial Sequence
  Description of Artificial Sequence: Synthetic oligonucleotide
cuauaacuaauaucaagua

SEQ ID NO: 2766057 - RNA, 19 nt, Artificial Sequence
  Description of Artificial Sequence: Synthetic oligonucleotide
uccucuaaguguuuauaua

SEQ ID NO: 2766058 - RNA, 19 nt, Artificial Sequence
  Description of Artificial Sequence: Synthetic oligonucleotide
caaaugcaaccauuuucag

SEQ ID NO: 2766059 - RNA, 19 nt, Artificial Sequence
  Description of Artificial Sequence: Synthetic oligonucleotide
aauuugcauuuaauuccuc

SEQ ID NO: 2766060 - RNA, 19 nt, Artificial Sequence
  Description of Artificial Sequence: Synthetic oligonucleotide
guacaaauaugaacauugc

SEQ ID NO: 2766061 - RNA, 19 nt, Artificial Sequence
  Description of Artificial Sequence: Synthetic oligonucleotide
gcuaacacuguuaaaugcc

SEQ ID NO: 2766062 - RNA, 19 nt, Artificial Sequence
  Description of Artificial Sequence: Synthetic oligonucleotide
aauaucaaguaugguuaau

SEQ ID NO: 2766063 - RNA, 19 nt, Artificial Sequence
  Description of Artificial Sequence: Synthetic oligonucleotide
cuucagugacucuguagag

SEQ ID NO: 2766064 - RNA, 19 nt, Artificial Sequence
  Description of Artificial Sequence: Synthetic oligonucleotide
agcagaacuuaagucauga

SEQ ID NO: 2766065 - RNA, 19 nt, Artificial Sequence
  Description of Artificial Sequence: Synthetic oligonucleotide
aagaaauauguaagucaca

SEQ ID NO: 2766066 - RNA, 19 nt, Artificial Sequence
  Description of Artificial Sequence: Synthetic oligonucleotide
cagaacuuaagucaugaua

SEQ ID NO: 2766067 - RNA, 19 nt, Artificial Sequence
  Description of Artificial Sequence: Synthetic oligonucleotide
ggaagauuguacaaauaug

SEQ ID NO: 2766068 - RNA, 19 nt, Artificial Sequence
  Description of Artificial Sequence: Synthetic oligonucleotide
aaaugacuauuaacuauau

SEQ ID NO: 2766069 - RNA, 19 nt, Artificial Sequence
  Description of Artificial Sequence: Synthetic oligonucleotide
cuguagaggauagugacca

SEQ ID NO: 2766070 - RNA, 19 nt, Artificial Sequence
  Description of Artificial Sequence: Synthetic oligonucleotide
guuaugaaugcuaagcuau

SEQ ID NO: 2766071 - RNA, 19 nt, Artificial Sequence
  Description of Artificial Sequence: Synthetic oligonucleotide
uaccuaugcugaacuaaga

SEQ ID NO: 2766072 - RNA, 19 nt, Artificial Sequence
  Description of Artificial Sequence: Synthetic oligonucleotide
aaccugcuuccuuuuauua

SEQ ID NO: 2766073 - RNA, 19 nt, Artificial Sequence
  Description of Artificial Sequence: Synthetic oligonucleotide
augaaugcuaagcuaugua

SEQ ID NO: 2766074 - RNA, 19 nt, Artificial Sequence
  Description of Artificial Sequence: Synthetic oligonucleotide
acauaccaugcuaacacug

SEQ ID NO: 2766075 - RNA, 19 nt, Artificial Sequence
  Description of Artificial Sequence: Synthetic oligonucleotide
caagguuucauaugacuaa

SEQ ID NO: 2766076 - RNA, 19 nt, Artificial Sequence
  Description of Artificial Sequence: Synthetic oligonucleotide
uccuuuuauuacuacucuu

SEQ ID NO: 2766077 - RNA, 19 nt, Artificial Sequence
  Description of Artificial Sequence: Synthetic oligonucleotide
caugcuaacacuguuaaau

SEQ ID NO: 2766078 - RNA, 19 nt, Artificial Sequence
  Description of Artificial Sequence: Synthetic oligonucleotide
ugcaaccauuuucaguauc

SEQ ID NO: 2766079 - RNA, 19 nt, Artificial Sequence
  Description of Artificial Sequence: Synthetic oligonucleotide
gcaaaugcaaccauuuuca

SEQ ID NO: 2766080 - RNA, 19 nt, Artificial Sequence
  Description of Artificial Sequence: Synthetic oligonucleotide
uaccaugcuaacacuguua

SEQ ID NO: 2766081 - RNA, 19 nt, Artificial Sequence
  Description of Artificial Sequence: Synthetic oligonucleotide
acaagguuucauaugacua

SEQ ID NO: 2766082 - RNA, 19 nt, Artificial Sequence
  Description of Artificial Sequence: Synthetic oligonucleotide
acuacucuuggguaacuuu

SEQ ID NO: 2766083 - RNA, 19 nt, Artificial Sequence
  Description of Artificial Sequence: Synthetic oligonucleotide
auuuccuuuuaguccaaua

SEQ ID NO: 2766084 - RNA, 19 nt, Artificial Sequence
  Description of Artificial Sequence: Synthetic oligonucleotide
uaacacuguuaaaugccua

SEQ ID NO: 2766085 - RNA, 19 nt, Artificial Sequence
  Description of Artificial Sequence: Synthetic oligonucleotide
aaagggaagaaaggugaua

SEQ ID NO: 2766086 - RNA, 19 nt, Artificial Sequence
  Description of Artificial Sequence: Synthetic oligonucleotide
agugaccaccaaugauaac

SEQ ID NO: 2766087 - RNA, 19 nt, Artificial Sequence
  Description of Artificial Sequence: Synthetic oligonucleotide
gaauuugcauuuaauuccu

SEQ ID NO: 2766088 - RNA, 19 nt, Artificial Sequence
  Description of Artificial Sequence: Synthetic oligonucleotide
gauagugaccaccaaugau

SEQ ID NO: 2766089 - RNA, 19 nt, Artificial Sequence
  Description of Artificial Sequence: Synthetic oligonucleotide
cacaaaugacuauuaacua

SEQ ID NO: 2766090 - RNA, 19 nt, Artificial Sequence
  Description of Artificial Sequence: Synthetic oligonucleotide
uaugaacauugcaguauuu

SEQ ID NO: 2766091 - RNA, 19 nt, Artificial Sequence
  Description of Artificial Sequence: Synthetic oligonucleotide
aaauuccucuaaguguuua

SEQ ID NO: 2766092 - RNA, 19 nt, Artificial Sequence
  Description of Artificial Sequence: Synthetic oligonucleotide
acuacgcaaaugcaaccau

SEQ ID NO: 2766093 - RNA, 19 nt, Artificial Sequence
  Description of Artificial Sequence: Synthetic oligonucleotide
uacucuuggguaacuuuua

SEQ ID NO: 2766094 - RNA, 19 nt, Artificial Sequence
  Description of Artificial Sequence: Synthetic oligonucleotide
cauaugacuaacagaggua

SEQ ID NO: 2766095 - RNA, 19 nt, Artificial Sequence
  Description of Artificial Sequence: Synthetic oligonucleotide
gaagaaaggugauauuguu

SEQ ID NO: 2766096 - RNA, 19 nt, Artificial Sequence
  Description of Artificial Sequence: Synthetic oligonucleotide
augaaauaccuaugcugaa

SEQ ID NO: 2766097 - RNA, 19 nt, Artificial Sequence
  Description of Artificial Sequence: Synthetic oligonucleotide
gugacucuguagaggauag

SEQ ID NO: 2766098 - RNA, 19 nt, Artificial Sequence
  Description of Artificial Sequence: Synthetic oligonucleotide
augcugaacuaagaaauau

SEQ ID NO: 2766099 - RNA, 19 nt, Artificial Sequence
  Description of Artificial Sequence: Synthetic oligonucleotide
ugccaucuuaaagggaaga

SEQ ID NO: 2766100 - RNA, 19 nt, Artificial Sequence
  Description of Artificial Sequence: Synthetic oligonucleotide
caugauaaggaagauugua

SEQ ID NO: 2766101 - RNA, 19 nt, Artificial Sequence
  Description of Artificial Sequence: Synthetic oligonucleotide
ccucagaauacacauacca

SEQ ID NO: 2766102 - RNA, 19 nt, Artificial Sequence
  Description of Artificial Sequence: Synthetic oligonucleotide
agugacucuguagaggaua

SEQ ID NO: 2766103 - RNA, 19 nt, Artificial Sequence
  Description of Artificial Sequence: Synthetic oligonucleotide
auaccaugcuaacacuguu

SEQ ID NO: 2766104 - RNA, 19 nt, Artificial Sequence
  Description of Artificial Sequence: Synthetic oligonucleotide
augccuagaucaguguuca

SEQ ID NO: 2766105 - RNA, 19 nt, Artificial Sequence
  Description of Artificial Sequence: Synthetic oligonucleotide
gaacaagguuucauaugac

SEQ ID NO: 2766106 - RNA, 19 nt, Artificial Sequence
  Description of Artificial Sequence: Synthetic oligonucleotide
cugaacuaagaaauaugua

SEQ ID NO: 2766107 - RNA, 19 nt, Artificial Sequence
  Description of Artificial Sequence: Synthetic oligonucleotide
acagagguaaggaggccag

SEQ ID NO: 2766108 - RNA, 19 nt, Artificial Sequence
  Description of Artificial Sequence: Synthetic oligonucleotide
cuguuaugaaugcuaagcu

SEQ ID NO: 2766109 - RNA, 19 nt, Artificial Sequence
  Description of Artificial Sequence: Synthetic oligonucleotide
uguagaggauagugaccac

SEQ ID NO: 2766110 - RNA, 19 nt, Artificial Sequence
  Description of Artificial Sequence: Synthetic oligonucleotide
uaacagagguaaggaggcc

SEQ ID NO: 2766111 - RNA, 19 nt, Artificial Sequence
  Description of Artificial Sequence: Synthetic oligonucleotide
aagcagaacuuaagucaug

SEQ ID NO: 2766112 - RNA, 19 nt, Artificial Sequence
  Description of Artificial Sequence: Synthetic oligonucleotide
agcuauguaucuguuccaa

SEQ ID NO: 2766113 - RNA, 19 nt, Artificial Sequence
  Description of Artificial Sequence: Synthetic oligonucleotide
gcugaacuaagaaauaugu

SEQ ID NO: 2766114 - RNA, 19 nt, Artificial Sequence
  Description of Artificial Sequence: Synthetic oligonucleotide
gguaacuuuuaaauuccuc

SEQ ID NO: 2766115 - RNA, 19 nt, Artificial Sequence
  Description of Artificial Sequence: Synthetic oligonucleotide
augcuaagcuauguaucug

SEQ ID NO: 2766116 - RNA, 19 nt, Artificial Sequence
  Description of Artificial Sequence: Synthetic oligonucleotide
guguuaaaucuguuaugaa

SEQ ID NO: 2766117 - RNA, 19 nt, Artificial Sequence
  Description of Artificial Sequence: Synthetic oligonucleotide
auuccucuaaguguuuaua

SEQ ID NO: 2766118 - RNA, 19 nt, Artificial Sequence
  Description of Artificial Sequence: Synthetic oligonucleotide
agaucaguguucauuuauu

SEQ ID NO: 2766119 - RNA, 19 nt, Artificial Sequence
  Description of Artificial Sequence: Synthetic oligonucleotide
cgcaaaugcaaccauuuuc

SEQ ID NO: 2766120 - RNA, 19 nt, Artificial Sequence
  Description of Artificial Sequence: Synthetic oligonucleotide
guuaaaugccuagaucagu

SEQ ID NO: 2766121 - RNA, 19 nt, Artificial Sequence
  Description of Artificial Sequence: Synthetic oligonucleotide
caccaaugauaacaagaga

SEQ ID NO: 2766122 - RNA, 19 nt, Artificial Sequence
  Description of Artificial Sequence: Synthetic oligonucleotide
cucagaauacacauaccau

SEQ ID NO: 2766123 - RNA, 19 nt, Artificial Sequence
  Description of Artificial Sequence: Synthetic oligonucleotide
ggauagugaccaccaauga

SEQ ID NO: 2766124 - RNA, 19 nt, Artificial Sequence
  Description of Artificial Sequence: Synthetic oligonucleotide
acucuauaacuaauaucaa

SEQ ID NO: 2766125 - RNA, 19 nt, Artificial Sequence
  Description of Artificial Sequence: Synthetic oligonucleotide
uuacuacucuuggguaacu

SEQ ID NO: 2766126 - RNA, 19 nt, Artificial Sequence
  Description of Artificial Sequence: Synthetic oligonucleotide
agaggauagugaccaccaa

SEQ ID NO: 2766127 - RNA, 19 nt, Artificial Sequence
  Description of Artificial Sequence: Synthetic oligonucleotide
agguuucauaugacuaaca

SEQ ID NO: 2766128 - RNA, 19 nt, Artificial Sequence
  Description of Artificial Sequence: Synthetic oligonucleotide
cuauauuaacuacgcaaau

SEQ ID NO: 2766129 - RNA, 19 nt, Artificial Sequence
  Description of Artificial Sequence: Synthetic oligonucleotide
uccaaccugcuuccuuuua

SEQ ID NO: 2766130 - RNA, 19 nt, Artificial Sequence
  Description of Artificial Sequence: Synthetic oligonucleotide
acgcaaaugcaaccauuuu

SEQ ID NO: 2766131 - RNA, 19 nt, Artificial Sequence
  Description of Artificial Sequence: Synthetic oligonucleotide
gcuauguaucuguuccaac

SEQ ID NO: 2766132 - RNA, 19 nt, Artificial Sequence
  Description of Artificial Sequence: Synthetic oligonucleotide
guaagucacaaaugacuau

SEQ ID NO: 2766133 - RNA, 19 nt, Artificial Sequence
  Description of Artificial Sequence: Synthetic oligonucleotide
agggaagaaaggugauauu

SEQ ID NO: 2766134 - RNA, 19 nt, Artificial Sequence
  Description of Artificial Sequence: Synthetic oligonucleotide
uacuacucuuggguaacuu

SEQ ID NO: 2766135 - RNA, 19 nt, Artificial Sequence
  Description of Artificial Sequence: Synthetic oligonucleotide
caguguucauuuauuuccu

SEQ ID NO: 2766136 - RNA, 19 nt, Artificial Sequence
  Description of Artificial Sequence: Synthetic oligonucleotide
gugccaucuuaaagggaag

SEQ ID NO: 2766137 - RNA, 19 nt, Artificial Sequence
  Description of Artificial Sequence: Synthetic oligonucleotide
ggaagaaaggugauauugu

SEQ ID NO: 2766138 - RNA, 19 nt, Artificial Sequence
  Description of Artificial Sequence: Synthetic oligonucleotide
ggggaaugaacaagguuuc

SEQ ID NO: 2766139 - RNA, 19 nt, Artificial Sequence
  Description of Artificial Sequence: Synthetic oligonucleotide
guaaggaggccagugcugu

SEQ ID NO: 2766140 - RNA, 19 nt, Artificial Sequence
  Description of Artificial Sequence: Synthetic oligonucleotide
cuagaucaguguucauuua

SEQ ID NO: 2766141 - RNA, 19 nt, Artificial Sequence
  Description of Artificial Sequence: Synthetic oligonucleotide
ccucuaaguguuuauauau

SEQ ID NO: 2766142 - RNA, 19 nt, Artificial Sequence
  Description of Artificial Sequence: Synthetic oligonucleotide
cacuguuaaaugccuagau

SEQ ID NO: 2766143 - RNA, 19 nt, Artificial Sequence
  Description of Artificial Sequence: Synthetic oligonucleotide
ugacucuguagaggauagu

SEQ ID NO: 2766144 - RNA, 19 nt, Artificial Sequence
  Description of Artificial Sequence: Synthetic oligonucleotide
ccuuuuaguccaauagaaa

SEQ ID NO: 2766145 - RNA, 19 nt, Artificial Sequence
  Description of Artificial Sequence: Synthetic oligonucleotide
auuccucagaauacacaua

SEQ ID NO: 2766146 - RNA, 19 nt, Artificial Sequence
  Description of Artificial Sequence: Synthetic oligonucleotide
cacauaccaugcuaacacu

SEQ ID NO: 2766147 - RNA, 19 nt, Artificial Sequence
  Description of Artificial Sequence: Synthetic oligonucleotide
gcaaccauuuucaguaucu

SEQ ID NO: 2766148 - RNA, 19 nt, Artificial Sequence
  Description of Artificial Sequence: Synthetic oligonucleotide
ccaaugauaacaagagaau

SEQ ID NO: 2766149 - RNA, 19 nt, Artificial Sequence
  Description of Artificial Sequence: Synthetic oligonucleotide
ggaaugaacaagguuucau

SEQ ID NO: 2766150 - RNA, 19 nt, Artificial Sequence
  Description of Artificial Sequence: Synthetic oligonucleotide
guaucuguuccaaccugcu

SEQ ID NO: 2766151 - RNA, 19 nt, Artificial Sequence
  Description of Artificial Sequence: Synthetic oligonucleotide
gauuuguguuaaaucuguu

SEQ ID NO: 2766152 - RNA, 19 nt, Artificial Sequence
  Description of Artificial Sequence: Synthetic oligonucleotide
ccuagaucaguguucauuu

SEQ ID NO: 2766153 - RNA, 19 nt, Artificial Sequence
  Description of Artificial Sequence: Synthetic oligonucleotide
gcauuuaauuccucagaau

SEQ ID NO: 2766154 - RNA, 19 nt, Artificial Sequence
  Description of Artificial Sequence: Synthetic oligonucleotide
cuacgcaaaugcaaccauu

SEQ ID NO: 2766155 - RNA, 19 nt, Artificial Sequence
  Description of Artificial Sequence: Synthetic oligonucleotide
gccaucuuaaagggaagaa

SEQ ID NO: 2766156 - RNA, 19 nt, Artificial Sequence
  Description of Artificial Sequence: Synthetic oligonucleotide
ugccuagaucaguguucau

SEQ ID NO: 2766157 - RNA, 19 nt, Artificial Sequence
  Description of Artificial Sequence: Synthetic oligonucleotide
gggaaugaacaagguuuca

SEQ ID NO: 2766158 - RNA, 19 nt, Artificial Sequence
  Description of Artificial Sequence: Synthetic oligonucleotide
ggccagugcuguugaagaa

SEQ ID NO: 2766159 - RNA, 19 nt, Artificial Sequence
  Description of Artificial Sequence: Synthetic oligonucleotide
gccuagaucaguguucauu

SEQ ID NO: 2766160 - RNA, 19 nt, Artificial Sequence
  Description of Artificial Sequence: Synthetic oligonucleotide
ggguaacuuuuaaauuccu

SEQ ID NO: 2766161 - RNA, 19 nt, Artificial Sequence
  Description of Artificial Sequence: Synthetic oligonucleotide
gcagaacuuaagucaugau

SEQ ID NO: 2766162 - RNA, 19 nt, Artificial Sequence
  Description of Artificial Sequence: Synthetic oligonucleotide
caaccauuuucaguaucuu

SEQ ID NO: 2766163 - RNA, 19 nt, Artificial Sequence
  Description of Artificial Sequence: Synthetic oligonucleotide
ccagugcuguugaagaauu

SEQ ID NO: 2766164 - RNA, 19 nt, Artificial Sequence
  Description of Artificial Sequence: Synthetic oligonucleotide
ccaugcuaacacuguuaaa

SEQ ID NO: 2766165 - RNA, 19 nt, Artificial Sequence
  Description of Artificial Sequence: Synthetic oligonucleotide
gccagugcuguugaagaau

SEQ ID NO: 2766166 - RNA, 19 nt, Artificial Sequence
  Description of Artificial Sequence: Synthetic oligonucleotide
cagugcuguugaagaauuu

SEQ ID NO: 2766167 - RNA, 19 nt, Artificial Sequence
  Description of Artificial Sequence: Synthetic oligonucleotide
ccaaccugcuuccuuuuau

SEQ ID NO: 2766168 - RNA, 19 nt, Artificial Sequence
  Description of Artificial Sequence: Synthetic oligonucleotide
gcuaagcuauguaucuguu

SEQ ID NO: 2766169 - RNA, 19 nt, Artificial Sequence
  Description of Artificial Sequence: Synthetic oligonucleotide
cagugacucuguagaggau

SEQ ID NO: 2766170 - RNA, 19 nt, Artificial Sequence
  Description of Artificial Sequence: Synthetic oligonucleotide
cagagguaaggaggccagu

SEQ ID NO: 2766171 - RNA, 19 nt, Artificial Sequence
  Description of Artificial Sequence: Synthetic oligonucleotide
cuguuccaaccugcuuccu

SEQ ID NO: 2766172 - RNA, 19 nt, Artificial Sequence
  Description of Artificial Sequence: Synthetic oligonucleotide
auagaauuaaaauaaaacc

SEQ ID NO: 2766173 - RNA, 19 nt, Artificial Sequence
  Description of Artificial Sequence: Synthetic oligonucleotide
aauagaauuaaaauaaaac

SEQ ID NO: 2766174 - RNA, 19 nt, Artificial Sequence
  Description of Artificial Sequence: Synthetic oligonucleotide
aauacaagccaccaagucc

SEQ ID NO: 2766175 - RNA, 19 nt, Artificial Sequence
  Description of Artificial Sequence: Synthetic oligonucleotide
uauuauauaccuaagauau

SEQ ID NO: 2766176 - RNA, 19 nt, Artificial Sequence
  Description of Artificial Sequence: Synthetic oligonucleotide
acuacauuagguuaaacac

SEQ ID NO: 2766177 - RNA, 19 nt, Artificial Sequence
  Description of Artificial Sequence: Synthetic oligonucleotide
uagaauuaaaauaaaacca

SEQ ID NO: 2766178 - RNA, 19 nt, Artificial Sequence
  Description of Artificial Sequence: Synthetic oligonucleotide
uaaaauaaaaccacuacca

SEQ ID NO: 2766179 - RNA, 19 nt, Artificial Sequence
  Description of Artificial Sequence: Synthetic oligonucleotide
aaacaaacagacuaagagg

SEQ ID NO: 2766180 - RNA, 19 nt, Artificial Sequence
  Description of Artificial Sequence: Synthetic oligonucleotide
aacuaugugcguuugauuc

SEQ ID NO: 2766181 - RNA, 19 nt, Artificial Sequence
  Description of Artificial Sequence: Synthetic oligonucleotide
aaaaguuauggcuucaaag

SEQ ID NO: 2766182 - RNA, 19 nt, Artificial Sequence
  Description of Artificial Sequence: Synthetic oligonucleotide
uuaaacaccauauucaacu

SEQ ID NO: 2766183 - RNA, 19 nt, Artificial Sequence
  Description of Artificial Sequence: Synthetic oligonucleotide
aauugucacauagagaugg

SEQ ID NO: 2766184 - RNA, 19 nt, Artificial Sequence
  Description of Artificial Sequence: Synthetic oligonucleotide
aaaguuauggcuucaaagu

SEQ ID NO: 2766185 - RNA, 19 nt, Artificial Sequence
  Description of Artificial Sequence: Synthetic oligonucleotide
aagacaaacauuuccagug

SEQ ID NO: 2766186 - RNA, 19 nt, Artificial Sequence
  Description of Artificial Sequence: Synthetic oligonucleotide
ucuagaauucauuaaauac

SEQ ID NO: 2766187 - RNA, 19 nt, Artificial Sequence
  Description of Artificial Sequence: Synthetic oligonucleotide
augugcauggaauacaagc

SEQ ID NO: 2766188 - RNA, 19 nt, Artificial Sequence
  Description of Artificial Sequence: Synthetic oligonucleotide
aaaauaaaaccacuaccag

SEQ ID NO: 2766189 - RNA, 19 nt, Artificial Sequence
  Description of Artificial Sequence: Synthetic oligonucleotide
aaauauacacugcaguuug

SEQ ID NO: 2766190 - RNA, 19 nt, Artificial Sequence
  Description of Artificial Sequence: Synthetic oligonucleotide
uguuuuguuuguuuuaggg

SEQ ID NO: 2766191 - RNA, 19 nt, Artificial Sequence
  Description of Artificial Sequence: Synthetic oligonucleotide
caaaucaccacccacagcc

SEQ ID NO: 2766192 - RNA, 19 nt, Artificial Sequence
  Description of Artificial Sequence: Synthetic oligonucleotide
auucaacucagauugcucc

SEQ ID NO: 2766193 - RNA, 19 nt, Artificial Sequence
  Description of Artificial Sequence: Synthetic oligonucleotide
agaauuaaaauaaaaccac

SEQ ID NO: 2766194 - RNA, 19 nt, Artificial Sequence
  Description of Artificial Sequence: Synthetic oligonucleotide
uuauauaccuaagauaugc

SEQ ID NO: 2766195 - RNA, 19 nt, Artificial Sequence
  Description of Artificial Sequence: Synthetic oligonucleotide
uucaaaguuauuauauacc

SEQ ID NO: 2766196 - RNA, 19 nt, Artificial Sequence
  Description of Artificial Sequence: Synthetic oligonucleotide
aaauaaaaccacuaccagu

SEQ ID NO: 2766197 - RNA, 19 nt, Artificial Sequence
  Description of Artificial Sequence: Synthetic oligonucleotide
uggaauacaagccaccaag

SEQ ID NO: 2766198 - RNA, 19 nt, Artificial Sequence
  Description of Artificial Sequence: Synthetic oligonucleotide
ucaaaguuauuauauaccu

SEQ ID NO: 2766199 - RNA, 19 nt, Artificial Sequence
  Description of Artificial Sequence: Synthetic oligonucleotide
accacuaccaguuaaaagu

SEQ ID NO: 2766200 - RNA, 19 nt, Artificial Sequence
  Description of Artificial Sequence: Synthetic oligonucleotide
ugcaaagacaaacauuucc

SEQ ID NO: 2766201 - RNA, 19 nt, Artificial Sequence
  Description of Artificial Sequence: Synthetic oligonucleotide
ucauuaaauacuacauuag

SEQ ID NO: 2766202 - RNA, 19 nt, Artificial Sequence
  Description of Artificial Sequence: Synthetic oligonucleotide
uauaccuaagauaugcuga

SEQ ID NO: 2766203 - RNA, 19 nt, Artificial Sequence
  Description of Artificial Sequence: Synthetic oligonucleotide
uucauuaaauacuacauua

SEQ ID NO: 2766204 - RNA, 19 nt, Artificial Sequence
  Description of Artificial Sequence: Synthetic oligonucleotide
uacaagaaggcucaugcag

SEQ ID NO: 2766205 - RNA, 19 nt, Artificial Sequence
  Description of Artificial Sequence: Synthetic oligonucleotide
uacauuagguuaaacacca

SEQ ID NO: 2766206 - RNA, 19 nt, Artificial Sequence
  Description of Artificial Sequence: Synthetic oligonucleotide
accaguuaaaaguuauggc

SEQ ID NO: 2766207 - RNA, 19 nt, Artificial Sequence
  Description of Artificial Sequence: Synthetic oligonucleotide
cauuaaauacuacauuagg

SEQ ID NO: 2766208 - RNA, 19 nt, Artificial Sequence
  Description of Artificial Sequence: Synthetic oligonucleotide
aacaaacagacuaagaggu

SEQ ID NO: 2766209 - RNA, 19 nt, Artificial Sequence
  Description of Artificial Sequence: Synthetic oligonucleotide
agagguaauugucacauag

SEQ ID NO: 2766210 - RNA, 19 nt, Artificial Sequence
  Description of Artificial Sequence: Synthetic oligonucleotide
acuaagagguaauugucac

SEQ ID NO: 2766211 - RNA, 19 nt, Artificial Sequence
  Description of Artificial Sequence: Synthetic oligonucleotide
gaauucauuaaauacuaca

SEQ ID NO: 2766212 - RNA, 19 nt, Artificial Sequence
  Description of Artificial Sequence: Synthetic oligonucleotide
ugugcauggaauacaagcc

SEQ ID NO: 2766213 - RNA, 19 nt, Artificial Sequence
  Description of Artificial Sequence: Synthetic oligonucleotide
uuuuguuuguuuuagggau

SEQ ID NO: 2766214 - RNA, 19 nt, Artificial Sequence
  Description of Artificial Sequence: Synthetic oligonucleotide
aauaaaaccacuaccaguu

SEQ ID NO: 2766215 - RNA, 19 nt, Artificial Sequence
  Description of Artificial Sequence: Synthetic oligonucleotide
gaugguuaaaauaaaauaa

SEQ ID NO: 2766216 - RNA, 19 nt, Artificial Sequence
  Description of Artificial Sequence: Synthetic oligonucleotide
uacuacauuagguuaaaca

SEQ ID NO: 2766217 - RNA, 19 nt, Artificial Sequence
  Description of Artificial Sequence: Synthetic oligonucleotide
guaauugucacauagagau

SEQ ID NO: 2766218 - RNA, 19 nt, Artificial Sequence
  Description of Artificial Sequence: Synthetic oligonucleotide
uaccaguuaaaaguuaugg

SEQ ID NO: 2766219 - RNA, 19 nt, Artificial Sequence
  Description of Artificial Sequence: Synthetic oligonucleotide
cuucaaaguuauuauauac

SEQ ID NO: 2766220 - RNA, 19 nt, Artificial Sequence
  Description of Artificial Sequence: Synthetic oligonucleotide
agguaauugucacauagag

SEQ ID NO: 2766221 - RNA, 19 nt, Artificial Sequence
  Description of Artificial Sequence: Synthetic oligonucleotide
aaagacaaacauuuccagu

SEQ ID NO: 2766222 - RNA, 19 nt, Artificial Sequence
  Description of Artificial Sequence: Synthetic oligonucleotide
uagguuaaacaccauauuc

SEQ ID NO: 2766223 - RNA, 19 nt, Artificial Sequence
  Description of Artificial Sequence: Synthetic oligonucleotide
agauaugcugaccaaauca

SEQ ID NO: 2766224 - RNA, 19 nt, Artificial Sequence
  Description of Artificial Sequence: Synthetic oligonucleotide
aauucauuaaauacuacau

SEQ ID NO: 2766225 - RNA, 19 nt, Artificial Sequence
  Description of Artificial Sequence: Synthetic oligonucleotide
ugcaguuugcagaaucugg

SEQ ID NO: 2766226 - RNA, 19 nt, Artificial Sequence
  Description of Artificial Sequence: Synthetic oligonucleotide
uaugcugaccaaaucacca

SEQ ID NO: 2766227 - RNA, 19 nt, Artificial Sequence
  Description of Artificial Sequence: Synthetic oligonucleotide
cuacauuagguuaaacacc

SEQ ID NO: 2766228 - RNA, 19 nt, Artificial Sequence
  Description of Artificial Sequence: Synthetic oligonucleotide
aguuaaaaguuauggcuuc

SEQ ID NO: 2766229 - RNA, 19 nt, Artificial Sequence
  Description of Artificial Sequence: Synthetic oligonucleotide
auaccuaagauaugcugac

SEQ ID NO: 2766230 - RNA, 19 nt, Artificial Sequence
  Description of Artificial Sequence: Synthetic oligonucleotide
uggacaaugcacgagaggc

SEQ ID NO: 2766231 - RNA, 19 nt, Artificial Sequence
  Description of Artificial Sequence: Synthetic oligonucleotide
aguuauuauauaccuaaga

SEQ ID NO: 2766232 - RNA, 19 nt, Artificial Sequence
  Description of Artificial Sequence: Synthetic oligonucleotide
uuuugugguguuuuguuug

SEQ ID NO: 2766233 - RNA, 19 nt, Artificial Sequence
  Description of Artificial Sequence: Synthetic oligonucleotide
agaugguuaaaauaaaaua

SEQ ID NO: 2766234 - RNA, 19 nt, Artificial Sequence
  Description of Artificial Sequence: Synthetic oligonucleotide
uagaauucauuaaauacua

SEQ ID NO: 2766235 - RNA, 19 nt, Artificial Sequence
  Description of Artificial Sequence: Synthetic oligonucleotide
aagauaugcugaccaaauc

SEQ ID NO: 2766236 - RNA, 19 nt, Artificial Sequence
  Description of Artificial Sequence: Synthetic oligonucleotide
ccauauucaacucagauug

SEQ ID NO: 2766237 - RNA, 19 nt, Artificial Sequence
  Description of Artificial Sequence: Synthetic oligonucleotide
gauugcucccuucaguggg

SEQ ID NO: 2766238 - RNA, 19 nt, Artificial Sequence
  Description of Artificial Sequence: Synthetic oligonucleotide
ugugcguuugauucuagag

SEQ ID NO: 2766239 - RNA, 19 nt, Artificial Sequence
  Description of Artificial Sequence: Synthetic oligonucleotide
uggaaacaggcucaggugc

SEQ ID NO: 2766240 - RNA, 19 nt, Artificial Sequence
  Description of Artificial Sequence: Synthetic oligonucleotide
auauaccuaagauaugcug

SEQ ID NO: 2766241 - RNA, 19 nt, Artificial Sequence
  Description of Artificial Sequence: Synthetic oligonucleotide
agugacugaacuaugugcg

SEQ ID NO: 2766242 - RNA, 19 nt, Artificial Sequence
  Description of Artificial Sequence: Synthetic oligonucleotide
auuaaauacuacauuaggu

SEQ ID NO: 2766243 - RNA, 19 nt, Artificial Sequence
  Description of Artificial Sequence: Synthetic oligonucleotide
ucaguggggacccugaagu

SEQ ID NO: 2766244 - RNA, 19 nt, Artificial Sequence
  Description of Artificial Sequence: Synthetic oligonucleotide
aacaccauauucaacucag

SEQ ID NO: 2766245 - RNA, 19 nt, Artificial Sequence
  Description of Artificial Sequence: Synthetic oligonucleotide
aguggaaacaggcucaggu

SEQ ID NO: 2766246 - RNA, 19 nt, Artificial Sequence
  Description of Artificial Sequence: Synthetic oligonucleotide
aaccacuaccaguuaaaag

SEQ ID NO: 2766247 - RNA, 19 nt, Artificial Sequence
  Description of Artificial Sequence: Synthetic oligonucleotide
uccaguacaagaaggcuca

SEQ ID NO: 2766248 - RNA, 19 nt, Artificial Sequence
  Description of Artificial Sequence: Synthetic oligonucleotide
uguuuuagggauuucuuua

SEQ ID NO: 2766249 - RNA, 19 nt, Artificial Sequence
  Description of Artificial Sequence: Synthetic oligonucleotide
aaacaccauauucaacuca

SEQ ID NO: 2766250 - RNA, 19 nt, Artificial Sequence
  Description of Artificial Sequence: Synthetic oligonucleotide
uuugauucuagaguaauuu

SEQ ID NO: 2766251 - RNA, 19 nt, Artificial Sequence
  Description of Artificial Sequence: Synthetic oligonucleotide
augcgaaucucucaucuuc

SEQ ID NO: 2766252 - RNA, 19 nt, Artificial Sequence
  Description of Artificial Sequence: Synthetic oligonucleotide
uaagauaugcugaccaaau

SEQ ID NO: 2766253 - RNA, 19 nt, Artificial Sequence
  Description of Artificial Sequence: Synthetic oligonucleotide
ucaggugcaaagacaaaca

SEQ ID NO: 2766254 - RNA, 19 nt, Artificial Sequence
  Description of Artificial Sequence: Synthetic oligonucleotide
ucaucagagacuccaguac

SEQ ID NO: 2766255 - RNA, 19 nt, Artificial Sequence
  Description of Artificial Sequence: Synthetic oligonucleotide
ugucacauagagaugguua

SEQ ID NO: 2766256 - RNA, 19 nt, Artificial Sequence
  Description of Artificial Sequence: Synthetic oligonucleotide
uuuagggauuucuuuaaaa

SEQ ID NO: 2766257 - RNA, 19 nt, Artificial Sequence
  Description of Artificial Sequence: Synthetic oligonucleotide
caaagacaaacauuuccag

SEQ ID NO: 2766258 - RNA, 19 nt, Artificial Sequence
  Description of Artificial Sequence: Synthetic oligonucleotide
uaagagguaauugucacau

SEQ ID NO: 2766259 - RNA, 19 nt, Artificial Sequence
  Description of Artificial Sequence: Synthetic oligonucleotide
uauauaccuaagauaugcu

SEQ ID NO: 2766260 - RNA, 19 nt, Artificial Sequence
  Description of Artificial Sequence: Synthetic oligonucleotide
augcacgagaggcugaggg

SEQ ID NO: 2766261 - RNA, 19 nt, Artificial Sequence
  Description of Artificial Sequence: Synthetic oligonucleotide
aauauacacugcaguuugc

SEQ ID NO: 2766262 - RNA, 19 nt, Artificial Sequence
  Description of Artificial Sequence: Synthetic oligonucleotide
guuauuauauaccuaagau

SEQ ID NO: 2766263 - RNA, 19 nt, Artificial Sequence
  Description of Artificial Sequence: Synthetic oligonucleotide
uauacacugcaguuugcag

SEQ ID NO: 2766264 - RNA, 19 nt, Artificial Sequence
  Description of Artificial Sequence: Synthetic oligonucleotide
aaguuauggcuucaaaguu

SEQ ID NO: 2766265 - RNA, 19 nt, Artificial Sequence
  Description of Artificial Sequence: Synthetic oligonucleotide
ugcguuugauucuagagua

SEQ ID NO: 2766266 - RNA, 19 nt, Artificial Sequence
  Description of Artificial Sequence: Synthetic oligonucleotide
cagugacugaacuaugugc

SEQ ID NO: 2766267 - RNA, 19 nt, Artificial Sequence
  Description of Artificial Sequence: Synthetic oligonucleotide
uaaaaccacuaccaguuaa

SEQ ID NO: 2766268 - RNA, 19 nt, Artificial Sequence
  Description of Artificial Sequence: Synthetic oligonucleotide
accuaagauaugcugacca

SEQ ID NO: 2766269 - RNA, 19 nt, Artificial Sequence
  Description of Artificial Sequence: Synthetic oligonucleotide
caaacauuuccagugacug

SEQ ID NO: 2766270 - RNA, 19 nt, Artificial Sequence
  Description of Artificial Sequence: Synthetic oligonucleotide
cuagaauucauuaaauacu

SEQ ID NO: 2766271 - RNA, 19 nt, Artificial Sequence
  Description of Artificial Sequence: Synthetic oligonucleotide
aaccagguggacaaugcac

SEQ ID NO: 2766272 - RNA, 19 nt, Artificial Sequence
  Description of Artificial Sequence: Synthetic oligonucleotide
auacacugcaguuugcaga

SEQ ID NO: 2766273 - RNA, 19 nt, Artificial Sequence
  Description of Artificial Sequence: Synthetic oligonucleotide
gauaugcugaccaaaucac

SEQ ID NO: 2766274 - RNA, 19 nt, Artificial Sequence
  Description of Artificial Sequence: Synthetic oligonucleotide
ucagggauggggaugugca

SEQ ID NO: 2766275 - RNA, 19 nt, Artificial Sequence
  Description of Artificial Sequence: Synthetic oligonucleotide
aaucaccacccacagccag

SEQ ID NO: 2766276 - RNA, 19 nt, Artificial Sequence
  Description of Artificial Sequence: Synthetic oligonucleotide
uuugcagaaucuggggugg

SEQ ID NO: 2766277 - RNA, 19 nt, Artificial Sequence
  Description of Artificial Sequence: Synthetic oligonucleotide
aacaggcucaggugcaaag

SEQ ID NO: 2766278 - RNA, 19 nt, Artificial Sequence
  Description of Artificial Sequence: Synthetic oligonucleotide
uuuguuuuagggauuucuu

SEQ ID NO: 2766279 - RNA, 19 nt, Artificial Sequence
  Description of Artificial Sequence: Synthetic oligonucleotide
uucuagaauucauuaaaua

SEQ ID NO: 2766280 - RNA, 19 nt, Artificial Sequence
  Description of Artificial Sequence: Synthetic oligonucleotide
auucauuaaauacuacauu

SEQ ID NO: 2766281 - RNA, 19 nt, Artificial Sequence
  Description of Artificial Sequence: Synthetic oligonucleotide
auuagguuaaacaccauau

SEQ ID NO: 2766282 - RNA, 19 nt, Artificial Sequence
  Description of Artificial Sequence: Synthetic oligonucleotide
gagacuccaguacaagaag

SEQ ID NO: 2766283 - RNA, 19 nt, Artificial Sequence
  Description of Artificial Sequence: Synthetic oligonucleotide
aaacauuuccagugacuga

SEQ ID NO: 2766284 - RNA, 19 nt, Artificial Sequence
  Description of Artificial Sequence: Synthetic oligonucleotide
guuugcagaaucuggggug

SEQ ID NO: 2766285 - RNA, 19 nt, Artificial Sequence
  Description of Artificial Sequence: Synthetic oligonucleotide
uaaaaguuauggcuucaaa

SEQ ID NO: 2766286 - RNA, 19 nt, Artificial Sequence
  Description of Artificial Sequence: Synthetic oligonucleotide
ugcauggaauacaagccac

SEQ ID NO: 2766287 - RNA, 19 nt, Artificial Sequence
  Description of Artificial Sequence: Synthetic oligonucleotide
aguuugcagaaucuggggu

SEQ ID NO: 2766288 - RNA, 19 nt, Artificial Sequence
  Description of Artificial Sequence: Synthetic oligonucleotide
gaauacaagccaccaaguc

SEQ ID NO: 2766289 - RNA, 19 nt, Artificial Sequence
  Description of Artificial Sequence: Synthetic oligonucleotide
ugcgaaucucucaucuucc

SEQ ID NO: 2766290 - RNA, 19 nt, Artificial Sequence
  Description of Artificial Sequence: Synthetic oligonucleotide
aaucucucaucuucccucu

SEQ ID NO: 2766291 - RNA, 19 nt, Artificial Sequence
  Description of Artificial Sequence: Synthetic oligonucleotide
uuuccagugacugaacuau

SEQ ID NO: 2766292 - RNA, 19 nt, Artificial Sequence
  Description of Artificial Sequence: Synthetic oligonucleotide
ucagauugcucccuucagu

SEQ ID NO: 2766293 - RNA, 19 nt, Artificial Sequence
  Description of Artificial Sequence: Synthetic oligonucleotide
aggaacucacugcugagug

SEQ ID NO: 2766294 - RNA, 19 nt, Artificial Sequence
  Description of Artificial Sequence: Synthetic oligonucleotide
uauucaacucagauugcuc

SEQ ID NO: 2766295 - RNA, 19 nt, Artificial Sequence
  Description of Artificial Sequence: Synthetic oligonucleotide
auaugcugaccaaaucacc

SEQ ID NO: 2766296 - RNA, 19 nt, Artificial Sequence
  Description of Artificial Sequence: Synthetic oligonucleotide
aacucagauugcucccuuc

SEQ ID NO: 2766297 - RNA, 19 nt, Artificial Sequence
  Description of Artificial Sequence: Synthetic oligonucleotide
accaaaucaccacccacag

SEQ ID NO: 2766298 - RNA, 19 nt, Artificial Sequence
  Description of Artificial Sequence: Synthetic oligonucleotide
ugcugaccaaaucaccacc

SEQ ID NO: 2766299 - RNA, 19 nt, Artificial Sequence
  Description of Artificial Sequence: Synthetic oligonucleotide
agguuaaacaccauauuca

SEQ ID NO: 2766300 - RNA, 19 nt, Artificial Sequence
  Description of Artificial Sequence: Synthetic oligonucleotide
augcugaccaaaucaccac

SEQ ID NO: 2766301 - RNA, 19 nt, Artificial Sequence
  Description of Artificial Sequence: Synthetic oligonucleotide
aaguuauuauauaccuaag

SEQ ID NO: 2766302 - RNA, 19 nt, Artificial Sequence
  Description of Artificial Sequence: Synthetic oligonucleotide
uuagguuaaacaccauauu

SEQ ID NO: 2766303 - RNA, 19 nt, Artificial Sequence
  Description of Artificial Sequence: Synthetic oligonucleotide
uacacugcaguuugcagaa

SEQ ID NO: 2766304 - RNA, 19 nt, Artificial Sequence
  Description of Artificial Sequence: Synthetic oligonucleotide
cagauugcucccuucagug

SEQ ID NO: 2766305 - RNA, 19 nt, Artificial Sequence
  Description of Artificial Sequence: Synthetic oligonucleotide
uaauugucacauagagaug

SEQ ID NO: 2766306 - RNA, 19 nt, Artificial Sequence
  Description of Artificial Sequence: Synthetic oligonucleotide
agacuaagagguaauuguc

SEQ ID NO: 2766307 - RNA, 19 nt, Artificial Sequence
  Description of Artificial Sequence: Synthetic oligonucleotide
uccagugacugaacuaugu

SEQ ID NO: 2766308 - RNA, 19 nt, Artificial Sequence
  Description of Artificial Sequence: Synthetic oligonucleotide
auggcuucaaaguuauuau

SEQ ID NO: 2766309 - RNA, 19 nt, Artificial Sequence
  Description of Artificial Sequence: Synthetic oligonucleotide
ucuacccucaucagagacu

SEQ ID NO: 2766310 - RNA, 19 nt, Artificial Sequence
  Description of Artificial Sequence: Synthetic oligonucleotide
accauauucaacucagauu

SEQ ID NO: 2766311 - RNA, 19 nt, Artificial Sequence
  Description of Artificial Sequence: Synthetic oligonucleotide
cauagagaugguuaaaaua

SEQ ID NO: 2766312 - RNA, 19 nt, Artificial Sequence
  Description of Artificial Sequence: Synthetic oligonucleotide
uuuuagggauuucuuuaaa

SEQ ID NO: 2766313 - RNA, 19 nt, Artificial Sequence
  Description of Artificial Sequence: Synthetic oligonucleotide
uaaacaccauauucaacuc

SEQ ID NO: 2766314 - RNA, 19 nt, Artificial Sequence
  Description of Artificial Sequence: Synthetic oligonucleotide
uucaguggggacccugaag

SEQ ID NO: 2766315 - RNA, 19 nt, Artificial Sequence
  Description of Artificial Sequence: Synthetic oligonucleotide
agauugcucccuucagugg

SEQ ID NO: 2766316 - RNA, 19 nt, Artificial Sequence
  Description of Artificial Sequence: Synthetic oligonucleotide
ugaacuaugugcguuugau

SEQ ID NO: 2766317 - RNA, 19 nt, Artificial Sequence
  Description of Artificial Sequence: Synthetic oligonucleotide
agaauucauuaaauacuac

SEQ ID NO: 2766318 - RNA, 19 nt, Artificial Sequence
  Description of Artificial Sequence: Synthetic oligonucleotide
gacaaacauuuccagugac

SEQ ID NO: 2766319 - RNA, 19 nt, Artificial Sequence
  Description of Artificial Sequence: Synthetic oligonucleotide
ugaccaaaucaccacccac

SEQ ID NO: 2766320 - RNA, 19 nt, Artificial Sequence
  Description of Artificial Sequence: Synthetic oligonucleotide
gacaaugcacgagaggcug

SEQ ID NO: 2766321 - RNA, 19 nt, Artificial Sequence
  Description of Artificial Sequence: Synthetic oligonucleotide
uagagaugguuaaaauaaa

SEQ ID NO: 2766322 - RNA, 19 nt, Artificial Sequence
  Description of Artificial Sequence: Synthetic oligonucleotide
acagacuaagagguaauug

SEQ ID NO: 2766323 - RNA, 19 nt, Artificial Sequence
  Description of Artificial Sequence: Synthetic oligonucleotide
ucucaucuucccucuaccc

SEQ ID NO: 2766324 - RNA, 19 nt, Artificial Sequence
  Description of Artificial Sequence: Synthetic oligonucleotide
cucaggugcaaagacaaac

SEQ ID NO: 2766325 - RNA, 19 nt, Artificial Sequence
  Description of Artificial Sequence: Synthetic oligonucleotide
caguuugcagaaucugggg

SEQ ID NO: 2766326 - RNA, 19 nt, Artificial Sequence
  Description of Artificial Sequence: Synthetic oligonucleotide
uuguuuuagggauuucuuu

SEQ ID NO: 2766327 - RNA, 19 nt, Artificial Sequence
  Description of Artificial Sequence: Synthetic oligonucleotide
acauagagaugguuaaaau

SEQ ID NO: 2766328 - RNA, 19 nt, Artificial Sequence
  Description of Artificial Sequence: Synthetic oligonucleotide
aaaaccacuaccaguuaaa

SEQ ID NO: 2766329 - RNA, 19 nt, Artificial Sequence
  Description of Artificial Sequence: Synthetic oligonucleotide
aggaggaacucacugcuga

SEQ ID NO: 2766330 - RNA, 19 nt, Artificial Sequence
  Description of Artificial Sequence: Synthetic oligonucleotide
accagguggacaaugcacg

SEQ ID NO: 2766331 - RNA, 19 nt, Artificial Sequence
  Description of Artificial Sequence: Synthetic oligonucleotide
uuugugguguuuuguuugu

SEQ ID NO: 2766332 - RNA, 19 nt, Artificial Sequence
  Description of Artificial Sequence: Synthetic oligonucleotide
auauucaacucagauugcu

SEQ ID NO: 2766333 - RNA, 19 nt, Artificial Sequence
  Description of Artificial Sequence: Synthetic oligonucleotide
agacaaacauuuccaguga

SEQ ID NO: 2766334 - RNA, 19 nt, Artificial Sequence
  Description of Artificial Sequence: Synthetic oligonucleotide
aauacuacauuagguuaaa

SEQ ID NO: 2766335 - RNA, 19 nt, Artificial Sequence
  Description of Artificial Sequence: Synthetic oligonucleotide
uugauucuagaguaauuuu

SEQ ID NO: 2766336 - RNA, 19 nt, Artificial Sequence
  Description of Artificial Sequence: Synthetic oligonucleotide
acuaugugcguuugauucu

SEQ ID NO: 2766337 - RNA, 19 nt, Artificial Sequence
  Description of Artificial Sequence: Synthetic oligonucleotide
caugcagaugccucccucc

SEQ ID NO: 2766338 - RNA, 19 nt, Artificial Sequence
  Description of Artificial Sequence: Synthetic oligonucleotide
cuucccucuacccucauca

SEQ ID NO: 2766339 - RNA, 19 nt, Artificial Sequence
  Description of Artificial Sequence: Synthetic oligonucleotide
gacuccaguacaagaaggc

SEQ ID NO: 2766340 - RNA, 19 nt, Artificial Sequence
  Description of Artificial Sequence: Synthetic oligonucleotide
cauauucaacucagauugc

SEQ ID NO: 2766341 - RNA, 19 nt, Artificial Sequence
  Description of Artificial Sequence: Synthetic oligonucleotide
ucucucaucuucccucuac

SEQ ID NO: 2766342 - RNA, 19 nt, Artificial Sequence
  Description of Artificial Sequence: Synthetic oligonucleotide
cucacugcugaguggaaac

SEQ ID NO: 2766343 - RNA, 19 nt, Artificial Sequence
  Description of Artificial Sequence: Synthetic oligonucleotide
gacuaagagguaauuguca

SEQ ID NO: 2766344 - RNA, 19 nt, Artificial Sequence
  Description of Artificial Sequence: Synthetic oligonucleotide
agacuccaguacaagaagg

SEQ ID NO: 2766345 - RNA, 19 nt, Artificial Sequence
  Description of Artificial Sequence: Synthetic oligonucleotide
uuuguuuguuuuagggauu

SEQ ID NO: 2766346 - RNA, 19 nt, Artificial Sequence
  Description of Artificial Sequence: Synthetic oligonucleotide
aguggggacccugaagugg

SEQ ID NO: 2766347 - RNA, 19 nt, Artificial Sequence
  Description of Artificial Sequence: Synthetic oligonucleotide
acucagauugcucccuuca

SEQ ID NO: 2766348 - RNA, 19 nt, Artificial Sequence
  Description of Artificial Sequence: Synthetic oligonucleotide
uuaaaaguuauggcuucaa

SEQ ID NO: 2766349 - RNA, 19 nt, Artificial Sequence
  Description of Artificial Sequence: Synthetic oligonucleotide
aggcugagggugcucaggg

SEQ ID NO: 2766350 - RNA, 19 nt, Artificial Sequence
  Description of Artificial Sequence: Synthetic oligonucleotide
guggaaacaggcucaggug

SEQ ID NO: 2766351 - RNA, 19 nt, Artificial Sequence
  Description of Artificial Sequence: Synthetic oligonucleotide
auauacacugcaguuugca

SEQ ID NO: 2766352 - RNA, 19 nt, Artificial Sequence
  Description of Artificial Sequence: Synthetic oligonucleotide
caagccaccaaguccccag

SEQ ID NO: 2766353 - RNA, 19 nt, Artificial Sequence
  Description of Artificial Sequence: Synthetic oligonucleotide
gguguuuuguuuguuuuag

SEQ ID NO: 2766354 - RNA, 19 nt, Artificial Sequence
  Description of Artificial Sequence: Synthetic oligonucleotide
cuaccaguuaaaaguuaug

SEQ ID NO: 2766355 - RNA, 19 nt, Artificial Sequence
  Description of Artificial Sequence: Synthetic oligonucleotide
aguggaugcgaaucucuca

SEQ ID NO: 2766356 - RNA, 19 nt, Artificial Sequence
  Description of Artificial Sequence: Synthetic oligonucleotide
ucagagacuccaguacaag

SEQ ID NO: 2766357 - RNA, 19 nt, Artificial Sequence
  Description of Artificial Sequence: Synthetic oligonucleotide
guuuuagggauuucuuuaa

SEQ ID NO: 2766358 - RNA, 19 nt, Artificial Sequence
  Description of Artificial Sequence: Synthetic oligonucleotide
gucacauagagaugguuaa

SEQ ID NO: 2766359 - RNA, 19 nt, Artificial Sequence
  Description of Artificial Sequence: Synthetic oligonucleotide
ugugguguuuuguuuguuu

SEQ ID NO: 2766360 - RNA, 19 nt, Artificial Sequence
  Description of Artificial Sequence: Synthetic oligonucleotide
cagacuaagagguaauugu

SEQ ID NO: 2766361 - RNA, 19 nt, Artificial Sequence
  Description of Artificial Sequence: Synthetic oligonucleotide
gaacucacugcugagugga

SEQ ID NO: 2766362 - RNA, 19 nt, Artificial Sequence
  Description of Artificial Sequence: Synthetic oligonucleotide
gaccaaaucaccacccaca

SEQ ID NO: 2766363 - RNA, 19 nt, Artificial Sequence
  Description of Artificial Sequence: Synthetic oligonucleotide
auuuccagugacugaacua

SEQ ID NO: 2766364 - RNA, 19 nt, Artificial Sequence
  Description of Artificial Sequence: Synthetic oligonucleotide
guggacaaugcacgagagg

SEQ ID NO: 2766365 - RNA, 19 nt, Artificial Sequence
  Description of Artificial Sequence: Synthetic oligonucleotide
cucucaucuucccucuacc

SEQ ID NO: 2766366 - RNA, 19 nt, Artificial Sequence
  Description of Artificial Sequence: Synthetic oligonucleotide
auuauauaccuaagauaug

SEQ ID NO: 2766367 - RNA, 19 nt, Artificial Sequence
  Description of Artificial Sequence: Synthetic oligonucleotide
gcuucuagaauucauuaaa

SEQ ID NO: 2766368 - RNA, 19 nt, Artificial Sequence
  Description of Artificial Sequence: Synthetic oligonucleotide
aaaccacuaccaguuaaaa

SEQ ID NO: 2766369 - RNA, 19 nt, Artificial Sequence
  Description of Artificial Sequence: Synthetic oligonucleotide
gcaguuugcagaaucuggg

SEQ ID NO: 2766370 - RNA, 19 nt, Artificial Sequence
  Description of Artificial Sequence: Synthetic oligonucleotide
agagaugguuaaaauaaaa

SEQ ID NO: 2766371 - RNA, 19 nt, Artificial Sequence
  Description of Artificial Sequence: Synthetic oligonucleotide
gguuaaacaccauauucaa

SEQ ID NO: 2766372 - RNA, 19 nt, Artificial Sequence
  Description of Artificial Sequence: Synthetic oligonucleotide
acuaccaguuaaaaguuau

SEQ ID NO: 2766373 - RNA, 19 nt, Artificial Sequence
  Description of Artificial Sequence: Synthetic oligonucleotide
cucuacccucaucagagac

SEQ ID NO: 2766374 - RNA, 19 nt, Artificial Sequence
  Description of Artificial Sequence: Synthetic oligonucleotide
acugcugaguggaaacagg

SEQ ID NO: 2766375 - RNA, 19 nt, Artificial Sequence
  Description of Artificial Sequence: Synthetic oligonucleotide
gugcauggaauacaagcca

SEQ ID NO: 2766376 - RNA, 19 nt, Artificial Sequence
  Description of Artificial Sequence: Synthetic oligonucleotide
acaagaaggcucaugcaga

SEQ ID NO: 2766377 - RNA, 19 nt, Artificial Sequence
  Description of Artificial Sequence: Synthetic oligonucleotide
uaugugcguuugauucuag

SEQ ID NO: 2766378 - RNA, 19 nt, Artificial Sequence
  Description of Artificial Sequence: Synthetic oligonucleotide
agagacuccaguacaagaa

SEQ ID NO: 2766379 - RNA, 19 nt, Artificial Sequence
  Description of Artificial Sequence: Synthetic oligonucleotide
guuaaacaccauauucaac

SEQ ID NO: 2766380 - RNA, 19 nt, Artificial Sequence
  Description of Artificial Sequence: Synthetic oligonucleotide
aggcuucuagaauucauua

SEQ ID NO: 2766381 - RNA, 19 nt, Artificial Sequence
  Description of Artificial Sequence: Synthetic oligonucleotide
cuacccucaucagagacuc

SEQ ID NO: 2766382 - RNA, 19 nt, Artificial Sequence
  Description of Artificial Sequence: Synthetic oligonucleotide
auacuacauuagguuaaac

SEQ ID NO: 2766383 - RNA, 19 nt, Artificial Sequence
  Description of Artificial Sequence: Synthetic oligonucleotide
uuccagugacugaacuaug

SEQ ID NO: 2766384 - RNA, 19 nt, Artificial Sequence
  Description of Artificial Sequence: Synthetic oligonucleotide
ugaguggaaacaggcucag

SEQ ID NO: 2766385 - RNA, 19 nt, Artificial Sequence
  Description of Artificial Sequence: Synthetic oligonucleotide
cuaagagguaauugucaca

SEQ ID NO: 2766386 - RNA, 19 nt, Artificial Sequence
  Description of Artificial Sequence: Synthetic oligonucleotide
uggcuucaaaguuauuaua

SEQ ID NO: 2766387 - RNA, 19 nt, Artificial Sequence
  Description of Artificial Sequence: Synthetic oligonucleotide
cucagauugcucccuucag

SEQ ID NO: 2766388 - RNA, 19 nt, Artificial Sequence
  Description of Artificial Sequence: Synthetic oligonucleotide
cauuagguuaaacaccaua

SEQ ID NO: 2766389 - RNA, 19 nt, Artificial Sequence
  Description of Artificial Sequence: Synthetic oligonucleotide
cugaguggaaacaggcuca

SEQ ID NO: 2766390 - RNA, 19 nt, Artificial Sequence
  Description of Artificial Sequence: Synthetic oligonucleotide
caaacagacuaagagguaa

SEQ ID NO: 2766391 - RNA, 19 nt, Artificial Sequence
  Description of Artificial Sequence: Synthetic oligonucleotide
gcugaguggaaacaggcuc

SEQ ID NO: 2766392 - RNA, 19 nt, Artificial Sequence
  Description of Artificial Sequence: Synthetic oligonucleotide
aaacagacuaagagguaau

SEQ ID NO: 2766393 - RNA, 19 nt, Artificial Sequence
  Description of Artificial Sequence: Synthetic oligonucleotide
aaugcacgagaggcugagg

SEQ ID NO: 2766394 - RNA, 19 nt, Artificial Sequence
  Description of Artificial Sequence: Synthetic oligonucleotide
ucaacucagauugcucccu

SEQ ID NO: 2766395 - RNA, 19 nt, Artificial Sequence
  Description of Artificial Sequence: Synthetic oligonucleotide
caucagagacuccaguaca

SEQ ID NO: 2766396 - RNA, 19 nt, Artificial Sequence
  Description of Artificial Sequence: Synthetic oligonucleotide
cccucuacccucaucagag

SEQ ID NO: 2766397 - RNA, 19 nt, Artificial Sequence
  Description of Artificial Sequence: Synthetic oligonucleotide
ucaugcagaugccucccuc

SEQ ID NO: 2766398 - RNA, 19 nt, Artificial Sequence
  Description of Artificial Sequence: Synthetic oligonucleotide
gaugugcauggaauacaag

SEQ ID NO: 2766399 - RNA, 19 nt, Artificial Sequence
  Description of Artificial Sequence: Synthetic oligonucleotide
cacugcaguuugcagaauc

SEQ ID NO: 2766400 - RNA, 19 nt, Artificial Sequence
  Description of Artificial Sequence: Synthetic oligonucleotide
aguuauggcuucaaaguua

SEQ ID NO: 2766401 - RNA, 19 nt, Artificial Sequence
  Description of Artificial Sequence: Synthetic oligonucleotide
aacagacuaagagguaauu

SEQ ID NO: 2766402 - RNA, 19 nt, Artificial Sequence
  Description of Artificial Sequence: Synthetic oligonucleotide
aaggcucaugcagaugccu

SEQ ID NO: 2766403 - RNA, 19 nt, Artificial Sequence
  Description of Artificial Sequence: Synthetic oligonucleotide
caaaguuauuauauaccua

SEQ ID NO: 2766404 - RNA, 19 nt, Artificial Sequence
  Description of Artificial Sequence: Synthetic oligonucleotide
ggugcaaagacaaacauuu

SEQ ID NO: 2766405 - RNA, 19 nt, Artificial Sequence
  Description of Artificial Sequence: Synthetic oligonucleotide
ccaguuaaaaguuauggcu

SEQ ID NO: 2766406 - RNA, 19 nt, Artificial Sequence
  Description of Artificial Sequence: Synthetic oligonucleotide
gagguaauugucacauaga

SEQ ID NO: 2766407 - RNA, 19 nt, Artificial Sequence
  Description of Artificial Sequence: Synthetic oligonucleotide
ugcacgagaggcugagggu

SEQ ID NO: 2766408 - RNA, 19 nt, Artificial Sequence
  Description of Artificial Sequence: Synthetic oligonucleotide
acagccaggcuucuagaau

SEQ ID NO: 2766409 - RNA, 19 nt, Artificial Sequence
  Description of Artificial Sequence: Synthetic oligonucleotide
ggaacucacugcugagugg

SEQ ID NO: 2766410 - RNA, 19 nt, Artificial Sequence
  Description of Artificial Sequence: Synthetic oligonucleotide
auggaauacaagccaccaa

SEQ ID NO: 2766411 - RNA, 19 nt, Artificial Sequence
  Description of Artificial Sequence: Synthetic oligonucleotide
ugaaguggaugcgaaucuc

SEQ ID NO: 2766412 - RNA, 19 nt, Artificial Sequence
  Description of Artificial Sequence: Synthetic oligonucleotide
uuguuuguuuuagggauuu

SEQ ID NO: 2766413 - RNA, 19 nt, Artificial Sequence
  Description of Artificial Sequence: Synthetic oligonucleotide
guuuguuuuagggauuucu

SEQ ID NO: 2766414 - RNA, 19 nt, Artificial Sequence
  Description of Artificial Sequence: Synthetic oligonucleotide
uggggaugugcauggaaua

SEQ ID NO: 2766415 - RNA, 19 nt, Artificial Sequence
  Description of Artificial Sequence: Synthetic oligonucleotide
uaccuaagauaugcugacc

SEQ ID NO: 2766416 - RNA, 19 nt, Artificial Sequence
  Description of Artificial Sequence: Synthetic oligonucleotide
gggacccugaaguggaugc

SEQ ID NO: 2766417 - RNA, 19 nt, Artificial Sequence
  Description of Artificial Sequence: Synthetic oligonucleotide
agaugccucccuccaccac

SEQ ID NO: 2766418 - RNA, 19 nt, Artificial Sequence
  Description of Artificial Sequence: Synthetic oligonucleotide
acugcaguuugcagaaucu

SEQ ID NO: 2766419 - RNA, 19 nt, Artificial Sequence
  Description of Artificial Sequence: Synthetic oligonucleotide
guacaagaaggcucaugca

SEQ ID NO: 2766420 - RNA, 19 nt, Artificial Sequence
  Description of Artificial Sequence: Synthetic oligonucleotide
agccaccaaguccccaggg

SEQ ID NO: 2766421 - RNA, 19 nt, Artificial Sequence
  Description of Artificial Sequence: Synthetic oligonucleotide
cuaagauaugcugaccaaa

SEQ ID NO: 2766422 - RNA, 19 nt, Artificial Sequence
  Description of Artificial Sequence: Synthetic oligonucleotide
cagagacuccaguacaaga

SEQ ID NO: 2766423 - RNA, 19 nt, Artificial Sequence
  Description of Artificial Sequence: Synthetic oligonucleotide
aagaaggcucaugcagaug

SEQ ID NO: 2766424 - RNA, 19 nt, Artificial Sequence
  Description of Artificial Sequence: Synthetic oligonucleotide
uucccucuacccucaucag

SEQ ID NO: 2766425 - RNA, 19 nt, Artificial Sequence
  Description of Artificial Sequence: Synthetic oligonucleotide
agggauggggaugugcaug

SEQ ID NO: 2766426 - RNA, 19 nt, Artificial Sequence
  Description of Artificial Sequence: Synthetic oligonucleotide
guuaaaaguuauggcuuca

SEQ ID NO: 2766427 - RNA, 19 nt, Artificial Sequence
  Description of Artificial Sequence: Synthetic oligonucleotide
gauggggaugugcauggaa

SEQ ID NO: 2766428 - RNA, 19 nt, Artificial Sequence
  Description of Artificial Sequence: Synthetic oligonucleotide
ugcucagggauggggaugu

SEQ ID NO: 2766429 - RNA, 19 nt, Artificial Sequence
  Description of Artificial Sequence: Synthetic oligonucleotide
auaaaaccacuaccaguua

SEQ ID NO: 2766430 - RNA, 19 nt, Artificial Sequence
  Description of Artificial Sequence: Synthetic oligonucleotide
cucaucagagacuccagua

SEQ ID NO: 2766431 - RNA, 19 nt, Artificial Sequence
  Description of Artificial Sequence: Synthetic oligonucleotide
gggaggaggaacucacugc

SEQ ID NO: 2766432 - RNA, 19 nt, Artificial Sequence
  Description of Artificial Sequence: Synthetic oligonucleotide
augugcguuugauucuaga

SEQ ID NO: 2766433 - RNA, 19 nt, Artificial Sequence
  Description of Artificial Sequence: Synthetic oligonucleotide
cacauagagaugguuaaaa

SEQ ID NO: 2766434 - RNA, 19 nt, Artificial Sequence
  Description of Artificial Sequence: Synthetic oligonucleotide
gugcguuugauucuagagu

SEQ ID NO: 2766435 - RNA, 19 nt, Artificial Sequence
  Description of Artificial Sequence: Synthetic oligonucleotide
aagagguaauugucacaua

SEQ ID NO: 2766436 - RNA, 19 nt, Artificial Sequence
  Description of Artificial Sequence: Synthetic oligonucleotide
acugaacuaugugcguuug

SEQ ID NO: 2766437 - RNA, 19 nt, Artificial Sequence
  Description of Artificial Sequence: Synthetic oligonucleotide
cacgagaggcugagggugc

SEQ ID NO: 2766438 - RNA, 19 nt, Artificial Sequence
  Description of Artificial Sequence: Synthetic oligonucleotide
acauuuccagugacugaac

SEQ ID NO: 2766439 - RNA, 19 nt, Artificial Sequence
  Description of Artificial Sequence: Synthetic oligonucleotide
ugacugaacuaugugcguu

SEQ ID NO: 2766440 - RNA, 19 nt, Artificial Sequence
  Description of Artificial Sequence: Synthetic oligonucleotide
ucacauagagaugguuaaa

SEQ ID NO: 2766441 - RNA, 19 nt, Artificial Sequence
  Description of Artificial Sequence: Synthetic oligonucleotide
cugagggugcucagggaug

SEQ ID NO: 2766442 - RNA, 19 nt, Artificial Sequence
  Description of Artificial Sequence: Synthetic oligonucleotide
agggugcucagggaugggg

SEQ ID NO: 2766443 - RNA, 19 nt, Artificial Sequence
  Description of Artificial Sequence: Synthetic oligonucleotide
aaaucaccacccacagcca

SEQ ID NO: 2766444 - RNA, 19 nt, Artificial Sequence
  Description of Artificial Sequence: Synthetic oligonucleotide
caguuaaaaguuauggcuu

SEQ ID NO: 2766445 - RNA, 19 nt, Artificial Sequence
  Description of Artificial Sequence: Synthetic oligonucleotide
uacaagccaccaagucccc

SEQ ID NO: 2766446 - RNA, 19 nt, Artificial Sequence
  Description of Artificial Sequence: Synthetic oligonucleotide
cuucuagaauucauuaaau

SEQ ID NO: 2766447 - RNA, 19 nt, Artificial Sequence
  Description of Artificial Sequence: Synthetic oligonucleotide
gguaauugucacauagaga

SEQ ID NO: 2766448 - RNA, 19 nt, Artificial Sequence
  Description of Artificial Sequence: Synthetic oligonucleotide
ggggaggaggaacucacug

SEQ ID NO: 2766449 - RNA, 19 nt, Artificial Sequence
  Description of Artificial Sequence: Synthetic oligonucleotide
caaugcacgagaggcugag

SEQ ID NO: 2766450 - RNA, 19 nt, Artificial Sequence
  Description of Artificial Sequence: Synthetic oligonucleotide
augcagaugccucccucca

SEQ ID NO: 2766451 - RNA, 19 nt, Artificial Sequence
  Description of Artificial Sequence: Synthetic oligonucleotide
gcagaugccucccuccacc

SEQ ID NO: 2766452 - RNA, 19 nt, Artificial Sequence
  Description of Artificial Sequence: Synthetic oligonucleotide
ugcagaugccucccuccac

SEQ ID NO: 2766453 - RNA, 19 nt, Artificial Sequence
  Description of Artificial Sequence: Synthetic oligonucleotide
gaaggcucaugcagaugcc

SEQ ID NO: 2766454 - RNA, 19 nt, Artificial Sequence
  Description of Artificial Sequence: Synthetic oligonucleotide
auggggaugugcauggaau

SEQ ID NO: 2766455 - RNA, 19 nt, Artificial Sequence
  Description of Artificial Sequence: Synthetic oligonucleotide
cucccuucaguggggaccc

SEQ ID NO: 2766456 - RNA, 19 nt, Artificial Sequence
  Description of Artificial Sequence: Synthetic oligonucleotide
cugcaguuugcagaaucug

SEQ ID NO: 2766457 - RNA, 19 nt, Artificial Sequence
  Description of Artificial Sequence: Synthetic oligonucleotide
ggcucaugcagaugccucc

SEQ ID NO: 2766458 - RNA, 19 nt, Artificial Sequence
  Description of Artificial Sequence: Synthetic oligonucleotide
uggaugcgaaucucucauc

SEQ ID NO: 2766459 - RNA, 19 nt, Artificial Sequence
  Description of Artificial Sequence: Synthetic oligonucleotide
uugucacauagagaugguu

SEQ ID NO: 2766460 - RNA, 19 nt, Artificial Sequence
  Description of Artificial Sequence: Synthetic oligonucleotide
ucuucccucuacccucauc

SEQ ID NO: 2766461 - RNA, 19 nt, Artificial Sequence
  Description of Artificial Sequence: Synthetic oligonucleotide
guuauggcuucaaaguuau

SEQ ID NO: 2766462 - RNA, 19 nt, Artificial Sequence
  Description of Artificial Sequence: Synthetic oligonucleotide
ccugaaguggaugcgaauc

SEQ ID NO: 2766463 - RNA, 19 nt, Artificial Sequence
  Description of Artificial Sequence: Synthetic oligonucleotide
gaguggaaacaggcucagg

SEQ ID NO: 2766464 - RNA, 19 nt, Artificial Sequence
  Description of Artificial Sequence: Synthetic oligonucleotide
gcugaccaaaucaccaccc

SEQ ID NO: 2766465 - RNA, 19 nt, Artificial Sequence
  Description of Artificial Sequence: Synthetic oligonucleotide
caguacaagaaggcucaug

SEQ ID NO: 2766466 - RNA, 19 nt, Artificial Sequence
  Description of Artificial Sequence: Synthetic oligonucleotide
gagaggcugagggugcuca

SEQ ID NO: 2766467 - RNA, 19 nt, Artificial Sequence
  Description of Artificial Sequence: Synthetic oligonucleotide
aucagagacuccaguacaa

SEQ ID NO: 2766468 - RNA, 19 nt, Artificial Sequence
  Description of Artificial Sequence: Synthetic oligonucleotide
cagaaucuggggugggaca

SEQ ID NO: 2766469 - RNA, 19 nt, Artificial Sequence
  Description of Artificial Sequence: Synthetic oligonucleotide
guggaugcgaaucucucau

SEQ ID NO: 2766470 - RNA, 19 nt, Artificial Sequence
  Description of Artificial Sequence: Synthetic oligonucleotide
gguggacaaugcacgagag

SEQ ID NO: 2766471 - RNA, 19 nt, Artificial Sequence
  Description of Artificial Sequence: Synthetic oligonucleotide
gaggaggaacucacugcug

SEQ ID NO: 2766472 - RNA, 19 nt, Artificial Sequence
  Description of Artificial Sequence: Synthetic oligonucleotide
aaacaggcucaggugcaaa

SEQ ID NO: 2766473 - RNA, 19 nt, Artificial Sequence
  Description of Artificial Sequence: Synthetic oligonucleotide
cagguggacaaugcacgag

SEQ ID NO: 2766474 - RNA, 19 nt, Artificial Sequence
  Description of Artificial Sequence: Synthetic oligonucleotide
aggugcaaagacaaacauu

SEQ ID NO: 2766475 - RNA, 19 nt, Artificial Sequence
  Description of Artificial Sequence: Synthetic oligonucleotide
ggcuucuagaauucauuaa

SEQ ID NO: 2766476 - RNA, 19 nt, Artificial Sequence
  Description of Artificial Sequence: Synthetic oligonucleotide
auugucacauagagauggu

SEQ ID NO: 2766477 - RNA, 19 nt, Artificial Sequence
  Description of Artificial Sequence: Synthetic oligonucleotide
ggaugcgaaucucucaucu

SEQ ID NO: 2766478 - RNA, 19 nt, Artificial Sequence
  Description of Artificial Sequence: Synthetic oligonucleotide
cugaccaaaucaccaccca

SEQ ID NO: 2766479 - RNA, 19 nt, Artificial Sequence
  Description of Artificial Sequence: Synthetic oligonucleotide
caccauauucaacucagau

SEQ ID NO: 2766480 - RNA, 19 nt, Artificial Sequence
  Description of Artificial Sequence: Synthetic oligonucleotide
gacccugaaguggaugcga

SEQ ID NO: 2766481 - RNA, 19 nt, Artificial Sequence
  Description of Artificial Sequence: Synthetic oligonucleotide
ggaggaggaacucacugcu

SEQ ID NO: 2766482 - RNA, 19 nt, Artificial Sequence
  Description of Artificial Sequence: Synthetic oligonucleotide
uguuuguuuuagggauuuc

SEQ ID NO: 2766483 - RNA, 19 nt, Artificial Sequence
  Description of Artificial Sequence: Synthetic oligonucleotide
ccagugacugaacuaugug

SEQ ID NO: 2766484 - RNA, 19 nt, Artificial Sequence
  Description of Artificial Sequence: Synthetic oligonucleotide
cauuuccagugacugaacu

SEQ ID NO: 2766485 - RNA, 19 nt, Artificial Sequence
  Description of Artificial Sequence: Synthetic oligonucleotide
caaccagguggacaaugca

SEQ ID NO: 2766486 - RNA, 19 nt, Artificial Sequence
  Description of Artificial Sequence: Synthetic oligonucleotide
caguggggacccugaagug

SEQ ID NO: 2766487 - RNA, 19 nt, Artificial Sequence
  Description of Artificial Sequence: Synthetic oligonucleotide
cucaucuucccucuacccu

SEQ ID NO: 2766488 - RNA, 19 nt, Artificial Sequence
  Description of Artificial Sequence: Synthetic oligonucleotide
cugaaguggaugcgaaucu

SEQ ID NO: 2766489 - RNA, 19 nt, Artificial Sequence
  Description of Artificial Sequence: Synthetic oligonucleotide
gcgaaucucucaucuuccc

SEQ ID NO: 2766490 - RNA, 19 nt, Artificial Sequence
  Description of Artificial Sequence: Synthetic oligonucleotide
gaacuaugugcguuugauu

SEQ ID NO: 2766491 - RNA, 19 nt, Artificial Sequence
  Description of Artificial Sequence: Synthetic oligonucleotide
gcacgagaggcugagggug

SEQ ID NO: 2766492 - RNA, 19 nt, Artificial Sequence
  Description of Artificial Sequence: Synthetic oligonucleotide
gcauggaauacaagccacc

SEQ ID NO: 2766493 - RNA, 19 nt, Artificial Sequence
  Description of Artificial Sequence: Synthetic oligonucleotide
ggcuucaaaguuauuauau

SEQ ID NO: 2766494 - RNA, 19 nt, Artificial Sequence
  Description of Artificial Sequence: Synthetic oligonucleotide
gacugaacuaugugcguuu

SEQ ID NO: 2766495 - RNA, 19 nt, Artificial Sequence
  Description of Artificial Sequence: Synthetic oligonucleotide
acucacugcugaguggaaa

SEQ ID NO: 2766496 - RNA, 19 nt, Artificial Sequence
  Description of Artificial Sequence: Synthetic oligonucleotide
acaaacagacuaagaggua

SEQ ID NO: 2766497 - RNA, 19 nt, Artificial Sequence
  Description of Artificial Sequence: Synthetic oligonucleotide
gcucccuucaguggggacc

SEQ ID NO: 2766498 - RNA, 19 nt, Artificial Sequence
  Description of Artificial Sequence: Synthetic oligonucleotide
ggaugugcauggaauacaa

SEQ ID NO: 2766499 - RNA, 19 nt, Artificial Sequence
  Description of Artificial Sequence: Synthetic oligonucleotide
caucuucccucuacccuca

SEQ ID NO: 2766500 - RNA, 19 nt, Artificial Sequence
  Description of Artificial Sequence: Synthetic oligonucleotide
uacccucaucagagacucc

SEQ ID NO: 2766501 - RNA, 19 nt, Artificial Sequence
  Description of Artificial Sequence: Synthetic oligonucleotide
cacagccaggcuucuagaa

SEQ ID NO: 2766502 - RNA, 19 nt, Artificial Sequence
  Description of Artificial Sequence: Synthetic oligonucleotide
ggggaugugcauggaauac

SEQ ID NO: 2766503 - RNA, 19 nt, Artificial Sequence
  Description of Artificial Sequence: Synthetic oligonucleotide
gaaacaggcucaggugcaa

SEQ ID NO: 2766504 - RNA, 19 nt, Artificial Sequence
  Description of Artificial Sequence: Synthetic oligonucleotide
uuauggcuucaaaguuauu

SEQ ID NO: 2766505 - RNA, 19 nt, Artificial Sequence
  Description of Artificial Sequence: Synthetic oligonucleotide
guggggacccugaagugga

SEQ ID NO: 2766506 - RNA, 19 nt, Artificial Sequence
  Description of Artificial Sequence: Synthetic oligonucleotide
cugaacuaugugcguuuga

SEQ ID NO: 2766507 - RNA, 19 nt, Artificial Sequence
  Description of Artificial Sequence: Synthetic oligonucleotide
cacuaccaguuaaaaguua

SEQ ID NO: 2766508 - RNA, 19 nt, Artificial Sequence
  Description of Artificial Sequence: Synthetic oligonucleotide
cuaugugcguuugauucua

SEQ ID NO: 2766509 - RNA, 19 nt, Artificial Sequence
  Description of Artificial Sequence: Synthetic oligonucleotide
gaggaacucacugcugagu

SEQ ID NO: 2766510 - RNA, 19 nt, Artificial Sequence
  Description of Artificial Sequence: Synthetic oligonucleotide
gaugcgaaucucucaucuu

SEQ ID NO: 2766511 - RNA, 19 nt, Artificial Sequence
  Description of Artificial Sequence: Synthetic oligonucleotide
ggaaacaggcucaggugca

SEQ ID NO: 2766512 - RNA, 19 nt, Artificial Sequence
  Description of Artificial Sequence: Synthetic oligonucleotide
gugcaaagacaaacauuuc

SEQ ID NO: 2766513 - RNA, 19 nt, Artificial Sequence
  Description of Artificial Sequence: Synthetic oligonucleotide
acaaugcacgagaggcuga

SEQ ID NO: 2766514 - RNA, 19 nt, Artificial Sequence
  Description of Artificial Sequence: Synthetic oligonucleotide
gugacugaacuaugugcgu

SEQ ID NO: 2766515 - RNA, 19 nt, Artificial Sequence
  Description of Artificial Sequence: Synthetic oligonucleotide
ggacccugaaguggaugcg

SEQ ID NO: 2766516 - RNA, 19 nt, Artificial Sequence
  Description of Artificial Sequence: Synthetic oligonucleotide
acaccauauucaacucaga

SEQ ID NO: 2766517 - RNA, 19 nt, Artificial Sequence
  Description of Artificial Sequence: Synthetic oligonucleotide
caagaaggcucaugcagau

SEQ ID NO: 2766518 - RNA, 19 nt, Artificial Sequence
  Description of Artificial Sequence: Synthetic oligonucleotide
gugcucagggauggggaug

SEQ ID NO: 2766519 - RNA, 19 nt, Artificial Sequence
  Description of Artificial Sequence: Synthetic oligonucleotide
gggaugugcauggaauaca

SEQ ID NO: 2766520 - RNA, 19 nt, Artificial Sequence
  Description of Artificial Sequence: Synthetic oligonucleotide
ccaaaucaccacccacagc

SEQ ID NO: 2766521 - RNA, 19 nt, Artificial Sequence
  Description of Artificial Sequence: Synthetic oligonucleotide
ugcucccuucaguggggac

SEQ ID NO: 2766522 - RNA, 19 nt, Artificial Sequence
  Description of Artificial Sequence: Synthetic oligonucleotide
uugcucccuucagugggga

SEQ ID NO: 2766523 - RNA, 19 nt, Artificial Sequence
  Description of Artificial Sequence: Synthetic oligonucleotide
caggugcaaagacaaacau

SEQ ID NO: 2766524 - RNA, 19 nt, Artificial Sequence
  Description of Artificial Sequence: Synthetic oligonucleotide
acaagccaccaagucccca

SEQ ID NO: 2766525 - RNA, 19 nt, Artificial Sequence
  Description of Artificial Sequence: Synthetic oligonucleotide
caggcuucuagaauucauu

SEQ ID NO: 2766526 - RNA, 19 nt, Artificial Sequence
  Description of Artificial Sequence: Synthetic oligonucleotide
gagggugcucagggauggg

SEQ ID NO: 2766527 - RNA, 19 nt, Artificial Sequence
  Description of Artificial Sequence: Synthetic oligonucleotide
cagaugccucccuccacca

SEQ ID NO: 2766528 - RNA, 19 nt, Artificial Sequence
  Description of Artificial Sequence: Synthetic oligonucleotide
guuugauucuagaguaauu

SEQ ID NO: 2766529 - RNA, 19 nt, Artificial Sequence
  Description of Artificial Sequence: Synthetic oligonucleotide
uugugguguuuuguuuguu

SEQ ID NO: 2766530 - RNA, 19 nt, Artificial Sequence
  Description of Artificial Sequence: Synthetic oligonucleotide
ccuaagauaugcugaccaa

SEQ ID NO: 2766531 - RNA, 19 nt, Artificial Sequence
  Description of Artificial Sequence: Synthetic oligonucleotide
aacucacugcugaguggaa

SEQ ID NO: 2766532 - RNA, 19 nt, Artificial Sequence
  Description of Artificial Sequence: Synthetic oligonucleotide
ggaauacaagccaccaagu

SEQ ID NO: 2766533 - RNA, 19 nt, Artificial Sequence
  Description of Artificial Sequence: Synthetic oligonucleotide
ccacccacagccaggcuuc

SEQ ID NO: 2766534 - RNA, 19 nt, Artificial Sequence
  Description of Artificial Sequence: Synthetic oligonucleotide
acauuagguuaaacaccau

SEQ ID NO: 2766535 - RNA, 19 nt, Artificial Sequence
  Description of Artificial Sequence: Synthetic oligonucleotide
augccucccuccaccacca

SEQ ID NO: 2766536 - RNA, 19 nt, Artificial Sequence
  Description of Artificial Sequence: Synthetic oligonucleotide
aucucucaucuucccucua

SEQ ID NO: 2766537 - RNA, 19 nt, Artificial Sequence
  Description of Artificial Sequence: Synthetic oligonucleotide
acccugaaguggaugcgaa

SEQ ID NO: 2766538 - RNA, 19 nt, Artificial Sequence
  Description of Artificial Sequence: Synthetic oligonucleotide
uggggacccugaaguggau

SEQ ID NO: 2766539 - RNA, 19 nt, Artificial Sequence
  Description of Artificial Sequence: Synthetic oligonucleotide
cuucaguggggacccugaa

SEQ ID NO: 2766540 - RNA, 19 nt, Artificial Sequence
  Description of Artificial Sequence: Synthetic oligonucleotide
gcugagggugcucagggau

SEQ ID NO: 2766541 - RNA, 19 nt, Artificial Sequence
  Description of Artificial Sequence: Synthetic oligonucleotide
acgagaggcugagggugcu

SEQ ID NO: 2766542 - RNA, 19 nt, Artificial Sequence
  Description of Artificial Sequence: Synthetic oligonucleotide
gggugcucagggaugggga

SEQ ID NO: 2766543 - RNA, 19 nt, Artificial Sequence
  Description of Artificial Sequence: Synthetic oligonucleotide
ggggacccugaaguggaug

SEQ ID NO: 2766544 - RNA, 19 nt, Artificial Sequence
  Description of Artificial Sequence: Synthetic oligonucleotide
ccagguggacaaugcacga

SEQ ID NO: 2766545 - RNA, 19 nt, Artificial Sequence
  Description of Artificial Sequence: Synthetic oligonucleotide
aucuucccucuacccucau

SEQ ID NO: 2766546 - RNA, 19 nt, Artificial Sequence
  Description of Artificial Sequence: Synthetic oligonucleotide
ggcugagggugcucaggga

SEQ ID NO: 2766547 - RNA, 19 nt, Artificial Sequence
  Description of Artificial Sequence: Synthetic oligonucleotide
ggacaaugcacgagaggcu

SEQ ID NO: 2766548 - RNA, 19 nt, Artificial Sequence
  Description of Artificial Sequence: Synthetic oligonucleotide
ggugcucagggauggggau

SEQ ID NO: 2766549 - RNA, 19 nt, Artificial Sequence
  Description of Artificial Sequence: Synthetic oligonucleotide
ccacuaccaguuaaaaguu

SEQ ID NO: 2766550 - RNA, 19 nt, Artificial Sequence
  Description of Artificial Sequence: Synthetic oligonucleotide
cucaugcagaugccucccu

SEQ ID NO: 2766551 - RNA, 19 nt, Artificial Sequence
  Description of Artificial Sequence: Synthetic oligonucleotide
acacugcaguuugcagaau

SEQ ID NO: 2766552 - RNA, 19 nt, Artificial Sequence
  Description of Artificial Sequence: Synthetic oligonucleotide
gcguuugauucuagaguaa

SEQ ID NO: 2766553 - RNA, 19 nt, Artificial Sequence
  Description of Artificial Sequence: Synthetic oligonucleotide
gccaggcuucuagaauuca

SEQ ID NO: 2766554 - RNA, 19 nt, Artificial Sequence
  Description of Artificial Sequence: Synthetic oligonucleotide
ccacagccaggcuucuaga

SEQ ID NO: 2766555 - RNA, 19 nt, Artificial Sequence
  Description of Artificial Sequence: Synthetic oligonucleotide
cagggauggggaugugcau

SEQ ID NO: 2766556 - RNA, 19 nt, Artificial Sequence
  Description of Artificial Sequence: Synthetic oligonucleotide
caacucagauugcucccuu

SEQ ID NO: 2766557 - RNA, 19 nt, Artificial Sequence
  Description of Artificial Sequence: Synthetic oligonucleotide
ccaggcuucuagaauucau

SEQ ID NO: 2766558 - RNA, 19 nt, Artificial Sequence
  Description of Artificial Sequence: Synthetic oligonucleotide
ccucuacccucaucagaga

SEQ ID NO: 2766559 - RNA, 19 nt, Artificial Sequence
  Description of Artificial Sequence: Synthetic oligonucleotide
ggauggggaugugcaugga

SEQ ID NO: 2766560 - RNA, 19 nt, Artificial Sequence
  Description of Artificial Sequence: Synthetic oligonucleotide
cgaaucucucaucuucccu

SEQ ID NO: 2766561 - RNA, 19 nt, Artificial Sequence
  Description of Artificial Sequence: Synthetic oligonucleotide
cguuugauucuagaguaau

SEQ ID NO: 2766562 - RNA, 19 nt, Artificial Sequence
  Description of Artificial Sequence: Synthetic oligonucleotide
gcucaggugcaaagacaaa

SEQ ID NO: 2766563 - RNA, 19 nt, Artificial Sequence
  Description of Artificial Sequence: Synthetic oligonucleotide
gcucagggauggggaugug

SEQ ID NO: 2766564 - RNA, 19 nt, Artificial Sequence
  Description of Artificial Sequence: Synthetic oligonucleotide
cccugaaguggaugcgaau

SEQ ID NO: 2766565 - RNA, 19 nt, Artificial Sequence
  Description of Artificial Sequence: Synthetic oligonucleotide
ccaguacaagaaggcucau

SEQ ID NO: 2766566 - RNA, 19 nt, Artificial Sequence
  Description of Artificial Sequence: Synthetic oligonucleotide
auuauguaaaauuaaaagc

SEQ ID NO: 2766567 - RNA, 19 nt, Artificial Sequence
  Description of Artificial Sequence: Synthetic oligonucleotide
uguuaaauaugcaacaugg

SEQ ID NO: 2766568 - RNA, 19 nt, Artificial Sequence
  Description of Artificial Sequence: Synthetic oligonucleotide
aaauuacuaauguacaaac

SEQ ID NO: 2766569 - RNA, 19 nt, Artificial Sequence
  Description of Artificial Sequence: Synthetic oligonucleotide
aauuaaaagcucuagaaga

SEQ ID NO: 2766570 - RNA, 19 nt, Artificial Sequence
  Description of Artificial Sequence: Synthetic oligonucleotide
aguucuacucuuuagaagc

SEQ ID NO: 2766571 - RNA, 19 nt, Artificial Sequence
  Description of Artificial Sequence: Synthetic oligonucleotide
aacaguuaaauuuccauuc

SEQ ID NO: 2766572 - RNA, 19 nt, Artificial Sequence
  Description of Artificial Sequence: Synthetic oligonucleotide
uaaauaugcaacauggucc

SEQ ID NO: 2766573 - RNA, 19 nt, Artificial Sequence
  Description of Artificial Sequence: Synthetic oligonucleotide
aaauuaaaagcucuagaag

SEQ ID NO: 2766574 - RNA, 19 nt, Artificial Sequence
  Description of Artificial Sequence: Synthetic oligonucleotide
aaaauuaaaagcucuagaa

SEQ ID NO: 2766575 - RNA, 19 nt, Artificial Sequence
  Description of Artificial Sequence: Synthetic oligonucleotide
auuacuaauguacaaacag

SEQ ID NO: 2766576 - RNA, 19 nt, Artificial Sequence
  Description of Artificial Sequence: Synthetic oligonucleotide
uuacuuaaauaacagaccc

SEQ ID NO: 2766577 - RNA, 19 nt, Artificial Sequence
  Description of Artificial Sequence: Synthetic oligonucleotide
uuuaaggcagucaaaagag

SEQ ID NO: 2766578 - RNA, 19 nt, Artificial Sequence
  Description of Artificial Sequence: Synthetic oligonucleotide
uuauguaacuguaaauugg

SEQ ID NO: 2766579 - RNA, 19 nt, Artificial Sequence
  Description of Artificial Sequence: Synthetic oligonucleotide
cauuacuuaaauaacagac

SEQ ID NO: 2766580 - RNA, 19 nt, Artificial Sequence
  Description of Artificial Sequence: Synthetic oligonucleotide
uuuaauaccuaacaguuaa

SEQ ID NO: 2766581 - RNA, 19 nt, Artificial Sequence
  Description of Artificial Sequence: Synthetic oligonucleotide
uuuaaauuacuaauguaca

SEQ ID NO: 2766582 - RNA, 19 nt, Artificial Sequence
  Description of Artificial Sequence: Synthetic oligonucleotide
uuuuaaggcagucaaaaga

SEQ ID NO: 2766583 - RNA, 19 nt, Artificial Sequence
  Description of Artificial Sequence: Synthetic oligonucleotide
uaaauaacagacccuaaag

SEQ ID NO: 2766584 - RNA, 19 nt, Artificial Sequence
  Description of Artificial Sequence: Synthetic oligonucleotide
uaaggcauuacuuaaauaa

SEQ ID NO: 2766585 - RNA, 19 nt, Artificial Sequence
  Description of Artificial Sequence: Synthetic oligonucleotide
acaaauauacuaauguugc

SEQ ID NO: 2766586 - RNA, 19 nt, Artificial Sequence
  Description of Artificial Sequence: Synthetic oligonucleotide
aauaacagacccuaaagaa

SEQ ID NO: 2766587 - RNA, 19 nt, Artificial Sequence
  Description of Artificial Sequence: Synthetic oligonucleotide
uuuagaagcauuaggacac

SEQ ID NO: 2766588 - RNA, 19 nt, Artificial Sequence
  Description of Artificial Sequence: Synthetic oligonucleotide
aaauauacuaauguugcag

SEQ ID NO: 2766589 - RNA, 19 nt, Artificial Sequence
  Description of Artificial Sequence: Synthetic oligonucleotide
uuacuaauguacaaacagg

SEQ ID NO: 2766590 - RNA, 19 nt, Artificial Sequence
  Description of Artificial Sequence: Synthetic oligonucleotide
ucacacaucagcauaggcg

SEQ ID NO: 2766591 - RNA, 19 nt, Artificial Sequence
  Description of Artificial Sequence: Synthetic oligonucleotide
guauuuaucacacaucagc

SEQ ID NO: 2766592 - RNA, 19 nt, Artificial Sequence
  Description of Artificial Sequence: Synthetic oligonucleotide
ugagaauugaaccuggacu

SEQ ID NO: 2766593 - RNA, 19 nt, Artificial Sequence
  Description of Artificial Sequence: Synthetic oligonucleotide
uuaaauaugcaacaugguc

SEQ ID NO: 2766594 - RNA, 19 nt, Artificial Sequence
  Description of Artificial Sequence: Synthetic oligonucleotide
aauauacuaauguugcagu

SEQ ID NO: 2766595 - RNA, 19 nt, Artificial Sequence
  Description of Artificial Sequence: Synthetic oligonucleotide
aaauaacagacccuaaaga

SEQ ID NO: 2766596 - RNA, 19 nt, Artificial Sequence
  Description of Artificial Sequence: Synthetic oligonucleotide
cuuuuguccaguuuaaggc

SEQ ID NO: 2766597 - RNA, 19 nt, Artificial Sequence
  Description of Artificial Sequence: Synthetic oligonucleotide
uguauaacugguuauacaa

SEQ ID NO: 2766598 - RNA, 19 nt, Artificial Sequence
  Description of Artificial Sequence: Synthetic oligonucleotide
uaaaauuaaaagcucuaga

SEQ ID NO: 2766599 - RNA, 19 nt, Artificial Sequence
  Description of Artificial Sequence: Synthetic oligonucleotide
aaaagaguccuuuugucca

SEQ ID NO: 2766600 - RNA, 19 nt, Artificial Sequence
  Description of Artificial Sequence: Synthetic oligonucleotide
accuuaaccacaaauauac

SEQ ID NO: 2766601 - RNA, 19 nt, Artificial Sequence
  Description of Artificial Sequence: Synthetic oligonucleotide
auuacuuaaauaacagacc

SEQ ID NO: 2766602 - RNA, 19 nt, Artificial Sequence
  Description of Artificial Sequence: Synthetic oligonucleotide
uuaaccacaaauauacuaa

SEQ ID NO: 2766603 - RNA, 19 nt, Artificial Sequence
  Description of Artificial Sequence: Synthetic oligonucleotide
guuuaaauuacuaauguac

SEQ ID NO: 2766604 - RNA, 19 nt, Artificial Sequence
  Description of Artificial Sequence: Synthetic oligonucleotide
cauucaguguuaaauaugc

SEQ ID NO: 2766605 - RNA, 19 nt, Artificial Sequence
  Description of Artificial Sequence: Synthetic oligonucleotide
cugguuauacaaaacaacc

SEQ ID NO: 2766606 - RNA, 19 nt, Artificial Sequence
  Description of Artificial Sequence: Synthetic oligonucleotide
aaauugguguuuugcuugc

SEQ ID NO: 2766607 - RNA, 19 nt, Artificial Sequence
  Description of Artificial Sequence: Synthetic oligonucleotide
uauuuaucacacaucagca

SEQ ID NO: 2766608 - RNA, 19 nt, Artificial Sequence
  Description of Artificial Sequence: Synthetic oligonucleotide
auaccuaacaguuaaauuu

SEQ ID NO: 2766609 - RNA, 19 nt, Artificial Sequence
  Description of Artificial Sequence: Synthetic oligonucleotide
aaauaugcaacaugguccu

SEQ ID NO: 2766610 - RNA, 19 nt, Artificial Sequence
  Description of Artificial Sequence: Synthetic oligonucleotide
ucaguguuaaauaugcaac

SEQ ID NO: 2766611 - RNA, 19 nt, Artificial Sequence
  Description of Artificial Sequence: Synthetic oligonucleotide
uaaaagcucuagaagaccc

SEQ ID NO: 2766612 - RNA, 19 nt, Artificial Sequence
  Description of Artificial Sequence: Synthetic oligonucleotide
uguaacuguaaauuggugu

SEQ ID NO: 2766613 - RNA, 19 nt, Artificial Sequence
  Description of Artificial Sequence: Synthetic oligonucleotide
cacaaauauacuaauguug

SEQ ID NO: 2766614 - RNA, 19 nt, Artificial Sequence
  Description of Artificial Sequence: Synthetic oligonucleotide
uacuaauguacaaacaggu

SEQ ID NO: 2766615 - RNA, 19 nt, Artificial Sequence
  Description of Artificial Sequence: Synthetic oligonucleotide
uguacaaacagguuuaaua

SEQ ID NO: 2766616 - RNA, 19 nt, Artificial Sequence
  Description of Artificial Sequence: Synthetic oligonucleotide
auguauuuaucacacauca

SEQ ID NO: 2766617 - RNA, 19 nt, Artificial Sequence
  Description of Artificial Sequence: Synthetic oligonucleotide
uaaauugguguuuugcuug

SEQ ID NO: 2766618 - RNA, 19 nt, Artificial Sequence
  Description of Artificial Sequence: Synthetic oligonucleotide
aaagaaacuagcaugucug

SEQ ID NO: 2766619 - RNA, 19 nt, Artificial Sequence
  Description of Artificial Sequence: Synthetic oligonucleotide
uaacugguuauacaaaaca

SEQ ID NO: 2766620 - RNA, 19 nt, Artificial Sequence
  Description of Artificial Sequence: Synthetic oligonucleotide
cauguuuaaauuacuaaug

SEQ ID NO: 2766621 - RNA, 19 nt, Artificial Sequence
  Description of Artificial Sequence: Synthetic oligonucleotide
aaaccuuaaccacaaauau

SEQ ID NO: 2766622 - RNA, 19 nt, Artificial Sequence
  Description of Artificial Sequence: Synthetic oligonucleotide
uaacagacccuaaagaaac

SEQ ID NO: 2766623 - RNA, 19 nt, Artificial Sequence
  Description of Artificial Sequence: Synthetic oligonucleotide
ucauguuuaaauuacuaau

SEQ ID NO: 2766624 - RNA, 19 nt, Artificial Sequence
  Description of Artificial Sequence: Synthetic oligonucleotide
uaaagaaacuagcaugucu

SEQ ID NO: 2766625 - RNA, 19 nt, Artificial Sequence
  Description of Artificial Sequence: Synthetic oligonucleotide
accacaaauauacuaaugu

SEQ ID NO: 2766626 - RNA, 19 nt, Artificial Sequence
  Description of Artificial Sequence: Synthetic oligonucleotide
cacacaucagcauaggcgg

SEQ ID NO: 2766627 - RNA, 19 nt, Artificial Sequence
  Description of Artificial Sequence: Synthetic oligonucleotide
uuaaauaacagacccuaaa

SEQ ID NO: 2766628 - RNA, 19 nt, Artificial Sequence
  Description of Artificial Sequence: Synthetic oligonucleotide
uucauuauguaaaauuaaa

SEQ ID NO: 2766629 - RNA, 19 nt, Artificial Sequence
  Description of Artificial Sequence: Synthetic oligonucleotide
ucauuauguaaaauuaaaa

SEQ ID NO: 2766630 - RNA, 19 nt, Artificial Sequence
  Description of Artificial Sequence: Synthetic oligonucleotide
ucauguuauggucaugaag

SEQ ID NO: 2766631 - RNA, 19 nt, Artificial Sequence
  Description of Artificial Sequence: Synthetic oligonucleotide
ucauguauuuaucacacau

SEQ ID NO: 2766632 - RNA, 19 nt, Artificial Sequence
  Description of Artificial Sequence: Synthetic oligonucleotide
auuaggacacuaguaaggc

SEQ ID NO: 2766633 - RNA, 19 nt, Artificial Sequence
  Description of Artificial Sequence: Synthetic oligonucleotide
cuuauguaacuguaaauug

SEQ ID NO: 2766634 - RNA, 19 nt, Artificial Sequence
  Description of Artificial Sequence: Synthetic oligonucleotide
cauuaggacacuaguaagg

SEQ ID NO: 2766635 - RNA, 19 nt, Artificial Sequence
  Description of Artificial Sequence: Synthetic oligonucleotide
uauguaacuguaaauuggu

SEQ ID NO: 2766636 - RNA, 19 nt, Artificial Sequence
  Description of Artificial Sequence: Synthetic oligonucleotide
uuaucacacaucagcauag

SEQ ID NO: 2766637 - RNA, 19 nt, Artificial Sequence
  Description of Artificial Sequence: Synthetic oligonucleotide
aaguucuacucuuuagaag

SEQ ID NO: 2766638 - RNA, 19 nt, Artificial Sequence
  Description of Artificial Sequence: Synthetic oligonucleotide
uguaaauugguguuuugcu

SEQ ID NO: 2766639 - RNA, 19 nt, Artificial Sequence
  Description of Artificial Sequence: Synthetic oligonucleotide
uacaacuuacuuuucauuc

SEQ ID NO: 2766640 - RNA, 19 nt, Artificial Sequence
  Description of Artificial Sequence: Synthetic oligonucleotide
uuuucauucaguguuaaau

SEQ ID NO: 2766641 - RNA, 19 nt, Artificial Sequence
  Description of Artificial Sequence: Synthetic oligonucleotide
uaauguugcagucauguau

SEQ ID NO: 2766642 - RNA, 19 nt, Artificial Sequence
  Description of Artificial Sequence: Synthetic oligonucleotide
acucuuuagaagcauuagg

SEQ ID NO: 2766643 - RNA, 19 nt, Artificial Sequence
  Description of Artificial Sequence: Synthetic oligonucleotide
auuaaaagcucuagaagac

SEQ ID NO: 2766644 - RNA, 19 nt, Artificial Sequence
  Description of Artificial Sequence: Synthetic oligonucleotide
uuauagacaggugugagcu

SEQ ID NO: 2766645 - RNA, 19 nt, Artificial Sequence
  Description of Artificial Sequence: Synthetic oligonucleotide
aagaaacuagcaugucugg

SEQ ID NO: 2766646 - RNA, 19 nt, Artificial Sequence
  Description of Artificial Sequence: Synthetic oligonucleotide
ugcaacaugguccuucgag

SEQ ID NO: 2766647 - RNA, 19 nt, Artificial Sequence
  Description of Artificial Sequence: Synthetic oligonucleotide
aaggcagucaaaagagucc

SEQ ID NO: 2766648 - RNA, 19 nt, Artificial Sequence
  Description of Artificial Sequence: Synthetic oligonucleotide
uucaguguuaaauaugcaa

SEQ ID NO: 2766649 - RNA, 19 nt, Artificial Sequence
  Description of Artificial Sequence: Synthetic oligonucleotide
agcauaggcggauuauucc

SEQ ID NO: 2766650 - RNA, 19 nt, Artificial Sequence
  Description of Artificial Sequence: Synthetic oligonucleotide
acuuacuuuucauucagug

SEQ ID NO: 2766651 - RNA, 19 nt, Artificial Sequence
  Description of Artificial Sequence: Synthetic oligonucleotide
uguaaguucuacucuuuag

SEQ ID NO: 2766652 - RNA, 19 nt, Artificial Sequence
  Description of Artificial Sequence: Synthetic oligonucleotide
uuuaucacacaucagcaua

SEQ ID NO: 2766653 - RNA, 19 nt, Artificial Sequence
  Description of Artificial Sequence: Synthetic oligonucleotide
uuaaauuacuaauguacaa

SEQ ID NO: 2766654 - RNA, 19 nt, Artificial Sequence
  Description of Artificial Sequence: Synthetic oligonucleotide
agcuagucacauuuuaagg

SEQ ID NO: 2766655 - RNA, 19 nt, Artificial Sequence
  Description of Artificial Sequence: Synthetic oligonucleotide
aaggcauuacuuaaauaac

SEQ ID NO: 2766656 - RNA, 19 nt, Artificial Sequence
  Description of Artificial Sequence: Synthetic oligonucleotide
caaaagaguccuuuugucc

SEQ ID NO: 2766657 - RNA, 19 nt, Artificial Sequence
  Description of Artificial Sequence: Synthetic oligonucleotide
ugguuauacaaaacaacca

SEQ ID NO: 2766658 - RNA, 19 nt, Artificial Sequence
  Description of Artificial Sequence: Synthetic oligonucleotide
aauaccuaacaguuaaauu

SEQ ID NO: 2766659 - RNA, 19 nt, Artificial Sequence
  Description of Artificial Sequence: Synthetic oligonucleotide
acagguuuaauaccuaaca

SEQ ID NO: 2766660 - RNA, 19 nt, Artificial Sequence
  Description of Artificial Sequence: Synthetic oligonucleotide
agguuuaauaccuaacagu

SEQ ID NO: 2766661 - RNA, 19 nt, Artificial Sequence
  Description of Artificial Sequence: Synthetic oligonucleotide
ucuuauguaacuguaaauu

SEQ ID NO: 2766662 - RNA, 19 nt, Artificial Sequence
  Description of Artificial Sequence: Synthetic oligonucleotide
auauacuaauguugcaguc

SEQ ID NO: 2766663 - RNA, 19 nt, Artificial Sequence
  Description of Artificial Sequence: Synthetic oligonucleotide
uucauguuuaaauuacuaa

SEQ ID NO: 2766664 - RNA, 19 nt, Artificial Sequence
  Description of Artificial Sequence: Synthetic oligonucleotide
uaauguacaaacagguuua

SEQ ID NO: 2766665 - RNA, 19 nt, Artificial Sequence
  Description of Artificial Sequence: Synthetic oligonucleotide
auagacaggugugagcugc

SEQ ID NO: 2766666 - RNA, 19 nt, Artificial Sequence
  Description of Artificial Sequence: Synthetic oligonucleotide
ucauucaguguuaaauaug

SEQ ID NO: 2766667 - RNA, 19 nt, Artificial Sequence
  Description of Artificial Sequence: Synthetic oligonucleotide
agucauguauuuaucacac

SEQ ID NO: 2766668 - RNA, 19 nt, Artificial Sequence
  Description of Artificial Sequence: Synthetic oligonucleotide
uaaauuacuaauguacaaa

SEQ ID NO: 2766669 - RNA, 19 nt, Artificial Sequence
  Description of Artificial Sequence: Synthetic oligonucleotide
ucuuuagaagcauuaggac

SEQ ID NO: 2766670 - RNA, 19 nt, Artificial Sequence
  Description of Artificial Sequence: Synthetic oligonucleotide
cucuagaagacccuguaag

SEQ ID NO: 2766671 - RNA, 19 nt, Artificial Sequence
  Description of Artificial Sequence: Synthetic oligonucleotide
acugguuauacaaaacaac

SEQ ID NO: 2766672 - RNA, 19 nt, Artificial Sequence
  Description of Artificial Sequence: Synthetic oligonucleotide
gagcuagucacauuuuaag

SEQ ID NO: 2766673 - RNA, 19 nt, Artificial Sequence
  Description of Artificial Sequence: Synthetic oligonucleotide
auuuccauucauuauguaa

SEQ ID NO: 2766674 - RNA, 19 nt, Artificial Sequence
  Description of Artificial Sequence: Synthetic oligonucleotide
uacaaacagguuuaauacc

SEQ ID NO: 2766675 - RNA, 19 nt, Artificial Sequence
  Description of Artificial Sequence: Synthetic oligonucleotide
guaaaauuaaaagcucuag

SEQ ID NO: 2766676 - RNA, 19 nt, Artificial Sequence
  Description of Artificial Sequence: Synthetic oligonucleotide
uuuaaggcucuuauguaac

SEQ ID NO: 2766677 - RNA, 19 nt, Artificial Sequence
  Description of Artificial Sequence: Synthetic oligonucleotide
uguauuuaucacacaucag

SEQ ID NO: 2766678 - RNA, 19 nt, Artificial Sequence
  Description of Artificial Sequence: Synthetic oligonucleotide
aaaaccuuaaccacaaaua

SEQ ID NO: 2766679 - RNA, 19 nt, Artificial Sequence
  Description of Artificial Sequence: Synthetic oligonucleotide
uaaggcagucaaaagaguc

SEQ ID NO: 2766680 - RNA, 19 nt, Artificial Sequence
  Description of Artificial Sequence: Synthetic oligonucleotide
uaggacacuaguaaggcau

SEQ ID NO: 2766681 - RNA, 19 nt, Artificial Sequence
  Description of Artificial Sequence: Synthetic oligonucleotide
auuuuaaggcagucaaaag

SEQ ID NO: 2766682 - RNA, 19 nt, Artificial Sequence
  Description of Artificial Sequence: Synthetic oligonucleotide
cuuuagaagcauuaggaca

SEQ ID NO: 2766683 - RNA, 19 nt, Artificial Sequence
  Description of Artificial Sequence: Synthetic oligonucleotide
aacagguuuaauaccuaac

SEQ ID NO: 2766684 - RNA, 19 nt, Artificial Sequence
  Description of Artificial Sequence: Synthetic oligonucleotide
acuaauguugcagucaugu

SEQ ID NO: 2766685 - RNA, 19 nt, Artificial Sequence
  Description of Artificial Sequence: Synthetic oligonucleotide
uuucauguuuaaauuacua

SEQ ID NO: 2766686 - RNA, 19 nt, Artificial Sequence
  Description of Artificial Sequence: Synthetic oligonucleotide
uaugcaacaugguccuucg

SEQ ID NO: 2766687 - RNA, 19 nt, Artificial Sequence
  Description of Artificial Sequence: Synthetic oligonucleotide
cauguuauggucaugaagu

SEQ ID NO: 2766688 - RNA, 19 nt, Artificial Sequence
  Description of Artificial Sequence: Synthetic oligonucleotide
agcauuaggacacuaguaa

SEQ ID NO: 2766689 - RNA, 19 nt, Artificial Sequence
  Description of Artificial Sequence: Synthetic oligonucleotide
uauacuaauguugcaguca

SEQ ID NO: 2766690 - RNA, 19 nt, Artificial Sequence
  Description of Artificial Sequence: Synthetic oligonucleotide
uuuuguccaguuuaaggcu

SEQ ID NO: 2766691 - RNA, 19 nt, Artificial Sequence
  Description of Artificial Sequence: Synthetic oligonucleotide
uuucauucaguguuaaaua

SEQ ID NO: 2766692 - RNA, 19 nt, Artificial Sequence
  Description of Artificial Sequence: Synthetic oligonucleotide
cucuuuagaagcauuagga

SEQ ID NO: 2766693 - RNA, 19 nt, Artificial Sequence
  Description of Artificial Sequence: Synthetic oligonucleotide
agagugucaaauccccugg

SEQ ID NO: 2766694 - RNA, 19 nt, Artificial Sequence
  Description of Artificial Sequence: Synthetic oligonucleotide
aucacacaucagcauaggc

SEQ ID NO: 2766695 - RNA, 19 nt, Artificial Sequence
  Description of Artificial Sequence: Synthetic oligonucleotide
agucaaaagaguccuuuug

SEQ ID NO: 2766696 - RNA, 19 nt, Artificial Sequence
  Description of Artificial Sequence: Synthetic oligonucleotide
uaaguucuacucuuuagaa

SEQ ID NO: 2766697 - RNA, 19 nt, Artificial Sequence
  Description of Artificial Sequence: Synthetic oligonucleotide
aaagaguccuuuuguccag

SEQ ID NO: 2766698 - RNA, 19 nt, Artificial Sequence
  Description of Artificial Sequence: Synthetic oligonucleotide
uaccuaacaguuaaauuuc

SEQ ID NO: 2766699 - RNA, 19 nt, Artificial Sequence
  Description of Artificial Sequence: Synthetic oligonucleotide
acuaguaaggcauuacuua

SEQ ID NO: 2766700 - RNA, 19 nt, Artificial Sequence
  Description of Artificial Sequence: Synthetic oligonucleotide
ugucagagugucaaauccc

SEQ ID NO: 2766701 - RNA, 19 nt, Artificial Sequence
  Description of Artificial Sequence: Synthetic oligonucleotide
aaggcucuuauguaacugu

SEQ ID NO: 2766702 - RNA, 19 nt, Artificial Sequence
  Description of Artificial Sequence: Synthetic oligonucleotide
uucauucaguguuaaauau

SEQ ID NO: 2766703 - RNA, 19 nt, Artificial Sequence
  Description of Artificial Sequence: Synthetic oligonucleotide
uguuuaaauuacuaaugua

SEQ ID NO: 2766704 - RNA, 19 nt, Artificial Sequence
  Description of Artificial Sequence: Synthetic oligonucleotide
uuaaaagcucuagaagacc

SEQ ID NO: 2766705 - RNA, 19 nt, Artificial Sequence
  Description of Artificial Sequence: Synthetic oligonucleotide
aaauuuccauucauuaugu

SEQ ID NO: 2766706 - RNA, 19 nt, Artificial Sequence
  Description of Artificial Sequence: Synthetic oligonucleotide
aacuagcaugucuggaaag

SEQ ID NO: 2766707 - RNA, 19 nt, Artificial Sequence
  Description of Artificial Sequence: Synthetic oligonucleotide
aauuacuaauguacaaaca

SEQ ID NO: 2766708 - RNA, 19 nt, Artificial Sequence
  Description of Artificial Sequence: Synthetic oligonucleotide
uccugcuucuguauaacug

SEQ ID NO: 2766709 - RNA, 19 nt, Artificial Sequence
  Description of Artificial Sequence: Synthetic oligonucleotide
ucuagaagacccuguaagu

SEQ ID NO: 2766710 - RNA, 19 nt, Artificial Sequence
  Description of Artificial Sequence: Synthetic oligonucleotide
ugcagucauguauuuauca

SEQ ID NO: 2766711 - RNA, 19 nt, Artificial Sequence
  Description of Artificial Sequence: Synthetic oligonucleotide
ucaaaagaguccuuuuguc

SEQ ID NO: 2766712 - RNA, 19 nt, Artificial Sequence
  Description of Artificial Sequence: Synthetic oligonucleotide
guaaguucuacucuuuaga

SEQ ID NO: 2766713 - RNA, 19 nt, Artificial Sequence
  Description of Artificial Sequence: Synthetic oligonucleotide
agacccuaaagaaacuagc

SEQ ID NO: 2766714 - RNA, 19 nt, Artificial Sequence
  Description of Artificial Sequence: Synthetic oligonucleotide
gcuagucacauuuuaaggc

SEQ ID NO: 2766715 - RNA, 19 nt, Artificial Sequence
  Description of Artificial Sequence: Synthetic oligonucleotide
cauucauuauguaaaauua

SEQ ID NO: 2766716 - RNA, 19 nt, Artificial Sequence
  Description of Artificial Sequence: Synthetic oligonucleotide
aaacagguuuaauaccuaa

SEQ ID NO: 2766717 - RNA, 19 nt, Artificial Sequence
  Description of Artificial Sequence: Synthetic oligonucleotide
uaacaguuaaauuuccauu

SEQ ID NO: 2766718 - RNA, 19 nt, Artificial Sequence
  Description of Artificial Sequence: Synthetic oligonucleotide
gugucagagugucaaaucc

SEQ ID NO: 2766719 - RNA, 19 nt, Artificial Sequence
  Description of Artificial Sequence: Synthetic oligonucleotide
acaacuuacuuuucauuca

SEQ ID NO: 2766720 - RNA, 19 nt, Artificial Sequence
  Description of Artificial Sequence: Synthetic oligonucleotide
cagguuuaauaccuaacag

SEQ ID NO: 2766721 - RNA, 19 nt, Artificial Sequence
  Description of Artificial Sequence: Synthetic oligonucleotide
aaacuagcaugucuggaaa

SEQ ID NO: 2766722 - RNA, 19 nt, Artificial Sequence
  Description of Artificial Sequence: Synthetic oligonucleotide
acaaacagguuuaauaccu

SEQ ID NO: 2766723 - RNA, 19 nt, Artificial Sequence
  Description of Artificial Sequence: Synthetic oligonucleotide
uagucacauuuuaaggcag

SEQ ID NO: 2766724 - RNA, 19 nt, Artificial Sequence
  Description of Artificial Sequence: Synthetic oligonucleotide
uccaguuuaaggcucuuau

SEQ ID NO: 2766725 - RNA, 19 nt, Artificial Sequence
  Description of Artificial Sequence: Synthetic oligonucleotide
uacuuaaauaacagacccu

SEQ ID NO: 2766726 - RNA, 19 nt, Artificial Sequence
  Description of Artificial Sequence: Synthetic oligonucleotide
acuagcaugucuggaaagg

SEQ ID NO: 2766727 - RNA, 19 nt, Artificial Sequence
  Description of Artificial Sequence: Synthetic oligonucleotide
uagcaugucuggaaaggag

SEQ ID NO: 2766728 - RNA, 19 nt, Artificial Sequence
  Description of Artificial Sequence: Synthetic oligonucleotide
gaaacuagcaugucuggaa

SEQ ID NO: 2766729 - RNA, 19 nt, Artificial Sequence
  Description of Artificial Sequence: Synthetic oligonucleotide
uguuauggucaugaagucc

SEQ ID NO: 2766730 - RNA, 19 nt, Artificial Sequence
  Description of Artificial Sequence: Synthetic oligonucleotide
acaggugugagcugccagg

SEQ ID NO: 2766731 - RNA, 19 nt, Artificial Sequence
  Description of Artificial Sequence: Synthetic oligonucleotide
aguaaggcauuacuuaaau

SEQ ID NO: 2766732 - RNA, 19 nt, Artificial Sequence
  Description of Artificial Sequence: Synthetic oligonucleotide
guguuaaauaugcaacaug

SEQ ID NO: 2766733 - RNA, 19 nt, Artificial Sequence
  Description of Artificial Sequence: Synthetic oligonucleotide
acuuaaauaacagacccua

SEQ ID NO: 2766734 - RNA, 19 nt, Artificial Sequence
  Description of Artificial Sequence: Synthetic oligonucleotide
ugguguuuugcuugcaugu

SEQ ID NO: 2766735 - RNA, 19 nt, Artificial Sequence
  Description of Artificial Sequence: Synthetic oligonucleotide
auaugcaacaugguccuuc

SEQ ID NO: 2766736 - RNA, 19 nt, Artificial Sequence
  Description of Artificial Sequence: Synthetic oligonucleotide
auguaugucugugucagag

SEQ ID NO: 2766737 - RNA, 19 nt, Artificial Sequence
  Description of Artificial Sequence: Synthetic oligonucleotide
auguuauggucaugaaguc

SEQ ID NO: 2766738 - RNA, 19 nt, Artificial Sequence
  Description of Artificial Sequence: Synthetic oligonucleotide
cuuaaccacaaauauacua

SEQ ID NO: 2766739 - RNA, 19 nt, Artificial Sequence
  Description of Artificial Sequence: Synthetic oligonucleotide
acaguuaaauuuccauuca

SEQ ID NO: 2766740 - RNA, 19 nt, Artificial Sequence
  Description of Artificial Sequence: Synthetic oligonucleotide
cuagucacauuuuaaggca

SEQ ID NO: 2766741 - RNA, 19 nt, Artificial Sequence
  Description of Artificial Sequence: Synthetic oligonucleotide
caacuuacuuuucauucag

SEQ ID NO: 2766742 - RNA, 19 nt, Artificial Sequence
  Description of Artificial Sequence: Synthetic oligonucleotide
uagaagacccuguaaguuc

SEQ ID NO: 2766743 - RNA, 19 nt, Artificial Sequence
  Description of Artificial Sequence: Synthetic oligonucleotide
aaagcucuagaagacccug

SEQ ID NO: 2766744 - RNA, 19 nt, Artificial Sequence
  Description of Artificial Sequence: Synthetic oligonucleotide
uaauaccuaacaguuaaau

SEQ ID NO: 2766745 - RNA, 19 nt, Artificial Sequence
  Description of Artificial Sequence: Synthetic oligonucleotide
uucgaggucauguuauggu

SEQ ID NO: 2766746 - RNA, 19 nt, Artificial Sequence
  Description of Artificial Sequence: Synthetic oligonucleotide
aguccuuuuguccaguuua

SEQ ID NO: 2766747 - RNA, 19 nt, Artificial Sequence
  Description of Artificial Sequence: Synthetic oligonucleotide
gacccuguaaguucuacuc

SEQ ID NO: 2766748 - RNA, 19 nt, Artificial Sequence
  Description of Artificial Sequence: Synthetic oligonucleotide
uuuguccaguuuaaggcuc

SEQ ID NO: 2766749 - RNA, 19 nt, Artificial Sequence
  Description of Artificial Sequence: Synthetic oligonucleotide
auacuaauguugcagucau

SEQ ID NO: 2766750 - RNA, 19 nt, Artificial Sequence
  Description of Artificial Sequence: Synthetic oligonucleotide
cuguaaauugguguuuugc

SEQ ID NO: 2766751 - RNA, 19 nt, Artificial Sequence
  Description of Artificial Sequence: Synthetic oligonucleotide
ucuguauaacugguuauac

SEQ ID NO: 2766752 - RNA, 19 nt, Artificial Sequence
  Description of Artificial Sequence: Synthetic oligonucleotide
aauguugcagucauguauu

SEQ ID NO: 2766753 - RNA, 19 nt, Artificial Sequence
  Description of Artificial Sequence: Synthetic oligonucleotide
aacugguuauacaaaacaa

SEQ ID NO: 2766754 - RNA, 19 nt, Artificial Sequence
  Description of Artificial Sequence: Synthetic oligonucleotide
uugguguuuugcuugcaug

SEQ ID NO: 2766755 - RNA, 19 nt, Artificial Sequence
  Description of Artificial Sequence: Synthetic oligonucleotide
ggugugagcugccaggugg

SEQ ID NO: 2766756 - RNA, 19 nt, Artificial Sequence
  Description of Artificial Sequence: Synthetic oligonucleotide
uuaaggcagucaaaagagu

SEQ ID NO: 2766757 - RNA, 19 nt, Artificial Sequence
  Description of Artificial Sequence: Synthetic oligonucleotide
acacuaguaaggcauuacu

SEQ ID NO: 2766758 - RNA, 19 nt, Artificial Sequence
  Description of Artificial Sequence: Synthetic oligonucleotide
guuuaaggcucuuauguaa

SEQ ID NO: 2766759 - RNA, 19 nt, Artificial Sequence
  Description of Artificial Sequence: Synthetic oligonucleotide
auuuaucacacaucagcau

SEQ ID NO: 2766760 - RNA, 19 nt, Artificial Sequence
  Description of Artificial Sequence: Synthetic oligonucleotide
gguuauacaaaacaaccaa

SEQ ID NO: 2766761 - RNA, 19 nt, Artificial Sequence
  Description of Artificial Sequence: Synthetic oligonucleotide
augucuggaaaggagagcu

SEQ ID NO: 2766762 - RNA, 19 nt, Artificial Sequence
  Description of Artificial Sequence: Synthetic oligonucleotide
uacucuuuagaagcauuag

SEQ ID NO: 2766763 - RNA, 19 nt, Artificial Sequence
  Description of Artificial Sequence: Synthetic oligonucleotide
aaccacaaauauacuaaug

SEQ ID NO: 2766764 - RNA, 19 nt, Artificial Sequence
  Description of Artificial Sequence: Synthetic oligonucleotide
ccuuuuguccaguuuaagg

SEQ ID NO: 2766765 - RNA, 19 nt, Artificial Sequence
  Description of Artificial Sequence: Synthetic oligonucleotide
uugcauguaugucuguguc

SEQ ID NO: 2766766 - RNA, 19 nt, Artificial Sequence
  Description of Artificial Sequence: Synthetic oligonucleotide
cagacccuaaagaaacuag

SEQ ID NO: 2766767 - RNA, 19 nt, Artificial Sequence
  Description of Artificial Sequence: Synthetic oligonucleotide
uaaccacaaauauacuaau

SEQ ID NO: 2766768 - RNA, 19 nt, Artificial Sequence
  Description of Artificial Sequence: Synthetic oligonucleotide
cacauuuuaaggcagucaa

SEQ ID NO: 2766769 - RNA, 19 nt, Artificial Sequence
  Description of Artificial Sequence: Synthetic oligonucleotide
aagacccuguaaguucuac

SEQ ID NO: 2766770 - RNA, 19 nt, Artificial Sequence
  Description of Artificial Sequence: Synthetic oligonucleotide
uuaaggcucuuauguaacu

SEQ ID NO: 2766771 - RNA, 19 nt, Artificial Sequence
  Description of Artificial Sequence: Synthetic oligonucleotide
uuaggacacuaguaaggca

SEQ ID NO: 2766772 - RNA, 19 nt, Artificial Sequence
  Description of Artificial Sequence: Synthetic oligonucleotide
uuaauaccuaacaguuaaa

SEQ ID NO: 2766773 - RNA, 19 nt, Artificial Sequence
  Description of Artificial Sequence: Synthetic oligonucleotide
uaaggcucuuauguaacug

SEQ ID NO: 2766774 - RNA, 19 nt, Artificial Sequence
  Description of Artificial Sequence: Synthetic oligonucleotide
ggcauuacuuaaauaacag

SEQ ID NO: 2766775 - RNA, 19 nt, Artificial Sequence
  Description of Artificial Sequence: Synthetic oligonucleotide
cccuaaagaaacuagcaug

SEQ ID NO: 2766776 - RNA, 19 nt, Artificial Sequence
  Description of Artificial Sequence: Synthetic oligonucleotide
gauuauuccuuucauguuu

SEQ ID NO: 2766777 - RNA, 19 nt, Artificial Sequence
  Description of Artificial Sequence: Synthetic oligonucleotide
gaagcauuaggacacuagu

SEQ ID NO: 2766778 - RNA, 19 nt, Artificial Sequence
  Description of Artificial Sequence: Synthetic oligonucleotide
uaguaaggcauuacuuaaa

SEQ ID NO: 2766779 - RNA, 19 nt, Artificial Sequence
  Description of Artificial Sequence: Synthetic oligonucleotide
cauuuuaaggcagucaaaa

SEQ ID NO: 2766780 - RNA, 19 nt, Artificial Sequence
  Description of Artificial Sequence: Synthetic oligonucleotide
ucacauuuuaaggcaguca

SEQ ID NO: 2766781 - RNA, 19 nt, Artificial Sequence
  Description of Artificial Sequence: Synthetic oligonucleotide
cuaguaaggcauuacuuaa

SEQ ID NO: 2766782 - RNA, 19 nt, Artificial Sequence
  Description of Artificial Sequence: Synthetic oligonucleotide
gcaacaugguccuucgagg

SEQ ID NO: 2766783 - RNA, 19 nt, Artificial Sequence
  Description of Artificial Sequence: Synthetic oligonucleotide
ucuacucuuuagaagcauu

SEQ ID NO: 2766784 - RNA, 19 nt, Artificial Sequence
  Description of Artificial Sequence: Synthetic oligonucleotide
gagaauugaaccuggacuu

SEQ ID NO: 2766785 - RNA, 19 nt, Artificial Sequence
  Description of Artificial Sequence: Synthetic oligonucleotide
ugcauguaugucuguguca

SEQ ID NO: 2766786 - RNA, 19 nt, Artificial Sequence
  Description of Artificial Sequence: Synthetic oligonucleotide
auggucaugaaguccugcu

SEQ ID NO: 2766787 - RNA, 19 nt, Artificial Sequence
  Description of Artificial Sequence: Synthetic oligonucleotide
cugagaauugaaccuggac

SEQ ID NO: 2766788 - RNA, 19 nt, Artificial Sequence
  Description of Artificial Sequence: Synthetic oligonucleotide
ccuuucauguuuaaauuac

SEQ ID NO: 2766789 - RNA, 19 nt, Artificial Sequence
  Description of Artificial Sequence: Synthetic oligonucleotide
caguguuaaauaugcaaca

SEQ ID NO: 2766790 - RNA, 19 nt, Artificial Sequence
  Description of Artificial Sequence: Synthetic oligonucleotide
uccuucgaggucauguuau

SEQ ID NO: 2766791 - RNA, 19 nt, Artificial Sequence
  Description of Artificial Sequence: Synthetic oligonucleotide
aguuuaaggcucuuaugua

SEQ ID NO: 2766792 - RNA, 19 nt, Artificial Sequence
  Description of Artificial Sequence: Synthetic oligonucleotide
uaucacacaucagcauagg

SEQ ID NO: 2766793 - RNA, 19 nt, Artificial Sequence
  Description of Artificial Sequence: Synthetic oligonucleotide
uaugucugugucagagugu

SEQ ID NO: 2766794 - RNA, 19 nt, Artificial Sequence
  Description of Artificial Sequence: Synthetic oligonucleotide
aaguccugcuucuguauaa

SEQ ID NO: 2766795 - RNA, 19 nt, Artificial Sequence
  Description of Artificial Sequence: Synthetic oligonucleotide
auaacagacccuaaagaaa

SEQ ID NO: 2766796 - RNA, 19 nt, Artificial Sequence
  Description of Artificial Sequence: Synthetic oligonucleotide
cuaauguacaaacagguuu

SEQ ID NO: 2766797 - RNA, 19 nt, Artificial Sequence
  Description of Artificial Sequence: Synthetic oligonucleotide
agaagcauuaggacacuag

SEQ ID NO: 2766798 - RNA, 19 nt, Artificial Sequence
  Description of Artificial Sequence: Synthetic oligonucleotide
auucauuauguaaaauuaa

SEQ ID NO: 2766799 - RNA, 19 nt, Artificial Sequence
  Description of Artificial Sequence: Synthetic oligonucleotide
gucuggaaaggagagcuag

SEQ ID NO: 2766800 - RNA, 19 nt, Artificial Sequence
  Description of Artificial Sequence: Synthetic oligonucleotide
aguguuaaauaugcaacau

SEQ ID NO: 2766801 - RNA, 19 nt, Artificial Sequence
  Description of Artificial Sequence: Synthetic oligonucleotide
cagucauguauuuaucaca

SEQ ID NO: 2766802 - RNA, 19 nt, Artificial Sequence
  Description of Artificial Sequence: Synthetic oligonucleotide
aggcauuacuuaaauaaca

SEQ ID NO: 2766803 - RNA, 19 nt, Artificial Sequence
  Description of Artificial Sequence: Synthetic oligonucleotide
ucgaggucauguuaugguc

SEQ ID NO: 2766804 - RNA, 19 nt, Artificial Sequence
  Description of Artificial Sequence: Synthetic oligonucleotide
caguuuaaggcucuuaugu

SEQ ID NO: 2766805 - RNA, 19 nt, Artificial Sequence
  Description of Artificial Sequence: Synthetic oligonucleotide
gucagagugucaaaucccc

SEQ ID NO: 2766806 - RNA, 19 nt, Artificial Sequence
  Description of Artificial Sequence: Synthetic oligonucleotide
ucuggaaaggagagcuagu

SEQ ID NO: 2766807 - RNA, 19 nt, Artificial Sequence
  Description of Artificial Sequence: Synthetic oligonucleotide
gcauuaggacacuaguaag

SEQ ID NO: 2766808 - RNA, 19 nt, Artificial Sequence
  Description of Artificial Sequence: Synthetic oligonucleotide
cuucgaggucauguuaugg

SEQ ID NO: 2766809 - RNA, 19 nt, Artificial Sequence
  Description of Artificial Sequence: Synthetic oligonucleotide
aauuuccauucauuaugua

SEQ ID NO: 2766810 - RNA, 19 nt, Artificial Sequence
  Description of Artificial Sequence: Synthetic oligonucleotide
guuauacaaaacaaccaaa

SEQ ID NO: 2766811 - RNA, 19 nt, Artificial Sequence
  Description of Artificial Sequence: Synthetic oligonucleotide
gacccuaaagaaacuagca

SEQ ID NO: 2766812 - RNA, 19 nt, Artificial Sequence
  Description of Artificial Sequence: Synthetic oligonucleotide
guugcagucauguauuuau

SEQ ID NO: 2766813 - RNA, 19 nt, Artificial Sequence
  Description of Artificial Sequence: Synthetic oligonucleotide
acuguaaauugguguuuug

SEQ ID NO: 2766814 - RNA, 19 nt, Artificial Sequence
  Description of Artificial Sequence: Synthetic oligonucleotide
aacuguaaauugguguuuu

SEQ ID NO: 2766815 - RNA, 19 nt, Artificial Sequence
  Description of Artificial Sequence: Synthetic oligonucleotide
aaaagcucuagaagacccu

SEQ ID NO: 2766816 - RNA, 19 nt, Artificial Sequence
  Description of Artificial Sequence: Synthetic oligonucleotide
guuauggucaugaaguccu

SEQ ID NO: 2766817 - RNA, 19 nt, Artificial Sequence
  Description of Artificial Sequence: Synthetic oligonucleotide
uucuguauaacugguuaua

SEQ ID NO: 2766818 - RNA, 19 nt, Artificial Sequence
  Description of Artificial Sequence: Synthetic oligonucleotide
gacaggugugagcugccag

SEQ ID NO: 2766819 - RNA, 19 nt, Artificial Sequence
  Description of Artificial Sequence: Synthetic oligonucleotide
ucagagugucaaauccccu

SEQ ID NO: 2766820 - RNA, 19 nt, Artificial Sequence
  Description of Artificial Sequence: Synthetic oligonucleotide
caaauauacuaauguugca

SEQ ID NO: 2766821 - RNA, 19 nt, Artificial Sequence
  Description of Artificial Sequence: Synthetic oligonucleotide
guaacuguaaauugguguu

SEQ ID NO: 2766822 - RNA, 19 nt, Artificial Sequence
  Description of Artificial Sequence: Synthetic oligonucleotide
aguuaaauuuccauucauu

SEQ ID NO: 2766823 - RNA, 19 nt, Artificial Sequence
  Description of Artificial Sequence: Synthetic oligonucleotide
uuauggucaugaaguccug

SEQ ID NO: 2766824 - RNA, 19 nt, Artificial Sequence
  Description of Artificial Sequence: Synthetic oligonucleotide
aaccuuaaccacaaauaua

SEQ ID NO: 2766825 - RNA, 19 nt, Artificial Sequence
  Description of Artificial Sequence: Synthetic oligonucleotide
aauguacaaacagguuuaa

SEQ ID NO: 2766826 - RNA, 19 nt, Artificial Sequence
  Description of Artificial Sequence: Synthetic oligonucleotide
cuguauaacugguuauaca

SEQ ID NO: 2766827 - RNA, 19 nt, Artificial Sequence
  Description of Artificial Sequence: Synthetic oligonucleotide
ugguccuucgaggucaugu

SEQ ID NO: 2766828 - RNA, 19 nt, Artificial Sequence
  Description of Artificial Sequence: Synthetic oligonucleotide
auugguguuuugcuugcau

SEQ ID NO: 2766829 - RNA, 19 nt, Artificial Sequence
  Description of Artificial Sequence: Synthetic oligonucleotide
uauggucaugaaguccugc

SEQ ID NO: 2766830 - RNA, 19 nt, Artificial Sequence
  Description of Artificial Sequence: Synthetic oligonucleotide
aguccugcuucuguauaac

SEQ ID NO: 2766831 - RNA, 19 nt, Artificial Sequence
  Description of Artificial Sequence: Synthetic oligonucleotide
cagcauaggcggauuauuc

SEQ ID NO: 2766832 - RNA, 19 nt, Artificial Sequence
  Description of Artificial Sequence: Synthetic oligonucleotide
gucaaaagaguccuuuugu

SEQ ID NO: 2766833 - RNA, 19 nt, Artificial Sequence
  Description of Artificial Sequence: Synthetic oligonucleotide
acaugguccuucgagguca

SEQ ID NO: 2766834 - RNA, 19 nt, Artificial Sequence
  Description of Artificial Sequence: Synthetic oligonucleotide
ugaaguccugcuucuguau

SEQ ID NO: 2766835 - RNA, 19 nt, Artificial Sequence
  Description of Artificial Sequence: Synthetic oligonucleotide
agaaacuagcaugucugga

SEQ ID NO: 2766836 - RNA, 19 nt, Artificial Sequence
  Description of Artificial Sequence: Synthetic oligonucleotide
gacacuaguaaggcauuac

SEQ ID NO: 2766837 - RNA, 19 nt, Artificial Sequence
  Description of Artificial Sequence: Synthetic oligonucleotide
aagcauuaggacacuagua

SEQ ID NO: 2766838 - RNA, 19 nt, Artificial Sequence
  Description of Artificial Sequence: Synthetic oligonucleotide
agaagacccuguaaguucu

SEQ ID NO: 2766839 - RNA, 19 nt, Artificial Sequence
  Description of Artificial Sequence: Synthetic oligonucleotide
gcagucauguauuuaucac

SEQ ID NO: 2766840 - RNA, 19 nt, Artificial Sequence
  Description of Artificial Sequence: Synthetic oligonucleotide
agcaugucuggaaaggaga

SEQ ID NO: 2766841 - RNA, 19 nt, Artificial Sequence
  Description of Artificial Sequence: Synthetic oligonucleotide
agacccuguaaguucuacu

SEQ ID NO: 2766842 - RNA, 19 nt, Artificial Sequence
  Description of Artificial Sequence: Synthetic oligonucleotide
uugcagucauguauuuauc

SEQ ID NO: 2766843 - RNA, 19 nt, Artificial Sequence
  Description of Artificial Sequence: Synthetic oligonucleotide
acccuguaaguucuacucu

SEQ ID NO: 2766844 - RNA, 19 nt, Artificial Sequence
  Description of Artificial Sequence: Synthetic oligonucleotide
ggucaugaaguccugcuuc

SEQ ID NO: 2766845 - RNA, 19 nt, Artificial Sequence
  Description of Artificial Sequence: Synthetic oligonucleotide
aggcggauuauuccuuuca

SEQ ID NO: 2766846 - RNA, 19 nt, Artificial Sequence
  Description of Artificial Sequence: Synthetic oligonucleotide
cuggaaaggagagcuaguc

SEQ ID NO: 2766847 - RNA, 19 nt, Artificial Sequence
  Description of Artificial Sequence: Synthetic oligonucleotide
uccuuuuguccaguuuaag

SEQ ID NO: 2766848 - RNA, 19 nt, Artificial Sequence
  Description of Artificial Sequence: Synthetic oligonucleotide
aggcagucaaaagaguccu

SEQ ID NO: 2766849 - RNA, 19 nt, Artificial Sequence
  Description of Artificial Sequence: Synthetic oligonucleotide
cuuaaauaacagacccuaa

SEQ ID NO: 2766850 - RNA, 19 nt, Artificial Sequence
  Description of Artificial Sequence: Synthetic oligonucleotide
augaaguccugcuucugua

SEQ ID NO: 2766851 - RNA, 19 nt, Artificial Sequence
  Description of Artificial Sequence: Synthetic oligonucleotide
aacuuacuuuucauucagu

SEQ ID NO: 2766852 - RNA, 19 nt, Artificial Sequence
  Description of Artificial Sequence: Synthetic oligonucleotide
gagagcuagucacauuuua

SEQ ID NO: 2766853 - RNA, 19 nt, Artificial Sequence
  Description of Artificial Sequence: Synthetic oligonucleotide
gcauuacuuaaauaacaga

SEQ ID NO: 2766854 - RNA, 19 nt, Artificial Sequence
  Description of Artificial Sequence: Synthetic oligonucleotide
caugucuggaaaggagagc

SEQ ID NO: 2766855 - RNA, 19 nt, Artificial Sequence
  Description of Artificial Sequence: Synthetic oligonucleotide
cuacucuuuagaagcauua

SEQ ID NO: 2766856 - RNA, 19 nt, Artificial Sequence
  Description of Artificial Sequence: Synthetic oligonucleotide
cuaaagaaacuagcauguc

SEQ ID NO: 2766857 - RNA, 19 nt, Artificial Sequence
  Description of Artificial Sequence: Synthetic oligonucleotide
ggucauguuauggucauga

SEQ ID NO: 2766858 - RNA, 19 nt, Artificial Sequence
  Description of Artificial Sequence: Synthetic oligonucleotide
uggucaugaaguccugcuu

SEQ ID NO: 2766859 - RNA, 19 nt, Artificial Sequence
  Description of Artificial Sequence: Synthetic oligonucleotide
aacagacccuaaagaaacu

SEQ ID NO: 2766860 - RNA, 19 nt, Artificial Sequence
  Description of Artificial Sequence: Synthetic oligonucleotide
auguaacuguaaauuggug

SEQ ID NO: 2766861 - RNA, 19 nt, Artificial Sequence
  Description of Artificial Sequence: Synthetic oligonucleotide
auuauuccuuucauguuua

SEQ ID NO: 2766862 - RNA, 19 nt, Artificial Sequence
  Description of Artificial Sequence: Synthetic oligonucleotide
guaaauugguguuuugcuu

SEQ ID NO: 2766863 - RNA, 19 nt, Artificial Sequence
  Description of Artificial Sequence: Synthetic oligonucleotide
uuauuccuuucauguuuaa

SEQ ID NO: 2766864 - RNA, 19 nt, Artificial Sequence
  Description of Artificial Sequence: Synthetic oligonucleotide
acuaauguacaaacagguu

SEQ ID NO: 2766865 - RNA, 19 nt, Artificial Sequence
  Description of Artificial Sequence: Synthetic oligonucleotide
agagcuagucacauuuuaa

SEQ ID NO: 2766866 - RNA, 19 nt, Artificial Sequence
  Description of Artificial Sequence: Synthetic oligonucleotide
uaacuguaaauugguguuu

SEQ ID NO: 2766867 - RNA, 19 nt, Artificial Sequence
  Description of Artificial Sequence: Synthetic oligonucleotide
aauugguguuuugcuugca

SEQ ID NO: 2766868 - RNA, 19 nt, Artificial Sequence
  Description of Artificial Sequence: Synthetic oligonucleotide
agcucuagaagacccugua

SEQ ID NO: 2766869 - RNA, 19 nt, Artificial Sequence
  Description of Artificial Sequence: Synthetic oligonucleotide
ucagcauaggcggauuauu

SEQ ID NO: 2766870 - RNA, 19 nt, Artificial Sequence
  Description of Artificial Sequence: Synthetic oligonucleotide
uuagaagcauuaggacacu

SEQ ID NO: 2766871 - RNA, 19 nt, Artificial Sequence
  Description of Artificial Sequence: Synthetic oligonucleotide
ugcuucuguauaacugguu

SEQ ID NO: 2766872 - RNA, 19 nt, Artificial Sequence
  Description of Artificial Sequence: Synthetic oligonucleotide
aaauccccuggaacuggag

SEQ ID NO: 2766873 - RNA, 19 nt, Artificial Sequence
  Description of Artificial Sequence: Synthetic oligonucleotide
guauaacugguuauacaaa

SEQ ID NO: 2766874 - RNA, 19 nt, Artificial Sequence
  Description of Artificial Sequence: Synthetic oligonucleotide
uucuacucuuuagaagcau

SEQ ID NO: 2766875 - RNA, 19 nt, Artificial Sequence
  Description of Artificial Sequence: Synthetic oligonucleotide
gcucuuauguaacuguaaa

SEQ ID NO: 2766876 - RNA, 19 nt, Artificial Sequence
  Description of Artificial Sequence: Synthetic oligonucleotide
ucaugaaguccugcuucug

SEQ ID NO: 2766877 - RNA, 19 nt, Artificial Sequence
  Description of Artificial Sequence: Synthetic oligonucleotide
auaggcggauuauuccuuu

SEQ ID NO: 2766878 - RNA, 19 nt, Artificial Sequence
  Description of Artificial Sequence: Synthetic oligonucleotide
guaaggcauuacuuaaaua

SEQ ID NO: 2766879 - RNA, 19 nt, Artificial Sequence
  Description of Artificial Sequence: Synthetic oligonucleotide
gaaguccugcuucuguaua

SEQ ID NO: 2766880 - RNA, 19 nt, Artificial Sequence
  Description of Artificial Sequence: Synthetic oligonucleotide
gcuucuguauaacugguua

SEQ ID NO: 2766881 - RNA, 19 nt, Artificial Sequence
  Description of Artificial Sequence: Synthetic oligonucleotide
aaggagagcuagucacauu

SEQ ID NO: 2766882 - RNA, 19 nt, Artificial Sequence
  Description of Artificial Sequence: Synthetic oligonucleotide
ccuaaagaaacuagcaugu

SEQ ID NO: 2766883 - RNA, 19 nt, Artificial Sequence
  Description of Artificial Sequence: Synthetic oligonucleotide
acagacccuaaagaaacua

SEQ ID NO: 2766884 - RNA, 19 nt, Artificial Sequence
  Description of Artificial Sequence: Synthetic oligonucleotide
aagcucuagaagacccugu

SEQ ID NO: 2766885 - RNA, 19 nt, Artificial Sequence
  Description of Artificial Sequence: Synthetic oligonucleotide
gcggauuauuccuuucaug

SEQ ID NO: 2766886 - RNA, 19 nt, Artificial Sequence
  Description of Artificial Sequence: Synthetic oligonucleotide
guuaaauaugcaacauggu

SEQ ID NO: 2766887 - RNA, 19 nt, Artificial Sequence
  Description of Artificial Sequence: Synthetic oligonucleotide
uguugcagucauguauuua

SEQ ID NO: 2766888 - RNA, 19 nt, Artificial Sequence
  Description of Artificial Sequence: Synthetic oligonucleotide
gucauguauuuaucacaca

SEQ ID NO: 2766889 - RNA, 19 nt, Artificial Sequence
  Description of Artificial Sequence: Synthetic oligonucleotide
gucacauuuuaaggcaguc

SEQ ID NO: 2766890 - RNA, 19 nt, Artificial Sequence
  Description of Artificial Sequence: Synthetic oligonucleotide
acuuuucauucaguguuaa

SEQ ID NO: 2766891 - RNA, 19 nt, Artificial Sequence
  Description of Artificial Sequence: Synthetic oligonucleotide
guuuaauaccuaacaguua

SEQ ID NO: 2766892 - RNA, 19 nt, Artificial Sequence
  Description of Artificial Sequence: Synthetic oligonucleotide
ugucuggaaaggagagcua

SEQ ID NO: 2766893 - RNA, 19 nt, Artificial Sequence
  Description of Artificial Sequence: Synthetic oligonucleotide
auucaguguuaaauaugca

SEQ ID NO: 2766894 - RNA, 19 nt, Artificial Sequence
  Description of Artificial Sequence: Synthetic oligonucleotide
agucacauuuuaaggcagu

SEQ ID NO: 2766895 - RNA, 19 nt, Artificial Sequence
  Description of Artificial Sequence: Synthetic oligonucleotide
ccaguuuaaggcucuuaug

SEQ ID NO: 2766896 - RNA, 19 nt, Artificial Sequence
  Description of Artificial Sequence: Synthetic oligonucleotide
cuagcaugucuggaaagga

SEQ ID NO: 2766897 - RNA, 19 nt, Artificial Sequence
  Description of Artificial Sequence: Synthetic oligonucleotide
guucuacucuuuagaagca

SEQ ID NO: 2766898 - RNA, 19 nt, Artificial Sequence
  Description of Artificial Sequence: Synthetic oligonucleotide
acauuuuaaggcagucaaa

SEQ ID NO: 2766899 - RNA, 19 nt, Artificial Sequence
  Description of Artificial Sequence: Synthetic oligonucleotide
uaggcggauuauuccuuuc

SEQ ID NO: 2766900 - RNA, 19 nt, Artificial Sequence
  Description of Artificial Sequence: Synthetic oligonucleotide
aucagcauaggcggauuau

SEQ ID NO: 2766901 - RNA, 19 nt, Artificial Sequence
  Description of Artificial Sequence: Synthetic oligonucleotide
cuuuucauucaguguuaaa

SEQ ID NO: 2766902 - RNA, 19 nt, Artificial Sequence
  Description of Artificial Sequence: Synthetic oligonucleotide
cucuuauguaacuguaaau

SEQ ID NO: 2766903 - RNA, 19 nt, Artificial Sequence
  Description of Artificial Sequence: Synthetic oligonucleotide
caaacagguuuaauaccua

SEQ ID NO: 2766904 - RNA, 19 nt, Artificial Sequence
  Description of Artificial Sequence: Synthetic oligonucleotide
agaauugaaccuggacuuu

SEQ ID NO: 2766905 - RNA, 19 nt, Artificial Sequence
  Description of Artificial Sequence: Synthetic oligonucleotide
cuaauguugcagucaugua

SEQ ID NO: 2766906 - RNA, 19 nt, Artificial Sequence
  Description of Artificial Sequence: Synthetic oligonucleotide
gucaugaaguccugcuucu

SEQ ID NO: 2766907 - RNA, 19 nt, Artificial Sequence
  Description of Artificial Sequence: Synthetic oligonucleotide
caacaugguccuucgaggu

SEQ ID NO: 2766908 - RNA, 19 nt, Artificial Sequence
  Description of Artificial Sequence: Synthetic oligonucleotide
uagaagcauuaggacacua

SEQ ID NO: 2766909 - RNA, 19 nt, Artificial Sequence
  Description of Artificial Sequence: Synthetic oligonucleotide
auguugcagucauguauuu

SEQ ID NO: 2766910 - RNA, 19 nt, Artificial Sequence
  Description of Artificial Sequence: Synthetic oligonucleotide
cuucuguauaacugguuau

SEQ ID NO: 2766911 - RNA, 19 nt, Artificial Sequence
  Description of Artificial Sequence: Synthetic oligonucleotide
cacuaguaaggcauuacuu

SEQ ID NO: 2766912 - RNA, 19 nt, Artificial Sequence
  Description of Artificial Sequence: Synthetic oligonucleotide
auguacaaacagguuuaau

SEQ ID NO: 2766913 - RNA, 19 nt, Artificial Sequence
  Description of Artificial Sequence: Synthetic oligonucleotide
gaggucauguuauggucau

SEQ ID NO: 2766914 - RNA, 19 nt, Artificial Sequence
  Description of Artificial Sequence: Synthetic oligonucleotide
caugaaguccugcuucugu

SEQ ID NO: 2766915 - RNA, 19 nt, Artificial Sequence
  Description of Artificial Sequence: Synthetic oligonucleotide
gucauguuauggucaugaa

SEQ ID NO: 2766916 - RNA, 19 nt, Artificial Sequence
  Description of Artificial Sequence: Synthetic oligonucleotide
ccauucauuauguaaaauu

SEQ ID NO: 2766917 - RNA, 19 nt, Artificial Sequence
  Description of Artificial Sequence: Synthetic oligonucleotide
aggugugagcugccaggug

SEQ ID NO: 2766918 - RNA, 19 nt, Artificial Sequence
  Description of Artificial Sequence: Synthetic oligonucleotide
cuguaaguucuacucuuua

SEQ ID NO: 2766919 - RNA, 19 nt, Artificial Sequence
  Description of Artificial Sequence: Synthetic oligonucleotide
agaguccuuuuguccaguu

SEQ ID NO: 2766920 - RNA, 19 nt, Artificial Sequence
  Description of Artificial Sequence: Synthetic oligonucleotide
aauaugcaacaugguccuu

SEQ ID NO: 2766921 - RNA, 19 nt, Artificial Sequence
  Description of Artificial Sequence: Synthetic oligonucleotide
cggauuauuccuuucaugu

SEQ ID NO: 2766922 - RNA, 19 nt, Artificial Sequence
  Description of Artificial Sequence: Synthetic oligonucleotide
guguuuugcuugcauguau

SEQ ID NO: 2766923 - RNA, 19 nt, Artificial Sequence
  Description of Artificial Sequence: Synthetic oligonucleotide
gcauaggcggauuauuccu

SEQ ID NO: 2766924 - RNA, 19 nt, Artificial Sequence
  Description of Artificial Sequence: Synthetic oligonucleotide
gaauugaaccuggacuuuu

SEQ ID NO: 2766925 - RNA, 19 nt, Artificial Sequence
  Description of Artificial Sequence: Synthetic oligonucleotide
cuagaagacccuguaaguu

SEQ ID NO: 2766926 - RNA, 19 nt, Artificial Sequence
  Description of Artificial Sequence: Synthetic oligonucleotide
augcaacaugguccuucga

SEQ ID NO: 2766927 - RNA, 19 nt, Artificial Sequence
  Description of Artificial Sequence: Synthetic oligonucleotide
guccuucgaggucauguua

SEQ ID NO: 2766928 - RNA, 19 nt, Artificial Sequence
  Description of Artificial Sequence: Synthetic oligonucleotide
aggcucuuauguaacugua

SEQ ID NO: 2766929 - RNA, 19 nt, Artificial Sequence
  Description of Artificial Sequence: Synthetic oligonucleotide
guccuuuuguccaguuuaa

SEQ ID NO: 2766930 - RNA, 19 nt, Artificial Sequence
  Description of Artificial Sequence: Synthetic oligonucleotide
ccuucgaggucauguuaug

SEQ ID NO: 2766931 - RNA, 19 nt, Artificial Sequence
  Description of Artificial Sequence: Synthetic oligonucleotide
acacaucagcauaggcgga

SEQ ID NO: 2766932 - RNA, 19 nt, Artificial Sequence
  Description of Artificial Sequence: Synthetic oligonucleotide
caucagcauaggcggauua

SEQ ID NO: 2766933 - RNA, 19 nt, Artificial Sequence
  Description of Artificial Sequence: Synthetic oligonucleotide
aggucauguuauggucaug

SEQ ID NO: 2766934 - RNA, 19 nt, Artificial Sequence
  Description of Artificial Sequence: Synthetic oligonucleotide
gcucuagaagacccuguaa

SEQ ID NO: 2766935 - RNA, 19 nt, Artificial Sequence
  Description of Artificial Sequence: Synthetic oligonucleotide
acaucagcauaggcggauu

SEQ ID NO: 2766936 - RNA, 19 nt, Artificial Sequence
  Description of Artificial Sequence: Synthetic oligonucleotide
ggauuauuccuuucauguu

SEQ ID NO: 2766937 - RNA, 19 nt, Artificial Sequence
  Description of Artificial Sequence: Synthetic oligonucleotide
cgaggucauguuaugguca

SEQ ID NO: 2766938 - RNA, 19 nt, Artificial Sequence
  Description of Artificial Sequence: Synthetic oligonucleotide
aggacacuaguaaggcauu

SEQ ID NO: 2766939 - RNA, 19 nt, Artificial Sequence
  Description of Artificial Sequence: Synthetic oligonucleotide
cauaggcggauuauuccuu

SEQ ID NO: 2766940 - RNA, 19 nt, Artificial Sequence
  Description of Artificial Sequence: Synthetic oligonucleotide
gaguccuuuuguccaguuu

SEQ ID NO: 2766941 - RNA, 19 nt, Artificial Sequence
  Description of Artificial Sequence: Synthetic oligonucleotide
ccacaaauauacuaauguu

SEQ ID NO: 2766942 - RNA, 19 nt, Artificial Sequence
  Description of Artificial Sequence: Synthetic oligonucleotide
ggcucuuauguaacuguaa

SEQ ID NO: 2766943 - RNA, 19 nt, Artificial Sequence
  Description of Artificial Sequence: Synthetic oligonucleotide
cugugucagagugucaaau

SEQ ID NO: 2766944 - RNA, 19 nt, Artificial Sequence
  Description of Artificial Sequence: Synthetic oligonucleotide
cagucaaaagaguccuuuu

SEQ ID NO: 2766945 - RNA, 19 nt, Artificial Sequence
  Description of Artificial Sequence: Synthetic oligonucleotide
gguguuuugcuugcaugua

SEQ ID NO: 2766946 - RNA, 19 nt, Artificial Sequence
  Description of Artificial Sequence: Synthetic oligonucleotide
gcugagaauugaaccugga

SEQ ID NO: 2766947 - RNA, 19 nt, Artificial Sequence
  Description of Artificial Sequence: Synthetic oligonucleotide
ggcggauuauuccuuucau

SEQ ID NO: 2766948 - RNA, 19 nt, Artificial Sequence
  Description of Artificial Sequence: Synthetic oligonucleotide
gaagacccuguaaguucua

SEQ ID NO: 2766949 - RNA, 19 nt, Artificial Sequence
  Description of Artificial Sequence: Synthetic oligonucleotide
guccaguuuaaggcucuua

SEQ ID NO: 2766950 - RNA, 19 nt, Artificial Sequence
  Description of Artificial Sequence: Synthetic oligonucleotide
gcagucaaaagaguccuuu

SEQ ID NO: 2766951 - RNA, 19 nt, Artificial Sequence
  Description of Artificial Sequence: Synthetic oligonucleotide
gcugccaggugggugcuga

SEQ ID NO: 2766952 - RNA, 19 nt, Artificial Sequence
  Description of Artificial Sequence: Synthetic oligonucleotide
cacaucagcauaggcggau

SEQ ID NO: 2766953 - RNA, 19 nt, Artificial Sequence
  Description of Artificial Sequence: Synthetic oligonucleotide
ggacacuaguaaggcauua

SEQ ID NO: 2766954 - RNA, 19 nt, Artificial Sequence
  Description of Artificial Sequence: Synthetic oligonucleotide
caggugugagcugccaggu

SEQ ID NO: 2766955 - RNA, 19 nt, Artificial Sequence
  Description of Artificial Sequence: Synthetic oligonucleotide
ccuuaaccacaaauauacu

SEQ ID NO: 2766956 - RNA, 19 nt, Artificial Sequence
  Description of Artificial Sequence: Synthetic oligonucleotide
gguccuucgaggucauguu

SEQ ID NO: 2766957 - RNA, 19 nt, Artificial Sequence
  Description of Artificial Sequence: Synthetic oligonucleotide
augguccuucgaggucaug

SEQ ID NO: 2766958 - RNA, 19 nt, Artificial Sequence
  Description of Artificial Sequence: Synthetic oligonucleotide
ccuguaaguucuacucuuu

SEQ ID NO: 2766959 - RNA, 19 nt, Artificial Sequence
  Description of Artificial Sequence: Synthetic oligonucleotide
caugguccuucgaggucau

SEQ ID NO: 2766960 - RNA, 19 nt, Artificial Sequence
  Description of Artificial Sequence: Synthetic oligonucleotide
ggagagcuagucacauuuu

SEQ ID NO: 2766961 - RNA, 19 nt, Artificial Sequence
  Description of Artificial Sequence: Synthetic oligonucleotide
ggcagucaaaagaguccuu

SEQ ID NO: 2766962 - RNA, 19 nt, Artificial Sequence
  Description of Artificial Sequence: Synthetic oligonucleotide
aaaauggagagcuacaggc

SEQ ID NO: 2766963 - RNA, 19 nt, Artificial Sequence
  Description of Artificial Sequence: Synthetic oligonucleotide
aacuauuugaucaaaaugg

SEQ ID NO: 2766964 - RNA, 19 nt, Artificial Sequence
  Description of Artificial Sequence: Synthetic oligonucleotide
aaugcaaugaacuauuuga

SEQ ID NO: 2766965 - RNA, 19 nt, Artificial Sequence
  Description of Artificial Sequence: Synthetic oligonucleotide
aauaucuguauucucuuac

SEQ ID NO: 2766966 - RNA, 19 nt, Artificial Sequence
  Description of Artificial Sequence: Synthetic oligonucleotide
aaaauuuuagcuugcagca

SEQ ID NO: 2766967 - RNA, 19 nt, Artificial Sequence
  Description of Artificial Sequence: Synthetic oligonucleotide
aaagcacccacucugggcc

SEQ ID NO: 2766968 - RNA, 19 nt, Artificial Sequence
  Description of Artificial Sequence: Synthetic oligonucleotide
uauuugaucaaaauggaga

SEQ ID NO: 2766969 - RNA, 19 nt, Artificial Sequence
  Description of Artificial Sequence: Synthetic oligonucleotide
aacgguucauuccagaaac

SEQ ID NO: 2766970 - RNA, 19 nt, Artificial Sequence
  Description of Artificial Sequence: Synthetic oligonucleotide
uguaggguacacuagaacg

SEQ ID NO: 2766971 - RNA, 19 nt, Artificial Sequence
  Description of Artificial Sequence: Synthetic oligonucleotide
ucuguauucucuuacuugg

SEQ ID NO: 2766972 - RNA, 19 nt, Artificial Sequence
  Description of Artificial Sequence: Synthetic oligonucleotide
uuugaaaggaagaggaaag

SEQ ID NO: 2766973 - RNA, 19 nt, Artificial Sequence
  Description of Artificial Sequence: Synthetic oligonucleotide
uguuuucuuaucauuaaag

SEQ ID NO: 2766974 - RNA, 19 nt, Artificial Sequence
  Description of Artificial Sequence: Synthetic oligonucleotide
aacaugguaagcugcaagg

SEQ ID NO: 2766975 - RNA, 19 nt, Artificial Sequence
  Description of Artificial Sequence: Synthetic oligonucleotide
aauucuuaauaauaucugu

SEQ ID NO: 2766976 - RNA, 19 nt, Artificial Sequence
  Description of Artificial Sequence: Synthetic oligonucleotide
cuuaauaauaucuguauuc

SEQ ID NO: 2766977 - RNA, 19 nt, Artificial Sequence
  Description of Artificial Sequence: Synthetic oligonucleotide
cauuaaaggauuugaaagg

SEQ ID NO: 2766978 - RNA, 19 nt, Artificial Sequence
  Description of Artificial Sequence: Synthetic oligonucleotide
auuugaucaaaauggagag

SEQ ID NO: 2766979 - RNA, 19 nt, Artificial Sequence
  Description of Artificial Sequence: Synthetic oligonucleotide
guuuucuuaucauuaaagg

SEQ ID NO: 2766980 - RNA, 19 nt, Artificial Sequence
  Description of Artificial Sequence: Synthetic oligonucleotide
aauaauaucuguauucucu

SEQ ID NO: 2766981 - RNA, 19 nt, Artificial Sequence
  Description of Artificial Sequence: Synthetic oligonucleotide
aagggagaaaggcuaaugg

SEQ ID NO: 2766982 - RNA, 19 nt, Artificial Sequence
  Description of Artificial Sequence: Synthetic oligonucleotide
guucauuccagaaacaugg

SEQ ID NO: 2766983 - RNA, 19 nt, Artificial Sequence
  Description of Artificial Sequence: Synthetic oligonucleotide
gaacuauuugaucaaaaug

SEQ ID NO: 2766984 - RNA, 19 nt, Artificial Sequence
  Description of Artificial Sequence: Synthetic oligonucleotide
uuucauagaguucacccag

SEQ ID NO: 2766985 - RNA, 19 nt, Artificial Sequence
  Description of Artificial Sequence: Synthetic oligonucleotide
auuuguauuacuuugugua

SEQ ID NO: 2766986 - RNA, 19 nt, Artificial Sequence
  Description of Artificial Sequence: Synthetic oligonucleotide
aauggagagcuacaggcag

SEQ ID NO: 2766987 - RNA, 19 nt, Artificial Sequence
  Description of Artificial Sequence: Synthetic oligonucleotide
uuagcuugcagcaagcuuc

SEQ ID NO: 2766988 - RNA, 19 nt, Artificial Sequence
  Description of Artificial Sequence: Synthetic oligonucleotide
uuguauuuguauuacuuug

SEQ ID NO: 2766989 - RNA, 19 nt, Artificial Sequence
  Description of Artificial Sequence: Synthetic oligonucleotide
uuacuugguaucauuugcg

SEQ ID NO: 2766990 - RNA, 19 nt, Artificial Sequence
  Description of Artificial Sequence: Synthetic oligonucleotide
auagaguucacccaguuaa

SEQ ID NO: 2766991 - RNA, 19 nt, Artificial Sequence
  Description of Artificial Sequence: Synthetic oligonucleotide
aaagaaaacauaaucccca

SEQ ID NO: 2766992 - RNA, 19 nt, Artificial Sequence
  Description of Artificial Sequence: Synthetic oligonucleotide
uaauggcuaaugaugaccc

SEQ ID NO: 2766993 - RNA, 19 nt, Artificial Sequence
  Description of Artificial Sequence: Synthetic oligonucleotide
gaggaaagaaaacauaauc

SEQ ID NO: 2766994 - RNA, 19 nt, Artificial Sequence
  Description of Artificial Sequence: Synthetic oligonucleotide
ggaaagaaaacauaauccc

SEQ ID NO: 2766995 - RNA, 19 nt, Artificial Sequence
  Description of Artificial Sequence: Synthetic oligonucleotide
uuaauaauaucuguauucu

SEQ ID NO: 2766996 - RNA, 19 nt, Artificial Sequence
  Description of Artificial Sequence: Synthetic oligonucleotide
uugaucaaaauggagagcu

SEQ ID NO: 2766997 - RNA, 19 nt, Artificial Sequence
  Description of Artificial Sequence: Synthetic oligonucleotide
gauguggagagguuguagg

SEQ ID NO: 2766998 - RNA, 19 nt, Artificial Sequence
  Description of Artificial Sequence: Synthetic oligonucleotide
agggagaaaggcuaauggc

SEQ ID NO: 2766999 - RNA, 19 nt, Artificial Sequence
  Description of Artificial Sequence: Synthetic oligonucleotide
aaacaugguaagcugcaag

SEQ ID NO: 2767000 - RNA, 19 nt, Artificial Sequence
  Description of Artificial Sequence: Synthetic oligonucleotide
aaacauaauccccaaacuu

SEQ ID NO: 2767001 - RNA, 19 nt, Artificial Sequence
  Description of Artificial Sequence: Synthetic oligonucleotide
uucacuuguuuucuuauca

SEQ ID NO: 2767002 - RNA, 19 nt, Artificial Sequence
  Description of Artificial Sequence: Synthetic oligonucleotide
aaggauuugaaaggaagag

SEQ ID NO: 2767003 - RNA, 19 nt, Artificial Sequence
  Description of Artificial Sequence: Synthetic oligonucleotide
gaaagaaaacauaaucccc

SEQ ID NO: 2767004 - RNA, 19 nt, Artificial Sequence
  Description of Artificial Sequence: Synthetic oligonucleotide
uucucaggaagccaagucc

SEQ ID NO: 2767005 - RNA, 19 nt, Artificial Sequence
  Description of Artificial Sequence: Synthetic oligonucleotide
uguauuuguauuacuuugu

SEQ ID NO: 2767006 - RNA, 19 nt, Artificial Sequence
  Description of Artificial Sequence: Synthetic oligonucleotide
uuaagagucaguguguaga

SEQ ID NO: 2767007 - RNA, 19 nt, Artificial Sequence
  Description of Artificial Sequence: Synthetic oligonucleotide
uuaucauuaaaggauuuga

SEQ ID NO: 2767008 - RNA, 19 nt, Artificial Sequence
  Description of Artificial Sequence: Synthetic oligonucleotide
agagucaguguguagaaug

SEQ ID NO: 2767009 - RNA, 19 nt, Artificial Sequence
  Description of Artificial Sequence: Synthetic oligonucleotide
gagagcuacaggcagguag

SEQ ID NO: 2767010 - RNA, 19 nt, Artificial Sequence
  Description of Artificial Sequence: Synthetic oligonucleotide
uguauuacuuuguguaagc

SEQ ID NO: 2767011 - RNA, 19 nt, Artificial Sequence
  Description of Artificial Sequence: Synthetic oligonucleotide
uucuuaauaauaucuguau

SEQ ID NO: 2767012 - RNA, 19 nt, Artificial Sequence
  Description of Artificial Sequence: Synthetic oligonucleotide
auuacuuuguguaagcaug

SEQ ID NO: 2767013 - RNA, 19 nt, Artificial Sequence
  Description of Artificial Sequence: Synthetic oligonucleotide
aguuguaccacugaugucu

SEQ ID NO: 2767014 - RNA, 19 nt, Artificial Sequence
  Description of Artificial Sequence: Synthetic oligonucleotide
ucaguguguagaauguuug

SEQ ID NO: 2767015 - RNA, 19 nt, Artificial Sequence
  Description of Artificial Sequence: Synthetic oligonucleotide
acuagaacgguucauucca

SEQ ID NO: 2767016 - RNA, 19 nt, Artificial Sequence
  Description of Artificial Sequence: Synthetic oligonucleotide
uguagaauguuuguauuug

SEQ ID NO: 2767017 - RNA, 19 nt, Artificial Sequence
  Description of Artificial Sequence: Synthetic oligonucleotide
uaggguuucucuugcauag

SEQ ID NO: 2767018 - RNA, 19 nt, Artificial Sequence
  Description of Artificial Sequence: Synthetic oligonucleotide
gaugacccaauccaucuag

SEQ ID NO: 2767019 - RNA, 19 nt, Artificial Sequence
  Description of Artificial Sequence: Synthetic oligonucleotide
aaugaugacccaauccauc

SEQ ID NO: 2767020 - RNA, 19 nt, Artificial Sequence
  Description of Artificial Sequence: Synthetic oligonucleotide
cuugcauaggaccagggac

SEQ ID NO: 2767021 - RNA, 19 nt, Artificial Sequence
  Description of Artificial Sequence: Synthetic oligonucleotide
ucaaaauggagagcuacag

SEQ ID NO: 2767022 - RNA, 19 nt, Artificial Sequence
  Description of Artificial Sequence: Synthetic oligonucleotide
ugaacuauuugaucaaaau

SEQ ID NO: 2767023 - RNA, 19 nt, Artificial Sequence
  Description of Artificial Sequence: Synthetic oligonucleotide
aucauuaaaggauuugaaa

SEQ ID NO: 2767024 - RNA, 19 nt, Artificial Sequence
  Description of Artificial Sequence: Synthetic oligonucleotide
cuauuugaucaaaauggag

SEQ ID NO: 2767025 - RNA, 19 nt, Artificial Sequence
  Description of Artificial Sequence: Synthetic oligonucleotide
caaacuucagaaugcaaug

SEQ ID NO: 2767026 - RNA, 19 nt, Artificial Sequence
  Description of Artificial Sequence: Synthetic oligonucleotide
uugcauaggaccagggacc

SEQ ID NO: 2767027 - RNA, 19 nt, Artificial Sequence
  Description of Artificial Sequence: Synthetic oligonucleotide
uaucauuugcguuuccaca

SEQ ID NO: 2767028 - RNA, 19 nt, Artificial Sequence
  Description of Artificial Sequence: Synthetic oligonucleotide
uguguuaggguuucucuug

SEQ ID NO: 2767029 - RNA, 19 nt, Artificial Sequence
  Description of Artificial Sequence: Synthetic oligonucleotide
uuucucuugcauaggacca

SEQ ID NO: 2767030 - RNA, 19 nt, Artificial Sequence
  Description of Artificial Sequence: Synthetic oligonucleotide
acccaauccaucuagggca

SEQ ID NO: 2767031 - RNA, 19 nt, Artificial Sequence
  Description of Artificial Sequence: Synthetic oligonucleotide
auuccagaaacaugguaag

SEQ ID NO: 2767032 - RNA, 19 nt, Artificial Sequence
  Description of Artificial Sequence: Synthetic oligonucleotide
gcuacaggcagguagaaag

SEQ ID NO: 2767033 - RNA, 19 nt, Artificial Sequence
  Description of Artificial Sequence: Synthetic oligonucleotide
ucuuacuugguaucauuug

SEQ ID NO: 2767034 - RNA, 19 nt, Artificial Sequence
  Description of Artificial Sequence: Synthetic oligonucleotide
uauuuguauuacuuugugu

SEQ ID NO: 2767035 - RNA, 19 nt, Artificial Sequence
  Description of Artificial Sequence: Synthetic oligonucleotide
gaaugcaaugaacuauuug

SEQ ID NO: 2767036 - RNA, 19 nt, Artificial Sequence
  Description of Artificial Sequence: Synthetic oligonucleotide
ugggccuccuuucauagag

SEQ ID NO: 2767037 - RNA, 19 nt, Artificial Sequence
  Description of Artificial Sequence: Synthetic oligonucleotide
accaaucuuucucaggaag

SEQ ID NO: 2767038 - RNA, 19 nt, Artificial Sequence
  Description of Artificial Sequence: Synthetic oligonucleotide
agaauguuuguauuuguau

SEQ ID NO: 2767039 - RNA, 19 nt, Artificial Sequence
  Description of Artificial Sequence: Synthetic oligonucleotide
ucucaggaagccaagucca

SEQ ID NO: 2767040 - RNA, 19 nt, Artificial Sequence
  Description of Artificial Sequence: Synthetic oligonucleotide
ucuuaauaauaucuguauu

SEQ ID NO: 2767041 - RNA, 19 nt, Artificial Sequence
  Description of Artificial Sequence: Synthetic oligonucleotide
gaguucacccaguuaagag

SEQ ID NO: 2767042 - RNA, 19 nt, Artificial Sequence
  Description of Artificial Sequence: Synthetic oligonucleotide
aaggaagaggaaagaaaac

SEQ ID NO: 2767043 - RNA, 19 nt, Artificial Sequence
  Description of Artificial Sequence: Synthetic oligonucleotide
ugucuuuccaccagugaug

SEQ ID NO: 2767044 - RNA, 19 nt, Artificial Sequence
  Description of Artificial Sequence: Synthetic oligonucleotide
uuguauuacuuuguguaag

SEQ ID NO: 2767045 - RNA, 19 nt, Artificial Sequence
  Description of Artificial Sequence: Synthetic oligonucleotide
accacugaugucuuuccac

SEQ ID NO: 2767046 - RNA, 19 nt, Artificial Sequence
  Description of Artificial Sequence: Synthetic oligonucleotide
cuaauggcuaaugaugacc

SEQ ID NO: 2767047 - RNA, 19 nt, Artificial Sequence
  Description of Artificial Sequence: Synthetic oligonucleotide
aucuguauucucuuacuug

SEQ ID NO: 2767048 - RNA, 19 nt, Artificial Sequence
  Description of Artificial Sequence: Synthetic oligonucleotide
agccaaguccaguuguacc

SEQ ID NO: 2767049 - RNA, 19 nt, Artificial Sequence
  Description of Artificial Sequence: Synthetic oligonucleotide
aacuucagaaugcaaugaa

SEQ ID NO: 2767050 - RNA, 19 nt, Artificial Sequence
  Description of Artificial Sequence: Synthetic oligonucleotide
uauuacuuuguguaagcau

SEQ ID NO: 2767051 - RNA, 19 nt, Artificial Sequence
  Description of Artificial Sequence: Synthetic oligonucleotide
uccagaaacaugguaagcu

SEQ ID NO: 2767052 - RNA, 19 nt, Artificial Sequence
  Description of Artificial Sequence: Synthetic oligonucleotide
agcugcaagggagaaaggc

SEQ ID NO: 2767053 - RNA, 19 nt, Artificial Sequence
  Description of Artificial Sequence: Synthetic oligonucleotide
gcaaugaacuauuugauca

SEQ ID NO: 2767054 - RNA, 19 nt, Artificial Sequence
  Description of Artificial Sequence: Synthetic oligonucleotide
uuuguauuacuuuguguaa

SEQ ID NO: 2767055 - RNA, 19 nt, Artificial Sequence
  Description of Artificial Sequence: Synthetic oligonucleotide
uaauccccaaacuucagaa

SEQ ID NO: 2767056 - RNA, 19 nt, Artificial Sequence
  Description of Artificial Sequence: Synthetic oligonucleotide
aggauuugaaaggaagagg

SEQ ID NO: 2767057 - RNA, 19 nt, Artificial Sequence
  Description of Artificial Sequence: Synthetic oligonucleotide
ugacccaauccaucuaggg

SEQ ID NO: 2767058 - RNA, 19 nt, Artificial Sequence
  Description of Artificial Sequence: Synthetic oligonucleotide
caaaauggagagcuacagg

SEQ ID NO: 2767059 - RNA, 19 nt, Artificial Sequence
  Description of Artificial Sequence: Synthetic oligonucleotide
gguaagaagacccauccac

SEQ ID NO: 2767060 - RNA, 19 nt, Artificial Sequence
  Description of Artificial Sequence: Synthetic oligonucleotide
aguucacccaguuaagagu

SEQ ID NO: 2767061 - RNA, 19 nt, Artificial Sequence
  Description of Artificial Sequence: Synthetic oligonucleotide
gaucaaaauggagagcuac

SEQ ID NO: 2767062 - RNA, 19 nt, Artificial Sequence
  Description of Artificial Sequence: Synthetic oligonucleotide
aggaagaggaaagaaaaca

SEQ ID NO: 2767063 - RNA, 19 nt, Artificial Sequence
  Description of Artificial Sequence: Synthetic oligonucleotide
uuuggugaaagcacccacu

SEQ ID NO: 2767064 - RNA, 19 nt, Artificial Sequence
  Description of Artificial Sequence: Synthetic oligonucleotide
guauuuguauuacuuugug

SEQ ID NO: 2767065 - RNA, 19 nt, Artificial Sequence
  Description of Artificial Sequence: Synthetic oligonucleotide
uucuuaucauuaaaggauu

SEQ ID NO: 2767066 - RNA, 19 nt, Artificial Sequence
  Description of Artificial Sequence: Synthetic oligonucleotide
acacuagaacgguucauuc

SEQ ID NO: 2767067 - RNA, 19 nt, Artificial Sequence
  Description of Artificial Sequence: Synthetic oligonucleotide
cagaaacaugguaagcugc

SEQ ID NO: 2767068 - RNA, 19 nt, Artificial Sequence
  Description of Artificial Sequence: Synthetic oligonucleotide
aagaaaacauaauccccaa

SEQ ID NO: 2767069 - RNA, 19 nt, Artificial Sequence
  Description of Artificial Sequence: Synthetic oligonucleotide
ugaaagcacccacucuggg

SEQ ID NO: 2767070 - RNA, 19 nt, Artificial Sequence
  Description of Artificial Sequence: Synthetic oligonucleotide
cauuccagaaacaugguaa

SEQ ID NO: 2767071 - RNA, 19 nt, Artificial Sequence
  Description of Artificial Sequence: Synthetic oligonucleotide
auguuuguauuuguauuac

SEQ ID NO: 2767072 - RNA, 19 nt, Artificial Sequence
  Description of Artificial Sequence: Synthetic oligonucleotide
uuacuuuguguaagcaugu

SEQ ID NO: 2767073 - RNA, 19 nt, Artificial Sequence
  Description of Artificial Sequence: Synthetic oligonucleotide
gacccaauccaucuagggc

SEQ ID NO: 2767074 - RNA, 19 nt, Artificial Sequence
  Description of Artificial Sequence: Synthetic oligonucleotide
auguggagagguuguaggg

SEQ ID NO: 2767075 - RNA, 19 nt, Artificial Sequence
  Description of Artificial Sequence: Synthetic oligonucleotide
gaaagcacccacucugggc

SEQ ID NO: 2767076 - RNA, 19 nt, Artificial Sequence
  Description of Artificial Sequence: Synthetic oligonucleotide
auuugaaaggaagaggaaa

SEQ ID NO: 2767077 - RNA, 19 nt, Artificial Sequence
  Description of Artificial Sequence: Synthetic oligonucleotide
ggugaaagcacccacucug

SEQ ID NO: 2767078 - RNA, 19 nt, Artificial Sequence
  Description of Artificial Sequence: Synthetic oligonucleotide
uauucucuuacuugguauc

SEQ ID NO: 2767079 - RNA, 19 nt, Artificial Sequence
  Description of Artificial Sequence: Synthetic oligonucleotide
augaugacccaauccaucu

SEQ ID NO: 2767080 - RNA, 19 nt, Artificial Sequence
  Description of Artificial Sequence: Synthetic oligonucleotide
uccaguuguaccacugaug

SEQ ID NO: 2767081 - RNA, 19 nt, Artificial Sequence
  Description of Artificial Sequence: Synthetic oligonucleotide
ucagaaugcaaugaacuau

SEQ ID NO: 2767082 - RNA, 19 nt, Artificial Sequence
  Description of Artificial Sequence: Synthetic oligonucleotide
acuucagaaugcaaugaac

SEQ ID NO: 2767083 - RNA, 19 nt, Artificial Sequence
  Description of Artificial Sequence: Synthetic oligonucleotide
uaauaauaucuguauucuc

SEQ ID NO: 2767084 - RNA, 19 nt, Artificial Sequence
  Description of Artificial Sequence: Synthetic oligonucleotide
aaacuucagaaugcaauga

SEQ ID NO: 2767085 - RNA, 19 nt, Artificial Sequence
  Description of Artificial Sequence: Synthetic oligonucleotide
acuuuguguaagcaugugu

SEQ ID NO: 2767086 - RNA, 19 nt, Artificial Sequence
  Description of Artificial Sequence: Synthetic oligonucleotide
ucuugcauaggaccaggga

SEQ ID NO: 2767087 - RNA, 19 nt, Artificial Sequence
  Description of Artificial Sequence: Synthetic oligonucleotide
agaagacccauccacaauu

SEQ ID NO: 2767088 - RNA, 19 nt, Artificial Sequence
  Description of Artificial Sequence: Synthetic oligonucleotide
ugcaaugaacuauuugauc

SEQ ID NO: 2767089 - RNA, 19 nt, Artificial Sequence
  Description of Artificial Sequence: Synthetic oligonucleotide
ugcagcaagcuucacuugu

SEQ ID NO: 2767090 - RNA, 19 nt, Artificial Sequence
  Description of Artificial Sequence: Synthetic oligonucleotide
uuguuuucuuaucauuaaa

SEQ ID NO: 2767091 - RNA, 19 nt, Artificial Sequence
  Description of Artificial Sequence: Synthetic oligonucleotide
aucauuugcguuuccacau

SEQ ID NO: 2767092 - RNA, 19 nt, Artificial Sequence
  Description of Artificial Sequence: Synthetic oligonucleotide
uccccaaacuucagaaugc

SEQ ID NO: 2767093 - RNA, 19 nt, Artificial Sequence
  Description of Artificial Sequence: Synthetic oligonucleotide
uaagaagacccauccacaa

SEQ ID NO: 2767094 - RNA, 19 nt, Artificial Sequence
  Description of Artificial Sequence: Synthetic oligonucleotide
ccuuucauagaguucaccc

SEQ ID NO: 2767095 - RNA, 19 nt, Artificial Sequence
  Description of Artificial Sequence: Synthetic oligonucleotide
auaauaucuguauucucuu

SEQ ID NO: 2767096 - RNA, 19 nt, Artificial Sequence
  Description of Artificial Sequence: Synthetic oligonucleotide
auaucuguauucucuuacu

SEQ ID NO: 2767097 - RNA, 19 nt, Artificial Sequence
  Description of Artificial Sequence: Synthetic oligonucleotide
uguauucucuuacuuggua

SEQ ID NO: 2767098 - RNA, 19 nt, Artificial Sequence
  Description of Artificial Sequence: Synthetic oligonucleotide
augucuuuccaccagugau

SEQ ID NO: 2767099 - RNA, 19 nt, Artificial Sequence
  Description of Artificial Sequence: Synthetic oligonucleotide
uuucucaggaagccaaguc

SEQ ID NO: 2767100 - RNA, 19 nt, Artificial Sequence
  Description of Artificial Sequence: Synthetic oligonucleotide
acugaugucuuuccaccag

SEQ ID NO: 2767101 - RNA, 19 nt, Artificial Sequence
  Description of Artificial Sequence: Synthetic oligonucleotide
uucagaaugcaaugaacua

SEQ ID NO: 2767102 - RNA, 19 nt, Artificial Sequence
  Description of Artificial Sequence: Synthetic oligonucleotide
cuuaucauuaaaggauuug

SEQ ID NO: 2767103 - RNA, 19 nt, Artificial Sequence
  Description of Artificial Sequence: Synthetic oligonucleotide
uagaauguuuguauuugua

SEQ ID NO: 2767104 - RNA, 19 nt, Artificial Sequence
  Description of Artificial Sequence: Synthetic oligonucleotide
cacuagaacgguucauucc

SEQ ID NO: 2767105 - RNA, 19 nt, Artificial Sequence
  Description of Artificial Sequence: Synthetic oligonucleotide
ccaguuaagagucagugug

SEQ ID NO: 2767106 - RNA, 19 nt, Artificial Sequence
  Description of Artificial Sequence: Synthetic oligonucleotide
ucuagggcagacaaauuuu

SEQ ID NO: 2767107 - RNA, 19 nt, Artificial Sequence
  Description of Artificial Sequence: Synthetic oligonucleotide
uuugaucaaaauggagagc

SEQ ID NO: 2767108 - RNA, 19 nt, Artificial Sequence
  Description of Artificial Sequence: Synthetic oligonucleotide
uuguaggguacacuagaac

SEQ ID NO: 2767109 - RNA, 19 nt, Artificial Sequence
  Description of Artificial Sequence: Synthetic oligonucleotide
uguuuguauuuguauuacu

SEQ ID NO: 2767110 - RNA, 19 nt, Artificial Sequence
  Description of Artificial Sequence: Synthetic oligonucleotide
aucuagggcagacaaauuu

SEQ ID NO: 2767111 - RNA, 19 nt, Artificial Sequence
  Description of Artificial Sequence: Synthetic oligonucleotide
ugaugucuuuccaccagug

SEQ ID NO: 2767112 - RNA, 19 nt, Artificial Sequence
  Description of Artificial Sequence: Synthetic oligonucleotide
guaucauuugcguuuccac

SEQ ID NO: 2767113 - RNA, 19 nt, Artificial Sequence
  Description of Artificial Sequence: Synthetic oligonucleotide
cuacaggcagguagaaagg

SEQ ID NO: 2767114 - RNA, 19 nt, Artificial Sequence
  Description of Artificial Sequence: Synthetic oligonucleotide
auaauccccaaacuucaga

SEQ ID NO: 2767115 - RNA, 19 nt, Artificial Sequence
  Description of Artificial Sequence: Synthetic oligonucleotide
uugcguuuccacaucauuu

SEQ ID NO: 2767116 - RNA, 19 nt, Artificial Sequence
  Description of Artificial Sequence: Synthetic oligonucleotide
uagaguucacccaguuaag

SEQ ID NO: 2767117 - RNA, 19 nt, Artificial Sequence
  Description of Artificial Sequence: Synthetic oligonucleotide
uguguagaauguuuguauu

SEQ ID NO: 2767118 - RNA, 19 nt, Artificial Sequence
  Description of Artificial Sequence: Synthetic oligonucleotide
uuuagcuugcagcaagcuu

SEQ ID NO: 2767119 - RNA, 19 nt, Artificial Sequence
  Description of Artificial Sequence: Synthetic oligonucleotide
uuggugaaagcacccacuc

SEQ ID NO: 2767120 - RNA, 19 nt, Artificial Sequence
  Description of Artificial Sequence: Synthetic oligonucleotide
uacuugguaucauuugcgu

SEQ ID NO: 2767121 - RNA, 19 nt, Artificial Sequence
  Description of Artificial Sequence: Synthetic oligonucleotide
ucucucugguguguuaggg

SEQ ID NO: 2767122 - RNA, 19 nt, Artificial Sequence
  Description of Artificial Sequence: Synthetic oligonucleotide
ggauuugaaaggaagagga

SEQ ID NO: 2767123 - RNA, 19 nt, Artificial Sequence
  Description of Artificial Sequence: Synthetic oligonucleotide
augguaagcugcaagggag

SEQ ID NO: 2767124 - RNA, 19 nt, Artificial Sequence
  Description of Artificial Sequence: Synthetic oligonucleotide
aaugaacuauuugaucaaa

SEQ ID NO: 2767125 - RNA, 19 nt, Artificial Sequence
  Description of Artificial Sequence: Synthetic oligonucleotide
acuauuugaucaaaaugga

SEQ ID NO: 2767126 - RNA, 19 nt, Artificial Sequence
  Description of Artificial Sequence: Synthetic oligonucleotide
acaugguaagcugcaaggg

SEQ ID NO: 2767127 - RNA, 19 nt, Artificial Sequence
  Description of Artificial Sequence: Synthetic oligonucleotide
uaagagucaguguguagaa

SEQ ID NO: 2767128 - RNA, 19 nt, Artificial Sequence
  Description of Artificial Sequence: Synthetic oligonucleotide
ucauuccagaaacauggua

SEQ ID NO: 2767129 - RNA, 19 nt, Artificial Sequence
  Description of Artificial Sequence: Synthetic oligonucleotide
uugaaaggaagaggaaaga

SEQ ID NO: 2767130 - RNA, 19 nt, Artificial Sequence
  Description of Artificial Sequence: Synthetic oligonucleotide
aggcuaauggcuaaugaug

SEQ ID NO: 2767131 - RNA, 19 nt, Artificial Sequence
  Description of Artificial Sequence: Synthetic oligonucleotide
cuuucauagaguucaccca

SEQ ID NO: 2767132 - RNA, 19 nt, Artificial Sequence
  Description of Artificial Sequence: Synthetic oligonucleotide
aauggcuaaugaugaccca

SEQ ID NO: 2767133 - RNA, 19 nt, Artificial Sequence
  Description of Artificial Sequence: Synthetic oligonucleotide
cuucagaaugcaaugaacu

SEQ ID NO: 2767134 - RNA, 19 nt, Artificial Sequence
  Description of Artificial Sequence: Synthetic oligonucleotide
aaauggagagcuacaggca

SEQ ID NO: 2767135 - RNA, 19 nt, Artificial Sequence
  Description of Artificial Sequence: Synthetic oligonucleotide
uguaccacugaugucuuuc

SEQ ID NO: 2767136 - RNA, 19 nt, Artificial Sequence
  Description of Artificial Sequence: Synthetic oligonucleotide
gagguuguaggguacacua

SEQ ID NO: 2767137 - RNA, 19 nt, Artificial Sequence
  Description of Artificial Sequence: Synthetic oligonucleotide
guuaagagucaguguguag

SEQ ID NO: 2767138 - RNA, 19 nt, Artificial Sequence
  Description of Artificial Sequence: Synthetic oligonucleotide
uuaggguuucucuugcaua

SEQ ID NO: 2767139 - RNA, 19 nt, Artificial Sequence
  Description of Artificial Sequence: Synthetic oligonucleotide
uuugcguuuccacaucauu

SEQ ID NO: 2767140 - RNA, 19 nt, Artificial Sequence
  Description of Artificial Sequence: Synthetic oligonucleotide
ucuuaucauuaaaggauuu

SEQ ID NO: 2767141 - RNA, 19 nt, Artificial Sequence
  Description of Artificial Sequence: Synthetic oligonucleotide
aagaagacccauccacaau

SEQ ID NO: 2767142 - RNA, 19 nt, Artificial Sequence
  Description of Artificial Sequence: Synthetic oligonucleotide
ugcguuuccacaucauuua

SEQ ID NO: 2767143 - RNA, 19 nt, Artificial Sequence
  Description of Artificial Sequence: Synthetic oligonucleotide
aagacccauccacaauucu

SEQ ID NO: 2767144 - RNA, 19 nt, Artificial Sequence
  Description of Artificial Sequence: Synthetic oligonucleotide
auucuuaauaauaucugua

SEQ ID NO: 2767145 - RNA, 19 nt, Artificial Sequence
  Description of Artificial Sequence: Synthetic oligonucleotide
ugauguggagagguuguag

SEQ ID NO: 2767146 - RNA, 19 nt, Artificial Sequence
  Description of Artificial Sequence: Synthetic oligonucleotide
acauaauccccaaacuuca

SEQ ID NO: 2767147 - RNA, 19 nt, Artificial Sequence
  Description of Artificial Sequence: Synthetic oligonucleotide
uuuccaccagugaugugga

SEQ ID NO: 2767148 - RNA, 19 nt, Artificial Sequence
  Description of Artificial Sequence: Synthetic oligonucleotide
agaacgguucauuccagaa

SEQ ID NO: 2767149 - RNA, 19 nt, Artificial Sequence
  Description of Artificial Sequence: Synthetic oligonucleotide
agacccauccacaauucuc

SEQ ID NO: 2767150 - RNA, 19 nt, Artificial Sequence
  Description of Artificial Sequence: Synthetic oligonucleotide
ucucugguguguuaggguu

SEQ ID NO: 2767151 - RNA, 19 nt, Artificial Sequence
  Description of Artificial Sequence: Synthetic oligonucleotide
gggguaagaagacccaucc

SEQ ID NO: 2767152 - RNA, 19 nt, Artificial Sequence
  Description of Artificial Sequence: Synthetic oligonucleotide
uucauagaguucacccagu

SEQ ID NO: 2767153 - RNA, 19 nt, Artificial Sequence
  Description of Artificial Sequence: Synthetic oligonucleotide
aaauuuuagcuugcagcaa

SEQ ID NO: 2767154 - RNA, 19 nt, Artificial Sequence
  Description of Artificial Sequence: Synthetic oligonucleotide
acccaguuaagagucagug

SEQ ID NO: 2767155 - RNA, 19 nt, Artificial Sequence
  Description of Artificial Sequence: Synthetic oligonucleotide
ucucuugcauaggaccagg

SEQ ID NO: 2767156 - RNA, 19 nt, Artificial Sequence
  Description of Artificial Sequence: Synthetic oligonucleotide
acuuguuuucuuaucauua

SEQ ID NO: 2767157 - RNA, 19 nt, Artificial Sequence
  Description of Artificial Sequence: Synthetic oligonucleotide
auccaucuagggcagacaa

SEQ ID NO: 2767158 - RNA, 19 nt, Artificial Sequence
  Description of Artificial Sequence: Synthetic oligonucleotide
gaaaggcuaauggcuaaug

SEQ ID NO: 2767159 - RNA, 19 nt, Artificial Sequence
  Description of Artificial Sequence: Synthetic oligonucleotide
ugguaagcugcaagggaga

SEQ ID NO: 2767160 - RNA, 19 nt, Artificial Sequence
  Description of Artificial Sequence: Synthetic oligonucleotide
uccaccagugauguggaga

SEQ ID NO: 2767161 - RNA, 19 nt, Artificial Sequence
  Description of Artificial Sequence: Synthetic oligonucleotide
ggaccaaucuuucucagga

SEQ ID NO: 2767162 - RNA, 19 nt, Artificial Sequence
  Description of Artificial Sequence: Synthetic oligonucleotide
ucacuuguuuucuuaucau

SEQ ID NO: 2767163 - RNA, 19 nt, Artificial Sequence
  Description of Artificial Sequence: Synthetic oligonucleotide
uucucucugguguguuagg

SEQ ID NO: 2767164 - RNA, 19 nt, Artificial Sequence
  Description of Artificial Sequence: Synthetic oligonucleotide
uucauuccagaaacauggu

SEQ ID NO: 2767165 - RNA, 19 nt, Artificial Sequence
  Description of Artificial Sequence: Synthetic oligonucleotide
cauaauccccaaacuucag

SEQ ID NO: 2767166 - RNA, 19 nt, Artificial Sequence
  Description of Artificial Sequence: Synthetic oligonucleotide
cacaauucucucuggugug

SEQ ID NO: 2767167 - RNA, 19 nt, Artificial Sequence
  Description of Artificial Sequence: Synthetic oligonucleotide
cuuguuuucuuaucauuaa

SEQ ID NO: 2767168 - RNA, 19 nt, Artificial Sequence
  Description of Artificial Sequence: Synthetic oligonucleotide
gaugucuuuccaccaguga

SEQ ID NO: 2767169 - RNA, 19 nt, Artificial Sequence
  Description of Artificial Sequence: Synthetic oligonucleotide
agaaacaugguaagcugca

SEQ ID NO: 2767170 - RNA, 19 nt, Artificial Sequence
  Description of Artificial Sequence: Synthetic oligonucleotide
gaagaggaaagaaaacaua

SEQ ID NO: 2767171 - RNA, 19 nt, Artificial Sequence
  Description of Artificial Sequence: Synthetic oligonucleotide
ucauagaguucacccaguu

SEQ ID NO: 2767172 - RNA, 19 nt, Artificial Sequence
  Description of Artificial Sequence: Synthetic oligonucleotide
uagaacgguucauuccaga

SEQ ID NO: 2767173 - RNA, 19 nt, Artificial Sequence
  Description of Artificial Sequence: Synthetic oligonucleotide
ucacccaguuaagagucag

SEQ ID NO: 2767174 - RNA, 19 nt, Artificial Sequence
  Description of Artificial Sequence: Synthetic oligonucleotide
agaaaacauaauccccaaa

SEQ ID NO: 2767175 - RNA, 19 nt, Artificial Sequence
  Description of Artificial Sequence: Synthetic oligonucleotide
uuuuagcuugcagcaagcu

SEQ ID NO: 2767176 - RNA, 19 nt, Artificial Sequence
  Description of Artificial Sequence: Synthetic oligonucleotide
cuagaacgguucauuccag

SEQ ID NO: 2767177 - RNA, 19 nt, Artificial Sequence
  Description of Artificial Sequence: Synthetic oligonucleotide
uucucuugcauaggaccag

SEQ ID NO: 2767178 - RNA, 19 nt, Artificial Sequence
  Description of Artificial Sequence: Synthetic oligonucleotide
guucacccaguuaagaguc

SEQ ID NO: 2767179 - RNA, 19 nt, Artificial Sequence
  Description of Artificial Sequence: Synthetic oligonucleotide
ucauuugcguuuccacauc

SEQ ID NO: 2767180 - RNA, 19 nt, Artificial Sequence
  Description of Artificial Sequence: Synthetic oligonucleotide
uacacuagaacgguucauu

SEQ ID NO: 2767181 - RNA, 19 nt, Artificial Sequence
  Description of Artificial Sequence: Synthetic oligonucleotide
cuucacuuguuuucuuauc

SEQ ID NO: 2767182 - RNA, 19 nt, Artificial Sequence
  Description of Artificial Sequence: Synthetic oligonucleotide
gaacgguucauuccagaaa

SEQ ID NO: 2767183 - RNA, 19 nt, Artificial Sequence
  Description of Artificial Sequence: Synthetic oligonucleotide
guaccacugaugucuuucc

SEQ ID NO: 2767184 - RNA, 19 nt, Artificial Sequence
  Description of Artificial Sequence: Synthetic oligonucleotide
aauucucucugguguguua

SEQ ID NO: 2767185 - RNA, 19 nt, Artificial Sequence
  Description of Artificial Sequence: Synthetic oligonucleotide
uuccagaaacaugguaagc

SEQ ID NO: 2767186 - RNA, 19 nt, Artificial Sequence
  Description of Artificial Sequence: Synthetic oligonucleotide
uggugaaagcacccacucu

SEQ ID NO: 2767187 - RNA, 19 nt, Artificial Sequence
  Description of Artificial Sequence: Synthetic oligonucleotide
guguuaggguuucucuugc

SEQ ID NO: 2767188 - RNA, 19 nt, Artificial Sequence
  Description of Artificial Sequence: Synthetic oligonucleotide
caugguaagcugcaaggga

SEQ ID NO: 2767189 - RNA, 19 nt, Artificial Sequence
  Description of Artificial Sequence: Synthetic oligonucleotide
auucucuuacuugguauca

SEQ ID NO: 2767190 - RNA, 19 nt, Artificial Sequence
  Description of Artificial Sequence: Synthetic oligonucleotide
uagcuugcagcaagcuuca

SEQ ID NO: 2767191 - RNA, 19 nt, Artificial Sequence
  Description of Artificial Sequence: Synthetic oligonucleotide
guaagaagacccauccaca

SEQ ID NO: 2767192 - RNA, 19 nt, Artificial Sequence
  Description of Artificial Sequence: Synthetic oligonucleotide
ucucuuacuugguaucauu

SEQ ID NO: 2767193 - RNA, 19 nt, Artificial Sequence
  Description of Artificial Sequence: Synthetic oligonucleotide
ugcaagggagaaaggcuaa

SEQ ID NO: 2767194 - RNA, 19 nt, Artificial Sequence
  Description of Artificial Sequence: Synthetic oligonucleotide
aggaagccaaguccaguug

SEQ ID NO: 2767195 - RNA, 19 nt, Artificial Sequence
  Description of Artificial Sequence: Synthetic oligonucleotide
aauccaucuagggcagaca

SEQ ID NO: 2767196 - RNA, 19 nt, Artificial Sequence
  Description of Artificial Sequence: Synthetic oligonucleotide
acuugguaucauuugcguu

SEQ ID NO: 2767197 - RNA, 19 nt, Artificial Sequence
  Description of Artificial Sequence: Synthetic oligonucleotide
uaggguacacuagaacggu

SEQ ID NO: 2767198 - RNA, 19 nt, Artificial Sequence
  Description of Artificial Sequence: Synthetic oligonucleotide
cucuugcauaggaccaggg

SEQ ID NO: 2767199 - RNA, 19 nt, Artificial Sequence
  Description of Artificial Sequence: Synthetic oligonucleotide
uaccacugaugucuuucca

SEQ ID NO: 2767200 - RNA, 19 nt, Artificial Sequence
  Description of Artificial Sequence: Synthetic oligonucleotide
aaguccaguuguaccacug

SEQ ID NO: 2767201 - RNA, 19 nt, Artificial Sequence
  Description of Artificial Sequence: Synthetic oligonucleotide
cuugguaucauuugcguuu

SEQ ID NO: 2767202 - RNA, 19 nt, Artificial Sequence
  Description of Artificial Sequence: Synthetic oligonucleotide
ugaucaaaauggagagcua

SEQ ID NO: 2767203 - RNA, 19 nt, Artificial Sequence
  Description of Artificial Sequence: Synthetic oligonucleotide
uguuaggguuucucuugca

SEQ ID NO: 2767204 - RNA, 19 nt, Artificial Sequence
  Description of Artificial Sequence: Synthetic oligonucleotide
aucaaaauggagagcuaca

SEQ ID NO: 2767205 - RNA, 19 nt, Artificial Sequence
  Description of Artificial Sequence: Synthetic oligonucleotide
uaggaccagggaccaaucu

SEQ ID NO: 2767206 - RNA, 19 nt, Artificial Sequence
  Description of Artificial Sequence: Synthetic oligonucleotide
gguuguaggguacacuaga

SEQ ID NO: 2767207 - RNA, 19 nt, Artificial Sequence
  Description of Artificial Sequence: Synthetic oligonucleotide
uccuuucauagaguucacc

SEQ ID NO: 2767208 - RNA, 19 nt, Artificial Sequence
  Description of Artificial Sequence: Synthetic oligonucleotide
aguguguagaauguuugua

SEQ ID NO: 2767209 - RNA, 19 nt, Artificial Sequence
  Description of Artificial Sequence: Synthetic oligonucleotide
agugauguggagagguugu

SEQ ID NO: 2767210 - RNA, 19 nt, Artificial Sequence
  Description of Artificial Sequence: Synthetic oligonucleotide
agggaccaaucuuucucag

SEQ ID NO: 2767211 - RNA, 19 nt, Artificial Sequence
  Description of Artificial Sequence: Synthetic oligonucleotide
gcaagcuucacuuguuuuc

SEQ ID NO: 2767212 - RNA, 19 nt, Artificial Sequence
  Description of Artificial Sequence: Synthetic oligonucleotide
uggagagguuguaggguac

SEQ ID NO: 2767213 - RNA, 19 nt, Artificial Sequence
  Description of Artificial Sequence: Synthetic oligonucleotide
aguccaguuguaccacuga

SEQ ID NO: 2767214 - RNA, 19 nt, Artificial Sequence
  Description of Artificial Sequence: Synthetic oligonucleotide
agaguucacccaguuaaga

SEQ ID NO: 2767215 - RNA, 19 nt, Artificial Sequence
  Description of Artificial Sequence: Synthetic oligonucleotide
caagggagaaaggcuaaug

SEQ ID NO: 2767216 - RNA, 19 nt, Artificial Sequence
  Description of Artificial Sequence: Synthetic oligonucleotide
agagcuacaggcagguaga

SEQ ID NO: 2767217 - RNA, 19 nt, Artificial Sequence
  Description of Artificial Sequence: Synthetic oligonucleotide
uacuuuguguaagcaugug

SEQ ID NO: 2767218 - RNA, 19 nt, Artificial Sequence
  Description of Artificial Sequence: Synthetic oligonucleotide
ugcauaggaccagggacca

SEQ ID NO: 2767219 - RNA, 19 nt, Artificial Sequence
  Description of Artificial Sequence: Synthetic oligonucleotide
cuugcagcaagcuucacuu

SEQ ID NO: 2767220 - RNA, 19 nt, Artificial Sequence
  Description of Artificial Sequence: Synthetic oligonucleotide
gagaaaggcuaauggcuaa

SEQ ID NO: 2767221 - RNA, 19 nt, Artificial Sequence
  Description of Artificial Sequence: Synthetic oligonucleotide
guauuacuuuguguaagca

SEQ ID NO: 2767222 - RNA, 19 nt, Artificial Sequence
  Description of Artificial Sequence: Synthetic oligonucleotide
auggcuaaugaugacccaa

SEQ ID NO: 2767223 - RNA, 19 nt, Artificial Sequence
  Description of Artificial Sequence: Synthetic oligonucleotide
uucacccaguuaagaguca

SEQ ID NO: 2767224 - RNA, 19 nt, Artificial Sequence
  Description of Artificial Sequence: Synthetic oligonucleotide
cucaggaagccaaguccag

SEQ ID NO: 2767225 - RNA, 19 nt, Artificial Sequence
  Description of Artificial Sequence: Synthetic oligonucleotide
ccagaaacaugguaagcug

SEQ ID NO: 2767226 - RNA, 19 nt, Artificial Sequence
  Description of Artificial Sequence: Synthetic oligonucleotide
aggaccagggaccaaucuu

SEQ ID NO: 2767227 - RNA, 19 nt, Artificial Sequence
  Description of Artificial Sequence: Synthetic oligonucleotide
ccacugaugucuuuccacc

SEQ ID NO: 2767228 - RNA, 19 nt, Artificial Sequence
  Description of Artificial Sequence: Synthetic oligonucleotide
uggagagcuacaggcaggu

SEQ ID NO: 2767229 - RNA, 19 nt, Artificial Sequence
  Description of Artificial Sequence: Synthetic oligonucleotide
ugaugacccaauccaucua

SEQ ID NO: 2767230 - RNA, 19 nt, Artificial Sequence
  Description of Artificial Sequence: Synthetic oligonucleotide
augcaaugaacuauuugau

SEQ ID NO: 2767231 - RNA, 19 nt, Artificial Sequence
  Description of Artificial Sequence: Synthetic oligonucleotide
aguuaagagucagugugua

SEQ ID NO: 2767232 - RNA, 19 nt, Artificial Sequence
  Description of Artificial Sequence: Synthetic oligonucleotide
acccauccacaauucucuc

SEQ ID NO: 2767233 - RNA, 19 nt, Artificial Sequence
  Description of Artificial Sequence: Synthetic oligonucleotide
uccaucuagggcagacaaa

SEQ ID NO: 2767234 - RNA, 19 nt, Artificial Sequence
  Description of Artificial Sequence: Synthetic oligonucleotide
agcuucacuuguuuucuua

SEQ ID NO: 2767235 - RNA, 19 nt, Artificial Sequence
  Description of Artificial Sequence: Synthetic oligonucleotide
uugguaucauuugcguuuc

SEQ ID NO: 2767236 - RNA, 19 nt, Artificial Sequence
  Description of Artificial Sequence: Synthetic oligonucleotide
guauucucuuacuugguau

SEQ ID NO: 2767237 - RNA, 19 nt, Artificial Sequence
  Description of Artificial Sequence: Synthetic oligonucleotide
ucaggaagccaaguccagu

SEQ ID NO: 2767238 - RNA, 19 nt, Artificial Sequence
  Description of Artificial Sequence: Synthetic oligonucleotide
aucuuucucaggaagccaa

SEQ ID NO: 2767239 - RNA, 19 nt, Artificial Sequence
  Description of Artificial Sequence: Synthetic oligonucleotide
cagugauguggagagguug

SEQ ID NO: 2767240 - RNA, 19 nt, Artificial Sequence
  Description of Artificial Sequence: Synthetic oligonucleotide
agcaagcuucacuuguuuu

SEQ ID NO: 2767241 - RNA, 19 nt, Artificial Sequence
  Description of Artificial Sequence: Synthetic oligonucleotide
guguguagaauguuuguau

SEQ ID NO: 2767242 - RNA, 19 nt, Artificial Sequence
  Description of Artificial Sequence: Synthetic oligonucleotide
caauccaucuagggcagac

SEQ ID NO: 2767243 - RNA, 19 nt, Artificial Sequence
  Description of Artificial Sequence: Synthetic oligonucleotide
guagaauguuuguauuugu

SEQ ID NO: 2767244 - RNA, 19 nt, Artificial Sequence
  Description of Artificial Sequence: Synthetic oligonucleotide
gggaccaaucuuucucagg

SEQ ID NO: 2767245 - RNA, 19 nt, Artificial Sequence
  Description of Artificial Sequence: Synthetic oligonucleotide
gaagacccauccacaauuc

SEQ ID NO: 2767246 - RNA, 19 nt, Artificial Sequence
  Description of Artificial Sequence: Synthetic oligonucleotide
augaacuauuugaucaaaa

SEQ ID NO: 2767247 - RNA, 19 nt, Artificial Sequence
  Description of Artificial Sequence: Synthetic oligonucleotide
ucugguguguuaggguuuc

SEQ ID NO: 2767248 - RNA, 19 nt, Artificial Sequence
  Description of Artificial Sequence: Synthetic oligonucleotide
cauuugcguuuccacauca

SEQ ID NO: 2767249 - RNA, 19 nt, Artificial Sequence
  Description of Artificial Sequence: Synthetic oligonucleotide
augacccaauccaucuagg

SEQ ID NO: 2767250 - RNA, 19 nt, Artificial Sequence
  Description of Artificial Sequence: Synthetic oligonucleotide
uugcagcaagcuucacuug

SEQ ID NO: 2767251 - RNA, 19 nt, Artificial Sequence
  Description of Artificial Sequence: Synthetic oligonucleotide
ggcuaauggcuaaugauga

SEQ ID NO: 2767252 - RNA, 19 nt, Artificial Sequence
  Description of Artificial Sequence: Synthetic oligonucleotide
gccaaguccaguuguacca

SEQ ID NO: 2767253 - RNA, 19 nt, Artificial Sequence
  Description of Artificial Sequence: Synthetic oligonucleotide
aagagucaguguguagaau

SEQ ID NO: 2767254 - RNA, 19 nt, Artificial Sequence
  Description of Artificial Sequence: Synthetic oligonucleotide
acaauucucucuggugugu

SEQ ID NO: 2767255 - RNA, 19 nt, Artificial Sequence
  Description of Artificial Sequence: Synthetic oligonucleotide
agagguuguaggguacacu

SEQ ID NO: 2767256 - RNA, 19 nt, Artificial Sequence
  Description of Artificial Sequence: Synthetic oligonucleotide
cagggaccaaucuuucuca

SEQ ID NO: 2767257 - RNA, 19 nt, Artificial Sequence
  Description of Artificial Sequence: Synthetic oligonucleotide
gacccauccacaauucucu

SEQ ID NO: 2767258 - RNA, 19 nt, Artificial Sequence
  Description of Artificial Sequence: Synthetic oligonucleotide
cugcaagggagaaaggcua

SEQ ID NO: 2767259 - RNA, 19 nt, Artificial Sequence
  Description of Artificial Sequence: Synthetic oligonucleotide
gguacacuagaacgguuca

SEQ ID NO: 2767260 - RNA, 19 nt, Artificial Sequence
  Description of Artificial Sequence: Synthetic oligonucleotide
auaggaccagggaccaauc

SEQ ID NO: 2767261 - RNA, 19 nt, Artificial Sequence
  Description of Artificial Sequence: Synthetic oligonucleotide
ccuccuuucauagaguuca

SEQ ID NO: 2767262 - RNA, 19 nt, Artificial Sequence
  Description of Artificial Sequence: Synthetic oligonucleotide
accagggaccaaucuuucu

SEQ ID NO: 2767263 - RNA, 19 nt, Artificial Sequence
  Description of Artificial Sequence: Synthetic oligonucleotide
ugguaucauuugcguuucc

SEQ ID NO: 2767264 - RNA, 19 nt, Artificial Sequence
  Description of Artificial Sequence: Synthetic oligonucleotide
uucucuuacuugguaucau

SEQ ID NO: 2767265 - RNA, 19 nt, Artificial Sequence
  Description of Artificial Sequence: Synthetic oligonucleotide
aggguuucucuugcauagg

SEQ ID NO: 2767266 - RNA, 19 nt, Artificial Sequence
  Description of Artificial Sequence: Synthetic oligonucleotide
agguuguaggguacacuag

SEQ ID NO: 2767267 - RNA, 19 nt, Artificial Sequence
  Description of Artificial Sequence: Synthetic oligonucleotide
guggagagguuguagggua

SEQ ID NO: 2767268 - RNA, 19 nt, Artificial Sequence
  Description of Artificial Sequence: Synthetic oligonucleotide
ugguguguuaggguuucuc

SEQ ID NO: 2767269 - RNA, 19 nt, Artificial Sequence
  Description of Artificial Sequence: Synthetic oligonucleotide
aagcacccacucugggccu

SEQ ID NO: 2767270 - RNA, 19 nt, Artificial Sequence
  Description of Artificial Sequence: Synthetic oligonucleotide
gagagguuguaggguacac

SEQ ID NO: 2767271 - RNA, 19 nt, Artificial Sequence
  Description of Artificial Sequence: Synthetic oligonucleotide
gaaacaugguaagcugcaa

SEQ ID NO: 2767272 - RNA, 19 nt, Artificial Sequence
  Description of Artificial Sequence: Synthetic oligonucleotide
gcuaauggcuaaugaugac

SEQ ID NO: 2767273 - RNA, 19 nt, Artificial Sequence
  Description of Artificial Sequence: Synthetic oligonucleotide
agaaaggcuaauggcuaau

SEQ ID NO: 2767274 - RNA, 19 nt, Artificial Sequence
  Description of Artificial Sequence: Synthetic oligonucleotide
ccagggaccaaucuuucuc

SEQ ID NO: 2767275 - RNA, 19 nt, Artificial Sequence
  Description of Artificial Sequence: Synthetic oligonucleotide
gguaucauuugcguuucca

SEQ ID NO: 2767276 - RNA, 19 nt, Artificial Sequence
  Description of Artificial Sequence: Synthetic oligonucleotide
gaccaaucuuucucaggaa

SEQ ID NO: 2767277 - RNA, 19 nt, Artificial Sequence
  Description of Artificial Sequence: Synthetic oligonucleotide
guuguaggguacacuagaa

SEQ ID NO: 2767278 - RNA, 19 nt, Artificial Sequence
  Description of Artificial Sequence: Synthetic oligonucleotide
cacugaugucuuuccacca

SEQ ID NO: 2767279 - RNA, 19 nt, Artificial Sequence
  Description of Artificial Sequence: Synthetic oligonucleotide
cagaaugcaaugaacuauu

SEQ ID NO: 2767280 - RNA, 19 nt, Artificial Sequence
  Description of Artificial Sequence: Synthetic oligonucleotide
guuaggguuucucuugcau

SEQ ID NO: 2767281 - RNA, 19 nt, Artificial Sequence
  Description of Artificial Sequence: Synthetic oligonucleotide
ucuuuccaccagugaugug

SEQ ID NO: 2767282 - RNA, 19 nt, Artificial Sequence
  Description of Artificial Sequence: Synthetic oligonucleotide
guguagaauguuuguauuu

SEQ ID NO: 2767283 - RNA, 19 nt, Artificial Sequence
  Description of Artificial Sequence: Synthetic oligonucleotide
ggguuucucuugcauagga

SEQ ID NO: 2767284 - RNA, 19 nt, Artificial Sequence
  Description of Artificial Sequence: Synthetic oligonucleotide
uuccaccagugauguggag

SEQ ID NO: 2767285 - RNA, 19 nt, Artificial Sequence
  Description of Artificial Sequence: Synthetic oligonucleotide
gagucaguguguagaaugu

SEQ ID NO: 2767286 - RNA, 19 nt, Artificial Sequence
  Description of Artificial Sequence: Synthetic oligonucleotide
cauagaguucacccaguua

SEQ ID NO: 2767287 - RNA, 19 nt, Artificial Sequence
  Description of Artificial Sequence: Synthetic oligonucleotide
gggagaaaggcuaauggcu

SEQ ID NO: 2767288 - RNA, 19 nt, Artificial Sequence
  Description of Artificial Sequence: Synthetic oligonucleotide
cuccuuucauagaguucac

SEQ ID NO: 2767289 - RNA, 19 nt, Artificial Sequence
  Description of Artificial Sequence: Synthetic oligonucleotide
caguuguaccacugauguc

SEQ ID NO: 2767290 - RNA, 19 nt, Artificial Sequence
  Description of Artificial Sequence: Synthetic oligonucleotide
ccaaacuucagaaugcaau

SEQ ID NO: 2767291 - RNA, 19 nt, Artificial Sequence
  Description of Artificial Sequence: Synthetic oligonucleotide
gguguguuaggguuucucu

SEQ ID NO: 2767292 - RNA, 19 nt, Artificial Sequence
  Description of Artificial Sequence: Synthetic oligonucleotide
ggaagaggaaagaaaacau

SEQ ID NO: 2767293 - RNA, 19 nt, Artificial Sequence
  Description of Artificial Sequence: Synthetic oligonucleotide
ccaguuguaccacugaugu

SEQ ID NO: 2767294 - RNA, 19 nt, Artificial Sequence
  Description of Artificial Sequence: Synthetic oligonucleotide
gguuucucuugcauaggac

SEQ ID NO: 2767295 - RNA, 19 nt, Artificial Sequence
  Description of Artificial Sequence: Synthetic oligonucleotide
ggguacacuagaacgguuc

SEQ ID NO: 2767296 - RNA, 19 nt, Artificial Sequence
  Description of Artificial Sequence: Synthetic oligonucleotide
cucuuacuugguaucauuu

SEQ ID NO: 2767297 - RNA, 19 nt, Artificial Sequence
  Description of Artificial Sequence: Synthetic oligonucleotide
ggagaaaggcuaauggcua

SEQ ID NO: 2767298 - RNA, 19 nt, Artificial Sequence
  Description of Artificial Sequence: Synthetic oligonucleotide
agaaugcaaugaacuauuu

SEQ ID NO: 2767299 - RNA, 19 nt, Artificial Sequence
  Description of Artificial Sequence: Synthetic oligonucleotide
caguuaagagucagugugu

SEQ ID NO: 2767300 - RNA, 19 nt, Artificial Sequence
  Description of Artificial Sequence: Synthetic oligonucleotide
gaagccaaguccaguugua

SEQ ID NO: 2767301 - RNA, 19 nt, Artificial Sequence
  Description of Artificial Sequence: Synthetic oligonucleotide
acucugggccuccuuucau

SEQ ID NO: 2767302 - RNA, 19 nt, Artificial Sequence
  Description of Artificial Sequence: Synthetic oligonucleotide
caagcuucacuuguuuucu

SEQ ID NO: 2767303 - RNA, 19 nt, Artificial Sequence
  Description of Artificial Sequence: Synthetic oligonucleotide
gucuuuccaccagugaugu

SEQ ID NO: 2767304 - RNA, 19 nt, Artificial Sequence
  Description of Artificial Sequence: Synthetic oligonucleotide
gaccagggaccaaucuuuc

SEQ ID NO: 2767305 - RNA, 19 nt, Artificial Sequence
  Description of Artificial Sequence: Synthetic oligonucleotide
cccaauccaucuagggcag

SEQ ID NO: 2767306 - RNA, 19 nt, Artificial Sequence
  Description of Artificial Sequence: Synthetic oligonucleotide
guguguuaggguuucucuu

SEQ ID NO: 2767307 - RNA, 19 nt, Artificial Sequence
  Description of Artificial Sequence: Synthetic oligonucleotide
auuugcguuuccacaucau

SEQ ID NO: 2767308 - RNA, 19 nt, Artificial Sequence
  Description of Artificial Sequence: Synthetic oligonucleotide
caguguguagaauguuugu

SEQ ID NO: 2767309 - RNA, 19 nt, Artificial Sequence
  Description of Artificial Sequence: Synthetic oligonucleotide
cacuuguuuucuuaucauu

SEQ ID NO: 2767310 - RNA, 19 nt, Artificial Sequence
  Description of Artificial Sequence: Synthetic oligonucleotide
ggguaagaagacccaucca

SEQ ID NO: 2767311 - RNA, 19 nt, Artificial Sequence
  Description of Artificial Sequence: Synthetic oligonucleotide
ccacaauucucucuggugu

SEQ ID NO: 2767312 - RNA, 19 nt, Artificial Sequence
  Description of Artificial Sequence: Synthetic oligonucleotide
cauaggaccagggaccaau

SEQ ID NO: 2767313 - RNA, 19 nt, Artificial Sequence
  Description of Artificial Sequence: Synthetic oligonucleotide
cugaugucuuuccaccagu

SEQ ID NO: 2767314 - RNA, 19 nt, Artificial Sequence
  Description of Artificial Sequence: Synthetic oligonucleotide
cuguauucucuuacuuggu

SEQ ID NO: 2767315 - RNA, 19 nt, Artificial Sequence
  Description of Artificial Sequence: Synthetic oligonucleotide
guaagcugcaagggagaaa

SEQ ID NO: 2767316 - RNA, 19 nt, Artificial Sequence
  Description of Artificial Sequence: Synthetic oligonucleotide
agcuacaggcagguagaaa

SEQ ID NO: 2767317 - RNA, 19 nt, Artificial Sequence
  Description of Artificial Sequence: Synthetic oligonucleotide
agcacccacucugggccuc

SEQ ID NO: 2767318 - RNA, 19 nt, Artificial Sequence
  Description of Artificial Sequence: Synthetic oligonucleotide
acgguucauuccagaaaca

SEQ ID NO: 2767319 - RNA, 19 nt, Artificial Sequence
  Description of Artificial Sequence: Synthetic oligonucleotide
guccaguuguaccacugau

SEQ ID NO: 2767320 - RNA, 19 nt, Artificial Sequence
  Description of Artificial Sequence: Synthetic oligonucleotide
uuguaccacugaugucuuu

SEQ ID NO: 2767321 - RNA, 19 nt, Artificial Sequence
  Description of Artificial Sequence: Synthetic oligonucleotide
cucucugguguguuagggu

SEQ ID NO: 2767322 - RNA, 19 nt, Artificial Sequence
  Description of Artificial Sequence: Synthetic oligonucleotide
caccagugauguggagagg

SEQ ID NO: 2767323 - RNA, 19 nt, Artificial Sequence
  Description of Artificial Sequence: Synthetic oligonucleotide
caggaagccaaguccaguu

SEQ ID NO: 2767324 - RNA, 19 nt, Artificial Sequence
  Description of Artificial Sequence: Synthetic oligonucleotide
agcuugcagcaagcuucac

SEQ ID NO: 2767325 - RNA, 19 nt, Artificial Sequence
  Description of Artificial Sequence: Synthetic oligonucleotide
cucugggccuccuuucaua

SEQ ID NO: 2767326 - RNA, 19 nt, Artificial Sequence
  Description of Artificial Sequence: Synthetic oligonucleotide
cuuucucaggaagccaagu

SEQ ID NO: 2767327 - RNA, 19 nt, Artificial Sequence
  Description of Artificial Sequence: Synthetic oligonucleotide
gcugcaagggagaaaggcu

SEQ ID NO: 2767328 - RNA, 19 nt, Artificial Sequence
  Description of Artificial Sequence: Synthetic oligonucleotide
gguaagcugcaagggagaa

SEQ ID NO: 2767329 - RNA, 19 nt, Artificial Sequence
  Description of Artificial Sequence: Synthetic oligonucleotide
ggagagguuguaggguaca

SEQ ID NO: 2767330 - RNA, 19 nt, Artificial Sequence
  Description of Artificial Sequence: Synthetic oligonucleotide
caaguccaguuguaccacu

SEQ ID NO: 2767331 - RNA, 19 nt, Artificial Sequence
  Description of Artificial Sequence: Synthetic oligonucleotide
gcguuuccacaucauuuaa

SEQ ID NO: 2767332 - RNA, 19 nt, Artificial Sequence
  Description of Artificial Sequence: Synthetic oligonucleotide
gagcuacaggcagguagaa

SEQ ID NO: 2767333 - RNA, 19 nt, Artificial Sequence
  Description of Artificial Sequence: Synthetic oligonucleotide
aggguacacuagaacgguu

SEQ ID NO: 2767334 - RNA, 19 nt, Artificial Sequence
  Description of Artificial Sequence: Synthetic oligonucleotide
cugggccuccuuucauaga

SEQ ID NO: 2767335 - RNA, 19 nt, Artificial Sequence
  Description of Artificial Sequence: Synthetic oligonucleotide
ccaucuagggcagacaaau

SEQ ID NO: 2767336 - RNA, 19 nt, Artificial Sequence
  Description of Artificial Sequence: Synthetic oligonucleotide
gugauguggagagguugua

SEQ ID NO: 2767337 - RNA, 19 nt, Artificial Sequence
  Description of Artificial Sequence: Synthetic oligonucleotide
guacacuagaacgguucau

SEQ ID NO: 2767338 - RNA, 19 nt, Artificial Sequence
  Description of Artificial Sequence: Synthetic oligonucleotide
ggaccagggaccaaucuuu

SEQ ID NO: 2767339 - RNA, 19 nt, Artificial Sequence
  Description of Artificial Sequence: Synthetic oligonucleotide
cacccaguuaagagucagu

SEQ ID NO: 2767340 - RNA, 19 nt, Artificial Sequence
  Description of Artificial Sequence: Synthetic oligonucleotide
cccaaacuucagaaugcaa

SEQ ID NO: 2767341 - RNA, 19 nt, Artificial Sequence
  Description of Artificial Sequence: Synthetic oligonucleotide
ggccuccuuucauagaguu

SEQ ID NO: 2767342 - RNA, 19 nt, Artificial Sequence
  Description of Artificial Sequence: Synthetic oligonucleotide
cucugguguguuaggguuu

SEQ ID NO: 2767343 - RNA, 19 nt, Artificial Sequence
  Description of Artificial Sequence: Synthetic oligonucleotide
caucuagggcagacaaauu

SEQ ID NO: 2767344 - RNA, 19 nt, Artificial Sequence
  Description of Artificial Sequence: Synthetic oligonucleotide
guuguaccacugaugucuu

SEQ ID NO: 2767345 - RNA, 19 nt, Artificial Sequence
  Description of Artificial Sequence: Synthetic oligonucleotide
gccuccuuucauagaguuc

SEQ ID NO: 2767346 - RNA, 19 nt, Artificial Sequence
  Description of Artificial Sequence: Synthetic oligonucleotide
cccaguuaagagucagugu

SEQ ID NO: 2767347 - RNA, 19 nt, Artificial Sequence
  Description of Artificial Sequence: Synthetic oligonucleotide
cagcaagcuucacuuguuu

SEQ ID NO: 2767348 - RNA, 19 nt, Artificial Sequence
  Description of Artificial Sequence: Synthetic oligonucleotide
ccccaaacuucagaaugca

SEQ ID NO: 2767349 - RNA, 19 nt, Artificial Sequence
  Description of Artificial Sequence: Synthetic oligonucleotide
acccacucugggccuccuu

SEQ ID NO: 2767350 - RNA, 19 nt, Artificial Sequence
  Description of Artificial Sequence: Synthetic oligonucleotide
caauucucucugguguguu

SEQ ID NO: 2767351 - RNA, 19 nt, Artificial Sequence
  Description of Artificial Sequence: Synthetic oligonucleotide
gcaagggagaaaggcuaau

SEQ ID NO: 2767352 - RNA, 19 nt, Artificial Sequence
  Description of Artificial Sequence: Synthetic oligonucleotide
gcagcaagcuucacuuguu

SEQ ID NO: 2767353 - RNA, 19 nt, Artificial Sequence
  Description of Artificial Sequence: Synthetic oligonucleotide
cgguucauuccagaaacau

SEQ ID NO: 2767354 - RNA, 19 nt, Artificial Sequence
  Description of Artificial Sequence: Synthetic oligonucleotide
cugguguguuaggguuucu

SEQ ID NO: 2767355 - RNA, 19 nt, Artificial Sequence
  Description of Artificial Sequence: Synthetic oligonucleotide
ccaauccaucuagggcaga

SEQ ID NO: 2767356 - RNA, 19 nt, Artificial Sequence
  Description of Artificial Sequence: Synthetic oligonucleotide
cacccacucugggccuccu

SEQ ID NO: 2767357 - RNA, 19 nt, Artificial Sequence
  Description of Artificial Sequence: Synthetic oligonucleotide
cuuaaaauaaccuacuugc

SEQ ID NO: 2767358 - RNA, 19 nt, Artificial Sequence
  Description of Artificial Sequence: Synthetic oligonucleotide
uauacauuaaauuugaaaa

SEQ ID NO: 2767359 - RNA, 19 nt, Artificial Sequence
  Description of Artificial Sequence: Synthetic oligonucleotide
ucuaaagagaagaauaugc

SEQ ID NO: 2767360 - RNA, 19 nt, Artificial Sequence
  Description of Artificial Sequence: Synthetic oligonucleotide
aaagagaagaauaugcggc

SEQ ID NO: 2767361 - RNA, 19 nt, Artificial Sequence
  Description of Artificial Sequence: Synthetic oligonucleotide
uuuauuaacaaaaguaaca

SEQ ID NO: 2767362 - RNA, 19 nt, Artificial Sequence
  Description of Artificial Sequence: Synthetic oligonucleotide
aaaaguaacagguaaagua

SEQ ID NO: 2767363 - RNA, 19 nt, Artificial Sequence
  Description of Artificial Sequence: Synthetic oligonucleotide
auuaacugagcucuguugc

SEQ ID NO: 2767364 - RNA, 19 nt, Artificial Sequence
  Description of Artificial Sequence: Synthetic oligonucleotide
gaagaauacagacucaugc

SEQ ID NO: 2767365 - RNA, 19 nt, Artificial Sequence
  Description of Artificial Sequence: Synthetic oligonucleotide
uacaaggaaauuuaucucg

SEQ ID NO: 2767366 - RNA, 19 nt, Artificial Sequence
  Description of Artificial Sequence: Synthetic oligonucleotide
acuacaaggaaauuuaucu

SEQ ID NO: 2767367 - RNA, 19 nt, Artificial Sequence
  Description of Artificial Sequence: Synthetic oligonucleotide
aaaauaaccuacuugcagu

SEQ ID NO: 2767368 - RNA, 19 nt, Artificial Sequence
  Description of Artificial Sequence: Synthetic oligonucleotide
accuuauauacacauauac

SEQ ID NO: 2767369 - RNA, 19 nt, Artificial Sequence
  Description of Artificial Sequence: Synthetic oligonucleotide
uaaaauaaccuacuugcag

SEQ ID NO: 2767370 - RNA, 19 nt, Artificial Sequence
  Description of Artificial Sequence: Synthetic oligonucleotide
uuauuaacaaaaguaacag

SEQ ID NO: 2767371 - RNA, 19 nt, Artificial Sequence
  Description of Artificial Sequence: Synthetic oligonucleotide
uaaagagaagaauaugcgg

SEQ ID NO: 2767372 - RNA, 19 nt, Artificial Sequence
  Description of Artificial Sequence: Synthetic oligonucleotide
aaggaaauuuaucucgaac

SEQ ID NO: 2767373 - RNA, 19 nt, Artificial Sequence
  Description of Artificial Sequence: Synthetic oligonucleotide
aagaauaugcggcucuggc

SEQ ID NO: 2767374 - RNA, 19 nt, Artificial Sequence
  Description of Artificial Sequence: Synthetic oligonucleotide
uuuggaaaaguucucuggg

SEQ ID NO: 2767375 - RNA, 19 nt, Artificial Sequence
  Description of Artificial Sequence: Synthetic oligonucleotide
gaagaggucgucuaaagag

SEQ ID NO: 2767376 - RNA, 19 nt, Artificial Sequence
  Description of Artificial Sequence: Synthetic oligonucleotide
uguaaugaacccaaccuag

SEQ ID NO: 2767377 - RNA, 19 nt, Artificial Sequence
  Description of Artificial Sequence: Synthetic oligonucleotide
acaacuuaaaauaaccuac

SEQ ID NO: 2767378 - RNA, 19 nt, Artificial Sequence
  Description of Artificial Sequence: Synthetic oligonucleotide
cuaaagagaagaauaugcg

SEQ ID NO: 2767379 - RNA, 19 nt, Artificial Sequence
  Description of Artificial Sequence: Synthetic oligonucleotide
auaaccuacuugcaguugc

SEQ ID NO: 2767380 - RNA, 19 nt, Artificial Sequence
  Description of Artificial Sequence: Synthetic oligonucleotide
auggaugaaagauuuguac

SEQ ID NO: 2767381 - RNA, 19 nt, Artificial Sequence
  Description of Artificial Sequence: Synthetic oligonucleotide
auuaacaaaaguaacaggu

SEQ ID NO: 2767382 - RNA, 19 nt, Artificial Sequence
  Description of Artificial Sequence: Synthetic oligonucleotide
aaauuuaucucgaacaacu

SEQ ID NO: 2767383 - RNA, 19 nt, Artificial Sequence
  Description of Artificial Sequence: Synthetic oligonucleotide
aauacagacucaugcacag

SEQ ID NO: 2767384 - RNA, 19 nt, Artificial Sequence
  Description of Artificial Sequence: Synthetic oligonucleotide
aacagguaaaguaaaacag

SEQ ID NO: 2767385 - RNA, 19 nt, Artificial Sequence
  Description of Artificial Sequence: Synthetic oligonucleotide
agaauacagacucaugcac

SEQ ID NO: 2767386 - RNA, 19 nt, Artificial Sequence
  Description of Artificial Sequence: Synthetic oligonucleotide
aagauuaagcgaucccagc

SEQ ID NO: 2767387 - RNA, 19 nt, Artificial Sequence
  Description of Artificial Sequence: Synthetic oligonucleotide
augaacccaaccuagacuc

SEQ ID NO: 2767388 - RNA, 19 nt, Artificial Sequence
  Description of Artificial Sequence: Synthetic oligonucleotide
uuuaucucgaacaacuuaa

SEQ ID NO: 2767389 - RNA, 19 nt, Artificial Sequence
  Description of Artificial Sequence: Synthetic oligonucleotide
uauuaacaaaaguaacagg

SEQ ID NO: 2767390 - RNA, 19 nt, Artificial Sequence
  Description of Artificial Sequence: Synthetic oligonucleotide
ugucuuuuggaagaggucg

SEQ ID NO: 2767391 - RNA, 19 nt, Artificial Sequence
  Description of Artificial Sequence: Synthetic oligonucleotide
ugaauacuaccuuauauac

SEQ ID NO: 2767392 - RNA, 19 nt, Artificial Sequence
  Description of Artificial Sequence: Synthetic oligonucleotide
uaacagguaaaguaaaaca

SEQ ID NO: 2767393 - RNA, 19 nt, Artificial Sequence
  Description of Artificial Sequence: Synthetic oligonucleotide
acuuaaaauaaccuacuug

SEQ ID NO: 2767394 - RNA, 19 nt, Artificial Sequence
  Description of Artificial Sequence: Synthetic oligonucleotide
aacaacuuaaaauaaccua

SEQ ID NO: 2767395 - RNA, 19 nt, Artificial Sequence
  Description of Artificial Sequence: Synthetic oligonucleotide
ugcaguugcauuaacugag

SEQ ID NO: 2767396 - RNA, 19 nt, Artificial Sequence
  Description of Artificial Sequence: Synthetic oligonucleotide
aggaaauuuaucucgaaca

SEQ ID NO: 2767397 - RNA, 19 nt, Artificial Sequence
  Description of Artificial Sequence: Synthetic oligonucleotide
aaaagauuaagcgauccca

SEQ ID NO: 2767398 - RNA, 19 nt, Artificial Sequence
  Description of Artificial Sequence: Synthetic oligonucleotide
aacuuuauuaacaaaagua

SEQ ID NO: 2767399 - RNA, 19 nt, Artificial Sequence
  Description of Artificial Sequence: Synthetic oligonucleotide
uuaaguauucacugaauac

SEQ ID NO: 2767400 - RNA, 19 nt, Artificial Sequence
  Description of Artificial Sequence: Synthetic oligonucleotide
aaguaaaacaggcacuacu

SEQ ID NO: 2767401 - RNA, 19 nt, Artificial Sequence
  Description of Artificial Sequence: Synthetic oligonucleotide
ucucgaacaacuuaaaaua

SEQ ID NO: 2767402 - RNA, 19 nt, Artificial Sequence
  Description of Artificial Sequence: Synthetic oligonucleotide
cuuuauuaacaaaaguaac

SEQ ID NO: 2767403 - RNA, 19 nt, Artificial Sequence
  Description of Artificial Sequence: Synthetic oligonucleotide
uaguagaucugcuuguggg

SEQ ID NO: 2767404 - RNA, 19 nt, Artificial Sequence
  Description of Artificial Sequence: Synthetic oligonucleotide
uuuguugucuuuuggaaga

SEQ ID NO: 2767405 - RNA, 19 nt, Artificial Sequence
  Description of Artificial Sequence: Synthetic oligonucleotide
aagaauacagacucaugca

SEQ ID NO: 2767406 - RNA, 19 nt, Artificial Sequence
  Description of Artificial Sequence: Synthetic oligonucleotide
ugaaucauguaaugaaccc

SEQ ID NO: 2767407 - RNA, 19 nt, Artificial Sequence
  Description of Artificial Sequence: Synthetic oligonucleotide
uuuaaguauucacugaaua

SEQ ID NO: 2767408 - RNA, 19 nt, Artificial Sequence
  Description of Artificial Sequence: Synthetic oligonucleotide
auuaagcgaucccagcugc

SEQ ID NO: 2767409 - RNA, 19 nt, Artificial Sequence
  Description of Artificial Sequence: Synthetic oligonucleotide
acuacuuauauuaagaaaa

SEQ ID NO: 2767410 - RNA, 19 nt, Artificial Sequence
  Description of Artificial Sequence: Synthetic oligonucleotide
auauacauuaaauuugaaa

SEQ ID NO: 2767411 - RNA, 19 nt, Artificial Sequence
  Description of Artificial Sequence: Synthetic oligonucleotide
aaugaacccaaccuagacu

SEQ ID NO: 2767412 - RNA, 19 nt, Artificial Sequence
  Description of Artificial Sequence: Synthetic oligonucleotide
uaaguauucacugaauacu

SEQ ID NO: 2767413 - RNA, 19 nt, Artificial Sequence
  Description of Artificial Sequence: Synthetic oligonucleotide
guugcugugaagaauacag

SEQ ID NO: 2767414 - RNA, 19 nt, Artificial Sequence
  Description of Artificial Sequence: Synthetic oligonucleotide
acacauauacauuaaauuu

SEQ ID NO: 2767415 - RNA, 19 nt, Artificial Sequence
  Description of Artificial Sequence: Synthetic oligonucleotide
ucaugaaucauguaaugaa

SEQ ID NO: 2767416 - RNA, 19 nt, Artificial Sequence
  Description of Artificial Sequence: Synthetic oligonucleotide
gguaaaguaaaacaggcac

SEQ ID NO: 2767417 - RNA, 19 nt, Artificial Sequence
  Description of Artificial Sequence: Synthetic oligonucleotide
augaaucauguaaugaacc

SEQ ID NO: 2767418 - RNA, 19 nt, Artificial Sequence
  Description of Artificial Sequence: Synthetic oligonucleotide
uuaaaauaaccuacuugca

SEQ ID NO: 2767419 - RNA, 19 nt, Artificial Sequence
  Description of Artificial Sequence: Synthetic oligonucleotide
uauucacugaauacuaccu

SEQ ID NO: 2767420 - RNA, 19 nt, Artificial Sequence
  Description of Artificial Sequence: Synthetic oligonucleotide
cagguaaaguaaaacaggc

SEQ ID NO: 2767421 - RNA, 19 nt, Artificial Sequence
  Description of Artificial Sequence: Synthetic oligonucleotide
guuuggaaaaguucucugg

SEQ ID NO: 2767422 - RNA, 19 nt, Artificial Sequence
  Description of Artificial Sequence: Synthetic oligonucleotide
ucaugcacagguauggaug

SEQ ID NO: 2767423 - RNA, 19 nt, Artificial Sequence
  Description of Artificial Sequence: Synthetic oligonucleotide
aaaguaacagguaaaguaa

SEQ ID NO: 2767424 - RNA, 19 nt, Artificial Sequence
  Description of Artificial Sequence: Synthetic oligonucleotide
aaaacuacaaggaaauuua

SEQ ID NO: 2767425 - RNA, 19 nt, Artificial Sequence
  Description of Artificial Sequence: Synthetic oligonucleotide
ucgucuaaagagaagaaua

SEQ ID NO: 2767426 - RNA, 19 nt, Artificial Sequence
  Description of Artificial Sequence: Synthetic oligonucleotide
aucucgaacaacuuaaaau

SEQ ID NO: 2767427 - RNA, 19 nt, Artificial Sequence
  Description of Artificial Sequence: Synthetic oligonucleotide
cugugaagaauacagacuc

SEQ ID NO: 2767428 - RNA, 19 nt, Artificial Sequence
  Description of Artificial Sequence: Synthetic oligonucleotide
acaggcacuacuuauauua

SEQ ID NO: 2767429 - RNA, 19 nt, Artificial Sequence
  Description of Artificial Sequence: Synthetic oligonucleotide
acaaaaguaacagguaaag

SEQ ID NO: 2767430 - RNA, 19 nt, Artificial Sequence
  Description of Artificial Sequence: Synthetic oligonucleotide
aguugcauuaacugagcuc

SEQ ID NO: 2767431 - RNA, 19 nt, Artificial Sequence
  Description of Artificial Sequence: Synthetic oligonucleotide
aaagauuaagcgaucccag

SEQ ID NO: 2767432 - RNA, 19 nt, Artificial Sequence
  Description of Artificial Sequence: Synthetic oligonucleotide
uuugguacuuguuuggaaa

SEQ ID NO: 2767433 - RNA, 19 nt, Artificial Sequence
  Description of Artificial Sequence: Synthetic oligonucleotide
ugcugugaagaauacagac

SEQ ID NO: 2767434 - RNA, 19 nt, Artificial Sequence
  Description of Artificial Sequence: Synthetic oligonucleotide
aacuacaaggaaauuuauc

SEQ ID NO: 2767435 - RNA, 19 nt, Artificial Sequence
  Description of Artificial Sequence: Synthetic oligonucleotide
caugaaucauguaaugaac

SEQ ID NO: 2767436 - RNA, 19 nt, Artificial Sequence
  Description of Artificial Sequence: Synthetic oligonucleotide
uuaacaaaaguaacaggua

SEQ ID NO: 2767437 - RNA, 19 nt, Artificial Sequence
  Description of Artificial Sequence: Synthetic oligonucleotide
guauucacugaauacuacc

SEQ ID NO: 2767438 - RNA, 19 nt, Artificial Sequence
  Description of Artificial Sequence: Synthetic oligonucleotide
ucuucagacaucagaugag

SEQ ID NO: 2767439 - RNA, 19 nt, Artificial Sequence
  Description of Artificial Sequence: Synthetic oligonucleotide
uacagacucaugcacaggu

SEQ ID NO: 2767440 - RNA, 19 nt, Artificial Sequence
  Description of Artificial Sequence: Synthetic oligonucleotide
ucgucgaaguacuuguccg

SEQ ID NO: 2767441 - RNA, 19 nt, Artificial Sequence
  Description of Artificial Sequence: Synthetic oligonucleotide
ucuguugcugugaagaaua

SEQ ID NO: 2767442 - RNA, 19 nt, Artificial Sequence
  Description of Artificial Sequence: Synthetic oligonucleotide
acugaauacuaccuuauau

SEQ ID NO: 2767443 - RNA, 19 nt, Artificial Sequence
  Description of Artificial Sequence: Synthetic oligonucleotide
gaauaugcggcucuggcuc

SEQ ID NO: 2767444 - RNA, 19 nt, Artificial Sequence
  Description of Artificial Sequence: Synthetic oligonucleotide
uggcucaugaaucauguaa

SEQ ID NO: 2767445 - RNA, 19 nt, Artificial Sequence
  Description of Artificial Sequence: Synthetic oligonucleotide
acagguaaaguaaaacagg

SEQ ID NO: 2767446 - RNA, 19 nt, Artificial Sequence
  Description of Artificial Sequence: Synthetic oligonucleotide
uaaaacaggcacuacuuau

SEQ ID NO: 2767447 - RNA, 19 nt, Artificial Sequence
  Description of Artificial Sequence: Synthetic oligonucleotide
ggaugaaagauuuguacag

SEQ ID NO: 2767448 - RNA, 19 nt, Artificial Sequence
  Description of Artificial Sequence: Synthetic oligonucleotide
ucgaacaacuuaaaauaac

SEQ ID NO: 2767449 - RNA, 19 nt, Artificial Sequence
  Description of Artificial Sequence: Synthetic oligonucleotide
uugugggccauccugccgg

SEQ ID NO: 2767450 - RNA, 19 nt, Artificial Sequence
  Description of Artificial Sequence: Synthetic oligonucleotide
uaaugaacccaaccuagac

SEQ ID NO: 2767451 - RNA, 19 nt, Artificial Sequence
  Description of Artificial Sequence: Synthetic oligonucleotide
gauuaagcgaucccagcug

SEQ ID NO: 2767452 - RNA, 19 nt, Artificial Sequence
  Description of Artificial Sequence: Synthetic oligonucleotide
aaaguaaaacaggcacuac

SEQ ID NO: 2767453 - RNA, 19 nt, Artificial Sequence
  Description of Artificial Sequence: Synthetic oligonucleotide
agauuaagcgaucccagcu

SEQ ID NO: 2767454 - RNA, 19 nt, Artificial Sequence
  Description of Artificial Sequence: Synthetic oligonucleotide
ucuguuggacaccaagucu

SEQ ID NO: 2767455 - RNA, 19 nt, Artificial Sequence
  Description of Artificial Sequence: Synthetic oligonucleotide
uguuuggaaaaguucucug

SEQ ID NO: 2767456 - RNA, 19 nt, Artificial Sequence
  Description of Artificial Sequence: Synthetic oligonucleotide
acuuguuuggaaaaguucu

SEQ ID NO: 2767457 - RNA, 19 nt, Artificial Sequence
  Description of Artificial Sequence: Synthetic oligonucleotide
aaauaaccuacuugcaguu

SEQ ID NO: 2767458 - RNA, 19 nt, Artificial Sequence
  Description of Artificial Sequence: Synthetic oligonucleotide
auacaaacuuuauuaacaa

SEQ ID NO: 2767459 - RNA, 19 nt, Artificial Sequence
  Description of Artificial Sequence: Synthetic oligonucleotide
aaguucucuggguagcaug

SEQ ID NO: 2767460 - RNA, 19 nt, Artificial Sequence
  Description of Artificial Sequence: Synthetic oligonucleotide
uccucuucagacaucagau

SEQ ID NO: 2767461 - RNA, 19 nt, Artificial Sequence
  Description of Artificial Sequence: Synthetic oligonucleotide
uaaaguaaaacaggcacua

SEQ ID NO: 2767462 - RNA, 19 nt, Artificial Sequence
  Description of Artificial Sequence: Synthetic oligonucleotide
uuguccgaguaguagaucu

SEQ ID NO: 2767463 - RNA, 19 nt, Artificial Sequence
  Description of Artificial Sequence: Synthetic oligonucleotide
ucuggcucaugaaucaugu

SEQ ID NO: 2767464 - RNA, 19 nt, Artificial Sequence
  Description of Artificial Sequence: Synthetic oligonucleotide
ugaagaauacagacucaug

SEQ ID NO: 2767465 - RNA, 19 nt, Artificial Sequence
  Description of Artificial Sequence: Synthetic oligonucleotide
uggguagcaugacaugccg

SEQ ID NO: 2767466 - RNA, 19 nt, Artificial Sequence
  Description of Artificial Sequence: Synthetic oligonucleotide
uacuuguuuggaaaaguuc

SEQ ID NO: 2767467 - RNA, 19 nt, Artificial Sequence
  Description of Artificial Sequence: Synthetic oligonucleotide
aacuuaaaauaaccuacuu

SEQ ID NO: 2767468 - RNA, 19 nt, Artificial Sequence
  Description of Artificial Sequence: Synthetic oligonucleotide
aaucauguaaugaacccaa

SEQ ID NO: 2767469 - RNA, 19 nt, Artificial Sequence
  Description of Artificial Sequence: Synthetic oligonucleotide
uuuuaaguauucacugaau

SEQ ID NO: 2767470 - RNA, 19 nt, Artificial Sequence
  Description of Artificial Sequence: Synthetic oligonucleotide
uacuaccuuauauacacau

SEQ ID NO: 2767471 - RNA, 19 nt, Artificial Sequence
  Description of Artificial Sequence: Synthetic oligonucleotide
gacucuguuggacaccaag

SEQ ID NO: 2767472 - RNA, 19 nt, Artificial Sequence
  Description of Artificial Sequence: Synthetic oligonucleotide
ucuggguagcaugacaugc

SEQ ID NO: 2767473 - RNA, 19 nt, Artificial Sequence
  Description of Artificial Sequence: Synthetic oligonucleotide
cauuaacugagcucuguug

SEQ ID NO: 2767474 - RNA, 19 nt, Artificial Sequence
  Description of Artificial Sequence: Synthetic oligonucleotide
uggacaccaagucuccucc

SEQ ID NO: 2767475 - RNA, 19 nt, Artificial Sequence
  Description of Artificial Sequence: Synthetic oligonucleotide
uucacugaauacuaccuua

SEQ ID NO: 2767476 - RNA, 19 nt, Artificial Sequence
  Description of Artificial Sequence: Synthetic oligonucleotide
acauauacauuaaauuuga

SEQ ID NO: 2767477 - RNA, 19 nt, Artificial Sequence
  Description of Artificial Sequence: Synthetic oligonucleotide
ccaaccuagacucuguugg

SEQ ID NO: 2767478 - RNA, 19 nt, Artificial Sequence
  Description of Artificial Sequence: Synthetic oligonucleotide
uacuuguccgaguaguaga

SEQ ID NO: 2767479 - RNA, 19 nt, Artificial Sequence
  Description of Artificial Sequence: Synthetic oligonucleotide
aaguacuuguccgaguagu

SEQ ID NO: 2767480 - RNA, 19 nt, Artificial Sequence
  Description of Artificial Sequence: Synthetic oligonucleotide
uauggaugaaagauuugua

SEQ ID NO: 2767481 - RNA, 19 nt, Artificial Sequence
  Description of Artificial Sequence: Synthetic oligonucleotide
gaaauuuaucucgaacaac

SEQ ID NO: 2767482 - RNA, 19 nt, Artificial Sequence
  Description of Artificial Sequence: Synthetic oligonucleotide
cuacaaggaaauuuaucuc

SEQ ID NO: 2767483 - RNA, 19 nt, Artificial Sequence
  Description of Artificial Sequence: Synthetic oligonucleotide
aaccuagacucuguuggac

SEQ ID NO: 2767484 - RNA, 19 nt, Artificial Sequence
  Description of Artificial Sequence: Synthetic oligonucleotide
auuuaucucgaacaacuua

SEQ ID NO: 2767485 - RNA, 19 nt, Artificial Sequence
  Description of Artificial Sequence: Synthetic oligonucleotide
uugcaguugcauuaacuga

SEQ ID NO: 2767486 - RNA, 19 nt, Artificial Sequence
  Description of Artificial Sequence: Synthetic oligonucleotide
guaacagguaaaguaaaac

SEQ ID NO: 2767487 - RNA, 19 nt, Artificial Sequence
  Description of Artificial Sequence: Synthetic oligonucleotide
ugaaagauuuguacaguuu

SEQ ID NO: 2767488 - RNA, 19 nt, Artificial Sequence
  Description of Artificial Sequence: Synthetic oligonucleotide
ugugaagaauacagacuca

SEQ ID NO: 2767489 - RNA, 19 nt, Artificial Sequence
  Description of Artificial Sequence: Synthetic oligonucleotide
cuguuggacaccaagucuc

SEQ ID NO: 2767490 - RNA, 19 nt, Artificial Sequence
  Description of Artificial Sequence: Synthetic oligonucleotide
uggaagaggucgucuaaag

SEQ ID NO: 2767491 - RNA, 19 nt, Artificial Sequence
  Description of Artificial Sequence: Synthetic oligonucleotide
ucucuggguagcaugacau

SEQ ID NO: 2767492 - RNA, 19 nt, Artificial Sequence
  Description of Artificial Sequence: Synthetic oligonucleotide
gaaaaguucucuggguagc

SEQ ID NO: 2767493 - RNA, 19 nt, Artificial Sequence
  Description of Artificial Sequence: Synthetic oligonucleotide
uaucucgaacaacuuaaaa

SEQ ID NO: 2767494 - RNA, 19 nt, Artificial Sequence
  Description of Artificial Sequence: Synthetic oligonucleotide
aacaaaaguaacagguaaa

SEQ ID NO: 2767495 - RNA, 19 nt, Artificial Sequence
  Description of Artificial Sequence: Synthetic oligonucleotide
guacucguagugcucgucg

SEQ ID NO: 2767496 - RNA, 19 nt, Artificial Sequence
  Description of Artificial Sequence: Synthetic oligonucleotide
guugcauuaacugagcucu

SEQ ID NO: 2767497 - RNA, 19 nt, Artificial Sequence
  Description of Artificial Sequence: Synthetic oligonucleotide
agaauaugcggcucuggcu

SEQ ID NO: 2767498 - RNA, 19 nt, Artificial Sequence
  Description of Artificial Sequence: Synthetic oligonucleotide
aguauucacugaauacuac

SEQ ID NO: 2767499 - RNA, 19 nt, Artificial Sequence
  Description of Artificial Sequence: Synthetic oligonucleotide
cucuucagacaucagauga

SEQ ID NO: 2767500 - RNA, 19 nt, Artificial Sequence
  Description of Artificial Sequence: Synthetic oligonucleotide
accaagucuccuccacucc

SEQ ID NO: 2767501 - RNA, 19 nt, Artificial Sequence
  Description of Artificial Sequence: Synthetic oligonucleotide
uacaaacuuuauuaacaaa

SEQ ID NO: 2767502 - RNA, 19 nt, Artificial Sequence
  Description of Artificial Sequence: Synthetic oligonucleotide
gaaagauuuguacaguuuu

SEQ ID NO: 2767503 - RNA, 19 nt, Artificial Sequence
  Description of Artificial Sequence: Synthetic oligonucleotide
cgaacaacuuaaaauaacc

SEQ ID NO: 2767504 - RNA, 19 nt, Artificial Sequence
  Description of Artificial Sequence: Synthetic oligonucleotide
uuggaaaaguucucugggu

SEQ ID NO: 2767505 - RNA, 19 nt, Artificial Sequence
  Description of Artificial Sequence: Synthetic oligonucleotide
uuaacugagcucuguugcu

SEQ ID NO: 2767506 - RNA, 19 nt, Artificial Sequence
  Description of Artificial Sequence: Synthetic oligonucleotide
gaaucauguaaugaaccca

SEQ ID NO: 2767507 - RNA, 19 nt, Artificial Sequence
  Description of Artificial Sequence: Synthetic oligonucleotide
cugaauacuaccuuauaua

SEQ ID NO: 2767508 - RNA, 19 nt, Artificial Sequence
  Description of Artificial Sequence: Synthetic oligonucleotide
uguuggacaccaagucucc

SEQ ID NO: 2767509 - RNA, 19 nt, Artificial Sequence
  Description of Artificial Sequence: Synthetic oligonucleotide
ugcucgucgaaguacuugu

SEQ ID NO: 2767510 - RNA, 19 nt, Artificial Sequence
  Description of Artificial Sequence: Synthetic oligonucleotide
aauaaccuacuugcaguug

SEQ ID NO: 2767511 - RNA, 19 nt, Artificial Sequence
  Description of Artificial Sequence: Synthetic oligonucleotide
ggaaaaguucucuggguag

SEQ ID NO: 2767512 - RNA, 19 nt, Artificial Sequence
  Description of Artificial Sequence: Synthetic oligonucleotide
uagcaugacaugccgguac

SEQ ID NO: 2767513 - RNA, 19 nt, Artificial Sequence
  Description of Artificial Sequence: Synthetic oligonucleotide
augaaagauuuguacaguu

SEQ ID NO: 2767514 - RNA, 19 nt, Artificial Sequence
  Description of Artificial Sequence: Synthetic oligonucleotide
auguaaugaacccaaccua

SEQ ID NO: 2767515 - RNA, 19 nt, Artificial Sequence
  Description of Artificial Sequence: Synthetic oligonucleotide
ugcaacauacaaacuuuau

SEQ ID NO: 2767516 - RNA, 19 nt, Artificial Sequence
  Description of Artificial Sequence: Synthetic oligonucleotide
ucacugaauacuaccuuau

SEQ ID NO: 2767517 - RNA, 19 nt, Artificial Sequence
  Description of Artificial Sequence: Synthetic oligonucleotide
aacugagcucuguugcugu

SEQ ID NO: 2767518 - RNA, 19 nt, Artificial Sequence
  Description of Artificial Sequence: Synthetic oligonucleotide
auacacauauacauuaaau

SEQ ID NO: 2767519 - RNA, 19 nt, Artificial Sequence
  Description of Artificial Sequence: Synthetic oligonucleotide
ugcuugugggccauccugc

SEQ ID NO: 2767520 - RNA, 19 nt, Artificial Sequence
  Description of Artificial Sequence: Synthetic oligonucleotide
agcucuguugcugugaaga

SEQ ID NO: 2767521 - RNA, 19 nt, Artificial Sequence
  Description of Artificial Sequence: Synthetic oligonucleotide
cuuguuuggaaaaguucuc

SEQ ID NO: 2767522 - RNA, 19 nt, Artificial Sequence
  Description of Artificial Sequence: Synthetic oligonucleotide
gaaguacuuguccgaguag

SEQ ID NO: 2767523 - RNA, 19 nt, Artificial Sequence
  Description of Artificial Sequence: Synthetic oligonucleotide
uuuggaagaggucgucuaa

SEQ ID NO: 2767524 - RNA, 19 nt, Artificial Sequence
  Description of Artificial Sequence: Synthetic oligonucleotide
uuguuuggaaaaguucucu

SEQ ID NO: 2767525 - RNA, 19 nt, Artificial Sequence
  Description of Artificial Sequence: Synthetic oligonucleotide
cauguaaugaacccaaccu

SEQ ID NO: 2767526 - RNA, 19 nt, Artificial Sequence
  Description of Artificial Sequence: Synthetic oligonucleotide
uuuugguacuuguuuggaa

SEQ ID NO: 2767527 - RNA, 19 nt, Artificial Sequence
  Description of Artificial Sequence: Synthetic oligonucleotide
uccacuccucuucagacau

SEQ ID NO: 2767528 - RNA, 19 nt, Artificial Sequence
  Description of Artificial Sequence: Synthetic oligonucleotide
uuuuggaagaggucgucua

SEQ ID NO: 2767529 - RNA, 19 nt, Artificial Sequence
  Description of Artificial Sequence: Synthetic oligonucleotide
gaaacggggcgcaaggagc

SEQ ID NO: 2767530 - RNA, 19 nt, Artificial Sequence
  Description of Artificial Sequence: Synthetic oligonucleotide
cucgucgaaguacuugucc

SEQ ID NO: 2767531 - RNA, 19 nt, Artificial Sequence
  Description of Artificial Sequence: Synthetic oligonucleotide
gaauacagacucaugcaca

SEQ ID NO: 2767532 - RNA, 19 nt, Artificial Sequence
  Description of Artificial Sequence: Synthetic oligonucleotide
aagaggucgucuaaagaga

SEQ ID NO: 2767533 - RNA, 19 nt, Artificial Sequence
  Description of Artificial Sequence: Synthetic oligonucleotide
aaguauucacugaauacua

SEQ ID NO: 2767534 - RNA, 19 nt, Artificial Sequence
  Description of Artificial Sequence: Synthetic oligonucleotide
aggucgucuaaagagaaga

SEQ ID NO: 2767535 - RNA, 19 nt, Artificial Sequence
  Description of Artificial Sequence: Synthetic oligonucleotide
aggcacuacuuauauuaag

SEQ ID NO: 2767536 - RNA, 19 nt, Artificial Sequence
  Description of Artificial Sequence: Synthetic oligonucleotide
uucucuggguagcaugaca

SEQ ID NO: 2767537 - RNA, 19 nt, Artificial Sequence
  Description of Artificial Sequence: Synthetic oligonucleotide
uugcugugaagaauacaga

SEQ ID NO: 2767538 - RNA, 19 nt, Artificial Sequence
  Description of Artificial Sequence: Synthetic oligonucleotide
aauaugcggcucuggcuca

SEQ ID NO: 2767539 - RNA, 19 nt, Artificial Sequence
  Description of Artificial Sequence: Synthetic oligonucleotide
uuaucucgaacaacuuaaa

SEQ ID NO: 2767540 - RNA, 19 nt, Artificial Sequence
  Description of Artificial Sequence: Synthetic oligonucleotide
uguugucuuuuggaagagg

SEQ ID NO: 2767541 - RNA, 19 nt, Artificial Sequence
  Description of Artificial Sequence: Synthetic oligonucleotide
gacaugccgguacucguag

SEQ ID NO: 2767542 - RNA, 19 nt, Artificial Sequence
  Description of Artificial Sequence: Synthetic oligonucleotide
gaauacuaccuuauauaca

SEQ ID NO: 2767543 - RNA, 19 nt, Artificial Sequence
  Description of Artificial Sequence: Synthetic oligonucleotide
uugguacuuguuuggaaaa

SEQ ID NO: 2767544 - RNA, 19 nt, Artificial Sequence
  Description of Artificial Sequence: Synthetic oligonucleotide
aguaaaacaggcacuacuu

SEQ ID NO: 2767545 - RNA, 19 nt, Artificial Sequence
  Description of Artificial Sequence: Synthetic oligonucleotide
agagaagaauaugcggcuc

SEQ ID NO: 2767546 - RNA, 19 nt, Artificial Sequence
  Description of Artificial Sequence: Synthetic oligonucleotide
gucuaaagagaagaauaug

SEQ ID NO: 2767547 - RNA, 19 nt, Artificial Sequence
  Description of Artificial Sequence: Synthetic oligonucleotide
cuggguagcaugacaugcc

SEQ ID NO: 2767548 - RNA, 19 nt, Artificial Sequence
  Description of Artificial Sequence: Synthetic oligonucleotide
uagugcucgucgaaguacu

SEQ ID NO: 2767549 - RNA, 19 nt, Artificial Sequence
  Description of Artificial Sequence: Synthetic oligonucleotide
guagaucugcuugugggcc

SEQ ID NO: 2767550 - RNA, 19 nt, Artificial Sequence
  Description of Artificial Sequence: Synthetic oligonucleotide
cucuguuggacaccaaguc

SEQ ID NO: 2767551 - RNA, 19 nt, Artificial Sequence
  Description of Artificial Sequence: Synthetic oligonucleotide
aaggagcugcacguccgcc

SEQ ID NO: 2767552 - RNA, 19 nt, Artificial Sequence
  Description of Artificial Sequence: Synthetic oligonucleotide
uaaccuacuugcaguugca

SEQ ID NO: 2767553 - RNA, 19 nt, Artificial Sequence
  Description of Artificial Sequence: Synthetic oligonucleotide
ugguacuuguuuggaaaag

SEQ ID NO: 2767554 - RNA, 19 nt, Artificial Sequence
  Description of Artificial Sequence: Synthetic oligonucleotide
uguccgaguaguagaucug

SEQ ID NO: 2767555 - RNA, 19 nt, Artificial Sequence
  Description of Artificial Sequence: Synthetic oligonucleotide
aaguaacagguaaaguaaa

SEQ ID NO: 2767556 - RNA, 19 nt, Artificial Sequence
  Description of Artificial Sequence: Synthetic oligonucleotide
ggaaauuuaucucgaacaa

SEQ ID NO: 2767557 - RNA, 19 nt, Artificial Sequence
  Description of Artificial Sequence: Synthetic oligonucleotide
uagacucuguuggacacca

SEQ ID NO: 2767558 - RNA, 19 nt, Artificial Sequence
  Description of Artificial Sequence: Synthetic oligonucleotide
cacuacuuauauuaagaaa

SEQ ID NO: 2767559 - RNA, 19 nt, Artificial Sequence
  Description of Artificial Sequence: Synthetic oligonucleotide
accuagacucuguuggaca

SEQ ID NO: 2767560 - RNA, 19 nt, Artificial Sequence
  Description of Artificial Sequence: Synthetic oligonucleotide
auucacugaauacuaccuu

SEQ ID NO: 2767561 - RNA, 19 nt, Artificial Sequence
  Description of Artificial Sequence: Synthetic oligonucleotide
aucugcuugugggccaucc

SEQ ID NO: 2767562 - RNA, 19 nt, Artificial Sequence
  Description of Artificial Sequence: Synthetic oligonucleotide
uaacugagcucuguugcug

SEQ ID NO: 2767563 - RNA, 19 nt, Artificial Sequence
  Description of Artificial Sequence: Synthetic oligonucleotide
gaacaacuuaaaauaaccu

SEQ ID NO: 2767564 - RNA, 19 nt, Artificial Sequence
  Description of Artificial Sequence: Synthetic oligonucleotide
guacuuguccgaguaguag

SEQ ID NO: 2767565 - RNA, 19 nt, Artificial Sequence
  Description of Artificial Sequence: Synthetic oligonucleotide
uccuccacuccucuucaga

SEQ ID NO: 2767566 - RNA, 19 nt, Artificial Sequence
  Description of Artificial Sequence: Synthetic oligonucleotide
aauuuaucucgaacaacuu

SEQ ID NO: 2767567 - RNA, 19 nt, Artificial Sequence
  Description of Artificial Sequence: Synthetic oligonucleotide
aagcgaucccagcugcacu

SEQ ID NO: 2767568 - RNA, 19 nt, Artificial Sequence
  Description of Artificial Sequence: Synthetic oligonucleotide
aaacuacaaggaaauuuau

SEQ ID NO: 2767569 - RNA, 19 nt, Artificial Sequence
  Description of Artificial Sequence: Synthetic oligonucleotide
uuaagcgaucccagcugca

SEQ ID NO: 2767570 - RNA, 19 nt, Artificial Sequence
  Description of Artificial Sequence: Synthetic oligonucleotide
uuggacaccaagucuccuc

SEQ ID NO: 2767571 - RNA, 19 nt, Artificial Sequence
  Description of Artificial Sequence: Synthetic oligonucleotide
acaaggaaauuuaucucga

SEQ ID NO: 2767572 - RNA, 19 nt, Artificial Sequence
  Description of Artificial Sequence: Synthetic oligonucleotide
cucgaacaacuuaaaauaa

SEQ ID NO: 2767573 - RNA, 19 nt, Artificial Sequence
  Description of Artificial Sequence: Synthetic oligonucleotide
gacaccaagucuccuccac

SEQ ID NO: 2767574 - RNA, 19 nt, Artificial Sequence
  Description of Artificial Sequence: Synthetic oligonucleotide
guauggaugaaagauuugu

SEQ ID NO: 2767575 - RNA, 19 nt, Artificial Sequence
  Description of Artificial Sequence: Synthetic oligonucleotide
uguugcugugaagaauaca

SEQ ID NO: 2767576 - RNA, 19 nt, Artificial Sequence
  Description of Artificial Sequence: Synthetic oligonucleotide
caugcacagguauggauga

SEQ ID NO: 2767577 - RNA, 19 nt, Artificial Sequence
  Description of Artificial Sequence: Synthetic oligonucleotide
cucaugaaucauguaauga

SEQ ID NO: 2767578 - RNA, 19 nt, Artificial Sequence
  Description of Artificial Sequence: Synthetic oligonucleotide
augccgguacucguagugc

SEQ ID NO: 2767579 - RNA, 19 nt, Artificial Sequence
  Description of Artificial Sequence: Synthetic oligonucleotide
ucguagugcucgucgaagu

SEQ ID NO: 2767580 - RNA, 19 nt, Artificial Sequence
  Description of Artificial Sequence: Synthetic oligonucleotide
uccgaguaguagaucugcu

SEQ ID NO: 2767581 - RNA, 19 nt, Artificial Sequence
  Description of Artificial Sequence: Synthetic oligonucleotide
ggaggagagagcgggagcg

SEQ ID NO: 2767582 - RNA, 19 nt, Artificial Sequence
  Description of Artificial Sequence: Synthetic oligonucleotide
gaacccaaccuagacucug

SEQ ID NO: 2767583 - RNA, 19 nt, Artificial Sequence
  Description of Artificial Sequence: Synthetic oligonucleotide
ccuuauauacacauauaca

SEQ ID NO: 2767584 - RNA, 19 nt, Artificial Sequence
  Description of Artificial Sequence: Synthetic oligonucleotide
agguauggaugaaagauuu

SEQ ID NO: 2767585 - RNA, 19 nt, Artificial Sequence
  Description of Artificial Sequence: Synthetic oligonucleotide
ugcauuaacugagcucugu

SEQ ID NO: 2767586 - RNA, 19 nt, Artificial Sequence
  Description of Artificial Sequence: Synthetic oligonucleotide
ggaaacggggcgcaaggag

SEQ ID NO: 2767587 - RNA, 19 nt, Artificial Sequence
  Description of Artificial Sequence: Synthetic oligonucleotide
cucuggcucaugaaucaug

SEQ ID NO: 2767588 - RNA, 19 nt, Artificial Sequence
  Description of Artificial Sequence: Synthetic oligonucleotide
acuugcaguugcauuaacu

SEQ ID NO: 2767589 - RNA, 19 nt, Artificial Sequence
  Description of Artificial Sequence: Synthetic oligonucleotide
agaagaauaugcggcucug

SEQ ID NO: 2767590 - RNA, 19 nt, Artificial Sequence
  Description of Artificial Sequence: Synthetic oligonucleotide
cugcuugugggccauccug

SEQ ID NO: 2767591 - RNA, 19 nt, Artificial Sequence
  Description of Artificial Sequence: Synthetic oligonucleotide
cuugugggccauccugccg

SEQ ID NO: 2767592 - RNA, 19 nt, Artificial Sequence
  Description of Artificial Sequence: Synthetic oligonucleotide
agcaugacaugccgguacu

SEQ ID NO: 2767593 - RNA, 19 nt, Artificial Sequence
  Description of Artificial Sequence: Synthetic oligonucleotide
ggcacuacuuauauuaaga

SEQ ID NO: 2767594 - RNA, 19 nt, Artificial Sequence
  Description of Artificial Sequence: Synthetic oligonucleotide
aguaacagguaaaguaaaa

SEQ ID NO: 2767595 - RNA, 19 nt, Artificial Sequence
  Description of Artificial Sequence: Synthetic oligonucleotide
gucgaaguacuuguccgag

SEQ ID NO: 2767596 - RNA, 19 nt, Artificial Sequence
  Description of Artificial Sequence: Synthetic oligonucleotide
ugggccauccugccggcgc

SEQ ID NO: 2767597 - RNA, 19 nt, Artificial Sequence
  Description of Artificial Sequence: Synthetic oligonucleotide
uaagcgaucccagcugcac

SEQ ID NO: 2767598 - RNA, 19 nt, Artificial Sequence
  Description of Artificial Sequence: Synthetic oligonucleotide
agguaaaguaaaacaggca

SEQ ID NO: 2767599 - RNA, 19 nt, Artificial Sequence
  Description of Artificial Sequence: Synthetic oligonucleotide
aaacggggcgcaaggagcu

SEQ ID NO: 2767600 - RNA, 19 nt, Artificial Sequence
  Description of Artificial Sequence: Synthetic oligonucleotide
caccaagucuccuccacuc

SEQ ID NO: 2767601 - RNA, 19 nt, Artificial Sequence
  Description of Artificial Sequence: Synthetic oligonucleotide
ugaacccaaccuagacucu

SEQ ID NO: 2767602 - RNA, 19 nt, Artificial Sequence
  Description of Artificial Sequence: Synthetic oligonucleotide
gagaagaauaugcggcucu

SEQ ID NO: 2767603 - RNA, 19 nt, Artificial Sequence
  Description of Artificial Sequence: Synthetic oligonucleotide
guaaaacaggcacuacuua

SEQ ID NO: 2767604 - RNA, 19 nt, Artificial Sequence
  Description of Artificial Sequence: Synthetic oligonucleotide
aguucucuggguagcauga

SEQ ID NO: 2767605 - RNA, 19 nt, Artificial Sequence
  Description of Artificial Sequence: Synthetic oligonucleotide
guaaaguaaaacaggcacu

SEQ ID NO: 2767606 - RNA, 19 nt, Artificial Sequence
  Description of Artificial Sequence: Synthetic oligonucleotide
auauacacauauacauuaa

SEQ ID NO: 2767607 - RNA, 19 nt, Artificial Sequence
  Description of Artificial Sequence: Synthetic oligonucleotide
caacuuaaaauaaccuacu

SEQ ID NO: 2767608 - RNA, 19 nt, Artificial Sequence
  Description of Artificial Sequence: Synthetic oligonucleotide
ugcacagguauggaugaaa

SEQ ID NO: 2767609 - RNA, 19 nt, Artificial Sequence
  Description of Artificial Sequence: Synthetic oligonucleotide
ugccgguacucguagugcu

SEQ ID NO: 2767610 - RNA, 19 nt, Artificial Sequence
  Description of Artificial Sequence: Synthetic oligonucleotide
cuccucuucagacaucaga

SEQ ID NO: 2767611 - RNA, 19 nt, Artificial Sequence
  Description of Artificial Sequence: Synthetic oligonucleotide
ucgaaguacuuguccgagu

SEQ ID NO: 2767612 - RNA, 19 nt, Artificial Sequence
  Description of Artificial Sequence: Synthetic oligonucleotide
gaugaaagauuuguacagu

SEQ ID NO: 2767613 - RNA, 19 nt, Artificial Sequence
  Description of Artificial Sequence: Synthetic oligonucleotide
guagugcucgucgaaguac

SEQ ID NO: 2767614 - RNA, 19 nt, Artificial Sequence
  Description of Artificial Sequence: Synthetic oligonucleotide
uugcauuaacugagcucug

SEQ ID NO: 2767615 - RNA, 19 nt, Artificial Sequence
  Description of Artificial Sequence: Synthetic oligonucleotide
guugucuuuuggaagaggu

SEQ ID NO: 2767616 - RNA, 19 nt, Artificial Sequence
  Description of Artificial Sequence: Synthetic oligonucleotide
uuggaagaggucgucuaaa

SEQ ID NO: 2767617 - RNA, 19 nt, Artificial Sequence
  Description of Artificial Sequence: Synthetic oligonucleotide
acaccaagucuccuccacu

SEQ ID NO: 2767618 - RNA, 19 nt, Artificial Sequence
  Description of Artificial Sequence: Synthetic oligonucleotide
aaaguucucuggguagcau

SEQ ID NO: 2767619 - RNA, 19 nt, Artificial Sequence
  Description of Artificial Sequence: Synthetic oligonucleotide
acucuguuggacaccaagu

SEQ ID NO: 2767620 - RNA, 19 nt, Artificial Sequence
  Description of Artificial Sequence: Synthetic oligonucleotide
gcucaugaaucauguaaug

SEQ ID NO: 2767621 - RNA, 19 nt, Artificial Sequence
  Description of Artificial Sequence: Synthetic oligonucleotide
auacagacucaugcacagg

SEQ ID NO: 2767622 - RNA, 19 nt, Artificial Sequence
  Description of Artificial Sequence: Synthetic oligonucleotide
ucugcuugugggccauccu

SEQ ID NO: 2767623 - RNA, 19 nt, Artificial Sequence
  Description of Artificial Sequence: Synthetic oligonucleotide
guccgaguaguagaucugc

SEQ ID NO: 2767624 - RNA, 19 nt, Artificial Sequence
  Description of Artificial Sequence: Synthetic oligonucleotide
cucguagugcucgucgaag

SEQ ID NO: 2767625 - RNA, 19 nt, Artificial Sequence
  Description of Artificial Sequence: Synthetic oligonucleotide
gaguaguagaucugcuugu

SEQ ID NO: 2767626 - RNA, 19 nt, Artificial Sequence
  Description of Artificial Sequence: Synthetic oligonucleotide
aggagagagcgggagcggg

SEQ ID NO: 2767627 - RNA, 19 nt, Artificial Sequence
  Description of Artificial Sequence: Synthetic oligonucleotide
gucuccuccacuccucuuc

SEQ ID NO: 2767628 - RNA, 19 nt, Artificial Sequence
  Description of Artificial Sequence: Synthetic oligonucleotide
accuacuugcaguugcauu

SEQ ID NO: 2767629 - RNA, 19 nt, Artificial Sequence
  Description of Artificial Sequence: Synthetic oligonucleotide
gaggucgucuaaagagaag

SEQ ID NO: 2767630 - RNA, 19 nt, Artificial Sequence
  Description of Artificial Sequence: Synthetic oligonucleotide
guaaugaacccaaccuaga

SEQ ID NO: 2767631 - RNA, 19 nt, Artificial Sequence
  Description of Artificial Sequence: Synthetic oligonucleotide
uacuugcaguugcauuaac

SEQ ID NO: 2767632 - RNA, 19 nt, Artificial Sequence
  Description of Artificial Sequence: Synthetic oligonucleotide
ucuuuuggaagaggucguc

SEQ ID NO: 2767633 - RNA, 19 nt, Artificial Sequence
  Description of Artificial Sequence: Synthetic oligonucleotide
cauauacauuaaauuugaa

SEQ ID NO: 2767634 - RNA, 19 nt, Artificial Sequence
  Description of Artificial Sequence: Synthetic oligonucleotide
gagagcgggagcgggaaac

SEQ ID NO: 2767635 - RNA, 19 nt, Artificial Sequence
  Description of Artificial Sequence: Synthetic oligonucleotide
cuguugcugugaagaauac

SEQ ID NO: 2767636 - RNA, 19 nt, Artificial Sequence
  Description of Artificial Sequence: Synthetic oligonucleotide
cuagacucuguuggacacc

SEQ ID NO: 2767637 - RNA, 19 nt, Artificial Sequence
  Description of Artificial Sequence: Synthetic oligonucleotide
cucuggguagcaugacaug

SEQ ID NO: 2767638 - RNA, 19 nt, Artificial Sequence
  Description of Artificial Sequence: Synthetic oligonucleotide
acugagcucuguugcugug

SEQ ID NO: 2767639 - RNA, 19 nt, Artificial Sequence
  Description of Artificial Sequence: Synthetic oligonucleotide
ggaagaggucgucuaaaga

SEQ ID NO: 2767640 - RNA, 19 nt, Artificial Sequence
  Description of Artificial Sequence: Synthetic oligonucleotide
gcacuacuuauauuaagaa

SEQ ID NO: 2767641 - RNA, 19 nt, Artificial Sequence
  Description of Artificial Sequence: Synthetic oligonucleotide
caagucuccuccacuccuc

SEQ ID NO: 2767642 - RNA, 19 nt, Artificial Sequence
  Description of Artificial Sequence: Synthetic oligonucleotide
acggggcgcaaggagcugc

SEQ ID NO: 2767643 - RNA, 19 nt, Artificial Sequence
  Description of Artificial Sequence: Synthetic oligonucleotide
agcgaucccagcugcacuu

SEQ ID NO: 2767644 - RNA, 19 nt, Artificial Sequence
  Description of Artificial Sequence: Synthetic oligonucleotide
agaggucgucuaaagagaa

SEQ ID NO: 2767645 - RNA, 19 nt, Artificial Sequence
  Description of Artificial Sequence: Synthetic oligonucleotide
ucccagcugcacuucauuu

SEQ ID NO: 2767646 - RNA, 19 nt, Artificial Sequence
  Description of Artificial Sequence: Synthetic oligonucleotide
ccuagacucuguuggacac

SEQ ID NO: 2767647 - RNA, 19 nt, Artificial Sequence
  Description of Artificial Sequence: Synthetic oligonucleotide
gaggagagagcgggagcgg

SEQ ID NO: 2767648 - RNA, 19 nt, Artificial Sequence
  Description of Artificial Sequence: Synthetic oligonucleotide
gggagcgggaaacggggcg

SEQ ID NO: 2767649 - RNA, 19 nt, Artificial Sequence
  Description of Artificial Sequence: Synthetic oligonucleotide
caaggagcugcacguccgc

SEQ ID NO: 2767650 - RNA, 19 nt, Artificial Sequence
  Description of Artificial Sequence: Synthetic oligonucleotide
aacccaaccuagacucugu

SEQ ID NO: 2767651 - RNA, 19 nt, Artificial Sequence
  Description of Artificial Sequence: Synthetic oligonucleotide
caaggaaauuuaucucgaa

SEQ ID NO: 2767652 - RNA, 19 nt, Artificial Sequence
  Description of Artificial Sequence: Synthetic oligonucleotide
ccuacuugcaguugcauua

SEQ ID NO: 2767653 - RNA, 19 nt, Artificial Sequence
  Description of Artificial Sequence: Synthetic oligonucleotide
aaccuacuugcaguugcau

SEQ ID NO: 2767654 - RNA, 19 nt, Artificial Sequence
  Description of Artificial Sequence: Synthetic oligonucleotide
acuuguccgaguaguagau

SEQ ID NO: 2767655 - RNA, 19 nt, Artificial Sequence
  Description of Artificial Sequence: Synthetic oligonucleotide
cacuccucuucagacauca

SEQ ID NO: 2767656 - RNA, 19 nt, Artificial Sequence
  Description of Artificial Sequence: Synthetic oligonucleotide
gguagcaugacaugccggu

SEQ ID NO: 2767657 - RNA, 19 nt, Artificial Sequence
  Description of Artificial Sequence: Synthetic oligonucleotide
gggcgcaaggagcugcacg

SEQ ID NO: 2767658 - RNA, 19 nt, Artificial Sequence
  Description of Artificial Sequence: Synthetic oligonucleotide
acucguagugcucgucgaa

SEQ ID NO: 2767659 - RNA, 19 nt, Artificial Sequence
  Description of Artificial Sequence: Synthetic oligonucleotide
acuaccuuauauacacaua

SEQ ID NO: 2767660 - RNA, 19 nt, Artificial Sequence
  Description of Artificial Sequence: Synthetic oligonucleotide
gagcucuguugcugugaag

SEQ ID NO: 2767661 - RNA, 19 nt, Artificial Sequence
  Description of Artificial Sequence: Synthetic oligonucleotide
gugaagaauacagacucau

SEQ ID NO: 2767662 - RNA, 19 nt, Artificial Sequence
  Description of Artificial Sequence: Synthetic oligonucleotide
caaccuagacucuguugga

SEQ ID NO: 2767663 - RNA, 19 nt, Artificial Sequence
  Description of Artificial Sequence: Synthetic oligonucleotide
caaaaguaacagguaaagu

SEQ ID NO: 2767664 - RNA, 19 nt, Artificial Sequence
  Description of Artificial Sequence: Synthetic oligonucleotide
gguauggaugaaagauuug

SEQ ID NO: 2767665 - RNA, 19 nt, Artificial Sequence
  Description of Artificial Sequence: Synthetic oligonucleotide
gcaaggagcugcacguccg

SEQ ID NO: 2767666 - RNA, 19 nt, Artificial Sequence
  Description of Artificial Sequence: Synthetic oligonucleotide
ccuccacuccucuucagac

SEQ ID NO: 2767667 - RNA, 19 nt, Artificial Sequence
  Description of Artificial Sequence: Synthetic oligonucleotide
acucaugcacagguaugga

SEQ ID NO: 2767668 - RNA, 19 nt, Artificial Sequence
  Description of Artificial Sequence: Synthetic oligonucleotide
auacuaccuuauauacaca

SEQ ID NO: 2767669 - RNA, 19 nt, Artificial Sequence
  Description of Artificial Sequence: Synthetic oligonucleotide
ugugggccauccugccggc

SEQ ID NO: 2767670 - RNA, 19 nt, Artificial Sequence
  Description of Artificial Sequence: Synthetic oligonucleotide
aguacuuguccgaguagua

SEQ ID NO: 2767671 - RNA, 19 nt, Artificial Sequence
  Description of Artificial Sequence: Synthetic oligonucleotide
ggcucuggcucaugaauca

SEQ ID NO: 2767672 - RNA, 19 nt, Artificial Sequence
  Description of Artificial Sequence: Synthetic oligonucleotide
caggcacuacuuauauuaa

SEQ ID NO: 2767673 - RNA, 19 nt, Artificial Sequence
  Description of Artificial Sequence: Synthetic oligonucleotide
aucccagcugcacuucauu

SEQ ID NO: 2767674 - RNA, 19 nt, Artificial Sequence
  Description of Artificial Sequence: Synthetic oligonucleotide
ccucuucagacaucagaug

SEQ ID NO: 2767675 - RNA, 19 nt, Artificial Sequence
  Description of Artificial Sequence: Synthetic oligonucleotide
ugcggcucuggcucaugaa

SEQ ID NO: 2767676 - RNA, 19 nt, Artificial Sequence
  Description of Artificial Sequence: Synthetic oligonucleotide
ggguagcaugacaugccgg

SEQ ID NO: 2767677 - RNA, 19 nt, Artificial Sequence
  Description of Artificial Sequence: Synthetic oligonucleotide
cagacucaugcacagguau

SEQ ID NO: 2767678 - RNA, 19 nt, Artificial Sequence
  Description of Artificial Sequence: Synthetic oligonucleotide
gucgucuaaagagaagaau

SEQ ID NO: 2767679 - RNA, 19 nt, Artificial Sequence
  Description of Artificial Sequence: Synthetic oligonucleotide
gcuugugggccauccugcc

SEQ ID NO: 2767680 - RNA, 19 nt, Artificial Sequence
  Description of Artificial Sequence: Synthetic oligonucleotide
cccaaccuagacucuguug

SEQ ID NO: 2767681 - RNA, 19 nt, Artificial Sequence
  Description of Artificial Sequence: Synthetic oligonucleotide
guacuuguuuggaaaaguu

SEQ ID NO: 2767682 - RNA, 19 nt, Artificial Sequence
  Description of Artificial Sequence: Synthetic oligonucleotide
gagagagcgggagcgggaa

SEQ ID NO: 2767683 - RNA, 19 nt, Artificial Sequence
  Description of Artificial Sequence: Synthetic oligonucleotide
ccgguacucguagugcucg

SEQ ID NO: 2767684 - RNA, 19 nt, Artificial Sequence
  Description of Artificial Sequence: Synthetic oligonucleotide
cucaugcacagguauggau

SEQ ID NO: 2767685 - RNA, 19 nt, Artificial Sequence
  Description of Artificial Sequence: Synthetic oligonucleotide
cacugaauacuaccuuaua

SEQ ID NO: 2767686 - RNA, 19 nt, Artificial Sequence
  Description of Artificial Sequence: Synthetic oligonucleotide
acccaaccuagacucuguu

SEQ ID NO: 2767687 - RNA, 19 nt, Artificial Sequence
  Description of Artificial Sequence: Synthetic oligonucleotide
gcugugaagaauacagacu

SEQ ID NO: 2767688 - RNA, 19 nt, Artificial Sequence
  Description of Artificial Sequence: Synthetic oligonucleotide
aacggggcgcaaggagcug

SEQ ID NO: 2767689 - RNA, 19 nt, Artificial Sequence
  Description of Artificial Sequence: Synthetic oligonucleotide
cuacuugcaguugcauuaa

SEQ ID NO: 2767690 - RNA, 19 nt, Artificial Sequence
  Description of Artificial Sequence: Synthetic oligonucleotide
uaugcggcucuggcucaug

SEQ ID NO: 2767691 - RNA, 19 nt, Artificial Sequence
  Description of Artificial Sequence: Synthetic oligonucleotide
guucucuggguagcaugac

SEQ ID NO: 2767692 - RNA, 19 nt, Artificial Sequence
  Description of Artificial Sequence: Synthetic oligonucleotide
gcgcgcggaggagagagcg

SEQ ID NO: 2767693 - RNA, 19 nt, Artificial Sequence
  Description of Artificial Sequence: Synthetic oligonucleotide
ggcgcaaggagcugcacgu

SEQ ID NO: 2767694 - RNA, 19 nt, Artificial Sequence
  Description of Artificial Sequence: Synthetic oligonucleotide
ggagcgggaaacggggcgc

SEQ ID NO: 2767695 - RNA, 19 nt, Artificial Sequence
  Description of Artificial Sequence: Synthetic oligonucleotide
acagacucaugcacaggua

SEQ ID NO: 2767696 - RNA, 19 nt, Artificial Sequence
  Description of Artificial Sequence: Synthetic oligonucleotide
agagagcgggagcgggaaa

SEQ ID NO: 2767697 - RNA, 19 nt, Artificial Sequence
  Description of Artificial Sequence: Synthetic oligonucleotide
caguugcauuaacugagcu

SEQ ID NO: 2767698 - RNA, 19 nt, Artificial Sequence
  Description of Artificial Sequence: Synthetic oligonucleotide
gucuuuuggaagaggucgu

SEQ ID NO: 2767699 - RNA, 19 nt, Artificial Sequence
  Description of Artificial Sequence: Synthetic oligonucleotide
gggccauccugccggcgcg

SEQ ID NO: 2767700 - RNA, 19 nt, Artificial Sequence
  Description of Artificial Sequence: Synthetic oligonucleotide
cugagcucuguugcuguga

SEQ ID NO: 2767701 - RNA, 19 nt, Artificial Sequence
  Description of Artificial Sequence: Synthetic oligonucleotide
cgcaaggagcugcacgucc

SEQ ID NO: 2767702 - RNA, 19 nt, Artificial Sequence
  Description of Artificial Sequence: Synthetic oligonucleotide
agucuccuccacuccucuu

SEQ ID NO: 2767703 - RNA, 19 nt, Artificial Sequence
  Description of Artificial Sequence: Synthetic oligonucleotide
gcggaggagagagcgggag

SEQ ID NO: 2767704 - RNA, 19 nt, Artificial Sequence
  Description of Artificial Sequence: Synthetic oligonucleotide
ggucgucuaaagagaagaa

SEQ ID NO: 2767705 - RNA, 19 nt, Artificial Sequence
  Description of Artificial Sequence: Synthetic oligonucleotide
guagcaugacaugccggua

SEQ ID NO: 2767706 - RNA, 19 nt, Artificial Sequence
  Description of Artificial Sequence: Synthetic oligonucleotide
gcucuguugcugugaagaa

SEQ ID NO: 2767707 - RNA, 19 nt, Artificial Sequence
  Description of Artificial Sequence: Synthetic oligonucleotide
cgaaguacuuguccgagua

SEQ ID NO: 2767708 - RNA, 19 nt, Artificial Sequence
  Description of Artificial Sequence: Synthetic oligonucleotide
cauccugccggcgcgcgga

SEQ ID NO: 2767709 - RNA, 19 nt, Artificial Sequence
  Description of Artificial Sequence: Synthetic oligonucleotide
auccugccggcgcgcggag

SEQ ID NO: 2767710 - RNA, 19 nt, Artificial Sequence
  Description of Artificial Sequence: Synthetic oligonucleotide
gguacucguagugcucguc

SEQ ID NO: 2767711 - RNA, 19 nt, Artificial Sequence
  Description of Artificial Sequence: Synthetic oligonucleotide
uccugccggcgcgcggagg

SEQ ID NO: 2767712 - RNA, 19 nt, Artificial Sequence
  Description of Artificial Sequence: Synthetic oligonucleotide
gagcgggaaacggggcgca

SEQ ID NO: 2767713 - RNA, 19 nt, Artificial Sequence
  Description of Artificial Sequence: Synthetic oligonucleotide
cgucuaaagagaagaauau

SEQ ID NO: 2767714 - RNA, 19 nt, Artificial Sequence
  Description of Artificial Sequence: Synthetic oligonucleotide
ggacaccaagucuccucca

SEQ ID NO: 2767715 - RNA, 19 nt, Artificial Sequence
  Description of Artificial Sequence: Synthetic oligonucleotide
ugccggcgcgcggaggaga

SEQ ID NO: 2767716 - RNA, 19 nt, Artificial Sequence
  Description of Artificial Sequence: Synthetic oligonucleotide
cuggcucaugaaucaugua

SEQ ID NO: 2767717 - RNA, 19 nt, Artificial Sequence
  Description of Artificial Sequence: Synthetic oligonucleotide
auaugcggcucuggcucau

SEQ ID NO: 2767718 - RNA, 19 nt, Artificial Sequence
  Description of Artificial Sequence: Synthetic oligonucleotide
augcacagguauggaugaa

SEQ ID NO: 2767719 - RNA, 19 nt, Artificial Sequence
  Description of Artificial Sequence: Synthetic oligonucleotide
cggcucuggcucaugaauc

SEQ ID NO: 2767720 - RNA, 19 nt, Artificial Sequence
  Description of Artificial Sequence: Synthetic oligonucleotide
gcauuaacugagcucuguu

SEQ ID NO: 2767721 - RNA, 19 nt, Artificial Sequence
  Description of Artificial Sequence: Synthetic oligonucleotide
gcgggaaacggggcgcaag

SEQ ID NO: 2767722 - RNA, 19 nt, Artificial Sequence
  Description of Artificial Sequence: Synthetic oligonucleotide
gugggccauccugccggcg

SEQ ID NO: 2767723 - RNA, 19 nt, Artificial Sequence
  Description of Artificial Sequence: Synthetic oligonucleotide
agugcucgucgaaguacuu

SEQ ID NO: 2767724 - RNA, 19 nt, Artificial Sequence
  Description of Artificial Sequence: Synthetic oligonucleotide
guuggacaccaagucuccu

SEQ ID NO: 2767725 - RNA, 19 nt, Artificial Sequence
  Description of Artificial Sequence: Synthetic oligonucleotide
gaucccagcugcacuucau

SEQ ID NO: 2767726 - RNA, 19 nt, Artificial Sequence
  Description of Artificial Sequence: Synthetic oligonucleotide
ggagagagcgggagcggga

SEQ ID NO: 2767727 - RNA, 19 nt, Artificial Sequence
  Description of Artificial Sequence: Synthetic oligonucleotide
cgucgaaguacuuguccga

SEQ ID NO: 2767728 - RNA, 19 nt, Artificial Sequence
  Description of Artificial Sequence: Synthetic oligonucleotide
gaucugcuugugggccauc

SEQ ID NO: 2767729 - RNA, 19 nt, Artificial Sequence
  Description of Artificial Sequence: Synthetic oligonucleotide
gcggcucuggcucaugaau

SEQ ID NO: 2767730 - RNA, 19 nt, Artificial Sequence
  Description of Artificial Sequence: Synthetic oligonucleotide
gcucgucgaaguacuuguc

SEQ ID NO: 2767731 - RNA, 19 nt, Artificial Sequence
  Description of Artificial Sequence: Synthetic oligonucleotide
gccauccugccggcgcgcg

SEQ ID NO: 2767732 - RNA, 19 nt, Artificial Sequence
  Description of Artificial Sequence: Synthetic oligonucleotide
ccauccugccggcgcgcgg

SEQ ID NO: 2767733 - RNA, 19 nt, Artificial Sequence
  Description of Artificial Sequence: Synthetic oligonucleotide
ccugccggcgcgcggagga

SEQ ID NO: 2767734 - RNA, 19 nt, Artificial Sequence
  Description of Artificial Sequence: Synthetic oligonucleotide
gccgguacucguagugcuc

SEQ ID NO: 2767735 - RNA, 19 nt, Artificial Sequence
  Description of Artificial Sequence: Synthetic oligonucleotide
agacucuguuggacaccaa

SEQ ID NO: 2767736 - RNA, 19 nt, Artificial Sequence
  Description of Artificial Sequence: Synthetic oligonucleotide
agcgggaaacggggcgcaa

SEQ ID NO: 2767737 - RNA, 19 nt, Artificial Sequence
  Description of Artificial Sequence: Synthetic oligonucleotide
cugccggcgcgcggaggag

SEQ ID NO: 2767738 - RNA, 19 nt, Artificial Sequence
  Description of Artificial Sequence: Synthetic oligonucleotide
gccggcgcgcggaggagag

SEQ ID NO: 2767739 - RNA, 19 nt, Artificial Sequence
  Description of Artificial Sequence: Synthetic oligonucleotide
cgggagcgggaaacggggc

SEQ ID NO: 2767740 - RNA, 19 nt, Artificial Sequence
  Description of Artificial Sequence: Synthetic oligonucleotide
cggcgcgcggaggagagag

SEQ ID NO: 2767741 - RNA, 19 nt, Artificial Sequence
  Description of Artificial Sequence: Synthetic oligonucleotide
ccgaguaguagaucugcuu

SEQ ID NO: 2767742 - RNA, 19 nt, Artificial Sequence
  Description of Artificial Sequence: Synthetic oligonucleotide
cguagugcucgucgaagua

SEQ ID NO: 2767743 - RNA, 19 nt, Artificial Sequence
  Description of Artificial Sequence: Synthetic oligonucleotide
cccagcugcacuucauuuu

SEQ ID NO: 2767744 - RNA, 19 nt, Artificial Sequence
  Description of Artificial Sequence: Synthetic oligonucleotide
gcgaucccagcugcacuuc

SEQ ID NO: 2767745 - RNA, 19 nt, Artificial Sequence
  Description of Artificial Sequence: Synthetic oligonucleotide
ggccauccugccggcgcgc

SEQ ID NO: 2767746 - RNA, 19 nt, Artificial Sequence
  Description of Artificial Sequence: Synthetic oligonucleotide
ggcgcgcggaggagagagc

SEQ ID NO: 2767747 - RNA, 19 nt, Artificial Sequence
  Description of Artificial Sequence: Synthetic oligonucleotide
gcgcaaggagcugcacguc

SEQ ID NO: 2767748 - RNA, 19 nt, Artificial Sequence
  Description of Artificial Sequence: Synthetic oligonucleotide
cgaucccagcugcacuuca

SEQ ID NO: 2767749 - RNA, 19 nt, Artificial Sequence
  Description of Artificial Sequence: Synthetic oligonucleotide
ggggcgcaaggagcugcac

SEQ ID NO: 2767750 - RNA, 19 nt, Artificial Sequence
  Description of Artificial Sequence: Synthetic oligonucleotide
cgcggaggagagagcggga

SEQ ID NO: 2767751 - RNA, 19 nt, Artificial Sequence
  Description of Artificial Sequence: Synthetic oligonucleotide
cggggcgcaaggagcugca

SEQ ID NO: 2767752 - RNA, 19 nt, Artificial Sequence
  Description of Artificial Sequence: Synthetic oligonucleotide
cgguacucguagugcucgu

SEQ ID NO: 2767753 - RNA, 19 nt, Artificial Sequence
  Description of Artificial Sequence: Synthetic oligonucleotide
ccggcgcgcggaggagaga

SEQ ID NO: 2767754 - RNA, 19 nt, Artificial Sequence
  Description of Artificial Sequence: Synthetic oligonucleotide
ucugugaugaauuagaaga

SEQ ID NO: 2767755 - RNA, 19 nt, Artificial Sequence
  Description of Artificial Sequence: Synthetic oligonucleotide
gaauuagaagauuugaccg

SEQ ID NO: 2767756 - RNA, 19 nt, Artificial Sequence
  Description of Artificial Sequence: Synthetic oligonucleotide
aauuagaagauuugaccgc

SEQ ID NO: 2767757 - RNA, 19 nt, Artificial Sequence
  Description of Artificial Sequence: Synthetic oligonucleotide
ugaauuagaagauuugacc

SEQ ID NO: 2767758 - RNA, 19 nt, Artificial Sequence
  Description of Artificial Sequence: Synthetic oligonucleotide
ucucugaugguccugaagg

SEQ ID NO: 2767759 - RNA, 19 nt, Artificial Sequence
  Description of Artificial Sequence: Synthetic oligonucleotide
aaagguuggagcuacagau

SEQ ID NO: 2767760 - RNA, 19 nt, Artificial Sequence
  Description of Artificial Sequence: Synthetic oligonucleotide
aaaccucacacuuguaagg

SEQ ID NO: 2767761 - RNA, 19 nt, Artificial Sequence
  Description of Artificial Sequence: Synthetic oligonucleotide
aauucuuucccacaaucca

SEQ ID NO: 2767762 - RNA, 19 nt, Artificial Sequence
  Description of Artificial Sequence: Synthetic oligonucleotide
aaauucuuucccacaaucc

SEQ ID NO: 2767763 - RNA, 19 nt, Artificial Sequence
  Description of Artificial Sequence: Synthetic oligonucleotide
caggguauagccuuuaccg

SEQ ID NO: 2767764 - RNA, 19 nt, Artificial Sequence
  Description of Artificial Sequence: Synthetic oligonucleotide
ugaauguaaagguuggagc

SEQ ID NO: 2767765 - RNA, 19 nt, Artificial Sequence
  Description of Artificial Sequence: Synthetic oligonucleotide
uggaauucaggguauagcc

SEQ ID NO: 2767766 - RNA, 19 nt, Artificial Sequence
  Description of Artificial Sequence: Synthetic oligonucleotide
aaguaucgcauuugaaagg

SEQ ID NO: 2767767 - RNA, 19 nt, Artificial Sequence
  Description of Artificial Sequence: Synthetic oligonucleotide
caaguaucgcauuugaaag

SEQ ID NO: 2767768 - RNA, 19 nt, Artificial Sequence
  Description of Artificial Sequence: Synthetic oligonucleotide
aagauuggaauucagggua

SEQ ID NO: 2767769 - RNA, 19 nt, Artificial Sequence
  Description of Artificial Sequence: Synthetic oligonucleotide
ugagaggccugacugaagg

SEQ ID NO: 2767770 - RNA, 19 nt, Artificial Sequence
  Description of Artificial Sequence: Synthetic oligonucleotide
auuagaagauuugaccgcc

SEQ ID NO: 2767771 - RNA, 19 nt, Artificial Sequence
  Description of Artificial Sequence: Synthetic oligonucleotide
gaagauuugaccgccaacc

SEQ ID NO: 2767772 - RNA, 19 nt, Artificial Sequence
  Description of Artificial Sequence: Synthetic oligonucleotide
aguaucgcauuugaaaggc

SEQ ID NO: 2767773 - RNA, 19 nt, Artificial Sequence
  Description of Artificial Sequence: Synthetic oligonucleotide
acacguaggauuucucucc

SEQ ID NO: 2767774 - RNA, 19 nt, Artificial Sequence
  Description of Artificial Sequence: Synthetic oligonucleotide
uugaccgccaaccaaagcu

SEQ ID NO: 2767775 - RNA, 19 nt, Artificial Sequence
  Description of Artificial Sequence: Synthetic oligonucleotide
aaggugagaggccugacug

SEQ ID NO: 2767776 - RNA, 19 nt, Artificial Sequence
  Description of Artificial Sequence: Synthetic oligonucleotide
uggagcuacagauaaagcu

SEQ ID NO: 2767777 - RNA, 19 nt, Artificial Sequence
  Description of Artificial Sequence: Synthetic oligonucleotide
acagauaaagcucuugcca

SEQ ID NO: 2767778 - RNA, 19 nt, Artificial Sequence
  Description of Artificial Sequence: Synthetic oligonucleotide
uaaauucuuucccacaauc

SEQ ID NO: 2767779 - RNA, 19 nt, Artificial Sequence
  Description of Artificial Sequence: Synthetic oligonucleotide
acacacgucacauuuguag

SEQ ID NO: 2767780 - RNA, 19 nt, Artificial Sequence
  Description of Artificial Sequence: Synthetic oligonucleotide
uucuuucccacaauccacg

SEQ ID NO: 2767781 - RNA, 19 nt, Artificial Sequence
  Description of Artificial Sequence: Synthetic oligonucleotide
ugaugaauuagaagauuug

SEQ ID NO: 2767782 - RNA, 19 nt, Artificial Sequence
  Description of Artificial Sequence: Synthetic oligonucleotide
augaauuagaagauuugac

SEQ ID NO: 2767783 - RNA, 19 nt, Artificial Sequence
  Description of Artificial Sequence: Synthetic oligonucleotide
ucgcagauggaccugaaga

SEQ ID NO: 2767784 - RNA, 19 nt, Artificial Sequence
  Description of Artificial Sequence: Synthetic oligonucleotide
uggugaauguaaagguugg

SEQ ID NO: 2767785 - RNA, 19 nt, Artificial Sequence
  Description of Artificial Sequence: Synthetic oligonucleotide
cauuugaaaggcuucuccc

SEQ ID NO: 2767786 - RNA, 19 nt, Artificial Sequence
  Description of Artificial Sequence: Synthetic oligonucleotide
cuacagauaaagcucuugc

SEQ ID NO: 2767787 - RNA, 19 nt, Artificial Sequence
  Description of Artificial Sequence: Synthetic oligonucleotide
aagcucuuaccacaaaccu

SEQ ID NO: 2767788 - RNA, 19 nt, Artificial Sequence
  Description of Artificial Sequence: Synthetic oligonucleotide
aaccaaagcucuuaccaca

SEQ ID NO: 2767789 - RNA, 19 nt, Artificial Sequence
  Description of Artificial Sequence: Synthetic oligonucleotide
acaauccacgcacuuauag

SEQ ID NO: 2767790 - RNA, 19 nt, Artificial Sequence
  Description of Artificial Sequence: Synthetic oligonucleotide
ugggaauuccggcugaagc

SEQ ID NO: 2767791 - RNA, 19 nt, Artificial Sequence
  Description of Artificial Sequence: Synthetic oligonucleotide
uacagauaaagcucuugcc

SEQ ID NO: 2767792 - RNA, 19 nt, Artificial Sequence
  Description of Artificial Sequence: Synthetic oligonucleotide
aggguauagccuuuaccgc

SEQ ID NO: 2767793 - RNA, 19 nt, Artificial Sequence
  Description of Artificial Sequence: Synthetic oligonucleotide
uagccuuuaccgcacacag

SEQ ID NO: 2767794 - RNA, 19 nt, Artificial Sequence
  Description of Artificial Sequence: Synthetic oligonucleotide
ugugaagagcggcugaaga

SEQ ID NO: 2767795 - RNA, 19 nt, Artificial Sequence
  Description of Artificial Sequence: Synthetic oligonucleotide
acuguagcugugaagagcg

SEQ ID NO: 2767796 - RNA, 19 nt, Artificial Sequence
  Description of Artificial Sequence: Synthetic oligonucleotide
gaugaauuagaagauuuga

SEQ ID NO: 2767797 - RNA, 19 nt, Artificial Sequence
  Description of Artificial Sequence: Synthetic oligonucleotide
uucugugaugaauuagaag

SEQ ID NO: 2767798 - RNA, 19 nt, Artificial Sequence
  Description of Artificial Sequence: Synthetic oligonucleotide
caaaccucacacuuguaag

SEQ ID NO: 2767799 - RNA, 19 nt, Artificial Sequence
  Description of Artificial Sequence: Synthetic oligonucleotide
cuggugaauguaaagguug

SEQ ID NO: 2767800 - RNA, 19 nt, Artificial Sequence
  Description of Artificial Sequence: Synthetic oligonucleotide
agggcgacuaaauucuuuc

SEQ ID NO: 2767801 - RNA, 19 nt, Artificial Sequence
  Description of Artificial Sequence: Synthetic oligonucleotide
acuaaauucuuucccacaa

SEQ ID NO: 2767802 - RNA, 19 nt, Artificial Sequence
  Description of Artificial Sequence: Synthetic oligonucleotide
guuggagcuacagauaaag

SEQ ID NO: 2767803 - RNA, 19 nt, Artificial Sequence
  Description of Artificial Sequence: Synthetic oligonucleotide
ugugaugggaccgaaggug

SEQ ID NO: 2767804 - RNA, 19 nt, Artificial Sequence
  Description of Artificial Sequence: Synthetic oligonucleotide
ucaggguauagccuuuacc

SEQ ID NO: 2767805 - RNA, 19 nt, Artificial Sequence
  Description of Artificial Sequence: Synthetic oligonucleotide
agaagauuugaccgccaac

SEQ ID NO: 2767806 - RNA, 19 nt, Artificial Sequence
  Description of Artificial Sequence: Synthetic oligonucleotide
gaauguaaagguuggagcu

SEQ ID NO: 2767807 - RNA, 19 nt, Artificial Sequence
  Description of Artificial Sequence: Synthetic oligonucleotide
uaaagguuggagcuacaga

SEQ ID NO: 2767808 - RNA, 19 nt, Artificial Sequence
  Description of Artificial Sequence: Synthetic oligonucleotide
ucgaagggcgacuaaauuc

SEQ ID NO: 2767809 - RNA, 19 nt, Artificial Sequence
  Description of Artificial Sequence: Synthetic oligonucleotide
caauccacgcacuuauagg

SEQ ID NO: 2767810 - RNA, 19 nt, Artificial Sequence
  Description of Artificial Sequence: Synthetic oligonucleotide
cacacgucacauuuguagg

SEQ ID NO: 2767811 - RNA, 19 nt, Artificial Sequence
  Description of Artificial Sequence: Synthetic oligonucleotide
cagauaaagcucuugccac

SEQ ID NO: 2767812 - RNA, 19 nt, Artificial Sequence
  Description of Artificial Sequence: Synthetic oligonucleotide
acacgucacauuuguaggg

SEQ ID NO: 2767813 - RNA, 19 nt, Artificial Sequence
  Description of Artificial Sequence: Synthetic oligonucleotide
aagauuugaccgccaacca

SEQ ID NO: 2767814 - RNA, 19 nt, Artificial Sequence
  Description of Artificial Sequence: Synthetic oligonucleotide
gugaauguaaagguuggag

SEQ ID NO: 2767815 - RNA, 19 nt, Artificial Sequence
  Description of Artificial Sequence: Synthetic oligonucleotide
gguguggacucgcagaugg

SEQ ID NO: 2767816 - RNA, 19 nt, Artificial Sequence
  Description of Artificial Sequence: Synthetic oligonucleotide
agcggcugaagacuuuccc

SEQ ID NO: 2767817 - RNA, 19 nt, Artificial Sequence
  Description of Artificial Sequence: Synthetic oligonucleotide
caaagcucuuaccacaaac

SEQ ID NO: 2767818 - RNA, 19 nt, Artificial Sequence
  Description of Artificial Sequence: Synthetic oligonucleotide
acaaaccucacacuuguaa

SEQ ID NO: 2767819 - RNA, 19 nt, Artificial Sequence
  Description of Artificial Sequence: Synthetic oligonucleotide
uaggauuucucucccgugu

SEQ ID NO: 2767820 - RNA, 19 nt, Artificial Sequence
  Description of Artificial Sequence: Synthetic oligonucleotide
auguaaagguuggagcuac

SEQ ID NO: 2767821 - RNA, 19 nt, Artificial Sequence
  Description of Artificial Sequence: Synthetic oligonucleotide
gaacccucugaugagacug

SEQ ID NO: 2767822 - RNA, 19 nt, Artificial Sequence
  Description of Artificial Sequence: Synthetic oligonucleotide
uuggaauucaggguauagc

SEQ ID NO: 2767823 - RNA, 19 nt, Artificial Sequence
  Description of Artificial Sequence: Synthetic oligonucleotide
guguguaugcccugguggg

SEQ ID NO: 2767824 - RNA, 19 nt, Artificial Sequence
  Description of Artificial Sequence: Synthetic oligonucleotide
ugagacuguagcugugaag

SEQ ID NO: 2767825 - RNA, 19 nt, Artificial Sequence
  Description of Artificial Sequence: Synthetic oligonucleotide
uggaccugaagauuggaau

SEQ ID NO: 2767826 - RNA, 19 nt, Artificial Sequence
  Description of Artificial Sequence: Synthetic oligonucleotide
ugggccugaagacucgaag

SEQ ID NO: 2767827 - RNA, 19 nt, Artificial Sequence
  Description of Artificial Sequence: Synthetic oligonucleotide
ugaagagcggcugaagacu

SEQ ID NO: 2767828 - RNA, 19 nt, Artificial Sequence
  Description of Artificial Sequence: Synthetic oligonucleotide
cacuccucgcauuuguagg

SEQ ID NO: 2767829 - RNA, 19 nt, Artificial Sequence
  Description of Artificial Sequence: Synthetic oligonucleotide
ugaaggcgcucccacacgc

SEQ ID NO: 2767830 - RNA, 19 nt, Artificial Sequence
  Description of Artificial Sequence: Synthetic oligonucleotide
uaucgcauuugaaaggcuu

SEQ ID NO: 2767831 - RNA, 19 nt, Artificial Sequence
  Description of Artificial Sequence: Synthetic oligonucleotide
ucuggugaauguaaagguu

SEQ ID NO: 2767832 - RNA, 19 nt, Artificial Sequence
  Description of Artificial Sequence: Synthetic oligonucleotide
cacacagugcacacguagg

SEQ ID NO: 2767833 - RNA, 19 nt, Artificial Sequence
  Description of Artificial Sequence: Synthetic oligonucleotide
uaccacaaaccucacacuu

SEQ ID NO: 2767834 - RNA, 19 nt, Artificial Sequence
  Description of Artificial Sequence: Synthetic oligonucleotide
uuggagcuacagauaaagc

SEQ ID NO: 2767835 - RNA, 19 nt, Artificial Sequence
  Description of Artificial Sequence: Synthetic oligonucleotide
agaggccugacugaaggcg

SEQ ID NO: 2767836 - RNA, 19 nt, Artificial Sequence
  Description of Artificial Sequence: Synthetic oligonucleotide
gaagauuggaauucagggu

SEQ ID NO: 2767837 - RNA, 19 nt, Artificial Sequence
  Description of Artificial Sequence: Synthetic oligonucleotide
gccuuuaccgcacacagug

SEQ ID NO: 2767838 - RNA, 19 nt, Artificial Sequence
  Description of Artificial Sequence: Synthetic oligonucleotide
agauaaagcucuugccaca

SEQ ID NO: 2767839 - RNA, 19 nt, Artificial Sequence
  Description of Artificial Sequence: Synthetic oligonucleotide
gacuaaauucuuucccaca

SEQ ID NO: 2767840 - RNA, 19 nt, Artificial Sequence
  Description of Artificial Sequence: Synthetic oligonucleotide
auuggaauucaggguauag

SEQ ID NO: 2767841 - RNA, 19 nt, Artificial Sequence
  Description of Artificial Sequence: Synthetic oligonucleotide
caaccaaagcucuuaccac

SEQ ID NO: 2767842 - RNA, 19 nt, Artificial Sequence
  Description of Artificial Sequence: Synthetic oligonucleotide
agguuggagcuacagauaa

SEQ ID NO: 2767843 - RNA, 19 nt, Artificial Sequence
  Description of Artificial Sequence: Synthetic oligonucleotide
ucugaugguccugaaggug

SEQ ID NO: 2767844 - RNA, 19 nt, Artificial Sequence
  Description of Artificial Sequence: Synthetic oligonucleotide
gacuguagcugugaagagc

SEQ ID NO: 2767845 - RNA, 19 nt, Artificial Sequence
  Description of Artificial Sequence: Synthetic oligonucleotide
uuagaagauuugaccgcca

SEQ ID NO: 2767846 - RNA, 19 nt, Artificial Sequence
  Description of Artificial Sequence: Synthetic oligonucleotide
uggacucgcagauggaccu

SEQ ID NO: 2767847 - RNA, 19 nt, Artificial Sequence
  Description of Artificial Sequence: Synthetic oligonucleotide
gauuugaccgccaaccaaa

SEQ ID NO: 2767848 - RNA, 19 nt, Artificial Sequence
  Description of Artificial Sequence: Synthetic oligonucleotide
ugaugguccugaaggugag

SEQ ID NO: 2767849 - RNA, 19 nt, Artificial Sequence
  Description of Artificial Sequence: Synthetic oligonucleotide
gauaaagcucuugccacac

SEQ ID NO: 2767850 - RNA, 19 nt, Artificial Sequence
  Description of Artificial Sequence: Synthetic oligonucleotide
guaaagguuggagcuacag

SEQ ID NO: 2767851 - RNA, 19 nt, Artificial Sequence
  Description of Artificial Sequence: Synthetic oligonucleotide
uagaagauuugaccgccaa

SEQ ID NO: 2767852 - RNA, 19 nt, Artificial Sequence
  Description of Artificial Sequence: Synthetic oligonucleotide
ucucccguguguaugcccu

SEQ ID NO: 2767853 - RNA, 19 nt, Artificial Sequence
  Description of Artificial Sequence: Synthetic oligonucleotide
ccugaagacucgaagggcg

SEQ ID NO: 2767854 - RNA, 19 nt, Artificial Sequence
  Description of Artificial Sequence: Synthetic oligonucleotide
gcaaguaucgcauuugaaa

SEQ ID NO: 2767855 - RNA, 19 nt, Artificial Sequence
  Description of Artificial Sequence: Synthetic oligonucleotide
uuugaccgccaaccaaagc

SEQ ID NO: 2767856 - RNA, 19 nt, Artificial Sequence
  Description of Artificial Sequence: Synthetic oligonucleotide
aauguaaagguuggagcua

SEQ ID NO: 2767857 - RNA, 19 nt, Artificial Sequence
  Description of Artificial Sequence: Synthetic oligonucleotide
uguggagucucugaugguc

SEQ ID NO: 2767858 - RNA, 19 nt, Artificial Sequence
  Description of Artificial Sequence: Synthetic oligonucleotide
gugaagagcggcugaagac

SEQ ID NO: 2767859 - RNA, 19 nt, Artificial Sequence
  Description of Artificial Sequence: Synthetic oligonucleotide
augguccugaaggugagag

SEQ ID NO: 2767860 - RNA, 19 nt, Artificial Sequence
  Description of Artificial Sequence: Synthetic oligonucleotide
ccugugaugggaccgaagg

SEQ ID NO: 2767861 - RNA, 19 nt, Artificial Sequence
  Description of Artificial Sequence: Synthetic oligonucleotide
uuaccacaaaccucacacu

SEQ ID NO: 2767862 - RNA, 19 nt, Artificial Sequence
  Description of Artificial Sequence: Synthetic oligonucleotide
cacacguaggauuucucuc

SEQ ID NO: 2767863 - RNA, 19 nt, Artificial Sequence
  Description of Artificial Sequence: Synthetic oligonucleotide
acacagugcacacguagga

SEQ ID NO: 2767864 - RNA, 19 nt, Artificial Sequence
  Description of Artificial Sequence: Synthetic oligonucleotide
ggcgacuaaauucuuuccc

SEQ ID NO: 2767865 - RNA, 19 nt, Artificial Sequence
  Description of Artificial Sequence: Synthetic oligonucleotide
gguccugaaggugagaggc

SEQ ID NO: 2767866 - RNA, 19 nt, Artificial Sequence
  Description of Artificial Sequence: Synthetic oligonucleotide
agcucuuaccacaaaccuc

SEQ ID NO: 2767867 - RNA, 19 nt, Artificial Sequence
  Description of Artificial Sequence: Synthetic oligonucleotide
uauagccuuuaccgcacac

SEQ ID NO: 2767868 - RNA, 19 nt, Artificial Sequence
  Description of Artificial Sequence: Synthetic oligonucleotide
agauuugaccgccaaccaa

SEQ ID NO: 2767869 - RNA, 19 nt, Artificial Sequence
  Description of Artificial Sequence: Synthetic oligonucleotide
ucuugccgcaaguaucgca

SEQ ID NO: 2767870 - RNA, 19 nt, Artificial Sequence
  Description of Artificial Sequence: Synthetic oligonucleotide
ucuuucccacaauccacgc

SEQ ID NO: 2767871 - RNA, 19 nt, Artificial Sequence
  Description of Artificial Sequence: Synthetic oligonucleotide
gugaugggaccgaaggugg

SEQ ID NO: 2767872 - RNA, 19 nt, Artificial Sequence
  Description of Artificial Sequence: Synthetic oligonucleotide
aucgcauuugaaaggcuuc

SEQ ID NO: 2767873 - RNA, 19 nt, Artificial Sequence
  Description of Artificial Sequence: Synthetic oligonucleotide
ugguccugaaggugagagg

SEQ ID NO: 2767874 - RNA, 19 nt, Artificial Sequence
  Description of Artificial Sequence: Synthetic oligonucleotide
ggccugaagacucgaaggg

SEQ ID NO: 2767875 - RNA, 19 nt, Artificial Sequence
  Description of Artificial Sequence: Synthetic oligonucleotide
gggccugaagacucgaagg

SEQ ID NO: 2767876 - RNA, 19 nt, Artificial Sequence
  Description of Artificial Sequence: Synthetic oligonucleotide
ccucugaugagacuguagc

SEQ ID NO: 2767877 - RNA, 19 nt, Artificial Sequence
  Description of Artificial Sequence: Synthetic oligonucleotide
cugaugguccugaagguga

SEQ ID NO: 2767878 - RNA, 19 nt, Artificial Sequence
  Description of Artificial Sequence: Synthetic oligonucleotide
aggauuucucucccgugug

SEQ ID NO: 2767879 - RNA, 19 nt, Artificial Sequence
  Description of Artificial Sequence: Synthetic oligonucleotide
uguggacucgcagauggac

SEQ ID NO: 2767880 - RNA, 19 nt, Artificial Sequence
  Description of Artificial Sequence: Synthetic oligonucleotide
acagugcacacguaggauu

SEQ ID NO: 2767881 - RNA, 19 nt, Artificial Sequence
  Description of Artificial Sequence: Synthetic oligonucleotide
agacuguagcugugaagag

SEQ ID NO: 2767882 - RNA, 19 nt, Artificial Sequence
  Description of Artificial Sequence: Synthetic oligonucleotide
ggagcuacagauaaagcuc

SEQ ID NO: 2767883 - RNA, 19 nt, Artificial Sequence
  Description of Artificial Sequence: Synthetic oligonucleotide
gaauucaggguauagccuu

SEQ ID NO: 2767884 - RNA, 19 nt, Artificial Sequence
  Description of Artificial Sequence: Synthetic oligonucleotide
aaggcgcucccacacgccu

SEQ ID NO: 2767885 - RNA, 19 nt, Artificial Sequence
  Description of Artificial Sequence: Synthetic oligonucleotide
guaggauuucucucccgug

SEQ ID NO: 2767886 - RNA, 19 nt, Artificial Sequence
  Description of Artificial Sequence: Synthetic oligonucleotide
gaccugaagauuggaauuc

SEQ ID NO: 2767887 - RNA, 19 nt, Artificial Sequence
  Description of Artificial Sequence: Synthetic oligonucleotide
agagcggcugaagacuuuc

SEQ ID NO: 2767888 - RNA, 19 nt, Artificial Sequence
  Description of Artificial Sequence: Synthetic oligonucleotide
uguaaagguuggagcuaca

SEQ ID NO: 2767889 - RNA, 19 nt, Artificial Sequence
  Description of Artificial Sequence: Synthetic oligonucleotide
uuaccgcacacagugcaca

SEQ ID NO: 2767890 - RNA, 19 nt, Artificial Sequence
  Description of Artificial Sequence: Synthetic oligonucleotide
uggauucugugaugaauua

SEQ ID NO: 2767891 - RNA, 19 nt, Artificial Sequence
  Description of Artificial Sequence: Synthetic oligonucleotide
gcucuuaccacaaaccuca

SEQ ID NO: 2767892 - RNA, 19 nt, Artificial Sequence
  Description of Artificial Sequence: Synthetic oligonucleotide
gaaggugggaauuccggcu

SEQ ID NO: 2767893 - RNA, 19 nt, Artificial Sequence
  Description of Artificial Sequence: Synthetic oligonucleotide
uucaggguauagccuuuac

SEQ ID NO: 2767894 - RNA, 19 nt, Artificial Sequence
  Description of Artificial Sequence: Synthetic oligonucleotide
cacguaggauuucucuccc

SEQ ID NO: 2767895 - RNA, 19 nt, Artificial Sequence
  Description of Artificial Sequence: Synthetic oligonucleotide
uccugaaggugagaggccu

SEQ ID NO: 2767896 - RNA, 19 nt, Artificial Sequence
  Description of Artificial Sequence: Synthetic oligonucleotide
gucucugaugguccugaag

SEQ ID NO: 2767897 - RNA, 19 nt, Artificial Sequence
  Description of Artificial Sequence: Synthetic oligonucleotide
ccaaccaaagcucuuacca

SEQ ID NO: 2767898 - RNA, 19 nt, Artificial Sequence
  Description of Artificial Sequence: Synthetic oligonucleotide
cacgucacauuuguagggc

SEQ ID NO: 2767899 - RNA, 19 nt, Artificial Sequence
  Description of Artificial Sequence: Synthetic oligonucleotide
gaugagacuguagcuguga

SEQ ID NO: 2767900 - RNA, 19 nt, Artificial Sequence
  Description of Artificial Sequence: Synthetic oligonucleotide
auagccuuuaccgcacaca

SEQ ID NO: 2767901 - RNA, 19 nt, Artificial Sequence
  Description of Artificial Sequence: Synthetic oligonucleotide
ucgcauuugaaaggcuucu

SEQ ID NO: 2767902 - RNA, 19 nt, Artificial Sequence
  Description of Artificial Sequence: Synthetic oligonucleotide
acguaggauuucucucccg

SEQ ID NO: 2767903 - RNA, 19 nt, Artificial Sequence
  Description of Artificial Sequence: Synthetic oligonucleotide
cuggugggccugaagacuc

SEQ ID NO: 2767904 - RNA, 19 nt, Artificial Sequence
  Description of Artificial Sequence: Synthetic oligonucleotide
gagaggccugacugaaggc

SEQ ID NO: 2767905 - RNA, 19 nt, Artificial Sequence
  Description of Artificial Sequence: Synthetic oligonucleotide
agauggaccugaagauugg

SEQ ID NO: 2767906 - RNA, 19 nt, Artificial Sequence
  Description of Artificial Sequence: Synthetic oligonucleotide
uguguaugcccuggugggc

SEQ ID NO: 2767907 - RNA, 19 nt, Artificial Sequence
  Description of Artificial Sequence: Synthetic oligonucleotide
ugaacccucugaugagacu

SEQ ID NO: 2767908 - RNA, 19 nt, Artificial Sequence
  Description of Artificial Sequence: Synthetic oligonucleotide
ggguauagccuuuaccgca

SEQ ID NO: 2767909 - RNA, 19 nt, Artificial Sequence
  Description of Artificial Sequence: Synthetic oligonucleotide
uccacgcacuuauaggguu

SEQ ID NO: 2767910 - RNA, 19 nt, Artificial Sequence
  Description of Artificial Sequence: Synthetic oligonucleotide
gcucuugccgcaaguaucg

SEQ ID NO: 2767911 - RNA, 19 nt, Artificial Sequence
  Description of Artificial Sequence: Synthetic oligonucleotide
ggauucugugaugaauuag

SEQ ID NO: 2767912 - RNA, 19 nt, Artificial Sequence
  Description of Artificial Sequence: Synthetic oligonucleotide
uggugggccugaagacucg

SEQ ID NO: 2767913 - RNA, 19 nt, Artificial Sequence
  Description of Artificial Sequence: Synthetic oligonucleotide
ugcuguggauucugugaug

SEQ ID NO: 2767914 - RNA, 19 nt, Artificial Sequence
  Description of Artificial Sequence: Synthetic oligonucleotide
ugugcacccugugauggga

SEQ ID NO: 2767915 - RNA, 19 nt, Artificial Sequence
  Description of Artificial Sequence: Synthetic oligonucleotide
gaggccugacugaaggcgc

SEQ ID NO: 2767916 - RNA, 19 nt, Artificial Sequence
  Description of Artificial Sequence: Synthetic oligonucleotide
acgucacauuuguagggcu

SEQ ID NO: 2767917 - RNA, 19 nt, Artificial Sequence
  Description of Artificial Sequence: Synthetic oligonucleotide
cucuggugaauguaaaggu

SEQ ID NO: 2767918 - RNA, 19 nt, Artificial Sequence
  Description of Artificial Sequence: Synthetic oligonucleotide
cguguguaugcccuggugg

SEQ ID NO: 2767919 - RNA, 19 nt, Artificial Sequence
  Description of Artificial Sequence: Synthetic oligonucleotide
auuugaccgccaaccaaag

SEQ ID NO: 2767920 - RNA, 19 nt, Artificial Sequence
  Description of Artificial Sequence: Synthetic oligonucleotide
gcgacuaaauucuuuccca

SEQ ID NO: 2767921 - RNA, 19 nt, Artificial Sequence
  Description of Artificial Sequence: Synthetic oligonucleotide
auucugugaugaauuagaa

SEQ ID NO: 2767922 - RNA, 19 nt, Artificial Sequence
  Description of Artificial Sequence: Synthetic oligonucleotide
ugaagacucgaagggcgac

SEQ ID NO: 2767923 - RNA, 19 nt, Artificial Sequence
  Description of Artificial Sequence: Synthetic oligonucleotide
guggagucucugauggucc

SEQ ID NO: 2767924 - RNA, 19 nt, Artificial Sequence
  Description of Artificial Sequence: Synthetic oligonucleotide
uggagucucugaugguccu

SEQ ID NO: 2767925 - RNA, 19 nt, Artificial Sequence
  Description of Artificial Sequence: Synthetic oligonucleotide
cugaaggcgcucccacacg

SEQ ID NO: 2767926 - RNA, 19 nt, Artificial Sequence
  Description of Artificial Sequence: Synthetic oligonucleotide
augagacuguagcugugaa

SEQ ID NO: 2767927 - RNA, 19 nt, Artificial Sequence
  Description of Artificial Sequence: Synthetic oligonucleotide
aagacucgaagggcgacua

SEQ ID NO: 2767928 - RNA, 19 nt, Artificial Sequence
  Description of Artificial Sequence: Synthetic oligonucleotide
guguaugcccuggugggcc

SEQ ID NO: 2767929 - RNA, 19 nt, Artificial Sequence
  Description of Artificial Sequence: Synthetic oligonucleotide
guggacucgcagauggacc

SEQ ID NO: 2767930 - RNA, 19 nt, Artificial Sequence
  Description of Artificial Sequence: Synthetic oligonucleotide
accgaaggugggaauuccg

SEQ ID NO: 2767931 - RNA, 19 nt, Artificial Sequence
  Description of Artificial Sequence: Synthetic oligonucleotide
ucucccgugugcacccugu

SEQ ID NO: 2767932 - RNA, 19 nt, Artificial Sequence
  Description of Artificial Sequence: Synthetic oligonucleotide
aggugagaggccugacuga

SEQ ID NO: 2767933 - RNA, 19 nt, Artificial Sequence
  Description of Artificial Sequence: Synthetic oligonucleotide
agcugugaagagcggcuga

SEQ ID NO: 2767934 - RNA, 19 nt, Artificial Sequence
  Description of Artificial Sequence: Synthetic oligonucleotide
cucgcagauggaccugaag

SEQ ID NO: 2767935 - RNA, 19 nt, Artificial Sequence
  Description of Artificial Sequence: Synthetic oligonucleotide
ccgaaggugggaauuccgg

SEQ ID NO: 2767936 - RNA, 19 nt, Artificial Sequence
  Description of Artificial Sequence: Synthetic oligonucleotide
uucuccccugugugaaccc

SEQ ID NO: 2767937 - RNA, 19 nt, Artificial Sequence
  Description of Artificial Sequence: Synthetic oligonucleotide
gaccgaaggugggaauucc

SEQ ID NO: 2767938 - RNA, 19 nt, Artificial Sequence
  Description of Artificial Sequence: Synthetic oligonucleotide
gaaggugagaggccugacu

SEQ ID NO: 2767939 - RNA, 19 nt, Artificial Sequence
  Description of Artificial Sequence: Synthetic oligonucleotide
aagguuggagcuacagaua

SEQ ID NO: 2767940 - RNA, 19 nt, Artificial Sequence
  Description of Artificial Sequence: Synthetic oligonucleotide
uagcugugaagagcggcug

SEQ ID NO: 2767941 - RNA, 19 nt, Artificial Sequence
  Description of Artificial Sequence: Synthetic oligonucleotide
cucucccguguguaugccc

SEQ ID NO: 2767942 - RNA, 19 nt, Artificial Sequence
  Description of Artificial Sequence: Synthetic oligonucleotide
uguaugcccuggugggccu

SEQ ID NO: 2767943 - RNA, 19 nt, Artificial Sequence
  Description of Artificial Sequence: Synthetic oligonucleotide
aauucaggguauagccuuu

SEQ ID NO: 2767944 - RNA, 19 nt, Artificial Sequence
  Description of Artificial Sequence: Synthetic oligonucleotide
cugaugagacuguagcugu

SEQ ID NO: 2767945 - RNA, 19 nt, Artificial Sequence
  Description of Artificial Sequence: Synthetic oligonucleotide
gugugcacccugugauggg

SEQ ID NO: 2767946 - RNA, 19 nt, Artificial Sequence
  Description of Artificial Sequence: Synthetic oligonucleotide
accugaagauuggaauuca

SEQ ID NO: 2767947 - RNA, 19 nt, Artificial Sequence
  Description of Artificial Sequence: Synthetic oligonucleotide
ugccgcaaguaucgcauuu

SEQ ID NO: 2767948 - RNA, 19 nt, Artificial Sequence
  Description of Artificial Sequence: Synthetic oligonucleotide
gagucucugaugguccuga

SEQ ID NO: 2767949 - RNA, 19 nt, Artificial Sequence
  Description of Artificial Sequence: Synthetic oligonucleotide
gauggaccugaagauugga

SEQ ID NO: 2767950 - RNA, 19 nt, Artificial Sequence
  Description of Artificial Sequence: Synthetic oligonucleotide
gacucgaagggcgacuaaa

SEQ ID NO: 2767951 - RNA, 19 nt, Artificial Sequence
  Description of Artificial Sequence: Synthetic oligonucleotide
uaccgcacacagugcacac

SEQ ID NO: 2767952 - RNA, 19 nt, Artificial Sequence
  Description of Artificial Sequence: Synthetic oligonucleotide
gauuucucucccgugugua

SEQ ID NO: 2767953 - RNA, 19 nt, Artificial Sequence
  Description of Artificial Sequence: Synthetic oligonucleotide
ccugaagauuggaauucag

SEQ ID NO: 2767954 - RNA, 19 nt, Artificial Sequence
  Description of Artificial Sequence: Synthetic oligonucleotide
gaugggaccgaagguggga

SEQ ID NO: 2767955 - RNA, 19 nt, Artificial Sequence
  Description of Artificial Sequence: Synthetic oligonucleotide
cucgcauuuguaggguuuc

SEQ ID NO: 2767956 - RNA, 19 nt, Artificial Sequence
  Description of Artificial Sequence: Synthetic oligonucleotide
gcuacagauaaagcucuug

SEQ ID NO: 2767957 - RNA, 19 nt, Artificial Sequence
  Description of Artificial Sequence: Synthetic oligonucleotide
cugaagacucgaagggcga

SEQ ID NO: 2767958 - RNA, 19 nt, Artificial Sequence
  Description of Artificial Sequence: Synthetic oligonucleotide
ucuccgguguggacucgca

SEQ ID NO: 2767959 - RNA, 19 nt, Artificial Sequence
  Description of Artificial Sequence: Synthetic oligonucleotide
cuugccgcaaguaucgcau

SEQ ID NO: 2767960 - RNA, 19 nt, Artificial Sequence
  Description of Artificial Sequence: Synthetic oligonucleotide
gggcgacuaaauucuuucc

SEQ ID NO: 2767961 - RNA, 19 nt, Artificial Sequence
  Description of Artificial Sequence: Synthetic oligonucleotide
gugaacccucugaugagac

SEQ ID NO: 2767962 - RNA, 19 nt, Artificial Sequence
  Description of Artificial Sequence: Synthetic oligonucleotide
accgcacacagugcacacg

SEQ ID NO: 2767963 - RNA, 19 nt, Artificial Sequence
  Description of Artificial Sequence: Synthetic oligonucleotide
aagggcgacuaaauucuuu

SEQ ID NO: 2767964 - RNA, 19 nt, Artificial Sequence
  Description of Artificial Sequence: Synthetic oligonucleotide
gguauagccuuuaccgcac

SEQ ID NO: 2767965 - RNA, 19 nt, Artificial Sequence
  Description of Artificial Sequence: Synthetic oligonucleotide
ggaauuccggcugaagcuc

SEQ ID NO: 2767966 - RNA, 19 nt, Artificial Sequence
  Description of Artificial Sequence: Synthetic oligonucleotide
gaagcucuugccgcaagua

SEQ ID NO: 2767967 - RNA, 19 nt, Artificial Sequence
  Description of Artificial Sequence: Synthetic oligonucleotide
cugugaagagcggcugaag

SEQ ID NO: 2767968 - RNA, 19 nt, Artificial Sequence
  Description of Artificial Sequence: Synthetic oligonucleotide
gggaauuccggcugaagcu

SEQ ID NO: 2767969 - RNA, 19 nt, Artificial Sequence
  Description of Artificial Sequence: Synthetic oligonucleotide
cucugaugagacuguagcu

SEQ ID NO: 2767970 - RNA, 19 nt, Artificial Sequence
  Description of Artificial Sequence: Synthetic oligonucleotide
ugaaggugagaggccugac

SEQ ID NO: 2767971 - RNA, 19 nt, Artificial Sequence
  Description of Artificial Sequence: Synthetic oligonucleotide
ugcccuggugggccugaag

SEQ ID NO: 2767972 - RNA, 19 nt, Artificial Sequence
  Description of Artificial Sequence: Synthetic oligonucleotide
gaaggcgcucccacacgcc

SEQ ID NO: 2767973 - RNA, 19 nt, Artificial Sequence
  Description of Artificial Sequence: Synthetic oligonucleotide
auggaccugaagauuggaa

SEQ ID NO: 2767974 - RNA, 19 nt, Artificial Sequence
  Description of Artificial Sequence: Synthetic oligonucleotide
cucuuaccacaaaccucac

SEQ ID NO: 2767975 - RNA, 19 nt, Artificial Sequence
  Description of Artificial Sequence: Synthetic oligonucleotide
acucgaagggcgacuaaau

SEQ ID NO: 2767976 - RNA, 19 nt, Artificial Sequence
  Description of Artificial Sequence: Synthetic oligonucleotide
ucucucccguguguaugcc

SEQ ID NO: 2767977 - RNA, 19 nt, Artificial Sequence
  Description of Artificial Sequence: Synthetic oligonucleotide
gugggaauuccggcugaag

SEQ ID NO: 2767978 - RNA, 19 nt, Artificial Sequence
  Description of Artificial Sequence: Synthetic oligonucleotide
auccacgcacuuauagggu

SEQ ID NO: 2767979 - RNA, 19 nt, Artificial Sequence
  Description of Artificial Sequence: Synthetic oligonucleotide
cgaaggugggaauuccggc

SEQ ID NO: 2767980 - RNA, 19 nt, Artificial Sequence
  Description of Artificial Sequence: Synthetic oligonucleotide
cgacuaaauucuuucccac

SEQ ID NO: 2767981 - RNA, 19 nt, Artificial Sequence
  Description of Artificial Sequence: Synthetic oligonucleotide
uccucgcauuuguaggguu

SEQ ID NO: 2767982 - RNA, 19 nt, Artificial Sequence
  Description of Artificial Sequence: Synthetic oligonucleotide
gacucgcagauggaccuga

SEQ ID NO: 2767983 - RNA, 19 nt, Artificial Sequence
  Description of Artificial Sequence: Synthetic oligonucleotide
cuccgguguggacucgcag

SEQ ID NO: 2767984 - RNA, 19 nt, Artificial Sequence
  Description of Artificial Sequence: Synthetic oligonucleotide
ucgcauuuguaggguuucu

SEQ ID NO: 2767985 - RNA, 19 nt, Artificial Sequence
  Description of Artificial Sequence: Synthetic oligonucleotide
guagcugugaagagcggcu

SEQ ID NO: 2767986 - RNA, 19 nt, Artificial Sequence
  Description of Artificial Sequence: Synthetic oligonucleotide
cucuugccacacuccucgc

SEQ ID NO: 2767987 - RNA, 19 nt, Artificial Sequence
  Description of Artificial Sequence: Synthetic oligonucleotide
gauuggaauucaggguaua

SEQ ID NO: 2767988 - RNA, 19 nt, Artificial Sequence
  Description of Artificial Sequence: Synthetic oligonucleotide
guauagccuuuaccgcaca

SEQ ID NO: 2767989 - RNA, 19 nt, Artificial Sequence
  Description of Artificial Sequence: Synthetic oligonucleotide
cacgcacuuauaggguuuc

SEQ ID NO: 2767990 - RNA, 19 nt, Artificial Sequence
  Description of Artificial Sequence: Synthetic oligonucleotide
cuaaauucuuucccacaau

SEQ ID NO: 2767991 - RNA, 19 nt, Artificial Sequence
  Description of Artificial Sequence: Synthetic oligonucleotide
guccugaaggugagaggcc

SEQ ID NO: 2767992 - RNA, 19 nt, Artificial Sequence
  Description of Artificial Sequence: Synthetic oligonucleotide
gagcggcugaagacuuucc

SEQ ID NO: 2767993 - RNA, 19 nt, Artificial Sequence
  Description of Artificial Sequence: Synthetic oligonucleotide
cugaaggugagaggccuga

SEQ ID NO: 2767994 - RNA, 19 nt, Artificial Sequence
  Description of Artificial Sequence: Synthetic oligonucleotide
gcccuggugggccugaaga

SEQ ID NO: 2767995 - RNA, 19 nt, Artificial Sequence
  Description of Artificial Sequence: Synthetic oligonucleotide
augggaccgaaggugggaa

SEQ ID NO: 2767996 - RNA, 19 nt, Artificial Sequence
  Description of Artificial Sequence: Synthetic oligonucleotide
gaagacucgaagggcgacu

SEQ ID NO: 2767997 - RNA, 19 nt, Artificial Sequence
  Description of Artificial Sequence: Synthetic oligonucleotide
ccuuuaccgcacacagugc

SEQ ID NO: 2767998 - RNA, 19 nt, Artificial Sequence
  Description of Artificial Sequence: Synthetic oligonucleotide
gugagaggccugacugaag

SEQ ID NO: 2767999 - RNA, 19 nt, Artificial Sequence
  Description of Artificial Sequence: Synthetic oligonucleotide
gccugaagacucgaagggc

SEQ ID NO: 2768000 - RNA, 19 nt, Artificial Sequence
  Description of Artificial Sequence: Synthetic oligonucleotide
gcacccugugaugggaccg

SEQ ID NO: 2768001 - RNA, 19 nt, Artificial Sequence
  Description of Artificial Sequence: Synthetic oligonucleotide
ugggaccgaaggugggaau

SEQ ID NO: 2768002 - RNA, 19 nt, Artificial Sequence
  Description of Artificial Sequence: Synthetic oligonucleotide
uaugcccuggugggccuga

SEQ ID NO: 2768003 - RNA, 19 nt, Artificial Sequence
  Description of Artificial Sequence: Synthetic oligonucleotide
ggugaauguaaagguugga

SEQ ID NO: 2768004 - RNA, 19 nt, Artificial Sequence
  Description of Artificial Sequence: Synthetic oligonucleotide
agucucugaugguccugaa

SEQ ID NO: 2768005 - RNA, 19 nt, Artificial Sequence
  Description of Artificial Sequence: Synthetic oligonucleotide
cucugaugguccugaaggu

SEQ ID NO: 2768006 - RNA, 19 nt, Artificial Sequence
  Description of Artificial Sequence: Synthetic oligonucleotide
gaugguccugaaggugaga

SEQ ID NO: 2768007 - RNA, 19 nt, Artificial Sequence
  Description of Artificial Sequence: Synthetic oligonucleotide
ggaccugaagauuggaauu

SEQ ID NO: 2768008 - RNA, 19 nt, Artificial Sequence
  Description of Artificial Sequence: Synthetic oligonucleotide
cccucugaugagacuguag

SEQ ID NO: 2768009 - RNA, 19 nt, Artificial Sequence
  Description of Artificial Sequence: Synthetic oligonucleotide
gaauuccggcugaagcucu

SEQ ID NO: 2768010 - RNA, 19 nt, Artificial Sequence
  Description of Artificial Sequence: Synthetic oligonucleotide
agacucgaagggcgacuaa

SEQ ID NO: 2768011 - RNA, 19 nt, Artificial Sequence
  Description of Artificial Sequence: Synthetic oligonucleotide
ggaauucaggguauagccu

SEQ ID NO: 2768012 - RNA, 19 nt, Artificial Sequence
  Description of Artificial Sequence: Synthetic oligonucleotide
auucaggguauagccuuua

SEQ ID NO: 2768013 - RNA, 19 nt, Artificial Sequence
  Description of Artificial Sequence: Synthetic oligonucleotide
ggcugaagacuuucccaca

SEQ ID NO: 2768014 - RNA, 19 nt, Artificial Sequence
  Description of Artificial Sequence: Synthetic oligonucleotide
aauuccggcugaagcucuu

SEQ ID NO: 2768015 - RNA, 19 nt, Artificial Sequence
  Description of Artificial Sequence: Synthetic oligonucleotide
gcacacguaggauuucucu

SEQ ID NO: 2768016 - RNA, 19 nt, Artificial Sequence
  Description of Artificial Sequence: Synthetic oligonucleotide
gcucccacacgccucacaa

SEQ ID NO: 2768017 - RNA, 19 nt, Artificial Sequence
  Description of Artificial Sequence: Synthetic oligonucleotide
cucuugccgcaaguaucgc

SEQ ID NO: 2768018 - RNA, 19 nt, Artificial Sequence
  Description of Artificial Sequence: Synthetic oligonucleotide
ggugagaggccugacugaa

SEQ ID NO: 2768019 - RNA, 19 nt, Artificial Sequence
  Description of Artificial Sequence: Synthetic oligonucleotide
uugccgcaaguaucgcauu

SEQ ID NO: 2768020 - RNA, 19 nt, Artificial Sequence
  Description of Artificial Sequence: Synthetic oligonucleotide
gccgcaaguaucgcauuug

SEQ ID NO: 2768021 - RNA, 19 nt, Artificial Sequence
  Description of Artificial Sequence: Synthetic oligonucleotide
cugcuguggauucugugau

SEQ ID NO: 2768022 - RNA, 19 nt, Artificial Sequence
  Description of Artificial Sequence: Synthetic oligonucleotide
cucccguguguaugcccug

SEQ ID NO: 2768023 - RNA, 19 nt, Artificial Sequence
  Description of Artificial Sequence: Synthetic oligonucleotide
gaagagcggcugaagacuu

SEQ ID NO: 2768024 - RNA, 19 nt, Artificial Sequence
  Description of Artificial Sequence: Synthetic oligonucleotide
agccuuuaccgcacacagu

SEQ ID NO: 2768025 - RNA, 19 nt, Artificial Sequence
  Description of Artificial Sequence: Synthetic oligonucleotide
cgaagggcgacuaaauucu

SEQ ID NO: 2768026 - RNA, 19 nt, Artificial Sequence
  Description of Artificial Sequence: Synthetic oligonucleotide
cugugaugggaccgaaggu

SEQ ID NO: 2768027 - RNA, 19 nt, Artificial Sequence
  Description of Artificial Sequence: Synthetic oligonucleotide
cagugcacacguaggauuu

SEQ ID NO: 2768028 - RNA, 19 nt, Artificial Sequence
  Description of Artificial Sequence: Synthetic oligonucleotide
aagagcggcugaagacuuu

SEQ ID NO: 2768029 - RNA, 19 nt, Artificial Sequence
  Description of Artificial Sequence: Synthetic oligonucleotide
ccugaaggugagaggccug

SEQ ID NO: 2768030 - RNA, 19 nt, Artificial Sequence
  Description of Artificial Sequence: Synthetic oligonucleotide
cccuggugggccugaagac

SEQ ID NO: 2768031 - RNA, 19 nt, Artificial Sequence
  Description of Artificial Sequence: Synthetic oligonucleotide
aggcgcucccacacgccuc

SEQ ID NO: 2768032 - RNA, 19 nt, Artificial Sequence
  Description of Artificial Sequence: Synthetic oligonucleotide
ggaccgaaggugggaauuc

SEQ ID NO: 2768033 - RNA, 19 nt, Artificial Sequence
  Description of Artificial Sequence: Synthetic oligonucleotide
ggagucucugaugguccug

SEQ ID NO: 2768034 - RNA, 19 nt, Artificial Sequence
  Description of Artificial Sequence: Synthetic oligonucleotide
cacaauccacgcacuuaua

SEQ ID NO: 2768035 - RNA, 19 nt, Artificial Sequence
  Description of Artificial Sequence: Synthetic oligonucleotide
ccacaaaccucacacuugu

SEQ ID NO: 2768036 - RNA, 19 nt, Artificial Sequence
  Description of Artificial Sequence: Synthetic oligonucleotide
gugcacccugugaugggac

SEQ ID NO: 2768037 - RNA, 19 nt, Artificial Sequence
  Description of Artificial Sequence: Synthetic oligonucleotide
ggauuucucucccgugugu

SEQ ID NO: 2768038 - RNA, 19 nt, Artificial Sequence
  Description of Artificial Sequence: Synthetic oligonucleotide
cucgaagggcgacuaaauu

SEQ ID NO: 2768039 - RNA, 19 nt, Artificial Sequence
  Description of Artificial Sequence: Synthetic oligonucleotide
acgcacuuauaggguuucu

SEQ ID NO: 2768040 - RNA, 19 nt, Artificial Sequence
  Description of Artificial Sequence: Synthetic oligonucleotide
aggccugacugaaggcgcu

SEQ ID NO: 2768041 - RNA, 19 nt, Artificial Sequence
  Description of Artificial Sequence: Synthetic oligonucleotide
cacacacgucacauuugua

SEQ ID NO: 2768042 - RNA, 19 nt, Artificial Sequence
  Description of Artificial Sequence: Synthetic oligonucleotide
gaccgccaaccaaagcucu

SEQ ID NO: 2768043 - RNA, 19 nt, Artificial Sequence
  Description of Artificial Sequence: Synthetic oligonucleotide
guaucgcauuugaaaggcu

SEQ ID NO: 2768044 - RNA, 19 nt, Artificial Sequence
  Description of Artificial Sequence: Synthetic oligonucleotide
agcuacagauaaagcucuu

SEQ ID NO: 2768045 - RNA, 19 nt, Artificial Sequence
  Description of Artificial Sequence: Synthetic oligonucleotide
gccugacugaaggcgcucc

SEQ ID NO: 2768046 - RNA, 19 nt, Artificial Sequence
  Description of Artificial Sequence: Synthetic oligonucleotide
guaugcccuggugggccug

SEQ ID NO: 2768047 - RNA, 19 nt, Artificial Sequence
  Description of Artificial Sequence: Synthetic oligonucleotide
cacaaaccucacacuugua

SEQ ID NO: 2768048 - RNA, 19 nt, Artificial Sequence
  Description of Artificial Sequence: Synthetic oligonucleotide
ggcgcucccacacgccuca

SEQ ID NO: 2768049 - RNA, 19 nt, Artificial Sequence
  Description of Artificial Sequence: Synthetic oligonucleotide
ccguguguaugcccuggug

SEQ ID NO: 2768050 - RNA, 19 nt, Artificial Sequence
  Description of Artificial Sequence: Synthetic oligonucleotide
cccugugaugggaccgaag

SEQ ID NO: 2768051 - RNA, 19 nt, Artificial Sequence
  Description of Artificial Sequence: Synthetic oligonucleotide
ccgcaaguaucgcauuuga

SEQ ID NO: 2768052 - RNA, 19 nt, Artificial Sequence
  Description of Artificial Sequence: Synthetic oligonucleotide
ccacaauccacgcacuuau

SEQ ID NO: 2768053 - RNA, 19 nt, Artificial Sequence
  Description of Artificial Sequence: Synthetic oligonucleotide
ccgugugcacccugugaug

SEQ ID NO: 2768054 - RNA, 19 nt, Artificial Sequence
  Description of Artificial Sequence: Synthetic oligonucleotide
gcugugaagagcggcugaa

SEQ ID NO: 2768055 - RNA, 19 nt, Artificial Sequence
  Description of Artificial Sequence: Synthetic oligonucleotide
ccacacacgucacauuugu

SEQ ID NO: 2768056 - RNA, 19 nt, Artificial Sequence
  Description of Artificial Sequence: Synthetic oligonucleotide
acccucugaugagacugua

SEQ ID NO: 2768057 - RNA, 19 nt, Artificial Sequence
  Description of Artificial Sequence: Synthetic oligonucleotide
guguggacucgcagaugga

SEQ ID NO: 2768058 - RNA, 19 nt, Artificial Sequence
  Description of Artificial Sequence: Synthetic oligonucleotide
cacagugcacacguaggau

SEQ ID NO: 2768059 - RNA, 19 nt, Artificial Sequence
  Description of Artificial Sequence: Synthetic oligonucleotide
cacccugugaugggaccga

SEQ ID NO: 2768060 - RNA, 19 nt, Artificial Sequence
  Description of Artificial Sequence: Synthetic oligonucleotide
gguuggagcuacagauaaa

SEQ ID NO: 2768061 - RNA, 19 nt, Artificial Sequence
  Description of Artificial Sequence: Synthetic oligonucleotide
ggacucgcagauggaccug

SEQ ID NO: 2768062 - RNA, 19 nt, Artificial Sequence
  Description of Artificial Sequence: Synthetic oligonucleotide
accgccaaccaaagcucuu

SEQ ID NO: 2768063 - RNA, 19 nt, Artificial Sequence
  Description of Artificial Sequence: Synthetic oligonucleotide
cgccaaccaaagcucuuac

SEQ ID NO: 2768064 - RNA, 19 nt, Artificial Sequence
  Description of Artificial Sequence: Synthetic oligonucleotide
acucgcagauggaccugaa

SEQ ID NO: 2768065 - RNA, 19 nt, Artificial Sequence
  Description of Artificial Sequence: Synthetic oligonucleotide
gaagggcgacuaaauucuu

SEQ ID NO: 2768066 - RNA, 19 nt, Artificial Sequence
  Description of Artificial Sequence: Synthetic oligonucleotide
cguaggauuucucucccgu

SEQ ID NO: 2768067 - RNA, 19 nt, Artificial Sequence
  Description of Artificial Sequence: Synthetic oligonucleotide
ggugggccugaagacucga

SEQ ID NO: 2768068 - RNA, 19 nt, Artificial Sequence
  Description of Artificial Sequence: Synthetic oligonucleotide
gugggccugaagacucgaa

SEQ ID NO: 2768069 - RNA, 19 nt, Artificial Sequence
  Description of Artificial Sequence: Synthetic oligonucleotide
gcagauggaccugaagauu

SEQ ID NO: 2768070 - RNA, 19 nt, Artificial Sequence
  Description of Artificial Sequence: Synthetic oligonucleotide
cuccucgcauuuguagggu

SEQ ID NO: 2768071 - RNA, 19 nt, Artificial Sequence
  Description of Artificial Sequence: Synthetic oligonucleotide
ccgcacacagugcacacgu

SEQ ID NO: 2768072 - RNA, 19 nt, Artificial Sequence
  Description of Artificial Sequence: Synthetic oligonucleotide
cgcaaguaucgcauuugaa

SEQ ID NO: 2768073 - RNA, 19 nt, Artificial Sequence
  Description of Artificial Sequence: Synthetic oligonucleotide
ggugggaauuccggcugaa

SEQ ID NO: 2768074 - RNA, 19 nt, Artificial Sequence
  Description of Artificial Sequence: Synthetic oligonucleotide
cgcagauggaccugaagau

SEQ ID NO: 2768075 - RNA, 19 nt, Artificial Sequence
  Description of Artificial Sequence: Synthetic oligonucleotide
ccaaagcucuuaccacaaa

SEQ ID NO: 2768076 - RNA, 19 nt, Artificial Sequence
  Description of Artificial Sequence: Synthetic oligonucleotide
cccgugugcacccugugau

SEQ ID NO: 2768077 - RNA, 19 nt, Artificial Sequence
  Description of Artificial Sequence: Synthetic oligonucleotide
gggaccgaaggugggaauu

SEQ ID NO: 2768078 - RNA, 19 nt, Artificial Sequence
  Description of Artificial Sequence: Synthetic oligonucleotide
ccucgcauuuguaggguuu

SEQ ID NO: 2768079 - RNA, 19 nt, Artificial Sequence
  Description of Artificial Sequence: Synthetic oligonucleotide
augcccuggugggccugaa

SEQ ID NO: 2768080 - RNA, 19 nt, Artificial Sequence
  Description of Artificial Sequence: Synthetic oligonucleotide
ccgccaaccaaagcucuua

SEQ ID NO: 2768081 - RNA, 19 nt, Artificial Sequence
  Description of Artificial Sequence: Synthetic oligonucleotide
ccacgcacuuauaggguuu

SEQ ID NO: 2768082 - RNA, 19 nt, Artificial Sequence
  Description of Artificial Sequence: Synthetic oligonucleotide
cgcucccacacgccucaca

SEQ ID NO: 2768083 - RNA, 19 nt, Artificial Sequence
  Description of Artificial Sequence: Synthetic oligonucleotide
cccguguguaugcccuggu

SEQ ID NO: 2768084 - RNA, 19 nt, Artificial Sequence
  Description of Artificial Sequence: Synthetic oligonucleotide
gcgcucccacacgccucac

SEQ ID NO: 2768085 - RNA, 19 nt, Artificial Sequence
  Description of Artificial Sequence: Synthetic oligonucleotide
aauggaaagacuuaaggug

SEQ ID NO: 2768086 - RNA, 19 nt, Artificial Sequence
  Description of Artificial Sequence: Synthetic oligonucleotide
aaaguaaaguuccuguggc

SEQ ID NO: 2768087 - RNA, 19 nt, Artificial Sequence
  Description of Artificial Sequence: Synthetic oligonucleotide
aauauauucaauauauuuc

SEQ ID NO: 2768088 - RNA, 19 nt, Artificial Sequence
  Description of Artificial Sequence: Synthetic oligonucleotide
aaggccguaaguuagugcc

SEQ ID NO: 2768089 - RNA, 19 nt, Artificial Sequence
  Description of Artificial Sequence: Synthetic oligonucleotide
acagaaaauaguuuucucc

SEQ ID NO: 2768090 - RNA, 19 nt, Artificial Sequence
  Description of Artificial Sequence: Synthetic oligonucleotide
agacucuucaaauagaaag

SEQ ID NO: 2768091 - RNA, 19 nt, Artificial Sequence
  Description of Artificial Sequence: Synthetic oligonucleotide
uaaguuagugccuaaagcc

SEQ ID NO: 2768092 - RNA, 19 nt, Artificial Sequence
  Description of Artificial Sequence: Synthetic oligonucleotide
auaguuuucuccuucaaag

SEQ ID NO: 2768093 - RNA, 19 nt, Artificial Sequence
  Description of Artificial Sequence: Synthetic oligonucleotide
auauauucaauauauuuca

SEQ ID NO: 2768094 - RNA, 19 nt, Artificial Sequence
  Description of Artificial Sequence: Synthetic oligonucleotide
gaagguacaugccucaugg

SEQ ID NO: 2768095 - RNA, 19 nt, Artificial Sequence
  Description of Artificial Sequence: Synthetic oligonucleotide
cuuguuagcaaauggaaag

SEQ ID NO: 2768096 - RNA, 19 nt, Artificial Sequence
  Description of Artificial Sequence: Synthetic oligonucleotide
auucaauauauuucaauag

SEQ ID NO: 2768097 - RNA, 19 nt, Artificial Sequence
  Description of Artificial Sequence: Synthetic oligonucleotide
uucaauauauuucaauagu

SEQ ID NO: 2768098 - RNA, 19 nt, Artificial Sequence
  Description of Artificial Sequence: Synthetic oligonucleotide
agugccuaaagccaguugg

SEQ ID NO: 2768099 - RNA, 19 nt, Artificial Sequence
  Description of Artificial Sequence: Synthetic oligonucleotide
caaauggaaagacuuaagg

SEQ ID NO: 2768100 - RNA, 19 nt, Artificial Sequence
  Description of Artificial Sequence: Synthetic oligonucleotide
uaacagaggaaauauauuc

SEQ ID NO: 2768101 - RNA, 19 nt, Artificial Sequence
  Description of Artificial Sequence: Synthetic oligonucleotide
ucaaugaagagacucuuca

SEQ ID NO: 2768102 - RNA, 19 nt, Artificial Sequence
  Description of Artificial Sequence: Synthetic oligonucleotide
aaauagaaagucuuccuaa

SEQ ID NO: 2768103 - RNA, 19 nt, Artificial Sequence
  Description of Artificial Sequence: Synthetic oligonucleotide
aaugaagagacucuucaaa

SEQ ID NO: 2768104 - RNA, 19 nt, Artificial Sequence
  Description of Artificial Sequence: Synthetic oligonucleotide
ucuuccuaaaguaaaguuc

SEQ ID NO: 2768105 - RNA, 19 nt, Artificial Sequence
  Description of Artificial Sequence: Synthetic oligonucleotide
ucuccuucaaaguaaggcc

SEQ ID NO: 2768106 - RNA, 19 nt, Artificial Sequence
  Description of Artificial Sequence: Synthetic oligonucleotide
ucuaaggacaugucuuugg

SEQ ID NO: 2768107 - RNA, 19 nt, Artificial Sequence
  Description of Artificial Sequence: Synthetic oligonucleotide
uuauugagaagagucuugg

SEQ ID NO: 2768108 - RNA, 19 nt, Artificial Sequence
  Description of Artificial Sequence: Synthetic oligonucleotide
uucaaauagaaagucuucc

SEQ ID NO: 2768109 - RNA, 19 nt, Artificial Sequence
  Description of Artificial Sequence: Synthetic oligonucleotide
uuuucuucuaaggacaugu

SEQ ID NO: 2768110 - RNA, 19 nt, Artificial Sequence
  Description of Artificial Sequence: Synthetic oligonucleotide
ucuuucuacagaaaauagu

SEQ ID NO: 2768111 - RNA, 19 nt, Artificial Sequence
  Description of Artificial Sequence: Synthetic oligonucleotide
ucuucaaauagaaagucuu

SEQ ID NO: 2768112 - RNA, 19 nt, Artificial Sequence
  Description of Artificial Sequence: Synthetic oligonucleotide
aaaauaguuuucuccuuca

SEQ ID NO: 2768113 - RNA, 19 nt, Artificial Sequence
  Description of Artificial Sequence: Synthetic oligonucleotide
uucaaaguaaggccguaag

SEQ ID NO: 2768114 - RNA, 19 nt, Artificial Sequence
  Description of Artificial Sequence: Synthetic oligonucleotide
ucaauauauuucaauaguu

SEQ ID NO: 2768115 - RNA, 19 nt, Artificial Sequence
  Description of Artificial Sequence: Synthetic oligonucleotide
cuuggcaucacuugacacg

SEQ ID NO: 2768116 - RNA, 19 nt, Artificial Sequence
  Description of Artificial Sequence: Synthetic oligonucleotide
guaaguuagugccuaaagc

SEQ ID NO: 2768117 - RNA, 19 nt, Artificial Sequence
  Description of Artificial Sequence: Synthetic oligonucleotide
aauaguuuucuccuucaaa

SEQ ID NO: 2768118 - RNA, 19 nt, Artificial Sequence
  Description of Artificial Sequence: Synthetic oligonucleotide
aauagaaagucuuccuaaa

SEQ ID NO: 2768119 - RNA, 19 nt, Artificial Sequence
  Description of Artificial Sequence: Synthetic oligonucleotide
uucuacagaaaauaguuuu

SEQ ID NO: 2768120 - RNA, 19 nt, Artificial Sequence
  Description of Artificial Sequence: Synthetic oligonucleotide
aaagacuuaaggugugccu

SEQ ID NO: 2768121 - RNA, 19 nt, Artificial Sequence
  Description of Artificial Sequence: Synthetic oligonucleotide
uucuccuucaaaguaaggc

SEQ ID NO: 2768122 - RNA, 19 nt, Artificial Sequence
  Description of Artificial Sequence: Synthetic oligonucleotide
ucaaauagaaagucuuccu

SEQ ID NO: 2768123 - RNA, 19 nt, Artificial Sequence
  Description of Artificial Sequence: Synthetic oligonucleotide
agaggaaauauauucaaua

SEQ ID NO: 2768124 - RNA, 19 nt, Artificial Sequence
  Description of Artificial Sequence: Synthetic oligonucleotide
aacuccuccuuauugagaa

SEQ ID NO: 2768125 - RNA, 19 nt, Artificial Sequence
  Description of Artificial Sequence: Synthetic oligonucleotide
aaagccaguuggaagguac

SEQ ID NO: 2768126 - RNA, 19 nt, Artificial Sequence
  Description of Artificial Sequence: Synthetic oligonucleotide
uuaaggugugccuugauuu

SEQ ID NO: 2768127 - RNA, 19 nt, Artificial Sequence
  Description of Artificial Sequence: Synthetic oligonucleotide
ugucuuuggcccuuguuag

SEQ ID NO: 2768128 - RNA, 19 nt, Artificial Sequence
  Description of Artificial Sequence: Synthetic oligonucleotide
ucuacagaaaauaguuuuc

SEQ ID NO: 2768129 - RNA, 19 nt, Artificial Sequence
  Description of Artificial Sequence: Synthetic oligonucleotide
aaaguaaggccguaaguua

SEQ ID NO: 2768130 - RNA, 19 nt, Artificial Sequence
  Description of Artificial Sequence: Synthetic oligonucleotide
cuccuucaaaguaaggccg

SEQ ID NO: 2768131 - RNA, 19 nt, Artificial Sequence
  Description of Artificial Sequence: Synthetic oligonucleotide
cuaaaguaaaguuccugug

SEQ ID NO: 2768132 - RNA, 19 nt, Artificial Sequence
  Description of Artificial Sequence: Synthetic oligonucleotide
uuggcaucacuugacacgg

SEQ ID NO: 2768133 - RNA, 19 nt, Artificial Sequence
  Description of Artificial Sequence: Synthetic oligonucleotide
acggugucaaugaagagac

SEQ ID NO: 2768134 - RNA, 19 nt, Artificial Sequence
  Description of Artificial Sequence: Synthetic oligonucleotide
ucaaaguaaggccguaagu

SEQ ID NO: 2768135 - RNA, 19 nt, Artificial Sequence
  Description of Artificial Sequence: Synthetic oligonucleotide
ccuaaagccaguuggaagg

SEQ ID NO: 2768136 - RNA, 19 nt, Artificial Sequence
  Description of Artificial Sequence: Synthetic oligonucleotide
aacagaggaaauauauuca

SEQ ID NO: 2768137 - RNA, 19 nt, Artificial Sequence
  Description of Artificial Sequence: Synthetic oligonucleotide
aagguacaugccucauggc

SEQ ID NO: 2768138 - RNA, 19 nt, Artificial Sequence
  Description of Artificial Sequence: Synthetic oligonucleotide
aguaacagaggaaauauau

SEQ ID NO: 2768139 - RNA, 19 nt, Artificial Sequence
  Description of Artificial Sequence: Synthetic oligonucleotide
ucgucagacaugcacgacc

SEQ ID NO: 2768140 - RNA, 19 nt, Artificial Sequence
  Description of Artificial Sequence: Synthetic oligonucleotide
acucuucaaauagaaaguc

SEQ ID NO: 2768141 - RNA, 19 nt, Artificial Sequence
  Description of Artificial Sequence: Synthetic oligonucleotide
uauauucaauauauuucaa

SEQ ID NO: 2768142 - RNA, 19 nt, Artificial Sequence
  Description of Artificial Sequence: Synthetic oligonucleotide
uccuuauugagaagagucu

SEQ ID NO: 2768143 - RNA, 19 nt, Artificial Sequence
  Description of Artificial Sequence: Synthetic oligonucleotide
aaguaaggccguaaguuag

SEQ ID NO: 2768144 - RNA, 19 nt, Artificial Sequence
  Description of Artificial Sequence: Synthetic oligonucleotide
ucugugucgucagacaugc

SEQ ID NO: 2768145 - RNA, 19 nt, Artificial Sequence
  Description of Artificial Sequence: Synthetic oligonucleotide
cuuauugagaagagucuug

SEQ ID NO: 2768146 - RNA, 19 nt, Artificial Sequence
  Description of Artificial Sequence: Synthetic oligonucleotide
aguuggaagguacaugccu

SEQ ID NO: 2768147 - RNA, 19 nt, Artificial Sequence
  Description of Artificial Sequence: Synthetic oligonucleotide
ucauggcuccguuagagcu

SEQ ID NO: 2768148 - RNA, 19 nt, Artificial Sequence
  Description of Artificial Sequence: Synthetic oligonucleotide
aaagucuuccuaaaguaaa

SEQ ID NO: 2768149 - RNA, 19 nt, Artificial Sequence
  Description of Artificial Sequence: Synthetic oligonucleotide
cuaaggacaugucuuuggc

SEQ ID NO: 2768150 - RNA, 19 nt, Artificial Sequence
  Description of Artificial Sequence: Synthetic oligonucleotide
aggaaauauauucaauaua

SEQ ID NO: 2768151 - RNA, 19 nt, Artificial Sequence
  Description of Artificial Sequence: Synthetic oligonucleotide
acagaggaaauauauucaa

SEQ ID NO: 2768152 - RNA, 19 nt, Artificial Sequence
  Description of Artificial Sequence: Synthetic oligonucleotide
ugccucauggcuccguuag

SEQ ID NO: 2768153 - RNA, 19 nt, Artificial Sequence
  Description of Artificial Sequence: Synthetic oligonucleotide
augaagagacucuucaaau

SEQ ID NO: 2768154 - RNA, 19 nt, Artificial Sequence
  Description of Artificial Sequence: Synthetic oligonucleotide
ugacacggugucaaugaag

SEQ ID NO: 2768155 - RNA, 19 nt, Artificial Sequence
  Description of Artificial Sequence: Synthetic oligonucleotide
agguacaugccucauggcu

SEQ ID NO: 2768156 - RNA, 19 nt, Artificial Sequence
  Description of Artificial Sequence: Synthetic oligonucleotide
cuucaaauagaaagucuuc

SEQ ID NO: 2768157 - RNA, 19 nt, Artificial Sequence
  Description of Artificial Sequence: Synthetic oligonucleotide
aaguuagugccuaaagcca

SEQ ID NO: 2768158 - RNA, 19 nt, Artificial Sequence
  Description of Artificial Sequence: Synthetic oligonucleotide
uaaggacaugucuuuggcc

SEQ ID NO: 2768159 - RNA, 19 nt, Artificial Sequence
  Description of Artificial Sequence: Synthetic oligonucleotide
aaguaaaguuccuguggca

SEQ ID NO: 2768160 - RNA, 19 nt, Artificial Sequence
  Description of Artificial Sequence: Synthetic oligonucleotide
aguuccuguggcaagcggc

SEQ ID NO: 2768161 - RNA, 19 nt, Artificial Sequence
  Description of Artificial Sequence: Synthetic oligonucleotide
uucccaguauucugugucg

SEQ ID NO: 2768162 - RNA, 19 nt, Artificial Sequence
  Description of Artificial Sequence: Synthetic oligonucleotide
uauucugugucgucagaca

SEQ ID NO: 2768163 - RNA, 19 nt, Artificial Sequence
  Description of Artificial Sequence: Synthetic oligonucleotide
aguuuucuccuucaaagua

SEQ ID NO: 2768164 - RNA, 19 nt, Artificial Sequence
  Description of Artificial Sequence: Synthetic oligonucleotide
aaauaguuuucuccuucaa

SEQ ID NO: 2768165 - RNA, 19 nt, Artificial Sequence
  Description of Artificial Sequence: Synthetic oligonucleotide
aagucuuccuaaaguaaag

SEQ ID NO: 2768166 - RNA, 19 nt, Artificial Sequence
  Description of Artificial Sequence: Synthetic oligonucleotide
agagucuuggcaucacuug

SEQ ID NO: 2768167 - RNA, 19 nt, Artificial Sequence
  Description of Artificial Sequence: Synthetic oligonucleotide
uaaaguuccuguggcaagc

SEQ ID NO: 2768168 - RNA, 19 nt, Artificial Sequence
  Description of Artificial Sequence: Synthetic oligonucleotide
uguuagcaaauggaaagac

SEQ ID NO: 2768169 - RNA, 19 nt, Artificial Sequence
  Description of Artificial Sequence: Synthetic oligonucleotide
uaguuuucuccuucaaagu

SEQ ID NO: 2768170 - RNA, 19 nt, Artificial Sequence
  Description of Artificial Sequence: Synthetic oligonucleotide
agagcuucccaguauucug

SEQ ID NO: 2768171 - RNA, 19 nt, Artificial Sequence
  Description of Artificial Sequence: Synthetic oligonucleotide
uuucuccuucaaaguaagg

SEQ ID NO: 2768172 - RNA, 19 nt, Artificial Sequence
  Description of Artificial Sequence: Synthetic oligonucleotide
aaguuccuguggcaagcgg

SEQ ID NO: 2768173 - RNA, 19 nt, Artificial Sequence
  Description of Artificial Sequence: Synthetic oligonucleotide
guaaaguuccuguggcaag

SEQ ID NO: 2768174 - RNA, 19 nt, Artificial Sequence
  Description of Artificial Sequence: Synthetic oligonucleotide
ccaguuggaagguacaugc

SEQ ID NO: 2768175 - RNA, 19 nt, Artificial Sequence
  Description of Artificial Sequence: Synthetic oligonucleotide
aaaguuccuguggcaagcg

SEQ ID NO: 2768176 - RNA, 19 nt, Artificial Sequence
  Description of Artificial Sequence: Synthetic oligonucleotide
auggaaagacuuaaggugu

SEQ ID NO: 2768177 - RNA, 19 nt, Artificial Sequence
  Description of Artificial Sequence: Synthetic oligonucleotide
uggaaagacuuaaggugug

SEQ ID NO: 2768178 - RNA, 19 nt, Artificial Sequence
  Description of Artificial Sequence: Synthetic oligonucleotide
gacacggugucaaugaaga

SEQ ID NO: 2768179 - RNA, 19 nt, Artificial Sequence
  Description of Artificial Sequence: Synthetic oligonucleotide
cuuucuacagaaaauaguu

SEQ ID NO: 2768180 - RNA, 19 nt, Artificial Sequence
  Description of Artificial Sequence: Synthetic oligonucleotide
augucuuuggcccuuguua

SEQ ID NO: 2768181 - RNA, 19 nt, Artificial Sequence
  Description of Artificial Sequence: Synthetic oligonucleotide
uccuccuuauugagaagag

SEQ ID NO: 2768182 - RNA, 19 nt, Artificial Sequence
  Description of Artificial Sequence: Synthetic oligonucleotide
uccuaaaguaaaguuccug

SEQ ID NO: 2768183 - RNA, 19 nt, Artificial Sequence
  Description of Artificial Sequence: Synthetic oligonucleotide
uuguuagcaaauggaaaga

SEQ ID NO: 2768184 - RNA, 19 nt, Artificial Sequence
  Description of Artificial Sequence: Synthetic oligonucleotide
cuucccaguauucuguguc

SEQ ID NO: 2768185 - RNA, 19 nt, Artificial Sequence
  Description of Artificial Sequence: Synthetic oligonucleotide
gaggaaauauauucaauau

SEQ ID NO: 2768186 - RNA, 19 nt, Artificial Sequence
  Description of Artificial Sequence: Synthetic oligonucleotide
aagacuuaaggugugccuu

SEQ ID NO: 2768187 - RNA, 19 nt, Artificial Sequence
  Description of Artificial Sequence: Synthetic oligonucleotide
uggucuuucuacagaaaau

SEQ ID NO: 2768188 - RNA, 19 nt, Artificial Sequence
  Description of Artificial Sequence: Synthetic oligonucleotide
gucuuucuacagaaaauag

SEQ ID NO: 2768189 - RNA, 19 nt, Artificial Sequence
  Description of Artificial Sequence: Synthetic oligonucleotide
cuccguuagagcuucccag

SEQ ID NO: 2768190 - RNA, 19 nt, Artificial Sequence
  Description of Artificial Sequence: Synthetic oligonucleotide
uucugugucgucagacaug

SEQ ID NO: 2768191 - RNA, 19 nt, Artificial Sequence
  Description of Artificial Sequence: Synthetic oligonucleotide
ggaaauauauucaauauau

SEQ ID NO: 2768192 - RNA, 19 nt, Artificial Sequence
  Description of Artificial Sequence: Synthetic oligonucleotide
ucuuuggcccuuguuagca

SEQ ID NO: 2768193 - RNA, 19 nt, Artificial Sequence
  Description of Artificial Sequence: Synthetic oligonucleotide
ucuuggcaucacuugacac

SEQ ID NO: 2768194 - RNA, 19 nt, Artificial Sequence
  Description of Artificial Sequence: Synthetic oligonucleotide
cuugacacggugucaauga

SEQ ID NO: 2768195 - RNA, 19 nt, Artificial Sequence
  Description of Artificial Sequence: Synthetic oligonucleotide
auucugugucgucagacau

SEQ ID NO: 2768196 - RNA, 19 nt, Artificial Sequence
  Description of Artificial Sequence: Synthetic oligonucleotide
aguuagugccuaaagccag

SEQ ID NO: 2768197 - RNA, 19 nt, Artificial Sequence
  Description of Artificial Sequence: Synthetic oligonucleotide
aguaaaguuccuguggcaa

SEQ ID NO: 2768198 - RNA, 19 nt, Artificial Sequence
  Description of Artificial Sequence: Synthetic oligonucleotide
agacaugcacgaccccacc

SEQ ID NO: 2768199 - RNA, 19 nt, Artificial Sequence
  Description of Artificial Sequence: Synthetic oligonucleotide
gugucgucagacaugcacg

SEQ ID NO: 2768200 - RNA, 19 nt, Artificial Sequence
  Description of Artificial Sequence: Synthetic oligonucleotide
uaaggccguaaguuagugc

SEQ ID NO: 2768201 - RNA, 19 nt, Artificial Sequence
  Description of Artificial Sequence: Synthetic oligonucleotide
ugucgucagacaugcacga

SEQ ID NO: 2768202 - RNA, 19 nt, Artificial Sequence
  Description of Artificial Sequence: Synthetic oligonucleotide
guacaugccucauggcucc

SEQ ID NO: 2768203 - RNA, 19 nt, Artificial Sequence
  Description of Artificial Sequence: Synthetic oligonucleotide
uuggaagguacaugccuca

SEQ ID NO: 2768204 - RNA, 19 nt, Artificial Sequence
  Description of Artificial Sequence: Synthetic oligonucleotide
uaaggugugccuugauuuc

SEQ ID NO: 2768205 - RNA, 19 nt, Artificial Sequence
  Description of Artificial Sequence: Synthetic oligonucleotide
agacuuaaggugugccuug

SEQ ID NO: 2768206 - RNA, 19 nt, Artificial Sequence
  Description of Artificial Sequence: Synthetic oligonucleotide
uccuucaaaguaaggccgu

SEQ ID NO: 2768207 - RNA, 19 nt, Artificial Sequence
  Description of Artificial Sequence: Synthetic oligonucleotide
agcaaauggaaagacuuaa

SEQ ID NO: 2768208 - RNA, 19 nt, Artificial Sequence
  Description of Artificial Sequence: Synthetic oligonucleotide
uccguuagagcuucccagu

SEQ ID NO: 2768209 - RNA, 19 nt, Artificial Sequence
  Description of Artificial Sequence: Synthetic oligonucleotide
uuagagcuucccaguauuc

SEQ ID NO: 2768210 - RNA, 19 nt, Artificial Sequence
  Description of Artificial Sequence: Synthetic oligonucleotide
gagucuuggcaucacuuga

SEQ ID NO: 2768211 - RNA, 19 nt, Artificial Sequence
  Description of Artificial Sequence: Synthetic oligonucleotide
gaaagucuuccuaaaguaa

SEQ ID NO: 2768212 - RNA, 19 nt, Artificial Sequence
  Description of Artificial Sequence: Synthetic oligonucleotide
agucuuggcaucacuugac

SEQ ID NO: 2768213 - RNA, 19 nt, Artificial Sequence
  Description of Artificial Sequence: Synthetic oligonucleotide
caucacuugacacgguguc

SEQ ID NO: 2768214 - RNA, 19 nt, Artificial Sequence
  Description of Artificial Sequence: Synthetic oligonucleotide
uagcaaauggaaagacuua

SEQ ID NO: 2768215 - RNA, 19 nt, Artificial Sequence
  Description of Artificial Sequence: Synthetic oligonucleotide
uuucuucuaaggacauguc

SEQ ID NO: 2768216 - RNA, 19 nt, Artificial Sequence
  Description of Artificial Sequence: Synthetic oligonucleotide
caguauucugugucgucag

SEQ ID NO: 2768217 - RNA, 19 nt, Artificial Sequence
  Description of Artificial Sequence: Synthetic oligonucleotide
uucuaaggacaugucuuug

SEQ ID NO: 2768218 - RNA, 19 nt, Artificial Sequence
  Description of Artificial Sequence: Synthetic oligonucleotide
ggugucaaugaagagacuc

SEQ ID NO: 2768219 - RNA, 19 nt, Artificial Sequence
  Description of Artificial Sequence: Synthetic oligonucleotide
uuccuaaaguaaaguuccu

SEQ ID NO: 2768220 - RNA, 19 nt, Artificial Sequence
  Description of Artificial Sequence: Synthetic oligonucleotide
ucacuugacacggugucaa

SEQ ID NO: 2768221 - RNA, 19 nt, Artificial Sequence
  Description of Artificial Sequence: Synthetic oligonucleotide
uagagcuucccaguauucu

SEQ ID NO: 2768222 - RNA, 19 nt, Artificial Sequence
  Description of Artificial Sequence: Synthetic oligonucleotide
agucuuccuaaaguaaagu

SEQ ID NO: 2768223 - RNA, 19 nt, Artificial Sequence
  Description of Artificial Sequence: Synthetic oligonucleotide
guauucugugucgucagac

SEQ ID NO: 2768224 - RNA, 19 nt, Artificial Sequence
  Description of Artificial Sequence: Synthetic oligonucleotide
cacgaccccaccuucuuug

SEQ ID NO: 2768225 - RNA, 19 nt, Artificial Sequence
  Description of Artificial Sequence: Synthetic oligonucleotide
gacucuucaaauagaaagu

SEQ ID NO: 2768226 - RNA, 19 nt, Artificial Sequence
  Description of Artificial Sequence: Synthetic oligonucleotide
cucauggcuccguuagagc

SEQ ID NO: 2768227 - RNA, 19 nt, Artificial Sequence
  Description of Artificial Sequence: Synthetic oligonucleotide
acuugacacggugucaaug

SEQ ID NO: 2768228 - RNA, 19 nt, Artificial Sequence
  Description of Artificial Sequence: Synthetic oligonucleotide
uagugccuaaagccaguug

SEQ ID NO: 2768229 - RNA, 19 nt, Artificial Sequence
  Description of Artificial Sequence: Synthetic oligonucleotide
aagagucuuggcaucacuu

SEQ ID NO: 2768230 - RNA, 19 nt, Artificial Sequence
  Description of Artificial Sequence: Synthetic oligonucleotide
uuuggcccuuguuagcaaa

SEQ ID NO: 2768231 - RNA, 19 nt, Artificial Sequence
  Description of Artificial Sequence: Synthetic oligonucleotide
cuggucuuucuacagaaaa

SEQ ID NO: 2768232 - RNA, 19 nt, Artificial Sequence
  Description of Artificial Sequence: Synthetic oligonucleotide
ugucaaugaagagacucuu

SEQ ID NO: 2768233 - RNA, 19 nt, Artificial Sequence
  Description of Artificial Sequence: Synthetic oligonucleotide
agaagagucuuggcaucac

SEQ ID NO: 2768234 - RNA, 19 nt, Artificial Sequence
  Description of Artificial Sequence: Synthetic oligonucleotide
guuggaagguacaugccuc

SEQ ID NO: 2768235 - RNA, 19 nt, Artificial Sequence
  Description of Artificial Sequence: Synthetic oligonucleotide
ggcccuuguuagcaaaugg

SEQ ID NO: 2768236 - RNA, 19 nt, Artificial Sequence
  Description of Artificial Sequence: Synthetic oligonucleotide
ucuggucuuucuacagaaa

SEQ ID NO: 2768237 - RNA, 19 nt, Artificial Sequence
  Description of Artificial Sequence: Synthetic oligonucleotide
uccuguggcaagcggcccc

SEQ ID NO: 2768238 - RNA, 19 nt, Artificial Sequence
  Description of Artificial Sequence: Synthetic oligonucleotide
aguauucugugucgucaga

SEQ ID NO: 2768239 - RNA, 19 nt, Artificial Sequence
  Description of Artificial Sequence: Synthetic oligonucleotide
aaacuccuccuuauugaga

SEQ ID NO: 2768240 - RNA, 19 nt, Artificial Sequence
  Description of Artificial Sequence: Synthetic oligonucleotide
cacggugucaaugaagaga

SEQ ID NO: 2768241 - RNA, 19 nt, Artificial Sequence
  Description of Artificial Sequence: Synthetic oligonucleotide
uugacacggugucaaugaa

SEQ ID NO: 2768242 - RNA, 19 nt, Artificial Sequence
  Description of Artificial Sequence: Synthetic oligonucleotide
caguuggaagguacaugcc

SEQ ID NO: 2768243 - RNA, 19 nt, Artificial Sequence
  Description of Artificial Sequence: Synthetic oligonucleotide
gccuaaagccaguuggaag

SEQ ID NO: 2768244 - RNA, 19 nt, Artificial Sequence
  Description of Artificial Sequence: Synthetic oligonucleotide
acacggugucaaugaagag

SEQ ID NO: 2768245 - RNA, 19 nt, Artificial Sequence
  Description of Artificial Sequence: Synthetic oligonucleotide
agcuucccaguauucugug

SEQ ID NO: 2768246 - RNA, 19 nt, Artificial Sequence
  Description of Artificial Sequence: Synthetic oligonucleotide
accccaccuucuuugauaa

SEQ ID NO: 2768247 - RNA, 19 nt, Artificial Sequence
  Description of Artificial Sequence: Synthetic oligonucleotide
cucuggucuuucuacagaa

SEQ ID NO: 2768248 - RNA, 19 nt, Artificial Sequence
  Description of Artificial Sequence: Synthetic oligonucleotide
aggacaugucuuuggcccu

SEQ ID NO: 2768249 - RNA, 19 nt, Artificial Sequence
  Description of Artificial Sequence: Synthetic oligonucleotide
ggcaucacuugacacggug

SEQ ID NO: 2768250 - RNA, 19 nt, Artificial Sequence
  Description of Artificial Sequence: Synthetic oligonucleotide
gucuuuggcccuuguuagc

SEQ ID NO: 2768251 - RNA, 19 nt, Artificial Sequence
  Description of Artificial Sequence: Synthetic oligonucleotide
gagaagagucuuggcauca

SEQ ID NO: 2768252 - RNA, 19 nt, Artificial Sequence
  Description of Artificial Sequence: Synthetic oligonucleotide
acaugcacgaccccaccuu

SEQ ID NO: 2768253 - RNA, 19 nt, Artificial Sequence
  Description of Artificial Sequence: Synthetic oligonucleotide
cucuucaaauagaaagucu

SEQ ID NO: 2768254 - RNA, 19 nt, Artificial Sequence
  Description of Artificial Sequence: Synthetic oligonucleotide
gcaaauggaaagacuuaag

SEQ ID NO: 2768255 - RNA, 19 nt, Artificial Sequence
  Description of Artificial Sequence: Synthetic oligonucleotide
cguaaguuagugccuaaag

SEQ ID NO: 2768256 - RNA, 19 nt, Artificial Sequence
  Description of Artificial Sequence: Synthetic oligonucleotide
ggucuuucuacagaaaaua

SEQ ID NO: 2768257 - RNA, 19 nt, Artificial Sequence
  Description of Artificial Sequence: Synthetic oligonucleotide
cuccuccuuauugagaaga

SEQ ID NO: 2768258 - RNA, 19 nt, Artificial Sequence
  Description of Artificial Sequence: Synthetic oligonucleotide
caaaguaaggccguaaguu

SEQ ID NO: 2768259 - RNA, 19 nt, Artificial Sequence
  Description of Artificial Sequence: Synthetic oligonucleotide
acuccuccuuauugagaag

SEQ ID NO: 2768260 - RNA, 19 nt, Artificial Sequence
  Description of Artificial Sequence: Synthetic oligonucleotide
uuggcccuuguuagcaaau

SEQ ID NO: 2768261 - RNA, 19 nt, Artificial Sequence
  Description of Artificial Sequence: Synthetic oligonucleotide
gguacaugccucauggcuc

SEQ ID NO: 2768262 - RNA, 19 nt, Artificial Sequence
  Description of Artificial Sequence: Synthetic oligonucleotide
ggaagguacaugccucaug

SEQ ID NO: 2768263 - RNA, 19 nt, Artificial Sequence
  Description of Artificial Sequence: Synthetic oligonucleotide
guuagcaaauggaaagacu

SEQ ID NO: 2768264 - RNA, 19 nt, Artificial Sequence
  Description of Artificial Sequence: Synthetic oligonucleotide
ugccuaaagccaguuggaa

SEQ ID NO: 2768265 - RNA, 19 nt, Artificial Sequence
  Description of Artificial Sequence: Synthetic oligonucleotide
gaaauauauucaauauauu

SEQ ID NO: 2768266 - RNA, 19 nt, Artificial Sequence
  Description of Artificial Sequence: Synthetic oligonucleotide
gucuuggcaucacuugaca

SEQ ID NO: 2768267 - RNA, 19 nt, Artificial Sequence
  Description of Artificial Sequence: Synthetic oligonucleotide
aagccaguuggaagguaca

SEQ ID NO: 2768268 - RNA, 19 nt, Artificial Sequence
  Description of Artificial Sequence: Synthetic oligonucleotide
gucaaugaagagacucuuc

SEQ ID NO: 2768269 - RNA, 19 nt, Artificial Sequence
  Description of Artificial Sequence: Synthetic oligonucleotide
caugcacgaccccaccuuc

SEQ ID NO: 2768270 - RNA, 19 nt, Artificial Sequence
  Description of Artificial Sequence: Synthetic oligonucleotide
gaccccaccuucuuugaua

SEQ ID NO: 2768271 - RNA, 19 nt, Artificial Sequence
  Description of Artificial Sequence: Synthetic oligonucleotide
aucacuugacacgguguca

SEQ ID NO: 2768272 - RNA, 19 nt, Artificial Sequence
  Description of Artificial Sequence: Synthetic oligonucleotide
ccuaaaguaaaguuccugu

SEQ ID NO: 2768273 - RNA, 19 nt, Artificial Sequence
  Description of Artificial Sequence: Synthetic oligonucleotide
gucuuccuaaaguaaaguu

SEQ ID NO: 2768274 - RNA, 19 nt, Artificial Sequence
  Description of Artificial Sequence: Synthetic oligonucleotide
uggcccuuguuagcaaaug

SEQ ID NO: 2768275 - RNA, 19 nt, Artificial Sequence
  Description of Artificial Sequence: Synthetic oligonucleotide
guuagagcuucccaguauu

SEQ ID NO: 2768276 - RNA, 19 nt, Artificial Sequence
  Description of Artificial Sequence: Synthetic oligonucleotide
gaagagucuuggcaucacu

SEQ ID NO: 2768277 - RNA, 19 nt, Artificial Sequence
  Description of Artificial Sequence: Synthetic oligonucleotide
ucccaguauucugugucgu

SEQ ID NO: 2768278 - RNA, 19 nt, Artificial Sequence
  Description of Artificial Sequence: Synthetic oligonucleotide
ggaaagacuuaaggugugc

SEQ ID NO: 2768279 - RNA, 19 nt, Artificial Sequence
  Description of Artificial Sequence: Synthetic oligonucleotide
cgucagacaugcacgaccc

SEQ ID NO: 2768280 - RNA, 19 nt, Artificial Sequence
  Description of Artificial Sequence: Synthetic oligonucleotide
uuagugccuaaagccaguu

SEQ ID NO: 2768281 - RNA, 19 nt, Artificial Sequence
  Description of Artificial Sequence: Synthetic oligonucleotide
ugcacgaccccaccuucuu

SEQ ID NO: 2768282 - RNA, 19 nt, Artificial Sequence
  Description of Artificial Sequence: Synthetic oligonucleotide
acuuaaggugugccuugau

SEQ ID NO: 2768283 - RNA, 19 nt, Artificial Sequence
  Description of Artificial Sequence: Synthetic oligonucleotide
gacuuaaggugugccuuga

SEQ ID NO: 2768284 - RNA, 19 nt, Artificial Sequence
  Description of Artificial Sequence: Synthetic oligonucleotide
ccuuguuagcaaauggaaa

SEQ ID NO: 2768285 - RNA, 19 nt, Artificial Sequence
  Description of Artificial Sequence: Synthetic oligonucleotide
uaaagccaguuggaaggua

SEQ ID NO: 2768286 - RNA, 19 nt, Artificial Sequence
  Description of Artificial Sequence: Synthetic oligonucleotide
gacaugcacgaccccaccu

SEQ ID NO: 2768287 - RNA, 19 nt, Artificial Sequence
  Description of Artificial Sequence: Synthetic oligonucleotide
caguaacagaggaaauaua

SEQ ID NO: 2768288 - RNA, 19 nt, Artificial Sequence
  Description of Artificial Sequence: Synthetic oligonucleotide
gucagacaugcacgacccc

SEQ ID NO: 2768289 - RNA, 19 nt, Artificial Sequence
  Description of Artificial Sequence: Synthetic oligonucleotide
guaacagaggaaauauauu

SEQ ID NO: 2768290 - RNA, 19 nt, Artificial Sequence
  Description of Artificial Sequence: Synthetic oligonucleotide
cuuaaggugugccuugauu

SEQ ID NO: 2768291 - RNA, 19 nt, Artificial Sequence
  Description of Artificial Sequence: Synthetic oligonucleotide
ccucauggcuccguuagag

SEQ ID NO: 2768292 - RNA, 19 nt, Artificial Sequence
  Description of Artificial Sequence: Synthetic oligonucleotide
cuucuaaggacaugucuuu

SEQ ID NO: 2768293 - RNA, 19 nt, Artificial Sequence
  Description of Artificial Sequence: Synthetic oligonucleotide
gacaugucuuuggcccuug

SEQ ID NO: 2768294 - RNA, 19 nt, Artificial Sequence
  Description of Artificial Sequence: Synthetic oligonucleotide
acgaccccaccuucuuuga

SEQ ID NO: 2768295 - RNA, 19 nt, Artificial Sequence
  Description of Artificial Sequence: Synthetic oligonucleotide
uuccuguggcaagcggccc

SEQ ID NO: 2768296 - RNA, 19 nt, Artificial Sequence
  Description of Artificial Sequence: Synthetic oligonucleotide
cuucaaaguaaggccguaa

SEQ ID NO: 2768297 - RNA, 19 nt, Artificial Sequence
  Description of Artificial Sequence: Synthetic oligonucleotide
uacaugccucauggcuccg

SEQ ID NO: 2768298 - RNA, 19 nt, Artificial Sequence
  Description of Artificial Sequence: Synthetic oligonucleotide
acaugucuuuggcccuugu

SEQ ID NO: 2768299 - RNA, 19 nt, Artificial Sequence
  Description of Artificial Sequence: Synthetic oligonucleotide
cagaggaaauauauucaau

SEQ ID NO: 2768300 - RNA, 19 nt, Artificial Sequence
  Description of Artificial Sequence: Synthetic oligonucleotide
uggaagguacaugccucau

SEQ ID NO: 2768301 - RNA, 19 nt, Artificial Sequence
  Description of Artificial Sequence: Synthetic oligonucleotide
gugccuaaagccaguugga

SEQ ID NO: 2768302 - RNA, 19 nt, Artificial Sequence
  Description of Artificial Sequence: Synthetic oligonucleotide
cccuuguuagcaaauggaa

SEQ ID NO: 2768303 - RNA, 19 nt, Artificial Sequence
  Description of Artificial Sequence: Synthetic oligonucleotide
agccaguuggaagguacau

SEQ ID NO: 2768304 - RNA, 19 nt, Artificial Sequence
  Description of Artificial Sequence: Synthetic oligonucleotide
gagcuucccaguauucugu

SEQ ID NO: 2768305 - RNA, 19 nt, Artificial Sequence
  Description of Artificial Sequence: Synthetic oligonucleotide
gccaguuggaagguacaug

SEQ ID NO: 2768306 - RNA, 19 nt, Artificial Sequence
  Description of Artificial Sequence: Synthetic oligonucleotide
gcccuuguuagcaaaugga

SEQ ID NO: 2768307 - RNA, 19 nt, Artificial Sequence
  Description of Artificial Sequence: Synthetic oligonucleotide
uggcaucacuugacacggu

SEQ ID NO: 2768308 - RNA, 19 nt, Artificial Sequence
  Description of Artificial Sequence: Synthetic oligonucleotide
ccaguauucugugucguca

SEQ ID NO: 2768309 - RNA, 19 nt, Artificial Sequence
  Description of Artificial Sequence: Synthetic oligonucleotide
gcuccguuagagcuuccca

SEQ ID NO: 2768310 - RNA, 19 nt, Artificial Sequence
  Description of Artificial Sequence: Synthetic oligonucleotide
cuuuggcccuuguuagcaa

SEQ ID NO: 2768311 - RNA, 19 nt, Artificial Sequence
  Description of Artificial Sequence: Synthetic oligonucleotide
gucgucagacaugcacgac

SEQ ID NO: 2768312 - RNA, 19 nt, Artificial Sequence
  Description of Artificial Sequence: Synthetic oligonucleotide
guuagugccuaaagccagu

SEQ ID NO: 2768313 - RNA, 19 nt, Artificial Sequence
  Description of Artificial Sequence: Synthetic oligonucleotide
augccucauggcuccguua

SEQ ID NO: 2768314 - RNA, 19 nt, Artificial Sequence
  Description of Artificial Sequence: Synthetic oligonucleotide
aggccguaaguuagugccu

SEQ ID NO: 2768315 - RNA, 19 nt, Artificial Sequence
  Description of Artificial Sequence: Synthetic oligonucleotide
acaugccucauggcuccgu

SEQ ID NO: 2768316 - RNA, 19 nt, Artificial Sequence
  Description of Artificial Sequence: Synthetic oligonucleotide
cuaaagccaguuggaaggu

SEQ ID NO: 2768317 - RNA, 19 nt, Artificial Sequence
  Description of Artificial Sequence: Synthetic oligonucleotide
augcacgaccccaccuucu

SEQ ID NO: 2768318 - RNA, 19 nt, Artificial Sequence
  Description of Artificial Sequence: Synthetic oligonucleotide
ggcuccguuagagcuuccc

SEQ ID NO: 2768319 - RNA, 19 nt, Artificial Sequence
  Description of Artificial Sequence: Synthetic oligonucleotide
cccaguauucugugucguc

SEQ ID NO: 2768320 - RNA, 19 nt, Artificial Sequence
  Description of Artificial Sequence: Synthetic oligonucleotide
ccaguaacagaggaaauau

SEQ ID NO: 2768321 - RNA, 19 nt, Artificial Sequence
  Description of Artificial Sequence: Synthetic oligonucleotide
uggcuccguuagagcuucc

SEQ ID NO: 2768322 - RNA, 19 nt, Artificial Sequence
  Description of Artificial Sequence: Synthetic oligonucleotide
ccucuggucuuucuacaga

SEQ ID NO: 2768323 - RNA, 19 nt, Artificial Sequence
  Description of Artificial Sequence: Synthetic oligonucleotide
cccaguaacagaggaaaua

SEQ ID NO: 2768324 - RNA, 19 nt, Artificial Sequence
  Description of Artificial Sequence: Synthetic oligonucleotide
cauggcuccguuagagcuu

SEQ ID NO: 2768325 - RNA, 19 nt, Artificial Sequence
  Description of Artificial Sequence: Synthetic oligonucleotide
caugucuuuggcccuuguu

SEQ ID NO: 2768326 - RNA, 19 nt, Artificial Sequence
  Description of Artificial Sequence: Synthetic oligonucleotide
gcaucacuugacacggugu

SEQ ID NO: 2768327 - RNA, 19 nt, Artificial Sequence
  Description of Artificial Sequence: Synthetic oligonucleotide
ggccguaaguuagugccua

SEQ ID NO: 2768328 - RNA, 19 nt, Artificial Sequence
  Description of Artificial Sequence: Synthetic oligonucleotide
ccuuauugagaagagucuu

SEQ ID NO: 2768329 - RNA, 19 nt, Artificial Sequence
  Description of Artificial Sequence: Synthetic oligonucleotide
gccguaaguuagugccuaa

SEQ ID NO: 2768330 - RNA, 19 nt, Artificial Sequence
  Description of Artificial Sequence: Synthetic oligonucleotide
gccucauggcuccguuaga

SEQ ID NO: 2768331 - RNA, 19 nt, Artificial Sequence
  Description of Artificial Sequence: Synthetic oligonucleotide
cacuugacacggugucaau

SEQ ID NO: 2768332 - RNA, 19 nt, Artificial Sequence
  Description of Artificial Sequence: Synthetic oligonucleotide
ccguuagagcuucccagua

SEQ ID NO: 2768333 - RNA, 19 nt, Artificial Sequence
  Description of Artificial Sequence: Synthetic oligonucleotide
ccguaaguuagugccuaaa

SEQ ID NO: 2768334 - RNA, 19 nt, Artificial Sequence
  Description of Artificial Sequence: Synthetic oligonucleotide
ccuccuuauugagaagagu

SEQ ID NO: 2768335 - RNA, 19 nt, Artificial Sequence
  Description of Artificial Sequence: Synthetic oligonucleotide
ccuucaaaguaaggccgua

SEQ ID NO: 2768336 - RNA, 19 nt, Artificial Sequence
  Description of Artificial Sequence: Synthetic oligonucleotide
cguuagagcuucccaguau

SEQ ID NO: 2768337 - RNA, 19 nt, Artificial Sequence
  Description of Artificial Sequence: Synthetic oligonucleotide
ggacaugucuuuggcccuu

SEQ ID NO: 2768338 - RNA, 19 nt, Artificial Sequence
  Description of Artificial Sequence: Synthetic oligonucleotide
ccccaguaacagaggaaau

SEQ ID NO: 2768339 - RNA, 19 nt, Artificial Sequence
  Description of Artificial Sequence: Synthetic oligonucleotide
gcacgaccccaccuucuuu

SEQ ID NO: 2768340 - RNA, 19 nt, Artificial Sequence
  Description of Artificial Sequence: Synthetic oligonucleotide
ccccaccuucuuugauaaa

SEQ ID NO: 2768341 - RNA, 19 nt, Artificial Sequence
  Description of Artificial Sequence: Synthetic oligonucleotide
cggugucaaugaagagacu

SEQ ID NO: 2768342 - RNA, 19 nt, Artificial Sequence
  Description of Artificial Sequence: Synthetic oligonucleotide
cgaccccaccuucuuugau

SEQ ID NO: 2768343 - RNA, 19 nt, Artificial Sequence
  Description of Artificial Sequence: Synthetic oligonucleotide
uguacauuaauagaaaugc

SEQ ID NO: 2768344 - RNA, 19 nt, Artificial Sequence
  Description of Artificial Sequence: Synthetic oligonucleotide
aguguuuuaacucaaaaca

SEQ ID NO: 2768345 - RNA, 19 nt, Artificial Sequence
  Description of Artificial Sequence: Synthetic oligonucleotide
aaguguuuuaacucaaaac

SEQ ID NO: 2768346 - RNA, 19 nt, Artificial Sequence
  Description of Artificial Sequence: Synthetic oligonucleotide
accauuuacagacaaauuc

SEQ ID NO: 2768347 - RNA, 19 nt, Artificial Sequence
  Description of Artificial Sequence: Synthetic oligonucleotide
auauauuccaaguagacau

SEQ ID NO: 2768348 - RNA, 19 nt, Artificial Sequence
  Description of Artificial Sequence: Synthetic oligonucleotide
auucguaacugucuaauac

SEQ ID NO: 2768349 - RNA, 19 nt, Artificial Sequence
  Description of Artificial Sequence: Synthetic oligonucleotide
aaugccaaguucuuuagca

SEQ ID NO: 2768350 - RNA, 19 nt, Artificial Sequence
  Description of Artificial Sequence: Synthetic oligonucleotide
agacaaauuccccaauucc

SEQ ID NO: 2768351 - RNA, 19 nt, Artificial Sequence
  Description of Artificial Sequence: Synthetic oligonucleotide
aauagaaaugccaaguucu

SEQ ID NO: 2768352 - RNA, 19 nt, Artificial Sequence
  Description of Artificial Sequence: Synthetic oligonucleotide
auuccaaguagacauuggc

SEQ ID NO: 2768353 - RNA, 19 nt, Artificial Sequence
  Description of Artificial Sequence: Synthetic oligonucleotide
uauacaaugugucuggcuc

SEQ ID NO: 2768354 - RNA, 19 nt, Artificial Sequence
  Description of Artificial Sequence: Synthetic oligonucleotide
ucagacgugguuaucgugg

SEQ ID NO: 2768355 - RNA, 19 nt, Artificial Sequence
  Description of Artificial Sequence: Synthetic oligonucleotide
acucaaaacaucuguagag

SEQ ID NO: 2768356 - RNA, 19 nt, Artificial Sequence
  Description of Artificial Sequence: Synthetic oligonucleotide
guuuauacaaugugucugg

SEQ ID NO: 2768357 - RNA, 19 nt, Artificial Sequence
  Description of Artificial Sequence: Synthetic oligonucleotide
ugugcaagcgugacaaugg

SEQ ID NO: 2768358 - RNA, 19 nt, Artificial Sequence
  Description of Artificial Sequence: Synthetic oligonucleotide
aguuucgcuggauauauuc

SEQ ID NO: 2768359 - RNA, 19 nt, Artificial Sequence
  Description of Artificial Sequence: Synthetic oligonucleotide
uccaaguagacauuggcug

SEQ ID NO: 2768360 - RNA, 19 nt, Artificial Sequence
  Description of Artificial Sequence: Synthetic oligonucleotide
aaaugccaaguucuuuagc

SEQ ID NO: 2768361 - RNA, 19 nt, Artificial Sequence
  Description of Artificial Sequence: Synthetic oligonucleotide
aagagugaaccgcucaauc

SEQ ID NO: 2768362 - RNA, 19 nt, Artificial Sequence
  Description of Artificial Sequence: Synthetic oligonucleotide
uaauacagccuugucaugg

SEQ ID NO: 2768363 - RNA, 19 nt, Artificial Sequence
  Description of Artificial Sequence: Synthetic oligonucleotide
uuuguuacuuccauggcaa

SEQ ID NO: 2768364 - RNA, 19 nt, Artificial Sequence
  Description of Artificial Sequence: Synthetic oligonucleotide
auuaauagaaaugccaagu

SEQ ID NO: 2768365 - RNA, 19 nt, Artificial Sequence
  Description of Artificial Sequence: Synthetic oligonucleotide
ugcucuuagaaccauuuac

SEQ ID NO: 2768366 - RNA, 19 nt, Artificial Sequence
  Description of Artificial Sequence: Synthetic oligonucleotide
cuggauauauuccaaguag

SEQ ID NO: 2768367 - RNA, 19 nt, Artificial Sequence
  Description of Artificial Sequence: Synthetic oligonucleotide
caaaauauucguaacuguc

SEQ ID NO: 2768368 - RNA, 19 nt, Artificial Sequence
  Description of Artificial Sequence: Synthetic oligonucleotide
aauacagccuugucauggg

SEQ ID NO: 2768369 - RNA, 19 nt, Artificial Sequence
  Description of Artificial Sequence: Synthetic oligonucleotide
aaaauauucguaacugucu

SEQ ID NO: 2768370 - RNA, 19 nt, Artificial Sequence
  Description of Artificial Sequence: Synthetic oligonucleotide
ucauacugaacccugugcu

SEQ ID NO: 2768371 - RNA, 19 nt, Artificial Sequence
  Description of Artificial Sequence: Synthetic oligonucleotide
uaauagaaaugccaaguuc

SEQ ID NO: 2768372 - RNA, 19 nt, Artificial Sequence
  Description of Artificial Sequence: Synthetic oligonucleotide
ucguaacugucuaauacag

SEQ ID NO: 2768373 - RNA, 19 nt, Artificial Sequence
  Description of Artificial Sequence: Synthetic oligonucleotide
ugaaaaugugcacugacuu

SEQ ID NO: 2768374 - RNA, 19 nt, Artificial Sequence
  Description of Artificial Sequence: Synthetic oligonucleotide
uuuggaacaucgaugugca

SEQ ID NO: 2768375 - RNA, 19 nt, Artificial Sequence
  Description of Artificial Sequence: Synthetic oligonucleotide
cauuuacagacaaauuccc

SEQ ID NO: 2768376 - RNA, 19 nt, Artificial Sequence
  Description of Artificial Sequence: Synthetic oligonucleotide
cuuucacuaagauggacag

SEQ ID NO: 2768377 - RNA, 19 nt, Artificial Sequence
  Description of Artificial Sequence: Synthetic oligonucleotide
ugugcauccggucaagugu

SEQ ID NO: 2768378 - RNA, 19 nt, Artificial Sequence
  Description of Artificial Sequence: Synthetic oligonucleotide
aaauauucguaacugucua

SEQ ID NO: 2768379 - RNA, 19 nt, Artificial Sequence
  Description of Artificial Sequence: Synthetic oligonucleotide
cuuuggaacaucgaugugc

SEQ ID NO: 2768380 - RNA, 19 nt, Artificial Sequence
  Description of Artificial Sequence: Synthetic oligonucleotide
ucaucagacgugguuaucg

SEQ ID NO: 2768381 - RNA, 19 nt, Artificial Sequence
  Description of Artificial Sequence: Synthetic oligonucleotide
uggauauauuccaaguaga

SEQ ID NO: 2768382 - RNA, 19 nt, Artificial Sequence
  Description of Artificial Sequence: Synthetic oligonucleotide
guaucugugucuuuguuac

SEQ ID NO: 2768383 - RNA, 19 nt, Artificial Sequence
  Description of Artificial Sequence: Synthetic oligonucleotide
uucguaacugucuaauaca

SEQ ID NO: 2768384 - RNA, 19 nt, Artificial Sequence
  Description of Artificial Sequence: Synthetic oligonucleotide
gacuugagaagagugaacc

SEQ ID NO: 2768385 - RNA, 19 nt, Artificial Sequence
  Description of Artificial Sequence: Synthetic oligonucleotide
gugagugcuucccacaucg

SEQ ID NO: 2768386 - RNA, 19 nt, Artificial Sequence
  Description of Artificial Sequence: Synthetic oligonucleotide
uuuagcagcgagcacggca

SEQ ID NO: 2768387 - RNA, 19 nt, Artificial Sequence
  Description of Artificial Sequence: Synthetic oligonucleotide
ucuuuagcagcgagcacgg

SEQ ID NO: 2768388 - RNA, 19 nt, Artificial Sequence
  Description of Artificial Sequence: Synthetic oligonucleotide
uggaacaucgaugugcaag

SEQ ID NO: 2768389 - RNA, 19 nt, Artificial Sequence
  Description of Artificial Sequence: Synthetic oligonucleotide
uuaauagaaaugccaaguu

SEQ ID NO: 2768390 - RNA, 19 nt, Artificial Sequence
  Description of Artificial Sequence: Synthetic oligonucleotide
caaauccuuuggaacaucg

SEQ ID NO: 2768391 - RNA, 19 nt, Artificial Sequence
  Description of Artificial Sequence: Synthetic oligonucleotide
cugugcugcucuuagaacc

SEQ ID NO: 2768392 - RNA, 19 nt, Artificial Sequence
  Description of Artificial Sequence: Synthetic oligonucleotide
guuaucgugggcuugguca

SEQ ID NO: 2768393 - RNA, 19 nt, Artificial Sequence
  Description of Artificial Sequence: Synthetic oligonucleotide
uucuugaaaaugugcacug

SEQ ID NO: 2768394 - RNA, 19 nt, Artificial Sequence
  Description of Artificial Sequence: Synthetic oligonucleotide
auuuacagacaaauucccc

SEQ ID NO: 2768395 - RNA, 19 nt, Artificial Sequence
  Description of Artificial Sequence: Synthetic oligonucleotide
aaccgcucaaucuuccuug

SEQ ID NO: 2768396 - RNA, 19 nt, Artificial Sequence
  Description of Artificial Sequence: Synthetic oligonucleotide
cuugagaagagugaaccgc

SEQ ID NO: 2768397 - RNA, 19 nt, Artificial Sequence
  Description of Artificial Sequence: Synthetic oligonucleotide
uucggguaaguuucgcugg

SEQ ID NO: 2768398 - RNA, 19 nt, Artificial Sequence
  Description of Artificial Sequence: Synthetic oligonucleotide
aaugugucuggcucaucag

SEQ ID NO: 2768399 - RNA, 19 nt, Artificial Sequence
  Description of Artificial Sequence: Synthetic oligonucleotide
acggcaaaauauucguaac

SEQ ID NO: 2768400 - RNA, 19 nt, Artificial Sequence
  Description of Artificial Sequence: Synthetic oligonucleotide
uggacaggcguuuauacaa

SEQ ID NO: 2768401 - RNA, 19 nt, Artificial Sequence
  Description of Artificial Sequence: Synthetic oligonucleotide
uuucgcuggauauauucca

SEQ ID NO: 2768402 - RNA, 19 nt, Artificial Sequence
  Description of Artificial Sequence: Synthetic oligonucleotide
aacugucuaauacagccuu

SEQ ID NO: 2768403 - RNA, 19 nt, Artificial Sequence
  Description of Artificial Sequence: Synthetic oligonucleotide
uggucaaauccuuuggaac

SEQ ID NO: 2768404 - RNA, 19 nt, Artificial Sequence
  Description of Artificial Sequence: Synthetic oligonucleotide
cuugaaaaugugcacugac

SEQ ID NO: 2768405 - RNA, 19 nt, Artificial Sequence
  Description of Artificial Sequence: Synthetic oligonucleotide
ccauuuacagacaaauucc

SEQ ID NO: 2768406 - RNA, 19 nt, Artificial Sequence
  Description of Artificial Sequence: Synthetic oligonucleotide
aguucuuuagcagcgagca

SEQ ID NO: 2768407 - RNA, 19 nt, Artificial Sequence
  Description of Artificial Sequence: Synthetic oligonucleotide
aauauucguaacugucuaa

SEQ ID NO: 2768408 - RNA, 19 nt, Artificial Sequence
  Description of Artificial Sequence: Synthetic oligonucleotide
gauggacaggcguuuauac

SEQ ID NO: 2768409 - RNA, 19 nt, Artificial Sequence
  Description of Artificial Sequence: Synthetic oligonucleotide
ugugucuggcucaucagac

SEQ ID NO: 2768410 - RNA, 19 nt, Artificial Sequence
  Description of Artificial Sequence: Synthetic oligonucleotide
gauauauuccaaguagaca

SEQ ID NO: 2768411 - RNA, 19 nt, Artificial Sequence
  Description of Artificial Sequence: Synthetic oligonucleotide
guuacuuccauggcaaccc

SEQ ID NO: 2768412 - RNA, 19 nt, Artificial Sequence
  Description of Artificial Sequence: Synthetic oligonucleotide
gucuaauacagccuuguca

SEQ ID NO: 2768413 - RNA, 19 nt, Artificial Sequence
  Description of Artificial Sequence: Synthetic oligonucleotide
gacaauggagcccaccuca

SEQ ID NO: 2768414 - RNA, 19 nt, Artificial Sequence
  Description of Artificial Sequence: Synthetic oligonucleotide
agagugaaccgcucaaucu

SEQ ID NO: 2768415 - RNA, 19 nt, Artificial Sequence
  Description of Artificial Sequence: Synthetic oligonucleotide
aacaucgaugugcaagcgu

SEQ ID NO: 2768416 - RNA, 19 nt, Artificial Sequence
  Description of Artificial Sequence: Synthetic oligonucleotide
augugcacugacuugagaa

SEQ ID NO: 2768417 - RNA, 19 nt, Artificial Sequence
  Description of Artificial Sequence: Synthetic oligonucleotide
uuagcagcgagcacggcaa

SEQ ID NO: 2768418 - RNA, 19 nt, Artificial Sequence
  Description of Artificial Sequence: Synthetic oligonucleotide
ugucuggcucaucagacgu

SEQ ID NO: 2768419 - RNA, 19 nt, Artificial Sequence
  Description of Artificial Sequence: Synthetic oligonucleotide
aagcgugacaauggagccc

SEQ ID NO: 2768420 - RNA, 19 nt, Artificial Sequence
  Description of Artificial Sequence: Synthetic oligonucleotide
uuauacaaugugucuggcu

SEQ ID NO: 2768421 - RNA, 19 nt, Artificial Sequence
  Description of Artificial Sequence: Synthetic oligonucleotide
uguaucugugucuuuguua

SEQ ID NO: 2768422 - RNA, 19 nt, Artificial Sequence
  Description of Artificial Sequence: Synthetic oligonucleotide
agcacggcaaaauauucgu

SEQ ID NO: 2768423 - RNA, 19 nt, Artificial Sequence
  Description of Artificial Sequence: Synthetic oligonucleotide
ugcacugacuugagaagag

SEQ ID NO: 2768424 - RNA, 19 nt, Artificial Sequence
  Description of Artificial Sequence: Synthetic oligonucleotide
cuugauguguucuggcaac

SEQ ID NO: 2768425 - RNA, 19 nt, Artificial Sequence
  Description of Artificial Sequence: Synthetic oligonucleotide
cuucggguaaguuucgcug

SEQ ID NO: 2768426 - RNA, 19 nt, Artificial Sequence
  Description of Artificial Sequence: Synthetic oligonucleotide
ucucauacugaacccugug

SEQ ID NO: 2768427 - RNA, 19 nt, Artificial Sequence
  Description of Artificial Sequence: Synthetic oligonucleotide
ucuggcaacugcuguaucu

SEQ ID NO: 2768428 - RNA, 19 nt, Artificial Sequence
  Description of Artificial Sequence: Synthetic oligonucleotide
uuggcugugcauccgguca

SEQ ID NO: 2768429 - RNA, 19 nt, Artificial Sequence
  Description of Artificial Sequence: Synthetic oligonucleotide
caggcuaugacuugcuuuc

SEQ ID NO: 2768430 - RNA, 19 nt, Artificial Sequence
  Description of Artificial Sequence: Synthetic oligonucleotide
uguuacuuccauggcaacc

SEQ ID NO: 2768431 - RNA, 19 nt, Artificial Sequence
  Description of Artificial Sequence: Synthetic oligonucleotide
aacaucuguagaguguccu

SEQ ID NO: 2768432 - RNA, 19 nt, Artificial Sequence
  Description of Artificial Sequence: Synthetic oligonucleotide
ucacuaagauggacaggcg

SEQ ID NO: 2768433 - RNA, 19 nt, Artificial Sequence
  Description of Artificial Sequence: Synthetic oligonucleotide
uaacugucuaauacagccu

SEQ ID NO: 2768434 - RNA, 19 nt, Artificial Sequence
  Description of Artificial Sequence: Synthetic oligonucleotide
auacugaacccugugcuuc

SEQ ID NO: 2768435 - RNA, 19 nt, Artificial Sequence
  Description of Artificial Sequence: Synthetic oligonucleotide
uuggucaaauccuuuggaa

SEQ ID NO: 2768436 - RNA, 19 nt, Artificial Sequence
  Description of Artificial Sequence: Synthetic oligonucleotide
cucauacugaacccugugc

SEQ ID NO: 2768437 - RNA, 19 nt, Artificial Sequence
  Description of Artificial Sequence: Synthetic oligonucleotide
ugugcugcucuuagaacca

SEQ ID NO: 2768438 - RNA, 19 nt, Artificial Sequence
  Description of Artificial Sequence: Synthetic oligonucleotide
uagacauuggcugugcauc

SEQ ID NO: 2768439 - RNA, 19 nt, Artificial Sequence
  Description of Artificial Sequence: Synthetic oligonucleotide
ucccacaucggcuucuuga

SEQ ID NO: 2768440 - RNA, 19 nt, Artificial Sequence
  Description of Artificial Sequence: Synthetic oligonucleotide
uccuuggcggcucauguac

SEQ ID NO: 2768441 - RNA, 19 nt, Artificial Sequence
  Description of Artificial Sequence: Synthetic oligonucleotide
caagcgugacaauggagcc

SEQ ID NO: 2768442 - RNA, 19 nt, Artificial Sequence
  Description of Artificial Sequence: Synthetic oligonucleotide
ggaacaucgaugugcaagc

SEQ ID NO: 2768443 - RNA, 19 nt, Artificial Sequence
  Description of Artificial Sequence: Synthetic oligonucleotide
ugucuuuguuacuuccaug

SEQ ID NO: 2768444 - RNA, 19 nt, Artificial Sequence
  Description of Artificial Sequence: Synthetic oligonucleotide
cuuuguuacuuccauggca

SEQ ID NO: 2768445 - RNA, 19 nt, Artificial Sequence
  Description of Artificial Sequence: Synthetic oligonucleotide
ugcaagcgugacaauggag

SEQ ID NO: 2768446 - RNA, 19 nt, Artificial Sequence
  Description of Artificial Sequence: Synthetic oligonucleotide
gagcacggcaaaauauucg

SEQ ID NO: 2768447 - RNA, 19 nt, Artificial Sequence
  Description of Artificial Sequence: Synthetic oligonucleotide
acaucuguagaguguccuc

SEQ ID NO: 2768448 - RNA, 19 nt, Artificial Sequence
  Description of Artificial Sequence: Synthetic oligonucleotide
uuagaaccauuuacagaca

SEQ ID NO: 2768449 - RNA, 19 nt, Artificial Sequence
  Description of Artificial Sequence: Synthetic oligonucleotide
uuuauacaaugugucuggc

SEQ ID NO: 2768450 - RNA, 19 nt, Artificial Sequence
  Description of Artificial Sequence: Synthetic oligonucleotide
augccaaguucuuuagcag

SEQ ID NO: 2768451 - RNA, 19 nt, Artificial Sequence
  Description of Artificial Sequence: Synthetic oligonucleotide
ugcuguaucugugucuuug

SEQ ID NO: 2768452 - RNA, 19 nt, Artificial Sequence
  Description of Artificial Sequence: Synthetic oligonucleotide
cacugacuugagaagagug

SEQ ID NO: 2768453 - RNA, 19 nt, Artificial Sequence
  Description of Artificial Sequence: Synthetic oligonucleotide
ggcaaaauauucguaacug

SEQ ID NO: 2768454 - RNA, 19 nt, Artificial Sequence
  Description of Artificial Sequence: Synthetic oligonucleotide
augggcuuucacuaagaug

SEQ ID NO: 2768455 - RNA, 19 nt, Artificial Sequence
  Description of Artificial Sequence: Synthetic oligonucleotide
acaucgaugugcaagcgug

SEQ ID NO: 2768456 - RNA, 19 nt, Artificial Sequence
  Description of Artificial Sequence: Synthetic oligonucleotide
aacccugugcuucuugaaa

SEQ ID NO: 2768457 - RNA, 19 nt, Artificial Sequence
  Description of Artificial Sequence: Synthetic oligonucleotide
acaaauuccccaauuccug

SEQ ID NO: 2768458 - RNA, 19 nt, Artificial Sequence
  Description of Artificial Sequence: Synthetic oligonucleotide
uuucacuaagauggacagg

SEQ ID NO: 2768459 - RNA, 19 nt, Artificial Sequence
  Description of Artificial Sequence: Synthetic oligonucleotide
guuuuaacucaaaacaucu

SEQ ID NO: 2768460 - RNA, 19 nt, Artificial Sequence
  Description of Artificial Sequence: Synthetic oligonucleotide
ggucaaauccuuuggaaca

SEQ ID NO: 2768461 - RNA, 19 nt, Artificial Sequence
  Description of Artificial Sequence: Synthetic oligonucleotide
caggcguuuauacaaugug

SEQ ID NO: 2768462 - RNA, 19 nt, Artificial Sequence
  Description of Artificial Sequence: Synthetic oligonucleotide
ugaacccugugcuucuuga

SEQ ID NO: 2768463 - RNA, 19 nt, Artificial Sequence
  Description of Artificial Sequence: Synthetic oligonucleotide
ugacuugagaagagugaac

SEQ ID NO: 2768464 - RNA, 19 nt, Artificial Sequence
  Description of Artificial Sequence: Synthetic oligonucleotide
auacaaugugucuggcuca

SEQ ID NO: 2768465 - RNA, 19 nt, Artificial Sequence
  Description of Artificial Sequence: Synthetic oligonucleotide
ugggcugugcugcucuuag

SEQ ID NO: 2768466 - RNA, 19 nt, Artificial Sequence
  Description of Artificial Sequence: Synthetic oligonucleotide
aaccccuucggguaaguuu

SEQ ID NO: 2768467 - RNA, 19 nt, Artificial Sequence
  Description of Artificial Sequence: Synthetic oligonucleotide
uguagaguguccucaucuc

SEQ ID NO: 2768468 - RNA, 19 nt, Artificial Sequence
  Description of Artificial Sequence: Synthetic oligonucleotide
caucucauacugaacccug

SEQ ID NO: 2768469 - RNA, 19 nt, Artificial Sequence
  Description of Artificial Sequence: Synthetic oligonucleotide
auauucguaacugucuaau

SEQ ID NO: 2768470 - RNA, 19 nt, Artificial Sequence
  Description of Artificial Sequence: Synthetic oligonucleotide
gcucaaucuuccuuggcgg

SEQ ID NO: 2768471 - RNA, 19 nt, Artificial Sequence
  Description of Artificial Sequence: Synthetic oligonucleotide
ucaucucauacugaacccu

SEQ ID NO: 2768472 - RNA, 19 nt, Artificial Sequence
  Description of Artificial Sequence: Synthetic oligonucleotide
caaguucuuuagcagcgag

SEQ ID NO: 2768473 - RNA, 19 nt, Artificial Sequence
  Description of Artificial Sequence: Synthetic oligonucleotide
gacaggcguuuauacaaug

SEQ ID NO: 2768474 - RNA, 19 nt, Artificial Sequence
  Description of Artificial Sequence: Synthetic oligonucleotide
uggagcccaccucacacug

SEQ ID NO: 2768475 - RNA, 19 nt, Artificial Sequence
  Description of Artificial Sequence: Synthetic oligonucleotide
accccuucggguaaguuuc

SEQ ID NO: 2768476 - RNA, 19 nt, Artificial Sequence
  Description of Artificial Sequence: Synthetic oligonucleotide
cucaaucuuccuuggcggc

SEQ ID NO: 2768477 - RNA, 19 nt, Artificial Sequence
  Description of Artificial Sequence: Synthetic oligonucleotide
ucaugggcuuucacuaaga

SEQ ID NO: 2768478 - RNA, 19 nt, Artificial Sequence
  Description of Artificial Sequence: Synthetic oligonucleotide
uuaucgugggcuuggucaa

SEQ ID NO: 2768479 - RNA, 19 nt, Artificial Sequence
  Description of Artificial Sequence: Synthetic oligonucleotide
guuucgcuggauauauucc

SEQ ID NO: 2768480 - RNA, 19 nt, Artificial Sequence
  Description of Artificial Sequence: Synthetic oligonucleotide
uauucguaacugucuaaua

SEQ ID NO: 2768481 - RNA, 19 nt, Artificial Sequence
  Description of Artificial Sequence: Synthetic oligonucleotide
gcaagcgugacaauggagc

SEQ ID NO: 2768482 - RNA, 19 nt, Artificial Sequence
  Description of Artificial Sequence: Synthetic oligonucleotide
caaugugucuggcucauca

SEQ ID NO: 2768483 - RNA, 19 nt, Artificial Sequence
  Description of Artificial Sequence: Synthetic oligonucleotide
aucgaugugcaagcgugac

SEQ ID NO: 2768484 - RNA, 19 nt, Artificial Sequence
  Description of Artificial Sequence: Synthetic oligonucleotide
uucgcuggauauauuccaa

SEQ ID NO: 2768485 - RNA, 19 nt, Artificial Sequence
  Description of Artificial Sequence: Synthetic oligonucleotide
augugucuggcucaucaga

SEQ ID NO: 2768486 - RNA, 19 nt, Artificial Sequence
  Description of Artificial Sequence: Synthetic oligonucleotide
uuacuuccauggcaacccc

SEQ ID NO: 2768487 - RNA, 19 nt, Artificial Sequence
  Description of Artificial Sequence: Synthetic oligonucleotide
auggacaggcguuuauaca

SEQ ID NO: 2768488 - RNA, 19 nt, Artificial Sequence
  Description of Artificial Sequence: Synthetic oligonucleotide
augugcaagcgugacaaug

SEQ ID NO: 2768489 - RNA, 19 nt, Artificial Sequence
  Description of Artificial Sequence: Synthetic oligonucleotide
gcuuggucaaauccuuugg

SEQ ID NO: 2768490 - RNA, 19 nt, Artificial Sequence
  Description of Artificial Sequence: Synthetic oligonucleotide
ucuugaaaaugugcacuga

SEQ ID NO: 2768491 - RNA, 19 nt, Artificial Sequence
  Description of Artificial Sequence: Synthetic oligonucleotide
agugagugcuucccacauc

SEQ ID NO: 2768492 - RNA, 19 nt, Artificial Sequence
  Description of Artificial Sequence: Synthetic oligonucleotide
cacggcaaaauauucguaa

SEQ ID NO: 2768493 - RNA, 19 nt, Artificial Sequence
  Description of Artificial Sequence: Synthetic oligonucleotide
gacaaauuccccaauuccu

SEQ ID NO: 2768494 - RNA, 19 nt, Artificial Sequence
  Description of Artificial Sequence: Synthetic oligonucleotide
ggucaaguguuuuaacuca

SEQ ID NO: 2768495 - RNA, 19 nt, Artificial Sequence
  Description of Artificial Sequence: Synthetic oligonucleotide
uguucuggcaacugcugua

SEQ ID NO: 2768496 - RNA, 19 nt, Artificial Sequence
  Description of Artificial Sequence: Synthetic oligonucleotide
ugucuaauacagccuuguc

SEQ ID NO: 2768497 - RNA, 19 nt, Artificial Sequence
  Description of Artificial Sequence: Synthetic oligonucleotide
cucagugagugcuucccac

SEQ ID NO: 2768498 - RNA, 19 nt, Artificial Sequence
  Description of Artificial Sequence: Synthetic oligonucleotide
aaauccuuuggaacaucga

SEQ ID NO: 2768499 - RNA, 19 nt, Artificial Sequence
  Description of Artificial Sequence: Synthetic oligonucleotide
agacgugguuaucgugggc

SEQ ID NO: 2768500 - RNA, 19 nt, Artificial Sequence
  Description of Artificial Sequence: Synthetic oligonucleotide
agugaaccgcucaaucuuc

SEQ ID NO: 2768501 - RNA, 19 nt, Artificial Sequence
  Description of Artificial Sequence: Synthetic oligonucleotide
aucagacgugguuaucgug

SEQ ID NO: 2768502 - RNA, 19 nt, Artificial Sequence
  Description of Artificial Sequence: Synthetic oligonucleotide
ugagugcuucccacaucgg

SEQ ID NO: 2768503 - RNA, 19 nt, Artificial Sequence
  Description of Artificial Sequence: Synthetic oligonucleotide
cagacgugguuaucguggg

SEQ ID NO: 2768504 - RNA, 19 nt, Artificial Sequence
  Description of Artificial Sequence: Synthetic oligonucleotide
gaacaucgaugugcaagcg

SEQ ID NO: 2768505 - RNA, 19 nt, Artificial Sequence
  Description of Artificial Sequence: Synthetic oligonucleotide
ucgaugugcaagcgugaca

SEQ ID NO: 2768506 - RNA, 19 nt, Artificial Sequence
  Description of Artificial Sequence: Synthetic oligonucleotide
guagaguguccucaucuca

SEQ ID NO: 2768507 - RNA, 19 nt, Artificial Sequence
  Description of Artificial Sequence: Synthetic oligonucleotide
ugagaagagugaaccgcuc

SEQ ID NO: 2768508 - RNA, 19 nt, Artificial Sequence
  Description of Artificial Sequence: Synthetic oligonucleotide
cucacacuggugcugagca

SEQ ID NO: 2768509 - RNA, 19 nt, Artificial Sequence
  Description of Artificial Sequence: Synthetic oligonucleotide
accgcucaaucuuccuugg

SEQ ID NO: 2768510 - RNA, 19 nt, Artificial Sequence
  Description of Artificial Sequence: Synthetic oligonucleotide
caaguguuuuaacucaaaa

SEQ ID NO: 2768511 - RNA, 19 nt, Artificial Sequence
  Description of Artificial Sequence: Synthetic oligonucleotide
uccucagugagugcuuccc

SEQ ID NO: 2768512 - RNA, 19 nt, Artificial Sequence
  Description of Artificial Sequence: Synthetic oligonucleotide
agcgugacaauggagccca

SEQ ID NO: 2768513 - RNA, 19 nt, Artificial Sequence
  Description of Artificial Sequence: Synthetic oligonucleotide
uccucaucucauacugaac

SEQ ID NO: 2768514 - RNA, 19 nt, Artificial Sequence
  Description of Artificial Sequence: Synthetic oligonucleotide
ucuguagaguguccucauc

SEQ ID NO: 2768515 - RNA, 19 nt, Artificial Sequence
  Description of Artificial Sequence: Synthetic oligonucleotide
cuaauacagccuugucaug

SEQ ID NO: 2768516 - RNA, 19 nt, Artificial Sequence
  Description of Artificial Sequence: Synthetic oligonucleotide
ucggguaaguuucgcugga

SEQ ID NO: 2768517 - RNA, 19 nt, Artificial Sequence
  Description of Artificial Sequence: Synthetic oligonucleotide
gacauuggcugugcauccg

SEQ ID NO: 2768518 - RNA, 19 nt, Artificial Sequence
  Description of Artificial Sequence: Synthetic oligonucleotide
gugguuaucgugggcuugg

SEQ ID NO: 2768519 - RNA, 19 nt, Artificial Sequence
  Description of Artificial Sequence: Synthetic oligonucleotide
acccugugcuucuugaaaa

SEQ ID NO: 2768520 - RNA, 19 nt, Artificial Sequence
  Description of Artificial Sequence: Synthetic oligonucleotide
ucaaucuuccuuggcggcu

SEQ ID NO: 2768521 - RNA, 19 nt, Artificial Sequence
  Description of Artificial Sequence: Synthetic oligonucleotide
cugugcauccggucaagug

SEQ ID NO: 2768522 - RNA, 19 nt, Artificial Sequence
  Description of Artificial Sequence: Synthetic oligonucleotide
aguagacauuggcugugca

SEQ ID NO: 2768523 - RNA, 19 nt, Artificial Sequence
  Description of Artificial Sequence: Synthetic oligonucleotide
auggcaaccccuucgggua

SEQ ID NO: 2768524 - RNA, 19 nt, Artificial Sequence
  Description of Artificial Sequence: Synthetic oligonucleotide
aggcguuuauacaaugugu

SEQ ID NO: 2768525 - RNA, 19 nt, Artificial Sequence
  Description of Artificial Sequence: Synthetic oligonucleotide
acuaagauggacaggcguu

SEQ ID NO: 2768526 - RNA, 19 nt, Artificial Sequence
  Description of Artificial Sequence: Synthetic oligonucleotide
gccaaguucuuuagcagcg

SEQ ID NO: 2768527 - RNA, 19 nt, Artificial Sequence
  Description of Artificial Sequence: Synthetic oligonucleotide
ugucaugggcuuucacuaa

SEQ ID NO: 2768528 - RNA, 19 nt, Artificial Sequence
  Description of Artificial Sequence: Synthetic oligonucleotide
uacuuccauggcaaccccu

SEQ ID NO: 2768529 - RNA, 19 nt, Artificial Sequence
  Description of Artificial Sequence: Synthetic oligonucleotide
gcuucuugaaaaugugcac

SEQ ID NO: 2768530 - RNA, 19 nt, Artificial Sequence
  Description of Artificial Sequence: Synthetic oligonucleotide
caaaacaucuguagagugu

SEQ ID NO: 2768531 - RNA, 19 nt, Artificial Sequence
  Description of Artificial Sequence: Synthetic oligonucleotide
gcucauguacauuaauaga

SEQ ID NO: 2768532 - RNA, 19 nt, Artificial Sequence
  Description of Artificial Sequence: Synthetic oligonucleotide
caaguagacauuggcugug

SEQ ID NO: 2768533 - RNA, 19 nt, Artificial Sequence
  Description of Artificial Sequence: Synthetic oligonucleotide
ugggcuuggucaaauccuu

SEQ ID NO: 2768534 - RNA, 19 nt, Artificial Sequence
  Description of Artificial Sequence: Synthetic oligonucleotide
aaccauuuacagacaaauu

SEQ ID NO: 2768535 - RNA, 19 nt, Artificial Sequence
  Description of Artificial Sequence: Synthetic oligonucleotide
uacugaacccugugcuucu

SEQ ID NO: 2768536 - RNA, 19 nt, Artificial Sequence
  Description of Artificial Sequence: Synthetic oligonucleotide
guccucaucucauacugaa

SEQ ID NO: 2768537 - RNA, 19 nt, Artificial Sequence
  Description of Artificial Sequence: Synthetic oligonucleotide
aucugugucuuuguuacuu

SEQ ID NO: 2768538 - RNA, 19 nt, Artificial Sequence
  Description of Artificial Sequence: Synthetic oligonucleotide
ggcuuggucaaauccuuug

SEQ ID NO: 2768539 - RNA, 19 nt, Artificial Sequence
  Description of Artificial Sequence: Synthetic oligonucleotide
ggcguuuauacaauguguc

SEQ ID NO: 2768540 - RNA, 19 nt, Artificial Sequence
  Description of Artificial Sequence: Synthetic oligonucleotide
cuggcaacugcuguaucug

SEQ ID NO: 2768541 - RNA, 19 nt, Artificial Sequence
  Description of Artificial Sequence: Synthetic oligonucleotide
uuguuacuuccauggcaac

SEQ ID NO: 2768542 - RNA, 19 nt, Artificial Sequence
  Description of Artificial Sequence: Synthetic oligonucleotide
cauguacauuaauagaaau

SEQ ID NO: 2768543 - RNA, 19 nt, Artificial Sequence
  Description of Artificial Sequence: Synthetic oligonucleotide
gcuucuugauguguucugg

SEQ ID NO: 2768544 - RNA, 19 nt, Artificial Sequence
  Description of Artificial Sequence: Synthetic oligonucleotide
gcuaugacuugcuuucuuc

SEQ ID NO: 2768545 - RNA, 19 nt, Artificial Sequence
  Description of Artificial Sequence: Synthetic oligonucleotide
uuccucagugagugcuucc

SEQ ID NO: 2768546 - RNA, 19 nt, Artificial Sequence
  Description of Artificial Sequence: Synthetic oligonucleotide
uugauguguucuggcaacu

SEQ ID NO: 2768547 - RNA, 19 nt, Artificial Sequence
  Description of Artificial Sequence: Synthetic oligonucleotide
cuucuugaaaaugugcacu

SEQ ID NO: 2768548 - RNA, 19 nt, Artificial Sequence
  Description of Artificial Sequence: Synthetic oligonucleotide
uaucugugucuuuguuacu

SEQ ID NO: 2768549 - RNA, 19 nt, Artificial Sequence
  Description of Artificial Sequence: Synthetic oligonucleotide
acaggcguuuauacaaugu

SEQ ID NO: 2768550 - RNA, 19 nt, Artificial Sequence
  Description of Artificial Sequence: Synthetic oligonucleotide
cugacuugagaagagugaa

SEQ ID NO: 2768551 - RNA, 19 nt, Artificial Sequence
  Description of Artificial Sequence: Synthetic oligonucleotide
acaucggcuucuugaugug

SEQ ID NO: 2768552 - RNA, 19 nt, Artificial Sequence
  Description of Artificial Sequence: Synthetic oligonucleotide
uggcaacugcuguaucugu

SEQ ID NO: 2768553 - RNA, 19 nt, Artificial Sequence
  Description of Artificial Sequence: Synthetic oligonucleotide
aucuguagaguguccucau

SEQ ID NO: 2768554 - RNA, 19 nt, Artificial Sequence
  Description of Artificial Sequence: Synthetic oligonucleotide
cguuuauacaaugugucug

SEQ ID NO: 2768555 - RNA, 19 nt, Artificial Sequence
  Description of Artificial Sequence: Synthetic oligonucleotide
caucuguagaguguccuca

SEQ ID NO: 2768556 - RNA, 19 nt, Artificial Sequence
  Description of Artificial Sequence: Synthetic oligonucleotide
cuguagaguguccucaucu

SEQ ID NO: 2768557 - RNA, 19 nt, Artificial Sequence
  Description of Artificial Sequence: Synthetic oligonucleotide
gacgugguuaucgugggcu

SEQ ID NO: 2768558 - RNA, 19 nt, Artificial Sequence
  Description of Artificial Sequence: Synthetic oligonucleotide
auagaaaugccaaguucuu

SEQ ID NO: 2768559 - RNA, 19 nt, Artificial Sequence
  Description of Artificial Sequence: Synthetic oligonucleotide
ccaguuugggcugugcugc

SEQ ID NO: 2768560 - RNA, 19 nt, Artificial Sequence
  Description of Artificial Sequence: Synthetic oligonucleotide
uuuccucagugagugcuuc

SEQ ID NO: 2768561 - RNA, 19 nt, Artificial Sequence
  Description of Artificial Sequence: Synthetic oligonucleotide
cuaugacuugcuuucuucu

SEQ ID NO: 2768562 - RNA, 19 nt, Artificial Sequence
  Description of Artificial Sequence: Synthetic oligonucleotide
agccuugucaugggcuuuc

SEQ ID NO: 2768563 - RNA, 19 nt, Artificial Sequence
  Description of Artificial Sequence: Synthetic oligonucleotide
gcaggaggccaccaguuug

SEQ ID NO: 2768564 - RNA, 19 nt, Artificial Sequence
  Description of Artificial Sequence: Synthetic oligonucleotide
ucggcuucuugauguguuc

SEQ ID NO: 2768565 - RNA, 19 nt, Artificial Sequence
  Description of Artificial Sequence: Synthetic oligonucleotide
acugucuaauacagccuug

SEQ ID NO: 2768566 - RNA, 19 nt, Artificial Sequence
  Description of Artificial Sequence: Synthetic oligonucleotide
uggcugugcauccggucaa

SEQ ID NO: 2768567 - RNA, 19 nt, Artificial Sequence
  Description of Artificial Sequence: Synthetic oligonucleotide
agaguguccucaucucaua

SEQ ID NO: 2768568 - RNA, 19 nt, Artificial Sequence
  Description of Artificial Sequence: Synthetic oligonucleotide
gcccaccucacacuggugc

SEQ ID NO: 2768569 - RNA, 19 nt, Artificial Sequence
  Description of Artificial Sequence: Synthetic oligonucleotide
agcgagcacggcaaaauau

SEQ ID NO: 2768570 - RNA, 19 nt, Artificial Sequence
  Description of Artificial Sequence: Synthetic oligonucleotide
cucaaaacaucuguagagu

SEQ ID NO: 2768571 - RNA, 19 nt, Artificial Sequence
  Description of Artificial Sequence: Synthetic oligonucleotide
gguaaguuucgcuggauau

SEQ ID NO: 2768572 - RNA, 19 nt, Artificial Sequence
  Description of Artificial Sequence: Synthetic oligonucleotide
guaaguuucgcuggauaua

SEQ ID NO: 2768573 - RNA, 19 nt, Artificial Sequence
  Description of Artificial Sequence: Synthetic oligonucleotide
gcuggauauauuccaagua

SEQ ID NO: 2768574 - RNA, 19 nt, Artificial Sequence
  Description of Artificial Sequence: Synthetic oligonucleotide
cauggcaaccccuucgggu

SEQ ID NO: 2768575 - RNA, 19 nt, Artificial Sequence
  Description of Artificial Sequence: Synthetic oligonucleotide
gaacccugugcuucuugaa

SEQ ID NO: 2768576 - RNA, 19 nt, Artificial Sequence
  Description of Artificial Sequence: Synthetic oligonucleotide
cugaacccugugcuucuug

SEQ ID NO: 2768577 - RNA, 19 nt, Artificial Sequence
  Description of Artificial Sequence: Synthetic oligonucleotide
cacuaagauggacaggcgu

SEQ ID NO: 2768578 - RNA, 19 nt, Artificial Sequence
  Description of Artificial Sequence: Synthetic oligonucleotide
caaucuuccuuggcggcuc

SEQ ID NO: 2768579 - RNA, 19 nt, Artificial Sequence
  Description of Artificial Sequence: Synthetic oligonucleotide
auccggucaaguguuuuaa

SEQ ID NO: 2768580 - RNA, 19 nt, Artificial Sequence
  Description of Artificial Sequence: Synthetic oligonucleotide
guagacauuggcugugcau

SEQ ID NO: 2768581 - RNA, 19 nt, Artificial Sequence
  Description of Artificial Sequence: Synthetic oligonucleotide
cgugggcuuggucaaaucc

SEQ ID NO: 2768582 - RNA, 19 nt, Artificial Sequence
  Description of Artificial Sequence: Synthetic oligonucleotide
gugcaagcgugacaaugga

SEQ ID NO: 2768583 - RNA, 19 nt, Artificial Sequence
  Description of Artificial Sequence: Synthetic oligonucleotide
aucucauacugaacccugu

SEQ ID NO: 2768584 - RNA, 19 nt, Artificial Sequence
  Description of Artificial Sequence: Synthetic oligonucleotide
gucaaguguuuuaacucaa

SEQ ID NO: 2768585 - RNA, 19 nt, Artificial Sequence
  Description of Artificial Sequence: Synthetic oligonucleotide
cguaacugucuaauacagc

SEQ ID NO: 2768586 - RNA, 19 nt, Artificial Sequence
  Description of Artificial Sequence: Synthetic oligonucleotide
cuuccauggcaaccccuuc

SEQ ID NO: 2768587 - RNA, 19 nt, Artificial Sequence
  Description of Artificial Sequence: Synthetic oligonucleotide
cggucaaguguuuuaacuc

SEQ ID NO: 2768588 - RNA, 19 nt, Artificial Sequence
  Description of Artificial Sequence: Synthetic oligonucleotide
uuccuuggcggcucaugua

SEQ ID NO: 2768589 - RNA, 19 nt, Artificial Sequence
  Description of Artificial Sequence: Synthetic oligonucleotide
caucgaugugcaagcguga

SEQ ID NO: 2768590 - RNA, 19 nt, Artificial Sequence
  Description of Artificial Sequence: Synthetic oligonucleotide
uggcaaccccuucggguaa

SEQ ID NO: 2768591 - RNA, 19 nt, Artificial Sequence
  Description of Artificial Sequence: Synthetic oligonucleotide
gagcccaccucacacuggu

SEQ ID NO: 2768592 - RNA, 19 nt, Artificial Sequence
  Description of Artificial Sequence: Synthetic oligonucleotide
uuggaacaucgaugugcaa

SEQ ID NO: 2768593 - RNA, 19 nt, Artificial Sequence
  Description of Artificial Sequence: Synthetic oligonucleotide
ugcuucccacaucggcuuc

SEQ ID NO: 2768594 - RNA, 19 nt, Artificial Sequence
  Description of Artificial Sequence: Synthetic oligonucleotide
gaaccgcucaaucuuccuu

SEQ ID NO: 2768595 - RNA, 19 nt, Artificial Sequence
  Description of Artificial Sequence: Synthetic oligonucleotide
cuuccuuggcggcucaugu

SEQ ID NO: 2768596 - RNA, 19 nt, Artificial Sequence
  Description of Artificial Sequence: Synthetic oligonucleotide
cauccggucaaguguuuua

SEQ ID NO: 2768597 - RNA, 19 nt, Artificial Sequence
  Description of Artificial Sequence: Synthetic oligonucleotide
acgugguuaucgugggcuu

SEQ ID NO: 2768598 - RNA, 19 nt, Artificial Sequence
  Description of Artificial Sequence: Synthetic oligonucleotide
ucgugggcuuggucaaauc

SEQ ID NO: 2768599 - RNA, 19 nt, Artificial Sequence
  Description of Artificial Sequence: Synthetic oligonucleotide
gaagagugaaccgcucaau

SEQ ID NO: 2768600 - RNA, 19 nt, Artificial Sequence
  Description of Artificial Sequence: Synthetic oligonucleotide
gugggcuuggucaaauccu

SEQ ID NO: 2768601 - RNA, 19 nt, Artificial Sequence
  Description of Artificial Sequence: Synthetic oligonucleotide
gucuggcucaucagacgug

SEQ ID NO: 2768602 - RNA, 19 nt, Artificial Sequence
  Description of Artificial Sequence: Synthetic oligonucleotide
accucacacuggugcugag

SEQ ID NO: 2768603 - RNA, 19 nt, Artificial Sequence
  Description of Artificial Sequence: Synthetic oligonucleotide
gcguuuauacaaugugucu

SEQ ID NO: 2768604 - RNA, 19 nt, Artificial Sequence
  Description of Artificial Sequence: Synthetic oligonucleotide
cuuuagcagcgagcacggc

SEQ ID NO: 2768605 - RNA, 19 nt, Artificial Sequence
  Description of Artificial Sequence: Synthetic oligonucleotide
aucgugggcuuggucaaau

SEQ ID NO: 2768606 - RNA, 19 nt, Artificial Sequence
  Description of Artificial Sequence: Synthetic oligonucleotide
uuugggcugugcugcucuu

SEQ ID NO: 2768607 - RNA, 19 nt, Artificial Sequence
  Description of Artificial Sequence: Synthetic oligonucleotide
cucaucagacgugguuauc

SEQ ID NO: 2768608 - RNA, 19 nt, Artificial Sequence
  Description of Artificial Sequence: Synthetic oligonucleotide
caucagacgugguuaucgu

SEQ ID NO: 2768609 - RNA, 19 nt, Artificial Sequence
  Description of Artificial Sequence: Synthetic oligonucleotide
cauacugaacccugugcuu

SEQ ID NO: 2768610 - RNA, 19 nt, Artificial Sequence
  Description of Artificial Sequence: Synthetic oligonucleotide
gguuaucgugggcuugguc

SEQ ID NO: 2768611 - RNA, 19 nt, Artificial Sequence
  Description of Artificial Sequence: Synthetic oligonucleotide
ugcauccggucaaguguuu

SEQ ID NO: 2768612 - RNA, 19 nt, Artificial Sequence
  Description of Artificial Sequence: Synthetic oligonucleotide
cauccccaggcuaugacuu

SEQ ID NO: 2768613 - RNA, 19 nt, Artificial Sequence
  Description of Artificial Sequence: Synthetic oligonucleotide
cgagcacggcaaaauauuc

SEQ ID NO: 2768614 - RNA, 19 nt, Artificial Sequence
  Description of Artificial Sequence: Synthetic oligonucleotide
ggcucaucagacgugguua

SEQ ID NO: 2768615 - RNA, 19 nt, Artificial Sequence
  Description of Artificial Sequence: Synthetic oligonucleotide
ggguaaguuucgcuggaua

SEQ ID NO: 2768616 - RNA, 19 nt, Artificial Sequence
  Description of Artificial Sequence: Synthetic oligonucleotide
ugguuaucgugggcuuggu

SEQ ID NO: 2768617 - RNA, 19 nt, Artificial Sequence
  Description of Artificial Sequence: Synthetic oligonucleotide
uagcagcgagcacggcaaa

SEQ ID NO: 2768618 - RNA, 19 nt, Artificial Sequence
  Description of Artificial Sequence: Synthetic oligonucleotide
aggcuaugacuugcuuucu

SEQ ID NO: 2768619 - RNA, 19 nt, Artificial Sequence
  Description of Artificial Sequence: Synthetic oligonucleotide
uaucgugggcuuggucaaa

SEQ ID NO: 2768620 - RNA, 19 nt, Artificial Sequence
  Description of Artificial Sequence: Synthetic oligonucleotide
caugggcuuucacuaagau

SEQ ID NO: 2768621 - RNA, 19 nt, Artificial Sequence
  Description of Artificial Sequence: Synthetic oligonucleotide
ccauggcaaccccuucggg

SEQ ID NO: 2768622 - RNA, 19 nt, Artificial Sequence
  Description of Artificial Sequence: Synthetic oligonucleotide
uugggcugugcugcucuua

SEQ ID NO: 2768623 - RNA, 19 nt, Artificial Sequence
  Description of Artificial Sequence: Synthetic oligonucleotide
agcagcgagcacggcaaaa

SEQ ID NO: 2768624 - RNA, 19 nt, Artificial Sequence
  Description of Artificial Sequence: Synthetic oligonucleotide
ccaaguagacauuggcugu

SEQ ID NO: 2768625 - RNA, 19 nt, Artificial Sequence
  Description of Artificial Sequence: Synthetic oligonucleotide
uuggcggcucauguacauu

SEQ ID NO: 2768626 - RNA, 19 nt, Artificial Sequence
  Description of Artificial Sequence: Synthetic oligonucleotide
cuaagauggacaggcguuu

SEQ ID NO: 2768627 - RNA, 19 nt, Artificial Sequence
  Description of Artificial Sequence: Synthetic oligonucleotide
caccaguuugggcugugcu

SEQ ID NO: 2768628 - RNA, 19 nt, Artificial Sequence
  Description of Artificial Sequence: Synthetic oligonucleotide
cauuggcugugcauccggu

SEQ ID NO: 2768629 - RNA, 19 nt, Artificial Sequence
  Description of Artificial Sequence: Synthetic oligonucleotide
cuuggcggcucauguacau

SEQ ID NO: 2768630 - RNA, 19 nt, Artificial Sequence
  Description of Artificial Sequence: Synthetic oligonucleotide
gaugugcaagcgugacaau

SEQ ID NO: 2768631 - RNA, 19 nt, Artificial Sequence
  Description of Artificial Sequence: Synthetic oligonucleotide
ccucacacuggugcugagc

SEQ ID NO: 2768632 - RNA, 19 nt, Artificial Sequence
  Description of Artificial Sequence: Synthetic oligonucleotide
gcuguaucugugucuuugu

SEQ ID NO: 2768633 - RNA, 19 nt, Artificial Sequence
  Description of Artificial Sequence: Synthetic oligonucleotide
cagcgagcacggcaaaaua

SEQ ID NO: 2768634 - RNA, 19 nt, Artificial Sequence
  Description of Artificial Sequence: Synthetic oligonucleotide
ccacaucggcuucuugaug

SEQ ID NO: 2768635 - RNA, 19 nt, Artificial Sequence
  Description of Artificial Sequence: Synthetic oligonucleotide
cagugagugcuucccacau

SEQ ID NO: 2768636 - RNA, 19 nt, Artificial Sequence
  Description of Artificial Sequence: Synthetic oligonucleotide
gugcuucccacaucggcuu

SEQ ID NO: 2768637 - RNA, 19 nt, Artificial Sequence
  Description of Artificial Sequence: Synthetic oligonucleotide
cuguaucugugucuuuguu

SEQ ID NO: 2768638 - RNA, 19 nt, Artificial Sequence
  Description of Artificial Sequence: Synthetic oligonucleotide
ccccuucggguaaguuucg

SEQ ID NO: 2768639 - RNA, 19 nt, Artificial Sequence
  Description of Artificial Sequence: Synthetic oligonucleotide
ggcugugcauccggucaag

SEQ ID NO: 2768640 - RNA, 19 nt, Artificial Sequence
  Description of Artificial Sequence: Synthetic oligonucleotide
cgugacaauggagcccacc

SEQ ID NO: 2768641 - RNA, 19 nt, Artificial Sequence
  Description of Artificial Sequence: Synthetic oligonucleotide
gagcaggaggccaccaguu

SEQ ID NO: 2768642 - RNA, 19 nt, Artificial Sequence
  Description of Artificial Sequence: Synthetic oligonucleotide
ggcaaccccuucggguaag

SEQ ID NO: 2768643 - RNA, 19 nt, Artificial Sequence
  Description of Artificial Sequence: Synthetic oligonucleotide
cggcucauguacauuaaua

SEQ ID NO: 2768644 - RNA, 19 nt, Artificial Sequence
  Description of Artificial Sequence: Synthetic oligonucleotide
gugcauccggucaaguguu

SEQ ID NO: 2768645 - RNA, 19 nt, Artificial Sequence
  Description of Artificial Sequence: Synthetic oligonucleotide
gcucaucagacgugguuau

SEQ ID NO: 2768646 - RNA, 19 nt, Artificial Sequence
  Description of Artificial Sequence: Synthetic oligonucleotide
ccucagugagugcuuccca

SEQ ID NO: 2768647 - RNA, 19 nt, Artificial Sequence
  Description of Artificial Sequence: Synthetic oligonucleotide
ccaggcuaugacuugcuuu

SEQ ID NO: 2768648 - RNA, 19 nt, Artificial Sequence
  Description of Artificial Sequence: Synthetic oligonucleotide
ccuucggguaaguuucgcu

SEQ ID NO: 2768649 - RNA, 19 nt, Artificial Sequence
  Description of Artificial Sequence: Synthetic oligonucleotide
agcccaccucacacuggug

SEQ ID NO: 2768650 - RNA, 19 nt, Artificial Sequence
  Description of Artificial Sequence: Synthetic oligonucleotide
ccuuggcggcucauguaca

SEQ ID NO: 2768651 - RNA, 19 nt, Artificial Sequence
  Description of Artificial Sequence: Synthetic oligonucleotide
ccaaguucuuuagcagcga

SEQ ID NO: 2768652 - RNA, 19 nt, Artificial Sequence
  Description of Artificial Sequence: Synthetic oligonucleotide
cggcaaaauauucguaacu

SEQ ID NO: 2768653 - RNA, 19 nt, Artificial Sequence
  Description of Artificial Sequence: Synthetic oligonucleotide
aucuuccuuggcggcucau

SEQ ID NO: 2768654 - RNA, 19 nt, Artificial Sequence
  Description of Artificial Sequence: Synthetic oligonucleotide
cccuucggguaaguuucgc

SEQ ID NO: 2768655 - RNA, 19 nt, Artificial Sequence
  Description of Artificial Sequence: Synthetic oligonucleotide
ggcuaugacuugcuuucuu

SEQ ID NO: 2768656 - RNA, 19 nt, Artificial Sequence
  Description of Artificial Sequence: Synthetic oligonucleotide
cgugguuaucgugggcuug

SEQ ID NO: 2768657 - RNA, 19 nt, Artificial Sequence
  Description of Artificial Sequence: Synthetic oligonucleotide
cgcuggauauauuccaagu

SEQ ID NO: 2768658 - RNA, 19 nt, Artificial Sequence
  Description of Artificial Sequence: Synthetic oligonucleotide
gcagcgagcacggcaaaau

SEQ ID NO: 2768659 - RNA, 19 nt, Artificial Sequence
  Description of Artificial Sequence: Synthetic oligonucleotide
gggcugugcugcucuuaga

SEQ ID NO: 2768660 - RNA, 19 nt, Artificial Sequence
  Description of Artificial Sequence: Synthetic oligonucleotide
gcgagcacggcaaaauauu

SEQ ID NO: 2768661 - RNA, 19 nt, Artificial Sequence
  Description of Artificial Sequence: Synthetic oligonucleotide
gcacggcaaaauauucgua

SEQ ID NO: 2768662 - RNA, 19 nt, Artificial Sequence
  Description of Artificial Sequence: Synthetic oligonucleotide
cuggcucaucagacguggu

SEQ ID NO: 2768663 - RNA, 19 nt, Artificial Sequence
  Description of Artificial Sequence: Synthetic oligonucleotide
cccacaucggcuucuugau

SEQ ID NO: 2768664 - RNA, 19 nt, Artificial Sequence
  Description of Artificial Sequence: Synthetic oligonucleotide
ggcggcucauguacauuaa

SEQ ID NO: 2768665 - RNA, 19 nt, Artificial Sequence
  Description of Artificial Sequence: Synthetic oligonucleotide
ggacaggcguuuauacaau

SEQ ID NO: 2768666 - RNA, 19 nt, Artificial Sequence
  Description of Artificial Sequence: Synthetic oligonucleotide
gcggcucauguacauuaau

SEQ ID NO: 2768667 - RNA, 19 nt, Artificial Sequence
  Description of Artificial Sequence: Synthetic oligonucleotide
gccaccaguuugggcugug

SEQ ID NO: 2768668 - RNA, 19 nt, Artificial Sequence
  Description of Artificial Sequence: Synthetic oligonucleotide
cccugugcuucuugaaaau

SEQ ID NO: 2768669 - RNA, 19 nt, Artificial Sequence
  Description of Artificial Sequence: Synthetic oligonucleotide
gccuugucaugggcuuuca

SEQ ID NO: 2768670 - RNA, 19 nt, Artificial Sequence
  Description of Artificial Sequence: Synthetic oligonucleotide
gcugugcauccggucaagu

SEQ ID NO: 2768671 - RNA, 19 nt, Artificial Sequence
  Description of Artificial Sequence: Synthetic oligonucleotide
cuucccacaucggcuucuu

SEQ ID NO: 2768672 - RNA, 19 nt, Artificial Sequence
  Description of Artificial Sequence: Synthetic oligonucleotide
gcauccggucaaguguuuu

SEQ ID NO: 2768673 - RNA, 19 nt, Artificial Sequence
  Description of Artificial Sequence: Synthetic oligonucleotide
caaccccuucggguaaguu

SEQ ID NO: 2768674 - RNA, 19 nt, Artificial Sequence
  Description of Artificial Sequence: Synthetic oligonucleotide
gggcuuggucaaauccuuu

SEQ ID NO: 2768675 - RNA, 19 nt, Artificial Sequence
  Description of Artificial Sequence: Synthetic oligonucleotide
ccccaggcuaugacuugcu

SEQ ID NO: 2768676 - RNA, 19 nt, Artificial Sequence
  Description of Artificial Sequence: Synthetic oligonucleotide
gcaaccccuucggguaagu

SEQ ID NO: 2768677 - RNA, 19 nt, Artificial Sequence
  Description of Artificial Sequence: Synthetic oligonucleotide
gcgugacaauggagcccac

SEQ ID NO: 2768678 - RNA, 19 nt, Artificial Sequence
  Description of Artificial Sequence: Synthetic oligonucleotide
cggcuucuugauguguucu

SEQ ID NO: 2768679 - RNA, 19 nt, Artificial Sequence
  Description of Artificial Sequence: Synthetic oligonucleotide
cccaggcuaugacuugcuu

SEQ ID NO: 2768680 - RNA, 19 nt, Artificial Sequence
  Description of Artificial Sequence: Synthetic oligonucleotide
ggccaccaguuugggcugu

SEQ ID NO: 2768681 - RNA, 19 nt, Artificial Sequence
  Description of Artificial Sequence: Synthetic oligonucleotide
cggguaaguuucgcuggau

SEQ ID NO: 2768682 - RNA, 19 nt, Artificial Sequence
  Description of Artificial Sequence: Synthetic oligonucleotide
aaagucauggcccuguucc

SEQ ID NO: 2768683 - RNA, 19 nt, Artificial Sequence
  Description of Artificial Sequence: Synthetic oligonucleotide
uauuugaccaagaagauga

SEQ ID NO: 2768684 - RNA, 19 nt, Artificial Sequence
  Description of Artificial Sequence: Synthetic oligonucleotide
ucguauuugaccaagaaga

SEQ ID NO: 2768685 - RNA, 19 nt, Artificial Sequence
  Description of Artificial Sequence: Synthetic oligonucleotide
uuaagaucguauuugacca

SEQ ID NO: 2768686 - RNA, 19 nt, Artificial Sequence
  Description of Artificial Sequence: Synthetic oligonucleotide
ucagauaacuuuaaggacu

SEQ ID NO: 2768687 - RNA, 19 nt, Artificial Sequence
  Description of Artificial Sequence: Synthetic oligonucleotide
agucagauaacuuuaagga

SEQ ID NO: 2768688 - RNA, 19 nt, Artificial Sequence
  Description of Artificial Sequence: Synthetic oligonucleotide
auuauaggcuucuggaccc

SEQ ID NO: 2768689 - RNA, 19 nt, Artificial Sequence
  Description of Artificial Sequence: Synthetic oligonucleotide
gagucagauaacuuuaagg

SEQ ID NO: 2768690 - RNA, 19 nt, Artificial Sequence
  Description of Artificial Sequence: Synthetic oligonucleotide
guuaagaucguauuugacc

SEQ ID NO: 2768691 - RNA, 19 nt, Artificial Sequence
  Description of Artificial Sequence: Synthetic oligonucleotide
ugcagcacgagagagaugg

SEQ ID NO: 2768692 - RNA, 19 nt, Artificial Sequence
  Description of Artificial Sequence: Synthetic oligonucleotide
aagaagaugagcagcacac

SEQ ID NO: 2768693 - RNA, 19 nt, Artificial Sequence
  Description of Artificial Sequence: Synthetic oligonucleotide
augaaaaccaguccugugg

SEQ ID NO: 2768694 - RNA, 19 nt, Artificial Sequence
  Description of Artificial Sequence: Synthetic oligonucleotide
gaagaaggcaaagucaugg

SEQ ID NO: 2768695 - RNA, 19 nt, Artificial Sequence
  Description of Artificial Sequence: Synthetic oligonucleotide
guaaugaagauguugacca

SEQ ID NO: 2768696 - RNA, 19 nt, Artificial Sequence
  Description of Artificial Sequence: Synthetic oligonucleotide
cuucuuguuggcauaaugg

SEQ ID NO: 2768697 - RNA, 19 nt, Artificial Sequence
  Description of Artificial Sequence: Synthetic oligonucleotide
ugggcugugagucagauaa

SEQ ID NO: 2768698 - RNA, 19 nt, Artificial Sequence
  Description of Artificial Sequence: Synthetic oligonucleotide
ggagaugagaaccacaagg

SEQ ID NO: 2768699 - RNA, 19 nt, Artificial Sequence
  Description of Artificial Sequence: Synthetic oligonucleotide
agaaggcaaagucauggcc

SEQ ID NO: 2768700 - RNA, 19 nt, Artificial Sequence
  Description of Artificial Sequence: Synthetic oligonucleotide
uaacuuuaaggacucuggg

SEQ ID NO: 2768701 - RNA, 19 nt, Artificial Sequence
  Description of Artificial Sequence: Synthetic oligonucleotide
uuauuaaggaaguccagcu

SEQ ID NO: 2768702 - RNA, 19 nt, Artificial Sequence
  Description of Artificial Sequence: Synthetic oligonucleotide
uucuggaccccaaaggccg

SEQ ID NO: 2768703 - RNA, 19 nt, Artificial Sequence
  Description of Artificial Sequence: Synthetic oligonucleotide
cacacaaggagagagaugc

SEQ ID NO: 2768704 - RNA, 19 nt, Artificial Sequence
  Description of Artificial Sequence: Synthetic oligonucleotide
uccauuauaggcuucugga

SEQ ID NO: 2768705 - RNA, 19 nt, Artificial Sequence
  Description of Artificial Sequence: Synthetic oligonucleotide
gagaugagaaccacaaggg

SEQ ID NO: 2768706 - RNA, 19 nt, Artificial Sequence
  Description of Artificial Sequence: Synthetic oligonucleotide
aacuuuaaggacucugggu

SEQ ID NO: 2768707 - RNA, 19 nt, Artificial Sequence
  Description of Artificial Sequence: Synthetic oligonucleotide
gaugagaaccacaaggggc

SEQ ID NO: 2768708 - RNA, 19 nt, Artificial Sequence
  Description of Artificial Sequence: Synthetic oligonucleotide
aucguauuugaccaagaag

SEQ ID NO: 2768709 - RNA, 19 nt, Artificial Sequence
  Description of Artificial Sequence: Synthetic oligonucleotide
aaggccguaaugaagaugu

SEQ ID NO: 2768710 - RNA, 19 nt, Artificial Sequence
  Description of Artificial Sequence: Synthetic oligonucleotide
ugaaaaccaguccuguggc

SEQ ID NO: 2768711 - RNA, 19 nt, Artificial Sequence
  Description of Artificial Sequence: Synthetic oligonucleotide
auaacuuuaaggacucugg

SEQ ID NO: 2768712 - RNA, 19 nt, Artificial Sequence
  Description of Artificial Sequence: Synthetic oligonucleotide
guuguuaagaucguauuug

SEQ ID NO: 2768713 - RNA, 19 nt, Artificial Sequence
  Description of Artificial Sequence: Synthetic oligonucleotide
guugcaggggucuggaugg

SEQ ID NO: 2768714 - RNA, 19 nt, Artificial Sequence
  Description of Artificial Sequence: Synthetic oligonucleotide
acaaggggcacgaagaagg

SEQ ID NO: 2768715 - RNA, 19 nt, Artificial Sequence
  Description of Artificial Sequence: Synthetic oligonucleotide
ucuucuuguuggcauaaug

SEQ ID NO: 2768716 - RNA, 19 nt, Artificial Sequence
  Description of Artificial Sequence: Synthetic oligonucleotide
gauaacuuuaaggacucug

SEQ ID NO: 2768717 - RNA, 19 nt, Artificial Sequence
  Description of Artificial Sequence: Synthetic oligonucleotide
ugagucagauaacuuuaag

SEQ ID NO: 2768718 - RNA, 19 nt, Artificial Sequence
  Description of Artificial Sequence: Synthetic oligonucleotide
aagauguugaccaccacga

SEQ ID NO: 2768719 - RNA, 19 nt, Artificial Sequence
  Description of Artificial Sequence: Synthetic oligonucleotide
ugguuuacauugauaggcc

SEQ ID NO: 2768720 - RNA, 19 nt, Artificial Sequence
  Description of Artificial Sequence: Synthetic oligonucleotide
uucuuguuggcauaauggu

SEQ ID NO: 2768721 - RNA, 19 nt, Artificial Sequence
  Description of Artificial Sequence: Synthetic oligonucleotide
guuauuaaggaaguccagc

SEQ ID NO: 2768722 - RNA, 19 nt, Artificial Sequence
  Description of Artificial Sequence: Synthetic oligonucleotide
ugugagucagauaacuuua

SEQ ID NO: 2768723 - RNA, 19 nt, Artificial Sequence
  Description of Artificial Sequence: Synthetic oligonucleotide
cagguuauuaaggaagucc

SEQ ID NO: 2768724 - RNA, 19 nt, Artificial Sequence
  Description of Artificial Sequence: Synthetic oligonucleotide
aggaaguccagcuuggcgu

SEQ ID NO: 2768725 - RNA, 19 nt, Artificial Sequence
  Description of Artificial Sequence: Synthetic oligonucleotide
ugccacguccauuauaggc

SEQ ID NO: 2768726 - RNA, 19 nt, Artificial Sequence
  Description of Artificial Sequence: Synthetic oligonucleotide
uuguuaagaucguauuuga

SEQ ID NO: 2768727 - RNA, 19 nt, Artificial Sequence
  Description of Artificial Sequence: Synthetic oligonucleotide
aagaucguauuugaccaag

SEQ ID NO: 2768728 - RNA, 19 nt, Artificial Sequence
  Description of Artificial Sequence: Synthetic oligonucleotide
ugccuugaggccauggcag

SEQ ID NO: 2768729 - RNA, 19 nt, Artificial Sequence
  Description of Artificial Sequence: Synthetic oligonucleotide
guuuacauugauaggccgg

SEQ ID NO: 2768730 - RNA, 19 nt, Artificial Sequence
  Description of Artificial Sequence: Synthetic oligonucleotide
aaaaccaguccuguggcca

SEQ ID NO: 2768731 - RNA, 19 nt, Artificial Sequence
  Description of Artificial Sequence: Synthetic oligonucleotide
uguuaagaucguauuugac

SEQ ID NO: 2768732 - RNA, 19 nt, Artificial Sequence
  Description of Artificial Sequence: Synthetic oligonucleotide
uccagcauacucuccgccg

SEQ ID NO: 2768733 - RNA, 19 nt, Artificial Sequence
  Description of Artificial Sequence: Synthetic oligonucleotide
gucagauaacuuuaaggac

SEQ ID NO: 2768734 - RNA, 19 nt, Artificial Sequence
  Description of Artificial Sequence: Synthetic oligonucleotide
aguugcaggggucuggaug

SEQ ID NO: 2768735 - RNA, 19 nt, Artificial Sequence
  Description of Artificial Sequence: Synthetic oligonucleotide
gaugaaaaccaguccugug

SEQ ID NO: 2768736 - RNA, 19 nt, Artificial Sequence
  Description of Artificial Sequence: Synthetic oligonucleotide
acucugggugucuuacugc

SEQ ID NO: 2768737 - RNA, 19 nt, Artificial Sequence
  Description of Artificial Sequence: Synthetic oligonucleotide
aaggcaaagucauggcccu

SEQ ID NO: 2768738 - RNA, 19 nt, Artificial Sequence
  Description of Artificial Sequence: Synthetic oligonucleotide
uuuacauugauaggccggu

SEQ ID NO: 2768739 - RNA, 19 nt, Artificial Sequence
  Description of Artificial Sequence: Synthetic oligonucleotide
caugagcagggcaaugucc

SEQ ID NO: 2768740 - RNA, 19 nt, Artificial Sequence
  Description of Artificial Sequence: Synthetic oligonucleotide
guccauuauaggcuucugg

SEQ ID NO: 2768741 - RNA, 19 nt, Artificial Sequence
  Description of Artificial Sequence: Synthetic oligonucleotide
ucgguucccgacuccaugg

SEQ ID NO: 2768742 - RNA, 19 nt, Artificial Sequence
  Description of Artificial Sequence: Synthetic oligonucleotide
aaaccaguccuguggccag

SEQ ID NO: 2768743 - RNA, 19 nt, Artificial Sequence
  Description of Artificial Sequence: Synthetic oligonucleotide
ggcuggguuguuaagaucg

SEQ ID NO: 2768744 - RNA, 19 nt, Artificial Sequence
  Description of Artificial Sequence: Synthetic oligonucleotide
cuucuggaccccaaaggcc

SEQ ID NO: 2768745 - RNA, 19 nt, Artificial Sequence
  Description of Artificial Sequence: Synthetic oligonucleotide
gacgcguuggccaugagca

SEQ ID NO: 2768746 - RNA, 19 nt, Artificial Sequence
  Description of Artificial Sequence: Synthetic oligonucleotide
gacucugggugucuuacug

SEQ ID NO: 2768747 - RNA, 19 nt, Artificial Sequence
  Description of Artificial Sequence: Synthetic oligonucleotide
agaagaugagcagcacacc

SEQ ID NO: 2768748 - RNA, 19 nt, Artificial Sequence
  Description of Artificial Sequence: Synthetic oligonucleotide
uauuaaggaaguccagcuu

SEQ ID NO: 2768749 - RNA, 19 nt, Artificial Sequence
  Description of Artificial Sequence: Synthetic oligonucleotide
agcacacccacuccaaucu

SEQ ID NO: 2768750 - RNA, 19 nt, Artificial Sequence
  Description of Artificial Sequence: Synthetic oligonucleotide
gaugccuugaggccauggc

SEQ ID NO: 2768751 - RNA, 19 nt, Artificial Sequence
  Description of Artificial Sequence: Synthetic oligonucleotide
cagauaacuuuaaggacuc

SEQ ID NO: 2768752 - RNA, 19 nt, Artificial Sequence
  Description of Artificial Sequence: Synthetic oligonucleotide
agcucguacuccucgguuc

SEQ ID NO: 2768753 - RNA, 19 nt, Artificial Sequence
  Description of Artificial Sequence: Synthetic oligonucleotide
uuugaccaagaagaugagc

SEQ ID NO: 2768754 - RNA, 19 nt, Artificial Sequence
  Description of Artificial Sequence: Synthetic oligonucleotide
gguuuacauugauaggccg

SEQ ID NO: 2768755 - RNA, 19 nt, Artificial Sequence
  Description of Artificial Sequence: Synthetic oligonucleotide
cucugggugucuuacugcc

SEQ ID NO: 2768756 - RNA, 19 nt, Artificial Sequence
  Description of Artificial Sequence: Synthetic oligonucleotide
agguuauuaaggaagucca

SEQ ID NO: 2768757 - RNA, 19 nt, Artificial Sequence
  Description of Artificial Sequence: Synthetic oligonucleotide
acggccuucagcugcgacg

SEQ ID NO: 2768758 - RNA, 19 nt, Artificial Sequence
  Description of Artificial Sequence: Synthetic oligonucleotide
cugggugucuuacugccgg

SEQ ID NO: 2768759 - RNA, 19 nt, Artificial Sequence
  Description of Artificial Sequence: Synthetic oligonucleotide
uccaaucugcagcacgaga

SEQ ID NO: 2768760 - RNA, 19 nt, Artificial Sequence
  Description of Artificial Sequence: Synthetic oligonucleotide
ucugggugucuuacugccg

SEQ ID NO: 2768761 - RNA, 19 nt, Artificial Sequence
  Description of Artificial Sequence: Synthetic oligonucleotide
gauggcugggcugugaguc

SEQ ID NO: 2768762 - RNA, 19 nt, Artificial Sequence
  Description of Artificial Sequence: Synthetic oligonucleotide
ugucuuacugccggggugc

SEQ ID NO: 2768763 - RNA, 19 nt, Artificial Sequence
  Description of Artificial Sequence: Synthetic oligonucleotide
ugaugaaaaccaguccugu

SEQ ID NO: 2768764 - RNA, 19 nt, Artificial Sequence
  Description of Artificial Sequence: Synthetic oligonucleotide
aaaggccguaaugaagaug

SEQ ID NO: 2768765 - RNA, 19 nt, Artificial Sequence
  Description of Artificial Sequence: Synthetic oligonucleotide
guauuugaccaagaagaug

SEQ ID NO: 2768766 - RNA, 19 nt, Artificial Sequence
  Description of Artificial Sequence: Synthetic oligonucleotide
uugauaggccgguuccucc

SEQ ID NO: 2768767 - RNA, 19 nt, Artificial Sequence
  Description of Artificial Sequence: Synthetic oligonucleotide
ggugccacguccauuauag

SEQ ID NO: 2768768 - RNA, 19 nt, Artificial Sequence
  Description of Artificial Sequence: Synthetic oligonucleotide
auugauaggccgguuccuc

SEQ ID NO: 2768769 - RNA, 19 nt, Artificial Sequence
  Description of Artificial Sequence: Synthetic oligonucleotide
gaggccauggcaguugcag

SEQ ID NO: 2768770 - RNA, 19 nt, Artificial Sequence
  Description of Artificial Sequence: Synthetic oligonucleotide
augagaaccacaaggggca

SEQ ID NO: 2768771 - RNA, 19 nt, Artificial Sequence
  Description of Artificial Sequence: Synthetic oligonucleotide
ucugcagcacgagagagau

SEQ ID NO: 2768772 - RNA, 19 nt, Artificial Sequence
  Description of Artificial Sequence: Synthetic oligonucleotide
uuccuccaaccccagcggg

SEQ ID NO: 2768773 - RNA, 19 nt, Artificial Sequence
  Description of Artificial Sequence: Synthetic oligonucleotide
ucagcugcgacgcguuggc

SEQ ID NO: 2768774 - RNA, 19 nt, Artificial Sequence
  Description of Artificial Sequence: Synthetic oligonucleotide
uaaugaagauguugaccac

SEQ ID NO: 2768775 - RNA, 19 nt, Artificial Sequence
  Description of Artificial Sequence: Synthetic oligonucleotide
cacgaagaaggcaaaguca

SEQ ID NO: 2768776 - RNA, 19 nt, Artificial Sequence
  Description of Artificial Sequence: Synthetic oligonucleotide
ugagcagcacacccacucc

SEQ ID NO: 2768777 - RNA, 19 nt, Artificial Sequence
  Description of Artificial Sequence: Synthetic oligonucleotide
gaucguauuugaccaagaa

SEQ ID NO: 2768778 - RNA, 19 nt, Artificial Sequence
  Description of Artificial Sequence: Synthetic oligonucleotide
ggagagagaugccuugagg

SEQ ID NO: 2768779 - RNA, 19 nt, Artificial Sequence
  Description of Artificial Sequence: Synthetic oligonucleotide
cauggugcggccacccggg

SEQ ID NO: 2768780 - RNA, 19 nt, Artificial Sequence
  Description of Artificial Sequence: Synthetic oligonucleotide
caaggagagagaugccuug

SEQ ID NO: 2768781 - RNA, 19 nt, Artificial Sequence
  Description of Artificial Sequence: Synthetic oligonucleotide
uucccgacuccauggugcg

SEQ ID NO: 2768782 - RNA, 19 nt, Artificial Sequence
  Description of Artificial Sequence: Synthetic oligonucleotide
ugcacacaaggagagagau

SEQ ID NO: 2768783 - RNA, 19 nt, Artificial Sequence
  Description of Artificial Sequence: Synthetic oligonucleotide
aggccgguuccuccaaccc

SEQ ID NO: 2768784 - RNA, 19 nt, Artificial Sequence
  Description of Artificial Sequence: Synthetic oligonucleotide
ugauaggccgguuccucca

SEQ ID NO: 2768785 - RNA, 19 nt, Artificial Sequence
  Description of Artificial Sequence: Synthetic oligonucleotide
augccuugaggccauggca

SEQ ID NO: 2768786 - RNA, 19 nt, Artificial Sequence
  Description of Artificial Sequence: Synthetic oligonucleotide
aggagagagaugccuugag

SEQ ID NO: 2768787 - RNA, 19 nt, Artificial Sequence
  Description of Artificial Sequence: Synthetic oligonucleotide
augaugaaaaccaguccug

SEQ ID NO: 2768788 - RNA, 19 nt, Artificial Sequence
  Description of Artificial Sequence: Synthetic oligonucleotide
cacacccacuccaaucugc

SEQ ID NO: 2768789 - RNA, 19 nt, Artificial Sequence
  Description of Artificial Sequence: Synthetic oligonucleotide
acgaagaaggcaaagucau

SEQ ID NO: 2768790 - RNA, 19 nt, Artificial Sequence
  Description of Artificial Sequence: Synthetic oligonucleotide
ggcuucuggaccccaaagg

SEQ ID NO: 2768791 - RNA, 19 nt, Artificial Sequence
  Description of Artificial Sequence: Synthetic oligonucleotide
caggucgccguugagcucg

SEQ ID NO: 2768792 - RNA, 19 nt, Artificial Sequence
  Description of Artificial Sequence: Synthetic oligonucleotide
gaccccaaaggccguaaug

SEQ ID NO: 2768793 - RNA, 19 nt, Artificial Sequence
  Description of Artificial Sequence: Synthetic oligonucleotide
caccacgaugaugaaaacc

SEQ ID NO: 2768794 - RNA, 19 nt, Artificial Sequence
  Description of Artificial Sequence: Synthetic oligonucleotide
aaccccagcgggcuggcga

SEQ ID NO: 2768795 - RNA, 19 nt, Artificial Sequence
  Description of Artificial Sequence: Synthetic oligonucleotide
uaagaucguauuugaccaa

SEQ ID NO: 2768796 - RNA, 19 nt, Artificial Sequence
  Description of Artificial Sequence: Synthetic oligonucleotide
guucccgacuccauggugc

SEQ ID NO: 2768797 - RNA, 19 nt, Artificial Sequence
  Description of Artificial Sequence: Synthetic oligonucleotide
ggcaauguccagcauacuc

SEQ ID NO: 2768798 - RNA, 19 nt, Artificial Sequence
  Description of Artificial Sequence: Synthetic oligonucleotide
ggccagguuauuaaggaag

SEQ ID NO: 2768799 - RNA, 19 nt, Artificial Sequence
  Description of Artificial Sequence: Synthetic oligonucleotide
guggccagguuauuaagga

SEQ ID NO: 2768800 - RNA, 19 nt, Artificial Sequence
  Description of Artificial Sequence: Synthetic oligonucleotide
agucauggcccuguuccac

SEQ ID NO: 2768801 - RNA, 19 nt, Artificial Sequence
  Description of Artificial Sequence: Synthetic oligonucleotide
cuuguuggcauaaugguuu

SEQ ID NO: 2768802 - RNA, 19 nt, Artificial Sequence
  Description of Artificial Sequence: Synthetic oligonucleotide
ucgccguugagcucguacu

SEQ ID NO: 2768803 - RNA, 19 nt, Artificial Sequence
  Description of Artificial Sequence: Synthetic oligonucleotide
uuuaaggacucuggguguc

SEQ ID NO: 2768804 - RNA, 19 nt, Artificial Sequence
  Description of Artificial Sequence: Synthetic oligonucleotide
uacuccucgguucccgacu

SEQ ID NO: 2768805 - RNA, 19 nt, Artificial Sequence
  Description of Artificial Sequence: Synthetic oligonucleotide
uguccagcauacucuccgc

SEQ ID NO: 2768806 - RNA, 19 nt, Artificial Sequence
  Description of Artificial Sequence: Synthetic oligonucleotide
accacaaggggcacgaaga

SEQ ID NO: 2768807 - RNA, 19 nt, Artificial Sequence
  Description of Artificial Sequence: Synthetic oligonucleotide
cuuacugccggggugccac

SEQ ID NO: 2768808 - RNA, 19 nt, Artificial Sequence
  Description of Artificial Sequence: Synthetic oligonucleotide
aaggagagagaugccuuga

SEQ ID NO: 2768809 - RNA, 19 nt, Artificial Sequence
  Description of Artificial Sequence: Synthetic oligonucleotide
acuccucgguucccgacuc

SEQ ID NO: 2768810 - RNA, 19 nt, Artificial Sequence
  Description of Artificial Sequence: Synthetic oligonucleotide
agaaccacaaggggcacga

SEQ ID NO: 2768811 - RNA, 19 nt, Artificial Sequence
  Description of Artificial Sequence: Synthetic oligonucleotide
uccuccaaccccagcgggc

SEQ ID NO: 2768812 - RNA, 19 nt, Artificial Sequence
  Description of Artificial Sequence: Synthetic oligonucleotide
ugaagauguugaccaccac

SEQ ID NO: 2768813 - RNA, 19 nt, Artificial Sequence
  Description of Artificial Sequence: Synthetic oligonucleotide
uggcccuguuccaccacgg

SEQ ID NO: 2768814 - RNA, 19 nt, Artificial Sequence
  Description of Artificial Sequence: Synthetic oligonucleotide
ugagcucguacuccucggu

SEQ ID NO: 2768815 - RNA, 19 nt, Artificial Sequence
  Description of Artificial Sequence: Synthetic oligonucleotide
caaggggcacgaagaaggc

SEQ ID NO: 2768816 - RNA, 19 nt, Artificial Sequence
  Description of Artificial Sequence: Synthetic oligonucleotide
agcugcgacgcguuggcca

SEQ ID NO: 2768817 - RNA, 19 nt, Artificial Sequence
  Description of Artificial Sequence: Synthetic oligonucleotide
uccauggugcggccacccg

SEQ ID NO: 2768818 - RNA, 19 nt, Artificial Sequence
  Description of Artificial Sequence: Synthetic oligonucleotide
auaggccgguuccuccaac

SEQ ID NO: 2768819 - RNA, 19 nt, Artificial Sequence
  Description of Artificial Sequence: Synthetic oligonucleotide
uaggccgguuccuccaacc

SEQ ID NO: 2768820 - RNA, 19 nt, Artificial Sequence
  Description of Artificial Sequence: Synthetic oligonucleotide
cuguggccagguuauuaag

SEQ ID NO: 2768821 - RNA, 19 nt, Artificial Sequence
  Description of Artificial Sequence: Synthetic oligonucleotide
gagaaccacaaggggcacg

SEQ ID NO: 2768822 - RNA, 19 nt, Artificial Sequence
  Description of Artificial Sequence: Synthetic oligonucleotide
gugucuuacugccggggug

SEQ ID NO: 2768823 - RNA, 19 nt, Artificial Sequence
  Description of Artificial Sequence: Synthetic oligonucleotide
auaaugguuuacauugaua

SEQ ID NO: 2768824 - RNA, 19 nt, Artificial Sequence
  Description of Artificial Sequence: Synthetic oligonucleotide
ucguacuccucgguucccg

SEQ ID NO: 2768825 - RNA, 19 nt, Artificial Sequence
  Description of Artificial Sequence: Synthetic oligonucleotide
gcacgaagaaggcaaaguc

SEQ ID NO: 2768826 - RNA, 19 nt, Artificial Sequence
  Description of Artificial Sequence: Synthetic oligonucleotide
ugcuuggcuggguuguuaa

SEQ ID NO: 2768827 - RNA, 19 nt, Artificial Sequence
  Description of Artificial Sequence: Synthetic oligonucleotide
agcacgagagagauggaga

SEQ ID NO: 2768828 - RNA, 19 nt, Artificial Sequence
  Description of Artificial Sequence: Synthetic oligonucleotide
caccacggccuucagcugc

SEQ ID NO: 2768829 - RNA, 19 nt, Artificial Sequence
  Description of Artificial Sequence: Synthetic oligonucleotide
gccgcacucuucuuguugg

SEQ ID NO: 2768830 - RNA, 19 nt, Artificial Sequence
  Description of Artificial Sequence: Synthetic oligonucleotide
cauacucuccgccgcacuc

SEQ ID NO: 2768831 - RNA, 19 nt, Artificial Sequence
  Description of Artificial Sequence: Synthetic oligonucleotide
gagagagauggagaugaga

SEQ ID NO: 2768832 - RNA, 19 nt, Artificial Sequence
  Description of Artificial Sequence: Synthetic oligonucleotide
gucauggcccuguuccacc

SEQ ID NO: 2768833 - RNA, 19 nt, Artificial Sequence
  Description of Artificial Sequence: Synthetic oligonucleotide
cguaaugaagauguugacc

SEQ ID NO: 2768834 - RNA, 19 nt, Artificial Sequence
  Description of Artificial Sequence: Synthetic oligonucleotide
auuugaccaagaagaugag

SEQ ID NO: 2768835 - RNA, 19 nt, Artificial Sequence
  Description of Artificial Sequence: Synthetic oligonucleotide
gccguaaugaagauguuga

SEQ ID NO: 2768836 - RNA, 19 nt, Artificial Sequence
  Description of Artificial Sequence: Synthetic oligonucleotide
uccgccgcacucuucuugu

SEQ ID NO: 2768837 - RNA, 19 nt, Artificial Sequence
  Description of Artificial Sequence: Synthetic oligonucleotide
cagcacgagagagauggag

SEQ ID NO: 2768838 - RNA, 19 nt, Artificial Sequence
  Description of Artificial Sequence: Synthetic oligonucleotide
uggccagguuauuaaggaa

SEQ ID NO: 2768839 - RNA, 19 nt, Artificial Sequence
  Description of Artificial Sequence: Synthetic oligonucleotide
caggggucuggauggcugg

SEQ ID NO: 2768840 - RNA, 19 nt, Artificial Sequence
  Description of Artificial Sequence: Synthetic oligonucleotide
acacaaggagagagaugcc

SEQ ID NO: 2768841 - RNA, 19 nt, Artificial Sequence
  Description of Artificial Sequence: Synthetic oligonucleotide
gagcagcacacccacucca

SEQ ID NO: 2768842 - RNA, 19 nt, Artificial Sequence
  Description of Artificial Sequence: Synthetic oligonucleotide
cagcacacccacuccaauc

SEQ ID NO: 2768843 - RNA, 19 nt, Artificial Sequence
  Description of Artificial Sequence: Synthetic oligonucleotide
uuguuggcauaaugguuua

SEQ ID NO: 2768844 - RNA, 19 nt, Artificial Sequence
  Description of Artificial Sequence: Synthetic oligonucleotide
aaggggcacgaagaaggca

SEQ ID NO: 2768845 - RNA, 19 nt, Artificial Sequence
  Description of Artificial Sequence: Synthetic oligonucleotide
agaugccuugaggccaugg

SEQ ID NO: 2768846 - RNA, 19 nt, Artificial Sequence
  Description of Artificial Sequence: Synthetic oligonucleotide
guccagcauacucuccgcc

SEQ ID NO: 2768847 - RNA, 19 nt, Artificial Sequence
  Description of Artificial Sequence: Synthetic oligonucleotide
cacaaggggcacgaagaag

SEQ ID NO: 2768848 - RNA, 19 nt, Artificial Sequence
  Description of Artificial Sequence: Synthetic oligonucleotide
aggggcacgaagaaggcaa

SEQ ID NO: 2768849 - RNA, 19 nt, Artificial Sequence
  Description of Artificial Sequence: Synthetic oligonucleotide
agcauacucuccgccgcac

SEQ ID NO: 2768850 - RNA, 19 nt, Artificial Sequence
  Description of Artificial Sequence: Synthetic oligonucleotide
uuaaggacucugggugucu

SEQ ID NO: 2768851 - RNA, 19 nt, Artificial Sequence
  Description of Artificial Sequence: Synthetic oligonucleotide
caaagucauggcccuguuc

SEQ ID NO: 2768852 - RNA, 19 nt, Artificial Sequence
  Description of Artificial Sequence: Synthetic oligonucleotide
guugaccaccacgaugaug

SEQ ID NO: 2768853 - RNA, 19 nt, Artificial Sequence
  Description of Artificial Sequence: Synthetic oligonucleotide
cucgguucccgacuccaug

SEQ ID NO: 2768854 - RNA, 19 nt, Artificial Sequence
  Description of Artificial Sequence: Synthetic oligonucleotide
aaccaguccuguggccagg

SEQ ID NO: 2768855 - RNA, 19 nt, Artificial Sequence
  Description of Artificial Sequence: Synthetic oligonucleotide
agauguugaccaccacgau

SEQ ID NO: 2768856 - RNA, 19 nt, Artificial Sequence
  Description of Artificial Sequence: Synthetic oligonucleotide
gucgccguugagcucguac

SEQ ID NO: 2768857 - RNA, 19 nt, Artificial Sequence
  Description of Artificial Sequence: Synthetic oligonucleotide
ggagcccgggcgcaggucg

SEQ ID NO: 2768858 - RNA, 19 nt, Artificial Sequence
  Description of Artificial Sequence: Synthetic oligonucleotide
auggcaguugcaggggucu

SEQ ID NO: 2768859 - RNA, 19 nt, Artificial Sequence
  Description of Artificial Sequence: Synthetic oligonucleotide
acguccauuauaggcuucu

SEQ ID NO: 2768860 - RNA, 19 nt, Artificial Sequence
  Description of Artificial Sequence: Synthetic oligonucleotide
cugugagucagauaacuuu

SEQ ID NO: 2768861 - RNA, 19 nt, Artificial Sequence
  Description of Artificial Sequence: Synthetic oligonucleotide
aguccuguggccagguuau

SEQ ID NO: 2768862 - RNA, 19 nt, Artificial Sequence
  Description of Artificial Sequence: Synthetic oligonucleotide
cuuuaaggacucugggugu

SEQ ID NO: 2768863 - RNA, 19 nt, Artificial Sequence
  Description of Artificial Sequence: Synthetic oligonucleotide
ucuggaccccaaaggccgu

SEQ ID NO: 2768864 - RNA, 19 nt, Artificial Sequence
  Description of Artificial Sequence: Synthetic oligonucleotide
uuacugccggggugccacg

SEQ ID NO: 2768865 - RNA, 19 nt, Artificial Sequence
  Description of Artificial Sequence: Synthetic oligonucleotide
ggccguaaugaagauguug

SEQ ID NO: 2768866 - RNA, 19 nt, Artificial Sequence
  Description of Artificial Sequence: Synthetic oligonucleotide
acaaggagagagaugccuu

SEQ ID NO: 2768867 - RNA, 19 nt, Artificial Sequence
  Description of Artificial Sequence: Synthetic oligonucleotide
uccucgguucccgacucca

SEQ ID NO: 2768868 - RNA, 19 nt, Artificial Sequence
  Description of Artificial Sequence: Synthetic oligonucleotide
uguuggcauaaugguuuac

SEQ ID NO: 2768869 - RNA, 19 nt, Artificial Sequence
  Description of Artificial Sequence: Synthetic oligonucleotide
agaucguauuugaccaaga

SEQ ID NO: 2768870 - RNA, 19 nt, Artificial Sequence
  Description of Artificial Sequence: Synthetic oligonucleotide
cauaaugguuuacauugau

SEQ ID NO: 2768871 - RNA, 19 nt, Artificial Sequence
  Description of Artificial Sequence: Synthetic oligonucleotide
acuccauggugcggccacc

SEQ ID NO: 2768872 - RNA, 19 nt, Artificial Sequence
  Description of Artificial Sequence: Synthetic oligonucleotide
accccagcgggcuggcgag

SEQ ID NO: 2768873 - RNA, 19 nt, Artificial Sequence
  Description of Artificial Sequence: Synthetic oligonucleotide
gcucguacuccucgguucc

SEQ ID NO: 2768874 - RNA, 19 nt, Artificial Sequence
  Description of Artificial Sequence: Synthetic oligonucleotide
gugccacguccauuauagg

SEQ ID NO: 2768875 - RNA, 19 nt, Artificial Sequence
  Description of Artificial Sequence: Synthetic oligonucleotide
auacucuccgccgcacucu

SEQ ID NO: 2768876 - RNA, 19 nt, Artificial Sequence
  Description of Artificial Sequence: Synthetic oligonucleotide
auggcugggcugugaguca

SEQ ID NO: 2768877 - RNA, 19 nt, Artificial Sequence
  Description of Artificial Sequence: Synthetic oligonucleotide
ugagaaccacaaggggcac

SEQ ID NO: 2768878 - RNA, 19 nt, Artificial Sequence
  Description of Artificial Sequence: Synthetic oligonucleotide
ccagcauacucuccgccgc

SEQ ID NO: 2768879 - RNA, 19 nt, Artificial Sequence
  Description of Artificial Sequence: Synthetic oligonucleotide
uccuguggccagguuauua

SEQ ID NO: 2768880 - RNA, 19 nt, Artificial Sequence
  Description of Artificial Sequence: Synthetic oligonucleotide
acucuucuuguuggcauaa

SEQ ID NO: 2768881 - RNA, 19 nt, Artificial Sequence
  Description of Artificial Sequence: Synthetic oligonucleotide
cacgagagagauggagaug

SEQ ID NO: 2768882 - RNA, 19 nt, Artificial Sequence
  Description of Artificial Sequence: Synthetic oligonucleotide
guacuccucgguucccgac

SEQ ID NO: 2768883 - RNA, 19 nt, Artificial Sequence
  Description of Artificial Sequence: Synthetic oligonucleotide
uguugaccaccacgaugau

SEQ ID NO: 2768884 - RNA, 19 nt, Artificial Sequence
  Description of Artificial Sequence: Synthetic oligonucleotide
cacccacuccaaucugcag

SEQ ID NO: 2768885 - RNA, 19 nt, Artificial Sequence
  Description of Artificial Sequence: Synthetic oligonucleotide
agauaacuuuaaggacucu

SEQ ID NO: 2768886 - RNA, 19 nt, Artificial Sequence
  Description of Artificial Sequence: Synthetic oligonucleotide
acacccacuccaaucugca

SEQ ID NO: 2768887 - RNA, 19 nt, Artificial Sequence
  Description of Artificial Sequence: Synthetic oligonucleotide
gaaguccagcuuggcgugc

SEQ ID NO: 2768888 - RNA, 19 nt, Artificial Sequence
  Description of Artificial Sequence: Synthetic oligonucleotide
cuccgccgcacucuucuug

SEQ ID NO: 2768889 - RNA, 19 nt, Artificial Sequence
  Description of Artificial Sequence: Synthetic oligonucleotide
gauaggccgguuccuccaa

SEQ ID NO: 2768890 - RNA, 19 nt, Artificial Sequence
  Description of Artificial Sequence: Synthetic oligonucleotide
ccacgaugaugaaaaccag

SEQ ID NO: 2768891 - RNA, 19 nt, Artificial Sequence
  Description of Artificial Sequence: Synthetic oligonucleotide
gcccuguuccaccacggcc

SEQ ID NO: 2768892 - RNA, 19 nt, Artificial Sequence
  Description of Artificial Sequence: Synthetic oligonucleotide
ugcgacgcguuggccauga

SEQ ID NO: 2768893 - RNA, 19 nt, Artificial Sequence
  Description of Artificial Sequence: Synthetic oligonucleotide
uacucuccgccgcacucuu

SEQ ID NO: 2768894 - RNA, 19 nt, Artificial Sequence
  Description of Artificial Sequence: Synthetic oligonucleotide
ccguaaugaagauguugac

SEQ ID NO: 2768895 - RNA, 19 nt, Artificial Sequence
  Description of Artificial Sequence: Synthetic oligonucleotide
cacaaggagagagaugccu

SEQ ID NO: 2768896 - RNA, 19 nt, Artificial Sequence
  Description of Artificial Sequence: Synthetic oligonucleotide
gguucccgacuccauggug

SEQ ID NO: 2768897 - RNA, 19 nt, Artificial Sequence
  Description of Artificial Sequence: Synthetic oligonucleotide
ccauggugcggccacccgg

SEQ ID NO: 2768898 - RNA, 19 nt, Artificial Sequence
  Description of Artificial Sequence: Synthetic oligonucleotide
gcaauguccagcauacucu

SEQ ID NO: 2768899 - RNA, 19 nt, Artificial Sequence
  Description of Artificial Sequence: Synthetic oligonucleotide
gugagucagauaacuuuaa

SEQ ID NO: 2768900 - RNA, 19 nt, Artificial Sequence
  Description of Artificial Sequence: Synthetic oligonucleotide
aggggucuggauggcuggg

SEQ ID NO: 2768901 - RNA, 19 nt, Artificial Sequence
  Description of Artificial Sequence: Synthetic oligonucleotide
caguccuguggccagguua

SEQ ID NO: 2768902 - RNA, 19 nt, Artificial Sequence
  Description of Artificial Sequence: Synthetic oligonucleotide
uaaggacucugggugucuu

SEQ ID NO: 2768903 - RNA, 19 nt, Artificial Sequence
  Description of Artificial Sequence: Synthetic oligonucleotide
uuacauugauaggccgguu

SEQ ID NO: 2768904 - RNA, 19 nt, Artificial Sequence
  Description of Artificial Sequence: Synthetic oligonucleotide
ggucuggauggcugggcug

SEQ ID NO: 2768905 - RNA, 19 nt, Artificial Sequence
  Description of Artificial Sequence: Synthetic oligonucleotide
ggccgguuccuccaacccc

SEQ ID NO: 2768906 - RNA, 19 nt, Artificial Sequence
  Description of Artificial Sequence: Synthetic oligonucleotide
ucuuacugccggggugcca

SEQ ID NO: 2768907 - RNA, 19 nt, Artificial Sequence
  Description of Artificial Sequence: Synthetic oligonucleotide
gcguuggccaugagcaggg

SEQ ID NO: 2768908 - RNA, 19 nt, Artificial Sequence
  Description of Artificial Sequence: Synthetic oligonucleotide
cacguccauuauaggcuuc

SEQ ID NO: 2768909 - RNA, 19 nt, Artificial Sequence
  Description of Artificial Sequence: Synthetic oligonucleotide
ugcaggggucuggauggcu

SEQ ID NO: 2768910 - RNA, 19 nt, Artificial Sequence
  Description of Artificial Sequence: Synthetic oligonucleotide
agagaugccuugaggccau

SEQ ID NO: 2768911 - RNA, 19 nt, Artificial Sequence
  Description of Artificial Sequence: Synthetic oligonucleotide
uggcgugcuuggcuggguu

SEQ ID NO: 2768912 - RNA, 19 nt, Artificial Sequence
  Description of Artificial Sequence: Synthetic oligonucleotide
gcuuggcuggguuguuaag

SEQ ID NO: 2768913 - RNA, 19 nt, Artificial Sequence
  Description of Artificial Sequence: Synthetic oligonucleotide
ucccgacuccauggugcgg

SEQ ID NO: 2768914 - RNA, 19 nt, Artificial Sequence
  Description of Artificial Sequence: Synthetic oligonucleotide
ugaccaccacgaugaugaa

SEQ ID NO: 2768915 - RNA, 19 nt, Artificial Sequence
  Description of Artificial Sequence: Synthetic oligonucleotide
gccauggcaguugcagggg

SEQ ID NO: 2768916 - RNA, 19 nt, Artificial Sequence
  Description of Artificial Sequence: Synthetic oligonucleotide
cccacuccaaucugcagca

SEQ ID NO: 2768917 - RNA, 19 nt, Artificial Sequence
  Description of Artificial Sequence: Synthetic oligonucleotide
cacucuucuuguuggcaua

SEQ ID NO: 2768918 - RNA, 19 nt, Artificial Sequence
  Description of Artificial Sequence: Synthetic oligonucleotide
cauggcccuguuccaccac

SEQ ID NO: 2768919 - RNA, 19 nt, Artificial Sequence
  Description of Artificial Sequence: Synthetic oligonucleotide
uggaccccaaaggccguaa

SEQ ID NO: 2768920 - RNA, 19 nt, Artificial Sequence
  Description of Artificial Sequence: Synthetic oligonucleotide
ggcgugcuuggcuggguug

SEQ ID NO: 2768921 - RNA, 19 nt, Artificial Sequence
  Description of Artificial Sequence: Synthetic oligonucleotide
cucguacuccucgguuccc

SEQ ID NO: 2768922 - RNA, 19 nt, Artificial Sequence
  Description of Artificial Sequence: Synthetic oligonucleotide
gccguugagcucguacucc

SEQ ID NO: 2768923 - RNA, 19 nt, Artificial Sequence
  Description of Artificial Sequence: Synthetic oligonucleotide
cccgacuccauggugcggc

SEQ ID NO: 2768924 - RNA, 19 nt, Artificial Sequence
  Description of Artificial Sequence: Synthetic oligonucleotide
ccaugagcagggcaauguc

SEQ ID NO: 2768925 - RNA, 19 nt, Artificial Sequence
  Description of Artificial Sequence: Synthetic oligonucleotide
gccacguccauuauaggcu

SEQ ID NO: 2768926 - RNA, 19 nt, Artificial Sequence
  Description of Artificial Sequence: Synthetic oligonucleotide
cuccucgguucccgacucc

SEQ ID NO: 2768927 - RNA, 19 nt, Artificial Sequence
  Description of Artificial Sequence: Synthetic oligonucleotide
uugcaggggucuggauggc

SEQ ID NO: 2768928 - RNA, 19 nt, Artificial Sequence
  Description of Artificial Sequence: Synthetic oligonucleotide
agcagcacacccacuccaa

SEQ ID NO: 2768929 - RNA, 19 nt, Artificial Sequence
  Description of Artificial Sequence: Synthetic oligonucleotide
cucuccgccgcacucuucu

SEQ ID NO: 2768930 - RNA, 19 nt, Artificial Sequence
  Description of Artificial Sequence: Synthetic oligonucleotide
ggcugugagucagauaacu

SEQ ID NO: 2768931 - RNA, 19 nt, Artificial Sequence
  Description of Artificial Sequence: Synthetic oligonucleotide
agcccgggcgcaggucgcc

SEQ ID NO: 2768932 - RNA, 19 nt, Artificial Sequence
  Description of Artificial Sequence: Synthetic oligonucleotide
gucuggauggcugggcugu

SEQ ID NO: 2768933 - RNA, 19 nt, Artificial Sequence
  Description of Artificial Sequence: Synthetic oligonucleotide
ggguuguuaagaucguauu

SEQ ID NO: 2768934 - RNA, 19 nt, Artificial Sequence
  Description of Artificial Sequence: Synthetic oligonucleotide
gucuuacugccggggugcc

SEQ ID NO: 2768935 - RNA, 19 nt, Artificial Sequence
  Description of Artificial Sequence: Synthetic oligonucleotide
gcacgagagagauggagau

SEQ ID NO: 2768936 - RNA, 19 nt, Artificial Sequence
  Description of Artificial Sequence: Synthetic oligonucleotide
auaggcuucuggaccccaa

SEQ ID NO: 2768937 - RNA, 19 nt, Artificial Sequence
  Description of Artificial Sequence: Synthetic oligonucleotide
cugcagcacgagagagaug

SEQ ID NO: 2768938 - RNA, 19 nt, Artificial Sequence
  Description of Artificial Sequence: Synthetic oligonucleotide
gcacacaaggagagagaug

SEQ ID NO: 2768939 - RNA, 19 nt, Artificial Sequence
  Description of Artificial Sequence: Synthetic oligonucleotide
cagcauacucuccgccgca

SEQ ID NO: 2768940 - RNA, 19 nt, Artificial Sequence
  Description of Artificial Sequence: Synthetic oligonucleotide
gcacacccacuccaaucug

SEQ ID NO: 2768941 - RNA, 19 nt, Artificial Sequence
  Description of Artificial Sequence: Synthetic oligonucleotide
uacugccggggugccacgu

SEQ ID NO: 2768942 - RNA, 19 nt, Artificial Sequence
  Description of Artificial Sequence: Synthetic oligonucleotide
cgacgcguuggccaugagc

SEQ ID NO: 2768943 - RNA, 19 nt, Artificial Sequence
  Description of Artificial Sequence: Synthetic oligonucleotide
uuggcgugcuuggcugggu

SEQ ID NO: 2768944 - RNA, 19 nt, Artificial Sequence
  Description of Artificial Sequence: Synthetic oligonucleotide
aggcaaagucauggcccug

SEQ ID NO: 2768945 - RNA, 19 nt, Artificial Sequence
  Description of Artificial Sequence: Synthetic oligonucleotide
ggugucuuacugccggggu

SEQ ID NO: 2768946 - RNA, 19 nt, Artificial Sequence
  Description of Artificial Sequence: Synthetic oligonucleotide
gagcucguacuccucgguu

SEQ ID NO: 2768947 - RNA, 19 nt, Artificial Sequence
  Description of Artificial Sequence: Synthetic oligonucleotide
ggcccuguuccaccacggc

SEQ ID NO: 2768948 - RNA, 19 nt, Artificial Sequence
  Description of Artificial Sequence: Synthetic oligonucleotide
cgcguuggccaugagcagg

SEQ ID NO: 2768949 - RNA, 19 nt, Artificial Sequence
  Description of Artificial Sequence: Synthetic oligonucleotide
ccagguuauuaaggaaguc

SEQ ID NO: 2768950 - RNA, 19 nt, Artificial Sequence
  Description of Artificial Sequence: Synthetic oligonucleotide
gccgguuccuccaacccca

SEQ ID NO: 2768951 - RNA, 19 nt, Artificial Sequence
  Description of Artificial Sequence: Synthetic oligonucleotide
caaaggccguaaugaagau

SEQ ID NO: 2768952 - RNA, 19 nt, Artificial Sequence
  Description of Artificial Sequence: Synthetic oligonucleotide
cuggguuguuaagaucgua

SEQ ID NO: 2768953 - RNA, 19 nt, Artificial Sequence
  Description of Artificial Sequence: Synthetic oligonucleotide
gccagguuauuaaggaagu

SEQ ID NO: 2768954 - RNA, 19 nt, Artificial Sequence
  Description of Artificial Sequence: Synthetic oligonucleotide
ggcaaagucauggcccugu

SEQ ID NO: 2768955 - RNA, 19 nt, Artificial Sequence
  Description of Artificial Sequence: Synthetic oligonucleotide
ucuccgccgcacucuucuu

SEQ ID NO: 2768956 - RNA, 19 nt, Artificial Sequence
  Description of Artificial Sequence: Synthetic oligonucleotide
gagaugccuugaggccaug

SEQ ID NO: 2768957 - RNA, 19 nt, Artificial Sequence
  Description of Artificial Sequence: Synthetic oligonucleotide
gagcccgggcgcaggucgc

SEQ ID NO: 2768958 - RNA, 19 nt, Artificial Sequence
  Description of Artificial Sequence: Synthetic oligonucleotide
cagcugcgacgcguuggcc

SEQ ID NO: 2768959 - RNA, 19 nt, Artificial Sequence
  Description of Artificial Sequence: Synthetic oligonucleotide
cguauuugaccaagaagau

SEQ ID NO: 2768960 - RNA, 19 nt, Artificial Sequence
  Description of Artificial Sequence: Synthetic oligonucleotide
ggcuggcgaggcgucgggg

SEQ ID NO: 2768961 - RNA, 19 nt, Artificial Sequence
  Description of Artificial Sequence: Synthetic oligonucleotide
caaccccagcgggcuggcg

SEQ ID NO: 2768962 - RNA, 19 nt, Artificial Sequence
  Description of Artificial Sequence: Synthetic oligonucleotide
gaaccacaaggggcacgaa

SEQ ID NO: 2768963 - RNA, 19 nt, Artificial Sequence
  Description of Artificial Sequence: Synthetic oligonucleotide
ggccuucagcugcgacgcg

SEQ ID NO: 2768964 - RNA, 19 nt, Artificial Sequence
  Description of Artificial Sequence: Synthetic oligonucleotide
ccacaaggggcacgaagaa

SEQ ID NO: 2768965 - RNA, 19 nt, Artificial Sequence
  Description of Artificial Sequence: Synthetic oligonucleotide
gggugccacguccauuaua

SEQ ID NO: 2768966 - RNA, 19 nt, Artificial Sequence
  Description of Artificial Sequence: Synthetic oligonucleotide
gugcuuggcuggguuguua

SEQ ID NO: 2768967 - RNA, 19 nt, Artificial Sequence
  Description of Artificial Sequence: Synthetic oligonucleotide
ggacucugggugucuuacu

SEQ ID NO: 2768968 - RNA, 19 nt, Artificial Sequence
  Description of Artificial Sequence: Synthetic oligonucleotide
cgccguugagcucguacuc

SEQ ID NO: 2768969 - RNA, 19 nt, Artificial Sequence
  Description of Artificial Sequence: Synthetic oligonucleotide
gggcugugagucagauaac

SEQ ID NO: 2768970 - RNA, 19 nt, Artificial Sequence
  Description of Artificial Sequence: Synthetic oligonucleotide
ccagcgggcuggcgaggcg

SEQ ID NO: 2768971 - RNA, 19 nt, Artificial Sequence
  Description of Artificial Sequence: Synthetic oligonucleotide
gcauacucuccgccgcacu

SEQ ID NO: 2768972 - RNA, 19 nt, Artificial Sequence
  Description of Artificial Sequence: Synthetic oligonucleotide
gcugcgacgcguuggccau

SEQ ID NO: 2768973 - RNA, 19 nt, Artificial Sequence
  Description of Artificial Sequence: Synthetic oligonucleotide
gcugugagucagauaacuu

SEQ ID NO: 2768974 - RNA, 19 nt, Artificial Sequence
  Description of Artificial Sequence: Synthetic oligonucleotide
cggggugccacguccauua

SEQ ID NO: 2768975 - RNA, 19 nt, Artificial Sequence
  Description of Artificial Sequence: Synthetic oligonucleotide
gggcgcaggucgccguuga

SEQ ID NO: 2768976 - RNA, 19 nt, Artificial Sequence
  Description of Artificial Sequence: Synthetic oligonucleotide
aggccguaaugaagauguu

SEQ ID NO: 2768977 - RNA, 19 nt, Artificial Sequence
  Description of Artificial Sequence: Synthetic oligonucleotide
cccagcgggcuggcgaggc

SEQ ID NO: 2768978 - RNA, 19 nt, Artificial Sequence
  Description of Artificial Sequence: Synthetic oligonucleotide
cugcgacgcguuggccaug

SEQ ID NO: 2768979 - RNA, 19 nt, Artificial Sequence
  Description of Artificial Sequence: Synthetic oligonucleotide
ggggcacgaagaaggcaaa

SEQ ID NO: 2768980 - RNA, 19 nt, Artificial Sequence
  Description of Artificial Sequence: Synthetic oligonucleotide
gcagcacacccacuccaau

SEQ ID NO: 2768981 - RNA, 19 nt, Artificial Sequence
  Description of Artificial Sequence: Synthetic oligonucleotide
gcgggcuggcgaggcgucg

SEQ ID NO: 2768982 - RNA, 19 nt, Artificial Sequence
  Description of Artificial Sequence: Synthetic oligonucleotide
gcuggguuguuaagaucgu

SEQ ID NO: 2768983 - RNA, 19 nt, Artificial Sequence
  Description of Artificial Sequence: Synthetic oligonucleotide
gccuucagcugcgacgcgu

SEQ ID NO: 2768984 - RNA, 19 nt, Artificial Sequence
  Description of Artificial Sequence: Synthetic oligonucleotide
cguacuccucgguucccga

SEQ ID NO: 2768985 - RNA, 19 nt, Artificial Sequence
  Description of Artificial Sequence: Synthetic oligonucleotide
gcgugcuuggcuggguugu

SEQ ID NO: 2768986 - RNA, 19 nt, Artificial Sequence
  Description of Artificial Sequence: Synthetic oligonucleotide
cucuucuuguuggcauaau

SEQ ID NO: 2768987 - RNA, 19 nt, Artificial Sequence
  Description of Artificial Sequence: Synthetic oligonucleotide
cuggaccccaaaggccgua

SEQ ID NO: 2768988 - RNA, 19 nt, Artificial Sequence
  Description of Artificial Sequence: Synthetic oligonucleotide
ccacguccauuauaggcuu

SEQ ID NO: 2768989 - RNA, 19 nt, Artificial Sequence
  Description of Artificial Sequence: Synthetic oligonucleotide
cagcgggcuggcgaggcgu

SEQ ID NO: 2768990 - RNA, 19 nt, Artificial Sequence
  Description of Artificial Sequence: Synthetic oligonucleotide
gcccgggcgcaggucgccg

SEQ ID NO: 2768991 - RNA, 19 nt, Artificial Sequence
  Description of Artificial Sequence: Synthetic oligonucleotide
caguugcaggggucuggau

SEQ ID NO: 2768992 - RNA, 19 nt, Artificial Sequence
  Description of Artificial Sequence: Synthetic oligonucleotide
gcagcacgagagagaugga

SEQ ID NO: 2768993 - RNA, 19 nt, Artificial Sequence
  Description of Artificial Sequence: Synthetic oligonucleotide
ggaccccaaaggccguaau

SEQ ID NO: 2768994 - RNA, 19 nt, Artificial Sequence
  Description of Artificial Sequence: Synthetic oligonucleotide
cgggcuggcgaggcgucgg

SEQ ID NO: 2768995 - RNA, 19 nt, Artificial Sequence
  Description of Artificial Sequence: Synthetic oligonucleotide
gcgacgcguuggccaugag

SEQ ID NO: 2768996 - RNA, 19 nt, Artificial Sequence
  Description of Artificial Sequence: Synthetic oligonucleotide
aggucgccguugagcucgu

SEQ ID NO: 2768997 - RNA, 19 nt, Artificial Sequence
  Description of Artificial Sequence: Synthetic oligonucleotide
ccuucagcugcgacgcguu

SEQ ID NO: 2768998 - RNA, 19 nt, Artificial Sequence
  Description of Artificial Sequence: Synthetic oligonucleotide
cguuggccaugagcagggc

SEQ ID NO: 2768999 - RNA, 19 nt, Artificial Sequence
  Description of Artificial Sequence: Synthetic oligonucleotide
gggcaauguccagcauacu

SEQ ID NO: 2769000 - RNA, 19 nt, Artificial Sequence
  Description of Artificial Sequence: Synthetic oligonucleotide
ggggugccacguccauuau

SEQ ID NO: 2769001 - RNA, 19 nt, Artificial Sequence
  Description of Artificial Sequence: Synthetic oligonucleotide
guccuguggccagguuauu

SEQ ID NO: 2769002 - RNA, 19 nt, Artificial Sequence
  Description of Artificial Sequence: Synthetic oligonucleotide
cgggcgcaggucgccguug

SEQ ID NO: 2769003 - RNA, 19 nt, Artificial Sequence
  Description of Artificial Sequence: Synthetic oligonucleotide
gccggggugccacguccau

SEQ ID NO: 2769004 - RNA, 19 nt, Artificial Sequence
  Description of Artificial Sequence: Synthetic oligonucleotide
cgacuccauggugcggcca

SEQ ID NO: 2769005 - RNA, 19 nt, Artificial Sequence
  Description of Artificial Sequence: Synthetic oligonucleotide
cgguucccgacuccauggu

SEQ ID NO: 2769006 - RNA, 19 nt, Artificial Sequence
  Description of Artificial Sequence: Synthetic oligonucleotide
cccgggcgcaggucgccgu

SEQ ID NO: 2769007 - RNA, 19 nt, Artificial Sequence
  Description of Artificial Sequence: Synthetic oligonucleotide
ggucgccguugagcucgua

SEQ ID NO: 2769008 - RNA, 19 nt, Artificial Sequence
  Description of Artificial Sequence: Synthetic oligonucleotide
ccgccgcacucuucuuguu

SEQ ID NO: 2769009 - RNA, 19 nt, Artificial Sequence
  Description of Artificial Sequence: Synthetic oligonucleotide
ccggggugccacguccauu

SEQ ID NO: 2769010 - RNA, 19 nt, Artificial Sequence
  Description of Artificial Sequence: Synthetic oligonucleotide
ccgggcgcaggucgccguu

SEQ ID NO: 2769011 - RNA, 19 nt, Artificial Sequence
  Description of Artificial Sequence: Synthetic oligonucleotide
gaaauuuuagcuuucgugg

SEQ ID NO: 2769012 - RNA, 19 nt, Artificial Sequence
  Description of Artificial Sequence: Synthetic oligonucleotide
auuaaaccaauucaaacac

SEQ ID NO: 2769013 - RNA, 19 nt, Artificial Sequence
  Description of Artificial Sequence: Synthetic oligonucleotide
aaauuuuagcuuucguggc

SEQ ID NO: 2769014 - RNA, 19 nt, Artificial Sequence
  Description of Artificial Sequence: Synthetic oligonucleotide
agaagcgucaccucgaagc

SEQ ID NO: 2769015 - RNA, 19 nt, Artificial Sequence
  Description of Artificial Sequence: Synthetic oligonucleotide
uuuaacuuuuauuaaacca

SEQ ID NO: 2769016 - RNA, 19 nt, Artificial Sequence
  Description of Artificial Sequence: Synthetic oligonucleotide
uuaacuuuuauuaaaccaa

SEQ ID NO: 2769017 - RNA, 19 nt, Artificial Sequence
  Description of Artificial Sequence: Synthetic oligonucleotide
aauaccaguccagaguucc

SEQ ID NO: 2769018 - RNA, 19 nt, Artificial Sequence
  Description of Artificial Sequence: Synthetic oligonucleotide
aauuuuagcuuucguggcg

SEQ ID NO: 2769019 - RNA, 19 nt, Artificial Sequence
  Description of Artificial Sequence: Synthetic oligonucleotide
uuauuaaaccaauucaaac

SEQ ID NO: 2769020 - RNA, 19 nt, Artificial Sequence
  Description of Artificial Sequence: Synthetic oligonucleotide
uaucauaaaugcuucaaca

SEQ ID NO: 2769021 - RNA, 19 nt, Artificial Sequence
  Description of Artificial Sequence: Synthetic oligonucleotide
agaaacuggcuucagguac

SEQ ID NO: 2769022 - RNA, 19 nt, Artificial Sequence
  Description of Artificial Sequence: Synthetic oligonucleotide
uuucuggugaggaagaaac

SEQ ID NO: 2769023 - RNA, 19 nt, Artificial Sequence
  Description of Artificial Sequence: Synthetic oligonucleotide
ugcuucaacaucuccaggg

SEQ ID NO: 2769024 - RNA, 19 nt, Artificial Sequence
  Description of Artificial Sequence: Synthetic oligonucleotide
ucuuuaaccaccucuugag

SEQ ID NO: 2769025 - RNA, 19 nt, Artificial Sequence
  Description of Artificial Sequence: Synthetic oligonucleotide
ucaaacacuuuuacaaugc

SEQ ID NO: 2769026 - RNA, 19 nt, Artificial Sequence
  Description of Artificial Sequence: Synthetic oligonucleotide
uuaugaaagauacuucuuc

SEQ ID NO: 2769027 - RNA, 19 nt, Artificial Sequence
  Description of Artificial Sequence: Synthetic oligonucleotide
uuagguuuggccaugcacu

SEQ ID NO: 2769028 - RNA, 19 nt, Artificial Sequence
  Description of Artificial Sequence: Synthetic oligonucleotide
uuauuuaacuuuuauuaaa

SEQ ID NO: 2769029 - RNA, 19 nt, Artificial Sequence
  Description of Artificial Sequence: Synthetic oligonucleotide
ugcucaaugaccaccgccg

SEQ ID NO: 2769030 - RNA, 19 nt, Artificial Sequence
  Description of Artificial Sequence: Synthetic oligonucleotide
ucagauacuuuauuuaacu

SEQ ID NO: 2769031 - RNA, 19 nt, Artificial Sequence
  Description of Artificial Sequence: Synthetic oligonucleotide
uuuaaccaccucuugaggc

SEQ ID NO: 2769032 - RNA, 19 nt, Artificial Sequence
  Description of Artificial Sequence: Synthetic oligonucleotide
ugcacuaucauaaaugcuu

SEQ ID NO: 2769033 - RNA, 19 nt, Artificial Sequence
  Description of Artificial Sequence: Synthetic oligonucleotide
uaugaaagauacuucuuca

SEQ ID NO: 2769034 - RNA, 19 nt, Artificial Sequence
  Description of Artificial Sequence: Synthetic oligonucleotide
gauggguucaccugcacag

SEQ ID NO: 2769035 - RNA, 19 nt, Artificial Sequence
  Description of Artificial Sequence: Synthetic oligonucleotide
ugaaagcucagcauggaga

SEQ ID NO: 2769036 - RNA, 19 nt, Artificial Sequence
  Description of Artificial Sequence: Synthetic oligonucleotide
uucaaacacuuuuacaaug

SEQ ID NO: 2769037 - RNA, 19 nt, Artificial Sequence
  Description of Artificial Sequence: Synthetic oligonucleotide
cuucaauucuuuaaccacc

SEQ ID NO: 2769038 - RNA, 19 nt, Artificial Sequence
  Description of Artificial Sequence: Synthetic oligonucleotide
ucauaaaugcuucaacauc

SEQ ID NO: 2769039 - RNA, 19 nt, Artificial Sequence
  Description of Artificial Sequence: Synthetic oligonucleotide
uuaauaccaguccagaguu

SEQ ID NO: 2769040 - RNA, 19 nt, Artificial Sequence
  Description of Artificial Sequence: Synthetic oligonucleotide
ucuucaauucuuuaaccac

SEQ ID NO: 2769041 - RNA, 19 nt, Artificial Sequence
  Description of Artificial Sequence: Synthetic oligonucleotide
aaccaauucaaacacuuuu

SEQ ID NO: 2769042 - RNA, 19 nt, Artificial Sequence
  Description of Artificial Sequence: Synthetic oligonucleotide
uuuacaaugccuuguugga

SEQ ID NO: 2769043 - RNA, 19 nt, Artificial Sequence
  Description of Artificial Sequence: Synthetic oligonucleotide
acauagcuuagguuuggcc

SEQ ID NO: 2769044 - RNA, 19 nt, Artificial Sequence
  Description of Artificial Sequence: Synthetic oligonucleotide
aagcucagcauggagacuc

SEQ ID NO: 2769045 - RNA, 19 nt, Artificial Sequence
  Description of Artificial Sequence: Synthetic oligonucleotide
ggaaauuuuagcuuucgug

SEQ ID NO: 2769046 - RNA, 19 nt, Artificial Sequence
  Description of Artificial Sequence: Synthetic oligonucleotide
ucuuaauaccaguccagag

SEQ ID NO: 2769047 - RNA, 19 nt, Artificial Sequence
  Description of Artificial Sequence: Synthetic oligonucleotide
gaaagcucagcauggagac

SEQ ID NO: 2769048 - RNA, 19 nt, Artificial Sequence
  Description of Artificial Sequence: Synthetic oligonucleotide
uucuuuaaccaccucuuga

SEQ ID NO: 2769049 - RNA, 19 nt, Artificial Sequence
  Description of Artificial Sequence: Synthetic oligonucleotide
gaaugaaagcucagcaugg

SEQ ID NO: 2769050 - RNA, 19 nt, Artificial Sequence
  Description of Artificial Sequence: Synthetic oligonucleotide
cuuucuuccgcuaggggcc

SEQ ID NO: 2769051 - RNA, 19 nt, Artificial Sequence
  Description of Artificial Sequence: Synthetic oligonucleotide
ugaaagauacuucuucaau

SEQ ID NO: 2769052 - RNA, 19 nt, Artificial Sequence
  Description of Artificial Sequence: Synthetic oligonucleotide
aggcucaggaaauuuuagc

SEQ ID NO: 2769053 - RNA, 19 nt, Artificial Sequence
  Description of Artificial Sequence: Synthetic oligonucleotide
ucagguacauagcuuaggu

SEQ ID NO: 2769054 - RNA, 19 nt, Artificial Sequence
  Description of Artificial Sequence: Synthetic oligonucleotide
aaaugcuucaacaucucca

SEQ ID NO: 2769055 - RNA, 19 nt, Artificial Sequence
  Description of Artificial Sequence: Synthetic oligonucleotide
uuguuggagggcuucgucg

SEQ ID NO: 2769056 - RNA, 19 nt, Artificial Sequence
  Description of Artificial Sequence: Synthetic oligonucleotide
acguccuuaugaaagauac

SEQ ID NO: 2769057 - RNA, 19 nt, Artificial Sequence
  Description of Artificial Sequence: Synthetic oligonucleotide
uuugcucucagauacuuua

SEQ ID NO: 2769058 - RNA, 19 nt, Artificial Sequence
  Description of Artificial Sequence: Synthetic oligonucleotide
uucaauucuuuaaccaccu

SEQ ID NO: 2769059 - RNA, 19 nt, Artificial Sequence
  Description of Artificial Sequence: Synthetic oligonucleotide
aaugcucaaugaccaccgc

SEQ ID NO: 2769060 - RNA, 19 nt, Artificial Sequence
  Description of Artificial Sequence: Synthetic oligonucleotide
augcucaaugaccaccgcc

SEQ ID NO: 2769061 - RNA, 19 nt, Artificial Sequence
  Description of Artificial Sequence: Synthetic oligonucleotide
aucauaaaugcuucaacau

SEQ ID NO: 2769062 - RNA, 19 nt, Artificial Sequence
  Description of Artificial Sequence: Synthetic oligonucleotide
aacacuuuuacaaugccuu

SEQ ID NO: 2769063 - RNA, 19 nt, Artificial Sequence
  Description of Artificial Sequence: Synthetic oligonucleotide
agcauggagacucccugcc

SEQ ID NO: 2769064 - RNA, 19 nt, Artificial Sequence
  Description of Artificial Sequence: Synthetic oligonucleotide
caaugcucaaugaccaccg

SEQ ID NO: 2769065 - RNA, 19 nt, Artificial Sequence
  Description of Artificial Sequence: Synthetic oligonucleotide
aucauuucuggugaggaag

SEQ ID NO: 2769066 - RNA, 19 nt, Artificial Sequence
  Description of Artificial Sequence: Synthetic oligonucleotide
uggccaugcacuaucauaa

SEQ ID NO: 2769067 - RNA, 19 nt, Artificial Sequence
  Description of Artificial Sequence: Synthetic oligonucleotide
uuaaaccaauucaaacacu

SEQ ID NO: 2769068 - RNA, 19 nt, Artificial Sequence
  Description of Artificial Sequence: Synthetic oligonucleotide
aaugaccaccgccgggccc

SEQ ID NO: 2769069 - RNA, 19 nt, Artificial Sequence
  Description of Artificial Sequence: Synthetic oligonucleotide
cauagcuuagguuuggcca

SEQ ID NO: 2769070 - RNA, 19 nt, Artificial Sequence
  Description of Artificial Sequence: Synthetic oligonucleotide
cuaucauaaaugcuucaac

SEQ ID NO: 2769071 - RNA, 19 nt, Artificial Sequence
  Description of Artificial Sequence: Synthetic oligonucleotide
cuuggauggguucaccugc

SEQ ID NO: 2769072 - RNA, 19 nt, Artificial Sequence
  Description of Artificial Sequence: Synthetic oligonucleotide
ugaggaagaaacuggcuuc

SEQ ID NO: 2769073 - RNA, 19 nt, Artificial Sequence
  Description of Artificial Sequence: Synthetic oligonucleotide
uuaaccaccucuugaggcu

SEQ ID NO: 2769074 - RNA, 19 nt, Artificial Sequence
  Description of Artificial Sequence: Synthetic oligonucleotide
cuuagguuuggccaugcac

SEQ ID NO: 2769075 - RNA, 19 nt, Artificial Sequence
  Description of Artificial Sequence: Synthetic oligonucleotide
agggaaugaaagcucagca

SEQ ID NO: 2769076 - RNA, 19 nt, Artificial Sequence
  Description of Artificial Sequence: Synthetic oligonucleotide
aaugccuuguuggagggcu

SEQ ID NO: 2769077 - RNA, 19 nt, Artificial Sequence
  Description of Artificial Sequence: Synthetic oligonucleotide
uucaacaucuccagggaau

SEQ ID NO: 2769078 - RNA, 19 nt, Artificial Sequence
  Description of Artificial Sequence: Synthetic oligonucleotide
aacuggaccaucauuucug

SEQ ID NO: 2769079 - RNA, 19 nt, Artificial Sequence
  Description of Artificial Sequence: Synthetic oligonucleotide
cauaaaugcuucaacaucu

SEQ ID NO: 2769080 - RNA, 19 nt, Artificial Sequence
  Description of Artificial Sequence: Synthetic oligonucleotide
ucuccagggaaugaaagcu

SEQ ID NO: 2769081 - RNA, 19 nt, Artificial Sequence
  Description of Artificial Sequence: Synthetic oligonucleotide
aauucuuuaaccaccucuu

SEQ ID NO: 2769082 - RNA, 19 nt, Artificial Sequence
  Description of Artificial Sequence: Synthetic oligonucleotide
auuuuagcuuucguggcgg

SEQ ID NO: 2769083 - RNA, 19 nt, Artificial Sequence
  Description of Artificial Sequence: Synthetic oligonucleotide
aaacacuuuuacaaugccu

SEQ ID NO: 2769084 - RNA, 19 nt, Artificial Sequence
  Description of Artificial Sequence: Synthetic oligonucleotide
cuuuaaccaccucuugagg

SEQ ID NO: 2769085 - RNA, 19 nt, Artificial Sequence
  Description of Artificial Sequence: Synthetic oligonucleotide
uccagggaaugaaagcuca

SEQ ID NO: 2769086 - RNA, 19 nt, Artificial Sequence
  Description of Artificial Sequence: Synthetic oligonucleotide
uguuggagggcuucgucgc

SEQ ID NO: 2769087 - RNA, 19 nt, Artificial Sequence
  Description of Artificial Sequence: Synthetic oligonucleotide
cucagauacuuuauuuaac

SEQ ID NO: 2769088 - RNA, 19 nt, Artificial Sequence
  Description of Artificial Sequence: Synthetic oligonucleotide
caaacacuuuuacaaugcc

SEQ ID NO: 2769089 - RNA, 19 nt, Artificial Sequence
  Description of Artificial Sequence: Synthetic oligonucleotide
uuagcuuucguggcgggcc

SEQ ID NO: 2769090 - RNA, 19 nt, Artificial Sequence
  Description of Artificial Sequence: Synthetic oligonucleotide
uccuuaugaaagauacuuc

SEQ ID NO: 2769091 - RNA, 19 nt, Artificial Sequence
  Description of Artificial Sequence: Synthetic oligonucleotide
augaaagcucagcauggag

SEQ ID NO: 2769092 - RNA, 19 nt, Artificial Sequence
  Description of Artificial Sequence: Synthetic oligonucleotide
uucagguacauagcuuagg

SEQ ID NO: 2769093 - RNA, 19 nt, Artificial Sequence
  Description of Artificial Sequence: Synthetic oligonucleotide
agcagcauggcgcccguac

SEQ ID NO: 2769094 - RNA, 19 nt, Artificial Sequence
  Description of Artificial Sequence: Synthetic oligonucleotide
ucgugcaaugcucaaugac

SEQ ID NO: 2769095 - RNA, 19 nt, Artificial Sequence
  Description of Artificial Sequence: Synthetic oligonucleotide
agcgucaccucgaagcugc

SEQ ID NO: 2769096 - RNA, 19 nt, Artificial Sequence
  Description of Artificial Sequence: Synthetic oligonucleotide
ucagcucgugcaaugcuca

SEQ ID NO: 2769097 - RNA, 19 nt, Artificial Sequence
  Description of Artificial Sequence: Synthetic oligonucleotide
caucuccagggaaugaaag

SEQ ID NO: 2769098 - RNA, 19 nt, Artificial Sequence
  Description of Artificial Sequence: Synthetic oligonucleotide
uccgcuuucuuccgcuagg

SEQ ID NO: 2769099 - RNA, 19 nt, Artificial Sequence
  Description of Artificial Sequence: Synthetic oligonucleotide
agggcuucgucgcaacugg

SEQ ID NO: 2769100 - RNA, 19 nt, Artificial Sequence
  Description of Artificial Sequence: Synthetic oligonucleotide
uucuuaauaccaguccaga

SEQ ID NO: 2769101 - RNA, 19 nt, Artificial Sequence
  Description of Artificial Sequence: Synthetic oligonucleotide
aguuucucgcgcuugucca

SEQ ID NO: 2769102 - RNA, 19 nt, Artificial Sequence
  Description of Artificial Sequence: Synthetic oligonucleotide
acggcuguuguccgggcgc

SEQ ID NO: 2769103 - RNA, 19 nt, Artificial Sequence
  Description of Artificial Sequence: Synthetic oligonucleotide
augaaagauacuucuucaa

SEQ ID NO: 2769104 - RNA, 19 nt, Artificial Sequence
  Description of Artificial Sequence: Synthetic oligonucleotide
auagcuuagguuuggccau

SEQ ID NO: 2769105 - RNA, 19 nt, Artificial Sequence
  Description of Artificial Sequence: Synthetic oligonucleotide
gaaagauacuucuucaauu

SEQ ID NO: 2769106 - RNA, 19 nt, Artificial Sequence
  Description of Artificial Sequence: Synthetic oligonucleotide
ugaggcucaggaaauuuua

SEQ ID NO: 2769107 - RNA, 19 nt, Artificial Sequence
  Description of Artificial Sequence: Synthetic oligonucleotide
gucaccucgaagcugcccc

SEQ ID NO: 2769108 - RNA, 19 nt, Artificial Sequence
  Description of Artificial Sequence: Synthetic oligonucleotide
uuuuagcuuucguggcggg

SEQ ID NO: 2769109 - RNA, 19 nt, Artificial Sequence
  Description of Artificial Sequence: Synthetic oligonucleotide
uggcuucagguacauagcu

SEQ ID NO: 2769110 - RNA, 19 nt, Artificial Sequence
  Description of Artificial Sequence: Synthetic oligonucleotide
gcuuucuuccgcuaggggc

SEQ ID NO: 2769111 - RNA, 19 nt, Artificial Sequence
  Description of Artificial Sequence: Synthetic oligonucleotide
aguccagaguuccgcacgg

SEQ ID NO: 2769112 - RNA, 19 nt, Artificial Sequence
  Description of Artificial Sequence: Synthetic oligonucleotide
cuuaauaccaguccagagu

SEQ ID NO: 2769113 - RNA, 19 nt, Artificial Sequence
  Description of Artificial Sequence: Synthetic oligonucleotide
acuaucauaaaugcuucaa

SEQ ID NO: 2769114 - RNA, 19 nt, Artificial Sequence
  Description of Artificial Sequence: Synthetic oligonucleotide
acacuuuuacaaugccuug

SEQ ID NO: 2769115 - RNA, 19 nt, Artificial Sequence
  Description of Artificial Sequence: Synthetic oligonucleotide
uggguucaccugcacaggc

SEQ ID NO: 2769116 - RNA, 19 nt, Artificial Sequence
  Description of Artificial Sequence: Synthetic oligonucleotide
aacaucuccagggaaugaa

SEQ ID NO: 2769117 - RNA, 19 nt, Artificial Sequence
  Description of Artificial Sequence: Synthetic oligonucleotide
gaagcugccccuccgcggc

SEQ ID NO: 2769118 - RNA, 19 nt, Artificial Sequence
  Description of Artificial Sequence: Synthetic oligonucleotide
guuguccgggcgcagaagc

SEQ ID NO: 2769119 - RNA, 19 nt, Artificial Sequence
  Description of Artificial Sequence: Synthetic oligonucleotide
uuggccaugcacuaucaua

SEQ ID NO: 2769120 - RNA, 19 nt, Artificial Sequence
  Description of Artificial Sequence: Synthetic oligonucleotide
acuuuuacaaugccuuguu

SEQ ID NO: 2769121 - RNA, 19 nt, Artificial Sequence
  Description of Artificial Sequence: Synthetic oligonucleotide
cccaacguccuuaugaaag

SEQ ID NO: 2769122 - RNA, 19 nt, Artificial Sequence
  Description of Artificial Sequence: Synthetic oligonucleotide
aggaaauuuuagcuuucgu

SEQ ID NO: 2769123 - RNA, 19 nt, Artificial Sequence
  Description of Artificial Sequence: Synthetic oligonucleotide
uccagaguuccgcacggcu

SEQ ID NO: 2769124 - RNA, 19 nt, Artificial Sequence
  Description of Artificial Sequence: Synthetic oligonucleotide
uuguccgggcgcagaagcg

SEQ ID NO: 2769125 - RNA, 19 nt, Artificial Sequence
  Description of Artificial Sequence: Synthetic oligonucleotide
caguuucucgcgcuugucc

SEQ ID NO: 2769126 - RNA, 19 nt, Artificial Sequence
  Description of Artificial Sequence: Synthetic oligonucleotide
uucuggugaggaagaaacu

SEQ ID NO: 2769127 - RNA, 19 nt, Artificial Sequence
  Description of Artificial Sequence: Synthetic oligonucleotide
cuucagguacauagcuuag

SEQ ID NO: 2769128 - RNA, 19 nt, Artificial Sequence
  Description of Artificial Sequence: Synthetic oligonucleotide
uuccgcuuucuuccgcuag

SEQ ID NO: 2769129 - RNA, 19 nt, Artificial Sequence
  Description of Artificial Sequence: Synthetic oligonucleotide
caggaaauuuuagcuuucg

SEQ ID NO: 2769130 - RNA, 19 nt, Artificial Sequence
  Description of Artificial Sequence: Synthetic oligonucleotide
cgugcaaugcucaaugacc

SEQ ID NO: 2769131 - RNA, 19 nt, Artificial Sequence
  Description of Artificial Sequence: Synthetic oligonucleotide
gaggcucaggaaauuuuag

SEQ ID NO: 2769132 - RNA, 19 nt, Artificial Sequence
  Description of Artificial Sequence: Synthetic oligonucleotide
cucaaugaccaccgccggg

SEQ ID NO: 2769133 - RNA, 19 nt, Artificial Sequence
  Description of Artificial Sequence: Synthetic oligonucleotide
acacgcgucagcucgugca

SEQ ID NO: 2769134 - RNA, 19 nt, Artificial Sequence
  Description of Artificial Sequence: Synthetic oligonucleotide
accucgaagcugccccucc

SEQ ID NO: 2769135 - RNA, 19 nt, Artificial Sequence
  Description of Artificial Sequence: Synthetic oligonucleotide
accaucauuucuggugagg

SEQ ID NO: 2769136 - RNA, 19 nt, Artificial Sequence
  Description of Artificial Sequence: Synthetic oligonucleotide
cagggaaugaaagcucagc

SEQ ID NO: 2769137 - RNA, 19 nt, Artificial Sequence
  Description of Artificial Sequence: Synthetic oligonucleotide
guacauagcuuagguuugg

SEQ ID NO: 2769138 - RNA, 19 nt, Artificial Sequence
  Description of Artificial Sequence: Synthetic oligonucleotide
uuggauggguucaccugca

SEQ ID NO: 2769139 - RNA, 19 nt, Artificial Sequence
  Description of Artificial Sequence: Synthetic oligonucleotide
gguucaccugcacaggcag

SEQ ID NO: 2769140 - RNA, 19 nt, Artificial Sequence
  Description of Artificial Sequence: Synthetic oligonucleotide
ugcccaacguccuuaugaa

SEQ ID NO: 2769141 - RNA, 19 nt, Artificial Sequence
  Description of Artificial Sequence: Synthetic oligonucleotide
ucaauucuuuaaccaccuc

SEQ ID NO: 2769142 - RNA, 19 nt, Artificial Sequence
  Description of Artificial Sequence: Synthetic oligonucleotide
uuuagcuuucguggcgggc

SEQ ID NO: 2769143 - RNA, 19 nt, Artificial Sequence
  Description of Artificial Sequence: Synthetic oligonucleotide
gggaccuccagcugcagag

SEQ ID NO: 2769144 - RNA, 19 nt, Artificial Sequence
  Description of Artificial Sequence: Synthetic oligonucleotide
cugcccaacguccuuauga

SEQ ID NO: 2769145 - RNA, 19 nt, Artificial Sequence
  Description of Artificial Sequence: Synthetic oligonucleotide
cuuguccacugucucugcc

SEQ ID NO: 2769146 - RNA, 19 nt, Artificial Sequence
  Description of Artificial Sequence: Synthetic oligonucleotide
ugcucucagauacuuuauu

SEQ ID NO: 2769147 - RNA, 19 nt, Artificial Sequence
  Description of Artificial Sequence: Synthetic oligonucleotide
uaccaguccagaguuccgc

SEQ ID NO: 2769148 - RNA, 19 nt, Artificial Sequence
  Description of Artificial Sequence: Synthetic oligonucleotide
aguuccgcacggcuguugu

SEQ ID NO: 2769149 - RNA, 19 nt, Artificial Sequence
  Description of Artificial Sequence: Synthetic oligonucleotide
uaauaccaguccagaguuc

SEQ ID NO: 2769150 - RNA, 19 nt, Artificial Sequence
  Description of Artificial Sequence: Synthetic oligonucleotide
uacauagcuuagguuuggc

SEQ ID NO: 2769151 - RNA, 19 nt, Artificial Sequence
  Description of Artificial Sequence: Synthetic oligonucleotide
gacucccugcccaacgucc

SEQ ID NO: 2769152 - RNA, 19 nt, Artificial Sequence
  Description of Artificial Sequence: Synthetic oligonucleotide
gcucgugcaaugcucaaug

SEQ ID NO: 2769153 - RNA, 19 nt, Artificial Sequence
  Description of Artificial Sequence: Synthetic oligonucleotide
agacucccugcccaacguc

SEQ ID NO: 2769154 - RNA, 19 nt, Artificial Sequence
  Description of Artificial Sequence: Synthetic oligonucleotide
cuucgucgcaacuggacca

SEQ ID NO: 2769155 - RNA, 19 nt, Artificial Sequence
  Description of Artificial Sequence: Synthetic oligonucleotide
gugcaaugcucaaugacca

SEQ ID NO: 2769156 - RNA, 19 nt, Artificial Sequence
  Description of Artificial Sequence: Synthetic oligonucleotide
aaaccaauucaaacacuuu

SEQ ID NO: 2769157 - RNA, 19 nt, Artificial Sequence
  Description of Artificial Sequence: Synthetic oligonucleotide
accaauucaaacacuuuua

SEQ ID NO: 2769158 - RNA, 19 nt, Artificial Sequence
  Description of Artificial Sequence: Synthetic oligonucleotide
ugcaaugcucaaugaccac

SEQ ID NO: 2769159 - RNA, 19 nt, Artificial Sequence
  Description of Artificial Sequence: Synthetic oligonucleotide
agcuuagguuuggccaugc

SEQ ID NO: 2769160 - RNA, 19 nt, Artificial Sequence
  Description of Artificial Sequence: Synthetic oligonucleotide
gguacauagcuuagguuug

SEQ ID NO: 2769161 - RNA, 19 nt, Artificial Sequence
  Description of Artificial Sequence: Synthetic oligonucleotide
cuccagggaaugaaagcuc

SEQ ID NO: 2769162 - RNA, 19 nt, Artificial Sequence
  Description of Artificial Sequence: Synthetic oligonucleotide
gaggaagaaacuggcuuca

SEQ ID NO: 2769163 - RNA, 19 nt, Artificial Sequence
  Description of Artificial Sequence: Synthetic oligonucleotide
gagggcuucgucgcaacug

SEQ ID NO: 2769164 - RNA, 19 nt, Artificial Sequence
  Description of Artificial Sequence: Synthetic oligonucleotide
uugcucucagauacuuuau

SEQ ID NO: 2769165 - RNA, 19 nt, Artificial Sequence
  Description of Artificial Sequence: Synthetic oligonucleotide
uagguuuggccaugcacua

SEQ ID NO: 2769166 - RNA, 19 nt, Artificial Sequence
  Description of Artificial Sequence: Synthetic oligonucleotide
gaccaucauuucuggugag

SEQ ID NO: 2769167 - RNA, 19 nt, Artificial Sequence
  Description of Artificial Sequence: Synthetic oligonucleotide
ggagacucccugcccaacg

SEQ ID NO: 2769168 - RNA, 19 nt, Artificial Sequence
  Description of Artificial Sequence: Synthetic oligonucleotide
uuuggccaugcacuaucau

SEQ ID NO: 2769169 - RNA, 19 nt, Artificial Sequence
  Description of Artificial Sequence: Synthetic oligonucleotide
gcuucgucgcaacuggacc

SEQ ID NO: 2769170 - RNA, 19 nt, Artificial Sequence
  Description of Artificial Sequence: Synthetic oligonucleotide
gcaaugcucaaugaccacc

SEQ ID NO: 2769171 - RNA, 19 nt, Artificial Sequence
  Description of Artificial Sequence: Synthetic oligonucleotide
uagcuuucguggcgggccc

SEQ ID NO: 2769172 - RNA, 19 nt, Artificial Sequence
  Description of Artificial Sequence: Synthetic oligonucleotide
cauggcgcccguacacgcg

SEQ ID NO: 2769173 - RNA, 19 nt, Artificial Sequence
  Description of Artificial Sequence: Synthetic oligonucleotide
gcuucagguacauagcuua

SEQ ID NO: 2769174 - RNA, 19 nt, Artificial Sequence
  Description of Artificial Sequence: Synthetic oligonucleotide
ccguacacgcgucagcucg

SEQ ID NO: 2769175 - RNA, 19 nt, Artificial Sequence
  Description of Artificial Sequence: Synthetic oligonucleotide
cccuucuuaauaccagucc

SEQ ID NO: 2769176 - RNA, 19 nt, Artificial Sequence
  Description of Artificial Sequence: Synthetic oligonucleotide
caccucuugaggcucagga

SEQ ID NO: 2769177 - RNA, 19 nt, Artificial Sequence
  Description of Artificial Sequence: Synthetic oligonucleotide
agcauggcgcccguacacg

SEQ ID NO: 2769178 - RNA, 19 nt, Artificial Sequence
  Description of Artificial Sequence: Synthetic oligonucleotide
aacguccuuaugaaagaua

SEQ ID NO: 2769179 - RNA, 19 nt, Artificial Sequence
  Description of Artificial Sequence: Synthetic oligonucleotide
gugaggaagaaacuggcuu

SEQ ID NO: 2769180 - RNA, 19 nt, Artificial Sequence
  Description of Artificial Sequence: Synthetic oligonucleotide
uuucguggcgggcccuucu

SEQ ID NO: 2769181 - RNA, 19 nt, Artificial Sequence
  Description of Artificial Sequence: Synthetic oligonucleotide
ucgcgcuuguccacugucu

SEQ ID NO: 2769182 - RNA, 19 nt, Artificial Sequence
  Description of Artificial Sequence: Synthetic oligonucleotide
accaguccagaguuccgca

SEQ ID NO: 2769183 - RNA, 19 nt, Artificial Sequence
  Description of Artificial Sequence: Synthetic oligonucleotide
gguuuggccaugcacuauc

SEQ ID NO: 2769184 - RNA, 19 nt, Artificial Sequence
  Description of Artificial Sequence: Synthetic oligonucleotide
cagagccuggcucagggca

SEQ ID NO: 2769185 - RNA, 19 nt, Artificial Sequence
  Description of Artificial Sequence: Synthetic oligonucleotide
auggguucaccugcacagg

SEQ ID NO: 2769186 - RNA, 19 nt, Artificial Sequence
  Description of Artificial Sequence: Synthetic oligonucleotide
gaagcgucaccucgaagcu

SEQ ID NO: 2769187 - RNA, 19 nt, Artificial Sequence
  Description of Artificial Sequence: Synthetic oligonucleotide
ccuuaugaaagauacuucu

SEQ ID NO: 2769188 - RNA, 19 nt, Artificial Sequence
  Description of Artificial Sequence: Synthetic oligonucleotide
uccgccaguuucucgcgcu

SEQ ID NO: 2769189 - RNA, 19 nt, Artificial Sequence
  Description of Artificial Sequence: Synthetic oligonucleotide
ucgcaacuggaccaucauu

SEQ ID NO: 2769190 - RNA, 19 nt, Artificial Sequence
  Description of Artificial Sequence: Synthetic oligonucleotide
cacuaucauaaaugcuuca

SEQ ID NO: 2769191 - RNA, 19 nt, Artificial Sequence
  Description of Artificial Sequence: Synthetic oligonucleotide
uacacgcgucagcucgugc

SEQ ID NO: 2769192 - RNA, 19 nt, Artificial Sequence
  Description of Artificial Sequence: Synthetic oligonucleotide
guuucucgcgcuuguccac

SEQ ID NO: 2769193 - RNA, 19 nt, Artificial Sequence
  Description of Artificial Sequence: Synthetic oligonucleotide
uguuguccgggcgcagaag

SEQ ID NO: 2769194 - RNA, 19 nt, Artificial Sequence
  Description of Artificial Sequence: Synthetic oligonucleotide
aagcgucaccucgaagcug

SEQ ID NO: 2769195 - RNA, 19 nt, Artificial Sequence
  Description of Artificial Sequence: Synthetic oligonucleotide
gcgcagaagcgucaccucg

SEQ ID NO: 2769196 - RNA, 19 nt, Artificial Sequence
  Description of Artificial Sequence: Synthetic oligonucleotide
acugucucugccggcgcgg

SEQ ID NO: 2769197 - RNA, 19 nt, Artificial Sequence
  Description of Artificial Sequence: Synthetic oligonucleotide
cccuccgcggcuuggaugg

SEQ ID NO: 2769198 - RNA, 19 nt, Artificial Sequence
  Description of Artificial Sequence: Synthetic oligonucleotide
uuucucgcgcuuguccacu

SEQ ID NO: 2769199 - RNA, 19 nt, Artificial Sequence
  Description of Artificial Sequence: Synthetic oligonucleotide
auaccaguccagaguuccg

SEQ ID NO: 2769200 - RNA, 19 nt, Artificial Sequence
  Description of Artificial Sequence: Synthetic oligonucleotide
cuuaugaaagauacuucuu

SEQ ID NO: 2769201 - RNA, 19 nt, Artificial Sequence
  Description of Artificial Sequence: Synthetic oligonucleotide
uccagcugcagagccuggc

SEQ ID NO: 2769202 - RNA, 19 nt, Artificial Sequence
  Description of Artificial Sequence: Synthetic oligonucleotide
uguccgggcgcagaagcgu

SEQ ID NO: 2769203 - RNA, 19 nt, Artificial Sequence
  Description of Artificial Sequence: Synthetic oligonucleotide
cagcauggcgcccguacac

SEQ ID NO: 2769204 - RNA, 19 nt, Artificial Sequence
  Description of Artificial Sequence: Synthetic oligonucleotide
cacugucucugccggcgcg

SEQ ID NO: 2769205 - RNA, 19 nt, Artificial Sequence
  Description of Artificial Sequence: Synthetic oligonucleotide
uggcgggcccuucuuaaua

SEQ ID NO: 2769206 - RNA, 19 nt, Artificial Sequence
  Description of Artificial Sequence: Synthetic oligonucleotide
gcucaaugaccaccgccgg

SEQ ID NO: 2769207 - RNA, 19 nt, Artificial Sequence
  Description of Artificial Sequence: Synthetic oligonucleotide
cacggcuguuguccgggcg

SEQ ID NO: 2769208 - RNA, 19 nt, Artificial Sequence
  Description of Artificial Sequence: Synthetic oligonucleotide
cuucaacaucuccagggaa

SEQ ID NO: 2769209 - RNA, 19 nt, Artificial Sequence
  Description of Artificial Sequence: Synthetic oligonucleotide
ucaccucgaagcugccccu

SEQ ID NO: 2769210 - RNA, 19 nt, Artificial Sequence
  Description of Artificial Sequence: Synthetic oligonucleotide
caaugaccaccgccgggcc

SEQ ID NO: 2769211 - RNA, 19 nt, Artificial Sequence
  Description of Artificial Sequence: Synthetic oligonucleotide
auggcgcccguacacgcgu

SEQ ID NO: 2769212 - RNA, 19 nt, Artificial Sequence
  Description of Artificial Sequence: Synthetic oligonucleotide
gucagcucgugcaaugcuc

SEQ ID NO: 2769213 - RNA, 19 nt, Artificial Sequence
  Description of Artificial Sequence: Synthetic oligonucleotide
aaacuggcuucagguacau

SEQ ID NO: 2769214 - RNA, 19 nt, Artificial Sequence
  Description of Artificial Sequence: Synthetic oligonucleotide
cuuccgcuaggggccaugg

SEQ ID NO: 2769215 - RNA, 19 nt, Artificial Sequence
  Description of Artificial Sequence: Synthetic oligonucleotide
caucauuucuggugaggaa

SEQ ID NO: 2769216 - RNA, 19 nt, Artificial Sequence
  Description of Artificial Sequence: Synthetic oligonucleotide
accaccgccgggcccuccg

SEQ ID NO: 2769217 - RNA, 19 nt, Artificial Sequence
  Description of Artificial Sequence: Synthetic oligonucleotide
uucucgcgcuuguccacug

SEQ ID NO: 2769218 - RNA, 19 nt, Artificial Sequence
  Description of Artificial Sequence: Synthetic oligonucleotide
uagcuuagguuuggccaug

SEQ ID NO: 2769219 - RNA, 19 nt, Artificial Sequence
  Description of Artificial Sequence: Synthetic oligonucleotide
cagaagcgucaccucgaag

SEQ ID NO: 2769220 - RNA, 19 nt, Artificial Sequence
  Description of Artificial Sequence: Synthetic oligonucleotide
uuucuuccgcuaggggcca

SEQ ID NO: 2769221 - RNA, 19 nt, Artificial Sequence
  Description of Artificial Sequence: Synthetic oligonucleotide
cucgcgcuuguccacuguc

SEQ ID NO: 2769222 - RNA, 19 nt, Artificial Sequence
  Description of Artificial Sequence: Synthetic oligonucleotide
ugucucugccggcgcggcc

SEQ ID NO: 2769223 - RNA, 19 nt, Artificial Sequence
  Description of Artificial Sequence: Synthetic oligonucleotide
uggagggcuucgucgcaac

SEQ ID NO: 2769224 - RNA, 19 nt, Artificial Sequence
  Description of Artificial Sequence: Synthetic oligonucleotide
ucuugaggcucaggaaauu

SEQ ID NO: 2769225 - RNA, 19 nt, Artificial Sequence
  Description of Artificial Sequence: Synthetic oligonucleotide
acaucuccagggaaugaaa

SEQ ID NO: 2769226 - RNA, 19 nt, Artificial Sequence
  Description of Artificial Sequence: Synthetic oligonucleotide
gcacuaucauaaaugcuuc

SEQ ID NO: 2769227 - RNA, 19 nt, Artificial Sequence
  Description of Artificial Sequence: Synthetic oligonucleotide
gcaacuggaccaucauuuc

SEQ ID NO: 2769228 - RNA, 19 nt, Artificial Sequence
  Description of Artificial Sequence: Synthetic oligonucleotide
cucgugcaaugcucaauga

SEQ ID NO: 2769229 - RNA, 19 nt, Artificial Sequence
  Description of Artificial Sequence: Synthetic oligonucleotide
ccagaguuccgcacggcug

SEQ ID NO: 2769230 - RNA, 19 nt, Artificial Sequence
  Description of Artificial Sequence: Synthetic oligonucleotide
uucgucgcaacuggaccau

SEQ ID NO: 2769231 - RNA, 19 nt, Artificial Sequence
  Description of Artificial Sequence: Synthetic oligonucleotide
cagauacuuuauuuaacuu

SEQ ID NO: 2769232 - RNA, 19 nt, Artificial Sequence
  Description of Artificial Sequence: Synthetic oligonucleotide
uuggagggcuucgucgcaa

SEQ ID NO: 2769233 - RNA, 19 nt, Artificial Sequence
  Description of Artificial Sequence: Synthetic oligonucleotide
ucuuccgcuaggggccaug

SEQ ID NO: 2769234 - RNA, 19 nt, Artificial Sequence
  Description of Artificial Sequence: Synthetic oligonucleotide
ccucuugaggcucaggaaa

SEQ ID NO: 2769235 - RNA, 19 nt, Artificial Sequence
  Description of Artificial Sequence: Synthetic oligonucleotide
guuuggccaugcacuauca

SEQ ID NO: 2769236 - RNA, 19 nt, Artificial Sequence
  Description of Artificial Sequence: Synthetic oligonucleotide
ucugccggcgcggccuucc

SEQ ID NO: 2769237 - RNA, 19 nt, Artificial Sequence
  Description of Artificial Sequence: Synthetic oligonucleotide
ggcgggcccuucuuaauac

SEQ ID NO: 2769238 - RNA, 19 nt, Artificial Sequence
  Description of Artificial Sequence: Synthetic oligonucleotide
uccgcggcuuggauggguu

SEQ ID NO: 2769239 - RNA, 19 nt, Artificial Sequence
  Description of Artificial Sequence: Synthetic oligonucleotide
caacuggaccaucauuucu

SEQ ID NO: 2769240 - RNA, 19 nt, Artificial Sequence
  Description of Artificial Sequence: Synthetic oligonucleotide
cacuuuuacaaugccuugu

SEQ ID NO: 2769241 - RNA, 19 nt, Artificial Sequence
  Description of Artificial Sequence: Synthetic oligonucleotide
guucaccugcacaggcagc

SEQ ID NO: 2769242 - RNA, 19 nt, Artificial Sequence
  Description of Artificial Sequence: Synthetic oligonucleotide
uucguggcgggcccuucuu

SEQ ID NO: 2769243 - RNA, 19 nt, Artificial Sequence
  Description of Artificial Sequence: Synthetic oligonucleotide
guuggagggcuucgucgca

SEQ ID NO: 2769244 - RNA, 19 nt, Artificial Sequence
  Description of Artificial Sequence: Synthetic oligonucleotide
gagacucccugcccaacgu

SEQ ID NO: 2769245 - RNA, 19 nt, Artificial Sequence
  Description of Artificial Sequence: Synthetic oligonucleotide
ccaacguccuuaugaaaga

SEQ ID NO: 2769246 - RNA, 19 nt, Artificial Sequence
  Description of Artificial Sequence: Synthetic oligonucleotide
gcauggagacucccugccc

SEQ ID NO: 2769247 - RNA, 19 nt, Artificial Sequence
  Description of Artificial Sequence: Synthetic oligonucleotide
cuccgccaguuucucgcgc

SEQ ID NO: 2769248 - RNA, 19 nt, Artificial Sequence
  Description of Artificial Sequence: Synthetic oligonucleotide
gaguuccgcacggcuguug

SEQ ID NO: 2769249 - RNA, 19 nt, Artificial Sequence
  Description of Artificial Sequence: Synthetic oligonucleotide
gcauggcgcccguacacgc

SEQ ID NO: 2769250 - RNA, 19 nt, Artificial Sequence
  Description of Artificial Sequence: Synthetic oligonucleotide
agcucgugcaaugcucaau

SEQ ID NO: 2769251 - RNA, 19 nt, Artificial Sequence
  Description of Artificial Sequence: Synthetic oligonucleotide
ccaucauuucuggugagga

SEQ ID NO: 2769252 - RNA, 19 nt, Artificial Sequence
  Description of Artificial Sequence: Synthetic oligonucleotide
ucguggcgggcccuucuua

SEQ ID NO: 2769253 - RNA, 19 nt, Artificial Sequence
  Description of Artificial Sequence: Synthetic oligonucleotide
gggcccuucuuaauaccag

SEQ ID NO: 2769254 - RNA, 19 nt, Artificial Sequence
  Description of Artificial Sequence: Synthetic oligonucleotide
uggagacucccugcccaac

SEQ ID NO: 2769255 - RNA, 19 nt, Artificial Sequence
  Description of Artificial Sequence: Synthetic oligonucleotide
gcucucagauacuuuauuu

SEQ ID NO: 2769256 - RNA, 19 nt, Artificial Sequence
  Description of Artificial Sequence: Synthetic oligonucleotide
guccacugucucugccggc

SEQ ID NO: 2769257 - RNA, 19 nt, Artificial Sequence
  Description of Artificial Sequence: Synthetic oligonucleotide
ggccuuccgcuuucuuccg

SEQ ID NO: 2769258 - RNA, 19 nt, Artificial Sequence
  Description of Artificial Sequence: Synthetic oligonucleotide
gcggccuuccgcuuucuuc

SEQ ID NO: 2769259 - RNA, 19 nt, Artificial Sequence
  Description of Artificial Sequence: Synthetic oligonucleotide
ccaguccagaguuccgcac

SEQ ID NO: 2769260 - RNA, 19 nt, Artificial Sequence
  Description of Artificial Sequence: Synthetic oligonucleotide
gcucaggaaauuuuagcuu

SEQ ID NO: 2769261 - RNA, 19 nt, Artificial Sequence
  Description of Artificial Sequence: Synthetic oligonucleotide
ggcuucgucgcaacuggac

SEQ ID NO: 2769262 - RNA, 19 nt, Artificial Sequence
  Description of Artificial Sequence: Synthetic oligonucleotide
acucccugcccaacguccu

SEQ ID NO: 2769263 - RNA, 19 nt, Artificial Sequence
  Description of Artificial Sequence: Synthetic oligonucleotide
ugccggcgcggccuuccgc

SEQ ID NO: 2769264 - RNA, 19 nt, Artificial Sequence
  Description of Artificial Sequence: Synthetic oligonucleotide
guacacgcgucagcucgug

SEQ ID NO: 2769265 - RNA, 19 nt, Artificial Sequence
  Description of Artificial Sequence: Synthetic oligonucleotide
caacaucuccagggaauga

SEQ ID NO: 2769266 - RNA, 19 nt, Artificial Sequence
  Description of Artificial Sequence: Synthetic oligonucleotide
cugucucugccggcgcggc

SEQ ID NO: 2769267 - RNA, 19 nt, Artificial Sequence
  Description of Artificial Sequence: Synthetic oligonucleotide
guuccgcacggcuguuguc

SEQ ID NO: 2769268 - RNA, 19 nt, Artificial Sequence
  Description of Artificial Sequence: Synthetic oligonucleotide
accgccgggcccuccgcca

SEQ ID NO: 2769269 - RNA, 19 nt, Artificial Sequence
  Description of Artificial Sequence: Synthetic oligonucleotide
cuguuguccgggcgcagaa

SEQ ID NO: 2769270 - RNA, 19 nt, Artificial Sequence
  Description of Artificial Sequence: Synthetic oligonucleotide
agguuuggccaugcacuau

SEQ ID NO: 2769271 - RNA, 19 nt, Artificial Sequence
  Description of Artificial Sequence: Synthetic oligonucleotide
ccucgaagcugccccuccg

SEQ ID NO: 2769272 - RNA, 19 nt, Artificial Sequence
  Description of Artificial Sequence: Synthetic oligonucleotide
gcccuucuuaauaccaguc

SEQ ID NO: 2769273 - RNA, 19 nt, Artificial Sequence
  Description of Artificial Sequence: Synthetic oligonucleotide
gcgggcccuucuuaauacc

SEQ ID NO: 2769274 - RNA, 19 nt, Artificial Sequence
  Description of Artificial Sequence: Synthetic oligonucleotide
ggcuuggauggguucaccu

SEQ ID NO: 2769275 - RNA, 19 nt, Artificial Sequence
  Description of Artificial Sequence: Synthetic oligonucleotide
cagguacauagcuuagguu

SEQ ID NO: 2769276 - RNA, 19 nt, Artificial Sequence
  Description of Artificial Sequence: Synthetic oligonucleotide
guccagaguuccgcacggc

SEQ ID NO: 2769277 - RNA, 19 nt, Artificial Sequence
  Description of Artificial Sequence: Synthetic oligonucleotide
cacgcgucagcucgugcaa

SEQ ID NO: 2769278 - RNA, 19 nt, Artificial Sequence
  Description of Artificial Sequence: Synthetic oligonucleotide
gcagcauggcgcccguaca

SEQ ID NO: 2769279 - RNA, 19 nt, Artificial Sequence
  Description of Artificial Sequence: Synthetic oligonucleotide
cuugaggcucaggaaauuu

SEQ ID NO: 2769280 - RNA, 19 nt, Artificial Sequence
  Description of Artificial Sequence: Synthetic oligonucleotide
ccgcuuucuuccgcuaggg

SEQ ID NO: 2769281 - RNA, 19 nt, Artificial Sequence
  Description of Artificial Sequence: Synthetic oligonucleotide
aacuggcuucagguacaua

SEQ ID NO: 2769282 - RNA, 19 nt, Artificial Sequence
  Description of Artificial Sequence: Synthetic oligonucleotide
ggcccuucuuaauaccagu

SEQ ID NO: 2769283 - RNA, 19 nt, Artificial Sequence
  Description of Artificial Sequence: Synthetic oligonucleotide
ggcgcagaagcgucaccuc

SEQ ID NO: 2769284 - RNA, 19 nt, Artificial Sequence
  Description of Artificial Sequence: Synthetic oligonucleotide
gucgcaacuggaccaucau

SEQ ID NO: 2769285 - RNA, 19 nt, Artificial Sequence
  Description of Artificial Sequence: Synthetic oligonucleotide
caccgccgggcccuccgcc

SEQ ID NO: 2769286 - RNA, 19 nt, Artificial Sequence
  Description of Artificial Sequence: Synthetic oligonucleotide
gcgucagcucgugcaaugc

SEQ ID NO: 2769287 - RNA, 19 nt, Artificial Sequence
  Description of Artificial Sequence: Synthetic oligonucleotide
cuuucguggcgggcccuuc

SEQ ID NO: 2769288 - RNA, 19 nt, Artificial Sequence
  Description of Artificial Sequence: Synthetic oligonucleotide
gcuuagguuuggccaugca

SEQ ID NO: 2769289 - RNA, 19 nt, Artificial Sequence
  Description of Artificial Sequence: Synthetic oligonucleotide
gcagaagcgucaccucgaa

SEQ ID NO: 2769290 - RNA, 19 nt, Artificial Sequence
  Description of Artificial Sequence: Synthetic oligonucleotide
cuuccgcuuucuuccgcua

SEQ ID NO: 2769291 - RNA, 19 nt, Artificial Sequence
  Description of Artificial Sequence: Synthetic oligonucleotide
cgcuuguccacugucucug

SEQ ID NO: 2769292 - RNA, 19 nt, Artificial Sequence
  Description of Artificial Sequence: Synthetic oligonucleotide
cgcuuucuuccgcuagggg

SEQ ID NO: 2769293 - RNA, 19 nt, Artificial Sequence
  Description of Artificial Sequence: Synthetic oligonucleotide
ucgucgcaacuggaccauc

SEQ ID NO: 2769294 - RNA, 19 nt, Artificial Sequence
  Description of Artificial Sequence: Synthetic oligonucleotide
cgcaacuggaccaucauuu

SEQ ID NO: 2769295 - RNA, 19 nt, Artificial Sequence
  Description of Artificial Sequence: Synthetic oligonucleotide
cuggaccaucauuucuggu

SEQ ID NO: 2769296 - RNA, 19 nt, Artificial Sequence
  Description of Artificial Sequence: Synthetic oligonucleotide
ggccaugcacuaucauaaa

SEQ ID NO: 2769297 - RNA, 19 nt, Artificial Sequence
  Description of Artificial Sequence: Synthetic oligonucleotide
guccgggcgcagaagcguc

SEQ ID NO: 2769298 - RNA, 19 nt, Artificial Sequence
  Description of Artificial Sequence: Synthetic oligonucleotide
gcucagcauggagacuccc

SEQ ID NO: 2769299 - RNA, 19 nt, Artificial Sequence
  Description of Artificial Sequence: Synthetic oligonucleotide
gccuuccgcuuucuuccgc

SEQ ID NO: 2769300 - RNA, 19 nt, Artificial Sequence
  Description of Artificial Sequence: Synthetic oligonucleotide
cugccggcgcggccuuccg

SEQ ID NO: 2769301 - RNA, 19 nt, Artificial Sequence
  Description of Artificial Sequence: Synthetic oligonucleotide
gucucugccggcgcggccu

SEQ ID NO: 2769302 - RNA, 19 nt, Artificial Sequence
  Description of Artificial Sequence: Synthetic oligonucleotide
caacguccuuaugaaagau

SEQ ID NO: 2769303 - RNA, 19 nt, Artificial Sequence
  Description of Artificial Sequence: Synthetic oligonucleotide
agcuuucguggcgggcccu

SEQ ID NO: 2769304 - RNA, 19 nt, Artificial Sequence
  Description of Artificial Sequence: Synthetic oligonucleotide
caccucgaagcugccccuc

SEQ ID NO: 2769305 - RNA, 19 nt, Artificial Sequence
  Description of Artificial Sequence: Synthetic oligonucleotide
gcccuccgccaguuucucg

SEQ ID NO: 2769306 - RNA, 19 nt, Artificial Sequence
  Description of Artificial Sequence: Synthetic oligonucleotide
ccacugucucugccggcgc

SEQ ID NO: 2769307 - RNA, 19 nt, Artificial Sequence
  Description of Artificial Sequence: Synthetic oligonucleotide
cgcgucagcucgugcaaug

SEQ ID NO: 2769308 - RNA, 19 nt, Artificial Sequence
  Description of Artificial Sequence: Synthetic oligonucleotide
cagcucgugcaaugcucaa

SEQ ID NO: 2769309 - RNA, 19 nt, Artificial Sequence
  Description of Artificial Sequence: Synthetic oligonucleotide
acgcgucagcucgugcaau

SEQ ID NO: 2769310 - RNA, 19 nt, Artificial Sequence
  Description of Artificial Sequence: Synthetic oligonucleotide
cgcacggcuguuguccggg

SEQ ID NO: 2769311 - RNA, 19 nt, Artificial Sequence
  Description of Artificial Sequence: Synthetic oligonucleotide
gcccaacguccuuaugaaa

SEQ ID NO: 2769312 - RNA, 19 nt, Artificial Sequence
  Description of Artificial Sequence: Synthetic oligonucleotide
cgucgcaacuggaccauca

SEQ ID NO: 2769313 - RNA, 19 nt, Artificial Sequence
  Description of Artificial Sequence: Synthetic oligonucleotide
ccccuccgcggcuuggaug

SEQ ID NO: 2769314 - RNA, 19 nt, Artificial Sequence
  Description of Artificial Sequence: Synthetic oligonucleotide
gccaguuucucgcgcuugu

SEQ ID NO: 2769315 - RNA, 19 nt, Artificial Sequence
  Description of Artificial Sequence: Synthetic oligonucleotide
cgcagaagcgucaccucga

SEQ ID NO: 2769316 - RNA, 19 nt, Artificial Sequence
  Description of Artificial Sequence: Synthetic oligonucleotide
gcacggcuguuguccgggc

SEQ ID NO: 2769317 - RNA, 19 nt, Artificial Sequence
  Description of Artificial Sequence: Synthetic oligonucleotide
ccaguuucucgcgcuuguc

SEQ ID NO: 2769318 - RNA, 19 nt, Artificial Sequence
  Description of Artificial Sequence: Synthetic oligonucleotide
uucuuccgcuaggggccau

SEQ ID NO: 2769319 - RNA, 19 nt, Artificial Sequence
  Description of Artificial Sequence: Synthetic oligonucleotide
ggcgcccguacacgcguca

SEQ ID NO: 2769320 - RNA, 19 nt, Artificial Sequence
  Description of Artificial Sequence: Synthetic oligonucleotide
ggcgcggccuuccgcuuuc

SEQ ID NO: 2769321 - RNA, 19 nt, Artificial Sequence
  Description of Artificial Sequence: Synthetic oligonucleotide
gcggcuuggauggguucac

SEQ ID NO: 2769322 - RNA, 19 nt, Artificial Sequence
  Description of Artificial Sequence: Synthetic oligonucleotide
cccguacacgcgucagcuc

SEQ ID NO: 2769323 - RNA, 19 nt, Artificial Sequence
  Description of Artificial Sequence: Synthetic oligonucleotide
ccugcccaacguccuuaug

SEQ ID NO: 2769324 - RNA, 19 nt, Artificial Sequence
  Description of Artificial Sequence: Synthetic oligonucleotide
gcccguacacgcgucagcu

SEQ ID NO: 2769325 - RNA, 19 nt, Artificial Sequence
  Description of Artificial Sequence: Synthetic oligonucleotide
ccgcacggcuguuguccgg

SEQ ID NO: 2769326 - RNA, 19 nt, Artificial Sequence
  Description of Artificial Sequence: Synthetic oligonucleotide
guggcgggcccuucuuaau

SEQ ID NO: 2769327 - RNA, 19 nt, Artificial Sequence
  Description of Artificial Sequence: Synthetic oligonucleotide
ccaccucuugaggcucagg

SEQ ID NO: 2769328 - RNA, 19 nt, Artificial Sequence
  Description of Artificial Sequence: Synthetic oligonucleotide
ccuuccgcuuucuuccgcu

SEQ ID NO: 2769329 - RNA, 19 nt, Artificial Sequence
  Description of Artificial Sequence: Synthetic oligonucleotide
gcgcuuguccacugucucu

SEQ ID NO: 2769330 - RNA, 19 nt, Artificial Sequence
  Description of Artificial Sequence: Synthetic oligonucleotide
gcgcccguacacgcgucag

SEQ ID NO: 2769331 - RNA, 19 nt, Artificial Sequence
  Description of Artificial Sequence: Synthetic oligonucleotide
gcugccccuccgcggcuug

SEQ ID NO: 2769332 - RNA, 19 nt, Artificial Sequence
  Description of Artificial Sequence: Synthetic oligonucleotide
cgucaccucgaagcugccc

SEQ ID NO: 2769333 - RNA, 19 nt, Artificial Sequence
  Description of Artificial Sequence: Synthetic oligonucleotide
gaccaccgccgggcccucc

SEQ ID NO: 2769334 - RNA, 19 nt, Artificial Sequence
  Description of Artificial Sequence: Synthetic oligonucleotide
cgcccguacacgcgucagc

SEQ ID NO: 2769335 - RNA, 19 nt, Artificial Sequence
  Description of Artificial Sequence: Synthetic oligonucleotide
gccggcgcggccuuccgcu

SEQ ID NO: 2769336 - RNA, 19 nt, Artificial Sequence
  Description of Artificial Sequence: Synthetic oligonucleotide
cguggcgggcccuucuuaa

SEQ ID NO: 2769337 - RNA, 19 nt, Artificial Sequence
  Description of Artificial Sequence: Synthetic oligonucleotide
ugaccaccgccgggcccuc

SEQ ID NO: 2769338 - RNA, 19 nt, Artificial Sequence
  Description of Artificial Sequence: Synthetic oligonucleotide
gggcuucgucgcaacugga

SEQ ID NO: 2769339 - RNA, 19 nt, Artificial Sequence
  Description of Artificial Sequence: Synthetic oligonucleotide
cguccuuaugaaagauacu

SEQ ID NO: 2769340 - RNA, 19 nt, Artificial Sequence
  Description of Artificial Sequence: Synthetic oligonucleotide
ccgcggcuuggauggguuc

SEQ ID NO: 2769341 - RNA, 19 nt, Artificial Sequence
  Description of Artificial Sequence: Synthetic oligonucleotide
ccgggcgcagaagcgucac

SEQ ID NO: 2769342 - RNA, 19 nt, Artificial Sequence
  Description of Artificial Sequence: Synthetic oligonucleotide
cgccaguuucucgcgcuug

SEQ ID NO: 2769343 - RNA, 19 nt, Artificial Sequence
  Description of Artificial Sequence: Synthetic oligonucleotide
ccaccgccgggcccuccgc

SEQ ID NO: 2769344 - RNA, 19 nt, Artificial Sequence
  Description of Artificial Sequence: Synthetic oligonucleotide
ccgccgggcccuccgccag

SEQ ID NO: 2769345 - RNA, 19 nt, Artificial Sequence
  Description of Artificial Sequence: Synthetic oligonucleotide
gcgucaccucgaagcugcc

SEQ ID NO: 2769346 - RNA, 19 nt, Artificial Sequence
  Description of Artificial Sequence: Synthetic oligonucleotide
cgggcgcagaagcgucacc

SEQ ID NO: 2769347 - RNA, 19 nt, Artificial Sequence
  Description of Artificial Sequence: Synthetic oligonucleotide
cuccgcggcuuggaugggu

SEQ ID NO: 2769348 - RNA, 19 nt, Artificial Sequence
  Description of Artificial Sequence: Synthetic oligonucleotide
cucugccggcgcggccuuc

SEQ ID NO: 2769349 - RNA, 19 nt, Artificial Sequence
  Description of Artificial Sequence: Synthetic oligonucleotide
cucccugcccaacguccuu

SEQ ID NO: 2769350 - RNA, 19 nt, Artificial Sequence
  Description of Artificial Sequence: Synthetic oligonucleotide
cgucagcucgugcaaugcu

SEQ ID NO: 2769351 - RNA, 19 nt, Artificial Sequence
  Description of Artificial Sequence: Synthetic oligonucleotide
ccuccgcggcuuggauggg

SEQ ID NO: 2769352 - RNA, 19 nt, Artificial Sequence
  Description of Artificial Sequence: Synthetic oligonucleotide
cguacacgcgucagcucgu

SEQ ID NO: 2769353 - RNA, 19 nt, Artificial Sequence
  Description of Artificial Sequence: Synthetic oligonucleotide
gcuuucguggcgggcccuu

SEQ ID NO: 2769354 - RNA, 19 nt, Artificial Sequence
  Description of Artificial Sequence: Synthetic oligonucleotide
cggcuguuguccgggcgca

SEQ ID NO: 2769355 - RNA, 19 nt, Artificial Sequence
  Description of Artificial Sequence: Synthetic oligonucleotide
gccccuccgcggcuuggau

SEQ ID NO: 2769356 - RNA, 19 nt, Artificial Sequence
  Description of Artificial Sequence: Synthetic oligonucleotide
ccgccaguuucucgcgcuu

SEQ ID NO: 2769357 - RNA, 19 nt, Artificial Sequence
  Description of Artificial Sequence: Synthetic oligonucleotide
gccgggcccuccgccaguu

SEQ ID NO: 2769358 - RNA, 19 nt, Artificial Sequence
  Description of Artificial Sequence: Synthetic oligonucleotide
gcgcggccuuccgcuuucu

SEQ ID NO: 2769359 - RNA, 19 nt, Artificial Sequence
  Description of Artificial Sequence: Synthetic oligonucleotide
ccggcgcggccuuccgcuu

SEQ ID NO: 2769360 - RNA, 19 nt, Artificial Sequence
  Description of Artificial Sequence: Synthetic oligonucleotide
cgcggccuuccgcuuucuu

SEQ ID NO: 2769361 - RNA, 19 nt, Artificial Sequence
  Description of Artificial Sequence: Synthetic oligonucleotide
cggcgcggccuuccgcuuu

SEQ ID NO: 2769362 - RNA, 19 nt, Artificial Sequence
  Description of Artificial Sequence: Synthetic oligonucleotide
cgccgggcccuccgccagu

SEQ ID NO: 2769363 - RNA, 19 nt, Artificial Sequence
  Description of Artificial Sequence: Synthetic oligonucleotide
ccgggcccuccgccaguuu

SEQ ID NO: 2769364 - RNA, 19 nt, Artificial Sequence
  Description of Artificial Sequence: Synthetic oligonucleotide
aaauccaguaccuuugugg

SEQ ID NO: 2769365 - RNA, 19 nt, Artificial Sequence
  Description of Artificial Sequence: Synthetic oligonucleotide
ugugaacaaauccaguacc

SEQ ID NO: 2769366 - RNA, 19 nt, Artificial Sequence
  Description of Artificial Sequence: Synthetic oligonucleotide
aauccaguaccuuuguggu

SEQ ID NO: 2769367 - RNA, 19 nt, Artificial Sequence
  Description of Artificial Sequence: Synthetic oligonucleotide
uccaguaccuuuguggucg

SEQ ID NO: 2769368 - RNA, 19 nt, Artificial Sequence
  Description of Artificial Sequence: Synthetic oligonucleotide
uugugaacaaauccaguac

SEQ ID NO: 2769369 - RNA, 19 nt, Artificial Sequence
  Description of Artificial Sequence: Synthetic oligonucleotide
aacaaauccaguaccuuug

SEQ ID NO: 2769370 - RNA, 19 nt, Artificial Sequence
  Description of Artificial Sequence: Synthetic oligonucleotide
ugagccacacacacacagg

SEQ ID NO: 2769371 - RNA, 19 nt, Artificial Sequence
  Description of Artificial Sequence: Synthetic oligonucleotide
cugagccacacacacacag

SEQ ID NO: 2769372 - RNA, 19 nt, Artificial Sequence
  Description of Artificial Sequence: Synthetic oligonucleotide
ucccgugcaaacuggagga

SEQ ID NO: 2769373 - RNA, 19 nt, Artificial Sequence
  Description of Artificial Sequence: Synthetic oligonucleotide
gucccgugcaaacuggagg

SEQ ID NO: 2769374 - RNA, 19 nt, Artificial Sequence
  Description of Artificial Sequence: Synthetic oligonucleotide
cuugugaacaaauccagua

SEQ ID NO: 2769375 - RNA, 19 nt, Artificial Sequence
  Description of Artificial Sequence: Synthetic oligonucleotide
auccuugacuggcagacca

SEQ ID NO: 2769376 - RNA, 19 nt, Artificial Sequence
  Description of Artificial Sequence: Synthetic oligonucleotide
uugacuggcagaccaccca

SEQ ID NO: 2769377 - RNA, 19 nt, Artificial Sequence
  Description of Artificial Sequence: Synthetic oligonucleotide
gccacacacacacagguag

SEQ ID NO: 2769378 - RNA, 19 nt, Artificial Sequence
  Description of Artificial Sequence: Synthetic oligonucleotide
cuugacuggcagaccaccc

SEQ ID NO: 2769379 - RNA, 19 nt, Artificial Sequence
  Description of Artificial Sequence: Synthetic oligonucleotide
ugacuggcagaccacccac

SEQ ID NO: 2769380 - RNA, 19 nt, Artificial Sequence
  Description of Artificial Sequence: Synthetic oligonucleotide
aguaccuuuguggucgcug

SEQ ID NO: 2769381 - RNA, 19 nt, Artificial Sequence
  Description of Artificial Sequence: Synthetic oligonucleotide
auccaguaccuuugugguc

SEQ ID NO: 2769382 - RNA, 19 nt, Artificial Sequence
  Description of Artificial Sequence: Synthetic oligonucleotide
gaacaaauccaguaccuuu

SEQ ID NO: 2769383 - RNA, 19 nt, Artificial Sequence
  Description of Artificial Sequence: Synthetic oligonucleotide
ugaacaaauccaguaccuu

SEQ ID NO: 2769384 - RNA, 19 nt, Artificial Sequence
  Description of Artificial Sequence: Synthetic oligonucleotide
caaauccaguaccuuugug

SEQ ID NO: 2769385 - RNA, 19 nt, Artificial Sequence
  Description of Artificial Sequence: Synthetic oligonucleotide
gagccacacacacacaggu

SEQ ID NO: 2769386 - RNA, 19 nt, Artificial Sequence
  Description of Artificial Sequence: Synthetic oligonucleotide
uccuugacuggcagaccac

SEQ ID NO: 2769387 - RNA, 19 nt, Artificial Sequence
  Description of Artificial Sequence: Synthetic oligonucleotide
acguggcagaagguggugg

SEQ ID NO: 2769388 - RNA, 19 nt, Artificial Sequence
  Description of Artificial Sequence: Synthetic oligonucleotide
ucggcauccgggagagaca

SEQ ID NO: 2769389 - RNA, 19 nt, Artificial Sequence
  Description of Artificial Sequence: Synthetic oligonucleotide
uggucccgugcaaacugga

SEQ ID NO: 2769390 - RNA, 19 nt, Artificial Sequence
  Description of Artificial Sequence: Synthetic oligonucleotide
acuggcagaccacccacua

SEQ ID NO: 2769391 - RNA, 19 nt, Artificial Sequence
  Description of Artificial Sequence: Synthetic oligonucleotide
gauccuugacuggcagacc

SEQ ID NO: 2769392 - RNA, 19 nt, Artificial Sequence
  Description of Artificial Sequence: Synthetic oligonucleotide
gugaacaaauccaguaccu

SEQ ID NO: 2769393 - RNA, 19 nt, Artificial Sequence
  Description of Artificial Sequence: Synthetic oligonucleotide
uaccuuuguggucgcuguc

SEQ ID NO: 2769394 - RNA, 19 nt, Artificial Sequence
  Description of Artificial Sequence: Synthetic oligonucleotide
ccacacacacacagguagg

SEQ ID NO: 2769395 - RNA, 19 nt, Artificial Sequence
  Description of Artificial Sequence: Synthetic oligonucleotide
cacacacacacagguagga

SEQ ID NO: 2769396 - RNA, 19 nt, Artificial Sequence
  Description of Artificial Sequence: Synthetic oligonucleotide
ggucccgugcaaacuggag

SEQ ID NO: 2769397 - RNA, 19 nt, Artificial Sequence
  Description of Artificial Sequence: Synthetic oligonucleotide
cacguggcagaagguggug

SEQ ID NO: 2769398 - RNA, 19 nt, Artificial Sequence
  Description of Artificial Sequence: Synthetic oligonucleotide
agccacacacacacaggua

SEQ ID NO: 2769399 - RNA, 19 nt, Artificial Sequence
  Description of Artificial Sequence: Synthetic oligonucleotide
ccaguaccuuuguggucgc

SEQ ID NO: 2769400 - RNA, 19 nt, Artificial Sequence
  Description of Artificial Sequence: Synthetic oligonucleotide
ccuugugaacaaauccagu

SEQ ID NO: 2769401 - RNA, 19 nt, Artificial Sequence
  Description of Artificial Sequence: Synthetic oligonucleotide
gacuggcagaccacccacu

SEQ ID NO: 2769402 - RNA, 19 nt, Artificial Sequence
  Description of Artificial Sequence: Synthetic oligonucleotide
ccgugcaaacuggaggaca

SEQ ID NO: 2769403 - RNA, 19 nt, Artificial Sequence
  Description of Artificial Sequence: Synthetic oligonucleotide
ccuuuguggucgcuguccu

SEQ ID NO: 2769404 - RNA, 19 nt, Artificial Sequence
  Description of Artificial Sequence: Synthetic oligonucleotide
ccugagccacacacacaca

SEQ ID NO: 2769405 - RNA, 19 nt, Artificial Sequence
  Description of Artificial Sequence: Synthetic oligonucleotide
cccgugcaaacuggaggac

SEQ ID NO: 2769406 - RNA, 19 nt, Artificial Sequence
  Description of Artificial Sequence: Synthetic oligonucleotide
caguaccuuuguggucgcu

SEQ ID NO: 2769407 - RNA, 19 nt, Artificial Sequence
  Description of Artificial Sequence: Synthetic oligonucleotide
aaauaaaucaggcaacugc

SEQ ID NO: 2769408 - RNA, 19 nt, Artificial Sequence
  Description of Artificial Sequence: Synthetic oligonucleotide
uccaaaaucaaauuaauag

SEQ ID NO: 2769409 - RNA, 19 nt, Artificial Sequence
  Description of Artificial Sequence: Synthetic oligonucleotide
aaaauccacaauuacacac

SEQ ID NO: 2769410 - RNA, 19 nt, Artificial Sequence
  Description of Artificial Sequence: Synthetic oligonucleotide
aaauuuacauauuacaaug

SEQ ID NO: 2769411 - RNA, 19 nt, Artificial Sequence
  Description of Artificial Sequence: Synthetic oligonucleotide
uuacauauuacaauguacc

SEQ ID NO: 2769412 - RNA, 19 nt, Artificial Sequence
  Description of Artificial Sequence: Synthetic oligonucleotide
aauguaccaacacaaaguc

SEQ ID NO: 2769413 - RNA, 19 nt, Artificial Sequence
  Description of Artificial Sequence: Synthetic oligonucleotide
aaaucuaaacgucaucuuc

SEQ ID NO: 2769414 - RNA, 19 nt, Artificial Sequence
  Description of Artificial Sequence: Synthetic oligonucleotide
ucaaaauccacaauuacac

SEQ ID NO: 2769415 - RNA, 19 nt, Artificial Sequence
  Description of Artificial Sequence: Synthetic oligonucleotide
aaggagacgagacacggcc

SEQ ID NO: 2769416 - RNA, 19 nt, Artificial Sequence
  Description of Artificial Sequence: Synthetic oligonucleotide
aaaucaaauuaauagucug

SEQ ID NO: 2769417 - RNA, 19 nt, Artificial Sequence
  Description of Artificial Sequence: Synthetic oligonucleotide
uguagaaauauuuaaauuu

SEQ ID NO: 2769418 - RNA, 19 nt, Artificial Sequence
  Description of Artificial Sequence: Synthetic oligonucleotide
aauuuaggcaauguuuccc

SEQ ID NO: 2769419 - RNA, 19 nt, Artificial Sequence
  Description of Artificial Sequence: Synthetic oligonucleotide
uguaccaacacaaagucaa

SEQ ID NO: 2769420 - RNA, 19 nt, Artificial Sequence
  Description of Artificial Sequence: Synthetic oligonucleotide
caacacaaagucaaaaucc

SEQ ID NO: 2769421 - RNA, 19 nt, Artificial Sequence
  Description of Artificial Sequence: Synthetic oligonucleotide
uaauagucuggucaaaacc

SEQ ID NO: 2769422 - RNA, 19 nt, Artificial Sequence
  Description of Artificial Sequence: Synthetic oligonucleotide
uuuacagacaucuaaccac

SEQ ID NO: 2769423 - RNA, 19 nt, Artificial Sequence
  Description of Artificial Sequence: Synthetic oligonucleotide
caaaaucaaauuaauaguc

SEQ ID NO: 2769424 - RNA, 19 nt, Artificial Sequence
  Description of Artificial Sequence: Synthetic oligonucleotide
uuuacauauuacaauguac

SEQ ID NO: 2769425 - RNA, 19 nt, Artificial Sequence
  Description of Artificial Sequence: Synthetic oligonucleotide
cauauuacaauguaccaac

SEQ ID NO: 2769426 - RNA, 19 nt, Artificial Sequence
  Description of Artificial Sequence: Synthetic oligonucleotide
ugugcuacggaguucagag

SEQ ID NO: 2769427 - RNA, 19 nt, Artificial Sequence
  Description of Artificial Sequence: Synthetic oligonucleotide
uucuguacaggauuuacag

SEQ ID NO: 2769428 - RNA, 19 nt, Artificial Sequence
  Description of Artificial Sequence: Synthetic oligonucleotide
augacugcuacauugucac

SEQ ID NO: 2769429 - RNA, 19 nt, Artificial Sequence
  Description of Artificial Sequence: Synthetic oligonucleotide
gauguauaauccuaauacc

SEQ ID NO: 2769430 - RNA, 19 nt, Artificial Sequence
  Description of Artificial Sequence: Synthetic oligonucleotide
uauuuaaauuuacauauua

SEQ ID NO: 2769431 - RNA, 19 nt, Artificial Sequence
  Description of Artificial Sequence: Synthetic oligonucleotide
auuacaauguaccaacaca

SEQ ID NO: 2769432 - RNA, 19 nt, Artificial Sequence
  Description of Artificial Sequence: Synthetic oligonucleotide
uccaaugacugcuacauug

SEQ ID NO: 2769433 - RNA, 19 nt, Artificial Sequence
  Description of Artificial Sequence: Synthetic oligonucleotide
uuacaauguaccaacacaa

SEQ ID NO: 2769434 - RNA, 19 nt, Artificial Sequence
  Description of Artificial Sequence: Synthetic oligonucleotide
aaaaccuuuuaguguuccc

SEQ ID NO: 2769435 - RNA, 19 nt, Artificial Sequence
  Description of Artificial Sequence: Synthetic oligonucleotide
aaauuaauagucuggucaa

SEQ ID NO: 2769436 - RNA, 19 nt, Artificial Sequence
  Description of Artificial Sequence: Synthetic oligonucleotide
ucauccaaaaucaaauuaa

SEQ ID NO: 2769437 - RNA, 19 nt, Artificial Sequence
  Description of Artificial Sequence: Synthetic oligonucleotide
ugcauuuauuaauuuaggc

SEQ ID NO: 2769438 - RNA, 19 nt, Artificial Sequence
  Description of Artificial Sequence: Synthetic oligonucleotide
uuuaguguucccacaauca

SEQ ID NO: 2769439 - RNA, 19 nt, Artificial Sequence
  Description of Artificial Sequence: Synthetic oligonucleotide
aaccuuuuaguguucccac

SEQ ID NO: 2769440 - RNA, 19 nt, Artificial Sequence
  Description of Artificial Sequence: Synthetic oligonucleotide
caaauuaauagucugguca

SEQ ID NO: 2769441 - RNA, 19 nt, Artificial Sequence
  Description of Artificial Sequence: Synthetic oligonucleotide
cauuuauuaauuuaggcaa

SEQ ID NO: 2769442 - RNA, 19 nt, Artificial Sequence
  Description of Artificial Sequence: Synthetic oligonucleotide
gaagugauaacggcgacgg

SEQ ID NO: 2769443 - RNA, 19 nt, Artificial Sequence
  Description of Artificial Sequence: Synthetic oligonucleotide
cuguacaggauuuacagac

SEQ ID NO: 2769444 - RNA, 19 nt, Artificial Sequence
  Description of Artificial Sequence: Synthetic oligonucleotide
aauaaaucaggcaacugca

SEQ ID NO: 2769445 - RNA, 19 nt, Artificial Sequence
  Description of Artificial Sequence: Synthetic oligonucleotide
agucaaaauccacaauuac

SEQ ID NO: 2769446 - RNA, 19 nt, Artificial Sequence
  Description of Artificial Sequence: Synthetic oligonucleotide
gauuuacagacaucuaacc

SEQ ID NO: 2769447 - RNA, 19 nt, Artificial Sequence
  Description of Artificial Sequence: Synthetic oligonucleotide
ugugaagagcugaauaccc

SEQ ID NO: 2769448 - RNA, 19 nt, Artificial Sequence
  Description of Artificial Sequence: Synthetic oligonucleotide
uggucaaaaccuuuuagug

SEQ ID NO: 2769449 - RNA, 19 nt, Artificial Sequence
  Description of Artificial Sequence: Synthetic oligonucleotide
ucagaagugauaacggcga

SEQ ID NO: 2769450 - RNA, 19 nt, Artificial Sequence
  Description of Artificial Sequence: Synthetic oligonucleotide
aaggcagacgucaugcugc

SEQ ID NO: 2769451 - RNA, 19 nt, Artificial Sequence
  Description of Artificial Sequence: Synthetic oligonucleotide
cuugugaagagcugaauac

SEQ ID NO: 2769452 - RNA, 19 nt, Artificial Sequence
  Description of Artificial Sequence: Synthetic oligonucleotide
ucuggucaaaaccuuuuag

SEQ ID NO: 2769453 - RNA, 19 nt, Artificial Sequence
  Description of Artificial Sequence: Synthetic oligonucleotide
auuuacagacaucuaacca

SEQ ID NO: 2769454 - RNA, 19 nt, Artificial Sequence
  Description of Artificial Sequence: Synthetic oligonucleotide
uauuacaauguaccaacac

SEQ ID NO: 2769455 - RNA, 19 nt, Artificial Sequence
  Description of Artificial Sequence: Synthetic oligonucleotide
uccuaauaccacuuguucc

SEQ ID NO: 2769456 - RNA, 19 nt, Artificial Sequence
  Description of Artificial Sequence: Synthetic oligonucleotide
uccacaauuacacacucau

SEQ ID NO: 2769457 - RNA, 19 nt, Artificial Sequence
  Description of Artificial Sequence: Synthetic oligonucleotide
cuaaacgucaucuucagaa

SEQ ID NO: 2769458 - RNA, 19 nt, Artificial Sequence
  Description of Artificial Sequence: Synthetic oligonucleotide
uucauccaaaaucaaauua

SEQ ID NO: 2769459 - RNA, 19 nt, Artificial Sequence
  Description of Artificial Sequence: Synthetic oligonucleotide
gacaucuaaccacacacug

SEQ ID NO: 2769460 - RNA, 19 nt, Artificial Sequence
  Description of Artificial Sequence: Synthetic oligonucleotide
aaaucaggcaacugcauuu

SEQ ID NO: 2769461 - RNA, 19 nt, Artificial Sequence
  Description of Artificial Sequence: Synthetic oligonucleotide
auugucaccucucacgaug

SEQ ID NO: 2769462 - RNA, 19 nt, Artificial Sequence
  Description of Artificial Sequence: Synthetic oligonucleotide
uuuuaguguucccacaauc

SEQ ID NO: 2769463 - RNA, 19 nt, Artificial Sequence
  Description of Artificial Sequence: Synthetic oligonucleotide
aaucuaaacgucaucuuca

SEQ ID NO: 2769464 - RNA, 19 nt, Artificial Sequence
  Description of Artificial Sequence: Synthetic oligonucleotide
acaggauuuacagacaucu

SEQ ID NO: 2769465 - RNA, 19 nt, Artificial Sequence
  Description of Artificial Sequence: Synthetic oligonucleotide
aguguucccacaaucauuc

SEQ ID NO: 2769466 - RNA, 19 nt, Artificial Sequence
  Description of Artificial Sequence: Synthetic oligonucleotide
uuaauagucuggucaaaac

SEQ ID NO: 2769467 - RNA, 19 nt, Artificial Sequence
  Description of Artificial Sequence: Synthetic oligonucleotide
uaaacgucaucuucagaag

SEQ ID NO: 2769468 - RNA, 19 nt, Artificial Sequence
  Description of Artificial Sequence: Synthetic oligonucleotide
caucuaaccacacacugug

SEQ ID NO: 2769469 - RNA, 19 nt, Artificial Sequence
  Description of Artificial Sequence: Synthetic oligonucleotide
ugcuacggaguucagaggu

SEQ ID NO: 2769470 - RNA, 19 nt, Artificial Sequence
  Description of Artificial Sequence: Synthetic oligonucleotide
uaauccuaauaccacuugu

SEQ ID NO: 2769471 - RNA, 19 nt, Artificial Sequence
  Description of Artificial Sequence: Synthetic oligonucleotide
ucggauguuccccaagucc

SEQ ID NO: 2769472 - RNA, 19 nt, Artificial Sequence
  Description of Artificial Sequence: Synthetic oligonucleotide
aguucagagguucggcucg

SEQ ID NO: 2769473 - RNA, 19 nt, Artificial Sequence
  Description of Artificial Sequence: Synthetic oligonucleotide
cacaauuacacacucauaa

SEQ ID NO: 2769474 - RNA, 19 nt, Artificial Sequence
  Description of Artificial Sequence: Synthetic oligonucleotide
aaaauaaaucaggcaacug

SEQ ID NO: 2769475 - RNA, 19 nt, Artificial Sequence
  Description of Artificial Sequence: Synthetic oligonucleotide
aggauuuacagacaucuaa

SEQ ID NO: 2769476 - RNA, 19 nt, Artificial Sequence
  Description of Artificial Sequence: Synthetic oligonucleotide
ucuaaccacacacuguguc

SEQ ID NO: 2769477 - RNA, 19 nt, Artificial Sequence
  Description of Artificial Sequence: Synthetic oligonucleotide
uauaauccuaauaccacuu

SEQ ID NO: 2769478 - RNA, 19 nt, Artificial Sequence
  Description of Artificial Sequence: Synthetic oligonucleotide
aucagaagugauaacggcg

SEQ ID NO: 2769479 - RNA, 19 nt, Artificial Sequence
  Description of Artificial Sequence: Synthetic oligonucleotide
cuucagaagacgcaguuuc

SEQ ID NO: 2769480 - RNA, 19 nt, Artificial Sequence
  Description of Artificial Sequence: Synthetic oligonucleotide
aaaccuuuuaguguuccca

SEQ ID NO: 2769481 - RNA, 19 nt, Artificial Sequence
  Description of Artificial Sequence: Synthetic oligonucleotide
aaaaucuaaacgucaucuu

SEQ ID NO: 2769482 - RNA, 19 nt, Artificial Sequence
  Description of Artificial Sequence: Synthetic oligonucleotide
cugcauuuauuaauuuagg

SEQ ID NO: 2769483 - RNA, 19 nt, Artificial Sequence
  Description of Artificial Sequence: Synthetic oligonucleotide
gcauuuauuaauuuaggca

SEQ ID NO: 2769484 - RNA, 19 nt, Artificial Sequence
  Description of Artificial Sequence: Synthetic oligonucleotide
cugaauacccucucguggc

SEQ ID NO: 2769485 - RNA, 19 nt, Artificial Sequence
  Description of Artificial Sequence: Synthetic oligonucleotide
auguauaauccuaauacca

SEQ ID NO: 2769486 - RNA, 19 nt, Artificial Sequence
  Description of Artificial Sequence: Synthetic oligonucleotide
aucaaauuaauagucuggu

SEQ ID NO: 2769487 - RNA, 19 nt, Artificial Sequence
  Description of Artificial Sequence: Synthetic oligonucleotide
aaauccacaauuacacacu

SEQ ID NO: 2769488 - RNA, 19 nt, Artificial Sequence
  Description of Artificial Sequence: Synthetic oligonucleotide
auuuaggcaauguuuccca

SEQ ID NO: 2769489 - RNA, 19 nt, Artificial Sequence
  Description of Artificial Sequence: Synthetic oligonucleotide
agagguucggcucggaugu

SEQ ID NO: 2769490 - RNA, 19 nt, Artificial Sequence
  Description of Artificial Sequence: Synthetic oligonucleotide
caucagaagugauaacggc

SEQ ID NO: 2769491 - RNA, 19 nt, Artificial Sequence
  Description of Artificial Sequence: Synthetic oligonucleotide
aaugacugcuacauuguca

SEQ ID NO: 2769492 - RNA, 19 nt, Artificial Sequence
  Description of Artificial Sequence: Synthetic oligonucleotide
uuaguguucccacaaucau

SEQ ID NO: 2769493 - RNA, 19 nt, Artificial Sequence
  Description of Artificial Sequence: Synthetic oligonucleotide
aacccggcaacaaggagac

SEQ ID NO: 2769494 - RNA, 19 nt, Artificial Sequence
  Description of Artificial Sequence: Synthetic oligonucleotide
auaauccuaauaccacuug

SEQ ID NO: 2769495 - RNA, 19 nt, Artificial Sequence
  Description of Artificial Sequence: Synthetic oligonucleotide
cacaaagucaaaauccaca

SEQ ID NO: 2769496 - RNA, 19 nt, Artificial Sequence
  Description of Artificial Sequence: Synthetic oligonucleotide
uuauuaauuuaggcaaugu

SEQ ID NO: 2769497 - RNA, 19 nt, Artificial Sequence
  Description of Artificial Sequence: Synthetic oligonucleotide
uguacaggauuuacagaca

SEQ ID NO: 2769498 - RNA, 19 nt, Artificial Sequence
  Description of Artificial Sequence: Synthetic oligonucleotide
aaucauucucccaucagaa

SEQ ID NO: 2769499 - RNA, 19 nt, Artificial Sequence
  Description of Artificial Sequence: Synthetic oligonucleotide
cgauguauaauccuaauac

SEQ ID NO: 2769500 - RNA, 19 nt, Artificial Sequence
  Description of Artificial Sequence: Synthetic oligonucleotide
uugugaagagcugaauacc

SEQ ID NO: 2769501 - RNA, 19 nt, Artificial Sequence
  Description of Artificial Sequence: Synthetic oligonucleotide
aucuaaacgucaucuucag

SEQ ID NO: 2769502 - RNA, 19 nt, Artificial Sequence
  Description of Artificial Sequence: Synthetic oligonucleotide
ucaaauuaauagucugguc

SEQ ID NO: 2769503 - RNA, 19 nt, Artificial Sequence
  Description of Artificial Sequence: Synthetic oligonucleotide
acaaggagacgagacacgg

SEQ ID NO: 2769504 - RNA, 19 nt, Artificial Sequence
  Description of Artificial Sequence: Synthetic oligonucleotide
gacgguucgguugauguag

SEQ ID NO: 2769505 - RNA, 19 nt, Artificial Sequence
  Description of Artificial Sequence: Synthetic oligonucleotide
aacggcgacgguucgguug

SEQ ID NO: 2769506 - RNA, 19 nt, Artificial Sequence
  Description of Artificial Sequence: Synthetic oligonucleotide
acauugucaccucucacga

SEQ ID NO: 2769507 - RNA, 19 nt, Artificial Sequence
  Description of Artificial Sequence: Synthetic oligonucleotide
auaccacuuguuccacucc

SEQ ID NO: 2769508 - RNA, 19 nt, Artificial Sequence
  Description of Artificial Sequence: Synthetic oligonucleotide
gaagacgcaguuucuguac

SEQ ID NO: 2769509 - RNA, 19 nt, Artificial Sequence
  Description of Artificial Sequence: Synthetic oligonucleotide
gacgucaugcugcugggcc

SEQ ID NO: 2769510 - RNA, 19 nt, Artificial Sequence
  Description of Artificial Sequence: Synthetic oligonucleotide
gagacaacccggcaacaag

SEQ ID NO: 2769511 - RNA, 19 nt, Artificial Sequence
  Description of Artificial Sequence: Synthetic oligonucleotide
acacacugugucuucagug

SEQ ID NO: 2769512 - RNA, 19 nt, Artificial Sequence
  Description of Artificial Sequence: Synthetic oligonucleotide
ucuccaaugacugcuacau

SEQ ID NO: 2769513 - RNA, 19 nt, Artificial Sequence
  Description of Artificial Sequence: Synthetic oligonucleotide
uaaaucaggcaacugcauu

SEQ ID NO: 2769514 - RNA, 19 nt, Artificial Sequence
  Description of Artificial Sequence: Synthetic oligonucleotide
ucuguacaggauuuacaga

SEQ ID NO: 2769515 - RNA, 19 nt, Artificial Sequence
  Description of Artificial Sequence: Synthetic oligonucleotide
uguucccacaaucauucuc

SEQ ID NO: 2769516 - RNA, 19 nt, Artificial Sequence
  Description of Artificial Sequence: Synthetic oligonucleotide
cauucucccaucagaagug

SEQ ID NO: 2769517 - RNA, 19 nt, Artificial Sequence
  Description of Artificial Sequence: Synthetic oligonucleotide
gucaaaauccacaauuaca

SEQ ID NO: 2769518 - RNA, 19 nt, Artificial Sequence
  Description of Artificial Sequence: Synthetic oligonucleotide
aacaaggagacgagacacg

SEQ ID NO: 2769519 - RNA, 19 nt, Artificial Sequence
  Description of Artificial Sequence: Synthetic oligonucleotide
uguuccacuccuugugaag

SEQ ID NO: 2769520 - RNA, 19 nt, Artificial Sequence
  Description of Artificial Sequence: Synthetic oligonucleotide
gcugaauacccucucgugg

SEQ ID NO: 2769521 - RNA, 19 nt, Artificial Sequence
  Description of Artificial Sequence: Synthetic oligonucleotide
gggaacaggagacaacccg

SEQ ID NO: 2769522 - RNA, 19 nt, Artificial Sequence
  Description of Artificial Sequence: Synthetic oligonucleotide
uaggcaauguuucccaaua

SEQ ID NO: 2769523 - RNA, 19 nt, Artificial Sequence
  Description of Artificial Sequence: Synthetic oligonucleotide
caucaauuucuccaaugac

SEQ ID NO: 2769524 - RNA, 19 nt, Artificial Sequence
  Description of Artificial Sequence: Synthetic oligonucleotide
acugcuacauugucaccuc

SEQ ID NO: 2769525 - RNA, 19 nt, Artificial Sequence
  Description of Artificial Sequence: Synthetic oligonucleotide
agaagugauaacggcgacg

SEQ ID NO: 2769526 - RNA, 19 nt, Artificial Sequence
  Description of Artificial Sequence: Synthetic oligonucleotide
cucucacgauguauaaucc

SEQ ID NO: 2769527 - RNA, 19 nt, Artificial Sequence
  Description of Artificial Sequence: Synthetic oligonucleotide
ucacgauguauaauccuaa

SEQ ID NO: 2769528 - RNA, 19 nt, Artificial Sequence
  Description of Artificial Sequence: Synthetic oligonucleotide
acauauuacaauguaccaa

SEQ ID NO: 2769529 - RNA, 19 nt, Artificial Sequence
  Description of Artificial Sequence: Synthetic oligonucleotide
aagacgcaguuucuguaca

SEQ ID NO: 2769530 - RNA, 19 nt, Artificial Sequence
  Description of Artificial Sequence: Synthetic oligonucleotide
gcagacgucaugcugcugg

SEQ ID NO: 2769531 - RNA, 19 nt, Artificial Sequence
  Description of Artificial Sequence: Synthetic oligonucleotide
caacaaggagacgagacac

SEQ ID NO: 2769532 - RNA, 19 nt, Artificial Sequence
  Description of Artificial Sequence: Synthetic oligonucleotide
ucucacgauguauaauccu

SEQ ID NO: 2769533 - RNA, 19 nt, Artificial Sequence
  Description of Artificial Sequence: Synthetic oligonucleotide
aucauucucccaucagaag

SEQ ID NO: 2769534 - RNA, 19 nt, Artificial Sequence
  Description of Artificial Sequence: Synthetic oligonucleotide
uacggaguucagagguucg

SEQ ID NO: 2769535 - RNA, 19 nt, Artificial Sequence
  Description of Artificial Sequence: Synthetic oligonucleotide
uguuccccaaguccagugc

SEQ ID NO: 2769536 - RNA, 19 nt, Artificial Sequence
  Description of Artificial Sequence: Synthetic oligonucleotide
auuaauagucuggucaaaa

SEQ ID NO: 2769537 - RNA, 19 nt, Artificial Sequence
  Description of Artificial Sequence: Synthetic oligonucleotide
acgucaugcugcugggccc

SEQ ID NO: 2769538 - RNA, 19 nt, Artificial Sequence
  Description of Artificial Sequence: Synthetic oligonucleotide
agacaacccggcaacaagg

SEQ ID NO: 2769539 - RNA, 19 nt, Artificial Sequence
  Description of Artificial Sequence: Synthetic oligonucleotide
aagucaaaauccacaauua

SEQ ID NO: 2769540 - RNA, 19 nt, Artificial Sequence
  Description of Artificial Sequence: Synthetic oligonucleotide
uucagugugcuacggaguu

SEQ ID NO: 2769541 - RNA, 19 nt, Artificial Sequence
  Description of Artificial Sequence: Synthetic oligonucleotide
ucuaaacgucaucuucaga

SEQ ID NO: 2769542 - RNA, 19 nt, Artificial Sequence
  Description of Artificial Sequence: Synthetic oligonucleotide
ugauaacggcgacgguucg

SEQ ID NO: 2769543 - RNA, 19 nt, Artificial Sequence
  Description of Artificial Sequence: Synthetic oligonucleotide
ucaccucucacgauguaua

SEQ ID NO: 2769544 - RNA, 19 nt, Artificial Sequence
  Description of Artificial Sequence: Synthetic oligonucleotide
uucagaagacgcaguuucu

SEQ ID NO: 2769545 - RNA, 19 nt, Artificial Sequence
  Description of Artificial Sequence: Synthetic oligonucleotide
gacgcaguuucuguacagg

SEQ ID NO: 2769546 - RNA, 19 nt, Artificial Sequence
  Description of Artificial Sequence: Synthetic oligonucleotide
caaaaccuuuuaguguucc

SEQ ID NO: 2769547 - RNA, 19 nt, Artificial Sequence
  Description of Artificial Sequence: Synthetic oligonucleotide
agugauaacggcgacgguu

SEQ ID NO: 2769548 - RNA, 19 nt, Artificial Sequence
  Description of Artificial Sequence: Synthetic oligonucleotide
guucgguugauguaguucu

SEQ ID NO: 2769549 - RNA, 19 nt, Artificial Sequence
  Description of Artificial Sequence: Synthetic oligonucleotide
acgauguauaauccuaaua

SEQ ID NO: 2769550 - RNA, 19 nt, Artificial Sequence
  Description of Artificial Sequence: Synthetic oligonucleotide
guauaauccuaauaccacu

SEQ ID NO: 2769551 - RNA, 19 nt, Artificial Sequence
  Description of Artificial Sequence: Synthetic oligonucleotide
aauuaauagucuggucaaa

SEQ ID NO: 2769552 - RNA, 19 nt, Artificial Sequence
  Description of Artificial Sequence: Synthetic oligonucleotide
uucuccaaugacugcuaca

SEQ ID NO: 2769553 - RNA, 19 nt, Artificial Sequence
  Description of Artificial Sequence: Synthetic oligonucleotide
cacugugucuucagugugc

SEQ ID NO: 2769554 - RNA, 19 nt, Artificial Sequence
  Description of Artificial Sequence: Synthetic oligonucleotide
uuaggcaauguuucccaau

SEQ ID NO: 2769555 - RNA, 19 nt, Artificial Sequence
  Description of Artificial Sequence: Synthetic oligonucleotide
cagagguucggcucggaug

SEQ ID NO: 2769556 - RNA, 19 nt, Artificial Sequence
  Description of Artificial Sequence: Synthetic oligonucleotide
acgucaucuucagaagacg

SEQ ID NO: 2769557 - RNA, 19 nt, Artificial Sequence
  Description of Artificial Sequence: Synthetic oligonucleotide
gaguucagagguucggcuc

SEQ ID NO: 2769558 - RNA, 19 nt, Artificial Sequence
  Description of Artificial Sequence: Synthetic oligonucleotide
uaguguucccacaaucauu

SEQ ID NO: 2769559 - RNA, 19 nt, Artificial Sequence
  Description of Artificial Sequence: Synthetic oligonucleotide
gauaacggcgacgguucgg

SEQ ID NO: 2769560 - RNA, 19 nt, Artificial Sequence
  Description of Artificial Sequence: Synthetic oligonucleotide
gugucuucagugugcuacg

SEQ ID NO: 2769561 - RNA, 19 nt, Artificial Sequence
  Description of Artificial Sequence: Synthetic oligonucleotide
gucaaaaccuuuuaguguu

SEQ ID NO: 2769562 - RNA, 19 nt, Artificial Sequence
  Description of Artificial Sequence: Synthetic oligonucleotide
ggauuuacagacaucuaac

SEQ ID NO: 2769563 - RNA, 19 nt, Artificial Sequence
  Description of Artificial Sequence: Synthetic oligonucleotide
uugucaccucucacgaugu

SEQ ID NO: 2769564 - RNA, 19 nt, Artificial Sequence
  Description of Artificial Sequence: Synthetic oligonucleotide
caacccggcaacaaggaga

SEQ ID NO: 2769565 - RNA, 19 nt, Artificial Sequence
  Description of Artificial Sequence: Synthetic oligonucleotide
ccaacacaaagucaaaauc

SEQ ID NO: 2769566 - RNA, 19 nt, Artificial Sequence
  Description of Artificial Sequence: Synthetic oligonucleotide
ucaaaaccuuuuaguguuc

SEQ ID NO: 2769567 - RNA, 19 nt, Artificial Sequence
  Description of Artificial Sequence: Synthetic oligonucleotide
ugaauacccucucguggcu

SEQ ID NO: 2769568 - RNA, 19 nt, Artificial Sequence
  Description of Artificial Sequence: Synthetic oligonucleotide
uuuaggcaauguuucccaa

SEQ ID NO: 2769569 - RNA, 19 nt, Artificial Sequence
  Description of Artificial Sequence: Synthetic oligonucleotide
caaggcagacgucaugcug

SEQ ID NO: 2769570 - RNA, 19 nt, Artificial Sequence
  Description of Artificial Sequence: Synthetic oligonucleotide
aauacccucucguggcuuu

SEQ ID NO: 2769571 - RNA, 19 nt, Artificial Sequence
  Description of Artificial Sequence: Synthetic oligonucleotide
uuccccaaguccagugcag

SEQ ID NO: 2769572 - RNA, 19 nt, Artificial Sequence
  Description of Artificial Sequence: Synthetic oligonucleotide
agacgcaguuucuguacag

SEQ ID NO: 2769573 - RNA, 19 nt, Artificial Sequence
  Description of Artificial Sequence: Synthetic oligonucleotide
caaaauccacaauuacaca

SEQ ID NO: 2769574 - RNA, 19 nt, Artificial Sequence
  Description of Artificial Sequence: Synthetic oligonucleotide
caggagacaacccggcaac

SEQ ID NO: 2769575 - RNA, 19 nt, Artificial Sequence
  Description of Artificial Sequence: Synthetic oligonucleotide
acaacccggcaacaaggag

SEQ ID NO: 2769576 - RNA, 19 nt, Artificial Sequence
  Description of Artificial Sequence: Synthetic oligonucleotide
ccucucacgauguauaauc

SEQ ID NO: 2769577 - RNA, 19 nt, Artificial Sequence
  Description of Artificial Sequence: Synthetic oligonucleotide
acgcaguuucuguacagga

SEQ ID NO: 2769578 - RNA, 19 nt, Artificial Sequence
  Description of Artificial Sequence: Synthetic oligonucleotide
ucucguggcuuucauccaa

SEQ ID NO: 2769579 - RNA, 19 nt, Artificial Sequence
  Description of Artificial Sequence: Synthetic oligonucleotide
ugucuucagugugcuacgg

SEQ ID NO: 2769580 - RNA, 19 nt, Artificial Sequence
  Description of Artificial Sequence: Synthetic oligonucleotide
uacaggauuuacagacauc

SEQ ID NO: 2769581 - RNA, 19 nt, Artificial Sequence
  Description of Artificial Sequence: Synthetic oligonucleotide
gaacaggagacaacccggc

SEQ ID NO: 2769582 - RNA, 19 nt, Artificial Sequence
  Description of Artificial Sequence: Synthetic oligonucleotide
ccuaauaccacuuguucca

SEQ ID NO: 2769583 - RNA, 19 nt, Artificial Sequence
  Description of Artificial Sequence: Synthetic oligonucleotide
cucacgauguauaauccua

SEQ ID NO: 2769584 - RNA, 19 nt, Artificial Sequence
  Description of Artificial Sequence: Synthetic oligonucleotide
aaucaggcaacugcauuua

SEQ ID NO: 2769585 - RNA, 19 nt, Artificial Sequence
  Description of Artificial Sequence: Synthetic oligonucleotide
caaggagacgagacacggc

SEQ ID NO: 2769586 - RNA, 19 nt, Artificial Sequence
  Description of Artificial Sequence: Synthetic oligonucleotide
accuuuuaguguucccaca

SEQ ID NO: 2769587 - RNA, 19 nt, Artificial Sequence
  Description of Artificial Sequence: Synthetic oligonucleotide
uuguuccacuccuugugaa

SEQ ID NO: 2769588 - RNA, 19 nt, Artificial Sequence
  Description of Artificial Sequence: Synthetic oligonucleotide
cuggucaaaaccuuuuagu

SEQ ID NO: 2769589 - RNA, 19 nt, Artificial Sequence
  Description of Artificial Sequence: Synthetic oligonucleotide
auaacggcgacgguucggu

SEQ ID NO: 2769590 - RNA, 19 nt, Artificial Sequence
  Description of Artificial Sequence: Synthetic oligonucleotide
auauuuaaauuuacauauu

SEQ ID NO: 2769591 - RNA, 19 nt, Artificial Sequence
  Description of Artificial Sequence: Synthetic oligonucleotide
ccaaaaucaaauuaauagu

SEQ ID NO: 2769592 - RNA, 19 nt, Artificial Sequence
  Description of Artificial Sequence: Synthetic oligonucleotide
acaucuaaccacacacugu

SEQ ID NO: 2769593 - RNA, 19 nt, Artificial Sequence
  Description of Artificial Sequence: Synthetic oligonucleotide
gacugcuacauugucaccu

SEQ ID NO: 2769594 - RNA, 19 nt, Artificial Sequence
  Description of Artificial Sequence: Synthetic oligonucleotide
uagucuggucaaaaccuuu

SEQ ID NO: 2769595 - RNA, 19 nt, Artificial Sequence
  Description of Artificial Sequence: Synthetic oligonucleotide
gugauaacggcgacgguuc

SEQ ID NO: 2769596 - RNA, 19 nt, Artificial Sequence
  Description of Artificial Sequence: Synthetic oligonucleotide
uucggcucggauguucccc

SEQ ID NO: 2769597 - RNA, 19 nt, Artificial Sequence
  Description of Artificial Sequence: Synthetic oligonucleotide
caaugacugcuacauuguc

SEQ ID NO: 2769598 - RNA, 19 nt, Artificial Sequence
  Description of Artificial Sequence: Synthetic oligonucleotide
cagacgucaugcugcuggg

SEQ ID NO: 2769599 - RNA, 19 nt, Artificial Sequence
  Description of Artificial Sequence: Synthetic oligonucleotide
acggaguucagagguucgg

SEQ ID NO: 2769600 - RNA, 19 nt, Artificial Sequence
  Description of Artificial Sequence: Synthetic oligonucleotide
ucagagguucggcucggau

SEQ ID NO: 2769601 - RNA, 19 nt, Artificial Sequence
  Description of Artificial Sequence: Synthetic oligonucleotide
acugugucuucagugugcu

SEQ ID NO: 2769602 - RNA, 19 nt, Artificial Sequence
  Description of Artificial Sequence: Synthetic oligonucleotide
ggucaaaaccuuuuagugu

SEQ ID NO: 2769603 - RNA, 19 nt, Artificial Sequence
  Description of Artificial Sequence: Synthetic oligonucleotide
cuaauaccacuuguuccac

SEQ ID NO: 2769604 - RNA, 19 nt, Artificial Sequence
  Description of Artificial Sequence: Synthetic oligonucleotide
agacaucuaaccacacacu

SEQ ID NO: 2769605 - RNA, 19 nt, Artificial Sequence
  Description of Artificial Sequence: Synthetic oligonucleotide
ucccacaaucauucuccca

SEQ ID NO: 2769606 - RNA, 19 nt, Artificial Sequence
  Description of Artificial Sequence: Synthetic oligonucleotide
aagugauaacggcgacggu

SEQ ID NO: 2769607 - RNA, 19 nt, Artificial Sequence
  Description of Artificial Sequence: Synthetic oligonucleotide
ggcaacaaggagacgagac

SEQ ID NO: 2769608 - RNA, 19 nt, Artificial Sequence
  Description of Artificial Sequence: Synthetic oligonucleotide
cacaaucauucucccauca

SEQ ID NO: 2769609 - RNA, 19 nt, Artificial Sequence
  Description of Artificial Sequence: Synthetic oligonucleotide
guuccccaaguccagugca

SEQ ID NO: 2769610 - RNA, 19 nt, Artificial Sequence
  Description of Artificial Sequence: Synthetic oligonucleotide
cuacggaguucagagguuc

SEQ ID NO: 2769611 - RNA, 19 nt, Artificial Sequence
  Description of Artificial Sequence: Synthetic oligonucleotide
ugacugcuacauugucacc

SEQ ID NO: 2769612 - RNA, 19 nt, Artificial Sequence
  Description of Artificial Sequence: Synthetic oligonucleotide
auaaaucaggcaacugcau

SEQ ID NO: 2769613 - RNA, 19 nt, Artificial Sequence
  Description of Artificial Sequence: Synthetic oligonucleotide
ucuucagaagacgcaguuu

SEQ ID NO: 2769614 - RNA, 19 nt, Artificial Sequence
  Description of Artificial Sequence: Synthetic oligonucleotide
ucggcucggauguucccca

SEQ ID NO: 2769615 - RNA, 19 nt, Artificial Sequence
  Description of Artificial Sequence: Synthetic oligonucleotide
ucuccaaggcagacgucau

SEQ ID NO: 2769616 - RNA, 19 nt, Artificial Sequence
  Description of Artificial Sequence: Synthetic oligonucleotide
agacgucaugcugcugggc

SEQ ID NO: 2769617 - RNA, 19 nt, Artificial Sequence
  Description of Artificial Sequence: Synthetic oligonucleotide
cucccaucagaagugauaa

SEQ ID NO: 2769618 - RNA, 19 nt, Artificial Sequence
  Description of Artificial Sequence: Synthetic oligonucleotide
ggcaauguuucccaauaaa

SEQ ID NO: 2769619 - RNA, 19 nt, Artificial Sequence
  Description of Artificial Sequence: Synthetic oligonucleotide
cauccaaaaucaaauuaau

SEQ ID NO: 2769620 - RNA, 19 nt, Artificial Sequence
  Description of Artificial Sequence: Synthetic oligonucleotide
cagaagugauaacggcgac

SEQ ID NO: 2769621 - RNA, 19 nt, Artificial Sequence
  Description of Artificial Sequence: Synthetic oligonucleotide
guacaggauuuacagacau

SEQ ID NO: 2769622 - RNA, 19 nt, Artificial Sequence
  Description of Artificial Sequence: Synthetic oligonucleotide
gcaacaaggagacgagaca

SEQ ID NO: 2769623 - RNA, 19 nt, Artificial Sequence
  Description of Artificial Sequence: Synthetic oligonucleotide
cuaaccacacacugugucu

SEQ ID NO: 2769624 - RNA, 19 nt, Artificial Sequence
  Description of Artificial Sequence: Synthetic oligonucleotide
auguaccaacacaaaguca

SEQ ID NO: 2769625 - RNA, 19 nt, Artificial Sequence
  Description of Artificial Sequence: Synthetic oligonucleotide
aggcaauguuucccaauaa

SEQ ID NO: 2769626 - RNA, 19 nt, Artificial Sequence
  Description of Artificial Sequence: Synthetic oligonucleotide
aggucccgggaacaggaga

SEQ ID NO: 2769627 - RNA, 19 nt, Artificial Sequence
  Description of Artificial Sequence: Synthetic oligonucleotide
gacaacccggcaacaagga

SEQ ID NO: 2769628 - RNA, 19 nt, Artificial Sequence
  Description of Artificial Sequence: Synthetic oligonucleotide
cagugugcuacggaguuca

SEQ ID NO: 2769629 - RNA, 19 nt, Artificial Sequence
  Description of Artificial Sequence: Synthetic oligonucleotide
agguucggcucggauguuc

SEQ ID NO: 2769630 - RNA, 19 nt, Artificial Sequence
  Description of Artificial Sequence: Synthetic oligonucleotide
cucggauguuccccaaguc

SEQ ID NO: 2769631 - RNA, 19 nt, Artificial Sequence
  Description of Artificial Sequence: Synthetic oligonucleotide
ccgggaacaggagacaacc

SEQ ID NO: 2769632 - RNA, 19 nt, Artificial Sequence
  Description of Artificial Sequence: Synthetic oligonucleotide
uccccaaguccagugcaga

SEQ ID NO: 2769633 - RNA, 19 nt, Artificial Sequence
  Description of Artificial Sequence: Synthetic oligonucleotide
auagucuggucaaaaccuu

SEQ ID NO: 2769634 - RNA, 19 nt, Artificial Sequence
  Description of Artificial Sequence: Synthetic oligonucleotide
guucagagguucggcucgg

SEQ ID NO: 2769635 - RNA, 19 nt, Artificial Sequence
  Description of Artificial Sequence: Synthetic oligonucleotide
gguucgguugauguaguuc

SEQ ID NO: 2769636 - RNA, 19 nt, Artificial Sequence
  Description of Artificial Sequence: Synthetic oligonucleotide
ucguggcuuucauccaaaa

SEQ ID NO: 2769637 - RNA, 19 nt, Artificial Sequence
  Description of Artificial Sequence: Synthetic oligonucleotide
aggcagacgucaugcugcu

SEQ ID NO: 2769638 - RNA, 19 nt, Artificial Sequence
  Description of Artificial Sequence: Synthetic oligonucleotide
agucuggucaaaaccuuuu

SEQ ID NO: 2769639 - RNA, 19 nt, Artificial Sequence
  Description of Artificial Sequence: Synthetic oligonucleotide
gcuuucauccaaaaucaaa

SEQ ID NO: 2769640 - RNA, 19 nt, Artificial Sequence
  Description of Artificial Sequence: Synthetic oligonucleotide
gucuggucaaaaccuuuua

SEQ ID NO: 2769641 - RNA, 19 nt, Artificial Sequence
  Description of Artificial Sequence: Synthetic oligonucleotide
guucggcucggauguuccc

SEQ ID NO: 2769642 - RNA, 19 nt, Artificial Sequence
  Description of Artificial Sequence: Synthetic oligonucleotide
ucagugugcuacggaguuc

SEQ ID NO: 2769643 - RNA, 19 nt, Artificial Sequence
  Description of Artificial Sequence: Synthetic oligonucleotide
ucccgggaacaggagacaa

SEQ ID NO: 2769644 - RNA, 19 nt, Artificial Sequence
  Description of Artificial Sequence: Synthetic oligonucleotide
auccacaauuacacacuca

SEQ ID NO: 2769645 - RNA, 19 nt, Artificial Sequence
  Description of Artificial Sequence: Synthetic oligonucleotide
auuucuccaaugacugcua

SEQ ID NO: 2769646 - RNA, 19 nt, Artificial Sequence
  Description of Artificial Sequence: Synthetic oligonucleotide
ggucccgggaacaggagac

SEQ ID NO: 2769647 - RNA, 19 nt, Artificial Sequence
  Description of Artificial Sequence: Synthetic oligonucleotide
cuucagugugcuacggagu

SEQ ID NO: 2769648 - RNA, 19 nt, Artificial Sequence
  Description of Artificial Sequence: Synthetic oligonucleotide
ugucaccucucacgaugua

SEQ ID NO: 2769649 - RNA, 19 nt, Artificial Sequence
  Description of Artificial Sequence: Synthetic oligonucleotide
aucuaaccacacacugugu

SEQ ID NO: 2769650 - RNA, 19 nt, Artificial Sequence
  Description of Artificial Sequence: Synthetic oligonucleotide
gguucggcucggauguucc

SEQ ID NO: 2769651 - RNA, 19 nt, Artificial Sequence
  Description of Artificial Sequence: Synthetic oligonucleotide
ccuuuuaguguucccacaa

SEQ ID NO: 2769652 - RNA, 19 nt, Artificial Sequence
  Description of Artificial Sequence: Synthetic oligonucleotide
gcaguuucuguacaggauu

SEQ ID NO: 2769653 - RNA, 19 nt, Artificial Sequence
  Description of Artificial Sequence: Synthetic oligonucleotide
ggaguucagagguucggcu

SEQ ID NO: 2769654 - RNA, 19 nt, Artificial Sequence
  Description of Artificial Sequence: Synthetic oligonucleotide
gaggucccgggaacaggag

SEQ ID NO: 2769655 - RNA, 19 nt, Artificial Sequence
  Description of Artificial Sequence: Synthetic oligonucleotide
caggauuuacagacaucua

SEQ ID NO: 2769656 - RNA, 19 nt, Artificial Sequence
  Description of Artificial Sequence: Synthetic oligonucleotide
uacccucucguggcuuuca

SEQ ID NO: 2769657 - RNA, 19 nt, Artificial Sequence
  Description of Artificial Sequence: Synthetic oligonucleotide
ccggcaacaaggagacgag

SEQ ID NO: 2769658 - RNA, 19 nt, Artificial Sequence
  Description of Artificial Sequence: Synthetic oligonucleotide
caccucucacgauguauaa

SEQ ID NO: 2769659 - RNA, 19 nt, Artificial Sequence
  Description of Artificial Sequence: Synthetic oligonucleotide
aggagacaacccggcaaca

SEQ ID NO: 2769660 - RNA, 19 nt, Artificial Sequence
  Description of Artificial Sequence: Synthetic oligonucleotide
cuuuuaguguucccacaau

SEQ ID NO: 2769661 - RNA, 19 nt, Artificial Sequence
  Description of Artificial Sequence: Synthetic oligonucleotide
gugugcuacggaguucaga

SEQ ID NO: 2769662 - RNA, 19 nt, Artificial Sequence
  Description of Artificial Sequence: Synthetic oligonucleotide
caucuucagaagacgcagu

SEQ ID NO: 2769663 - RNA, 19 nt, Artificial Sequence
  Description of Artificial Sequence: Synthetic oligonucleotide
ggaggucccgggaacagga

SEQ ID NO: 2769664 - RNA, 19 nt, Artificial Sequence
  Description of Artificial Sequence: Synthetic oligonucleotide
cccggcaacaaggagacga

SEQ ID NO: 2769665 - RNA, 19 nt, Artificial Sequence
  Description of Artificial Sequence: Synthetic oligonucleotide
guaccaacacaaagucaaa

SEQ ID NO: 2769666 - RNA, 19 nt, Artificial Sequence
  Description of Artificial Sequence: Synthetic oligonucleotide
cucguggcuuucauccaaa

SEQ ID NO: 2769667 - RNA, 19 nt, Artificial Sequence
  Description of Artificial Sequence: Synthetic oligonucleotide
cacuuguuccacuccuugu

SEQ ID NO: 2769668 - RNA, 19 nt, Artificial Sequence
  Description of Artificial Sequence: Synthetic oligonucleotide
gcaacugcauuuauuaauu

SEQ ID NO: 2769669 - RNA, 19 nt, Artificial Sequence
  Description of Artificial Sequence: Synthetic oligonucleotide
ggcucggauguuccccaag

SEQ ID NO: 2769670 - RNA, 19 nt, Artificial Sequence
  Description of Artificial Sequence: Synthetic oligonucleotide
aguccagugcagagucugu

SEQ ID NO: 2769671 - RNA, 19 nt, Artificial Sequence
  Description of Artificial Sequence: Synthetic oligonucleotide
cacgauguauaauccuaau

SEQ ID NO: 2769672 - RNA, 19 nt, Artificial Sequence
  Description of Artificial Sequence: Synthetic oligonucleotide
cccacaaucauucucccau

SEQ ID NO: 2769673 - RNA, 19 nt, Artificial Sequence
  Description of Artificial Sequence: Synthetic oligonucleotide
ccccaaguccagugcagag

SEQ ID NO: 2769674 - RNA, 19 nt, Artificial Sequence
  Description of Artificial Sequence: Synthetic oligonucleotide
ccacaaucauucucccauc

SEQ ID NO: 2769675 - RNA, 19 nt, Artificial Sequence
  Description of Artificial Sequence: Synthetic oligonucleotide
gcgacgguucgguugaugu

SEQ ID NO: 2769676 - RNA, 19 nt, Artificial Sequence
  Description of Artificial Sequence: Synthetic oligonucleotide
agugugcuacggaguucag

SEQ ID NO: 2769677 - RNA, 19 nt, Artificial Sequence
  Description of Artificial Sequence: Synthetic oligonucleotide
cuucaucaauuucuccaau

SEQ ID NO: 2769678 - RNA, 19 nt, Artificial Sequence
  Description of Artificial Sequence: Synthetic oligonucleotide
acgguucgguugauguagu

SEQ ID NO: 2769679 - RNA, 19 nt, Artificial Sequence
  Description of Artificial Sequence: Synthetic oligonucleotide
gucaccucucacgauguau

SEQ ID NO: 2769680 - RNA, 19 nt, Artificial Sequence
  Description of Artificial Sequence: Synthetic oligonucleotide
ccaaugacugcuacauugu

SEQ ID NO: 2769681 - RNA, 19 nt, Artificial Sequence
  Description of Artificial Sequence: Synthetic oligonucleotide
caacugcauuuauuaauuu

SEQ ID NO: 2769682 - RNA, 19 nt, Artificial Sequence
  Description of Artificial Sequence: Synthetic oligonucleotide
ggagacaacccggcaacaa

SEQ ID NO: 2769683 - RNA, 19 nt, Artificial Sequence
  Description of Artificial Sequence: Synthetic oligonucleotide
uaacggcgacgguucgguu

SEQ ID NO: 2769684 - RNA, 19 nt, Artificial Sequence
  Description of Artificial Sequence: Synthetic oligonucleotide
cccgggaacaggagacaac

SEQ ID NO: 2769685 - RNA, 19 nt, Artificial Sequence
  Description of Artificial Sequence: Synthetic oligonucleotide
cggaguucagagguucggc

SEQ ID NO: 2769686 - RNA, 19 nt, Artificial Sequence
  Description of Artificial Sequence: Synthetic oligonucleotide
gaauacccucucguggcuu

SEQ ID NO: 2769687 - RNA, 19 nt, Artificial Sequence
  Description of Artificial Sequence: Synthetic oligonucleotide
caaguccagugcagagucu

SEQ ID NO: 2769688 - RNA, 19 nt, Artificial Sequence
  Description of Artificial Sequence: Synthetic oligonucleotide
gucccgggaacaggagaca

SEQ ID NO: 2769689 - RNA, 19 nt, Artificial Sequence
  Description of Artificial Sequence: Synthetic oligonucleotide
cauugucaccucucacgau

SEQ ID NO: 2769690 - RNA, 19 nt, Artificial Sequence
  Description of Artificial Sequence: Synthetic oligonucleotide
guguucccacaaucauucu

SEQ ID NO: 2769691 - RNA, 19 nt, Artificial Sequence
  Description of Artificial Sequence: Synthetic oligonucleotide
acccggcaacaaggagacg

SEQ ID NO: 2769692 - RNA, 19 nt, Artificial Sequence
  Description of Artificial Sequence: Synthetic oligonucleotide
ggcgacgguucgguugaug

SEQ ID NO: 2769693 - RNA, 19 nt, Artificial Sequence
  Description of Artificial Sequence: Synthetic oligonucleotide
gcccggaggucccgggaac

SEQ ID NO: 2769694 - RNA, 19 nt, Artificial Sequence
  Description of Artificial Sequence: Synthetic oligonucleotide
ggcccggaggucccgggaa

SEQ ID NO: 2769695 - RNA, 19 nt, Artificial Sequence
  Description of Artificial Sequence: Synthetic oligonucleotide
cuccaaugacugcuacauu

SEQ ID NO: 2769696 - RNA, 19 nt, Artificial Sequence
  Description of Artificial Sequence: Synthetic oligonucleotide
cggaggucccgggaacagg

SEQ ID NO: 2769697 - RNA, 19 nt, Artificial Sequence
  Description of Artificial Sequence: Synthetic oligonucleotide
ggcagacgucaugcugcug

SEQ ID NO: 2769698 - RNA, 19 nt, Artificial Sequence
  Description of Artificial Sequence: Synthetic oligonucleotide
ccaaggcagacgucaugcu

SEQ ID NO: 2769699 - RNA, 19 nt, Artificial Sequence
  Description of Artificial Sequence: Synthetic oligonucleotide
gggcccggaggucccggga

SEQ ID NO: 2769700 - RNA, 19 nt, Artificial Sequence
  Description of Artificial Sequence: Synthetic oligonucleotide
gcuacggaguucagagguu

SEQ ID NO: 2769701 - RNA, 19 nt, Artificial Sequence
  Description of Artificial Sequence: Synthetic oligonucleotide
cgacgguucgguugaugua

SEQ ID NO: 2769702 - RNA, 19 nt, Artificial Sequence
  Description of Artificial Sequence: Synthetic oligonucleotide
cccggaggucccgggaaca

SEQ ID NO: 2769703 - RNA, 19 nt, Artificial Sequence
  Description of Artificial Sequence: Synthetic oligonucleotide
gagguucggcucggauguu

SEQ ID NO: 2769704 - RNA, 19 nt, Artificial Sequence
  Description of Artificial Sequence: Synthetic oligonucleotide
cggcaacaaggagacgaga

SEQ ID NO: 2769705 - RNA, 19 nt, Artificial Sequence
  Description of Artificial Sequence: Synthetic oligonucleotide
cggcucggauguuccccaa

SEQ ID NO: 2769706 - RNA, 19 nt, Artificial Sequence
  Description of Artificial Sequence: Synthetic oligonucleotide
cgguucgguugauguaguu

SEQ ID NO: 2769707 - RNA, 19 nt, Artificial Sequence
  Description of Artificial Sequence: Synthetic oligonucleotide
cggcgacgguucgguugau

SEQ ID NO: 2769708 - RNA, 19 nt, Artificial Sequence
  Description of Artificial Sequence: Synthetic oligonucleotide
aaaauaauaauugaguccc

SEQ ID NO: 2769709 - RNA, 19 nt, Artificial Sequence
  Description of Artificial Sequence: Synthetic oligonucleotide
uaauaauugagucccauca

SEQ ID NO: 2769710 - RNA, 19 nt, Artificial Sequence
  Description of Artificial Sequence: Synthetic oligonucleotide
uucccuuugcaguugagag

SEQ ID NO: 2769711 - RNA, 19 nt, Artificial Sequence
  Description of Artificial Sequence: Synthetic oligonucleotide
auugcuucgcacgccaugc

SEQ ID NO: 2769712 - RNA, 19 nt, Artificial Sequence
  Description of Artificial Sequence: Synthetic oligonucleotide
ugugcagugacagacugug

SEQ ID NO: 2769713 - RNA, 19 nt, Artificial Sequence
  Description of Artificial Sequence: Synthetic oligonucleotide
auucuugggaucugggaag

SEQ ID NO: 2769714 - RNA, 19 nt, Artificial Sequence
  Description of Artificial Sequence: Synthetic oligonucleotide
uuugcaguugagagccugg

SEQ ID NO: 2769715 - RNA, 19 nt, Artificial Sequence
  Description of Artificial Sequence: Synthetic oligonucleotide
aauaauaauugagucccau

SEQ ID NO: 2769716 - RNA, 19 nt, Artificial Sequence
  Description of Artificial Sequence: Synthetic oligonucleotide
auuauugcuucgcacgcca

SEQ ID NO: 2769717 - RNA, 19 nt, Artificial Sequence
  Description of Artificial Sequence: Synthetic oligonucleotide
accgugugcagugacagac

SEQ ID NO: 2769718 - RNA, 19 nt, Artificial Sequence
  Description of Artificial Sequence: Synthetic oligonucleotide
uguuccuuggggauuugga

SEQ ID NO: 2769719 - RNA, 19 nt, Artificial Sequence
  Description of Artificial Sequence: Synthetic oligonucleotide
uuccuuggggauuuggaga

SEQ ID NO: 2769720 - RNA, 19 nt, Artificial Sequence
  Description of Artificial Sequence: Synthetic oligonucleotide
guuccuuggggauuuggag

SEQ ID NO: 2769721 - RNA, 19 nt, Artificial Sequence
  Description of Artificial Sequence: Synthetic oligonucleotide
caugcuuccuucaucacga

SEQ ID NO: 2769722 - RNA, 19 nt, Artificial Sequence
  Description of Artificial Sequence: Synthetic oligonucleotide
ugcaguugagagccugggg

SEQ ID NO: 2769723 - RNA, 19 nt, Artificial Sequence
  Description of Artificial Sequence: Synthetic oligonucleotide
uuuuccgucuuagauauuu

SEQ ID NO: 2769724 - RNA, 19 nt, Artificial Sequence
  Description of Artificial Sequence: Synthetic oligonucleotide
cuuggggauuuggagaugg

SEQ ID NO: 2769725 - RNA, 19 nt, Artificial Sequence
  Description of Artificial Sequence: Synthetic oligonucleotide
uauugcuucgcacgccaug

SEQ ID NO: 2769726 - RNA, 19 nt, Artificial Sequence
  Description of Artificial Sequence: Synthetic oligonucleotide
gaaccgugugcagugacag

SEQ ID NO: 2769727 - RNA, 19 nt, Artificial Sequence
  Description of Artificial Sequence: Synthetic oligonucleotide
uuaccacgccagaagacac

SEQ ID NO: 2769728 - RNA, 19 nt, Artificial Sequence
  Description of Artificial Sequence: Synthetic oligonucleotide
uaccacgccagaagacacg

SEQ ID NO: 2769729 - RNA, 19 nt, Artificial Sequence
  Description of Artificial Sequence: Synthetic oligonucleotide
uauuauugcuucgcacgcc

SEQ ID NO: 2769730 - RNA, 19 nt, Artificial Sequence
  Description of Artificial Sequence: Synthetic oligonucleotide
ucccuuugcaguugagagc

SEQ ID NO: 2769731 - RNA, 19 nt, Artificial Sequence
  Description of Artificial Sequence: Synthetic oligonucleotide
cacgccagaagacacggac

SEQ ID NO: 2769732 - RNA, 19 nt, Artificial Sequence
  Description of Artificial Sequence: Synthetic oligonucleotide
uccuuggggauuuggagau

SEQ ID NO: 2769733 - RNA, 19 nt, Artificial Sequence
  Description of Artificial Sequence: Synthetic oligonucleotide
aaauaauaauugaguccca

SEQ ID NO: 2769734 - RNA, 19 nt, Artificial Sequence
  Description of Artificial Sequence: Synthetic oligonucleotide
ggaucugggaagcauuccc

SEQ ID NO: 2769735 - RNA, 19 nt, Artificial Sequence
  Description of Artificial Sequence: Synthetic oligonucleotide
ugggaagcauucccuuugc

SEQ ID NO: 2769736 - RNA, 19 nt, Artificial Sequence
  Description of Artificial Sequence: Synthetic oligonucleotide
aguugagagccuggggugg

SEQ ID NO: 2769737 - RNA, 19 nt, Artificial Sequence
  Description of Artificial Sequence: Synthetic oligonucleotide
uugcaguugagagccuggg

SEQ ID NO: 2769738 - RNA, 19 nt, Artificial Sequence
  Description of Artificial Sequence: Synthetic oligonucleotide
gggauuuggagauggcugc

SEQ ID NO: 2769739 - RNA, 19 nt, Artificial Sequence
  Description of Artificial Sequence: Synthetic oligonucleotide
cugggaagcauucccuuug

SEQ ID NO: 2769740 - RNA, 19 nt, Artificial Sequence
  Description of Artificial Sequence: Synthetic oligonucleotide
acgaaccgugugcagugac

SEQ ID NO: 2769741 - RNA, 19 nt, Artificial Sequence
  Description of Artificial Sequence: Synthetic oligonucleotide
ugggaucugggaagcauuc

SEQ ID NO: 2769742 - RNA, 19 nt, Artificial Sequence
  Description of Artificial Sequence: Synthetic oligonucleotide
guuaccacgccagaagaca

SEQ ID NO: 2769743 - RNA, 19 nt, Artificial Sequence
  Description of Artificial Sequence: Synthetic oligonucleotide
accacgccagaagacacgg

SEQ ID NO: 2769744 - RNA, 19 nt, Artificial Sequence
  Description of Artificial Sequence: Synthetic oligonucleotide
caguugagagccuggggug

SEQ ID NO: 2769745 - RNA, 19 nt, Artificial Sequence
  Description of Artificial Sequence: Synthetic oligonucleotide
uucuugggaucugggaagc

SEQ ID NO: 2769746 - RNA, 19 nt, Artificial Sequence
  Description of Artificial Sequence: Synthetic oligonucleotide
uugggaucugggaagcauu

SEQ ID NO: 2769747 - RNA, 19 nt, Artificial Sequence
  Description of Artificial Sequence: Synthetic oligonucleotide
cccuuugcaguugagagcc

SEQ ID NO: 2769748 - RNA, 19 nt, Artificial Sequence
  Description of Artificial Sequence: Synthetic oligonucleotide
acgccagaagacacggacc

SEQ ID NO: 2769749 - RNA, 19 nt, Artificial Sequence
  Description of Artificial Sequence: Synthetic oligonucleotide
cuucgcacgccaugcuucc

SEQ ID NO: 2769750 - RNA, 19 nt, Artificial Sequence
  Description of Artificial Sequence: Synthetic oligonucleotide
ucgacgaaccgugugcagu

SEQ ID NO: 2769751 - RNA, 19 nt, Artificial Sequence
  Description of Artificial Sequence: Synthetic oligonucleotide
ccaugcuuccuucaucacg

SEQ ID NO: 2769752 - RNA, 19 nt, Artificial Sequence
  Description of Artificial Sequence: Synthetic oligonucleotide
cuuugcaguugagagccug

SEQ ID NO: 2769753 - RNA, 19 nt, Artificial Sequence
  Description of Artificial Sequence: Synthetic oligonucleotide
acgccaugcuuccuucauc

SEQ ID NO: 2769754 - RNA, 19 nt, Artificial Sequence
  Description of Artificial Sequence: Synthetic oligonucleotide
uuggggauuuggagauggc

SEQ ID NO: 2769755 - RNA, 19 nt, Artificial Sequence
  Description of Artificial Sequence: Synthetic oligonucleotide
uuuccgucuuagauauuuu

SEQ ID NO: 2769756 - RNA, 19 nt, Artificial Sequence
  Description of Artificial Sequence: Synthetic oligonucleotide
aaccgugugcagugacaga

SEQ ID NO: 2769757 - RNA, 19 nt, Artificial Sequence
  Description of Artificial Sequence: Synthetic oligonucleotide
uuauugcuucgcacgccau

SEQ ID NO: 2769758 - RNA, 19 nt, Artificial Sequence
  Description of Artificial Sequence: Synthetic oligonucleotide
ugcuucgcacgccaugcuu

SEQ ID NO: 2769759 - RNA, 19 nt, Artificial Sequence
  Description of Artificial Sequence: Synthetic oligonucleotide
ugggguggggaaguaucug

SEQ ID NO: 2769760 - RNA, 19 nt, Artificial Sequence
  Description of Artificial Sequence: Synthetic oligonucleotide
uugagagccuggggugggg

SEQ ID NO: 2769761 - RNA, 19 nt, Artificial Sequence
  Description of Artificial Sequence: Synthetic oligonucleotide
cauucccuuugcaguugag

SEQ ID NO: 2769762 - RNA, 19 nt, Artificial Sequence
  Description of Artificial Sequence: Synthetic oligonucleotide
cuguuccuuggggauuugg

SEQ ID NO: 2769763 - RNA, 19 nt, Artificial Sequence
  Description of Artificial Sequence: Synthetic oligonucleotide
gcaguugagagccuggggu

SEQ ID NO: 2769764 - RNA, 19 nt, Artificial Sequence
  Description of Artificial Sequence: Synthetic oligonucleotide
uugcuucgcacgccaugcu

SEQ ID NO: 2769765 - RNA, 19 nt, Artificial Sequence
  Description of Artificial Sequence: Synthetic oligonucleotide
gucgacgaaccgugugcag

SEQ ID NO: 2769766 - RNA, 19 nt, Artificial Sequence
  Description of Artificial Sequence: Synthetic oligonucleotide
gaucugggaagcauucccu

SEQ ID NO: 2769767 - RNA, 19 nt, Artificial Sequence
  Description of Artificial Sequence: Synthetic oligonucleotide
ugagagccuggggugggga

SEQ ID NO: 2769768 - RNA, 19 nt, Artificial Sequence
  Description of Artificial Sequence: Synthetic oligonucleotide
ucuugggaucugggaagca

SEQ ID NO: 2769769 - RNA, 19 nt, Artificial Sequence
  Description of Artificial Sequence: Synthetic oligonucleotide
ucgcacgccaugcuuccuu

SEQ ID NO: 2769770 - RNA, 19 nt, Artificial Sequence
  Description of Artificial Sequence: Synthetic oligonucleotide
cgccagaagacacggaccc

SEQ ID NO: 2769771 - RNA, 19 nt, Artificial Sequence
  Description of Artificial Sequence: Synthetic oligonucleotide
ccugggguggggaaguauc

SEQ ID NO: 2769772 - RNA, 19 nt, Artificial Sequence
  Description of Artificial Sequence: Synthetic oligonucleotide
gagagccugggguggggaa

SEQ ID NO: 2769773 - RNA, 19 nt, Artificial Sequence
  Description of Artificial Sequence: Synthetic oligonucleotide
cgugugcagugacagacug

SEQ ID NO: 2769774 - RNA, 19 nt, Artificial Sequence
  Description of Artificial Sequence: Synthetic oligonucleotide
gggaucugggaagcauucc

SEQ ID NO: 2769775 - RNA, 19 nt, Artificial Sequence
  Description of Artificial Sequence: Synthetic oligonucleotide
gcuucgcacgccaugcuuc

SEQ ID NO: 2769776 - RNA, 19 nt, Artificial Sequence
  Description of Artificial Sequence: Synthetic oligonucleotide
cgacgaaccgugugcagug

SEQ ID NO: 2769777 - RNA, 19 nt, Artificial Sequence
  Description of Artificial Sequence: Synthetic oligonucleotide
cugggguggggaaguaucu

SEQ ID NO: 2769778 - RNA, 19 nt, Artificial Sequence
  Description of Artificial Sequence: Synthetic oligonucleotide
gcauucccuuugcaguuga

SEQ ID NO: 2769779 - RNA, 19 nt, Artificial Sequence
  Description of Artificial Sequence: Synthetic oligonucleotide
cuugggaucugggaagcau

SEQ ID NO: 2769780 - RNA, 19 nt, Artificial Sequence
  Description of Artificial Sequence: Synthetic oligonucleotide
uucgcacgccaugcuuccu

SEQ ID NO: 2769781 - RNA, 19 nt, Artificial Sequence
  Description of Artificial Sequence: Synthetic oligonucleotide
cgccaugcuuccuucauca

SEQ ID NO: 2769782 - RNA, 19 nt, Artificial Sequence
  Description of Artificial Sequence: Synthetic oligonucleotide
gccaugcuuccuucaucac

SEQ ID NO: 2769783 - RNA, 19 nt, Artificial Sequence
  Description of Artificial Sequence: Synthetic oligonucleotide
gagccugggguggggaagu

SEQ ID NO: 2769784 - RNA, 19 nt, Artificial Sequence
  Description of Artificial Sequence: Synthetic oligonucleotide
cacgccaugcuuccuucau

SEQ ID NO: 2769785 - RNA, 19 nt, Artificial Sequence
  Description of Artificial Sequence: Synthetic oligonucleotide
gugugcagugacagacugu

SEQ ID NO: 2769786 - RNA, 19 nt, Artificial Sequence
  Description of Artificial Sequence: Synthetic oligonucleotide
cgaaccgugugcagugaca

SEQ ID NO: 2769787 - RNA, 19 nt, Artificial Sequence
  Description of Artificial Sequence: Synthetic oligonucleotide
gcacgccaugcuuccuuca

SEQ ID NO: 2769788 - RNA, 19 nt, Artificial Sequence
  Description of Artificial Sequence: Synthetic oligonucleotide
cgcacgccaugcuuccuuc

SEQ ID NO: 2769789 - RNA, 19 nt, Artificial Sequence
  Description of Artificial Sequence: Synthetic oligonucleotide
ccuuggggauuuggagaug

SEQ ID NO: 2769790 - RNA, 19 nt, Artificial Sequence
  Description of Artificial Sequence: Synthetic oligonucleotide
cgucgacgaaccgugugca

SEQ ID NO: 2769791 - RNA, 19 nt, Artificial Sequence
  Description of Artificial Sequence: Synthetic oligonucleotide
agccugggguggggaagua

SEQ ID NO: 2769792 - RNA, 19 nt, Artificial Sequence
  Description of Artificial Sequence: Synthetic oligonucleotide
ccacgccagaagacacgga

SEQ ID NO: 2769793 - RNA, 19 nt, Artificial Sequence
  Description of Artificial Sequence: Synthetic oligonucleotide
ccuguuccuuggggauuug

SEQ ID NO: 2769794 - RNA, 19 nt, Artificial Sequence
  Description of Artificial Sequence: Synthetic oligonucleotide
ccgugugcagugacagacu

SEQ ID NO: 2769795 - RNA, 19 nt, Artificial Sequence
  Description of Artificial Sequence: Synthetic oligonucleotide
ccuuugcaguugagagccu

SEQ ID NO: 2769796 - RNA, 19 nt, Artificial Sequence
  Description of Artificial Sequence: Synthetic oligonucleotide
gccugggguggggaaguau

SEQ ID NO: 2769797 - RNA, 19 nt, Artificial Sequence
  Description of Artificial Sequence: Synthetic oligonucleotide
uuuucuuucaaaaugaguc

SEQ ID NO: 2769798 - RNA, 19 nt, Artificial Sequence
  Description of Artificial Sequence: Synthetic oligonucleotide
uucaaaaugagucugaaaa

SEQ ID NO: 2769799 - RNA, 19 nt, Artificial Sequence
  Description of Artificial Sequence: Synthetic oligonucleotide
cuuuucacaagcuagaaag

SEQ ID NO: 2769800 - RNA, 19 nt, Artificial Sequence
  Description of Artificial Sequence: Synthetic oligonucleotide
gauauauucagguggaucc

SEQ ID NO: 2769801 - RNA, 19 nt, Artificial Sequence
  Description of Artificial Sequence: Synthetic oligonucleotide
auucuaaucaucuuucugg

SEQ ID NO: 2769802 - RNA, 19 nt, Artificial Sequence
  Description of Artificial Sequence: Synthetic oligonucleotide
ugcuuuauaauuuaugcag

SEQ ID NO: 2769803 - RNA, 19 nt, Artificial Sequence
  Description of Artificial Sequence: Synthetic oligonucleotide
gaacauuacagauuuaucc

SEQ ID NO: 2769804 - RNA, 19 nt, Artificial Sequence
  Description of Artificial Sequence: Synthetic oligonucleotide
uuugcuuuauaauuuaugc

SEQ ID NO: 2769805 - RNA, 19 nt, Artificial Sequence
  Description of Artificial Sequence: Synthetic oligonucleotide
aaggagaugacuuuguucu

SEQ ID NO: 2769806 - RNA, 19 nt, Artificial Sequence
  Description of Artificial Sequence: Synthetic oligonucleotide
ucugaaaacaucauccucc

SEQ ID NO: 2769807 - RNA, 19 nt, Artificial Sequence
  Description of Artificial Sequence: Synthetic oligonucleotide
cuuaucauaaggcucaugc

SEQ ID NO: 2769808 - RNA, 19 nt, Artificial Sequence
  Description of Artificial Sequence: Synthetic oligonucleotide
uuuauuagcccauauguca

SEQ ID NO: 2769809 - RNA, 19 nt, Artificial Sequence
  Description of Artificial Sequence: Synthetic oligonucleotide
auugcaucuuguuaugucc

SEQ ID NO: 2769810 - RNA, 19 nt, Artificial Sequence
  Description of Artificial Sequence: Synthetic oligonucleotide
acagugaagauucaaauug

SEQ ID NO: 2769811 - RNA, 19 nt, Artificial Sequence
  Description of Artificial Sequence: Synthetic oligonucleotide
aacgaagagaacuugguca

SEQ ID NO: 2769812 - RNA, 19 nt, Artificial Sequence
  Description of Artificial Sequence: Synthetic oligonucleotide
uuuauccccauuuucaucc

SEQ ID NO: 2769813 - RNA, 19 nt, Artificial Sequence
  Description of Artificial Sequence: Synthetic oligonucleotide
uguaucaucgauauauuca

SEQ ID NO: 2769814 - RNA, 19 nt, Artificial Sequence
  Description of Artificial Sequence: Synthetic oligonucleotide
ucuuuauacauauauauua

SEQ ID NO: 2769815 - RNA, 19 nt, Artificial Sequence
  Description of Artificial Sequence: Synthetic oligonucleotide
uucuggaacacaaacauac

SEQ ID NO: 2769816 - RNA, 19 nt, Artificial Sequence
  Description of Artificial Sequence: Synthetic oligonucleotide
aaaggagaugacuuuguuc

SEQ ID NO: 2769817 - RNA, 19 nt, Artificial Sequence
  Description of Artificial Sequence: Synthetic oligonucleotide
acauuacagauuuaucccc

SEQ ID NO: 2769818 - RNA, 19 nt, Artificial Sequence
  Description of Artificial Sequence: Synthetic oligonucleotide
aauugcaucuuguuauguc

SEQ ID NO: 2769819 - RNA, 19 nt, Artificial Sequence
  Description of Artificial Sequence: Synthetic oligonucleotide
agaaucuuuauacauauau

SEQ ID NO: 2769820 - RNA, 19 nt, Artificial Sequence
  Description of Artificial Sequence: Synthetic oligonucleotide
cauauggcaacacagaaug

SEQ ID NO: 2769821 - RNA, 19 nt, Artificial Sequence
  Description of Artificial Sequence: Synthetic oligonucleotide
ucaaauugcaucuuguuau

SEQ ID NO: 2769822 - RNA, 19 nt, Artificial Sequence
  Description of Artificial Sequence: Synthetic oligonucleotide
ugcaucagaaucuuuauac

SEQ ID NO: 2769823 - RNA, 19 nt, Artificial Sequence
  Description of Artificial Sequence: Synthetic oligonucleotide
aauggcuuaucauaaggcu

SEQ ID NO: 2769824 - RNA, 19 nt, Artificial Sequence
  Description of Artificial Sequence: Synthetic oligonucleotide
aauuuaugcagccucgggu

SEQ ID NO: 2769825 - RNA, 19 nt, Artificial Sequence
  Description of Artificial Sequence: Synthetic oligonucleotide
uuugauccuccacagagag

SEQ ID NO: 2769826 - RNA, 19 nt, Artificial Sequence
  Description of Artificial Sequence: Synthetic oligonucleotide
auucauauuacguacuacu

SEQ ID NO: 2769827 - RNA, 19 nt, Artificial Sequence
  Description of Artificial Sequence: Synthetic oligonucleotide
aagaauaugauaucacuuu

SEQ ID NO: 2769828 - RNA, 19 nt, Artificial Sequence
  Description of Artificial Sequence: Synthetic oligonucleotide
agaauggcuuaucauaagg

SEQ ID NO: 2769829 - RNA, 19 nt, Artificial Sequence
  Description of Artificial Sequence: Synthetic oligonucleotide
aacagugaacauuacagau

SEQ ID NO: 2769830 - RNA, 19 nt, Artificial Sequence
  Description of Artificial Sequence: Synthetic oligonucleotide
uuaucagucugguaugggg

SEQ ID NO: 2769831 - RNA, 19 nt, Artificial Sequence
  Description of Artificial Sequence: Synthetic oligonucleotide
uggaacaccucucucaaag

SEQ ID NO: 2769832 - RNA, 19 nt, Artificial Sequence
  Description of Artificial Sequence: Synthetic oligonucleotide
guaucaucgauauauucag

SEQ ID NO: 2769833 - RNA, 19 nt, Artificial Sequence
  Description of Artificial Sequence: Synthetic oligonucleotide
uuauuagcccauaugucag

SEQ ID NO: 2769834 - RNA, 19 nt, Artificial Sequence
  Description of Artificial Sequence: Synthetic oligonucleotide
uaacugugagguaagguag

SEQ ID NO: 2769835 - RNA, 19 nt, Artificial Sequence
  Description of Artificial Sequence: Synthetic oligonucleotide
cuuuauaauuuaugcagcc

SEQ ID NO: 2769836 - RNA, 19 nt, Artificial Sequence
  Description of Artificial Sequence: Synthetic oligonucleotide
augacuuuguucuuacagg

SEQ ID NO: 2769837 - RNA, 19 nt, Artificial Sequence
  Description of Artificial Sequence: Synthetic oligonucleotide
uauccucaaacacagguga

SEQ ID NO: 2769838 - RNA, 19 nt, Artificial Sequence
  Description of Artificial Sequence: Synthetic oligonucleotide
gaaaguguccuuuguacag

SEQ ID NO: 2769839 - RNA, 19 nt, Artificial Sequence
  Description of Artificial Sequence: Synthetic oligonucleotide
aucagucauauccucaaac

SEQ ID NO: 2769840 - RNA, 19 nt, Artificial Sequence
  Description of Artificial Sequence: Synthetic oligonucleotide
auauauauuaucagucugg

SEQ ID NO: 2769841 - RNA, 19 nt, Artificial Sequence
  Description of Artificial Sequence: Synthetic oligonucleotide
cuaaucaucuuucuggaac

SEQ ID NO: 2769842 - RNA, 19 nt, Artificial Sequence
  Description of Artificial Sequence: Synthetic oligonucleotide
uaucauaaggcucaugcau

SEQ ID NO: 2769843 - RNA, 19 nt, Artificial Sequence
  Description of Artificial Sequence: Synthetic oligonucleotide
cuugauaccuaacugugag

SEQ ID NO: 2769844 - RNA, 19 nt, Artificial Sequence
  Description of Artificial Sequence: Synthetic oligonucleotide
aaaugaaccuguuugcuuu

SEQ ID NO: 2769845 - RNA, 19 nt, Artificial Sequence
  Description of Artificial Sequence: Synthetic oligonucleotide
ucugucaacgaagagaacu

SEQ ID NO: 2769846 - RNA, 19 nt, Artificial Sequence
  Description of Artificial Sequence: Synthetic oligonucleotide
uaauuuaugcagccucggg

SEQ ID NO: 2769847 - RNA, 19 nt, Artificial Sequence
  Description of Artificial Sequence: Synthetic oligonucleotide
aagguagcaacagugaaca

SEQ ID NO: 2769848 - RNA, 19 nt, Artificial Sequence
  Description of Artificial Sequence: Synthetic oligonucleotide
uacuugauaccuaacugug

SEQ ID NO: 2769849 - RNA, 19 nt, Artificial Sequence
  Description of Artificial Sequence: Synthetic oligonucleotide
aacacagaauggcuuauca

SEQ ID NO: 2769850 - RNA, 19 nt, Artificial Sequence
  Description of Artificial Sequence: Synthetic oligonucleotide
ugugagguaagguagcaac

SEQ ID NO: 2769851 - RNA, 19 nt, Artificial Sequence
  Description of Artificial Sequence: Synthetic oligonucleotide
ucuuguuauguccuggaac

SEQ ID NO: 2769852 - RNA, 19 nt, Artificial Sequence
  Description of Artificial Sequence: Synthetic oligonucleotide
aaacauacuugauaccuaa

SEQ ID NO: 2769853 - RNA, 19 nt, Artificial Sequence
  Description of Artificial Sequence: Synthetic oligonucleotide
ucagucauauccucaaaca

SEQ ID NO: 2769854 - RNA, 19 nt, Artificial Sequence
  Description of Artificial Sequence: Synthetic oligonucleotide
auacuugauaccuaacugu

SEQ ID NO: 2769855 - RNA, 19 nt, Artificial Sequence
  Description of Artificial Sequence: Synthetic oligonucleotide
ucugguaugggguuuauua

SEQ ID NO: 2769856 - RNA, 19 nt, Artificial Sequence
  Description of Artificial Sequence: Synthetic oligonucleotide
ucaaaaugagucugaaaac

SEQ ID NO: 2769857 - RNA, 19 nt, Artificial Sequence
  Description of Artificial Sequence: Synthetic oligonucleotide
auuuaugcagccucgggug

SEQ ID NO: 2769858 - RNA, 19 nt, Artificial Sequence
  Description of Artificial Sequence: Synthetic oligonucleotide
cauauauauuaucagucug

SEQ ID NO: 2769859 - RNA, 19 nt, Artificial Sequence
  Description of Artificial Sequence: Synthetic oligonucleotide
uagaaaguguccuuuguac

SEQ ID NO: 2769860 - RNA, 19 nt, Artificial Sequence
  Description of Artificial Sequence: Synthetic oligonucleotide
aucaucgauauauucaggu

SEQ ID NO: 2769861 - RNA, 19 nt, Artificial Sequence
  Description of Artificial Sequence: Synthetic oligonucleotide
acaaacauacuugauaccu

SEQ ID NO: 2769862 - RNA, 19 nt, Artificial Sequence
  Description of Artificial Sequence: Synthetic oligonucleotide
aaaugagucugaaaacauc

SEQ ID NO: 2769863 - RNA, 19 nt, Artificial Sequence
  Description of Artificial Sequence: Synthetic oligonucleotide
uauggcaacacagaauggc

SEQ ID NO: 2769864 - RNA, 19 nt, Artificial Sequence
  Description of Artificial Sequence: Synthetic oligonucleotide
ugacuuuguucuuacagga

SEQ ID NO: 2769865 - RNA, 19 nt, Artificial Sequence
  Description of Artificial Sequence: Synthetic oligonucleotide
agaacuuggucauucauau

SEQ ID NO: 2769866 - RNA, 19 nt, Artificial Sequence
  Description of Artificial Sequence: Synthetic oligonucleotide
uuggucauucauauuacgu

SEQ ID NO: 2769867 - RNA, 19 nt, Artificial Sequence
  Description of Artificial Sequence: Synthetic oligonucleotide
cauacuugauaccuaacug

SEQ ID NO: 2769868 - RNA, 19 nt, Artificial Sequence
  Description of Artificial Sequence: Synthetic oligonucleotide
cuuguuauguccuggaaca

SEQ ID NO: 2769869 - RNA, 19 nt, Artificial Sequence
  Description of Artificial Sequence: Synthetic oligonucleotide
uucaaauugcaucuuguua

SEQ ID NO: 2769870 - RNA, 19 nt, Artificial Sequence
  Description of Artificial Sequence: Synthetic oligonucleotide
guuucauauggcaacacag

SEQ ID NO: 2769871 - RNA, 19 nt, Artificial Sequence
  Description of Artificial Sequence: Synthetic oligonucleotide
uucauauggcaacacagaa

SEQ ID NO: 2769872 - RNA, 19 nt, Artificial Sequence
  Description of Artificial Sequence: Synthetic oligonucleotide
uggcuuaucauaaggcuca

SEQ ID NO: 2769873 - RNA, 19 nt, Artificial Sequence
  Description of Artificial Sequence: Synthetic oligonucleotide
uucacaagcuagaaagugu

SEQ ID NO: 2769874 - RNA, 19 nt, Artificial Sequence
  Description of Artificial Sequence: Synthetic oligonucleotide
ugauaccuaacugugaggu

SEQ ID NO: 2769875 - RNA, 19 nt, Artificial Sequence
  Description of Artificial Sequence: Synthetic oligonucleotide
gaggguuacagccauuccc

SEQ ID NO: 2769876 - RNA, 19 nt, Artificial Sequence
  Description of Artificial Sequence: Synthetic oligonucleotide
acuuuguucuuacaggaga

SEQ ID NO: 2769877 - RNA, 19 nt, Artificial Sequence
  Description of Artificial Sequence: Synthetic oligonucleotide
uguuucauauggcaacaca

SEQ ID NO: 2769878 - RNA, 19 nt, Artificial Sequence
  Description of Artificial Sequence: Synthetic oligonucleotide
auuuccugaaaggagauga

SEQ ID NO: 2769879 - RNA, 19 nt, Artificial Sequence
  Description of Artificial Sequence: Synthetic oligonucleotide
aaagaauaugauaucacuu

SEQ ID NO: 2769880 - RNA, 19 nt, Artificial Sequence
  Description of Artificial Sequence: Synthetic oligonucleotide
uuucacaagcuagaaagug

SEQ ID NO: 2769881 - RNA, 19 nt, Artificial Sequence
  Description of Artificial Sequence: Synthetic oligonucleotide
uaugggguuuauuagccca

SEQ ID NO: 2769882 - RNA, 19 nt, Artificial Sequence
  Description of Artificial Sequence: Synthetic oligonucleotide
ugcauucuaaucaucuuuc

SEQ ID NO: 2769883 - RNA, 19 nt, Artificial Sequence
  Description of Artificial Sequence: Synthetic oligonucleotide
cuuuguucuuacaggagag

SEQ ID NO: 2769884 - RNA, 19 nt, Artificial Sequence
  Description of Artificial Sequence: Synthetic oligonucleotide
auauuaucagucugguaug

SEQ ID NO: 2769885 - RNA, 19 nt, Artificial Sequence
  Description of Artificial Sequence: Synthetic oligonucleotide
uuuucauccuuuucuuuca

SEQ ID NO: 2769886 - RNA, 19 nt, Artificial Sequence
  Description of Artificial Sequence: Synthetic oligonucleotide
uuguucuuacaggagagag

SEQ ID NO: 2769887 - RNA, 19 nt, Artificial Sequence
  Description of Artificial Sequence: Synthetic oligonucleotide
ucaucgauauauucaggug

SEQ ID NO: 2769888 - RNA, 19 nt, Artificial Sequence
  Description of Artificial Sequence: Synthetic oligonucleotide
uucuaaucaucuuucugga

SEQ ID NO: 2769889 - RNA, 19 nt, Artificial Sequence
  Description of Artificial Sequence: Synthetic oligonucleotide
ucaacgaagagaacuuggu

SEQ ID NO: 2769890 - RNA, 19 nt, Artificial Sequence
  Description of Artificial Sequence: Synthetic oligonucleotide
uaucaucgauauauucagg

SEQ ID NO: 2769891 - RNA, 19 nt, Artificial Sequence
  Description of Artificial Sequence: Synthetic oligonucleotide
ucacaagcuagaaaguguc

SEQ ID NO: 2769892 - RNA, 19 nt, Artificial Sequence
  Description of Artificial Sequence: Synthetic oligonucleotide
uuucuucugucaacgaaga

SEQ ID NO: 2769893 - RNA, 19 nt, Artificial Sequence
  Description of Artificial Sequence: Synthetic oligonucleotide
ugguaugggguuuauuagc

SEQ ID NO: 2769894 - RNA, 19 nt, Artificial Sequence
  Description of Artificial Sequence: Synthetic oligonucleotide
acacaggugacuuucuucu

SEQ ID NO: 2769895 - RNA, 19 nt, Artificial Sequence
  Description of Artificial Sequence: Synthetic oligonucleotide
uauuaucagucugguaugg

SEQ ID NO: 2769896 - RNA, 19 nt, Artificial Sequence
  Description of Artificial Sequence: Synthetic oligonucleotide
aaaacaucauccuccuuuu

SEQ ID NO: 2769897 - RNA, 19 nt, Artificial Sequence
  Description of Artificial Sequence: Synthetic oligonucleotide
uuaucauaaggcucaugca

SEQ ID NO: 2769898 - RNA, 19 nt, Artificial Sequence
  Description of Artificial Sequence: Synthetic oligonucleotide
gaauggcuuaucauaaggc

SEQ ID NO: 2769899 - RNA, 19 nt, Artificial Sequence
  Description of Artificial Sequence: Synthetic oligonucleotide
uuuauaauuuaugcagccu

SEQ ID NO: 2769900 - RNA, 19 nt, Artificial Sequence
  Description of Artificial Sequence: Synthetic oligonucleotide
ugagguaagguagcaacag

SEQ ID NO: 2769901 - RNA, 19 nt, Artificial Sequence
  Description of Artificial Sequence: Synthetic oligonucleotide
aggguuacagccauucccc

SEQ ID NO: 2769902 - RNA, 19 nt, Artificial Sequence
  Description of Artificial Sequence: Synthetic oligonucleotide
uuuucacaagcuagaaagu

SEQ ID NO: 2769903 - RNA, 19 nt, Artificial Sequence
  Description of Artificial Sequence: Synthetic oligonucleotide
aacugugagguaagguagc

SEQ ID NO: 2769904 - RNA, 19 nt, Artificial Sequence
  Description of Artificial Sequence: Synthetic oligonucleotide
uugauaccuaacugugagg

SEQ ID NO: 2769905 - RNA, 19 nt, Artificial Sequence
  Description of Artificial Sequence: Synthetic oligonucleotide
uguccuuuguacagugaag

SEQ ID NO: 2769906 - RNA, 19 nt, Artificial Sequence
  Description of Artificial Sequence: Synthetic oligonucleotide
cuuggucauucauauuacg

SEQ ID NO: 2769907 - RNA, 19 nt, Artificial Sequence
  Description of Artificial Sequence: Synthetic oligonucleotide
uuacaggagagaguaaaca

SEQ ID NO: 2769908 - RNA, 19 nt, Artificial Sequence
  Description of Artificial Sequence: Synthetic oligonucleotide
agauuuauccccauuuuca

SEQ ID NO: 2769909 - RNA, 19 nt, Artificial Sequence
  Description of Artificial Sequence: Synthetic oligonucleotide
uggauccauuuccugaaag

SEQ ID NO: 2769910 - RNA, 19 nt, Artificial Sequence
  Description of Artificial Sequence: Synthetic oligonucleotide
uacaggagagaguaaacau

SEQ ID NO: 2769911 - RNA, 19 nt, Artificial Sequence
  Description of Artificial Sequence: Synthetic oligonucleotide
ucucucaaagaauaugaua

SEQ ID NO: 2769912 - RNA, 19 nt, Artificial Sequence
  Description of Artificial Sequence: Synthetic oligonucleotide
cagugaagauucaaauugc

SEQ ID NO: 2769913 - RNA, 19 nt, Artificial Sequence
  Description of Artificial Sequence: Synthetic oligonucleotide
ugaaaggagaugacuuugu

SEQ ID NO: 2769914 - RNA, 19 nt, Artificial Sequence
  Description of Artificial Sequence: Synthetic oligonucleotide
uguucuuacaggagagagu

SEQ ID NO: 2769915 - RNA, 19 nt, Artificial Sequence
  Description of Artificial Sequence: Synthetic oligonucleotide
cuucugucaacgaagagaa

SEQ ID NO: 2769916 - RNA, 19 nt, Artificial Sequence
  Description of Artificial Sequence: Synthetic oligonucleotide
cauucuaaucaucuuucug

SEQ ID NO: 2769917 - RNA, 19 nt, Artificial Sequence
  Description of Artificial Sequence: Synthetic oligonucleotide
auaauuuaugcagccucgg

SEQ ID NO: 2769918 - RNA, 19 nt, Artificial Sequence
  Description of Artificial Sequence: Synthetic oligonucleotide
caaaaugagucugaaaaca

SEQ ID NO: 2769919 - RNA, 19 nt, Artificial Sequence
  Description of Artificial Sequence: Synthetic oligonucleotide
gaaccuguuugcuuuauaa

SEQ ID NO: 2769920 - RNA, 19 nt, Artificial Sequence
  Description of Artificial Sequence: Synthetic oligonucleotide
accuguuugcuuuauaauu

SEQ ID NO: 2769921 - RNA, 19 nt, Artificial Sequence
  Description of Artificial Sequence: Synthetic oligonucleotide
aggcucaugcauucuaauc

SEQ ID NO: 2769922 - RNA, 19 nt, Artificial Sequence
  Description of Artificial Sequence: Synthetic oligonucleotide
uguuauguccuggaacacc

SEQ ID NO: 2769923 - RNA, 19 nt, Artificial Sequence
  Description of Artificial Sequence: Synthetic oligonucleotide
agucugaaaacaucauccu

SEQ ID NO: 2769924 - RNA, 19 nt, Artificial Sequence
  Description of Artificial Sequence: Synthetic oligonucleotide
uuguaucaucgauauauuc

SEQ ID NO: 2769925 - RNA, 19 nt, Artificial Sequence
  Description of Artificial Sequence: Synthetic oligonucleotide
aaccuguuugcuuuauaau

SEQ ID NO: 2769926 - RNA, 19 nt, Artificial Sequence
  Description of Artificial Sequence: Synthetic oligonucleotide
ucauucauauuacguacua

SEQ ID NO: 2769927 - RNA, 19 nt, Artificial Sequence
  Description of Artificial Sequence: Synthetic oligonucleotide
guuugcuuuauaauuuaug

SEQ ID NO: 2769928 - RNA, 19 nt, Artificial Sequence
  Description of Artificial Sequence: Synthetic oligonucleotide
aacauacuugauaccuaac

SEQ ID NO: 2769929 - RNA, 19 nt, Artificial Sequence
  Description of Artificial Sequence: Synthetic oligonucleotide
cuaacugugagguaaggua

SEQ ID NO: 2769930 - RNA, 19 nt, Artificial Sequence
  Description of Artificial Sequence: Synthetic oligonucleotide
cugguaugggguuuauuag

SEQ ID NO: 2769931 - RNA, 19 nt, Artificial Sequence
  Description of Artificial Sequence: Synthetic oligonucleotide
ccauaugucagcaucaguc

SEQ ID NO: 2769932 - RNA, 19 nt, Artificial Sequence
  Description of Artificial Sequence: Synthetic oligonucleotide
auggcuuaucauaaggcuc

SEQ ID NO: 2769933 - RNA, 19 nt, Artificial Sequence
  Description of Artificial Sequence: Synthetic oligonucleotide
ucggguguuucauauggca

SEQ ID NO: 2769934 - RNA, 19 nt, Artificial Sequence
  Description of Artificial Sequence: Synthetic oligonucleotide
uccuggaacaccucucuca

SEQ ID NO: 2769935 - RNA, 19 nt, Artificial Sequence
  Description of Artificial Sequence: Synthetic oligonucleotide
cuuacaggagagaguaaac

SEQ ID NO: 2769936 - RNA, 19 nt, Artificial Sequence
  Description of Artificial Sequence: Synthetic oligonucleotide
cagucauauccucaaacac

SEQ ID NO: 2769937 - RNA, 19 nt, Artificial Sequence
  Description of Artificial Sequence: Synthetic oligonucleotide
ucucaaagaauaugauauc

SEQ ID NO: 2769938 - RNA, 19 nt, Artificial Sequence
  Description of Artificial Sequence: Synthetic oligonucleotide
agucauauccucaaacaca

SEQ ID NO: 2769939 - RNA, 19 nt, Artificial Sequence
  Description of Artificial Sequence: Synthetic oligonucleotide
gucaacgaagagaacuugg

SEQ ID NO: 2769940 - RNA, 19 nt, Artificial Sequence
  Description of Artificial Sequence: Synthetic oligonucleotide
aagagaacuuggucauuca

SEQ ID NO: 2769941 - RNA, 19 nt, Artificial Sequence
  Description of Artificial Sequence: Synthetic oligonucleotide
uuucaaaaugagucugaaa

SEQ ID NO: 2769942 - RNA, 19 nt, Artificial Sequence
  Description of Artificial Sequence: Synthetic oligonucleotide
gaagagaacuuggucauuc

SEQ ID NO: 2769943 - RNA, 19 nt, Artificial Sequence
  Description of Artificial Sequence: Synthetic oligonucleotide
caaauugcaucuuguuaug

SEQ ID NO: 2769944 - RNA, 19 nt, Artificial Sequence
  Description of Artificial Sequence: Synthetic oligonucleotide
uuuguaucaucgauauauu

SEQ ID NO: 2769945 - RNA, 19 nt, Artificial Sequence
  Description of Artificial Sequence: Synthetic oligonucleotide
acaagcuagaaaguguccu

SEQ ID NO: 2769946 - RNA, 19 nt, Artificial Sequence
  Description of Artificial Sequence: Synthetic oligonucleotide
auaccuaacugugagguaa

SEQ ID NO: 2769947 - RNA, 19 nt, Artificial Sequence
  Description of Artificial Sequence: Synthetic oligonucleotide
uagcccauaugucagcauc

SEQ ID NO: 2769948 - RNA, 19 nt, Artificial Sequence
  Description of Artificial Sequence: Synthetic oligonucleotide
uauuagcccauaugucagc

SEQ ID NO: 2769949 - RNA, 19 nt, Artificial Sequence
  Description of Artificial Sequence: Synthetic oligonucleotide
ucauccuccuuuucacaag

SEQ ID NO: 2769950 - RNA, 19 nt, Artificial Sequence
  Description of Artificial Sequence: Synthetic oligonucleotide
acuuucuucugucaacgaa

SEQ ID NO: 2769951 - RNA, 19 nt, Artificial Sequence
  Description of Artificial Sequence: Synthetic oligonucleotide
cacaaacauacuugauacc

SEQ ID NO: 2769952 - RNA, 19 nt, Artificial Sequence
  Description of Artificial Sequence: Synthetic oligonucleotide
aaauugcaucuuguuaugu

SEQ ID NO: 2769953 - RNA, 19 nt, Artificial Sequence
  Description of Artificial Sequence: Synthetic oligonucleotide
gagaugacuuuguucuuac

SEQ ID NO: 2769954 - RNA, 19 nt, Artificial Sequence
  Description of Artificial Sequence: Synthetic oligonucleotide
ucauauccucaaacacagg

SEQ ID NO: 2769955 - RNA, 19 nt, Artificial Sequence
  Description of Artificial Sequence: Synthetic oligonucleotide
agguaagguagcaacagug

SEQ ID NO: 2769956 - RNA, 19 nt, Artificial Sequence
  Description of Artificial Sequence: Synthetic oligonucleotide
uguuugcuuuauaauuuau

SEQ ID NO: 2769957 - RNA, 19 nt, Artificial Sequence
  Description of Artificial Sequence: Synthetic oligonucleotide
acuuggucauucauauuac

SEQ ID NO: 2769958 - RNA, 19 nt, Artificial Sequence
  Description of Artificial Sequence: Synthetic oligonucleotide
auucaaauugcaucuuguu

SEQ ID NO: 2769959 - RNA, 19 nt, Artificial Sequence
  Description of Artificial Sequence: Synthetic oligonucleotide
cauaugucagcaucaguca

SEQ ID NO: 2769960 - RNA, 19 nt, Artificial Sequence
  Description of Artificial Sequence: Synthetic oligonucleotide
uuuccugaaaggagaugac

SEQ ID NO: 2769961 - RNA, 19 nt, Artificial Sequence
  Description of Artificial Sequence: Synthetic oligonucleotide
uuuaugcagccucgggugu

SEQ ID NO: 2769962 - RNA, 19 nt, Artificial Sequence
  Description of Artificial Sequence: Synthetic oligonucleotide
ggaacacaaacauacuuga

SEQ ID NO: 2769963 - RNA, 19 nt, Artificial Sequence
  Description of Artificial Sequence: Synthetic oligonucleotide
acgaagagaacuuggucau

SEQ ID NO: 2769964 - RNA, 19 nt, Artificial Sequence
  Description of Artificial Sequence: Synthetic oligonucleotide
auuaucagucugguauggg

SEQ ID NO: 2769965 - RNA, 19 nt, Artificial Sequence
  Description of Artificial Sequence: Synthetic oligonucleotide
ggcucaugcauucuaauca

SEQ ID NO: 2769966 - RNA, 19 nt, Artificial Sequence
  Description of Artificial Sequence: Synthetic oligonucleotide
guucuuacaggagagagua

SEQ ID NO: 2769967 - RNA, 19 nt, Artificial Sequence
  Description of Artificial Sequence: Synthetic oligonucleotide
guagcaacagugaacauua

SEQ ID NO: 2769968 - RNA, 19 nt, Artificial Sequence
  Description of Artificial Sequence: Synthetic oligonucleotide
guuuauuagcccauauguc

SEQ ID NO: 2769969 - RNA, 19 nt, Artificial Sequence
  Description of Artificial Sequence: Synthetic oligonucleotide
auauccucaaacacaggug

SEQ ID NO: 2769970 - RNA, 19 nt, Artificial Sequence
  Description of Artificial Sequence: Synthetic oligonucleotide
cauauccucaaacacaggu

SEQ ID NO: 2769971 - RNA, 19 nt, Artificial Sequence
  Description of Artificial Sequence: Synthetic oligonucleotide
uauucagguggauccauuu

SEQ ID NO: 2769972 - RNA, 19 nt, Artificial Sequence
  Description of Artificial Sequence: Synthetic oligonucleotide
cauuacagauuuaucccca

SEQ ID NO: 2769973 - RNA, 19 nt, Artificial Sequence
  Description of Artificial Sequence: Synthetic oligonucleotide
cugaaaggagaugacuuug

SEQ ID NO: 2769974 - RNA, 19 nt, Artificial Sequence
  Description of Artificial Sequence: Synthetic oligonucleotide
agcuagaaaguguccuuug

SEQ ID NO: 2769975 - RNA, 19 nt, Artificial Sequence
  Description of Artificial Sequence: Synthetic oligonucleotide
auaugucagcaucagucau

SEQ ID NO: 2769976 - RNA, 19 nt, Artificial Sequence
  Description of Artificial Sequence: Synthetic oligonucleotide
cacaagcuagaaagugucc

SEQ ID NO: 2769977 - RNA, 19 nt, Artificial Sequence
  Description of Artificial Sequence: Synthetic oligonucleotide
ucuaaucaucuuucuggaa

SEQ ID NO: 2769978 - RNA, 19 nt, Artificial Sequence
  Description of Artificial Sequence: Synthetic oligonucleotide
uuuguucuuacaggagaga

SEQ ID NO: 2769979 - RNA, 19 nt, Artificial Sequence
  Description of Artificial Sequence: Synthetic oligonucleotide
aaggcucaugcauucuaau

SEQ ID NO: 2769980 - RNA, 19 nt, Artificial Sequence
  Description of Artificial Sequence: Synthetic oligonucleotide
ugucaacgaagagaacuug

SEQ ID NO: 2769981 - RNA, 19 nt, Artificial Sequence
  Description of Artificial Sequence: Synthetic oligonucleotide
ugcaucuuguuauguccug

SEQ ID NO: 2769982 - RNA, 19 nt, Artificial Sequence
  Description of Artificial Sequence: Synthetic oligonucleotide
aaugaaccuguuugcuuua

SEQ ID NO: 2769983 - RNA, 19 nt, Artificial Sequence
  Description of Artificial Sequence: Synthetic oligonucleotide
gucugaaaacaucauccuc

SEQ ID NO: 2769984 - RNA, 19 nt, Artificial Sequence
  Description of Artificial Sequence: Synthetic oligonucleotide
acagaauggcuuaucauaa

SEQ ID NO: 2769985 - RNA, 19 nt, Artificial Sequence
  Description of Artificial Sequence: Synthetic oligonucleotide
guaagguagcaacagugaa

SEQ ID NO: 2769986 - RNA, 19 nt, Artificial Sequence
  Description of Artificial Sequence: Synthetic oligonucleotide
agagaacuuggucauucau

SEQ ID NO: 2769987 - RNA, 19 nt, Artificial Sequence
  Description of Artificial Sequence: Synthetic oligonucleotide
caacgaagagaacuugguc

SEQ ID NO: 2769988 - RNA, 19 nt, Artificial Sequence
  Description of Artificial Sequence: Synthetic oligonucleotide
gcuuuauaauuuaugcagc

SEQ ID NO: 2769989 - RNA, 19 nt, Artificial Sequence
  Description of Artificial Sequence: Synthetic oligonucleotide
gguaugggguuuauuagcc

SEQ ID NO: 2769990 - RNA, 19 nt, Artificial Sequence
  Description of Artificial Sequence: Synthetic oligonucleotide
cagaauggcuuaucauaag

SEQ ID NO: 2769991 - RNA, 19 nt, Artificial Sequence
  Description of Artificial Sequence: Synthetic oligonucleotide
ccuccuuuucacaagcuag

SEQ ID NO: 2769992 - RNA, 19 nt, Artificial Sequence
  Description of Artificial Sequence: Synthetic oligonucleotide
uuccugaaaggagaugacu

SEQ ID NO: 2769993 - RNA, 19 nt, Artificial Sequence
  Description of Artificial Sequence: Synthetic oligonucleotide
aucgauauauucaggugga

SEQ ID NO: 2769994 - RNA, 19 nt, Artificial Sequence
  Description of Artificial Sequence: Synthetic oligonucleotide
cauucauauuacguacuac

SEQ ID NO: 2769995 - RNA, 19 nt, Artificial Sequence
  Description of Artificial Sequence: Synthetic oligonucleotide
auaaggcucaugcauucua

SEQ ID NO: 2769996 - RNA, 19 nt, Artificial Sequence
  Description of Artificial Sequence: Synthetic oligonucleotide
guaugggguuuauuagccc

SEQ ID NO: 2769997 - RNA, 19 nt, Artificial Sequence
  Description of Artificial Sequence: Synthetic oligonucleotide
auuacagauuuauccccau

SEQ ID NO: 2769998 - RNA, 19 nt, Artificial Sequence
  Description of Artificial Sequence: Synthetic oligonucleotide
guccuuuguacagugaaga

SEQ ID NO: 2769999 - RNA, 19 nt, Artificial Sequence
  Description of Artificial Sequence: Synthetic oligonucleotide
aacaccucucucaaagaau

SEQ ID NO: 2770000 - RNA, 19 nt, Artificial Sequence
  Description of Artificial Sequence: Synthetic oligonucleotide
accucucucaaagaauaug

SEQ ID NO: 2770001 - RNA, 19 nt, Artificial Sequence
  Description of Artificial Sequence: Synthetic oligonucleotide
gauuuauccccauuuucau

SEQ ID NO: 2770002 - RNA, 19 nt, Artificial Sequence
  Description of Artificial Sequence: Synthetic oligonucleotide
gagaggguuacagccauuc

SEQ ID NO: 2770003 - RNA, 19 nt, Artificial Sequence
  Description of Artificial Sequence: Synthetic oligonucleotide
auauauuaucagucuggua

SEQ ID NO: 2770004 - RNA, 19 nt, Artificial Sequence
  Description of Artificial Sequence: Synthetic oligonucleotide
auuagcccauaugucagca

SEQ ID NO: 2770005 - RNA, 19 nt, Artificial Sequence
  Description of Artificial Sequence: Synthetic oligonucleotide
ccucggguguuucauaugg

SEQ ID NO: 2770006 - RNA, 19 nt, Artificial Sequence
  Description of Artificial Sequence: Synthetic oligonucleotide
uuacagauuuauccccauu

SEQ ID NO: 2770007 - RNA, 19 nt, Artificial Sequence
  Description of Artificial Sequence: Synthetic oligonucleotide
uauauucagguggauccau

SEQ ID NO: 2770008 - RNA, 19 nt, Artificial Sequence
  Description of Artificial Sequence: Synthetic oligonucleotide
gauucaaauugcaucuugu

SEQ ID NO: 2770009 - RNA, 19 nt, Artificial Sequence
  Description of Artificial Sequence: Synthetic oligonucleotide
ggguguuucauauggcaac

SEQ ID NO: 2770010 - RNA, 19 nt, Artificial Sequence
  Description of Artificial Sequence: Synthetic oligonucleotide
aagcuagaaaguguccuuu

SEQ ID NO: 2770011 - RNA, 19 nt, Artificial Sequence
  Description of Artificial Sequence: Synthetic oligonucleotide
cuuuucuuucaaaaugagu

SEQ ID NO: 2770012 - RNA, 19 nt, Artificial Sequence
  Description of Artificial Sequence: Synthetic oligonucleotide
auauggcaacacagaaugg

SEQ ID NO: 2770013 - RNA, 19 nt, Artificial Sequence
  Description of Artificial Sequence: Synthetic oligonucleotide
gagaacuuggucauucaua

SEQ ID NO: 2770014 - RNA, 19 nt, Artificial Sequence
  Description of Artificial Sequence: Synthetic oligonucleotide
uccuccacagagaggguua

SEQ ID NO: 2770015 - RNA, 19 nt, Artificial Sequence
  Description of Artificial Sequence: Synthetic oligonucleotide
cucaugcauucuaaucauc

SEQ ID NO: 2770016 - RNA, 19 nt, Artificial Sequence
  Description of Artificial Sequence: Synthetic oligonucleotide
ugaaccuguuugcuuuaua

SEQ ID NO: 2770017 - RNA, 19 nt, Artificial Sequence
  Description of Artificial Sequence: Synthetic oligonucleotide
cuagaaaguguccuuugua

SEQ ID NO: 2770018 - RNA, 19 nt, Artificial Sequence
  Description of Artificial Sequence: Synthetic oligonucleotide
uccuuuucacaagcuagaa

SEQ ID NO: 2770019 - RNA, 19 nt, Artificial Sequence
  Description of Artificial Sequence: Synthetic oligonucleotide
augucagcaucagucauau

SEQ ID NO: 2770020 - RNA, 19 nt, Artificial Sequence
  Description of Artificial Sequence: Synthetic oligonucleotide
aucuuguuauguccuggaa

SEQ ID NO: 2770021 - RNA, 19 nt, Artificial Sequence
  Description of Artificial Sequence: Synthetic oligonucleotide
cucggguguuucauauggc

SEQ ID NO: 2770022 - RNA, 19 nt, Artificial Sequence
  Description of Artificial Sequence: Synthetic oligonucleotide
acagugaacauuacagauu

SEQ ID NO: 2770023 - RNA, 19 nt, Artificial Sequence
  Description of Artificial Sequence: Synthetic oligonucleotide
caucuuguuauguccugga

SEQ ID NO: 2770024 - RNA, 19 nt, Artificial Sequence
  Description of Artificial Sequence: Synthetic oligonucleotide
caggugacuuucuucuguc

SEQ ID NO: 2770025 - RNA, 19 nt, Artificial Sequence
  Description of Artificial Sequence: Synthetic oligonucleotide
uuauccccauuuucauccu

SEQ ID NO: 2770026 - RNA, 19 nt, Artificial Sequence
  Description of Artificial Sequence: Synthetic oligonucleotide
acaggagagaguaaacauu

SEQ ID NO: 2770027 - RNA, 19 nt, Artificial Sequence
  Description of Artificial Sequence: Synthetic oligonucleotide
acaccucucucaaagaaua

SEQ ID NO: 2770028 - RNA, 19 nt, Artificial Sequence
  Description of Artificial Sequence: Synthetic oligonucleotide
aucauaaggcucaugcauu

SEQ ID NO: 2770029 - RNA, 19 nt, Artificial Sequence
  Description of Artificial Sequence: Synthetic oligonucleotide
aucagucugguaugggguu

SEQ ID NO: 2770030 - RNA, 19 nt, Artificial Sequence
  Description of Artificial Sequence: Synthetic oligonucleotide
gacuuucuucugucaacga

SEQ ID NO: 2770031 - RNA, 19 nt, Artificial Sequence
  Description of Artificial Sequence: Synthetic oligonucleotide
caaacauacuugauaccua

SEQ ID NO: 2770032 - RNA, 19 nt, Artificial Sequence
  Description of Artificial Sequence: Synthetic oligonucleotide
acuugauaccuaacuguga

SEQ ID NO: 2770033 - RNA, 19 nt, Artificial Sequence
  Description of Artificial Sequence: Synthetic oligonucleotide
agcaucagucauauccuca

SEQ ID NO: 2770034 - RNA, 19 nt, Artificial Sequence
  Description of Artificial Sequence: Synthetic oligonucleotide
uuguuauguccuggaacac

SEQ ID NO: 2770035 - RNA, 19 nt, Artificial Sequence
  Description of Artificial Sequence: Synthetic oligonucleotide
gauaccuaacugugaggua

SEQ ID NO: 2770036 - RNA, 19 nt, Artificial Sequence
  Description of Artificial Sequence: Synthetic oligonucleotide
acagagaggguuacagcca

SEQ ID NO: 2770037 - RNA, 19 nt, Artificial Sequence
  Description of Artificial Sequence: Synthetic oligonucleotide
agccucggguguuucauau

SEQ ID NO: 2770038 - RNA, 19 nt, Artificial Sequence
  Description of Artificial Sequence: Synthetic oligonucleotide
gguaagguagcaacaguga

SEQ ID NO: 2770039 - RNA, 19 nt, Artificial Sequence
  Description of Artificial Sequence: Synthetic oligonucleotide
uuagcccauaugucagcau

SEQ ID NO: 2770040 - RNA, 19 nt, Artificial Sequence
  Description of Artificial Sequence: Synthetic oligonucleotide
cuguuugcuuuauaauuua

SEQ ID NO: 2770041 - RNA, 19 nt, Artificial Sequence
  Description of Artificial Sequence: Synthetic oligonucleotide
gguggauccauuuccugaa

SEQ ID NO: 2770042 - RNA, 19 nt, Artificial Sequence
  Description of Artificial Sequence: Synthetic oligonucleotide
cagguggauccauuuccug

SEQ ID NO: 2770043 - RNA, 19 nt, Artificial Sequence
  Description of Artificial Sequence: Synthetic oligonucleotide
cacaggugacuuucuucug

SEQ ID NO: 2770044 - RNA, 19 nt, Artificial Sequence
  Description of Artificial Sequence: Synthetic oligonucleotide
gugagguaagguagcaaca

SEQ ID NO: 2770045 - RNA, 19 nt, Artificial Sequence
  Description of Artificial Sequence: Synthetic oligonucleotide
cugaaaacaucauccuccu

SEQ ID NO: 2770046 - RNA, 19 nt, Artificial Sequence
  Description of Artificial Sequence: Synthetic oligonucleotide
gagguaagguagcaacagu

SEQ ID NO: 2770047 - RNA, 19 nt, Artificial Sequence
  Description of Artificial Sequence: Synthetic oligonucleotide
uagcaacagugaacauuac

SEQ ID NO: 2770048 - RNA, 19 nt, Artificial Sequence
  Description of Artificial Sequence: Synthetic oligonucleotide
gaaaggagaugacuuuguu

SEQ ID NO: 2770049 - RNA, 19 nt, Artificial Sequence
  Description of Artificial Sequence: Synthetic oligonucleotide
uauccccauuuucauccuu

SEQ ID NO: 2770050 - RNA, 19 nt, Artificial Sequence
  Description of Artificial Sequence: Synthetic oligonucleotide
agcccauaugucagcauca

SEQ ID NO: 2770051 - RNA, 19 nt, Artificial Sequence
  Description of Artificial Sequence: Synthetic oligonucleotide
gcaucagucauauccucaa

SEQ ID NO: 2770052 - RNA, 19 nt, Artificial Sequence
  Description of Artificial Sequence: Synthetic oligonucleotide
augagucugaaaacaucau

SEQ ID NO: 2770053 - RNA, 19 nt, Artificial Sequence
  Description of Artificial Sequence: Synthetic oligonucleotide
ugcagccucggguguuuca

SEQ ID NO: 2770054 - RNA, 19 nt, Artificial Sequence
  Description of Artificial Sequence: Synthetic oligonucleotide
cuggaacacaaacauacuu

SEQ ID NO: 2770055 - RNA, 19 nt, Artificial Sequence
  Description of Artificial Sequence: Synthetic oligonucleotide
ucgauauauucagguggau

SEQ ID NO: 2770056 - RNA, 19 nt, Artificial Sequence
  Description of Artificial Sequence: Synthetic oligonucleotide
ggcaacacagaauggcuua

SEQ ID NO: 2770057 - RNA, 19 nt, Artificial Sequence
  Description of Artificial Sequence: Synthetic oligonucleotide
guguuucauauggcaacac

SEQ ID NO: 2770058 - RNA, 19 nt, Artificial Sequence
  Description of Artificial Sequence: Synthetic oligonucleotide
caacacagaauggcuuauc

SEQ ID NO: 2770059 - RNA, 19 nt, Artificial Sequence
  Description of Artificial Sequence: Synthetic oligonucleotide
ggaacaccucucucaaaga

SEQ ID NO: 2770060 - RNA, 19 nt, Artificial Sequence
  Description of Artificial Sequence: Synthetic oligonucleotide
gucauucauauuacguacu

SEQ ID NO: 2770061 - RNA, 19 nt, Artificial Sequence
  Description of Artificial Sequence: Synthetic oligonucleotide
uuaugcagccucggguguu

SEQ ID NO: 2770062 - RNA, 19 nt, Artificial Sequence
  Description of Artificial Sequence: Synthetic oligonucleotide
cugucaacgaagagaacuu

SEQ ID NO: 2770063 - RNA, 19 nt, Artificial Sequence
  Description of Artificial Sequence: Synthetic oligonucleotide
auauucagguggauccauu

SEQ ID NO: 2770064 - RNA, 19 nt, Artificial Sequence
  Description of Artificial Sequence: Synthetic oligonucleotide
ugggguuuauuagcccaua

SEQ ID NO: 2770065 - RNA, 19 nt, Artificial Sequence
  Description of Artificial Sequence: Synthetic oligonucleotide
augggguuuauuagcccau

SEQ ID NO: 2770066 - RNA, 19 nt, Artificial Sequence
  Description of Artificial Sequence: Synthetic oligonucleotide
cgauauauucagguggauc

SEQ ID NO: 2770067 - RNA, 19 nt, Artificial Sequence
  Description of Artificial Sequence: Synthetic oligonucleotide
gguagcaacagugaacauu

SEQ ID NO: 2770068 - RNA, 19 nt, Artificial Sequence
  Description of Artificial Sequence: Synthetic oligonucleotide
guccuggaacaccucucuc

SEQ ID NO: 2770069 - RNA, 19 nt, Artificial Sequence
  Description of Artificial Sequence: Synthetic oligonucleotide
gcuagaaaguguccuuugu

SEQ ID NO: 2770070 - RNA, 19 nt, Artificial Sequence
  Description of Artificial Sequence: Synthetic oligonucleotide
caucagucauauccucaaa

SEQ ID NO: 2770071 - RNA, 19 nt, Artificial Sequence
  Description of Artificial Sequence: Synthetic oligonucleotide
caagcuagaaaguguccuu

SEQ ID NO: 2770072 - RNA, 19 nt, Artificial Sequence
  Description of Artificial Sequence: Synthetic oligonucleotide
augaaccuguuugcuuuau

SEQ ID NO: 2770073 - RNA, 19 nt, Artificial Sequence
  Description of Artificial Sequence: Synthetic oligonucleotide
cccugcaucagaaucuuua

SEQ ID NO: 2770074 - RNA, 19 nt, Artificial Sequence
  Description of Artificial Sequence: Synthetic oligonucleotide
guggauccauuuccugaaa

SEQ ID NO: 2770075 - RNA, 19 nt, Artificial Sequence
  Description of Artificial Sequence: Synthetic oligonucleotide
gcccauaugucagcaucag

SEQ ID NO: 2770076 - RNA, 19 nt, Artificial Sequence
  Description of Artificial Sequence: Synthetic oligonucleotide
gcauucuaaucaucuuucu

SEQ ID NO: 2770077 - RNA, 19 nt, Artificial Sequence
  Description of Artificial Sequence: Synthetic oligonucleotide
gcucaugcauucuaaucau

SEQ ID NO: 2770078 - RNA, 19 nt, Artificial Sequence
  Description of Artificial Sequence: Synthetic oligonucleotide
gcuuaucauaaggcucaug

SEQ ID NO: 2770079 - RNA, 19 nt, Artificial Sequence
  Description of Artificial Sequence: Synthetic oligonucleotide
cuggaacaccucucucaaa

SEQ ID NO: 2770080 - RNA, 19 nt, Artificial Sequence
  Description of Artificial Sequence: Synthetic oligonucleotide
cugugagguaagguagcaa

SEQ ID NO: 2770081 - RNA, 19 nt, Artificial Sequence
  Description of Artificial Sequence: Synthetic oligonucleotide
gccucggguguuucauaug

SEQ ID NO: 2770082 - RNA, 19 nt, Artificial Sequence
  Description of Artificial Sequence: Synthetic oligonucleotide
agucugguaugggguuuau

SEQ ID NO: 2770083 - RNA, 19 nt, Artificial Sequence
  Description of Artificial Sequence: Synthetic oligonucleotide
gggguuuauuagcccauau

SEQ ID NO: 2770084 - RNA, 19 nt, Artificial Sequence
  Description of Artificial Sequence: Synthetic oligonucleotide
ccugaaaggagaugacuuu

SEQ ID NO: 2770085 - RNA, 19 nt, Artificial Sequence
  Description of Artificial Sequence: Synthetic oligonucleotide
caccucucucaaagaauau

SEQ ID NO: 2770086 - RNA, 19 nt, Artificial Sequence
  Description of Artificial Sequence: Synthetic oligonucleotide
cggguguuucauauggcaa

SEQ ID NO: 2770087 - RNA, 19 nt, Artificial Sequence
  Description of Artificial Sequence: Synthetic oligonucleotide
agagaggguuacagccauu

SEQ ID NO: 2770088 - RNA, 19 nt, Artificial Sequence
  Description of Artificial Sequence: Synthetic oligonucleotide
ccuccacagagaggguuac

SEQ ID NO: 2770089 - RNA, 19 nt, Artificial Sequence
  Description of Artificial Sequence: Synthetic oligonucleotide
ccuaacugugagguaaggu

SEQ ID NO: 2770090 - RNA, 19 nt, Artificial Sequence
  Description of Artificial Sequence: Synthetic oligonucleotide
cagccucggguguuucaua

SEQ ID NO: 2770091 - RNA, 19 nt, Artificial Sequence
  Description of Artificial Sequence: Synthetic oligonucleotide
gcaacacagaauggcuuau

SEQ ID NO: 2770092 - RNA, 19 nt, Artificial Sequence
  Description of Artificial Sequence: Synthetic oligonucleotide
cccauaugucagcaucagu

SEQ ID NO: 2770093 - RNA, 19 nt, Artificial Sequence
  Description of Artificial Sequence: Synthetic oligonucleotide
gcagccucggguguuucau

SEQ ID NO: 2770094 - RNA, 19 nt, Artificial Sequence
  Description of Artificial Sequence: Synthetic oligonucleotide
gucugguaugggguuuauu

SEQ ID NO: 2770095 - RNA, 19 nt, Artificial Sequence
  Description of Artificial Sequence: Synthetic oligonucleotide
ggcuuaucauaaggcucau

SEQ ID NO: 2770096 - RNA, 19 nt, Artificial Sequence
  Description of Artificial Sequence: Synthetic oligonucleotide
cgaagagaacuuggucauu

SEQ ID NO: 2770097 - RNA, 19 nt, Artificial Sequence
  Description of Artificial Sequence: Synthetic oligonucleotide
ccccugcaucagaaucuuu

SEQ ID NO: 2770098 - RNA, 19 nt, Artificial Sequence
  Description of Artificial Sequence: Synthetic oligonucleotide
aauuaauuuaauuaauccc

SEQ ID NO: 2770099 - RNA, 19 nt, Artificial Sequence
  Description of Artificial Sequence: Synthetic oligonucleotide
auuuaauuaauacaaaucc

SEQ ID NO: 2770100 - RNA, 19 nt, Artificial Sequence
  Description of Artificial Sequence: Synthetic oligonucleotide
uuaaguaaaagcuagaucc

SEQ ID NO: 2770101 - RNA, 19 nt, Artificial Sequence
  Description of Artificial Sequence: Synthetic oligonucleotide
auuuaauaugauuagcucc

SEQ ID NO: 2770102 - RNA, 19 nt, Artificial Sequence
  Description of Artificial Sequence: Synthetic oligonucleotide
auucuauaaauuuucaacc

SEQ ID NO: 2770103 - RNA, 19 nt, Artificial Sequence
  Description of Artificial Sequence: Synthetic oligonucleotide
uuaauuaauacaaauccag

SEQ ID NO: 2770104 - RNA, 19 nt, Artificial Sequence
  Description of Artificial Sequence: Synthetic oligonucleotide
aaauuuucaaccacaaucc

SEQ ID NO: 2770105 - RNA, 19 nt, Artificial Sequence
  Description of Artificial Sequence: Synthetic oligonucleotide
aauuaauuaauuuaauuaa

SEQ ID NO: 2770106 - RNA, 19 nt, Artificial Sequence
  Description of Artificial Sequence: Synthetic oligonucleotide
uaaauuuucaaccacaauc

SEQ ID NO: 2770107 - RNA, 19 nt, Artificial Sequence
  Description of Artificial Sequence: Synthetic oligonucleotide
uuuguuaaguaaaagcuag

SEQ ID NO: 2770108 - RNA, 19 nt, Artificial Sequence
  Description of Artificial Sequence: Synthetic oligonucleotide
uaauuaauuuaauuaaucc

SEQ ID NO: 2770109 - RNA, 19 nt, Artificial Sequence
  Description of Artificial Sequence: Synthetic oligonucleotide
uauaauaucccaacuuugg

SEQ ID NO: 2770110 - RNA, 19 nt, Artificial Sequence
  Description of Artificial Sequence: Synthetic oligonucleotide
auuaauacaaauccaguag

SEQ ID NO: 2770111 - RNA, 19 nt, Artificial Sequence
  Description of Artificial Sequence: Synthetic oligonucleotide
uaauuaauuaauuuaauua

SEQ ID NO: 2770112 - RNA, 19 nt, Artificial Sequence
  Description of Artificial Sequence: Synthetic oligonucleotide
uauucuauaaauuuucaac

SEQ ID NO: 2770113 - RNA, 19 nt, Artificial Sequence
  Description of Artificial Sequence: Synthetic oligonucleotide
ucuuuagaauauaauaucc

SEQ ID NO: 2770114 - RNA, 19 nt, Artificial Sequence
  Description of Artificial Sequence: Synthetic oligonucleotide
uucacauuuaauaugauua

SEQ ID NO: 2770115 - RNA, 19 nt, Artificial Sequence
  Description of Artificial Sequence: Synthetic oligonucleotide
ugucauaccuauuugacag

SEQ ID NO: 2770116 - RNA, 19 nt, Artificial Sequence
  Description of Artificial Sequence: Synthetic oligonucleotide
gauaagcuuacuuugacug

SEQ ID NO: 2770117 - RNA, 19 nt, Artificial Sequence
  Description of Artificial Sequence: Synthetic oligonucleotide
cauauuuucaucuauuuuc

SEQ ID NO: 2770118 - RNA, 19 nt, Artificial Sequence
  Description of Artificial Sequence: Synthetic oligonucleotide
uuuaauaugauuagcuccu

SEQ ID NO: 2770119 - RNA, 19 nt, Artificial Sequence
  Description of Artificial Sequence: Synthetic oligonucleotide
uuuaauuaauacaaaucca

SEQ ID NO: 2770120 - RNA, 19 nt, Artificial Sequence
  Description of Artificial Sequence: Synthetic oligonucleotide
uauaggaaggccaugauaa

SEQ ID NO: 2770121 - RNA, 19 nt, Artificial Sequence
  Description of Artificial Sequence: Synthetic oligonucleotide
uuucaaauuauuuugcaac

SEQ ID NO: 2770122 - RNA, 19 nt, Artificial Sequence
  Description of Artificial Sequence: Synthetic oligonucleotide
aaauccaguaguuuuaagu

SEQ ID NO: 2770123 - RNA, 19 nt, Artificial Sequence
  Description of Artificial Sequence: Synthetic oligonucleotide
aauuuucaaccacaauccc

SEQ ID NO: 2770124 - RNA, 19 nt, Artificial Sequence
  Description of Artificial Sequence: Synthetic oligonucleotide
uuuucaucuauuuucuuag

SEQ ID NO: 2770125 - RNA, 19 nt, Artificial Sequence
  Description of Artificial Sequence: Synthetic oligonucleotide
cuaacuuggagucucaagg

SEQ ID NO: 2770126 - RNA, 19 nt, Artificial Sequence
  Description of Artificial Sequence: Synthetic oligonucleotide
uuuagaauauaauauccca

SEQ ID NO: 2770127 - RNA, 19 nt, Artificial Sequence
  Description of Artificial Sequence: Synthetic oligonucleotide
uuaauuaauuuaauuaauc

SEQ ID NO: 2770128 - RNA, 19 nt, Artificial Sequence
  Description of Artificial Sequence: Synthetic oligonucleotide
aauuuaauuaaucccaaua

SEQ ID NO: 2770129 - RNA, 19 nt, Artificial Sequence
  Description of Artificial Sequence: Synthetic oligonucleotide
uuaucuauuaauuuuguua

SEQ ID NO: 2770130 - RNA, 19 nt, Artificial Sequence
  Description of Artificial Sequence: Synthetic oligonucleotide
uaauaucccaacuuuggcg

SEQ ID NO: 2770131 - RNA, 19 nt, Artificial Sequence
  Description of Artificial Sequence: Synthetic oligonucleotide
aaauauuauuuucaaauua

SEQ ID NO: 2770132 - RNA, 19 nt, Artificial Sequence
  Description of Artificial Sequence: Synthetic oligonucleotide
aauuaauacaaauccagua

SEQ ID NO: 2770133 - RNA, 19 nt, Artificial Sequence
  Description of Artificial Sequence: Synthetic oligonucleotide
aauaugauuagcuccuacu

SEQ ID NO: 2770134 - RNA, 19 nt, Artificial Sequence
  Description of Artificial Sequence: Synthetic oligonucleotide
aauaucccaacuuuggcgu

SEQ ID NO: 2770135 - RNA, 19 nt, Artificial Sequence
  Description of Artificial Sequence: Synthetic oligonucleotide
uuaauuaaucccaauaauu

SEQ ID NO: 2770136 - RNA, 19 nt, Artificial Sequence
  Description of Artificial Sequence: Synthetic oligonucleotide
auaauaucccaacuuuggc

SEQ ID NO: 2770137 - RNA, 19 nt, Artificial Sequence
  Description of Artificial Sequence: Synthetic oligonucleotide
aaucccaauaauuuaauua

SEQ ID NO: 2770138 - RNA, 19 nt, Artificial Sequence
  Description of Artificial Sequence: Synthetic oligonucleotide
uuugcaaccuacuuuuagg

SEQ ID NO: 2770139 - RNA, 19 nt, Artificial Sequence
  Description of Artificial Sequence: Synthetic oligonucleotide
ucaaggauauuucacauuc

SEQ ID NO: 2770140 - RNA, 19 nt, Artificial Sequence
  Description of Artificial Sequence: Synthetic oligonucleotide
agucugagguacuugaggc

SEQ ID NO: 2770141 - RNA, 19 nt, Artificial Sequence
  Description of Artificial Sequence: Synthetic oligonucleotide
auuaauuuaauuaauccca

SEQ ID NO: 2770142 - RNA, 19 nt, Artificial Sequence
  Description of Artificial Sequence: Synthetic oligonucleotide
ucaaauguucuuuagaaua

SEQ ID NO: 2770143 - RNA, 19 nt, Artificial Sequence
  Description of Artificial Sequence: Synthetic oligonucleotide
uguucuuuagaauauaaua

SEQ ID NO: 2770144 - RNA, 19 nt, Artificial Sequence
  Description of Artificial Sequence: Synthetic oligonucleotide
aauaauuuacacuuaucua

SEQ ID NO: 2770145 - RNA, 19 nt, Artificial Sequence
  Description of Artificial Sequence: Synthetic oligonucleotide
aaaauauuauuuucaaauu

SEQ ID NO: 2770146 - RNA, 19 nt, Artificial Sequence
  Description of Artificial Sequence: Synthetic oligonucleotide
uuaauacaaauccaguagu

SEQ ID NO: 2770147 - RNA, 19 nt, Artificial Sequence
  Description of Artificial Sequence: Synthetic oligonucleotide
ucuauuuucuuagaaacug

SEQ ID NO: 2770148 - RNA, 19 nt, Artificial Sequence
  Description of Artificial Sequence: Synthetic oligonucleotide
uaauuaaucccaauaauuu

SEQ ID NO: 2770149 - RNA, 19 nt, Artificial Sequence
  Description of Artificial Sequence: Synthetic oligonucleotide
uguucuuauaggaaggcca

SEQ ID NO: 2770150 - RNA, 19 nt, Artificial Sequence
  Description of Artificial Sequence: Synthetic oligonucleotide
uuuucuuagaaacugggua

SEQ ID NO: 2770151 - RNA, 19 nt, Artificial Sequence
  Description of Artificial Sequence: Synthetic oligonucleotide
uuagaaacuggguauaacu

SEQ ID NO: 2770152 - RNA, 19 nt, Artificial Sequence
  Description of Artificial Sequence: Synthetic oligonucleotide
uauuucacauucaaaauau

SEQ ID NO: 2770153 - RNA, 19 nt, Artificial Sequence
  Description of Artificial Sequence: Synthetic oligonucleotide
aauguucuuauaggaaggc

SEQ ID NO: 2770154 - RNA, 19 nt, Artificial Sequence
  Description of Artificial Sequence: Synthetic oligonucleotide
cuuuagaauauaauauccc

SEQ ID NO: 2770155 - RNA, 19 nt, Artificial Sequence
  Description of Artificial Sequence: Synthetic oligonucleotide
caucuauuuucuuagaaac

SEQ ID NO: 2770156 - RNA, 19 nt, Artificial Sequence
  Description of Artificial Sequence: Synthetic oligonucleotide
uuaaguucacauuuaauau

SEQ ID NO: 2770157 - RNA, 19 nt, Artificial Sequence
  Description of Artificial Sequence: Synthetic oligonucleotide
gaauguuucccucauauga

SEQ ID NO: 2770158 - RNA, 19 nt, Artificial Sequence
  Description of Artificial Sequence: Synthetic oligonucleotide
uucaaauuauuuugcaacc

SEQ ID NO: 2770159 - RNA, 19 nt, Artificial Sequence
  Description of Artificial Sequence: Synthetic oligonucleotide
aacuggguauaacucaccg

SEQ ID NO: 2770160 - RNA, 19 nt, Artificial Sequence
  Description of Artificial Sequence: Synthetic oligonucleotide
gaauaauuuacacuuaucu

SEQ ID NO: 2770161 - RNA, 19 nt, Artificial Sequence
  Description of Artificial Sequence: Synthetic oligonucleotide
auuuuguuaaguaaaagcu

SEQ ID NO: 2770162 - RNA, 19 nt, Artificial Sequence
  Description of Artificial Sequence: Synthetic oligonucleotide
uuuucaaccacaaucccaa

SEQ ID NO: 2770163 - RNA, 19 nt, Artificial Sequence
  Description of Artificial Sequence: Synthetic oligonucleotide
uucacauucaaaauauuau

SEQ ID NO: 2770164 - RNA, 19 nt, Artificial Sequence
  Description of Artificial Sequence: Synthetic oligonucleotide
uagaauauaauaucccaac

SEQ ID NO: 2770165 - RNA, 19 nt, Artificial Sequence
  Description of Artificial Sequence: Synthetic oligonucleotide
aguaguuuuaaguucacau

SEQ ID NO: 2770166 - RNA, 19 nt, Artificial Sequence
  Description of Artificial Sequence: Synthetic oligonucleotide
ucuauaaauuuucaaccac

SEQ ID NO: 2770167 - RNA, 19 nt, Artificial Sequence
  Description of Artificial Sequence: Synthetic oligonucleotide
uaaguucacauuuaauaug

SEQ ID NO: 2770168 - RNA, 19 nt, Artificial Sequence
  Description of Artificial Sequence: Synthetic oligonucleotide
ucacauuuaauaugauuag

SEQ ID NO: 2770169 - RNA, 19 nt, Artificial Sequence
  Description of Artificial Sequence: Synthetic oligonucleotide
aaaagcuagaucccgaguu

SEQ ID NO: 2770170 - RNA, 19 nt, Artificial Sequence
  Description of Artificial Sequence: Synthetic oligonucleotide
aaagcuagaucccgaguuc

SEQ ID NO: 2770171 - RNA, 19 nt, Artificial Sequence
  Description of Artificial Sequence: Synthetic oligonucleotide
uuagaauauaauaucccaa

SEQ ID NO: 2770172 - RNA, 19 nt, Artificial Sequence
  Description of Artificial Sequence: Synthetic oligonucleotide
ucaaccacaaucccaauaa

SEQ ID NO: 2770173 - RNA, 19 nt, Artificial Sequence
  Description of Artificial Sequence: Synthetic oligonucleotide
uucuauaaauuuucaacca

SEQ ID NO: 2770174 - RNA, 19 nt, Artificial Sequence
  Description of Artificial Sequence: Synthetic oligonucleotide
uuaauuuuguuaaguaaaa

SEQ ID NO: 2770175 - RNA, 19 nt, Artificial Sequence
  Description of Artificial Sequence: Synthetic oligonucleotide
aauuaaucccaauaauuua

SEQ ID NO: 2770176 - RNA, 19 nt, Artificial Sequence
  Description of Artificial Sequence: Synthetic oligonucleotide
uaauuaauacaaauccagu

SEQ ID NO: 2770177 - RNA, 19 nt, Artificial Sequence
  Description of Artificial Sequence: Synthetic oligonucleotide
uauaaauuuucaaccacaa

SEQ ID NO: 2770178 - RNA, 19 nt, Artificial Sequence
  Description of Artificial Sequence: Synthetic oligonucleotide
uuugucauaccuauuugac

SEQ ID NO: 2770179 - RNA, 19 nt, Artificial Sequence
  Description of Artificial Sequence: Synthetic oligonucleotide
uuucacauucaaaauauua

SEQ ID NO: 2770180 - RNA, 19 nt, Artificial Sequence
  Description of Artificial Sequence: Synthetic oligonucleotide
uauuuugcaaccuacuuuu

SEQ ID NO: 2770181 - RNA, 19 nt, Artificial Sequence
  Description of Artificial Sequence: Synthetic oligonucleotide
caauaauuuaauuaauaca

SEQ ID NO: 2770182 - RNA, 19 nt, Artificial Sequence
  Description of Artificial Sequence: Synthetic oligonucleotide
uuuugcaaccuacuuuuag

SEQ ID NO: 2770183 - RNA, 19 nt, Artificial Sequence
  Description of Artificial Sequence: Synthetic oligonucleotide
uaaguaaaagcuagauccc

SEQ ID NO: 2770184 - RNA, 19 nt, Artificial Sequence
  Description of Artificial Sequence: Synthetic oligonucleotide
uccaguaguuuuaaguuca

SEQ ID NO: 2770185 - RNA, 19 nt, Artificial Sequence
  Description of Artificial Sequence: Synthetic oligonucleotide
ucuauuaauuuuguuaagu

SEQ ID NO: 2770186 - RNA, 19 nt, Artificial Sequence
  Description of Artificial Sequence: Synthetic oligonucleotide
cauucaaaauauuauuuuc

SEQ ID NO: 2770187 - RNA, 19 nt, Artificial Sequence
  Description of Artificial Sequence: Synthetic oligonucleotide
aaaauugcccuguacccca

SEQ ID NO: 2770188 - RNA, 19 nt, Artificial Sequence
  Description of Artificial Sequence: Synthetic oligonucleotide
uuuuguuaaguaaaagcua

SEQ ID NO: 2770189 - RNA, 19 nt, Artificial Sequence
  Description of Artificial Sequence: Synthetic oligonucleotide
uuaauuuaauuaaucccaa

SEQ ID NO: 2770190 - RNA, 19 nt, Artificial Sequence
  Description of Artificial Sequence: Synthetic oligonucleotide
uucaaaauauuauuuucaa

SEQ ID NO: 2770191 - RNA, 19 nt, Artificial Sequence
  Description of Artificial Sequence: Synthetic oligonucleotide
aaguaaaagcuagaucccg

SEQ ID NO: 2770192 - RNA, 19 nt, Artificial Sequence
  Description of Artificial Sequence: Synthetic oligonucleotide
augaacauaccauuuguca

SEQ ID NO: 2770193 - RNA, 19 nt, Artificial Sequence
  Description of Artificial Sequence: Synthetic oligonucleotide
aucccaauaauuuaauuaa

SEQ ID NO: 2770194 - RNA, 19 nt, Artificial Sequence
  Description of Artificial Sequence: Synthetic oligonucleotide
cuauuuucuuagaaacugg

SEQ ID NO: 2770195 - RNA, 19 nt, Artificial Sequence
  Description of Artificial Sequence: Synthetic oligonucleotide
uagaauguuucccucauau

SEQ ID NO: 2770196 - RNA, 19 nt, Artificial Sequence
  Description of Artificial Sequence: Synthetic oligonucleotide
uuuacacuuaucuauuaau

SEQ ID NO: 2770197 - RNA, 19 nt, Artificial Sequence
  Description of Artificial Sequence: Synthetic oligonucleotide
uuuucaaauuauuuugcaa

SEQ ID NO: 2770198 - RNA, 19 nt, Artificial Sequence
  Description of Artificial Sequence: Synthetic oligonucleotide
aaggauauuucacauucaa

SEQ ID NO: 2770199 - RNA, 19 nt, Artificial Sequence
  Description of Artificial Sequence: Synthetic oligonucleotide
caauaauuuaauuaauuaa

SEQ ID NO: 2770200 - RNA, 19 nt, Artificial Sequence
  Description of Artificial Sequence: Synthetic oligonucleotide
augauuagcuccuacuuca

SEQ ID NO: 2770201 - RNA, 19 nt, Artificial Sequence
  Description of Artificial Sequence: Synthetic oligonucleotide
caauguucuuauaggaagg

SEQ ID NO: 2770202 - RNA, 19 nt, Artificial Sequence
  Description of Artificial Sequence: Synthetic oligonucleotide
agguccaauguucuuauag

SEQ ID NO: 2770203 - RNA, 19 nt, Artificial Sequence
  Description of Artificial Sequence: Synthetic oligonucleotide
uuucuuagaaacuggguau

SEQ ID NO: 2770204 - RNA, 19 nt, Artificial Sequence
  Description of Artificial Sequence: Synthetic oligonucleotide
ucaucuauuuucuuagaaa

SEQ ID NO: 2770205 - RNA, 19 nt, Artificial Sequence
  Description of Artificial Sequence: Synthetic oligonucleotide
auaagcuuacuuugacugg

SEQ ID NO: 2770206 - RNA, 19 nt, Artificial Sequence
  Description of Artificial Sequence: Synthetic oligonucleotide
cauuuaauaugauuagcuc

SEQ ID NO: 2770207 - RNA, 19 nt, Artificial Sequence
  Description of Artificial Sequence: Synthetic oligonucleotide
agaauauaauaucccaacu

SEQ ID NO: 2770208 - RNA, 19 nt, Artificial Sequence
  Description of Artificial Sequence: Synthetic oligonucleotide
auaugaacauaccauuugu

SEQ ID NO: 2770209 - RNA, 19 nt, Artificial Sequence
  Description of Artificial Sequence: Synthetic oligonucleotide
auuuucaaauuauuuugca

SEQ ID NO: 2770210 - RNA, 19 nt, Artificial Sequence
  Description of Artificial Sequence: Synthetic oligonucleotide
cacuuaucuauuaauuuug

SEQ ID NO: 2770211 - RNA, 19 nt, Artificial Sequence
  Description of Artificial Sequence: Synthetic oligonucleotide
uuagcuccuacuucaaaug

SEQ ID NO: 2770212 - RNA, 19 nt, Artificial Sequence
  Description of Artificial Sequence: Synthetic oligonucleotide
agaaacuggguauaacuca

SEQ ID NO: 2770213 - RNA, 19 nt, Artificial Sequence
  Description of Artificial Sequence: Synthetic oligonucleotide
ggauauuucacauucaaaa

SEQ ID NO: 2770214 - RNA, 19 nt, Artificial Sequence
  Description of Artificial Sequence: Synthetic oligonucleotide
auuugucauaccuauuuga

SEQ ID NO: 2770215 - RNA, 19 nt, Artificial Sequence
  Description of Artificial Sequence: Synthetic oligonucleotide
uaauuuuguuaaguaaaag

SEQ ID NO: 2770216 - RNA, 19 nt, Artificial Sequence
  Description of Artificial Sequence: Synthetic oligonucleotide
uuauucuauaaauuuucaa

SEQ ID NO: 2770217 - RNA, 19 nt, Artificial Sequence
  Description of Artificial Sequence: Synthetic oligonucleotide
acuuuuagguccaauguuc

SEQ ID NO: 2770218 - RNA, 19 nt, Artificial Sequence
  Description of Artificial Sequence: Synthetic oligonucleotide
acauuuaauaugauuagcu

SEQ ID NO: 2770219 - RNA, 19 nt, Artificial Sequence
  Description of Artificial Sequence: Synthetic oligonucleotide
uuacacuuaucuauuaauu

SEQ ID NO: 2770220 - RNA, 19 nt, Artificial Sequence
  Description of Artificial Sequence: Synthetic oligonucleotide
uaugauuagcuccuacuuc

SEQ ID NO: 2770221 - RNA, 19 nt, Artificial Sequence
  Description of Artificial Sequence: Synthetic oligonucleotide
ugaacauaccauuugucau

SEQ ID NO: 2770222 - RNA, 19 nt, Artificial Sequence
  Description of Artificial Sequence: Synthetic oligonucleotide
auagaaacccugucugggg

SEQ ID NO: 2770223 - RNA, 19 nt, Artificial Sequence
  Description of Artificial Sequence: Synthetic oligonucleotide
cauaugaacauaccauuug

SEQ ID NO: 2770224 - RNA, 19 nt, Artificial Sequence
  Description of Artificial Sequence: Synthetic oligonucleotide
uagaaacuggguauaacuc

SEQ ID NO: 2770225 - RNA, 19 nt, Artificial Sequence
  Description of Artificial Sequence: Synthetic oligonucleotide
aaggccaugauaagcuuac

SEQ ID NO: 2770226 - RNA, 19 nt, Artificial Sequence
  Description of Artificial Sequence: Synthetic oligonucleotide
uucaucuauuuucuuagaa

SEQ ID NO: 2770227 - RNA, 19 nt, Artificial Sequence
  Description of Artificial Sequence: Synthetic oligonucleotide
auucaaaauauuauuuuca

SEQ ID NO: 2770228 - RNA, 19 nt, Artificial Sequence
  Description of Artificial Sequence: Synthetic oligonucleotide
ccaauaauuuaauuaauac

SEQ ID NO: 2770229 - RNA, 19 nt, Artificial Sequence
  Description of Artificial Sequence: Synthetic oligonucleotide
ccaacuuuggcguagaaug

SEQ ID NO: 2770230 - RNA, 19 nt, Artificial Sequence
  Description of Artificial Sequence: Synthetic oligonucleotide
ucuuauaggaaggccauga

SEQ ID NO: 2770231 - RNA, 19 nt, Artificial Sequence
  Description of Artificial Sequence: Synthetic oligonucleotide
ucacauucaaaauauuauu

SEQ ID NO: 2770232 - RNA, 19 nt, Artificial Sequence
  Description of Artificial Sequence: Synthetic oligonucleotide
  modified_base (12)..(12): a, c, u, g, unknown or other
uaacucaccggnuuuuccc

SEQ ID NO: 2770233 - RNA, 19 nt, Artificial Sequence
  Description of Artificial Sequence: Synthetic oligonucleotide
acauucaaaauauuauuuu

SEQ ID NO: 2770234 - RNA, 19 nt, Artificial Sequence
  Description of Artificial Sequence: Synthetic oligonucleotide
auuagcuccuacuucaaau

SEQ ID NO: 2770235 - RNA, 19 nt, Artificial Sequence
  Description of Artificial Sequence: Synthetic oligonucleotide
auaccuauuugacagcagu

SEQ ID NO: 2770236 - RNA, 19 nt, Artificial Sequence
  Description of Artificial Sequence: Synthetic oligonucleotide
cuauaaauuuucaaccaca

SEQ ID NO: 2770237 - RNA, 19 nt, Artificial Sequence
  Description of Artificial Sequence: Synthetic oligonucleotide
cacauagaaacccugucug

SEQ ID NO: 2770238 - RNA, 19 nt, Artificial Sequence
  Description of Artificial Sequence: Synthetic oligonucleotide
uaauuuacacuuaucuauu

SEQ ID NO: 2770239 - RNA, 19 nt, Artificial Sequence
  Description of Artificial Sequence: Synthetic oligonucleotide
ugaggccucaccuaacuug

SEQ ID NO: 2770240 - RNA, 19 nt, Artificial Sequence
  Description of Artificial Sequence: Synthetic oligonucleotide
guuaaguaaaagcuagauc

SEQ ID NO: 2770241 - RNA, 19 nt, Artificial Sequence
  Description of Artificial Sequence: Synthetic oligonucleotide
uuuuaaguucacauuuaau

SEQ ID NO: 2770242 - RNA, 19 nt, Artificial Sequence
  Description of Artificial Sequence: Synthetic oligonucleotide
auguuucccucauaugaac

SEQ ID NO: 2770243 - RNA, 19 nt, Artificial Sequence
  Description of Artificial Sequence: Synthetic oligonucleotide
uaugaacauaccauuuguc

SEQ ID NO: 2770244 - RNA, 19 nt, Artificial Sequence
  Description of Artificial Sequence: Synthetic oligonucleotide
auacaaauccaguaguuuu

SEQ ID NO: 2770245 - RNA, 19 nt, Artificial Sequence
  Description of Artificial Sequence: Synthetic oligonucleotide
acauagaaacccugucugg

SEQ ID NO: 2770246 - RNA, 19 nt, Artificial Sequence
  Description of Artificial Sequence: Synthetic oligonucleotide
acuucaaauguucuuuaga

SEQ ID NO: 2770247 - RNA, 19 nt, Artificial Sequence
  Description of Artificial Sequence: Synthetic oligonucleotide
agagguuuuauucuauaaa

SEQ ID NO: 2770248 - RNA, 19 nt, Artificial Sequence
  Description of Artificial Sequence: Synthetic oligonucleotide
uacacuuaucuauuaauuu

SEQ ID NO: 2770249 - RNA, 19 nt, Artificial Sequence
  Description of Artificial Sequence: Synthetic oligonucleotide
  modified_base (2)..(2): a, c, u, g, unknown or other
gnuuuucccagucugaggu

SEQ ID NO: 2770250 - RNA, 19 nt, Artificial Sequence
  Description of Artificial Sequence: Synthetic oligonucleotide
cuucaaauguucuuuagaa

SEQ ID NO: 2770251 - RNA, 19 nt, Artificial Sequence
  Description of Artificial Sequence: Synthetic oligonucleotide
acacuuaucuauuaauuuu

SEQ ID NO: 2770252 - RNA, 19 nt, Artificial Sequence
  Description of Artificial Sequence: Synthetic oligonucleotide
guaaaagcuagaucccgag

SEQ ID NO: 2770253 - RNA, 19 nt, Artificial Sequence
  Description of Artificial Sequence: Synthetic oligonucleotide
uguuucccucauaugaaca

SEQ ID NO: 2770254 - RNA, 19 nt, Artificial Sequence
  Description of Artificial Sequence: Synthetic oligonucleotide
uguuaaguaaaagcuagau

SEQ ID NO: 2770255 - RNA, 19 nt, Artificial Sequence
  Description of Artificial Sequence: Synthetic oligonucleotide
aauacaaauccaguaguuu

SEQ ID NO: 2770256 - RNA, 19 nt, Artificial Sequence
  Description of Artificial Sequence: Synthetic oligonucleotide
auuaauuaauuuaauuaau

SEQ ID NO: 2770257 - RNA, 19 nt, Artificial Sequence
  Description of Artificial Sequence: Synthetic oligonucleotide
uccaauguucuuauaggaa

SEQ ID NO: 2770258 - RNA, 19 nt, Artificial Sequence
  Description of Artificial Sequence: Synthetic oligonucleotide
gcaaccuacuuuuaggucc

SEQ ID NO: 2770259 - RNA, 19 nt, Artificial Sequence
  Description of Artificial Sequence: Synthetic oligonucleotide
acacauagaaacccugucu

SEQ ID NO: 2770260 - RNA, 19 nt, Artificial Sequence
  Description of Artificial Sequence: Synthetic oligonucleotide
cauagaaacccugucuggg

SEQ ID NO: 2770261 - RNA, 19 nt, Artificial Sequence
  Description of Artificial Sequence: Synthetic oligonucleotide
aauuuacacuuaucuauua

SEQ ID NO: 2770262 - RNA, 19 nt, Artificial Sequence
  Description of Artificial Sequence: Synthetic oligonucleotide
uugucauaccuauuugaca

SEQ ID NO: 2770263 - RNA, 19 nt, Artificial Sequence
  Description of Artificial Sequence: Synthetic oligonucleotide
uuauaggaaggccaugaua

SEQ ID NO: 2770264 - RNA, 19 nt, Artificial Sequence
  Description of Artificial Sequence: Synthetic oligonucleotide
auuaaucccaauaauuuaa

SEQ ID NO: 2770265 - RNA, 19 nt, Artificial Sequence
  Description of Artificial Sequence: Synthetic oligonucleotide
uaauacaaauccaguaguu

SEQ ID NO: 2770266 - RNA, 19 nt, Artificial Sequence
  Description of Artificial Sequence: Synthetic oligonucleotide
ucugcauauuuucaucuau

SEQ ID NO: 2770267 - RNA, 19 nt, Artificial Sequence
  Description of Artificial Sequence: Synthetic oligonucleotide
uuuggcguagaauguuucc

SEQ ID NO: 2770268 - RNA, 19 nt, Artificial Sequence
  Description of Artificial Sequence: Synthetic oligonucleotide
uaauaugauuagcuccuac

SEQ ID NO: 2770269 - RNA, 19 nt, Artificial Sequence
  Description of Artificial Sequence: Synthetic oligonucleotide
ucauaugaacauaccauuu

SEQ ID NO: 2770270 - RNA, 19 nt, Artificial Sequence
  Description of Artificial Sequence: Synthetic oligonucleotide
uuaaucccaauaauuuaau

SEQ ID NO: 2770271 - RNA, 19 nt, Artificial Sequence
  Description of Artificial Sequence: Synthetic oligonucleotide
uacuucaaauguucuuuag

SEQ ID NO: 2770272 - RNA, 19 nt, Artificial Sequence
  Description of Artificial Sequence: Synthetic oligonucleotide
uucccucauaugaacauac

SEQ ID NO: 2770273 - RNA, 19 nt, Artificial Sequence
  Description of Artificial Sequence: Synthetic oligonucleotide
uaacuuggagucucaagga

SEQ ID NO: 2770274 - RNA, 19 nt, Artificial Sequence
  Description of Artificial Sequence: Synthetic oligonucleotide
aucuauuaauuuuguuaag

SEQ ID NO: 2770275 - RNA, 19 nt, Artificial Sequence
  Description of Artificial Sequence: Synthetic oligonucleotide
ucaaauuauuuugcaaccu

SEQ ID NO: 2770276 - RNA, 19 nt, Artificial Sequence
  Description of Artificial Sequence: Synthetic oligonucleotide
  modified_base (19)..(19): a, c, u, g, unknown or other
cuggguauaacucaccggn

SEQ ID NO: 2770277 - RNA, 19 nt, Artificial Sequence
  Description of Artificial Sequence: Synthetic oligonucleotide
auaugauuagcuccuacuu

SEQ ID NO: 2770278 - RNA, 19 nt, Artificial Sequence
  Description of Artificial Sequence: Synthetic oligonucleotide
uacaaauccaguaguuuua

SEQ ID NO: 2770279 - RNA, 19 nt, Artificial Sequence
  Description of Artificial Sequence: Synthetic oligonucleotide
auguucuuauaggaaggcc

SEQ ID NO: 2770280 - RNA, 19 nt, Artificial Sequence
  Description of Artificial Sequence: Synthetic oligonucleotide
uugcaaccuacuuuuaggu

SEQ ID NO: 2770281 - RNA, 19 nt, Artificial Sequence
  Description of Artificial Sequence: Synthetic oligonucleotide
acuggguauaacucaccgg

SEQ ID NO: 2770282 - RNA, 19 nt, Artificial Sequence
  Description of Artificial Sequence: Synthetic oligonucleotide
aauguucuuuagaauauaa

SEQ ID NO: 2770283 - RNA, 19 nt, Artificial Sequence
  Description of Artificial Sequence: Synthetic oligonucleotide
gguccaauguucuuauagg

SEQ ID NO: 2770284 - RNA, 19 nt, Artificial Sequence
  Description of Artificial Sequence: Synthetic oligonucleotide
agguacuugaggccucacc

SEQ ID NO: 2770285 - RNA, 19 nt, Artificial Sequence
  Description of Artificial Sequence: Synthetic oligonucleotide
auauaauaucccaacuuug

SEQ ID NO: 2770286 - RNA, 19 nt, Artificial Sequence
  Description of Artificial Sequence: Synthetic oligonucleotide
auuuacacuuaucuauuaa

SEQ ID NO: 2770287 - RNA, 19 nt, Artificial Sequence
  Description of Artificial Sequence: Synthetic oligonucleotide
uucaaauguucuuuagaau

SEQ ID NO: 2770288 - RNA, 19 nt, Artificial Sequence
  Description of Artificial Sequence: Synthetic oligonucleotide
uaccauuugucauaccuau

SEQ ID NO: 2770289 - RNA, 19 nt, Artificial Sequence
  Description of Artificial Sequence: Synthetic oligonucleotide
cacauuuaauaugauuagc

SEQ ID NO: 2770290 - RNA, 19 nt, Artificial Sequence
  Description of Artificial Sequence: Synthetic oligonucleotide
aaacuggguauaacucacc

SEQ ID NO: 2770291 - RNA, 19 nt, Artificial Sequence
  Description of Artificial Sequence: Synthetic oligonucleotide
ccaauguucuuauaggaag

SEQ ID NO: 2770292 - RNA, 19 nt, Artificial Sequence
  Description of Artificial Sequence: Synthetic oligonucleotide
uacuuuuagguccaauguu

SEQ ID NO: 2770293 - RNA, 19 nt, Artificial Sequence
  Description of Artificial Sequence: Synthetic oligonucleotide
uuguuaaguaaaagcuaga

SEQ ID NO: 2770294 - RNA, 19 nt, Artificial Sequence
  Description of Artificial Sequence: Synthetic oligonucleotide
agucucaaggauauuucac

SEQ ID NO: 2770295 - RNA, 19 nt, Artificial Sequence
  Description of Artificial Sequence: Synthetic oligonucleotide
aacuuggagucucaaggau

SEQ ID NO: 2770296 - RNA, 19 nt, Artificial Sequence
  Description of Artificial Sequence: Synthetic oligonucleotide
uuuagguccaauguucuua

SEQ ID NO: 2770297 - RNA, 19 nt, Artificial Sequence
  Description of Artificial Sequence: Synthetic oligonucleotide
  modified_base (13)..(13): a, c, u, g, unknown or other
auaacucaccggnuuuucc

SEQ ID NO: 2770298 - RNA, 19 nt, Artificial Sequence
  Description of Artificial Sequence: Synthetic oligonucleotide
gagguuuuauucuauaaau

SEQ ID NO: 2770299 - RNA, 19 nt, Artificial Sequence
  Description of Artificial Sequence: Synthetic oligonucleotide
  modified_base (11)..(11): a, c, u, g, unknown or other
aacucaccggnuuuuccca

SEQ ID NO: 2770300 - RNA, 19 nt, Artificial Sequence
  Description of Artificial Sequence: Synthetic oligonucleotide
ugcauauuuucaucuauuu

SEQ ID NO: 2770301 - RNA, 19 nt, Artificial Sequence
  Description of Artificial Sequence: Synthetic oligonucleotide
ucauaccuauuugacagca

SEQ ID NO: 2770302 - RNA, 19 nt, Artificial Sequence
  Description of Artificial Sequence: Synthetic oligonucleotide
ucucaaggauauuucacau

SEQ ID NO: 2770303 - RNA, 19 nt, Artificial Sequence
  Description of Artificial Sequence: Synthetic oligonucleotide
uaaaagcuagaucccgagu

SEQ ID NO: 2770304 - RNA, 19 nt, Artificial Sequence
  Description of Artificial Sequence: Synthetic oligonucleotide
uaagcuuacuuugacuggu

SEQ ID NO: 2770305 - RNA, 19 nt, Artificial Sequence
  Description of Artificial Sequence: Synthetic oligonucleotide
gaaacuggguauaacucac

SEQ ID NO: 2770306 - RNA, 19 nt, Artificial Sequence
  Description of Artificial Sequence: Synthetic oligonucleotide
gauauuucacauucaaaau

SEQ ID NO: 2770307 - RNA, 19 nt, Artificial Sequence
  Description of Artificial Sequence: Synthetic oligonucleotide
ucugagguacuugaggccu

SEQ ID NO: 2770308 - RNA, 19 nt, Artificial Sequence
  Description of Artificial Sequence: Synthetic oligonucleotide
gaauauaauaucccaacuu

SEQ ID NO: 2770309 - RNA, 19 nt, Artificial Sequence
  Description of Artificial Sequence: Synthetic oligonucleotide
aauguuucccucauaugaa

SEQ ID NO: 2770310 - RNA, 19 nt, Artificial Sequence
  Description of Artificial Sequence: Synthetic oligonucleotide
  modified_base (6)..(6): a, c, u, g, unknown or other
accggnuuuucccagucug

SEQ ID NO: 2770311 - RNA, 19 nt, Artificial Sequence
  Description of Artificial Sequence: Synthetic oligonucleotide
cuauuaauuuuguuaagua

SEQ ID NO: 2770312 - RNA, 19 nt, Artificial Sequence
  Description of Artificial Sequence: Synthetic oligonucleotide
uaauuuaauuaaucccaau

SEQ ID NO: 2770313 - RNA, 19 nt, Artificial Sequence
  Description of Artificial Sequence: Synthetic oligonucleotide
cagucugagguacuugagg

SEQ ID NO: 2770314 - RNA, 19 nt, Artificial Sequence
  Description of Artificial Sequence: Synthetic oligonucleotide
gucucaaggauauuucaca

SEQ ID NO: 2770315 - RNA, 19 nt, Artificial Sequence
  Description of Artificial Sequence: Synthetic oligonucleotide
agaauguuucccucauaug

SEQ ID NO: 2770316 - RNA, 19 nt, Artificial Sequence
  Description of Artificial Sequence: Synthetic oligonucleotide
auaaauuuucaaccacaau

SEQ ID NO: 2770317 - RNA, 19 nt, Artificial Sequence
  Description of Artificial Sequence: Synthetic oligonucleotide
gaggccucaccuaacuugg

SEQ ID NO: 2770318 - RNA, 19 nt, Artificial Sequence
  Description of Artificial Sequence: Synthetic oligonucleotide
cauuugucauaccuauuug

SEQ ID NO: 2770319 - RNA, 19 nt, Artificial Sequence
  Description of Artificial Sequence: Synthetic oligonucleotide
uucaaccacaaucccaaua

SEQ ID NO: 2770320 - RNA, 19 nt, Artificial Sequence
  Description of Artificial Sequence: Synthetic oligonucleotide
uauuugacagcaguuuaaa

SEQ ID NO: 2770321 - RNA, 19 nt, Artificial Sequence
  Description of Artificial Sequence: Synthetic oligonucleotide
uuggcguagaauguuuccc

SEQ ID NO: 2770322 - RNA, 19 nt, Artificial Sequence
  Description of Artificial Sequence: Synthetic oligonucleotide
  modified_base (14)..(14): a, c, u, g, unknown or other
uauaacucaccggnuuuuc

SEQ ID NO: 2770323 - RNA, 19 nt, Artificial Sequence
  Description of Artificial Sequence: Synthetic oligonucleotide
auuuucaaccacaauccca

SEQ ID NO: 2770324 - RNA, 19 nt, Artificial Sequence
  Description of Artificial Sequence: Synthetic oligonucleotide
auaggaaggccaugauaag

SEQ ID NO: 2770325 - RNA, 19 nt, Artificial Sequence
  Description of Artificial Sequence: Synthetic oligonucleotide
uuucaucuauuuucuuaga

SEQ ID NO: 2770326 - RNA, 19 nt, Artificial Sequence
  Description of Artificial Sequence: Synthetic oligonucleotide
uuagguccaauguucuuau

SEQ ID NO: 2770327 - RNA, 19 nt, Artificial Sequence
  Description of Artificial Sequence: Synthetic oligonucleotide
ucccaauaauuuaauuaau

SEQ ID NO: 2770328 - RNA, 19 nt, Artificial Sequence
  Description of Artificial Sequence: Synthetic oligonucleotide
uagcuccuacuucaaaugu

SEQ ID NO: 2770329 - RNA, 19 nt, Artificial Sequence
  Description of Artificial Sequence: Synthetic oligonucleotide
caugauaagcuuacuuuga

SEQ ID NO: 2770330 - RNA, 19 nt, Artificial Sequence
  Description of Artificial Sequence: Synthetic oligonucleotide
auaauuuaauuaauacaaa

SEQ ID NO: 2770331 - RNA, 19 nt, Artificial Sequence
  Description of Artificial Sequence: Synthetic oligonucleotide
cauaccauuugucauaccu

SEQ ID NO: 2770332 - RNA, 19 nt, Artificial Sequence
  Description of Artificial Sequence: Synthetic oligonucleotide
cacaaucccaauaauuuaa

SEQ ID NO: 2770333 - RNA, 19 nt, Artificial Sequence
  Description of Artificial Sequence: Synthetic oligonucleotide
uuuucccagucugagguac

SEQ ID NO: 2770334 - RNA, 19 nt, Artificial Sequence
  Description of Artificial Sequence: Synthetic oligonucleotide
gagucucaaggauauuuca

SEQ ID NO: 2770335 - RNA, 19 nt, Artificial Sequence
  Description of Artificial Sequence: Synthetic oligonucleotide
guccaauguucuuauagga

SEQ ID NO: 2770336 - RNA, 19 nt, Artificial Sequence
  Description of Artificial Sequence: Synthetic oligonucleotide
ccuacuuuuagguccaaug

SEQ ID NO: 2770337 - RNA, 19 nt, Artificial Sequence
  Description of Artificial Sequence: Synthetic oligonucleotide
uugcccuguaccccagagg

SEQ ID NO: 2770338 - RNA, 19 nt, Artificial Sequence
  Description of Artificial Sequence: Synthetic oligonucleotide
auugcccuguaccccagag

SEQ ID NO: 2770339 - RNA, 19 nt, Artificial Sequence
  Description of Artificial Sequence: Synthetic oligonucleotide
  modified_base (10)..(10): a, c, u, g, unknown or other
acucaccggnuuuucccag

SEQ ID NO: 2770340 - RNA, 19 nt, Artificial Sequence
  Description of Artificial Sequence: Synthetic oligonucleotide
ccaugauaagcuuacuuug

SEQ ID NO: 2770341 - RNA, 19 nt, Artificial Sequence
  Description of Artificial Sequence: Synthetic oligonucleotide
uaaucccaauaauuuaauu

SEQ ID NO: 2770342 - RNA, 19 nt, Artificial Sequence
  Description of Artificial Sequence: Synthetic oligonucleotide
uggcguagaauguuucccu

SEQ ID NO: 2770343 - RNA, 19 nt, Artificial Sequence
  Description of Artificial Sequence: Synthetic oligonucleotide
aaauguucuuuagaauaua

SEQ ID NO: 2770344 - RNA, 19 nt, Artificial Sequence
  Description of Artificial Sequence: Synthetic oligonucleotide
aaccacaaucccaauaauu

SEQ ID NO: 2770345 - RNA, 19 nt, Artificial Sequence
  Description of Artificial Sequence: Synthetic oligonucleotide
gguuuuauucuauaaauuu

SEQ ID NO: 2770346 - RNA, 19 nt, Artificial Sequence
  Description of Artificial Sequence: Synthetic oligonucleotide
cuuagaaacuggguauaac

SEQ ID NO: 2770347 - RNA, 19 nt, Artificial Sequence
  Description of Artificial Sequence: Synthetic oligonucleotide
aagcuagaucccgaguucu

SEQ ID NO: 2770348 - RNA, 19 nt, Artificial Sequence
  Description of Artificial Sequence: Synthetic oligonucleotide
ucccucauaugaacauacc

SEQ ID NO: 2770349 - RNA, 19 nt, Artificial Sequence
  Description of Artificial Sequence: Synthetic oligonucleotide
aucuauuuucuuagaaacu

SEQ ID NO: 2770350 - RNA, 19 nt, Artificial Sequence
  Description of Artificial Sequence: Synthetic oligonucleotide
ugcaaccuacuuuuagguc

SEQ ID NO: 2770351 - RNA, 19 nt, Artificial Sequence
  Description of Artificial Sequence: Synthetic oligonucleotide
  modified_base (3)..(3): a, c, u, g, unknown or other
ggnuuuucccagucugagg

SEQ ID NO: 2770352 - RNA, 19 nt, Artificial Sequence
  Description of Artificial Sequence: Synthetic oligonucleotide
cauaccuauuugacagcag

SEQ ID NO: 2770353 - RNA, 19 nt, Artificial Sequence
  Description of Artificial Sequence: Synthetic oligonucleotide
auauuauuuucaaauuauu

SEQ ID NO: 2770354 - RNA, 19 nt, Artificial Sequence
  Description of Artificial Sequence: Synthetic oligonucleotide
caaauccaguaguuuuaag

SEQ ID NO: 2770355 - RNA, 19 nt, Artificial Sequence
  Description of Artificial Sequence: Synthetic oligonucleotide
aguaaaagcuagaucccga

SEQ ID NO: 2770356 - RNA, 19 nt, Artificial Sequence
  Description of Artificial Sequence: Synthetic oligonucleotide
acauaccauuugucauacc

SEQ ID NO: 2770357 - RNA, 19 nt, Artificial Sequence
  Description of Artificial Sequence: Synthetic oligonucleotide
uaccuauuugacagcaguu

SEQ ID NO: 2770358 - RNA, 19 nt, Artificial Sequence
  Description of Artificial Sequence: Synthetic oligonucleotide
accccagagguuuuauucu

SEQ ID NO: 2770359 - RNA, 19 nt, Artificial Sequence
  Description of Artificial Sequence: Synthetic oligonucleotide
uaucccaacuuuggcguag

SEQ ID NO: 2770360 - RNA, 19 nt, Artificial Sequence
  Description of Artificial Sequence: Synthetic oligonucleotide
cuuuggcguagaauguuuc

SEQ ID NO: 2770361 - RNA, 19 nt, Artificial Sequence
  Description of Artificial Sequence: Synthetic oligonucleotide
cuauuugacagcaguuuaa

SEQ ID NO: 2770362 - RNA, 19 nt, Artificial Sequence
  Description of Artificial Sequence: Synthetic oligonucleotide
uuacuuugacugguuaaaa

SEQ ID NO: 2770363 - RNA, 19 nt, Artificial Sequence
  Description of Artificial Sequence: Synthetic oligonucleotide
acuuaucuauuaauuuugu

SEQ ID NO: 2770364 - RNA, 19 nt, Artificial Sequence
  Description of Artificial Sequence: Synthetic oligonucleotide
ucaccuaacuuggagucuc

SEQ ID NO: 2770365 - RNA, 19 nt, Artificial Sequence
  Description of Artificial Sequence: Synthetic oligonucleotide
gucugagguacuugaggcc

SEQ ID NO: 2770366 - RNA, 19 nt, Artificial Sequence
  Description of Artificial Sequence: Synthetic oligonucleotide
uccuacuucaaauguucuu

SEQ ID NO: 2770367 - RNA, 19 nt, Artificial Sequence
  Description of Artificial Sequence: Synthetic oligonucleotide
ucuuagaaacuggguauaa

SEQ ID NO: 2770368 - RNA, 19 nt, Artificial Sequence
  Description of Artificial Sequence: Synthetic oligonucleotide
gucauaccuauuugacagc

SEQ ID NO: 2770369 - RNA, 19 nt, Artificial Sequence
  Description of Artificial Sequence: Synthetic oligonucleotide
ugauuagcuccuacuucaa

SEQ ID NO: 2770370 - RNA, 19 nt, Artificial Sequence
  Description of Artificial Sequence: Synthetic oligonucleotide
uucugcauauuuucaucua

SEQ ID NO: 2770371 - RNA, 19 nt, Artificial Sequence
  Description of Artificial Sequence: Synthetic oligonucleotide
guucugcauauuuucaucu

SEQ ID NO: 2770372 - RNA, 19 nt, Artificial Sequence
  Description of Artificial Sequence: Synthetic oligonucleotide
aacuuuggcguagaauguu

SEQ ID NO: 2770373 - RNA, 19 nt, Artificial Sequence
  Description of Artificial Sequence: Synthetic oligonucleotide
cacauucaaaauauuauuu

SEQ ID NO: 2770374 - RNA, 19 nt, Artificial Sequence
  Description of Artificial Sequence: Synthetic oligonucleotide
uucuuagaaacuggguaua

SEQ ID NO: 2770375 - RNA, 19 nt, Artificial Sequence
  Description of Artificial Sequence: Synthetic oligonucleotide
cuacuuuuagguccaaugu

SEQ ID NO: 2770376 - RNA, 19 nt, Artificial Sequence
  Description of Artificial Sequence: Synthetic oligonucleotide
  modified_base (18)..(18): a, c, u, g, unknown or other
uggguauaacucaccggnu

SEQ ID NO: 2770377 - RNA, 19 nt, Artificial Sequence
  Description of Artificial Sequence: Synthetic oligonucleotide
guaguuuuaaguucacauu

SEQ ID NO: 2770378 - RNA, 19 nt, Artificial Sequence
  Description of Artificial Sequence: Synthetic oligonucleotide
uucuuauaggaaggccaug

SEQ ID NO: 2770379 - RNA, 19 nt, Artificial Sequence
  Description of Artificial Sequence: Synthetic oligonucleotide
accuauuugacagcaguuu

SEQ ID NO: 2770380 - RNA, 19 nt, Artificial Sequence
  Description of Artificial Sequence: Synthetic oligonucleotide
caaauguucuuuagaauau

SEQ ID NO: 2770381 - RNA, 19 nt, Artificial Sequence
  Description of Artificial Sequence: Synthetic oligonucleotide
acaaauccaguaguuuuaa

SEQ ID NO: 2770382 - RNA, 19 nt, Artificial Sequence
  Description of Artificial Sequence: Synthetic oligonucleotide
  modified_base (8)..(8): a, c, u, g, unknown or other
ucaccggnuuuucccaguc

SEQ ID NO: 2770383 - RNA, 19 nt, Artificial Sequence
  Description of Artificial Sequence: Synthetic oligonucleotide
auguucuuuagaauauaau

SEQ ID NO: 2770384 - RNA, 19 nt, Artificial Sequence
  Description of Artificial Sequence: Synthetic oligonucleotide
cagagguuuuauucuauaa

SEQ ID NO: 2770385 - RNA, 19 nt, Artificial Sequence
  Description of Artificial Sequence: Synthetic oligonucleotide
ucccgaguucugcauauuu

SEQ ID NO: 2770386 - RNA, 19 nt, Artificial Sequence
  Description of Artificial Sequence: Synthetic oligonucleotide
gguacuugaggccucaccu

SEQ ID NO: 2770387 - RNA, 19 nt, Artificial Sequence
  Description of Artificial Sequence: Synthetic oligonucleotide
gauuagcuccuacuucaaa

SEQ ID NO: 2770388 - RNA, 19 nt, Artificial Sequence
  Description of Artificial Sequence: Synthetic oligonucleotide
cuagaucccgaguucugca

SEQ ID NO: 2770389 - RNA, 19 nt, Artificial Sequence
  Description of Artificial Sequence: Synthetic oligonucleotide
cucauaugaacauaccauu

SEQ ID NO: 2770390 - RNA, 19 nt, Artificial Sequence
  Description of Artificial Sequence: Synthetic oligonucleotide
aauugcccuguaccccaga

SEQ ID NO: 2770391 - RNA, 19 nt, Artificial Sequence
  Description of Artificial Sequence: Synthetic oligonucleotide
cuuuuagguccaauguucu

SEQ ID NO: 2770392 - RNA, 19 nt, Artificial Sequence
  Description of Artificial Sequence: Synthetic oligonucleotide
uuaauaugauuagcuccua

SEQ ID NO: 2770393 - RNA, 19 nt, Artificial Sequence
  Description of Artificial Sequence: Synthetic oligonucleotide
caaggauauuucacauuca

SEQ ID NO: 2770394 - RNA, 19 nt, Artificial Sequence
  Description of Artificial Sequence: Synthetic oligonucleotide
caaccuacuuuuaggucca

SEQ ID NO: 2770395 - RNA, 19 nt, Artificial Sequence
  Description of Artificial Sequence: Synthetic oligonucleotide
uagaucccgaguucugcau

SEQ ID NO: 2770396 - RNA, 19 nt, Artificial Sequence
  Description of Artificial Sequence: Synthetic oligonucleotide
guucacauuuaauaugauu

SEQ ID NO: 2770397 - RNA, 19 nt, Artificial Sequence
  Description of Artificial Sequence: Synthetic oligonucleotide
cuuggagucucaaggauau

SEQ ID NO: 2770398 - RNA, 19 nt, Artificial Sequence
  Description of Artificial Sequence: Synthetic oligonucleotide
ccuaacuuggagucucaag

SEQ ID NO: 2770399 - RNA, 19 nt, Artificial Sequence
  Description of Artificial Sequence: Synthetic oligonucleotide
gaguucugcauauuuucau

SEQ ID NO: 2770400 - RNA, 19 nt, Artificial Sequence
  Description of Artificial Sequence: Synthetic oligonucleotide
aggauauuucacauucaaa

SEQ ID NO: 2770401 - RNA, 19 nt, Artificial Sequence
  Description of Artificial Sequence: Synthetic oligonucleotide
acaaucccaauaauuuaau

SEQ ID NO: 2770402 - RNA, 19 nt, Artificial Sequence
  Description of Artificial Sequence: Synthetic oligonucleotide
ggaauaauuuacacuuauc

SEQ ID NO: 2770403 - RNA, 19 nt, Artificial Sequence
  Description of Artificial Sequence: Synthetic oligonucleotide
aaauugcccuguaccccag

SEQ ID NO: 2770404 - RNA, 19 nt, Artificial Sequence
  Description of Artificial Sequence: Synthetic oligonucleotide
ccgaguucugcauauuuuc

SEQ ID NO: 2770405 - RNA, 19 nt, Artificial Sequence
  Description of Artificial Sequence: Synthetic oligonucleotide
ugagguacuugaggccuca

SEQ ID NO: 2770406 - RNA, 19 nt, Artificial Sequence
  Description of Artificial Sequence: Synthetic oligonucleotide
auaccauuugucauaccua

SEQ ID NO: 2770407 - RNA, 19 nt, Artificial Sequence
  Description of Artificial Sequence: Synthetic oligonucleotide
cuacuucaaauguucuuua

SEQ ID NO: 2770408 - RNA, 19 nt, Artificial Sequence
  Description of Artificial Sequence: Synthetic oligonucleotide
acuugaggccucaccuaac

SEQ ID NO: 2770409 - RNA, 19 nt, Artificial Sequence
  Description of Artificial Sequence: Synthetic oligonucleotide
ccucaccuaacuuggaguc

SEQ ID NO: 2770410 - RNA, 19 nt, Artificial Sequence
  Description of Artificial Sequence: Synthetic oligonucleotide
uugaggccucaccuaacuu

SEQ ID NO: 2770411 - RNA, 19 nt, Artificial Sequence
  Description of Artificial Sequence: Synthetic oligonucleotide
acuuggagucucaaggaua

SEQ ID NO: 2770412 - RNA, 19 nt, Artificial Sequence
  Description of Artificial Sequence: Synthetic oligonucleotide
gaaggccaugauaagcuua

SEQ ID NO: 2770413 - RNA, 19 nt, Artificial Sequence
  Description of Artificial Sequence: Synthetic oligonucleotide
cccaauaauuuaauuaaua

SEQ ID NO: 2770414 - RNA, 19 nt, Artificial Sequence
  Description of Artificial Sequence: Synthetic oligonucleotide
agaucccgaguucugcaua

SEQ ID NO: 2770415 - RNA, 19 nt, Artificial Sequence
  Description of Artificial Sequence: Synthetic oligonucleotide
uuucaaccacaaucccaau

SEQ ID NO: 2770416 - RNA, 19 nt, Artificial Sequence
  Description of Artificial Sequence: Synthetic oligonucleotide
gcuuacuuugacugguuaa

SEQ ID NO: 2770417 - RNA, 19 nt, Artificial Sequence
  Description of Artificial Sequence: Synthetic oligonucleotide
  modified_base (16)..(16): a, c, u, g, unknown or other
gguauaacucaccggnuuu

SEQ ID NO: 2770418 - RNA, 19 nt, Artificial Sequence
  Description of Artificial Sequence: Synthetic oligonucleotide
cuuaucuauuaauuuuguu

SEQ ID NO: 2770419 - RNA, 19 nt, Artificial Sequence
  Description of Artificial Sequence: Synthetic oligonucleotide
uguaccccagagguuuuau

SEQ ID NO: 2770420 - RNA, 19 nt, Artificial Sequence
  Description of Artificial Sequence: Synthetic oligonucleotide
gggaauaauuuacacuuau

SEQ ID NO: 2770421 - RNA, 19 nt, Artificial Sequence
  Description of Artificial Sequence: Synthetic oligonucleotide
gcuagaucccgaguucugc

SEQ ID NO: 2770422 - RNA, 19 nt, Artificial Sequence
  Description of Artificial Sequence: Synthetic oligonucleotide
auuucacauucaaaauauu

SEQ ID NO: 2770423 - RNA, 19 nt, Artificial Sequence
  Description of Artificial Sequence: Synthetic oligonucleotide
cccucauaugaacauacca

SEQ ID NO: 2770424 - RNA, 19 nt, Artificial Sequence
  Description of Artificial Sequence: Synthetic oligonucleotide
auaucccaacuuuggcgua

SEQ ID NO: 2770425 - RNA, 19 nt, Artificial Sequence
  Description of Artificial Sequence: Synthetic oligonucleotide
gccaugauaagcuuacuuu

SEQ ID NO: 2770426 - RNA, 19 nt, Artificial Sequence
  Description of Artificial Sequence: Synthetic oligonucleotide
acuuuggcguagaauguuu

SEQ ID NO: 2770427 - RNA, 19 nt, Artificial Sequence
  Description of Artificial Sequence: Synthetic oligonucleotide
guacuugaggccucaccua

SEQ ID NO: 2770428 - RNA, 19 nt, Artificial Sequence
  Description of Artificial Sequence: Synthetic oligonucleotide
cuugaggccucaccuaacu

SEQ ID NO: 2770429 - RNA, 19 nt, Artificial Sequence
  Description of Artificial Sequence: Synthetic oligonucleotide
ggcguagaauguuucccuc

SEQ ID NO: 2770430 - RNA, 19 nt, Artificial Sequence
  Description of Artificial Sequence: Synthetic oligonucleotide
caacuuuggcguagaaugu

SEQ ID NO: 2770431 - RNA, 19 nt, Artificial Sequence
  Description of Artificial Sequence: Synthetic oligonucleotide
ccucauaugaacauaccau

SEQ ID NO: 2770432 - RNA, 19 nt, Artificial Sequence
  Description of Artificial Sequence: Synthetic oligonucleotide
aguucacauuuaauaugau

SEQ ID NO: 2770433 - RNA, 19 nt, Artificial Sequence
  Description of Artificial Sequence: Synthetic oligonucleotide
agcuagaucccgaguucug

SEQ ID NO: 2770434 - RNA, 19 nt, Artificial Sequence
  Description of Artificial Sequence: Synthetic oligonucleotide
aagcuuacuuugacugguu

SEQ ID NO: 2770435 - RNA, 19 nt, Artificial Sequence
  Description of Artificial Sequence: Synthetic oligonucleotide
caguaguuuuaaguucaca

SEQ ID NO: 2770436 - RNA, 19 nt, Artificial Sequence
  Description of Artificial Sequence: Synthetic oligonucleotide
ccagucugagguacuugag

SEQ ID NO: 2770437 - RNA, 19 nt, Artificial Sequence
  Description of Artificial Sequence: Synthetic oligonucleotide
guagaauguuucccucaua

SEQ ID NO: 2770438 - RNA, 19 nt, Artificial Sequence
  Description of Artificial Sequence: Synthetic oligonucleotide
gcguagaauguuucccuca

SEQ ID NO: 2770439 - RNA, 19 nt, Artificial Sequence
  Description of Artificial Sequence: Synthetic oligonucleotide
ucccaacuuuggcguagaa

SEQ ID NO: 2770440 - RNA, 19 nt, Artificial Sequence
  Description of Artificial Sequence: Synthetic oligonucleotide
ccuauuugacagcaguuua

SEQ ID NO: 2770441 - RNA, 19 nt, Artificial Sequence
  Description of Artificial Sequence: Synthetic oligonucleotide
cugcauauuuucaucuauu

SEQ ID NO: 2770442 - RNA, 19 nt, Artificial Sequence
  Description of Artificial Sequence: Synthetic oligonucleotide
cuuauaggaaggccaugau

SEQ ID NO: 2770443 - RNA, 19 nt, Artificial Sequence
  Description of Artificial Sequence: Synthetic oligonucleotide
ccaguaguuuuaaguucac

SEQ ID NO: 2770444 - RNA, 19 nt, Artificial Sequence
  Description of Artificial Sequence: Synthetic oligonucleotide
caaucccaauaauuuaauu

SEQ ID NO: 2770445 - RNA, 19 nt, Artificial Sequence
  Description of Artificial Sequence: Synthetic oligonucleotide
cccagucugagguacuuga

SEQ ID NO: 2770446 - RNA, 19 nt, Artificial Sequence
  Description of Artificial Sequence: Synthetic oligonucleotide
uagguccaauguucuuaua

SEQ ID NO: 2770447 - RNA, 19 nt, Artificial Sequence
  Description of Artificial Sequence: Synthetic oligonucleotide
uucccagucugagguacuu

SEQ ID NO: 2770448 - RNA, 19 nt, Artificial Sequence
  Description of Artificial Sequence: Synthetic oligonucleotide
cucaaggauauuucacauu

SEQ ID NO: 2770449 - RNA, 19 nt, Artificial Sequence
  Description of Artificial Sequence: Synthetic oligonucleotide
  modified_base (4)..(4): a, c, u, g, unknown or other
cggnuuuucccagucugag

SEQ ID NO: 2770450 - RNA, 19 nt, Artificial Sequence
  Description of Artificial Sequence: Synthetic oligonucleotide
cuccuacuucaaauguucu

SEQ ID NO: 2770451 - RNA, 19 nt, Artificial Sequence
  Description of Artificial Sequence: Synthetic oligonucleotide
accuacuuuuagguccaau

SEQ ID NO: 2770452 - RNA, 19 nt, Artificial Sequence
  Description of Artificial Sequence: Synthetic oligonucleotide
ccauuugucauaccuauuu

SEQ ID NO: 2770453 - RNA, 19 nt, Artificial Sequence
  Description of Artificial Sequence: Synthetic oligonucleotide
auuuugcaaccuacuuuua

SEQ ID NO: 2770454 - RNA, 19 nt, Artificial Sequence
  Description of Artificial Sequence: Synthetic oligonucleotide
accuaacuuggagucucaa

SEQ ID NO: 2770455 - RNA, 19 nt, Artificial Sequence
  Description of Artificial Sequence: Synthetic oligonucleotide
aucccaacuuuggcguaga

SEQ ID NO: 2770456 - RNA, 19 nt, Artificial Sequence
  Description of Artificial Sequence: Synthetic oligonucleotide
  modified_base (15)..(15): a, c, u, g, unknown or other
guauaacucaccggnuuuu

SEQ ID NO: 2770457 - RNA, 19 nt, Artificial Sequence
  Description of Artificial Sequence: Synthetic oligonucleotide
caccuaacuuggagucuca

SEQ ID NO: 2770458 - RNA, 19 nt, Artificial Sequence
  Description of Artificial Sequence: Synthetic oligonucleotide
accauuugucauaccuauu

SEQ ID NO: 2770459 - RNA, 19 nt, Artificial Sequence
  Description of Artificial Sequence: Synthetic oligonucleotide
  modified_base (17)..(17): a, c, u, g, unknown or other
ggguauaacucaccggnuu

SEQ ID NO: 2770460 - RNA, 19 nt, Artificial Sequence
  Description of Artificial Sequence: Synthetic oligonucleotide
gccucaccuaacuuggagu

SEQ ID NO: 2770461 - RNA, 19 nt, Artificial Sequence
  Description of Artificial Sequence: Synthetic oligonucleotide
gagguacuugaggccucac

SEQ ID NO: 2770462 - RNA, 19 nt, Artificial Sequence
  Description of Artificial Sequence: Synthetic oligonucleotide
ggccaugauaagcuuacuu

SEQ ID NO: 2770463 - RNA, 19 nt, Artificial Sequence
  Description of Artificial Sequence: Synthetic oligonucleotide
aggccaugauaagcuuacu

SEQ ID NO: 2770464 - RNA, 19 nt, Artificial Sequence
  Description of Artificial Sequence: Synthetic oligonucleotide
ccuacuucaaauguucuuu

SEQ ID NO: 2770465 - RNA, 19 nt, Artificial Sequence
  Description of Artificial Sequence: Synthetic oligonucleotide
  modified_base (9)..(9): a, c, u, g, unknown or other
cucaccggnuuuucccagu

SEQ ID NO: 2770466 - RNA, 19 nt, Artificial Sequence
  Description of Artificial Sequence: Synthetic oligonucleotide
  modified_base (5)..(5): a, c, u, g, unknown or other
ccggnuuuucccagucuga

SEQ ID NO: 2770467 - RNA, 19 nt, Artificial Sequence
  Description of Artificial Sequence: Synthetic oligonucleotide
caaccacaaucccaauaau

SEQ ID NO: 2770468 - RNA, 19 nt, Artificial Sequence
  Description of Artificial Sequence: Synthetic oligonucleotide
ggggaauaauuuacacuua

SEQ ID NO: 2770469 - RNA, 19 nt, Artificial Sequence
  Description of Artificial Sequence: Synthetic oligonucleotide
ccagagguuuuauucuaua

SEQ ID NO: 2770470 - RNA, 19 nt, Artificial Sequence
  Description of Artificial Sequence: Synthetic oligonucleotide
  modified_base (7)..(7): a, c, u, g, unknown or other
caccggnuuuucccagucu

SEQ ID NO: 2770471 - RNA, 19 nt, Artificial Sequence
  Description of Artificial Sequence: Synthetic oligonucleotide
cucaccuaacuuggagucu

SEQ ID NO: 2770472 - RNA, 19 nt, Artificial Sequence
  Description of Artificial Sequence: Synthetic oligonucleotide
guaccccagagguuuuauu

SEQ ID NO: 2770473 - RNA, 19 nt, Artificial Sequence
  Description of Artificial Sequence: Synthetic oligonucleotide
ggaaggccaugauaagcuu

SEQ ID NO: 2770474 - RNA, 19 nt, Artificial Sequence
  Description of Artificial Sequence: Synthetic oligonucleotide
aucccgaguucugcauauu

SEQ ID NO: 2770475 - RNA, 19 nt, Artificial Sequence
  Description of Artificial Sequence: Synthetic oligonucleotide
ccccagagguuuuauucua

SEQ ID NO: 2770476 - RNA, 19 nt, Artificial Sequence
  Description of Artificial Sequence: Synthetic oligonucleotide
cuguaccccagagguuuua

SEQ ID NO: 2770477 - RNA, 19 nt, Artificial Sequence
  Description of Artificial Sequence: Synthetic oligonucleotide
cccgaguucugcauauuuu

SEQ ID NO: 2770478 - RNA, 19 nt, Artificial Sequence
  Description of Artificial Sequence: Synthetic oligonucleotide
cccagagguuuuauucuau

SEQ ID NO: 2770479 - RNA, 19 nt, Artificial Sequence
  Description of Artificial Sequence: Synthetic oligonucleotide
cccuguaccccagagguuu

SEQ ID NO: 2770480 - RNA, 19 nt, Artificial Sequence
  Description of Artificial Sequence: Synthetic oligonucleotide
cccaacuuuggcguagaau

SEQ ID NO: 2770481 - RNA, 19 nt, Artificial Sequence
  Description of Artificial Sequence: Synthetic oligonucleotide
ccuguaccccagagguuuu

SEQ ID NO: 2770482 - RNA, 19 nt, Artificial Sequence
  Description of Artificial Sequence: Synthetic oligonucleotide
gcccuguaccccagagguu

SEQ ID NO: 2770483 - RNA, 19 nt, Artificial Sequence
  Description of Artificial Sequence: Synthetic oligonucleotide
  modified_base (1)..(1): a, c, u, g, unknown or other
nuuuucccagucugaggua

SEQ ID NO: 2770484 - RNA, 19 nt, Artificial Sequence
  Description of Artificial Sequence: Synthetic oligonucleotide
uccaauacugagaagaugg

SEQ ID NO: 2770485 - RNA, 19 nt, Artificial Sequence
  Description of Artificial Sequence: Synthetic oligonucleotide
uaaucauaagaucaaaugc

SEQ ID NO: 2770486 - RNA, 19 nt, Artificial Sequence
  Description of Artificial Sequence: Synthetic oligonucleotide
uucuuuaugaaguuucucg

SEQ ID NO: 2770487 - RNA, 19 nt, Artificial Sequence
  Description of Artificial Sequence: Synthetic oligonucleotide
uucuuuaaucauaagauca

SEQ ID NO: 2770488 - RNA, 19 nt, Artificial Sequence
  Description of Artificial Sequence: Synthetic oligonucleotide
aauguuguaguuaauuuac

SEQ ID NO: 2770489 - RNA, 19 nt, Artificial Sequence
  Description of Artificial Sequence: Synthetic oligonucleotide
uuaaucauaagaucaaaug

SEQ ID NO: 2770490 - RNA, 19 nt, Artificial Sequence
  Description of Artificial Sequence: Synthetic oligonucleotide
uucaauuucuuuaugaagu

SEQ ID NO: 2770491 - RNA, 19 nt, Artificial Sequence
  Description of Artificial Sequence: Synthetic oligonucleotide
aacaucuuuuauuuucacc

SEQ ID NO: 2770492 - RNA, 19 nt, Artificial Sequence
  Description of Artificial Sequence: Synthetic oligonucleotide
ucacacuucauguacaugg

SEQ ID NO: 2770493 - RNA, 19 nt, Artificial Sequence
  Description of Artificial Sequence: Synthetic oligonucleotide
uuaagugcuucauagagag

SEQ ID NO: 2770494 - RNA, 19 nt, Artificial Sequence
  Description of Artificial Sequence: Synthetic oligonucleotide
uuguaguuaauuuaccagg

SEQ ID NO: 2770495 - RNA, 19 nt, Artificial Sequence
  Description of Artificial Sequence: Synthetic oligonucleotide
uucuuuaagugcuucauag

SEQ ID NO: 2770496 - RNA, 19 nt, Artificial Sequence
  Description of Artificial Sequence: Synthetic oligonucleotide
acaucuuuuauuuucaccu

SEQ ID NO: 2770497 - RNA, 19 nt, Artificial Sequence
  Description of Artificial Sequence: Synthetic oligonucleotide
uuuacaauguuguaguuaa

SEQ ID NO: 2770498 - RNA, 19 nt, Artificial Sequence
  Description of Artificial Sequence: Synthetic oligonucleotide
aauuaccucugccauguac

SEQ ID NO: 2770499 - RNA, 19 nt, Artificial Sequence
  Description of Artificial Sequence: Synthetic oligonucleotide
aguucuuagauguuaacug

SEQ ID NO: 2770500 - RNA, 19 nt, Artificial Sequence
  Description of Artificial Sequence: Synthetic oligonucleotide
ucaacaguuuccaauucgg

SEQ ID NO: 2770501 - RNA, 19 nt, Artificial Sequence
  Description of Artificial Sequence: Synthetic oligonucleotide
ucaaauuccugacuauccg

SEQ ID NO: 2770502 - RNA, 19 nt, Artificial Sequence
  Description of Artificial Sequence: Synthetic oligonucleotide
cauaagaucaaaugcuucc

SEQ ID NO: 2770503 - RNA, 19 nt, Artificial Sequence
  Description of Artificial Sequence: Synthetic oligonucleotide
aaucauaagaucaaaugcu

SEQ ID NO: 2770504 - RNA, 19 nt, Artificial Sequence
  Description of Artificial Sequence: Synthetic oligonucleotide
uaguuaauuuaccaggagc

SEQ ID NO: 2770505 - RNA, 19 nt, Artificial Sequence
  Description of Artificial Sequence: Synthetic oligonucleotide
uucgaagcuauccagaggu

SEQ ID NO: 2770506 - RNA, 19 nt, Artificial Sequence
  Description of Artificial Sequence: Synthetic oligonucleotide
agagguucaugacucagcc

SEQ ID NO: 2770507 - RNA, 19 nt, Artificial Sequence
  Description of Artificial Sequence: Synthetic oligonucleotide
uuauuuucaccuaagcuuc

SEQ ID NO: 2770508 - RNA, 19 nt, Artificial Sequence
  Description of Artificial Sequence: Synthetic oligonucleotide
agguucaugacucagccuc

SEQ ID NO: 2770509 - RNA, 19 nt, Artificial Sequence
  Description of Artificial Sequence: Synthetic oligonucleotide
cuuuaagugcuucauagag

SEQ ID NO: 2770510 - RNA, 19 nt, Artificial Sequence
  Description of Artificial Sequence: Synthetic oligonucleotide
uucggaaucaaauuccuga

SEQ ID NO: 2770511 - RNA, 19 nt, Artificial Sequence
  Description of Artificial Sequence: Synthetic oligonucleotide
uuuaccaggagcuguagug

SEQ ID NO: 2770512 - RNA, 19 nt, Artificial Sequence
  Description of Artificial Sequence: Synthetic oligonucleotide
aguggaggaagacacaguc

SEQ ID NO: 2770513 - RNA, 19 nt, Artificial Sequence
  Description of Artificial Sequence: Synthetic oligonucleotide
aaucaaauuccugacuauc

SEQ ID NO: 2770514 - RNA, 19 nt, Artificial Sequence
  Description of Artificial Sequence: Synthetic oligonucleotide
uagugcagggcaaaguugg

SEQ ID NO: 2770515 - RNA, 19 nt, Artificial Sequence
  Description of Artificial Sequence: Synthetic oligonucleotide
uguaguuaauuuaccagga

SEQ ID NO: 2770516 - RNA, 19 nt, Artificial Sequence
  Description of Artificial Sequence: Synthetic oligonucleotide
acuucuuuccaauacugag

SEQ ID NO: 2770517 - RNA, 19 nt, Artificial Sequence
  Description of Artificial Sequence: Synthetic oligonucleotide
uuuaaucauaagaucaaau

SEQ ID NO: 2770518 - RNA, 19 nt, Artificial Sequence
  Description of Artificial Sequence: Synthetic oligonucleotide
aauuucacuguccuucugu

SEQ ID NO: 2770519 - RNA, 19 nt, Artificial Sequence
  Description of Artificial Sequence: Synthetic oligonucleotide
guucuuagauguuaacugg

SEQ ID NO: 2770520 - RNA, 19 nt, Artificial Sequence
  Description of Artificial Sequence: Synthetic oligonucleotide
uucacuguccuucuguuca

SEQ ID NO: 2770521 - RNA, 19 nt, Artificial Sequence
  Description of Artificial Sequence: Synthetic oligonucleotide
ucauagagagcuuuccucc

SEQ ID NO: 2770522 - RNA, 19 nt, Artificial Sequence
  Description of Artificial Sequence: Synthetic oligonucleotide
aagacacagucucuucagc

SEQ ID NO: 2770523 - RNA, 19 nt, Artificial Sequence
  Description of Artificial Sequence: Synthetic oligonucleotide
uucagaauccucaacaguu

SEQ ID NO: 2770524 - RNA, 19 nt, Artificial Sequence
  Description of Artificial Sequence: Synthetic oligonucleotide
uaacuggucauuccaaagc

SEQ ID NO: 2770525 - RNA, 19 nt, Artificial Sequence
  Description of Artificial Sequence: Synthetic oligonucleotide
ucaccuaagcuucuggacc

SEQ ID NO: 2770526 - RNA, 19 nt, Artificial Sequence
  Description of Artificial Sequence: Synthetic oligonucleotide
uguaccucacacuucaugu

SEQ ID NO: 2770527 - RNA, 19 nt, Artificial Sequence
  Description of Artificial Sequence: Synthetic oligonucleotide
caauucggaaucaaauucc

SEQ ID NO: 2770528 - RNA, 19 nt, Artificial Sequence
  Description of Artificial Sequence: Synthetic oligonucleotide
ucucguuuucuuuaagugc

SEQ ID NO: 2770529 - RNA, 19 nt, Artificial Sequence
  Description of Artificial Sequence: Synthetic oligonucleotide
uuuaagugcuucauagaga

SEQ ID NO: 2770530 - RNA, 19 nt, Artificial Sequence
  Description of Artificial Sequence: Synthetic oligonucleotide
gauggguuuucuuuaauca

SEQ ID NO: 2770531 - RNA, 19 nt, Artificial Sequence
  Description of Artificial Sequence: Synthetic oligonucleotide
uucuuuccaauacugagaa

SEQ ID NO: 2770532 - RNA, 19 nt, Artificial Sequence
  Description of Artificial Sequence: Synthetic oligonucleotide
uuaacuggucauuccaaag

SEQ ID NO: 2770533 - RNA, 19 nt, Artificial Sequence
  Description of Artificial Sequence: Synthetic oligonucleotide
uucucguuuucuuuaagug

SEQ ID NO: 2770534 - RNA, 19 nt, Artificial Sequence
  Description of Artificial Sequence: Synthetic oligonucleotide
aacaguuuccaauucggaa

SEQ ID NO: 2770535 - RNA, 19 nt, Artificial Sequence
  Description of Artificial Sequence: Synthetic oligonucleotide
uuuucaccuaagcuucugg

SEQ ID NO: 2770536 - RNA, 19 nt, Artificial Sequence
  Description of Artificial Sequence: Synthetic oligonucleotide
gauucgaagcuauccagag

SEQ ID NO: 2770537 - RNA, 19 nt, Artificial Sequence
  Description of Artificial Sequence: Synthetic oligonucleotide
ucuuuaaucauaagaucaa

SEQ ID NO: 2770538 - RNA, 19 nt, Artificial Sequence
  Description of Artificial Sequence: Synthetic oligonucleotide
aucaaauuccugacuaucc

SEQ ID NO: 2770539 - RNA, 19 nt, Artificial Sequence
  Description of Artificial Sequence: Synthetic oligonucleotide
aaaguuggcaguguaccuc

SEQ ID NO: 2770540 - RNA, 19 nt, Artificial Sequence
  Description of Artificial Sequence: Synthetic oligonucleotide
uccaacaucuuuuauuuuc

SEQ ID NO: 2770541 - RNA, 19 nt, Artificial Sequence
  Description of Artificial Sequence: Synthetic oligonucleotide
agaucaaaugcuuccuggg

SEQ ID NO: 2770542 - RNA, 19 nt, Artificial Sequence
  Description of Artificial Sequence: Synthetic oligonucleotide
agauggguuuucuuuaauc

SEQ ID NO: 2770543 - RNA, 19 nt, Artificial Sequence
  Description of Artificial Sequence: Synthetic oligonucleotide
uuucuuuaaucauaagauc

SEQ ID NO: 2770544 - RNA, 19 nt, Artificial Sequence
  Description of Artificial Sequence: Synthetic oligonucleotide
uuuaugaaguuucucguuu

SEQ ID NO: 2770545 - RNA, 19 nt, Artificial Sequence
  Description of Artificial Sequence: Synthetic oligonucleotide
augugcuaguuucugaguc

SEQ ID NO: 2770546 - RNA, 19 nt, Artificial Sequence
  Description of Artificial Sequence: Synthetic oligonucleotide
aaguucuuagauguuaacu

SEQ ID NO: 2770547 - RNA, 19 nt, Artificial Sequence
  Description of Artificial Sequence: Synthetic oligonucleotide
aguuaauuuaccaggagcu

SEQ ID NO: 2770548 - RNA, 19 nt, Artificial Sequence
  Description of Artificial Sequence: Synthetic oligonucleotide
aauacugagaagauggguu

SEQ ID NO: 2770549 - RNA, 19 nt, Artificial Sequence
  Description of Artificial Sequence: Synthetic oligonucleotide
uggaggaagacacagucuc

SEQ ID NO: 2770550 - RNA, 19 nt, Artificial Sequence
  Description of Artificial Sequence: Synthetic oligonucleotide
auguacaugguuuggcauc

SEQ ID NO: 2770551 - RNA, 19 nt, Artificial Sequence
  Description of Artificial Sequence: Synthetic oligonucleotide
cuuuccaauacugagaaga

SEQ ID NO: 2770552 - RNA, 19 nt, Artificial Sequence
  Description of Artificial Sequence: Synthetic oligonucleotide
acaugugcuaguuucugag

SEQ ID NO: 2770553 - RNA, 19 nt, Artificial Sequence
  Description of Artificial Sequence: Synthetic oligonucleotide
gauguuaacuggucauucc

SEQ ID NO: 2770554 - RNA, 19 nt, Artificial Sequence
  Description of Artificial Sequence: Synthetic oligonucleotide
caaauuccugacuauccgg

SEQ ID NO: 2770555 - RNA, 19 nt, Artificial Sequence
  Description of Artificial Sequence: Synthetic oligonucleotide
ugcuacuucugccaauucc

SEQ ID NO: 2770556 - RNA, 19 nt, Artificial Sequence
  Description of Artificial Sequence: Synthetic oligonucleotide
uauccagagguucaugacu

SEQ ID NO: 2770557 - RNA, 19 nt, Artificial Sequence
  Description of Artificial Sequence: Synthetic oligonucleotide
gaagacacagucucuucag

SEQ ID NO: 2770558 - RNA, 19 nt, Artificial Sequence
  Description of Artificial Sequence: Synthetic oligonucleotide
uuaauuuaccaggagcugu

SEQ ID NO: 2770559 - RNA, 19 nt, Artificial Sequence
  Description of Artificial Sequence: Synthetic oligonucleotide
ugagucuuccacuucagaa

SEQ ID NO: 2770560 - RNA, 19 nt, Artificial Sequence
  Description of Artificial Sequence: Synthetic oligonucleotide
caucaguggaggaagacac

SEQ ID NO: 2770561 - RNA, 19 nt, Artificial Sequence
  Description of Artificial Sequence: Synthetic oligonucleotide
ucuccaacaucuuuuauuu

SEQ ID NO: 2770562 - RNA, 19 nt, Artificial Sequence
  Description of Artificial Sequence: Synthetic oligonucleotide
aucaaaugcuuccugggug

SEQ ID NO: 2770563 - RNA, 19 nt, Artificial Sequence
  Description of Artificial Sequence: Synthetic oligonucleotide
uuccaauucggaaucaaau

SEQ ID NO: 2770564 - RNA, 19 nt, Artificial Sequence
  Description of Artificial Sequence: Synthetic oligonucleotide
ucaauuaccucugccaugu

SEQ ID NO: 2770565 - RNA, 19 nt, Artificial Sequence
  Description of Artificial Sequence: Synthetic oligonucleotide
acaguuuccaauucggaau

SEQ ID NO: 2770566 - RNA, 19 nt, Artificial Sequence
  Description of Artificial Sequence: Synthetic oligonucleotide
uguucugcuacuucugcca

SEQ ID NO: 2770567 - RNA, 19 nt, Artificial Sequence
  Description of Artificial Sequence: Synthetic oligonucleotide
cucaacaguuuccaauucg

SEQ ID NO: 2770568 - RNA, 19 nt, Artificial Sequence
  Description of Artificial Sequence: Synthetic oligonucleotide
uuucucguuuucuuuaagu

SEQ ID NO: 2770569 - RNA, 19 nt, Artificial Sequence
  Description of Artificial Sequence: Synthetic oligonucleotide
uucauagagagcuuuccuc

SEQ ID NO: 2770570 - RNA, 19 nt, Artificial Sequence
  Description of Artificial Sequence: Synthetic oligonucleotide
ucaaaugcuuccuggguga

SEQ ID NO: 2770571 - RNA, 19 nt, Artificial Sequence
  Description of Artificial Sequence: Synthetic oligonucleotide
uucuuagauguuaacuggu

SEQ ID NO: 2770572 - RNA, 19 nt, Artificial Sequence
  Description of Artificial Sequence: Synthetic oligonucleotide
uauccggugauucgaagcu

SEQ ID NO: 2770573 - RNA, 19 nt, Artificial Sequence
  Description of Artificial Sequence: Synthetic oligonucleotide
uuucaggcgggcaauuuca

SEQ ID NO: 2770574 - RNA, 19 nt, Artificial Sequence
  Description of Artificial Sequence: Synthetic oligonucleotide
acuucauguacaugguuug

SEQ ID NO: 2770575 - RNA, 19 nt, Artificial Sequence
  Description of Artificial Sequence: Synthetic oligonucleotide
ugaaguucuuagauguuaa

SEQ ID NO: 2770576 - RNA, 19 nt, Artificial Sequence
  Description of Artificial Sequence: Synthetic oligonucleotide
ucauguacaugguuuggca

SEQ ID NO: 2770577 - RNA, 19 nt, Artificial Sequence
  Description of Artificial Sequence: Synthetic oligonucleotide
uguacuguacguguucugc

SEQ ID NO: 2770578 - RNA, 19 nt, Artificial Sequence
  Description of Artificial Sequence: Synthetic oligonucleotide
uguagugcagggcaaaguu

SEQ ID NO: 2770579 - RNA, 19 nt, Artificial Sequence
  Description of Artificial Sequence: Synthetic oligonucleotide
cagagcuugaaguucuuag

SEQ ID NO: 2770580 - RNA, 19 nt, Artificial Sequence
  Description of Artificial Sequence: Synthetic oligonucleotide
uuggcaguguaccucacac

SEQ ID NO: 2770581 - RNA, 19 nt, Artificial Sequence
  Description of Artificial Sequence: Synthetic oligonucleotide
ucugccaauuccuuauucu

SEQ ID NO: 2770582 - RNA, 19 nt, Artificial Sequence
  Description of Artificial Sequence: Synthetic oligonucleotide
ucucaauuaccucugccau

SEQ ID NO: 2770583 - RNA, 19 nt, Artificial Sequence
  Description of Artificial Sequence: Synthetic oligonucleotide
acaauguuguaguuaauuu

SEQ ID NO: 2770584 - RNA, 19 nt, Artificial Sequence
  Description of Artificial Sequence: Synthetic oligonucleotide
uguccuucuguucaauuuc

SEQ ID NO: 2770585 - RNA, 19 nt, Artificial Sequence
  Description of Artificial Sequence: Synthetic oligonucleotide
ucuuuaagugcuucauaga

SEQ ID NO: 2770586 - RNA, 19 nt, Artificial Sequence
  Description of Artificial Sequence: Synthetic oligonucleotide
cuauccggugauucgaagc

SEQ ID NO: 2770587 - RNA, 19 nt, Artificial Sequence
  Description of Artificial Sequence: Synthetic oligonucleotide
aauuccugacuauccggug

SEQ ID NO: 2770588 - RNA, 19 nt, Artificial Sequence
  Description of Artificial Sequence: Synthetic oligonucleotide
ucugccauguacuguacgu

SEQ ID NO: 2770589 - RNA, 19 nt, Artificial Sequence
  Description of Artificial Sequence: Synthetic oligonucleotide
aaguuggcaguguaccuca

SEQ ID NO: 2770590 - RNA, 19 nt, Artificial Sequence
  Description of Artificial Sequence: Synthetic oligonucleotide
ucuuagauguuaacugguc

SEQ ID NO: 2770591 - RNA, 19 nt, Artificial Sequence
  Description of Artificial Sequence: Synthetic oligonucleotide
agaauccucaacaguuucc

SEQ ID NO: 2770592 - RNA, 19 nt, Artificial Sequence
  Description of Artificial Sequence: Synthetic oligonucleotide
uuucaccuaagcuucugga

SEQ ID NO: 2770593 - RNA, 19 nt, Artificial Sequence
  Description of Artificial Sequence: Synthetic oligonucleotide
cauuccaaagcuuccuuug

SEQ ID NO: 2770594 - RNA, 19 nt, Artificial Sequence
  Description of Artificial Sequence: Synthetic oligonucleotide
agauguuaacuggucauuc

SEQ ID NO: 2770595 - RNA, 19 nt, Artificial Sequence
  Description of Artificial Sequence: Synthetic oligonucleotide
ucuguucaauuucuuuaug

SEQ ID NO: 2770596 - RNA, 19 nt, Artificial Sequence
  Description of Artificial Sequence: Synthetic oligonucleotide
ucuucagcacaugugcuag

SEQ ID NO: 2770597 - RNA, 19 nt, Artificial Sequence
  Description of Artificial Sequence: Synthetic oligonucleotide
uacguguucugcuacuucu

SEQ ID NO: 2770598 - RNA, 19 nt, Artificial Sequence
  Description of Artificial Sequence: Synthetic oligonucleotide
auguuaacuggucauucca

SEQ ID NO: 2770599 - RNA, 19 nt, Artificial Sequence
  Description of Artificial Sequence: Synthetic oligonucleotide
aaguuucucguuuucuuua

SEQ ID NO: 2770600 - RNA, 19 nt, Artificial Sequence
  Description of Artificial Sequence: Synthetic oligonucleotide
aauuccuuauucuccuuuu

SEQ ID NO: 2770601 - RNA, 19 nt, Artificial Sequence
  Description of Artificial Sequence: Synthetic oligonucleotide
guaguuaauuuaccaggag

SEQ ID NO: 2770602 - RNA, 19 nt, Artificial Sequence
  Description of Artificial Sequence: Synthetic oligonucleotide
aaugcuuccugggugacau

SEQ ID NO: 2770603 - RNA, 19 nt, Artificial Sequence
  Description of Artificial Sequence: Synthetic oligonucleotide
uaguuucugagucuuccac

SEQ ID NO: 2770604 - RNA, 19 nt, Artificial Sequence
  Description of Artificial Sequence: Synthetic oligonucleotide
auucgaagcuauccagagg

SEQ ID NO: 2770605 - RNA, 19 nt, Artificial Sequence
  Description of Artificial Sequence: Synthetic oligonucleotide
aaauuccugacuauccggu

SEQ ID NO: 2770606 - RNA, 19 nt, Artificial Sequence
  Description of Artificial Sequence: Synthetic oligonucleotide
cugacuauccggugauucg

SEQ ID NO: 2770607 - RNA, 19 nt, Artificial Sequence
  Description of Artificial Sequence: Synthetic oligonucleotide
gugauucgaagcuauccag

SEQ ID NO: 2770608 - RNA, 19 nt, Artificial Sequence
  Description of Artificial Sequence: Synthetic oligonucleotide
uuuuacaauguuguaguua

SEQ ID NO: 2770609 - RNA, 19 nt, Artificial Sequence
  Description of Artificial Sequence: Synthetic oligonucleotide
uggguuuucuuuaaucaua

SEQ ID NO: 2770610 - RNA, 19 nt, Artificial Sequence
  Description of Artificial Sequence: Synthetic oligonucleotide
uaccucacacuucauguac

SEQ ID NO: 2770611 - RNA, 19 nt, Artificial Sequence
  Description of Artificial Sequence: Synthetic oligonucleotide
uguuaacuggucauuccaa

SEQ ID NO: 2770612 - RNA, 19 nt, Artificial Sequence
  Description of Artificial Sequence: Synthetic oligonucleotide
cauagagagcuuuccuccg

SEQ ID NO: 2770613 - RNA, 19 nt, Artificial Sequence
  Description of Artificial Sequence: Synthetic oligonucleotide
aauucggaaucaaauuccu

SEQ ID NO: 2770614 - RNA, 19 nt, Artificial Sequence
  Description of Artificial Sequence: Synthetic oligonucleotide
uucaccuaagcuucuggac

SEQ ID NO: 2770615 - RNA, 19 nt, Artificial Sequence
  Description of Artificial Sequence: Synthetic oligonucleotide
agcuugaaguucuuagaug

SEQ ID NO: 2770616 - RNA, 19 nt, Artificial Sequence
  Description of Artificial Sequence: Synthetic oligonucleotide
cuaagcuucuggaccagag

SEQ ID NO: 2770617 - RNA, 19 nt, Artificial Sequence
  Description of Artificial Sequence: Synthetic oligonucleotide
agagcuugaaguucuuaga

SEQ ID NO: 2770618 - RNA, 19 nt, Artificial Sequence
  Description of Artificial Sequence: Synthetic oligonucleotide
uuuccaauucggaaucaaa

SEQ ID NO: 2770619 - RNA, 19 nt, Artificial Sequence
  Description of Artificial Sequence: Synthetic oligonucleotide
ucggaaucaaauuccugac

SEQ ID NO: 2770620 - RNA, 19 nt, Artificial Sequence
  Description of Artificial Sequence: Synthetic oligonucleotide
uccaauucggaaucaaauu

SEQ ID NO: 2770621 - RNA, 19 nt, Artificial Sequence
  Description of Artificial Sequence: Synthetic oligonucleotide
uuuccaauacugagaagau

SEQ ID NO: 2770622 - RNA, 19 nt, Artificial Sequence
  Description of Artificial Sequence: Synthetic oligonucleotide
uucauguacaugguuuggc

SEQ ID NO: 2770623 - RNA, 19 nt, Artificial Sequence
  Description of Artificial Sequence: Synthetic oligonucleotide
cuggucauuccaaagcuuc

SEQ ID NO: 2770624 - RNA, 19 nt, Artificial Sequence
  Description of Artificial Sequence: Synthetic oligonucleotide
uaauuuaccaggagcugua

SEQ ID NO: 2770625 - RNA, 19 nt, Artificial Sequence
  Description of Artificial Sequence: Synthetic oligonucleotide
uuuucaggcgggcaauuuc

SEQ ID NO: 2770626 - RNA, 19 nt, Artificial Sequence
  Description of Artificial Sequence: Synthetic oligonucleotide
aguuucugagucuuccacu

SEQ ID NO: 2770627 - RNA, 19 nt, Artificial Sequence
  Description of Artificial Sequence: Synthetic oligonucleotide
uccaaagcuuccuuuggac

SEQ ID NO: 2770628 - RNA, 19 nt, Artificial Sequence
  Description of Artificial Sequence: Synthetic oligonucleotide
uacaauguuguaguuaauu

SEQ ID NO: 2770629 - RNA, 19 nt, Artificial Sequence
  Description of Artificial Sequence: Synthetic oligonucleotide
agacacagucucuucagca

SEQ ID NO: 2770630 - RNA, 19 nt, Artificial Sequence
  Description of Artificial Sequence: Synthetic oligonucleotide
uaugaaguuucucguuuuc

SEQ ID NO: 2770631 - RNA, 19 nt, Artificial Sequence
  Description of Artificial Sequence: Synthetic oligonucleotide
gacucagccucucaauuac

SEQ ID NO: 2770632 - RNA, 19 nt, Artificial Sequence
  Description of Artificial Sequence: Synthetic oligonucleotide
ugaaguuucucguuuucuu

SEQ ID NO: 2770633 - RNA, 19 nt, Artificial Sequence
  Description of Artificial Sequence: Synthetic oligonucleotide
gacacagucucuucagcac

SEQ ID NO: 2770634 - RNA, 19 nt, Artificial Sequence
  Description of Artificial Sequence: Synthetic oligonucleotide
auguuguaguuaauuuacc

SEQ ID NO: 2770635 - RNA, 19 nt, Artificial Sequence
  Description of Artificial Sequence: Synthetic oligonucleotide
uuccaaagcuuccuuugga

SEQ ID NO: 2770636 - RNA, 19 nt, Artificial Sequence
  Description of Artificial Sequence: Synthetic oligonucleotide
uuucuuuaagugcuucaua

SEQ ID NO: 2770637 - RNA, 19 nt, Artificial Sequence
  Description of Artificial Sequence: Synthetic oligonucleotide
ugugcuaguuucugagucu

SEQ ID NO: 2770638 - RNA, 19 nt, Artificial Sequence
  Description of Artificial Sequence: Synthetic oligonucleotide
uguacaugguuuggcauca

SEQ ID NO: 2770639 - RNA, 19 nt, Artificial Sequence
  Description of Artificial Sequence: Synthetic oligonucleotide
cuguucaauuucuuuauga

SEQ ID NO: 2770640 - RNA, 19 nt, Artificial Sequence
  Description of Artificial Sequence: Synthetic oligonucleotide
aagcuuccuuuggacaagc

SEQ ID NO: 2770641 - RNA, 19 nt, Artificial Sequence
  Description of Artificial Sequence: Synthetic oligonucleotide
ucugagucuuccacuucag

SEQ ID NO: 2770642 - RNA, 19 nt, Artificial Sequence
  Description of Artificial Sequence: Synthetic oligonucleotide
cuuagauguuaacugguca

SEQ ID NO: 2770643 - RNA, 19 nt, Artificial Sequence
  Description of Artificial Sequence: Synthetic oligonucleotide
ugccacuucuuuccaauac

SEQ ID NO: 2770644 - RNA, 19 nt, Artificial Sequence
  Description of Artificial Sequence: Synthetic oligonucleotide
auuaccucugccauguacu

SEQ ID NO: 2770645 - RNA, 19 nt, Artificial Sequence
  Description of Artificial Sequence: Synthetic oligonucleotide
gaaguucuuagauguuaac

SEQ ID NO: 2770646 - RNA, 19 nt, Artificial Sequence
  Description of Artificial Sequence: Synthetic oligonucleotide
caggcgggcaauuucacug

SEQ ID NO: 2770647 - RNA, 19 nt, Artificial Sequence
  Description of Artificial Sequence: Synthetic oligonucleotide
auuccugacuauccgguga

SEQ ID NO: 2770648 - RNA, 19 nt, Artificial Sequence
  Description of Artificial Sequence: Synthetic oligonucleotide
aauuuaccaggagcuguag

SEQ ID NO: 2770649 - RNA, 19 nt, Artificial Sequence
  Description of Artificial Sequence: Synthetic oligonucleotide
cucucaauuaccucugcca

SEQ ID NO: 2770650 - RNA, 19 nt, Artificial Sequence
  Description of Artificial Sequence: Synthetic oligonucleotide
auaagaucaaaugcuuccu

SEQ ID NO: 2770651 - RNA, 19 nt, Artificial Sequence
  Description of Artificial Sequence: Synthetic oligonucleotide
cuucuuuccaauacugaga

SEQ ID NO: 2770652 - RNA, 19 nt, Artificial Sequence
  Description of Artificial Sequence: Synthetic oligonucleotide
cagcacaugugcuaguuuc

SEQ ID NO: 2770653 - RNA, 19 nt, Artificial Sequence
  Description of Artificial Sequence: Synthetic oligonucleotide
uggucauuccaaagcuucc

SEQ ID NO: 2770654 - RNA, 19 nt, Artificial Sequence
  Description of Artificial Sequence: Synthetic oligonucleotide
uccucaacaguuuccaauu

SEQ ID NO: 2770655 - RNA, 19 nt, Artificial Sequence
  Description of Artificial Sequence: Synthetic oligonucleotide
ucaugacucagccucucaa

SEQ ID NO: 2770656 - RNA, 19 nt, Artificial Sequence
  Description of Artificial Sequence: Synthetic oligonucleotide
auccagagguucaugacuc

SEQ ID NO: 2770657 - RNA, 19 nt, Artificial Sequence
  Description of Artificial Sequence: Synthetic oligonucleotide
ucuggaccagagcuugaag

SEQ ID NO: 2770658 - RNA, 19 nt, Artificial Sequence
  Description of Artificial Sequence: Synthetic oligonucleotide
ugccauguacuguacgugu

SEQ ID NO: 2770659 - RNA, 19 nt, Artificial Sequence
  Description of Artificial Sequence: Synthetic oligonucleotide
uugaaguucuuagauguua

SEQ ID NO: 2770660 - RNA, 19 nt, Artificial Sequence
  Description of Artificial Sequence: Synthetic oligonucleotide
cuucuguucaauuucuuua

SEQ ID NO: 2770661 - RNA, 19 nt, Artificial Sequence
  Description of Artificial Sequence: Synthetic oligonucleotide
guuaauuuaccaggagcug

SEQ ID NO: 2770662 - RNA, 19 nt, Artificial Sequence
  Description of Artificial Sequence: Synthetic oligonucleotide
auccucaacaguuuccaau

SEQ ID NO: 2770663 - RNA, 19 nt, Artificial Sequence
  Description of Artificial Sequence: Synthetic oligonucleotide
ucucuucagcacaugugcu

SEQ ID NO: 2770664 - RNA, 19 nt, Artificial Sequence
  Description of Artificial Sequence: Synthetic oligonucleotide
auggguuuucuuuaaucau

SEQ ID NO: 2770665 - RNA, 19 nt, Artificial Sequence
  Description of Artificial Sequence: Synthetic oligonucleotide
gaauccucaacaguuucca

SEQ ID NO: 2770666 - RNA, 19 nt, Artificial Sequence
  Description of Artificial Sequence: Synthetic oligonucleotide
acaugguuuggcaucagug

SEQ ID NO: 2770667 - RNA, 19 nt, Artificial Sequence
  Description of Artificial Sequence: Synthetic oligonucleotide
caauguuguaguuaauuua

SEQ ID NO: 2770668 - RNA, 19 nt, Artificial Sequence
  Description of Artificial Sequence: Synthetic oligonucleotide
uuaugaaguuucucguuuu

SEQ ID NO: 2770669 - RNA, 19 nt, Artificial Sequence
  Description of Artificial Sequence: Synthetic oligonucleotide
ucagaauccucaacaguuu

SEQ ID NO: 2770670 - RNA, 19 nt, Artificial Sequence
  Description of Artificial Sequence: Synthetic oligonucleotide
cuauccagagguucaugac

SEQ ID NO: 2770671 - RNA, 19 nt, Artificial Sequence
  Description of Artificial Sequence: Synthetic oligonucleotide
cugccaauuccuuauucuc

SEQ ID NO: 2770672 - RNA, 19 nt, Artificial Sequence
  Description of Artificial Sequence: Synthetic oligonucleotide
auacugagaagauggguuu

SEQ ID NO: 2770673 - RNA, 19 nt, Artificial Sequence
  Description of Artificial Sequence: Synthetic oligonucleotide
cagagguucaugacucagc

SEQ ID NO: 2770674 - RNA, 19 nt, Artificial Sequence
  Description of Artificial Sequence: Synthetic oligonucleotide
ccaauucggaaucaaauuc

SEQ ID NO: 2770675 - RNA, 19 nt, Artificial Sequence
  Description of Artificial Sequence: Synthetic oligonucleotide
acugagaagauggguuuuc

SEQ ID NO: 2770676 - RNA, 19 nt, Artificial Sequence
  Description of Artificial Sequence: Synthetic oligonucleotide
ggaaucaaauuccugacua

SEQ ID NO: 2770677 - RNA, 19 nt, Artificial Sequence
  Description of Artificial Sequence: Synthetic oligonucleotide
gaagcuauccagagguuca

SEQ ID NO: 2770678 - RNA, 19 nt, Artificial Sequence
  Description of Artificial Sequence: Synthetic oligonucleotide
uuccaauacugagaagaug

SEQ ID NO: 2770679 - RNA, 19 nt, Artificial Sequence
  Description of Artificial Sequence: Synthetic oligonucleotide
cucaauuaccucugccaug

SEQ ID NO: 2770680 - RNA, 19 nt, Artificial Sequence
  Description of Artificial Sequence: Synthetic oligonucleotide
ugacuauccggugauucga

SEQ ID NO: 2770681 - RNA, 19 nt, Artificial Sequence
  Description of Artificial Sequence: Synthetic oligonucleotide
acacagucucuucagcaca

SEQ ID NO: 2770682 - RNA, 19 nt, Artificial Sequence
  Description of Artificial Sequence: Synthetic oligonucleotide
cucguuuucuuuaagugcu

SEQ ID NO: 2770683 - RNA, 19 nt, Artificial Sequence
  Description of Artificial Sequence: Synthetic oligonucleotide
uacaugguuuggcaucagu

SEQ ID NO: 2770684 - RNA, 19 nt, Artificial Sequence
  Description of Artificial Sequence: Synthetic oligonucleotide
auuuaccaggagcuguagu

SEQ ID NO: 2770685 - RNA, 19 nt, Artificial Sequence
  Description of Artificial Sequence: Synthetic oligonucleotide
uccacuucagaauccucaa

SEQ ID NO: 2770686 - RNA, 19 nt, Artificial Sequence
  Description of Artificial Sequence: Synthetic oligonucleotide
acuauccggugauucgaag

SEQ ID NO: 2770687 - RNA, 19 nt, Artificial Sequence
  Description of Artificial Sequence: Synthetic oligonucleotide
caaagcuuccuuuggacaa

SEQ ID NO: 2770688 - RNA, 19 nt, Artificial Sequence
  Description of Artificial Sequence: Synthetic oligonucleotide
cugggugacaucuccaaca

SEQ ID NO: 2770689 - RNA, 19 nt, Artificial Sequence
  Description of Artificial Sequence: Synthetic oligonucleotide
uucugccaauuccuuauuc

SEQ ID NO: 2770690 - RNA, 19 nt, Artificial Sequence
  Description of Artificial Sequence: Synthetic oligonucleotide
cuucauguacaugguuugg

SEQ ID NO: 2770691 - RNA, 19 nt, Artificial Sequence
  Description of Artificial Sequence: Synthetic oligonucleotide
ucuuccacuucagaauccu

SEQ ID NO: 2770692 - RNA, 19 nt, Artificial Sequence
  Description of Artificial Sequence: Synthetic oligonucleotide
caguuuccaauucggaauc

SEQ ID NO: 2770693 - RNA, 19 nt, Artificial Sequence
  Description of Artificial Sequence: Synthetic oligonucleotide
ucuuuccaauacugagaag

SEQ ID NO: 2770694 - RNA, 19 nt, Artificial Sequence
  Description of Artificial Sequence: Synthetic oligonucleotide
auuucuuuaugaaguuucu

SEQ ID NO: 2770695 - RNA, 19 nt, Artificial Sequence
  Description of Artificial Sequence: Synthetic oligonucleotide
guguaccucacacuucaug

SEQ ID NO: 2770696 - RNA, 19 nt, Artificial Sequence
  Description of Artificial Sequence: Synthetic oligonucleotide
ucauuccaaagcuuccuuu

SEQ ID NO: 2770697 - RNA, 19 nt, Artificial Sequence
  Description of Artificial Sequence: Synthetic oligonucleotide
ugggugacaucuccaacau

SEQ ID NO: 2770698 - RNA, 19 nt, Artificial Sequence
  Description of Artificial Sequence: Synthetic oligonucleotide
gcaaaguuggcaguguacc

SEQ ID NO: 2770699 - RNA, 19 nt, Artificial Sequence
  Description of Artificial Sequence: Synthetic oligonucleotide
uucaugacucagccucuca

SEQ ID NO: 2770700 - RNA, 19 nt, Artificial Sequence
  Description of Artificial Sequence: Synthetic oligonucleotide
caacaucuuuuauuuucac

SEQ ID NO: 2770701 - RNA, 19 nt, Artificial Sequence
  Description of Artificial Sequence: Synthetic oligonucleotide
uaagugcuucauagagagc

SEQ ID NO: 2770702 - RNA, 19 nt, Artificial Sequence
  Description of Artificial Sequence: Synthetic oligonucleotide
guuucucguuuucuuuaag

SEQ ID NO: 2770703 - RNA, 19 nt, Artificial Sequence
  Description of Artificial Sequence: Synthetic oligonucleotide
guuaacuggucauuccaaa

SEQ ID NO: 2770704 - RNA, 19 nt, Artificial Sequence
  Description of Artificial Sequence: Synthetic oligonucleotide
gcuugaaguucuuagaugu

SEQ ID NO: 2770705 - RNA, 19 nt, Artificial Sequence
  Description of Artificial Sequence: Synthetic oligonucleotide
ggagcuguagugcagggca

SEQ ID NO: 2770706 - RNA, 19 nt, Artificial Sequence
  Description of Artificial Sequence: Synthetic oligonucleotide
auagagagcuuuccuccgu

SEQ ID NO: 2770707 - RNA, 19 nt, Artificial Sequence
  Description of Artificial Sequence: Synthetic oligonucleotide
ggugauucgaagcuaucca

SEQ ID NO: 2770708 - RNA, 19 nt, Artificial Sequence
  Description of Artificial Sequence: Synthetic oligonucleotide
ugcuucauagagagcuuuc

SEQ ID NO: 2770709 - RNA, 19 nt, Artificial Sequence
  Description of Artificial Sequence: Synthetic oligonucleotide
uccggugauucgaagcuau

SEQ ID NO: 2770710 - RNA, 19 nt, Artificial Sequence
  Description of Artificial Sequence: Synthetic oligonucleotide
ugacucagccucucaauua

SEQ ID NO: 2770711 - RNA, 19 nt, Artificial Sequence
  Description of Artificial Sequence: Synthetic oligonucleotide
aguuucucguuuucuuuaa

SEQ ID NO: 2770712 - RNA, 19 nt, Artificial Sequence
  Description of Artificial Sequence: Synthetic oligonucleotide
aauccucaacaguuuccaa

SEQ ID NO: 2770713 - RNA, 19 nt, Artificial Sequence
  Description of Artificial Sequence: Synthetic oligonucleotide
ggugacaucuccaacaucu

SEQ ID NO: 2770714 - RNA, 19 nt, Artificial Sequence
  Description of Artificial Sequence: Synthetic oligonucleotide
gaucaaaugcuuccugggu

SEQ ID NO: 2770715 - RNA, 19 nt, Artificial Sequence
  Description of Artificial Sequence: Synthetic oligonucleotide
augacucagccucucaauu

SEQ ID NO: 2770716 - RNA, 19 nt, Artificial Sequence
  Description of Artificial Sequence: Synthetic oligonucleotide
cagaauccucaacaguuuc

SEQ ID NO: 2770717 - RNA, 19 nt, Artificial Sequence
  Description of Artificial Sequence: Synthetic oligonucleotide
caguguaccucacacuuca

SEQ ID NO: 2770718 - RNA, 19 nt, Artificial Sequence
  Description of Artificial Sequence: Synthetic oligonucleotide
uuccugacuauccggugau

SEQ ID NO: 2770719 - RNA, 19 nt, Artificial Sequence
  Description of Artificial Sequence: Synthetic oligonucleotide
uacuguacguguucugcua

SEQ ID NO: 2770720 - RNA, 19 nt, Artificial Sequence
  Description of Artificial Sequence: Synthetic oligonucleotide
ucagccucucaauuaccuc

SEQ ID NO: 2770721 - RNA, 19 nt, Artificial Sequence
  Description of Artificial Sequence: Synthetic oligonucleotide
acaucuccaacaucuuuua

SEQ ID NO: 2770722 - RNA, 19 nt, Artificial Sequence
  Description of Artificial Sequence: Synthetic oligonucleotide
cucugccauguacuguacg

SEQ ID NO: 2770723 - RNA, 19 nt, Artificial Sequence
  Description of Artificial Sequence: Synthetic oligonucleotide
agucucuucagcacaugug

SEQ ID NO: 2770724 - RNA, 19 nt, Artificial Sequence
  Description of Artificial Sequence: Synthetic oligonucleotide
guagugcagggcaaaguug

SEQ ID NO: 2770725 - RNA, 19 nt, Artificial Sequence
  Description of Artificial Sequence: Synthetic oligonucleotide
gcuaguuucugagucuucc

SEQ ID NO: 2770726 - RNA, 19 nt, Artificial Sequence
  Description of Artificial Sequence: Synthetic oligonucleotide
auuuucaccuaagcuucug

SEQ ID NO: 2770727 - RNA, 19 nt, Artificial Sequence
  Description of Artificial Sequence: Synthetic oligonucleotide
auguacuguacguguucug

SEQ ID NO: 2770728 - RNA, 19 nt, Artificial Sequence
  Description of Artificial Sequence: Synthetic oligonucleotide
gagcuugaaguucuuagau

SEQ ID NO: 2770729 - RNA, 19 nt, Artificial Sequence
  Description of Artificial Sequence: Synthetic oligonucleotide
uucaggcgggcaauuucac

SEQ ID NO: 2770730 - RNA, 19 nt, Artificial Sequence
  Description of Artificial Sequence: Synthetic oligonucleotide
ccaauacugagaagauggg

SEQ ID NO: 2770731 - RNA, 19 nt, Artificial Sequence
  Description of Artificial Sequence: Synthetic oligonucleotide
uccugggugacaucuccaa

SEQ ID NO: 2770732 - RNA, 19 nt, Artificial Sequence
  Description of Artificial Sequence: Synthetic oligonucleotide
uuccugggugacaucucca

SEQ ID NO: 2770733 - RNA, 19 nt, Artificial Sequence
  Description of Artificial Sequence: Synthetic oligonucleotide
ucaggcgggcaauuucacu

SEQ ID NO: 2770734 - RNA, 19 nt, Artificial Sequence
  Description of Artificial Sequence: Synthetic oligonucleotide
uagauguuaacuggucauu

SEQ ID NO: 2770735 - RNA, 19 nt, Artificial Sequence
  Description of Artificial Sequence: Synthetic oligonucleotide
cuuuaaucauaagaucaaa

SEQ ID NO: 2770736 - RNA, 19 nt, Artificial Sequence
  Description of Artificial Sequence: Synthetic oligonucleotide
acucagccucucaauuacc

SEQ ID NO: 2770737 - RNA, 19 nt, Artificial Sequence
  Description of Artificial Sequence: Synthetic oligonucleotide
uuacaauguuguaguuaau

SEQ ID NO: 2770738 - RNA, 19 nt, Artificial Sequence
  Description of Artificial Sequence: Synthetic oligonucleotide
agugcagggcaaaguuggc

SEQ ID NO: 2770739 - RNA, 19 nt, Artificial Sequence
  Description of Artificial Sequence: Synthetic oligonucleotide
cuaguuucugagucuucca

SEQ ID NO: 2770740 - RNA, 19 nt, Artificial Sequence
  Description of Artificial Sequence: Synthetic oligonucleotide
gaaguuucucguuuucuuu

SEQ ID NO: 2770741 - RNA, 19 nt, Artificial Sequence
  Description of Artificial Sequence: Synthetic oligonucleotide
cacuucuuuccaauacuga

SEQ ID NO: 2770742 - RNA, 19 nt, Artificial Sequence
  Description of Artificial Sequence: Synthetic oligonucleotide
aaaugcuuccugggugaca

SEQ ID NO: 2770743 - RNA, 19 nt, Artificial Sequence
  Description of Artificial Sequence: Synthetic oligonucleotide
gguuuucuuuaaucauaag

SEQ ID NO: 2770744 - RNA, 19 nt, Artificial Sequence
  Description of Artificial Sequence: Synthetic oligonucleotide
caacaguuuccaauucgga

SEQ ID NO: 2770745 - RNA, 19 nt, Artificial Sequence
  Description of Artificial Sequence: Synthetic oligonucleotide
caccuaagcuucuggacca

SEQ ID NO: 2770746 - RNA, 19 nt, Artificial Sequence
  Description of Artificial Sequence: Synthetic oligonucleotide
uccagagguucaugacuca

SEQ ID NO: 2770747 - RNA, 19 nt, Artificial Sequence
  Description of Artificial Sequence: Synthetic oligonucleotide
ucagcacaugugcuaguuu

SEQ ID NO: 2770748 - RNA, 19 nt, Artificial Sequence
  Description of Artificial Sequence: Synthetic oligonucleotide
uagagagcuuuccuccguu

SEQ ID NO: 2770749 - RNA, 19 nt, Artificial Sequence
  Description of Artificial Sequence: Synthetic oligonucleotide
auucggaaucaaauuccug

SEQ ID NO: 2770750 - RNA, 19 nt, Artificial Sequence
  Description of Artificial Sequence: Synthetic oligonucleotide
uggcaguguaccucacacu

SEQ ID NO: 2770751 - RNA, 19 nt, Artificial Sequence
  Description of Artificial Sequence: Synthetic oligonucleotide
caggagcuguagugcaggg

SEQ ID NO: 2770752 - RNA, 19 nt, Artificial Sequence
  Description of Artificial Sequence: Synthetic oligonucleotide
uucagcacaugugcuaguu

SEQ ID NO: 2770753 - RNA, 19 nt, Artificial Sequence
  Description of Artificial Sequence: Synthetic oligonucleotide
acacuucauguacaugguu

SEQ ID NO: 2770754 - RNA, 19 nt, Artificial Sequence
  Description of Artificial Sequence: Synthetic oligonucleotide
cuggaccagagcuugaagu

SEQ ID NO: 2770755 - RNA, 19 nt, Artificial Sequence
  Description of Artificial Sequence: Synthetic oligonucleotide
ccacuucuuuccaauacug

SEQ ID NO: 2770756 - RNA, 19 nt, Artificial Sequence
  Description of Artificial Sequence: Synthetic oligonucleotide
acuguccuucuguucaauu

SEQ ID NO: 2770757 - RNA, 19 nt, Artificial Sequence
  Description of Artificial Sequence: Synthetic oligonucleotide
gcuucauagagagcuuucc

SEQ ID NO: 2770758 - RNA, 19 nt, Artificial Sequence
  Description of Artificial Sequence: Synthetic oligonucleotide
uggcaucaguggaggaaga

SEQ ID NO: 2770759 - RNA, 19 nt, Artificial Sequence
  Description of Artificial Sequence: Synthetic oligonucleotide
caauuucacuguccuucug

SEQ ID NO: 2770760 - RNA, 19 nt, Artificial Sequence
  Description of Artificial Sequence: Synthetic oligonucleotide
uucuggaccagagcuugaa

SEQ ID NO: 2770761 - RNA, 19 nt, Artificial Sequence
  Description of Artificial Sequence: Synthetic oligonucleotide
caucuuuuauuuucaccua

SEQ ID NO: 2770762 - RNA, 19 nt, Artificial Sequence
  Description of Artificial Sequence: Synthetic oligonucleotide
uguacguguucugcuacuu

SEQ ID NO: 2770763 - RNA, 19 nt, Artificial Sequence
  Description of Artificial Sequence: Synthetic oligonucleotide
cacaugugcuaguuucuga

SEQ ID NO: 2770764 - RNA, 19 nt, Artificial Sequence
  Description of Artificial Sequence: Synthetic oligonucleotide
agcuuccuuuggacaagcc

SEQ ID NO: 2770765 - RNA, 19 nt, Artificial Sequence
  Description of Artificial Sequence: Synthetic oligonucleotide
aggcgggcaauuucacugu

SEQ ID NO: 2770766 - RNA, 19 nt, Artificial Sequence
  Description of Artificial Sequence: Synthetic oligonucleotide
ugcuaguuucugagucuuc

SEQ ID NO: 2770767 - RNA, 19 nt, Artificial Sequence
  Description of Artificial Sequence: Synthetic oligonucleotide
cugccauguacuguacgug

SEQ ID NO: 2770768 - RNA, 19 nt, Artificial Sequence
  Description of Artificial Sequence: Synthetic oligonucleotide
guacguguucugcuacuuc

SEQ ID NO: 2770769 - RNA, 19 nt, Artificial Sequence
  Description of Artificial Sequence: Synthetic oligonucleotide
cacuucauguacaugguuu

SEQ ID NO: 2770770 - RNA, 19 nt, Artificial Sequence
  Description of Artificial Sequence: Synthetic oligonucleotide
ucguuuucuuuaagugcuu

SEQ ID NO: 2770771 - RNA, 19 nt, Artificial Sequence
  Description of Artificial Sequence: Synthetic oligonucleotide
cagggcaaaguuggcagug

SEQ ID NO: 2770772 - RNA, 19 nt, Artificial Sequence
  Description of Artificial Sequence: Synthetic oligonucleotide
cuucauagagagcuuuccu

SEQ ID NO: 2770773 - RNA, 19 nt, Artificial Sequence
  Description of Artificial Sequence: Synthetic oligonucleotide
aagcuauccagagguucau

SEQ ID NO: 2770774 - RNA, 19 nt, Artificial Sequence
  Description of Artificial Sequence: Synthetic oligonucleotide
aguuuccaauucggaauca

SEQ ID NO: 2770775 - RNA, 19 nt, Artificial Sequence
  Description of Artificial Sequence: Synthetic oligonucleotide
uucugccacuucuuuccaa

SEQ ID NO: 2770776 - RNA, 19 nt, Artificial Sequence
  Description of Artificial Sequence: Synthetic oligonucleotide
guuggcaguguaccucaca

SEQ ID NO: 2770777 - RNA, 19 nt, Artificial Sequence
  Description of Artificial Sequence: Synthetic oligonucleotide
uucugcuacuucugccaau

SEQ ID NO: 2770778 - RNA, 19 nt, Artificial Sequence
  Description of Artificial Sequence: Synthetic oligonucleotide
cuucagaauccucaacagu

SEQ ID NO: 2770779 - RNA, 19 nt, Artificial Sequence
  Description of Artificial Sequence: Synthetic oligonucleotide
cucacacuucauguacaug

SEQ ID NO: 2770780 - RNA, 19 nt, Artificial Sequence
  Description of Artificial Sequence: Synthetic oligonucleotide
cuuuaugaaguuucucguu

SEQ ID NO: 2770781 - RNA, 19 nt, Artificial Sequence
  Description of Artificial Sequence: Synthetic oligonucleotide
cucuucagcacaugugcua

SEQ ID NO: 2770782 - RNA, 19 nt, Artificial Sequence
  Description of Artificial Sequence: Synthetic oligonucleotide
guaccucacacuucaugua

SEQ ID NO: 2770783 - RNA, 19 nt, Artificial Sequence
  Description of Artificial Sequence: Synthetic oligonucleotide
agagagcuuuccuccguuu

SEQ ID NO: 2770784 - RNA, 19 nt, Artificial Sequence
  Description of Artificial Sequence: Synthetic oligonucleotide
ccucucaauuaccucugcc

SEQ ID NO: 2770785 - RNA, 19 nt, Artificial Sequence
  Description of Artificial Sequence: Synthetic oligonucleotide
ucgaagcuauccagagguu

SEQ ID NO: 2770786 - RNA, 19 nt, Artificial Sequence
  Description of Artificial Sequence: Synthetic oligonucleotide
guacuguacguguucugcu

SEQ ID NO: 2770787 - RNA, 19 nt, Artificial Sequence
  Description of Artificial Sequence: Synthetic oligonucleotide
agccucucaauuaccucug

SEQ ID NO: 2770788 - RNA, 19 nt, Artificial Sequence
  Description of Artificial Sequence: Synthetic oligonucleotide
ggguuuucuuuaaucauaa

SEQ ID NO: 2770789 - RNA, 19 nt, Artificial Sequence
  Description of Artificial Sequence: Synthetic oligonucleotide
cucagccucucaauuaccu

SEQ ID NO: 2770790 - RNA, 19 nt, Artificial Sequence
  Description of Artificial Sequence: Synthetic oligonucleotide
guucugcuacuucugccaa

SEQ ID NO: 2770791 - RNA, 19 nt, Artificial Sequence
  Description of Artificial Sequence: Synthetic oligonucleotide
caaaguuggcaguguaccu

SEQ ID NO: 2770792 - RNA, 19 nt, Artificial Sequence
  Description of Artificial Sequence: Synthetic oligonucleotide
acguguucugcuacuucug

SEQ ID NO: 2770793 - RNA, 19 nt, Artificial Sequence
  Description of Artificial Sequence: Synthetic oligonucleotide
cauguacaugguuuggcau

SEQ ID NO: 2770794 - RNA, 19 nt, Artificial Sequence
  Description of Artificial Sequence: Synthetic oligonucleotide
accucacacuucauguaca

SEQ ID NO: 2770795 - RNA, 19 nt, Artificial Sequence
  Description of Artificial Sequence: Synthetic oligonucleotide
gaccagagcuugaaguucu

SEQ ID NO: 2770796 - RNA, 19 nt, Artificial Sequence
  Description of Artificial Sequence: Synthetic oligonucleotide
ccaaagcuuccuuuggaca

SEQ ID NO: 2770797 - RNA, 19 nt, Artificial Sequence
  Description of Artificial Sequence: Synthetic oligonucleotide
agcuauccagagguucaug

SEQ ID NO: 2770798 - RNA, 19 nt, Artificial Sequence
  Description of Artificial Sequence: Synthetic oligonucleotide
ggcaaaguuggcaguguac

SEQ ID NO: 2770799 - RNA, 19 nt, Artificial Sequence
  Description of Artificial Sequence: Synthetic oligonucleotide
caaaugcuuccugggugac

SEQ ID NO: 2770800 - RNA, 19 nt, Artificial Sequence
  Description of Artificial Sequence: Synthetic oligonucleotide
caauacugagaagaugggu

SEQ ID NO: 2770801 - RNA, 19 nt, Artificial Sequence
  Description of Artificial Sequence: Synthetic oligonucleotide
accaggagcuguagugcag

SEQ ID NO: 2770802 - RNA, 19 nt, Artificial Sequence
  Description of Artificial Sequence: Synthetic oligonucleotide
cugagucuuccacuucaga

SEQ ID NO: 2770803 - RNA, 19 nt, Artificial Sequence
  Description of Artificial Sequence: Synthetic oligonucleotide
gcuacuucugccaauuccu

SEQ ID NO: 2770804 - RNA, 19 nt, Artificial Sequence
  Description of Artificial Sequence: Synthetic oligonucleotide
aguuggcaguguaccucac

SEQ ID NO: 2770805 - RNA, 19 nt, Artificial Sequence
  Description of Artificial Sequence: Synthetic oligonucleotide
aucaguggaggaagacaca

SEQ ID NO: 2770806 - RNA, 19 nt, Artificial Sequence
  Description of Artificial Sequence: Synthetic oligonucleotide
ggcaguguaccucacacuu

SEQ ID NO: 2770807 - RNA, 19 nt, Artificial Sequence
  Description of Artificial Sequence: Synthetic oligonucleotide
acagucucuucagcacaug

SEQ ID NO: 2770808 - RNA, 19 nt, Artificial Sequence
  Description of Artificial Sequence: Synthetic oligonucleotide
agggcaaaguuggcagugu

SEQ ID NO: 2770809 - RNA, 19 nt, Artificial Sequence
  Description of Artificial Sequence: Synthetic oligonucleotide
gcaucaguggaggaagaca

SEQ ID NO: 2770810 - RNA, 19 nt, Artificial Sequence
  Description of Artificial Sequence: Synthetic oligonucleotide
ccugacuauccggugauuc

SEQ ID NO: 2770811 - RNA, 19 nt, Artificial Sequence
  Description of Artificial Sequence: Synthetic oligonucleotide
ccauguacuguacguguuc

SEQ ID NO: 2770812 - RNA, 19 nt, Artificial Sequence
  Description of Artificial Sequence: Synthetic oligonucleotide
gccaauuccuuauucuccu

SEQ ID NO: 2770813 - RNA, 19 nt, Artificial Sequence
  Description of Artificial Sequence: Synthetic oligonucleotide
gacuauccggugauucgaa

SEQ ID NO: 2770814 - RNA, 19 nt, Artificial Sequence
  Description of Artificial Sequence: Synthetic oligonucleotide
ccaggagcuguagugcagg

SEQ ID NO: 2770815 - RNA, 19 nt, Artificial Sequence
  Description of Artificial Sequence: Synthetic oligonucleotide
cacacuucauguacauggu

SEQ ID NO: 2770816 - RNA, 19 nt, Artificial Sequence
  Description of Artificial Sequence: Synthetic oligonucleotide
accuaagcuucuggaccag

SEQ ID NO: 2770817 - RNA, 19 nt, Artificial Sequence
  Description of Artificial Sequence: Synthetic oligonucleotide
gagguucaugacucagccu

SEQ ID NO: 2770818 - RNA, 19 nt, Artificial Sequence
  Description of Artificial Sequence: Synthetic oligonucleotide
caugugcuaguuucugagu

SEQ ID NO: 2770819 - RNA, 19 nt, Artificial Sequence
  Description of Artificial Sequence: Synthetic oligonucleotide
gagagcuuuccuccguuuu

SEQ ID NO: 2770820 - RNA, 19 nt, Artificial Sequence
  Description of Artificial Sequence: Synthetic oligonucleotide
guucaugacucagccucuc

SEQ ID NO: 2770821 - RNA, 19 nt, Artificial Sequence
  Description of Artificial Sequence: Synthetic oligonucleotide
cauguacuguacguguucu

SEQ ID NO: 2770822 - RNA, 19 nt, Artificial Sequence
  Description of Artificial Sequence: Synthetic oligonucleotide
cguguucugcuacuucugc

SEQ ID NO: 2770823 - RNA, 19 nt, Artificial Sequence
  Description of Artificial Sequence: Synthetic oligonucleotide
ggaccagagcuugaaguuc

SEQ ID NO: 2770824 - RNA, 19 nt, Artificial Sequence
  Description of Artificial Sequence: Synthetic oligonucleotide
gcacaugugcuaguuucug

SEQ ID NO: 2770825 - RNA, 19 nt, Artificial Sequence
  Description of Artificial Sequence: Synthetic oligonucleotide
gcuguagugcagggcaaag

SEQ ID NO: 2770826 - RNA, 19 nt, Artificial Sequence
  Description of Artificial Sequence: Synthetic oligonucleotide
cuguccuucuguucaauuu

SEQ ID NO: 2770827 - RNA, 19 nt, Artificial Sequence
  Description of Artificial Sequence: Synthetic oligonucleotide
ccagagguucaugacucag

SEQ ID NO: 2770828 - RNA, 19 nt, Artificial Sequence
  Description of Artificial Sequence: Synthetic oligonucleotide
cugcuacuucugccaauuc

SEQ ID NO: 2770829 - RNA, 19 nt, Artificial Sequence
  Description of Artificial Sequence: Synthetic oligonucleotide
cggugauucgaagcuaucc

SEQ ID NO: 2770830 - RNA, 19 nt, Artificial Sequence
  Description of Artificial Sequence: Synthetic oligonucleotide
agcuguagugcagggcaaa

SEQ ID NO: 2770831 - RNA, 19 nt, Artificial Sequence
  Description of Artificial Sequence: Synthetic oligonucleotide
cagucucuucagcacaugu

SEQ ID NO: 2770832 - RNA, 19 nt, Artificial Sequence
  Description of Artificial Sequence: Synthetic oligonucleotide
guacaugguuuggcaucag

SEQ ID NO: 2770833 - RNA, 19 nt, Artificial Sequence
  Description of Artificial Sequence: Synthetic oligonucleotide
gcaauuucacuguccuucu

SEQ ID NO: 2770834 - RNA, 19 nt, Artificial Sequence
  Description of Artificial Sequence: Synthetic oligonucleotide
gucauuccaaagcuuccuu

SEQ ID NO: 2770835 - RNA, 19 nt, Artificial Sequence
  Description of Artificial Sequence: Synthetic oligonucleotide
ggcaucaguggaggaagac

SEQ ID NO: 2770836 - RNA, 19 nt, Artificial Sequence
  Description of Artificial Sequence: Synthetic oligonucleotide
gccacuucuuuccaauacu

SEQ ID NO: 2770837 - RNA, 19 nt, Artificial Sequence
  Description of Artificial Sequence: Synthetic oligonucleotide
cuugaaguucuuagauguu

SEQ ID NO: 2770838 - RNA, 19 nt, Artificial Sequence
  Description of Artificial Sequence: Synthetic oligonucleotide
cuucuggaccagagcuuga

SEQ ID NO: 2770839 - RNA, 19 nt, Artificial Sequence
  Description of Artificial Sequence: Synthetic oligonucleotide
ccucaacaguuuccaauuc

SEQ ID NO: 2770840 - RNA, 19 nt, Artificial Sequence
  Description of Artificial Sequence: Synthetic oligonucleotide
ccacuucagaauccucaac

SEQ ID NO: 2770841 - RNA, 19 nt, Artificial Sequence
  Description of Artificial Sequence: Synthetic oligonucleotide
cgaagcuauccagagguuc

SEQ ID NO: 2770842 - RNA, 19 nt, Artificial Sequence
  Description of Artificial Sequence: Synthetic oligonucleotide
ccugggugacaucuccaac

SEQ ID NO: 2770843 - RNA, 19 nt, Artificial Sequence
  Description of Artificial Sequence: Synthetic oligonucleotide
guggaggaagacacagucu

SEQ ID NO: 2770844 - RNA, 19 nt, Artificial Sequence
  Description of Artificial Sequence: Synthetic oligonucleotide
gccucucaauuaccucugc

SEQ ID NO: 2770845 - RNA, 19 nt, Artificial Sequence
  Description of Artificial Sequence: Synthetic oligonucleotide
cacagucucuucagcacau

SEQ ID NO: 2770846 - RNA, 19 nt, Artificial Sequence
  Description of Artificial Sequence: Synthetic oligonucleotide
ggucauuccaaagcuuccu

SEQ ID NO: 2770847 - RNA, 19 nt, Artificial Sequence
  Description of Artificial Sequence: Synthetic oligonucleotide
cuguacguguucugcuacu

SEQ ID NO: 2770848 - RNA, 19 nt, Artificial Sequence
  Description of Artificial Sequence: Synthetic oligonucleotide
gagcuguagugcagggcaa

SEQ ID NO: 2770849 - RNA, 19 nt, Artificial Sequence
  Description of Artificial Sequence: Synthetic oligonucleotide
gcgggcaauuucacugucc

SEQ ID NO: 2770850 - RNA, 19 nt, Artificial Sequence
  Description of Artificial Sequence: Synthetic oligonucleotide
auccggugauucgaagcua

SEQ ID NO: 2770851 - RNA, 19 nt, Artificial Sequence
  Description of Artificial Sequence: Synthetic oligonucleotide
cugagaagauggguuuucu

SEQ ID NO: 2770852 - RNA, 19 nt, Artificial Sequence
  Description of Artificial Sequence: Synthetic oligonucleotide
cuacuucugccaauuccuu

SEQ ID NO: 2770853 - RNA, 19 nt, Artificial Sequence
  Description of Artificial Sequence: Synthetic oligonucleotide
caguggaggaagacacagu

SEQ ID NO: 2770854 - RNA, 19 nt, Artificial Sequence
  Description of Artificial Sequence: Synthetic oligonucleotide
aguguaccucacacuucau

SEQ ID NO: 2770855 - RNA, 19 nt, Artificial Sequence
  Description of Artificial Sequence: Synthetic oligonucleotide
gggugacaucuccaacauc

SEQ ID NO: 2770856 - RNA, 19 nt, Artificial Sequence
  Description of Artificial Sequence: Synthetic oligonucleotide
gggcaaaguuggcagugua

SEQ ID NO: 2770857 - RNA, 19 nt, Artificial Sequence
  Description of Artificial Sequence: Synthetic oligonucleotide
cuguagugcagggcaaagu

SEQ ID NO: 2770858 - RNA, 19 nt, Artificial Sequence
  Description of Artificial Sequence: Synthetic oligonucleotide
ggcgggcaauuucacuguc

SEQ ID NO: 2770859 - RNA, 19 nt, Artificial Sequence
  Description of Artificial Sequence: Synthetic oligonucleotide
cuucagcacaugugcuagu

SEQ ID NO: 2770860 - RNA, 19 nt, Artificial Sequence
  Description of Artificial Sequence: Synthetic oligonucleotide
uccugacuauccggugauu

SEQ ID NO: 2770861 - RNA, 19 nt, Artificial Sequence
  Description of Artificial Sequence: Synthetic oligonucleotide
gugcuaguuucugagucuu

SEQ ID NO: 2770862 - RNA, 19 nt, Artificial Sequence
  Description of Artificial Sequence: Synthetic oligonucleotide
caucuccaacaucuuuuau

SEQ ID NO: 2770863 - RNA, 19 nt, Artificial Sequence
  Description of Artificial Sequence: Synthetic oligonucleotide
ccucugccauguacuguac

SEQ ID NO: 2770864 - RNA, 19 nt, Artificial Sequence
  Description of Artificial Sequence: Synthetic oligonucleotide
ccuucuguucaauuucuuu

SEQ ID NO: 2770865 - RNA, 19 nt, Artificial Sequence
  Description of Artificial Sequence: Synthetic oligonucleotide
ggaggaagacacagucucu

SEQ ID NO: 2770866 - RNA, 19 nt, Artificial Sequence
  Description of Artificial Sequence: Synthetic oligonucleotide
cuccaacaucuuuuauuuu

SEQ ID NO: 2770867 - RNA, 19 nt, Artificial Sequence
  Description of Artificial Sequence: Synthetic oligonucleotide
ccggugauucgaagcuauc

SEQ ID NO: 2770868 - RNA, 19 nt, Artificial Sequence
  Description of Artificial Sequence: Synthetic oligonucleotide
gguucaugacucagccucu

SEQ ID NO: 2770869 - RNA, 19 nt, Artificial Sequence
  Description of Artificial Sequence: Synthetic oligonucleotide
accagagcuugaaguucuu

SEQ ID NO: 2770870 - RNA, 19 nt, Artificial Sequence
  Description of Artificial Sequence: Synthetic oligonucleotide
caauuaccucugccaugua

SEQ ID NO: 2770871 - RNA, 19 nt, Artificial Sequence
  Description of Artificial Sequence: Synthetic oligonucleotide
gugacaucuccaacaucuu

SEQ ID NO: 2770872 - RNA, 19 nt, Artificial Sequence
  Description of Artificial Sequence: Synthetic oligonucleotide
cggaaucaaauuccugacu

SEQ ID NO: 2770873 - RNA, 19 nt, Artificial Sequence
  Description of Artificial Sequence: Synthetic oligonucleotide
ccuaagcuucuggaccaga

SEQ ID NO: 2770874 - RNA, 19 nt, Artificial Sequence
  Description of Artificial Sequence: Synthetic oligonucleotide
ccagagcuugaaguucuua

SEQ ID NO: 2770875 - RNA, 19 nt, Artificial Sequence
  Description of Artificial Sequence: Synthetic oligonucleotide
gggcaauuucacuguccuu

SEQ ID NO: 2770876 - RNA, 19 nt, Artificial Sequence
  Description of Artificial Sequence: Synthetic oligonucleotide
gccauguacuguacguguu

SEQ ID NO: 2770877 - RNA, 19 nt, Artificial Sequence
  Description of Artificial Sequence: Synthetic oligonucleotide
uauuauuuuagaaaagaug

SEQ ID NO: 2770878 - RNA, 19 nt, Artificial Sequence
  Description of Artificial Sequence: Synthetic oligonucleotide
aguucuucaggcuuaaacc

SEQ ID NO: 2770879 - RNA, 19 nt, Artificial Sequence
  Description of Artificial Sequence: Synthetic oligonucleotide
auuuuagaaaagaugaucc

SEQ ID NO: 2770880 - RNA, 19 nt, Artificial Sequence
  Description of Artificial Sequence: Synthetic oligonucleotide
gaugauaucgcccaccagg

SEQ ID NO: 2770881 - RNA, 19 nt, Artificial Sequence
  Description of Artificial Sequence: Synthetic oligonucleotide
auuauuuuagaaaagauga

SEQ ID NO: 2770882 - RNA, 19 nt, Artificial Sequence
  Description of Artificial Sequence: Synthetic oligonucleotide
cuuagaaucagcuggauug

SEQ ID NO: 2770883 - RNA, 19 nt, Artificial Sequence
  Description of Artificial Sequence: Synthetic oligonucleotide
aaaagacccagcguuaucc

SEQ ID NO: 2770884 - RNA, 19 nt, Artificial Sequence
  Description of Artificial Sequence: Synthetic oligonucleotide
ucaggcuuaaaccauagac

SEQ ID NO: 2770885 - RNA, 19 nt, Artificial Sequence
  Description of Artificial Sequence: Synthetic oligonucleotide
uucuguggaaugaagagcc

SEQ ID NO: 2770886 - RNA, 19 nt, Artificial Sequence
  Description of Artificial Sequence: Synthetic oligonucleotide
uuaaaccauagacugaucu

SEQ ID NO: 2770887 - RNA, 19 nt, Artificial Sequence
  Description of Artificial Sequence: Synthetic oligonucleotide
uauucuguggaaugaagag

SEQ ID NO: 2770888 - RNA, 19 nt, Artificial Sequence
  Description of Artificial Sequence: Synthetic oligonucleotide
gaaaggacggucuuucagg

SEQ ID NO: 2770889 - RNA, 19 nt, Artificial Sequence
  Description of Artificial Sequence: Synthetic oligonucleotide
aaccccuucugcucgaagc

SEQ ID NO: 2770890 - RNA, 19 nt, Artificial Sequence
  Description of Artificial Sequence: Synthetic oligonucleotide
cuggcuuagaaucagcugg

SEQ ID NO: 2770891 - RNA, 19 nt, Artificial Sequence
  Description of Artificial Sequence: Synthetic oligonucleotide
uccaccucuacucauauac

SEQ ID NO: 2770892 - RNA, 19 nt, Artificial Sequence
  Description of Artificial Sequence: Synthetic oligonucleotide
aauguagugcugcuucagg

SEQ ID NO: 2770893 - RNA, 19 nt, Artificial Sequence
  Description of Artificial Sequence: Synthetic oligonucleotide
agaugauccauuuauucug

SEQ ID NO: 2770894 - RNA, 19 nt, Artificial Sequence
  Description of Artificial Sequence: Synthetic oligonucleotide
aaggcuuguagucaaucag

SEQ ID NO: 2770895 - RNA, 19 nt, Artificial Sequence
  Description of Artificial Sequence: Synthetic oligonucleotide
uuucucugcacuuugcacc

SEQ ID NO: 2770896 - RNA, 19 nt, Artificial Sequence
  Description of Artificial Sequence: Synthetic oligonucleotide
uuauucuguggaaugaaga

SEQ ID NO: 2770897 - RNA, 19 nt, Artificial Sequence
  Description of Artificial Sequence: Synthetic oligonucleotide
uuuauucuguggaaugaag

SEQ ID NO: 2770898 - RNA, 19 nt, Artificial Sequence
  Description of Artificial Sequence: Synthetic oligonucleotide
ugauccauuuauucugugg

SEQ ID NO: 2770899 - RNA, 19 nt, Artificial Sequence
  Description of Artificial Sequence: Synthetic oligonucleotide
uugauggcaaugaagguac

SEQ ID NO: 2770900 - RNA, 19 nt, Artificial Sequence
  Description of Artificial Sequence: Synthetic oligonucleotide
uagucaaucaguucuucag

SEQ ID NO: 2770901 - RNA, 19 nt, Artificial Sequence
  Description of Artificial Sequence: Synthetic oligonucleotide
aggcuuaaaccauagacug

SEQ ID NO: 2770902 - RNA, 19 nt, Artificial Sequence
  Description of Artificial Sequence: Synthetic oligonucleotide
uuccucagaagcccgaagg

SEQ ID NO: 2770903 - RNA, 19 nt, Artificial Sequence
  Description of Artificial Sequence: Synthetic oligonucleotide
uauuuuagaaaagaugauc

SEQ ID NO: 2770904 - RNA, 19 nt, Artificial Sequence
  Description of Artificial Sequence: Synthetic oligonucleotide
ucgagguuggccauggucc

SEQ ID NO: 2770905 - RNA, 19 nt, Artificial Sequence
  Description of Artificial Sequence: Synthetic oligonucleotide
uuugcaccgaaucacugcc

SEQ ID NO: 2770906 - RNA, 19 nt, Artificial Sequence
  Description of Artificial Sequence: Synthetic oligonucleotide
aaaccauagacugaucucu

SEQ ID NO: 2770907 - RNA, 19 nt, Artificial Sequence
  Description of Artificial Sequence: Synthetic oligonucleotide
agucaaucaguucuucagg

SEQ ID NO: 2770908 - RNA, 19 nt, Artificial Sequence
  Description of Artificial Sequence: Synthetic oligonucleotide
ggauccaucaguaaugugg

SEQ ID NO: 2770909 - RNA, 19 nt, Artificial Sequence
  Description of Artificial Sequence: Synthetic oligonucleotide
aauccccucgaauggugcc

SEQ ID NO: 2770910 - RNA, 19 nt, Artificial Sequence
  Description of Artificial Sequence: Synthetic oligonucleotide
gauccauuuauucugugga

SEQ ID NO: 2770911 - RNA, 19 nt, Artificial Sequence
  Description of Artificial Sequence: Synthetic oligonucleotide
auucuguggaaugaagagc

SEQ ID NO: 2770912 - RNA, 19 nt, Artificial Sequence
  Description of Artificial Sequence: Synthetic oligonucleotide
gaaaagaugauccauuuau

SEQ ID NO: 2770913 - RNA, 19 nt, Artificial Sequence
  Description of Artificial Sequence: Synthetic oligonucleotide
accacauugagccccuccc

SEQ ID NO: 2770914 - RNA, 19 nt, Artificial Sequence
  Description of Artificial Sequence: Synthetic oligonucleotide
cauauacccagucaugagc

SEQ ID NO: 2770915 - RNA, 19 nt, Artificial Sequence
  Description of Artificial Sequence: Synthetic oligonucleotide
uuagaaaagaugauccauu

SEQ ID NO: 2770916 - RNA, 19 nt, Artificial Sequence
  Description of Artificial Sequence: Synthetic oligonucleotide
ugucuuuaccacauugagc

SEQ ID NO: 2770917 - RNA, 19 nt, Artificial Sequence
  Description of Artificial Sequence: Synthetic oligonucleotide
auggccaccaggcggaacc

SEQ ID NO: 2770918 - RNA, 19 nt, Artificial Sequence
  Description of Artificial Sequence: Synthetic oligonucleotide
ugaagagccguguccaggg

SEQ ID NO: 2770919 - RNA, 19 nt, Artificial Sequence
  Description of Artificial Sequence: Synthetic oligonucleotide
uucauguacuucaccagcc

SEQ ID NO: 2770920 - RNA, 19 nt, Artificial Sequence
  Description of Artificial Sequence: Synthetic oligonucleotide
gaagcgcuugaugauaucg

SEQ ID NO: 2770921 - RNA, 19 nt, Artificial Sequence
  Description of Artificial Sequence: Synthetic oligonucleotide
agcgcuugaugauaucgcc

SEQ ID NO: 2770922 - RNA, 19 nt, Artificial Sequence
  Description of Artificial Sequence: Synthetic oligonucleotide
acgccaucuggcuugaugg

SEQ ID NO: 2770923 - RNA, 19 nt, Artificial Sequence
  Description of Artificial Sequence: Synthetic oligonucleotide
ugcucgaagcgcuugauga

SEQ ID NO: 2770924 - RNA, 19 nt, Artificial Sequence
  Description of Artificial Sequence: Synthetic oligonucleotide
augagcacaaggcuuguag

SEQ ID NO: 2770925 - RNA, 19 nt, Artificial Sequence
  Description of Artificial Sequence: Synthetic oligonucleotide
uucucugcacuuugcaccg

SEQ ID NO: 2770926 - RNA, 19 nt, Artificial Sequence
  Description of Artificial Sequence: Synthetic oligonucleotide
agcuggauuggucucuccc

SEQ ID NO: 2770927 - RNA, 19 nt, Artificial Sequence
  Description of Artificial Sequence: Synthetic oligonucleotide
uuagaaucagcuggauugg

SEQ ID NO: 2770928 - RNA, 19 nt, Artificial Sequence
  Description of Artificial Sequence: Synthetic oligonucleotide
agaaaggacggucuuucag

SEQ ID NO: 2770929 - RNA, 19 nt, Artificial Sequence
  Description of Artificial Sequence: Synthetic oligonucleotide
aaaggacggucuuucaggu

SEQ ID NO: 2770930 - RNA, 19 nt, Artificial Sequence
  Description of Artificial Sequence: Synthetic oligonucleotide
aaucagcuggauuggucuc

SEQ ID NO: 2770931 - RNA, 19 nt, Artificial Sequence
  Description of Artificial Sequence: Synthetic oligonucleotide
gaagguacgcucgagguug

SEQ ID NO: 2770932 - RNA, 19 nt, Artificial Sequence
  Description of Artificial Sequence: Synthetic oligonucleotide
uguggaaugaagagccgug

SEQ ID NO: 2770933 - RNA, 19 nt, Artificial Sequence
  Description of Artificial Sequence: Synthetic oligonucleotide
aagacccagcguuauccac

SEQ ID NO: 2770934 - RNA, 19 nt, Artificial Sequence
  Description of Artificial Sequence: Synthetic oligonucleotide
auagacugaucucuuucuc

SEQ ID NO: 2770935 - RNA, 19 nt, Artificial Sequence
  Description of Artificial Sequence: Synthetic oligonucleotide
ucauauacccagucaugag

SEQ ID NO: 2770936 - RNA, 19 nt, Artificial Sequence
  Description of Artificial Sequence: Synthetic oligonucleotide
aauggugccuggcuuagaa

SEQ ID NO: 2770937 - RNA, 19 nt, Artificial Sequence
  Description of Artificial Sequence: Synthetic oligonucleotide
uaaaccauagacugaucuc

SEQ ID NO: 2770938 - RNA, 19 nt, Artificial Sequence
  Description of Artificial Sequence: Synthetic oligonucleotide
gucaaucaguucuucaggc

SEQ ID NO: 2770939 - RNA, 19 nt, Artificial Sequence
  Description of Artificial Sequence: Synthetic oligonucleotide
ucuacucauauacccaguc

SEQ ID NO: 2770940 - RNA, 19 nt, Artificial Sequence
  Description of Artificial Sequence: Synthetic oligonucleotide
aagcgcuugaugauaucgc

SEQ ID NO: 2770941 - RNA, 19 nt, Artificial Sequence
  Description of Artificial Sequence: Synthetic oligonucleotide
cuuguagucaaucaguucu

SEQ ID NO: 2770942 - RNA, 19 nt, Artificial Sequence
  Description of Artificial Sequence: Synthetic oligonucleotide
cuucauggccaccaggcgg

SEQ ID NO: 2770943 - RNA, 19 nt, Artificial Sequence
  Description of Artificial Sequence: Synthetic oligonucleotide
cagaccauggccaccacag

SEQ ID NO: 2770944 - RNA, 19 nt, Artificial Sequence
  Description of Artificial Sequence: Synthetic oligonucleotide
ucuuucucugcacuuugca

SEQ ID NO: 2770945 - RNA, 19 nt, Artificial Sequence
  Description of Artificial Sequence: Synthetic oligonucleotide
aaauccccucgaauggugc

SEQ ID NO: 2770946 - RNA, 19 nt, Artificial Sequence
  Description of Artificial Sequence: Synthetic oligonucleotide
gauaucgcccaccaggcca

SEQ ID NO: 2770947 - RNA, 19 nt, Artificial Sequence
  Description of Artificial Sequence: Synthetic oligonucleotide
agacugaucucuuucucug

SEQ ID NO: 2770948 - RNA, 19 nt, Artificial Sequence
  Description of Artificial Sequence: Synthetic oligonucleotide
aaugaagagccguguccag

SEQ ID NO: 2770949 - RNA, 19 nt, Artificial Sequence
  Description of Artificial Sequence: Synthetic oligonucleotide
caccucuacucauauaccc

SEQ ID NO: 2770950 - RNA, 19 nt, Artificial Sequence
  Description of Artificial Sequence: Synthetic oligonucleotide
augauaucgcccaccaggc

SEQ ID NO: 2770951 - RNA, 19 nt, Artificial Sequence
  Description of Artificial Sequence: Synthetic oligonucleotide
cugucuuuaccacauugag

SEQ ID NO: 2770952 - RNA, 19 nt, Artificial Sequence
  Description of Artificial Sequence: Synthetic oligonucleotide
ucauguacuucaccagccc

SEQ ID NO: 2770953 - RNA, 19 nt, Artificial Sequence
  Description of Artificial Sequence: Synthetic oligonucleotide
cuuugcaccgaaucacugc

SEQ ID NO: 2770954 - RNA, 19 nt, Artificial Sequence
  Description of Artificial Sequence: Synthetic oligonucleotide
cuuuaccacauugagcccc

SEQ ID NO: 2770955 - RNA, 19 nt, Artificial Sequence
  Description of Artificial Sequence: Synthetic oligonucleotide
guucuucaggcuuaaacca

SEQ ID NO: 2770956 - RNA, 19 nt, Artificial Sequence
  Description of Artificial Sequence: Synthetic oligonucleotide
ucagaagcccgaaggaacu

SEQ ID NO: 2770957 - RNA, 19 nt, Artificial Sequence
  Description of Artificial Sequence: Synthetic oligonucleotide
caguucuucaggcuuaaac

SEQ ID NO: 2770958 - RNA, 19 nt, Artificial Sequence
  Description of Artificial Sequence: Synthetic oligonucleotide
augaagguacgcucgaggu

SEQ ID NO: 2770959 - RNA, 19 nt, Artificial Sequence
  Description of Artificial Sequence: Synthetic oligonucleotide
uguacuucaccagcccugg

SEQ ID NO: 2770960 - RNA, 19 nt, Artificial Sequence
  Description of Artificial Sequence: Synthetic oligonucleotide
cucagaagcccgaaggaac

SEQ ID NO: 2770961 - RNA, 19 nt, Artificial Sequence
  Description of Artificial Sequence: Synthetic oligonucleotide
uugagccccucccagacca

SEQ ID NO: 2770962 - RNA, 19 nt, Artificial Sequence
  Description of Artificial Sequence: Synthetic oligonucleotide
cauucgaccugucuuuacc

SEQ ID NO: 2770963 - RNA, 19 nt, Artificial Sequence
  Description of Artificial Sequence: Synthetic oligonucleotide
uucauggccaccaggcgga

SEQ ID NO: 2770964 - RNA, 19 nt, Artificial Sequence
  Description of Artificial Sequence: Synthetic oligonucleotide
uacuucaccagcccuggga

SEQ ID NO: 2770965 - RNA, 19 nt, Artificial Sequence
  Description of Artificial Sequence: Synthetic oligonucleotide
uagaaaagaugauccauuu

SEQ ID NO: 2770966 - RNA, 19 nt, Artificial Sequence
  Description of Artificial Sequence: Synthetic oligonucleotide
ugggaagaaaggacggucu

SEQ ID NO: 2770967 - RNA, 19 nt, Artificial Sequence
  Description of Artificial Sequence: Synthetic oligonucleotide
gaacuucauggccaccagg

SEQ ID NO: 2770968 - RNA, 19 nt, Artificial Sequence
  Description of Artificial Sequence: Synthetic oligonucleotide
gaccauggccaccacaggc

SEQ ID NO: 2770969 - RNA, 19 nt, Artificial Sequence
  Description of Artificial Sequence: Synthetic oligonucleotide
ucuguggaaugaagagccg

SEQ ID NO: 2770970 - RNA, 19 nt, Artificial Sequence
  Description of Artificial Sequence: Synthetic oligonucleotide
agcguuauccaccucuacu

SEQ ID NO: 2770971 - RNA, 19 nt, Artificial Sequence
  Description of Artificial Sequence: Synthetic oligonucleotide
ucucuuucucugcacuuug

SEQ ID NO: 2770972 - RNA, 19 nt, Artificial Sequence
  Description of Artificial Sequence: Synthetic oligonucleotide
agguguuccucagaagccc

SEQ ID NO: 2770973 - RNA, 19 nt, Artificial Sequence
  Description of Artificial Sequence: Synthetic oligonucleotide
gcccgaaggaacuucaugg

SEQ ID NO: 2770974 - RNA, 19 nt, Artificial Sequence
  Description of Artificial Sequence: Synthetic oligonucleotide
aaagacccagcguuaucca

SEQ ID NO: 2770975 - RNA, 19 nt, Artificial Sequence
  Description of Artificial Sequence: Synthetic oligonucleotide
uggugccuggcuuagaauc

SEQ ID NO: 2770976 - RNA, 19 nt, Artificial Sequence
  Description of Artificial Sequence: Synthetic oligonucleotide
gaagaaaggacggucuuuc

SEQ ID NO: 2770977 - RNA, 19 nt, Artificial Sequence
  Description of Artificial Sequence: Synthetic oligonucleotide
cuuucucugcacuuugcac

SEQ ID NO: 2770978 - RNA, 19 nt, Artificial Sequence
  Description of Artificial Sequence: Synthetic oligonucleotide
cacgcuguacgccaucugg

SEQ ID NO: 2770979 - RNA, 19 nt, Artificial Sequence
  Description of Artificial Sequence: Synthetic oligonucleotide
uccaucaguaauguggaaa

SEQ ID NO: 2770980 - RNA, 19 nt, Artificial Sequence
  Description of Artificial Sequence: Synthetic oligonucleotide
uacgccaucuggcuugaug

SEQ ID NO: 2770981 - RNA, 19 nt, Artificial Sequence
  Description of Artificial Sequence: Synthetic oligonucleotide
acuucauggccaccaggcg

SEQ ID NO: 2770982 - RNA, 19 nt, Artificial Sequence
  Description of Artificial Sequence: Synthetic oligonucleotide
ugagcacaaggcuuguagu

SEQ ID NO: 2770983 - RNA, 19 nt, Artificial Sequence
  Description of Artificial Sequence: Synthetic oligonucleotide
ggaaugaagagccgugucc

SEQ ID NO: 2770984 - RNA, 19 nt, Artificial Sequence
  Description of Artificial Sequence: Synthetic oligonucleotide
ucuggcuugauggcaauga

SEQ ID NO: 2770985 - RNA, 19 nt, Artificial Sequence
  Description of Artificial Sequence: Synthetic oligonucleotide
agacccagcguuauccacc

SEQ ID NO: 2770986 - RNA, 19 nt, Artificial Sequence
  Description of Artificial Sequence: Synthetic oligonucleotide
ccagucaugagcacaaggc

SEQ ID NO: 2770987 - RNA, 19 nt, Artificial Sequence
  Description of Artificial Sequence: Synthetic oligonucleotide
gaaugaagagccgugucca

SEQ ID NO: 2770988 - RNA, 19 nt, Artificial Sequence
  Description of Artificial Sequence: Synthetic oligonucleotide
cagggauccaucaguaaug

SEQ ID NO: 2770989 - RNA, 19 nt, Artificial Sequence
  Description of Artificial Sequence: Synthetic oligonucleotide
gaaucagcuggauuggucu

SEQ ID NO: 2770990 - RNA, 19 nt, Artificial Sequence
  Description of Artificial Sequence: Synthetic oligonucleotide
acugaucucuuucucugca

SEQ ID NO: 2770991 - RNA, 19 nt, Artificial Sequence
  Description of Artificial Sequence: Synthetic oligonucleotide
auauacccagucaugagca

SEQ ID NO: 2770992 - RNA, 19 nt, Artificial Sequence
  Description of Artificial Sequence: Synthetic oligonucleotide
gaaggaacuucauggccac

SEQ ID NO: 2770993 - RNA, 19 nt, Artificial Sequence
  Description of Artificial Sequence: Synthetic oligonucleotide
uccucagaagcccgaagga

SEQ ID NO: 2770994 - RNA, 19 nt, Artificial Sequence
  Description of Artificial Sequence: Synthetic oligonucleotide
aaggacggucuuucagguc

SEQ ID NO: 2770995 - RNA, 19 nt, Artificial Sequence
  Description of Artificial Sequence: Synthetic oligonucleotide
gauccaucaguaaugugga

SEQ ID NO: 2770996 - RNA, 19 nt, Artificial Sequence
  Description of Artificial Sequence: Synthetic oligonucleotide
auugagccccucccagacc

SEQ ID NO: 2770997 - RNA, 19 nt, Artificial Sequence
  Description of Artificial Sequence: Synthetic oligonucleotide
auucgaccugucuuuacca

SEQ ID NO: 2770998 - RNA, 19 nt, Artificial Sequence
  Description of Artificial Sequence: Synthetic oligonucleotide
uuuaccacauugagccccu

SEQ ID NO: 2770999 - RNA, 19 nt, Artificial Sequence
  Description of Artificial Sequence: Synthetic oligonucleotide
accauggccaccacaggcc

SEQ ID NO: 2771000 - RNA, 19 nt, Artificial Sequence
  Description of Artificial Sequence: Synthetic oligonucleotide
aagaaaggacggucuuuca

SEQ ID NO: 2771001 - RNA, 19 nt, Artificial Sequence
  Description of Artificial Sequence: Synthetic oligonucleotide
cuucaggcuuaaaccauag

SEQ ID NO: 2771002 - RNA, 19 nt, Artificial Sequence
  Description of Artificial Sequence: Synthetic oligonucleotide
aaaauccccucgaauggug

SEQ ID NO: 2771003 - RNA, 19 nt, Artificial Sequence
  Description of Artificial Sequence: Synthetic oligonucleotide
gagcacaaggcuuguaguc

SEQ ID NO: 2771004 - RNA, 19 nt, Artificial Sequence
  Description of Artificial Sequence: Synthetic oligonucleotide
gauggcaaugaagguacgc

SEQ ID NO: 2771005 - RNA, 19 nt, Artificial Sequence
  Description of Artificial Sequence: Synthetic oligonucleotide
uggcuuagaaucagcugga

SEQ ID NO: 2771006 - RNA, 19 nt, Artificial Sequence
  Description of Artificial Sequence: Synthetic oligonucleotide
uccauuuauucuguggaau

SEQ ID NO: 2771007 - RNA, 19 nt, Artificial Sequence
  Description of Artificial Sequence: Synthetic oligonucleotide
cagguguuccucagaagcc

SEQ ID NO: 2771008 - RNA, 19 nt, Artificial Sequence
  Description of Artificial Sequence: Synthetic oligonucleotide
ucuucaggcuuaaaccaua

SEQ ID NO: 2771009 - RNA, 19 nt, Artificial Sequence
  Description of Artificial Sequence: Synthetic oligonucleotide
agaaucagcuggauugguc

SEQ ID NO: 2771010 - RNA, 19 nt, Artificial Sequence
  Description of Artificial Sequence: Synthetic oligonucleotide
uuauccaccucuacucaua

SEQ ID NO: 2771011 - RNA, 19 nt, Artificial Sequence
  Description of Artificial Sequence: Synthetic oligonucleotide
uggaaugaagagccguguc

SEQ ID NO: 2771012 - RNA, 19 nt, Artificial Sequence
  Description of Artificial Sequence: Synthetic oligonucleotide
ucucucccagcaucauucg

SEQ ID NO: 2771013 - RNA, 19 nt, Artificial Sequence
  Description of Artificial Sequence: Synthetic oligonucleotide
agaaaagaugauccauuua

SEQ ID NO: 2771014 - RNA, 19 nt, Artificial Sequence
  Description of Artificial Sequence: Synthetic oligonucleotide
gucaugagcacaaggcuug

SEQ ID NO: 2771015 - RNA, 19 nt, Artificial Sequence
  Description of Artificial Sequence: Synthetic oligonucleotide
cuguacgccaucuggcuug

SEQ ID NO: 2771016 - RNA, 19 nt, Artificial Sequence
  Description of Artificial Sequence: Synthetic oligonucleotide
auggcaaugaagguacgcu

SEQ ID NO: 2771017 - RNA, 19 nt, Artificial Sequence
  Description of Artificial Sequence: Synthetic oligonucleotide
ugauggcaaugaagguacg

SEQ ID NO: 2771018 - RNA, 19 nt, Artificial Sequence
  Description of Artificial Sequence: Synthetic oligonucleotide
uacccagucaugagcacaa

SEQ ID NO: 2771019 - RNA, 19 nt, Artificial Sequence
  Description of Artificial Sequence: Synthetic oligonucleotide
ucgaccugucuuuaccaca

SEQ ID NO: 2771020 - RNA, 19 nt, Artificial Sequence
  Description of Artificial Sequence: Synthetic oligonucleotide
uggcaaugaagguacgcuc

SEQ ID NO: 2771021 - RNA, 19 nt, Artificial Sequence
  Description of Artificial Sequence: Synthetic oligonucleotide
uaccacauugagccccucc

SEQ ID NO: 2771022 - RNA, 19 nt, Artificial Sequence
  Description of Artificial Sequence: Synthetic oligonucleotide
cacauugagccccucccag

SEQ ID NO: 2771023 - RNA, 19 nt, Artificial Sequence
  Description of Artificial Sequence: Synthetic oligonucleotide
cucccagcaucauucgacc

SEQ ID NO: 2771024 - RNA, 19 nt, Artificial Sequence
  Description of Artificial Sequence: Synthetic oligonucleotide
cuggauuggucucucccag

SEQ ID NO: 2771025 - RNA, 19 nt, Artificial Sequence
  Description of Artificial Sequence: Synthetic oligonucleotide
augaagagccguguccagg

SEQ ID NO: 2771026 - RNA, 19 nt, Artificial Sequence
  Description of Artificial Sequence: Synthetic oligonucleotide
auuuauucuguggaaugaa

SEQ ID NO: 2771027 - RNA, 19 nt, Artificial Sequence
  Description of Artificial Sequence: Synthetic oligonucleotide
guagucaaucaguucuuca

SEQ ID NO: 2771028 - RNA, 19 nt, Artificial Sequence
  Description of Artificial Sequence: Synthetic oligonucleotide
ugauaucgcccaccaggcc

SEQ ID NO: 2771029 - RNA, 19 nt, Artificial Sequence
  Description of Artificial Sequence: Synthetic oligonucleotide
cauugagccccucccagac

SEQ ID NO: 2771030 - RNA, 19 nt, Artificial Sequence
  Description of Artificial Sequence: Synthetic oligonucleotide
cucauauacccagucauga

SEQ ID NO: 2771031 - RNA, 19 nt, Artificial Sequence
  Description of Artificial Sequence: Synthetic oligonucleotide
uucaggcuuaaaccauaga

SEQ ID NO: 2771032 - RNA, 19 nt, Artificial Sequence
  Description of Artificial Sequence: Synthetic oligonucleotide
aaggaacuucauggccacc

SEQ ID NO: 2771033 - RNA, 19 nt, Artificial Sequence
  Description of Artificial Sequence: Synthetic oligonucleotide
aagagccguguccagggau

SEQ ID NO: 2771034 - RNA, 19 nt, Artificial Sequence
  Description of Artificial Sequence: Synthetic oligonucleotide
uauccaccucuacucauau

SEQ ID NO: 2771035 - RNA, 19 nt, Artificial Sequence
  Description of Artificial Sequence: Synthetic oligonucleotide
ugcaccgaaucacugccau

SEQ ID NO: 2771036 - RNA, 19 nt, Artificial Sequence
  Description of Artificial Sequence: Synthetic oligonucleotide
aggaacuucauggccacca

SEQ ID NO: 2771037 - RNA, 19 nt, Artificial Sequence
  Description of Artificial Sequence: Synthetic oligonucleotide
uucgaccugucuuuaccac

SEQ ID NO: 2771038 - RNA, 19 nt, Artificial Sequence
  Description of Artificial Sequence: Synthetic oligonucleotide
ucgaagcgcuugaugauau

SEQ ID NO: 2771039 - RNA, 19 nt, Artificial Sequence
  Description of Artificial Sequence: Synthetic oligonucleotide
agcccugggaagaaaggac

SEQ ID NO: 2771040 - RNA, 19 nt, Artificial Sequence
  Description of Artificial Sequence: Synthetic oligonucleotide
agaagcccgaaggaacuuc

SEQ ID NO: 2771041 - RNA, 19 nt, Artificial Sequence
  Description of Artificial Sequence: Synthetic oligonucleotide
cugaguucauguacuucac

SEQ ID NO: 2771042 - RNA, 19 nt, Artificial Sequence
  Description of Artificial Sequence: Synthetic oligonucleotide
ugaagguacgcucgagguu

SEQ ID NO: 2771043 - RNA, 19 nt, Artificial Sequence
  Description of Artificial Sequence: Synthetic oligonucleotide
agcacaaggcuuguaguca

SEQ ID NO: 2771044 - RNA, 19 nt, Artificial Sequence
  Description of Artificial Sequence: Synthetic oligonucleotide
uuguagucaaucaguucuu

SEQ ID NO: 2771045 - RNA, 19 nt, Artificial Sequence
  Description of Artificial Sequence: Synthetic oligonucleotide
ccauuuauucuguggaaug

SEQ ID NO: 2771046 - RNA, 19 nt, Artificial Sequence
  Description of Artificial Sequence: Synthetic oligonucleotide
cucuuucucugcacuuugc

SEQ ID NO: 2771047 - RNA, 19 nt, Artificial Sequence
  Description of Artificial Sequence: Synthetic oligonucleotide
auccauuuauucuguggaa

SEQ ID NO: 2771048 - RNA, 19 nt, Artificial Sequence
  Description of Artificial Sequence: Synthetic oligonucleotide
caggcuuaaaccauagacu

SEQ ID NO: 2771049 - RNA, 19 nt, Artificial Sequence
  Description of Artificial Sequence: Synthetic oligonucleotide
cauuuauucuguggaauga

SEQ ID NO: 2771050 - RNA, 19 nt, Artificial Sequence
  Description of Artificial Sequence: Synthetic oligonucleotide
agcccgaaggaacuucaug

SEQ ID NO: 2771051 - RNA, 19 nt, Artificial Sequence
  Description of Artificial Sequence: Synthetic oligonucleotide
cugcacuuugcaccgaauc

SEQ ID NO: 2771052 - RNA, 19 nt, Artificial Sequence
  Description of Artificial Sequence: Synthetic oligonucleotide
guacgcucgagguuggcca

SEQ ID NO: 2771053 - RNA, 19 nt, Artificial Sequence
  Description of Artificial Sequence: Synthetic oligonucleotide
caaggcuuguagucaauca

SEQ ID NO: 2771054 - RNA, 19 nt, Artificial Sequence
  Description of Artificial Sequence: Synthetic oligonucleotide
uucugcucgaagcgcuuga

SEQ ID NO: 2771055 - RNA, 19 nt, Artificial Sequence
  Description of Artificial Sequence: Synthetic oligonucleotide
gucucucccagcaucauuc

SEQ ID NO: 2771056 - RNA, 19 nt, Artificial Sequence
  Description of Artificial Sequence: Synthetic oligonucleotide
acgcuguacgccaucuggc

SEQ ID NO: 2771057 - RNA, 19 nt, Artificial Sequence
  Description of Artificial Sequence: Synthetic oligonucleotide
augauccauuuauucugug

SEQ ID NO: 2771058 - RNA, 19 nt, Artificial Sequence
  Description of Artificial Sequence: Synthetic oligonucleotide
uguagucaaucaguucuuc

SEQ ID NO: 2771059 - RNA, 19 nt, Artificial Sequence
  Description of Artificial Sequence: Synthetic oligonucleotide
uauacccagucaugagcac

SEQ ID NO: 2771060 - RNA, 19 nt, Artificial Sequence
  Description of Artificial Sequence: Synthetic oligonucleotide
acucauauacccagucaug

SEQ ID NO: 2771061 - RNA, 19 nt, Artificial Sequence
  Description of Artificial Sequence: Synthetic oligonucleotide
cucgagguuggccaugguc

SEQ ID NO: 2771062 - RNA, 19 nt, Artificial Sequence
  Description of Artificial Sequence: Synthetic oligonucleotide
accaggccacgcuguacgc

SEQ ID NO: 2771063 - RNA, 19 nt, Artificial Sequence
  Description of Artificial Sequence: Synthetic oligonucleotide
aaucaguucuucaggcuua

SEQ ID NO: 2771064 - RNA, 19 nt, Artificial Sequence
  Description of Artificial Sequence: Synthetic oligonucleotide
auaucgcccaccaggccac

SEQ ID NO: 2771065 - RNA, 19 nt, Artificial Sequence
  Description of Artificial Sequence: Synthetic oligonucleotide
agaccauggccaccacagg

SEQ ID NO: 2771066 - RNA, 19 nt, Artificial Sequence
  Description of Artificial Sequence: Synthetic oligonucleotide
ccugaguucauguacuuca

SEQ ID NO: 2771067 - RNA, 19 nt, Artificial Sequence
  Description of Artificial Sequence: Synthetic oligonucleotide
ucgaauggugccuggcuua

SEQ ID NO: 2771068 - RNA, 19 nt, Artificial Sequence
  Description of Artificial Sequence: Synthetic oligonucleotide
cuuaaaccauagacugauc

SEQ ID NO: 2771069 - RNA, 19 nt, Artificial Sequence
  Description of Artificial Sequence: Synthetic oligonucleotide
cuacucauauacccaguca

SEQ ID NO: 2771070 - RNA, 19 nt, Artificial Sequence
  Description of Artificial Sequence: Synthetic oligonucleotide
uggauuggucucucccagc

SEQ ID NO: 2771071 - RNA, 19 nt, Artificial Sequence
  Description of Artificial Sequence: Synthetic oligonucleotide
ucauucgaccugucuuuac

SEQ ID NO: 2771072 - RNA, 19 nt, Artificial Sequence
  Description of Artificial Sequence: Synthetic oligonucleotide
auguacuucaccagcccug

SEQ ID NO: 2771073 - RNA, 19 nt, Artificial Sequence
  Description of Artificial Sequence: Synthetic oligonucleotide
cugaucucuuucucugcac

SEQ ID NO: 2771074 - RNA, 19 nt, Artificial Sequence
  Description of Artificial Sequence: Synthetic oligonucleotide
ccucuacucauauacccag

SEQ ID NO: 2771075 - RNA, 19 nt, Artificial Sequence
  Description of Artificial Sequence: Synthetic oligonucleotide
accacaggcccugaguuca

SEQ ID NO: 2771076 - RNA, 19 nt, Artificial Sequence
  Description of Artificial Sequence: Synthetic oligonucleotide
acaggcccugaguucaugu

SEQ ID NO: 2771077 - RNA, 19 nt, Artificial Sequence
  Description of Artificial Sequence: Synthetic oligonucleotide
aggucaauguagugcugcu

SEQ ID NO: 2771078 - RNA, 19 nt, Artificial Sequence
  Description of Artificial Sequence: Synthetic oligonucleotide
cuucagguguuccucagaa

SEQ ID NO: 2771079 - RNA, 19 nt, Artificial Sequence
  Description of Artificial Sequence: Synthetic oligonucleotide
caccgaaucacugccauga

SEQ ID NO: 2771080 - RNA, 19 nt, Artificial Sequence
  Description of Artificial Sequence: Synthetic oligonucleotide
cugggaagaaaggacgguc

SEQ ID NO: 2771081 - RNA, 19 nt, Artificial Sequence
  Description of Artificial Sequence: Synthetic oligonucleotide
guuccucagaagcccgaag

SEQ ID NO: 2771082 - RNA, 19 nt, Artificial Sequence
  Description of Artificial Sequence: Synthetic oligonucleotide
agagccguguccagggauc

SEQ ID NO: 2771083 - RNA, 19 nt, Artificial Sequence
  Description of Artificial Sequence: Synthetic oligonucleotide
auacccagucaugagcaca

SEQ ID NO: 2771084 - RNA, 19 nt, Artificial Sequence
  Description of Artificial Sequence: Synthetic oligonucleotide
aggcuuguagucaaucagu

SEQ ID NO: 2771085 - RNA, 19 nt, Artificial Sequence
  Description of Artificial Sequence: Synthetic oligonucleotide
agucaugagcacaaggcuu

SEQ ID NO: 2771086 - RNA, 19 nt, Artificial Sequence
  Description of Artificial Sequence: Synthetic oligonucleotide
gcguuauccaccucuacuc

SEQ ID NO: 2771087 - RNA, 19 nt, Artificial Sequence
  Description of Artificial Sequence: Synthetic oligonucleotide
agugcugcuucagguguuc

SEQ ID NO: 2771088 - RNA, 19 nt, Artificial Sequence
  Description of Artificial Sequence: Synthetic oligonucleotide
cauagacugaucucuuucu

SEQ ID NO: 2771089 - RNA, 19 nt, Artificial Sequence
  Description of Artificial Sequence: Synthetic oligonucleotide
agggauccaucaguaaugu

SEQ ID NO: 2771090 - RNA, 19 nt, Artificial Sequence
  Description of Artificial Sequence: Synthetic oligonucleotide
uugcaccgaaucacugcca

SEQ ID NO: 2771091 - RNA, 19 nt, Artificial Sequence
  Description of Artificial Sequence: Synthetic oligonucleotide
ugccuggcuuagaaucagc

SEQ ID NO: 2771092 - RNA, 19 nt, Artificial Sequence
  Description of Artificial Sequence: Synthetic oligonucleotide
caggcggaaccccuucugc

SEQ ID NO: 2771093 - RNA, 19 nt, Artificial Sequence
  Description of Artificial Sequence: Synthetic oligonucleotide
accucuacucauauaccca

SEQ ID NO: 2771094 - RNA, 19 nt, Artificial Sequence
  Description of Artificial Sequence: Synthetic oligonucleotide
acuuugcaccgaaucacug

SEQ ID NO: 2771095 - RNA, 19 nt, Artificial Sequence
  Description of Artificial Sequence: Synthetic oligonucleotide
aggcggaaccccuucugcu

SEQ ID NO: 2771096 - RNA, 19 nt, Artificial Sequence
  Description of Artificial Sequence: Synthetic oligonucleotide
guagugcugcuucaggugu

SEQ ID NO: 2771097 - RNA, 19 nt, Artificial Sequence
  Description of Artificial Sequence: Synthetic oligonucleotide
uagaaucagcuggauuggu

SEQ ID NO: 2771098 - RNA, 19 nt, Artificial Sequence
  Description of Artificial Sequence: Synthetic oligonucleotide
gaagcccgaaggaacuuca

SEQ ID NO: 2771099 - RNA, 19 nt, Artificial Sequence
  Description of Artificial Sequence: Synthetic oligonucleotide
gaaccccuucugcucgaag

SEQ ID NO: 2771100 - RNA, 19 nt, Artificial Sequence
  Description of Artificial Sequence: Synthetic oligonucleotide
ggauuggucucucccagca

SEQ ID NO: 2771101 - RNA, 19 nt, Artificial Sequence
  Description of Artificial Sequence: Synthetic oligonucleotide
aagguacgcucgagguugg

SEQ ID NO: 2771102 - RNA, 19 nt, Artificial Sequence
  Description of Artificial Sequence: Synthetic oligonucleotide
caaugaagguacgcucgag

SEQ ID NO: 2771103 - RNA, 19 nt, Artificial Sequence
  Description of Artificial Sequence: Synthetic oligonucleotide
accagcccugggaagaaag

SEQ ID NO: 2771104 - RNA, 19 nt, Artificial Sequence
  Description of Artificial Sequence: Synthetic oligonucleotide
ucugcacuuugcaccgaau

SEQ ID NO: 2771105 - RNA, 19 nt, Artificial Sequence
  Description of Artificial Sequence: Synthetic oligonucleotide
uccagggauccaucaguaa

SEQ ID NO: 2771106 - RNA, 19 nt, Artificial Sequence
  Description of Artificial Sequence: Synthetic oligonucleotide
ggaacuucauggccaccag

SEQ ID NO: 2771107 - RNA, 19 nt, Artificial Sequence
  Description of Artificial Sequence: Synthetic oligonucleotide
ccgaaggaacuucauggcc

SEQ ID NO: 2771108 - RNA, 19 nt, Artificial Sequence
  Description of Artificial Sequence: Synthetic oligonucleotide
ccauagacugaucucuuuc

SEQ ID NO: 2771109 - RNA, 19 nt, Artificial Sequence
  Description of Artificial Sequence: Synthetic oligonucleotide
accauagacugaucucuuu

SEQ ID NO: 2771110 - RNA, 19 nt, Artificial Sequence
  Description of Artificial Sequence: Synthetic oligonucleotide
ucccagcaucauucgaccu

SEQ ID NO: 2771111 - RNA, 19 nt, Artificial Sequence
  Description of Artificial Sequence: Synthetic oligonucleotide
aucagcuggauuggucucu

SEQ ID NO: 2771112 - RNA, 19 nt, Artificial Sequence
  Description of Artificial Sequence: Synthetic oligonucleotide
gguguuccucagaagcccg

SEQ ID NO: 2771113 - RNA, 19 nt, Artificial Sequence
  Description of Artificial Sequence: Synthetic oligonucleotide
ccaucaguaauguggaaaa

SEQ ID NO: 2771114 - RNA, 19 nt, Artificial Sequence
  Description of Artificial Sequence: Synthetic oligonucleotide
cccagucaugagcacaagg

SEQ ID NO: 2771115 - RNA, 19 nt, Artificial Sequence
  Description of Artificial Sequence: Synthetic oligonucleotide
aaccauagacugaucucuu

SEQ ID NO: 2771116 - RNA, 19 nt, Artificial Sequence
  Description of Artificial Sequence: Synthetic oligonucleotide
cccgaaggaacuucauggc

SEQ ID NO: 2771117 - RNA, 19 nt, Artificial Sequence
  Description of Artificial Sequence: Synthetic oligonucleotide
cugccaaccugaaugcaaa

SEQ ID NO: 2771118 - RNA, 19 nt, Artificial Sequence
  Description of Artificial Sequence: Synthetic oligonucleotide
uguuccucagaagcccgaa

SEQ ID NO: 2771119 - RNA, 19 nt, Artificial Sequence
  Description of Artificial Sequence: Synthetic oligonucleotide
gcggaaccccuucugcucg

SEQ ID NO: 2771120 - RNA, 19 nt, Artificial Sequence
  Description of Artificial Sequence: Synthetic oligonucleotide
cugcucgaagcgcuugaug

SEQ ID NO: 2771121 - RNA, 19 nt, Artificial Sequence
  Description of Artificial Sequence: Synthetic oligonucleotide
ugccaaccugaaugcaaaa

SEQ ID NO: 2771122 - RNA, 19 nt, Artificial Sequence
  Description of Artificial Sequence: Synthetic oligonucleotide
guacuucaccagcccuggg

SEQ ID NO: 2771123 - RNA, 19 nt, Artificial Sequence
  Description of Artificial Sequence: Synthetic oligonucleotide
aucucuuucucugcacuuu

SEQ ID NO: 2771124 - RNA, 19 nt, Artificial Sequence
  Description of Artificial Sequence: Synthetic oligonucleotide
gcuuguagucaaucaguuc

SEQ ID NO: 2771125 - RNA, 19 nt, Artificial Sequence
  Description of Artificial Sequence: Synthetic oligonucleotide
auggccaccacaggcccug

SEQ ID NO: 2771126 - RNA, 19 nt, Artificial Sequence
  Description of Artificial Sequence: Synthetic oligonucleotide
caaucaguucuucaggcuu

SEQ ID NO: 2771127 - RNA, 19 nt, Artificial Sequence
  Description of Artificial Sequence: Synthetic oligonucleotide
gcuggauuggucucuccca

SEQ ID NO: 2771128 - RNA, 19 nt, Artificial Sequence
  Description of Artificial Sequence: Synthetic oligonucleotide
ccugucuuuaccacauuga

SEQ ID NO: 2771129 - RNA, 19 nt, Artificial Sequence
  Description of Artificial Sequence: Synthetic oligonucleotide
caggccacgcuguacgcca

SEQ ID NO: 2771130 - RNA, 19 nt, Artificial Sequence
  Description of Artificial Sequence: Synthetic oligonucleotide
ucaugagcacaaggcuugu

SEQ ID NO: 2771131 - RNA, 19 nt, Artificial Sequence
  Description of Artificial Sequence: Synthetic oligonucleotide
cagucaugagcacaaggcu

SEQ ID NO: 2771132 - RNA, 19 nt, Artificial Sequence
  Description of Artificial Sequence: Synthetic oligonucleotide
gagccguguccagggaucc

SEQ ID NO: 2771133 - RNA, 19 nt, Artificial Sequence
  Description of Artificial Sequence: Synthetic oligonucleotide
auggugccuggcuuagaau

SEQ ID NO: 2771134 - RNA, 19 nt, Artificial Sequence
  Description of Artificial Sequence: Synthetic oligonucleotide
ucagcuggauuggucucuc

SEQ ID NO: 2771135 - RNA, 19 nt, Artificial Sequence
  Description of Artificial Sequence: Synthetic oligonucleotide
uguacgccaucuggcuuga

SEQ ID NO: 2771136 - RNA, 19 nt, Artificial Sequence
  Description of Artificial Sequence: Synthetic oligonucleotide
ccaccucuacucauauacc

SEQ ID NO: 2771137 - RNA, 19 nt, Artificial Sequence
  Description of Artificial Sequence: Synthetic oligonucleotide
gaagagccguguccaggga

SEQ ID NO: 2771138 - RNA, 19 nt, Artificial Sequence
  Description of Artificial Sequence: Synthetic oligonucleotide
gugccuggcuuagaaucag

SEQ ID NO: 2771139 - RNA, 19 nt, Artificial Sequence
  Description of Artificial Sequence: Synthetic oligonucleotide
cauguacuucaccagcccu

SEQ ID NO: 2771140 - RNA, 19 nt, Artificial Sequence
  Description of Artificial Sequence: Synthetic oligonucleotide
cgaaggaacuucauggcca

SEQ ID NO: 2771141 - RNA, 19 nt, Artificial Sequence
  Description of Artificial Sequence: Synthetic oligonucleotide
guuauccaccucuacucau

SEQ ID NO: 2771142 - RNA, 19 nt, Artificial Sequence
  Description of Artificial Sequence: Synthetic oligonucleotide
uagugcugcuucagguguu

SEQ ID NO: 2771143 - RNA, 19 nt, Artificial Sequence
  Description of Artificial Sequence: Synthetic oligonucleotide
cuucugcucgaagcgcuug

SEQ ID NO: 2771144 - RNA, 19 nt, Artificial Sequence
  Description of Artificial Sequence: Synthetic oligonucleotide
uacgcucgagguuggccau

SEQ ID NO: 2771145 - RNA, 19 nt, Artificial Sequence
  Description of Artificial Sequence: Synthetic oligonucleotide
gcuuaaaccauagacugau

SEQ ID NO: 2771146 - RNA, 19 nt, Artificial Sequence
  Description of Artificial Sequence: Synthetic oligonucleotide
caucauucgaccugucuuu

SEQ ID NO: 2771147 - RNA, 19 nt, Artificial Sequence
  Description of Artificial Sequence: Synthetic oligonucleotide
uccccucgaauggugccug

SEQ ID NO: 2771148 - RNA, 19 nt, Artificial Sequence
  Description of Artificial Sequence: Synthetic oligonucleotide
gaucucuuucucugcacuu

SEQ ID NO: 2771149 - RNA, 19 nt, Artificial Sequence
  Description of Artificial Sequence: Synthetic oligonucleotide
caccacaggcccugaguuc

SEQ ID NO: 2771150 - RNA, 19 nt, Artificial Sequence
  Description of Artificial Sequence: Synthetic oligonucleotide
agccccucccagaccaugg

SEQ ID NO: 2771151 - RNA, 19 nt, Artificial Sequence
  Description of Artificial Sequence: Synthetic oligonucleotide
accaggcggaaccccuucu

SEQ ID NO: 2771152 - RNA, 19 nt, Artificial Sequence
  Description of Artificial Sequence: Synthetic oligonucleotide
cccagcaucauucgaccug

SEQ ID NO: 2771153 - RNA, 19 nt, Artificial Sequence
  Description of Artificial Sequence: Synthetic oligonucleotide
ccagcccugggaagaaagg

SEQ ID NO: 2771154 - RNA, 19 nt, Artificial Sequence
  Description of Artificial Sequence: Synthetic oligonucleotide
gguacgcucgagguuggcc

SEQ ID NO: 2771155 - RNA, 19 nt, Artificial Sequence
  Description of Artificial Sequence: Synthetic oligonucleotide
ucugcucgaagcgcuugau

SEQ ID NO: 2771156 - RNA, 19 nt, Artificial Sequence
  Description of Artificial Sequence: Synthetic oligonucleotide
gacccagcguuauccaccu

SEQ ID NO: 2771157 - RNA, 19 nt, Artificial Sequence
  Description of Artificial Sequence: Synthetic oligonucleotide
gcaaugaagguacgcucga

SEQ ID NO: 2771158 - RNA, 19 nt, Artificial Sequence
  Description of Artificial Sequence: Synthetic oligonucleotide
auccaucaguaauguggaa

SEQ ID NO: 2771159 - RNA, 19 nt, Artificial Sequence
  Description of Artificial Sequence: Synthetic oligonucleotide
aucuggcuugauggcaaug

SEQ ID NO: 2771160 - RNA, 19 nt, Artificial Sequence
  Description of Artificial Sequence: Synthetic oligonucleotide
cagcguuauccaccucuac

SEQ ID NO: 2771161 - RNA, 19 nt, Artificial Sequence
  Description of Artificial Sequence: Synthetic oligonucleotide
accgaaucacugccaugaa

SEQ ID NO: 2771162 - RNA, 19 nt, Artificial Sequence
  Description of Artificial Sequence: Synthetic oligonucleotide
auccccucgaauggugccu

SEQ ID NO: 2771163 - RNA, 19 nt, Artificial Sequence
  Description of Artificial Sequence: Synthetic oligonucleotide
cacuuugcaccgaaucacu

SEQ ID NO: 2771164 - RNA, 19 nt, Artificial Sequence
  Description of Artificial Sequence: Synthetic oligonucleotide
aucauucgaccugucuuua

SEQ ID NO: 2771165 - RNA, 19 nt, Artificial Sequence
  Description of Artificial Sequence: Synthetic oligonucleotide
aucaguucuucaggcuuaa

SEQ ID NO: 2771166 - RNA, 19 nt, Artificial Sequence
  Description of Artificial Sequence: Synthetic oligonucleotide
agguacgcucgagguuggc

SEQ ID NO: 2771167 - RNA, 19 nt, Artificial Sequence
  Description of Artificial Sequence: Synthetic oligonucleotide
gcaucauucgaccugucuu

SEQ ID NO: 2771168 - RNA, 19 nt, Artificial Sequence
  Description of Artificial Sequence: Synthetic oligonucleotide
cuggcuugauggcaaugaa

SEQ ID NO: 2771169 - RNA, 19 nt, Artificial Sequence
  Description of Artificial Sequence: Synthetic oligonucleotide
cagcccugggaagaaagga

SEQ ID NO: 2771170 - RNA, 19 nt, Artificial Sequence
  Description of Artificial Sequence: Synthetic oligonucleotide
ggcggaaccccuucugcuc

SEQ ID NO: 2771171 - RNA, 19 nt, Artificial Sequence
  Description of Artificial Sequence: Synthetic oligonucleotide
cagcuggauuggucucucc

SEQ ID NO: 2771172 - RNA, 19 nt, Artificial Sequence
  Description of Artificial Sequence: Synthetic oligonucleotide
gggauccaucaguaaugug

SEQ ID NO: 2771173 - RNA, 19 nt, Artificial Sequence
  Description of Artificial Sequence: Synthetic oligonucleotide
ccauggccaccacaggccc

SEQ ID NO: 2771174 - RNA, 19 nt, Artificial Sequence
  Description of Artificial Sequence: Synthetic oligonucleotide
ggugccuggcuuagaauca

SEQ ID NO: 2771175 - RNA, 19 nt, Artificial Sequence
  Description of Artificial Sequence: Synthetic oligonucleotide
ggcuuaaaccauagacuga

SEQ ID NO: 2771176 - RNA, 19 nt, Artificial Sequence
  Description of Artificial Sequence: Synthetic oligonucleotide
cucucccagcaucauucga

SEQ ID NO: 2771177 - RNA, 19 nt, Artificial Sequence
  Description of Artificial Sequence: Synthetic oligonucleotide
uaucgcccaccaggccacg

SEQ ID NO: 2771178 - RNA, 19 nt, Artificial Sequence
  Description of Artificial Sequence: Synthetic oligonucleotide
cucgaagcgcuugaugaua

SEQ ID NO: 2771179 - RNA, 19 nt, Artificial Sequence
  Description of Artificial Sequence: Synthetic oligonucleotide
gcacaaggcuuguagucaa

SEQ ID NO: 2771180 - RNA, 19 nt, Artificial Sequence
  Description of Artificial Sequence: Synthetic oligonucleotide
aagcccgaaggaacuucau

SEQ ID NO: 2771181 - RNA, 19 nt, Artificial Sequence
  Description of Artificial Sequence: Synthetic oligonucleotide
uggccaccaggcggaaccc

SEQ ID NO: 2771182 - RNA, 19 nt, Artificial Sequence
  Description of Artificial Sequence: Synthetic oligonucleotide
cucugcacuuugcaccgaa

SEQ ID NO: 2771183 - RNA, 19 nt, Artificial Sequence
  Description of Artificial Sequence: Synthetic oligonucleotide
ucaguucuucaggcuuaaa

SEQ ID NO: 2771184 - RNA, 19 nt, Artificial Sequence
  Description of Artificial Sequence: Synthetic oligonucleotide
guggaaugaagagccgugu

SEQ ID NO: 2771185 - RNA, 19 nt, Artificial Sequence
  Description of Artificial Sequence: Synthetic oligonucleotide
cucuacucauauacccagu

SEQ ID NO: 2771186 - RNA, 19 nt, Artificial Sequence
  Description of Artificial Sequence: Synthetic oligonucleotide
cuguggaaugaagagccgu

SEQ ID NO: 2771187 - RNA, 19 nt, Artificial Sequence
  Description of Artificial Sequence: Synthetic oligonucleotide
auccaccucuacucauaua

SEQ ID NO: 2771188 - RNA, 19 nt, Artificial Sequence
  Description of Artificial Sequence: Synthetic oligonucleotide
caccaggcggaaccccuuc

SEQ ID NO: 2771189 - RNA, 19 nt, Artificial Sequence
  Description of Artificial Sequence: Synthetic oligonucleotide
guccagggauccaucagua

SEQ ID NO: 2771190 - RNA, 19 nt, Artificial Sequence
  Description of Artificial Sequence: Synthetic oligonucleotide
ucucugcacuuugcaccga

SEQ ID NO: 2771191 - RNA, 19 nt, Artificial Sequence
  Description of Artificial Sequence: Synthetic oligonucleotide
acccagucaugagcacaag

SEQ ID NO: 2771192 - RNA, 19 nt, Artificial Sequence
  Description of Artificial Sequence: Synthetic oligonucleotide
gugcugcuucagguguucc

SEQ ID NO: 2771193 - RNA, 19 nt, Artificial Sequence
  Description of Artificial Sequence: Synthetic oligonucleotide
gaauggugccuggcuuaga

SEQ ID NO: 2771194 - RNA, 19 nt, Artificial Sequence
  Description of Artificial Sequence: Synthetic oligonucleotide
gcaccgaaucacugccaug

SEQ ID NO: 2771195 - RNA, 19 nt, Artificial Sequence
  Description of Artificial Sequence: Synthetic oligonucleotide
ugagccccucccagaccau

SEQ ID NO: 2771196 - RNA, 19 nt, Artificial Sequence
  Description of Artificial Sequence: Synthetic oligonucleotide
acccagcguuauccaccuc

SEQ ID NO: 2771197 - RNA, 19 nt, Artificial Sequence
  Description of Artificial Sequence: Synthetic oligonucleotide
cccucccagaccauggcca

SEQ ID NO: 2771198 - RNA, 19 nt, Artificial Sequence
  Description of Artificial Sequence: Synthetic oligonucleotide
cucgaauggugccuggcuu

SEQ ID NO: 2771199 - RNA, 19 nt, Artificial Sequence
  Description of Artificial Sequence: Synthetic oligonucleotide
gccaucuggcuugauggca

SEQ ID NO: 2771200 - RNA, 19 nt, Artificial Sequence
  Description of Artificial Sequence: Synthetic oligonucleotide
ccaucuggcuugauggcaa

SEQ ID NO: 2771201 - RNA, 19 nt, Artificial Sequence
  Description of Artificial Sequence: Synthetic oligonucleotide
caggcccugaguucaugua

SEQ ID NO: 2771202 - RNA, 19 nt, Artificial Sequence
  Description of Artificial Sequence: Synthetic oligonucleotide
guguuccucagaagcccga

SEQ ID NO: 2771203 - RNA, 19 nt, Artificial Sequence
  Description of Artificial Sequence: Synthetic oligonucleotide
cacaggcccugaguucaug

SEQ ID NO: 2771204 - RNA, 19 nt, Artificial Sequence
  Description of Artificial Sequence: Synthetic oligonucleotide
gcuuagaaucagcuggauu

SEQ ID NO: 2771205 - RNA, 19 nt, Artificial Sequence
  Description of Artificial Sequence: Synthetic oligonucleotide
ccaggcggaaccccuucug

SEQ ID NO: 2771206 - RNA, 19 nt, Artificial Sequence
  Description of Artificial Sequence: Synthetic oligonucleotide
cagcaucauucgaccuguc

SEQ ID NO: 2771207 - RNA, 19 nt, Artificial Sequence
  Description of Artificial Sequence: Synthetic oligonucleotide
ccagggauccaucaguaau

SEQ ID NO: 2771208 - RNA, 19 nt, Artificial Sequence
  Description of Artificial Sequence: Synthetic oligonucleotide
cauggccaccaggcggaac

SEQ ID NO: 2771209 - RNA, 19 nt, Artificial Sequence
  Description of Artificial Sequence: Synthetic oligonucleotide
cguuauccaccucuacuca

SEQ ID NO: 2771210 - RNA, 19 nt, Artificial Sequence
  Description of Artificial Sequence: Synthetic oligonucleotide
uuaccacauugagccccuc

SEQ ID NO: 2771211 - RNA, 19 nt, Artificial Sequence
  Description of Artificial Sequence: Synthetic oligonucleotide
cccagcguuauccaccucu

SEQ ID NO: 2771212 - RNA, 19 nt, Artificial Sequence
  Description of Artificial Sequence: Synthetic oligonucleotide
acgcucgagguuggccaug

SEQ ID NO: 2771213 - RNA, 19 nt, Artificial Sequence
  Description of Artificial Sequence: Synthetic oligonucleotide
ccacauugagccccuccca

SEQ ID NO: 2771214 - RNA, 19 nt, Artificial Sequence
  Description of Artificial Sequence: Synthetic oligonucleotide
ccaggccacgcuguacgcc

SEQ ID NO: 2771215 - RNA, 19 nt, Artificial Sequence
  Description of Artificial Sequence: Synthetic oligonucleotide
cgaauggugccuggcuuag

SEQ ID NO: 2771216 - RNA, 19 nt, Artificial Sequence
  Description of Artificial Sequence: Synthetic oligonucleotide
ggcuuguagucaaucaguu

SEQ ID NO: 2771217 - RNA, 19 nt, Artificial Sequence
  Description of Artificial Sequence: Synthetic oligonucleotide
gggaagaaaggacggucuu

SEQ ID NO: 2771218 - RNA, 19 nt, Artificial Sequence
  Description of Artificial Sequence: Synthetic oligonucleotide
ggccaccacaggcccugag

SEQ ID NO: 2771219 - RNA, 19 nt, Artificial Sequence
  Description of Artificial Sequence: Synthetic oligonucleotide
cguguccagggauccauca

SEQ ID NO: 2771220 - RNA, 19 nt, Artificial Sequence
  Description of Artificial Sequence: Synthetic oligonucleotide
ggaagaaaggacggucuuu

SEQ ID NO: 2771221 - RNA, 19 nt, Artificial Sequence
  Description of Artificial Sequence: Synthetic oligonucleotide
ccucagaagcccgaaggaa

SEQ ID NO: 2771222 - RNA, 19 nt, Artificial Sequence
  Description of Artificial Sequence: Synthetic oligonucleotide
ccccuucugcucgaagcgc

SEQ ID NO: 2771223 - RNA, 19 nt, Artificial Sequence
  Description of Artificial Sequence: Synthetic oligonucleotide
caugagcacaaggcuugua

SEQ ID NO: 2771224 - RNA, 19 nt, Artificial Sequence
  Description of Artificial Sequence: Synthetic oligonucleotide
agccguguccagggaucca

SEQ ID NO: 2771225 - RNA, 19 nt, Artificial Sequence
  Description of Artificial Sequence: Synthetic oligonucleotide
cccucgaauggugccuggc

SEQ ID NO: 2771226 - RNA, 19 nt, Artificial Sequence
  Description of Artificial Sequence: Synthetic oligonucleotide
gccuggcuuagaaucagcu

SEQ ID NO: 2771227 - RNA, 19 nt, Artificial Sequence
  Description of Artificial Sequence: Synthetic oligonucleotide
gcucgaagcgcuugaugau

SEQ ID NO: 2771228 - RNA, 19 nt, Artificial Sequence
  Description of Artificial Sequence: Synthetic oligonucleotide
cacaaggcuuguagucaau

SEQ ID NO: 2771229 - RNA, 19 nt, Artificial Sequence
  Description of Artificial Sequence: Synthetic oligonucleotide
ccagcguuauccaccucua

SEQ ID NO: 2771230 - RNA, 19 nt, Artificial Sequence
  Description of Artificial Sequence: Synthetic oligonucleotide
cgcucgagguuggccaugg

SEQ ID NO: 2771231 - RNA, 19 nt, Artificial Sequence
  Description of Artificial Sequence: Synthetic oligonucleotide
ccccucgaauggugccugg

SEQ ID NO: 2771232 - RNA, 19 nt, Artificial Sequence
  Description of Artificial Sequence: Synthetic oligonucleotide
ccacgcuguacgccaucug

SEQ ID NO: 2771233 - RNA, 19 nt, Artificial Sequence
  Description of Artificial Sequence: Synthetic oligonucleotide
ccagcaucauucgaccugu

SEQ ID NO: 2771234 - RNA, 19 nt, Artificial Sequence
  Description of Artificial Sequence: Synthetic oligonucleotide
ggccaccaggcggaacccc

SEQ ID NO: 2771235 - RNA, 19 nt, Artificial Sequence
  Description of Artificial Sequence: Synthetic oligonucleotide
ccguguccagggauccauc

SEQ ID NO: 2771236 - RNA, 19 nt, Artificial Sequence
  Description of Artificial Sequence: Synthetic oligonucleotide
uggccaccacaggcccuga

SEQ ID NO: 2771237 - RNA, 19 nt, Artificial Sequence
  Description of Artificial Sequence: Synthetic oligonucleotide
gcuguacgccaucuggcuu

SEQ ID NO: 2771238 - RNA, 19 nt, Artificial Sequence
  Description of Artificial Sequence: Synthetic oligonucleotide
cgaagcgcuugaugauauc

SEQ ID NO: 2771239 - RNA, 19 nt, Artificial Sequence
  Description of Artificial Sequence: Synthetic oligonucleotide
ggucucucccagcaucauu

SEQ ID NO: 2771240 - RNA, 19 nt, Artificial Sequence
  Description of Artificial Sequence: Synthetic oligonucleotide
ccucgaauggugccuggcu

SEQ ID NO: 2771241 - RNA, 19 nt, Artificial Sequence
  Description of Artificial Sequence: Synthetic oligonucleotide
ccaccaggccacgcuguac

SEQ ID NO: 2771242 - RNA, 19 nt, Artificial Sequence
  Description of Artificial Sequence: Synthetic oligonucleotide
ggccacgcuguacgccauc

SEQ ID NO: 2771243 - RNA, 19 nt, Artificial Sequence
  Description of Artificial Sequence: Synthetic oligonucleotide
cgaccugucuuuaccacau

SEQ ID NO: 2771244 - RNA, 19 nt, Artificial Sequence
  Description of Artificial Sequence: Synthetic oligonucleotide
ccgaaucacugccaugaau

SEQ ID NO: 2771245 - RNA, 19 nt, Artificial Sequence
  Description of Artificial Sequence: Synthetic oligonucleotide
aggccacgcuguacgccau

SEQ ID NO: 2771246 - RNA, 19 nt, Artificial Sequence
  Description of Artificial Sequence: Synthetic oligonucleotide
ggcuuagaaucagcuggau

SEQ ID NO: 2771247 - RNA, 19 nt, Artificial Sequence
  Description of Artificial Sequence: Synthetic oligonucleotide
ggaaccccuucugcucgaa

SEQ ID NO: 2771248 - RNA, 19 nt, Artificial Sequence
  Description of Artificial Sequence: Synthetic oligonucleotide
gccacgcuguacgccaucu

SEQ ID NO: 2771249 - RNA, 19 nt, Artificial Sequence
  Description of Artificial Sequence: Synthetic oligonucleotide
caccagcccugggaagaaa

SEQ ID NO: 2771250 - RNA, 19 nt, Artificial Sequence
  Description of Artificial Sequence: Synthetic oligonucleotide
gccaccaggcggaaccccu

SEQ ID NO: 2771251 - RNA, 19 nt, Artificial Sequence
  Description of Artificial Sequence: Synthetic oligonucleotide
cgcuguacgccaucuggcu

SEQ ID NO: 2771252 - RNA, 19 nt, Artificial Sequence
  Description of Artificial Sequence: Synthetic oligonucleotide
cagaagcccgaaggaacuu

SEQ ID NO: 2771253 - RNA, 19 nt, Artificial Sequence
  Description of Artificial Sequence: Synthetic oligonucleotide
gccguguccagggauccau

SEQ ID NO: 2771254 - RNA, 19 nt, Artificial Sequence
  Description of Artificial Sequence: Synthetic oligonucleotide
gcccugaguucauguacuu

SEQ ID NO: 2771255 - RNA, 19 nt, Artificial Sequence
  Description of Artificial Sequence: Synthetic oligonucleotide
cggaaccccuucugcucga

SEQ ID NO: 2771256 - RNA, 19 nt, Artificial Sequence
  Description of Artificial Sequence: Synthetic oligonucleotide
gcccaccaggccacgcugu

SEQ ID NO: 2771257 - RNA, 19 nt, Artificial Sequence
  Description of Artificial Sequence: Synthetic oligonucleotide
ccaccaggcggaaccccuu

SEQ ID NO: 2771258 - RNA, 19 nt, Artificial Sequence
  Description of Artificial Sequence: Synthetic oligonucleotide
guacgccaucuggcuugau

SEQ ID NO: 2771259 - RNA, 19 nt, Artificial Sequence
  Description of Artificial Sequence: Synthetic oligonucleotide
ccacaggcccugaguucau

SEQ ID NO: 2771260 - RNA, 19 nt, Artificial Sequence
  Description of Artificial Sequence: Synthetic oligonucleotide
uuaggaauuagcauuaggg

SEQ ID NO: 2771261 - RNA, 19 nt, Artificial Sequence
  Description of Artificial Sequence: Synthetic oligonucleotide
ucaagaaagaggaagaagc

SEQ ID NO: 2771262 - RNA, 19 nt, Artificial Sequence
  Description of Artificial Sequence: Synthetic oligonucleotide
aggaauuagcauuagggcc

SEQ ID NO: 2771263 - RNA, 19 nt, Artificial Sequence
  Description of Artificial Sequence: Synthetic oligonucleotide
aaccaugaacuuuaccucc

SEQ ID NO: 2771264 - RNA, 19 nt, Artificial Sequence
  Description of Artificial Sequence: Synthetic oligonucleotide
aacaaagcgacgguuauac

SEQ ID NO: 2771265 - RNA, 19 nt, Artificial Sequence
  Description of Artificial Sequence: Synthetic oligonucleotide
gaagauggagucaagaaag

SEQ ID NO: 2771266 - RNA, 19 nt, Artificial Sequence
  Description of Artificial Sequence: Synthetic oligonucleotide
cauguuggcgacuaaaccg

SEQ ID NO: 2771267 - RNA, 19 nt, Artificial Sequence
  Description of Artificial Sequence: Synthetic oligonucleotide
aaagcgacgguuauacugc

SEQ ID NO: 2771268 - RNA, 19 nt, Artificial Sequence
  Description of Artificial Sequence: Synthetic oligonucleotide
uguuuggccaccuugggag

SEQ ID NO: 2771269 - RNA, 19 nt, Artificial Sequence
  Description of Artificial Sequence: Synthetic oligonucleotide
ugaacuuuaccucccaaca

SEQ ID NO: 2771270 - RNA, 19 nt, Artificial Sequence
  Description of Artificial Sequence: Synthetic oligonucleotide
ucuuguuuggccaccuugg

SEQ ID NO: 2771271 - RNA, 19 nt, Artificial Sequence
  Description of Artificial Sequence: Synthetic oligonucleotide
caugcgaccagcuacuucc

SEQ ID NO: 2771272 - RNA, 19 nt, Artificial Sequence
  Description of Artificial Sequence: Synthetic oligonucleotide
gucaaaguggcuuuauuag

SEQ ID NO: 2771273 - RNA, 19 nt, Artificial Sequence
  Description of Artificial Sequence: Synthetic oligonucleotide
augaacuuuaccucccaac

SEQ ID NO: 2771274 - RNA, 19 nt, Artificial Sequence
  Description of Artificial Sequence: Synthetic oligonucleotide
caagaaagaggaagaagcg

SEQ ID NO: 2771275 - RNA, 19 nt, Artificial Sequence
  Description of Artificial Sequence: Synthetic oligonucleotide
caaaguggcuuuauuagag

SEQ ID NO: 2771276 - RNA, 19 nt, Artificial Sequence
  Description of Artificial Sequence: Synthetic oligonucleotide
uuccagaguagucagggcc

SEQ ID NO: 2771277 - RNA, 19 nt, Artificial Sequence
  Description of Artificial Sequence: Synthetic oligonucleotide
aaaugccuuccagugaggc

SEQ ID NO: 2771278 - RNA, 19 nt, Artificial Sequence
  Description of Artificial Sequence: Synthetic oligonucleotide
uuagagugcaagaaucaca

SEQ ID NO: 2771279 - RNA, 19 nt, Artificial Sequence
  Description of Artificial Sequence: Synthetic oligonucleotide
accacguuaacaaagcgac

SEQ ID NO: 2771280 - RNA, 19 nt, Artificial Sequence
  Description of Artificial Sequence: Synthetic oligonucleotide
aaguggcuuuauuagagug

SEQ ID NO: 2771281 - RNA, 19 nt, Artificial Sequence
  Description of Artificial Sequence: Synthetic oligonucleotide
uuuaccucccaacaugcga

SEQ ID NO: 2771282 - RNA, 19 nt, Artificial Sequence
  Description of Artificial Sequence: Synthetic oligonucleotide
acgguuauacugcauccgc

SEQ ID NO: 2771283 - RNA, 19 nt, Artificial Sequence
  Description of Artificial Sequence: Synthetic oligonucleotide
caaagcgacgguuauacug

SEQ ID NO: 2771284 - RNA, 19 nt, Artificial Sequence
  Description of Artificial Sequence: Synthetic oligonucleotide
cacgacuugaucuuccggg

SEQ ID NO: 2771285 - RNA, 19 nt, Artificial Sequence
  Description of Artificial Sequence: Synthetic oligonucleotide
cacguuaacaaagcgacgg

SEQ ID NO: 2771286 - RNA, 19 nt, Artificial Sequence
  Description of Artificial Sequence: Synthetic oligonucleotide
agaaagaggaagaagcgag

SEQ ID NO: 2771287 - RNA, 19 nt, Artificial Sequence
  Description of Artificial Sequence: Synthetic oligonucleotide
aaaccgcggacgccgaagc

SEQ ID NO: 2771288 - RNA, 19 nt, Artificial Sequence
  Description of Artificial Sequence: Synthetic oligonucleotide
ugaccucucacuuuuccag

SEQ ID NO: 2771289 - RNA, 19 nt, Artificial Sequence
  Description of Artificial Sequence: Synthetic oligonucleotide
uccagcacgagcuagggaa

SEQ ID NO: 2771290 - RNA, 19 nt, Artificial Sequence
  Description of Artificial Sequence: Synthetic oligonucleotide
aaggacuuaggaauuagca

SEQ ID NO: 2771291 - RNA, 19 nt, Artificial Sequence
  Description of Artificial Sequence: Synthetic oligonucleotide
auuagagugcaagaaucac

SEQ ID NO: 2771292 - RNA, 19 nt, Artificial Sequence
  Description of Artificial Sequence: Synthetic oligonucleotide
aaaagcacgacuugaucuu

SEQ ID NO: 2771293 - RNA, 19 nt, Artificial Sequence
  Description of Artificial Sequence: Synthetic oligonucleotide
gcugcuaccgcgaagaugg

SEQ ID NO: 2771294 - RNA, 19 nt, Artificial Sequence
  Description of Artificial Sequence: Synthetic oligonucleotide
ucaaaguggcuuuauuaga

SEQ ID NO: 2771295 - RNA, 19 nt, Artificial Sequence
  Description of Artificial Sequence: Synthetic oligonucleotide
gagugcaagaaucacagaa

SEQ ID NO: 2771296 - RNA, 19 nt, Artificial Sequence
  Description of Artificial Sequence: Synthetic oligonucleotide
ucacuuuuccagcacgagc

SEQ ID NO: 2771297 - RNA, 19 nt, Artificial Sequence
  Description of Artificial Sequence: Synthetic oligonucleotide
aucacagaaggacuuagga

SEQ ID NO: 2771298 - RNA, 19 nt, Artificial Sequence
  Description of Artificial Sequence: Synthetic oligonucleotide
cuuaggaauuagcauuagg

SEQ ID NO: 2771299 - RNA, 19 nt, Artificial Sequence
  Description of Artificial Sequence: Synthetic oligonucleotide
aguggcuuuauuagagugc

SEQ ID NO: 2771300 - RNA, 19 nt, Artificial Sequence
  Description of Artificial Sequence: Synthetic oligonucleotide
acuuuaccucccaacaugc

SEQ ID NO: 2771301 - RNA, 19 nt, Artificial Sequence
  Description of Artificial Sequence: Synthetic oligonucleotide
aaaguggcuuuauuagagu

SEQ ID NO: 2771302 - RNA, 19 nt, Artificial Sequence
  Description of Artificial Sequence: Synthetic oligonucleotide
acuuccagaguagucaggg

SEQ ID NO: 2771303 - RNA, 19 nt, Artificial Sequence
  Description of Artificial Sequence: Synthetic oligonucleotide
uuaccucccaacaugcgac

SEQ ID NO: 2771304 - RNA, 19 nt, Artificial Sequence
  Description of Artificial Sequence: Synthetic oligonucleotide
aagaaagaggaagaagcga

SEQ ID NO: 2771305 - RNA, 19 nt, Artificial Sequence
  Description of Artificial Sequence: Synthetic oligonucleotide
gacuaaaccgcggacgccg

SEQ ID NO: 2771306 - RNA, 19 nt, Artificial Sequence
  Description of Artificial Sequence: Synthetic oligonucleotide
cuugccaaagguuggcacc

SEQ ID NO: 2771307 - RNA, 19 nt, Artificial Sequence
  Description of Artificial Sequence: Synthetic oligonucleotide
auguuggcgacuaaaccgc

SEQ ID NO: 2771308 - RNA, 19 nt, Artificial Sequence
  Description of Artificial Sequence: Synthetic oligonucleotide
aguagucagggccucuacg

SEQ ID NO: 2771309 - RNA, 19 nt, Artificial Sequence
  Description of Artificial Sequence: Synthetic oligonucleotide
aaagguuggcaccacguua

SEQ ID NO: 2771310 - RNA, 19 nt, Artificial Sequence
  Description of Artificial Sequence: Synthetic oligonucleotide
uuaacaaagcgacgguuau

SEQ ID NO: 2771311 - RNA, 19 nt, Artificial Sequence
  Description of Artificial Sequence: Synthetic oligonucleotide
gguuauacugcauccgccg

SEQ ID NO: 2771312 - RNA, 19 nt, Artificial Sequence
  Description of Artificial Sequence: Synthetic oligonucleotide
uagggaaccaugaacuuua

SEQ ID NO: 2771313 - RNA, 19 nt, Artificial Sequence
  Description of Artificial Sequence: Synthetic oligonucleotide
aaucacagaaggacuuagg

SEQ ID NO: 2771314 - RNA, 19 nt, Artificial Sequence
  Description of Artificial Sequence: Synthetic oligonucleotide
guagucagggccucuacgc

SEQ ID NO: 2771315 - RNA, 19 nt, Artificial Sequence
  Description of Artificial Sequence: Synthetic oligonucleotide
ugcaagaaucacagaagga

SEQ ID NO: 2771316 - RNA, 19 nt, Artificial Sequence
  Description of Artificial Sequence: Synthetic oligonucleotide
ugcauguuggcgacuaaac

SEQ ID NO: 2771317 - RNA, 19 nt, Artificial Sequence
  Description of Artificial Sequence: Synthetic oligonucleotide
agagcugcauguuggcgac

SEQ ID NO: 2771318 - RNA, 19 nt, Artificial Sequence
  Description of Artificial Sequence: Synthetic oligonucleotide
uggcaccacguuaacaaag

SEQ ID NO: 2771319 - RNA, 19 nt, Artificial Sequence
  Description of Artificial Sequence: Synthetic oligonucleotide
ugggcgcgcacaaagagcu

SEQ ID NO: 2771320 - RNA, 19 nt, Artificial Sequence
  Description of Artificial Sequence: Synthetic oligonucleotide
ggaauuagcauuagggccc

SEQ ID NO: 2771321 - RNA, 19 nt, Artificial Sequence
  Description of Artificial Sequence: Synthetic oligonucleotide
acgacuugaucuuccgggg

SEQ ID NO: 2771322 - RNA, 19 nt, Artificial Sequence
  Description of Artificial Sequence: Synthetic oligonucleotide
uggccggucaccucgagug

SEQ ID NO: 2771323 - RNA, 19 nt, Artificial Sequence
  Description of Artificial Sequence: Synthetic oligonucleotide
agugcaagaaucacagaag

SEQ ID NO: 2771324 - RNA, 19 nt, Artificial Sequence
  Description of Artificial Sequence: Synthetic oligonucleotide
auuagggcccuucuucuug

SEQ ID NO: 2771325 - RNA, 19 nt, Artificial Sequence
  Description of Artificial Sequence: Synthetic oligonucleotide
aggacuuaggaauuagcau

SEQ ID NO: 2771326 - RNA, 19 nt, Artificial Sequence
  Description of Artificial Sequence: Synthetic oligonucleotide
agcgagggcgcgcacgucc

SEQ ID NO: 2771327 - RNA, 19 nt, Artificial Sequence
  Description of Artificial Sequence: Synthetic oligonucleotide
aaagcacgacuugaucuuc

SEQ ID NO: 2771328 - RNA, 19 nt, Artificial Sequence
  Description of Artificial Sequence: Synthetic oligonucleotide
uccagugaggccacaugag

SEQ ID NO: 2771329 - RNA, 19 nt, Artificial Sequence
  Description of Artificial Sequence: Synthetic oligonucleotide
aguguguguagucccuggg

SEQ ID NO: 2771330 - RNA, 19 nt, Artificial Sequence
  Description of Artificial Sequence: Synthetic oligonucleotide
uuugaucugagcgaccguc

SEQ ID NO: 2771331 - RNA, 19 nt, Artificial Sequence
  Description of Artificial Sequence: Synthetic oligonucleotide
uccagaguagucagggccu

SEQ ID NO: 2771332 - RNA, 19 nt, Artificial Sequence
  Description of Artificial Sequence: Synthetic oligonucleotide
ugagcgaccgucucuuggc

SEQ ID NO: 2771333 - RNA, 19 nt, Artificial Sequence
  Description of Artificial Sequence: Synthetic oligonucleotide
auuagcauuagggcccuuc

SEQ ID NO: 2771334 - RNA, 19 nt, Artificial Sequence
  Description of Artificial Sequence: Synthetic oligonucleotide
ucucacuuuuccagcacga

SEQ ID NO: 2771335 - RNA, 19 nt, Artificial Sequence
  Description of Artificial Sequence: Synthetic oligonucleotide
gcaagaaucacagaaggac

SEQ ID NO: 2771336 - RNA, 19 nt, Artificial Sequence
  Description of Artificial Sequence: Synthetic oligonucleotide
uguguagucccugggcgcg

SEQ ID NO: 2771337 - RNA, 19 nt, Artificial Sequence
  Description of Artificial Sequence: Synthetic oligonucleotide
uuggcgacuaaaccgcgga

SEQ ID NO: 2771338 - RNA, 19 nt, Artificial Sequence
  Description of Artificial Sequence: Synthetic oligonucleotide
cuacuuccagaguagucag

SEQ ID NO: 2771339 - RNA, 19 nt, Artificial Sequence
  Description of Artificial Sequence: Synthetic oligonucleotide
gacgguuauacugcauccg

SEQ ID NO: 2771340 - RNA, 19 nt, Artificial Sequence
  Description of Artificial Sequence: Synthetic oligonucleotide
agcuagggaaccaugaacu

SEQ ID NO: 2771341 - RNA, 19 nt, Artificial Sequence
  Description of Artificial Sequence: Synthetic oligonucleotide
uuuugggucaaaguggcuu

SEQ ID NO: 2771342 - RNA, 19 nt, Artificial Sequence
  Description of Artificial Sequence: Synthetic oligonucleotide
uacugcauccgccgcuugg

SEQ ID NO: 2771343 - RNA, 19 nt, Artificial Sequence
  Description of Artificial Sequence: Synthetic oligonucleotide
uguuggcgacuaaaccgcg

SEQ ID NO: 2771344 - RNA, 19 nt, Artificial Sequence
  Description of Artificial Sequence: Synthetic oligonucleotide
gaagcugcuaccgcgaaga

SEQ ID NO: 2771345 - RNA, 19 nt, Artificial Sequence
  Description of Artificial Sequence: Synthetic oligonucleotide
gagcuagggaaccaugaac

SEQ ID NO: 2771346 - RNA, 19 nt, Artificial Sequence
  Description of Artificial Sequence: Synthetic oligonucleotide
uuguuuggccaccuuggga

SEQ ID NO: 2771347 - RNA, 19 nt, Artificial Sequence
  Description of Artificial Sequence: Synthetic oligonucleotide
agauggagucaagaaagag

SEQ ID NO: 2771348 - RNA, 19 nt, Artificial Sequence
  Description of Artificial Sequence: Synthetic oligonucleotide
cucgaguguguguaguccc

SEQ ID NO: 2771349 - RNA, 19 nt, Artificial Sequence
  Description of Artificial Sequence: Synthetic oligonucleotide
cucuuggccggucaccucg

SEQ ID NO: 2771350 - RNA, 19 nt, Artificial Sequence
  Description of Artificial Sequence: Synthetic oligonucleotide
accagcuacuuccagagua

SEQ ID NO: 2771351 - RNA, 19 nt, Artificial Sequence
  Description of Artificial Sequence: Synthetic oligonucleotide
ucuugccaaagguuggcac

SEQ ID NO: 2771352 - RNA, 19 nt, Artificial Sequence
  Description of Artificial Sequence: Synthetic oligonucleotide
gaguguguguagucccugg

SEQ ID NO: 2771353 - RNA, 19 nt, Artificial Sequence
  Description of Artificial Sequence: Synthetic oligonucleotide
ggcuuuauuagagugcaag

SEQ ID NO: 2771354 - RNA, 19 nt, Artificial Sequence
  Description of Artificial Sequence: Synthetic oligonucleotide
caaaagcacgacuugaucu

SEQ ID NO: 2771355 - RNA, 19 nt, Artificial Sequence
  Description of Artificial Sequence: Synthetic oligonucleotide
cuuguuuggccaccuuggg

SEQ ID NO: 2771356 - RNA, 19 nt, Artificial Sequence
  Description of Artificial Sequence: Synthetic oligonucleotide
ugggaguuugaccucucac

SEQ ID NO: 2771357 - RNA, 19 nt, Artificial Sequence
  Description of Artificial Sequence: Synthetic oligonucleotide
aagaaucacagaaggacuu

SEQ ID NO: 2771358 - RNA, 19 nt, Artificial Sequence
  Description of Artificial Sequence: Synthetic oligonucleotide
guuauacugcauccgccgc

SEQ ID NO: 2771359 - RNA, 19 nt, Artificial Sequence
  Description of Artificial Sequence: Synthetic oligonucleotide
uuuccagcacgagcuaggg

SEQ ID NO: 2771360 - RNA, 19 nt, Artificial Sequence
  Description of Artificial Sequence: Synthetic oligonucleotide
acugcauccgccgcuuggc

SEQ ID NO: 2771361 - RNA, 19 nt, Artificial Sequence
  Description of Artificial Sequence: Synthetic oligonucleotide
uagucagggccucuacgcc

SEQ ID NO: 2771362 - RNA, 19 nt, Artificial Sequence
  Description of Artificial Sequence: Synthetic oligonucleotide
cacagaaggacuuaggaau

SEQ ID NO: 2771363 - RNA, 19 nt, Artificial Sequence
  Description of Artificial Sequence: Synthetic oligonucleotide
ggggaaaugccuuccagug

SEQ ID NO: 2771364 - RNA, 19 nt, Artificial Sequence
  Description of Artificial Sequence: Synthetic oligonucleotide
uugaucugagcgaccgucu

SEQ ID NO: 2771365 - RNA, 19 nt, Artificial Sequence
  Description of Artificial Sequence: Synthetic oligonucleotide
ucccugggcgcgcacaaag

SEQ ID NO: 2771366 - RNA, 19 nt, Artificial Sequence
  Description of Artificial Sequence: Synthetic oligonucleotide
uuagggcccuucuucuugc

SEQ ID NO: 2771367 - RNA, 19 nt, Artificial Sequence
  Description of Artificial Sequence: Synthetic oligonucleotide
aagguuggcaccacguuaa

SEQ ID NO: 2771368 - RNA, 19 nt, Artificial Sequence
  Description of Artificial Sequence: Synthetic oligonucleotide
uuugggucaaaguggcuuu

SEQ ID NO: 2771369 - RNA, 19 nt, Artificial Sequence
  Description of Artificial Sequence: Synthetic oligonucleotide
gaccucucacuuuuccagc

SEQ ID NO: 2771370 - RNA, 19 nt, Artificial Sequence
  Description of Artificial Sequence: Synthetic oligonucleotide
acguccucaccgcaugccg

SEQ ID NO: 2771371 - RNA, 19 nt, Artificial Sequence
  Description of Artificial Sequence: Synthetic oligonucleotide
gcuuugaucugagcgaccg

SEQ ID NO: 2771372 - RNA, 19 nt, Artificial Sequence
  Description of Artificial Sequence: Synthetic oligonucleotide
acaugcgaccagcuacuuc

SEQ ID NO: 2771373 - RNA, 19 nt, Artificial Sequence
  Description of Artificial Sequence: Synthetic oligonucleotide
accucgaguguguguaguc

SEQ ID NO: 2771374 - RNA, 19 nt, Artificial Sequence
  Description of Artificial Sequence: Synthetic oligonucleotide
cugagcgaccgucucuugg

SEQ ID NO: 2771375 - RNA, 19 nt, Artificial Sequence
  Description of Artificial Sequence: Synthetic oligonucleotide
uaaaccgcggacgccgaag

SEQ ID NO: 2771376 - RNA, 19 nt, Artificial Sequence
  Description of Artificial Sequence: Synthetic oligonucleotide
ccaacaugcgaccagcuac

SEQ ID NO: 2771377 - RNA, 19 nt, Artificial Sequence
  Description of Artificial Sequence: Synthetic oligonucleotide
ucuuccggggaaaugccuu

SEQ ID NO: 2771378 - RNA, 19 nt, Artificial Sequence
  Description of Artificial Sequence: Synthetic oligonucleotide
guguguguagucccugggc

SEQ ID NO: 2771379 - RNA, 19 nt, Artificial Sequence
  Description of Artificial Sequence: Synthetic oligonucleotide
uugccaaagguuggcacca

SEQ ID NO: 2771380 - RNA, 19 nt, Artificial Sequence
  Description of Artificial Sequence: Synthetic oligonucleotide
ugaucugagcgaccgucuc

SEQ ID NO: 2771381 - RNA, 19 nt, Artificial Sequence
  Description of Artificial Sequence: Synthetic oligonucleotide
guggcuuuauuagagugca

SEQ ID NO: 2771382 - RNA, 19 nt, Artificial Sequence
  Description of Artificial Sequence: Synthetic oligonucleotide
caccacguuaacaaagcga

SEQ ID NO: 2771383 - RNA, 19 nt, Artificial Sequence
  Description of Artificial Sequence: Synthetic oligonucleotide
agucagggccucuacgcca

SEQ ID NO: 2771384 - RNA, 19 nt, Artificial Sequence
  Description of Artificial Sequence: Synthetic oligonucleotide
guuaacaaagcgacgguua

SEQ ID NO: 2771385 - RNA, 19 nt, Artificial Sequence
  Description of Artificial Sequence: Synthetic oligonucleotide
acguuaacaaagcgacggu

SEQ ID NO: 2771386 - RNA, 19 nt, Artificial Sequence
  Description of Artificial Sequence: Synthetic oligonucleotide
gcauguuggcgacuaaacc

SEQ ID NO: 2771387 - RNA, 19 nt, Artificial Sequence
  Description of Artificial Sequence: Synthetic oligonucleotide
aagaagcgagggcgcgcac

SEQ ID NO: 2771388 - RNA, 19 nt, Artificial Sequence
  Description of Artificial Sequence: Synthetic oligonucleotide
ucgaguguguguagucccu

SEQ ID NO: 2771389 - RNA, 19 nt, Artificial Sequence
  Description of Artificial Sequence: Synthetic oligonucleotide
agcgaccgucucuuggccg

SEQ ID NO: 2771390 - RNA, 19 nt, Artificial Sequence
  Description of Artificial Sequence: Synthetic oligonucleotide
gccacaugagcuuugaucu

SEQ ID NO: 2771391 - RNA, 19 nt, Artificial Sequence
  Description of Artificial Sequence: Synthetic oligonucleotide
cuucuugccaaagguuggc

SEQ ID NO: 2771392 - RNA, 19 nt, Artificial Sequence
  Description of Artificial Sequence: Synthetic oligonucleotide
uugggaguuugaccucuca

SEQ ID NO: 2771393 - RNA, 19 nt, Artificial Sequence
  Description of Artificial Sequence: Synthetic oligonucleotide
gacuugaucuuccggggaa

SEQ ID NO: 2771394 - RNA, 19 nt, Artificial Sequence
  Description of Artificial Sequence: Synthetic oligonucleotide
gcuacuuccagaguaguca

SEQ ID NO: 2771395 - RNA, 19 nt, Artificial Sequence
  Description of Artificial Sequence: Synthetic oligonucleotide
ugcauccgccgcuuggccc

SEQ ID NO: 2771396 - RNA, 19 nt, Artificial Sequence
  Description of Artificial Sequence: Synthetic oligonucleotide
cugggcgcgcacaaagagc

SEQ ID NO: 2771397 - RNA, 19 nt, Artificial Sequence
  Description of Artificial Sequence: Synthetic oligonucleotide
ggccacaugagcuuugauc

SEQ ID NO: 2771398 - RNA, 19 nt, Artificial Sequence
  Description of Artificial Sequence: Synthetic oligonucleotide
gaaaugccuuccagugagg

SEQ ID NO: 2771399 - RNA, 19 nt, Artificial Sequence
  Description of Artificial Sequence: Synthetic oligonucleotide
acgccgaagcugcuaccgc

SEQ ID NO: 2771400 - RNA, 19 nt, Artificial Sequence
  Description of Artificial Sequence: Synthetic oligonucleotide
agaagcgagggcgcgcacg

SEQ ID NO: 2771401 - RNA, 19 nt, Artificial Sequence
  Description of Artificial Sequence: Synthetic oligonucleotide
gacuuaggaauuagcauua

SEQ ID NO: 2771402 - RNA, 19 nt, Artificial Sequence
  Description of Artificial Sequence: Synthetic oligonucleotide
uugaucuuccggggaaaug

SEQ ID NO: 2771403 - RNA, 19 nt, Artificial Sequence
  Description of Artificial Sequence: Synthetic oligonucleotide
gcuuuauuagagugcaaga

SEQ ID NO: 2771404 - RNA, 19 nt, Artificial Sequence
  Description of Artificial Sequence: Synthetic oligonucleotide
aagcgacgguuauacugca

SEQ ID NO: 2771405 - RNA, 19 nt, Artificial Sequence
  Description of Artificial Sequence: Synthetic oligonucleotide
guccucaccgcaugccgcg

SEQ ID NO: 2771406 - RNA, 19 nt, Artificial Sequence
  Description of Artificial Sequence: Synthetic oligonucleotide
guguguagucccugggcgc

SEQ ID NO: 2771407 - RNA, 19 nt, Artificial Sequence
  Description of Artificial Sequence: Synthetic oligonucleotide
caccuugggaguuugaccu

SEQ ID NO: 2771408 - RNA, 19 nt, Artificial Sequence
  Description of Artificial Sequence: Synthetic oligonucleotide
ggcgacuaaaccgcggacg

SEQ ID NO: 2771409 - RNA, 19 nt, Artificial Sequence
  Description of Artificial Sequence: Synthetic oligonucleotide
agcuacuuccagaguaguc

SEQ ID NO: 2771410 - RNA, 19 nt, Artificial Sequence
  Description of Artificial Sequence: Synthetic oligonucleotide
ugaggccacaugagcuuug

SEQ ID NO: 2771411 - RNA, 19 nt, Artificial Sequence
  Description of Artificial Sequence: Synthetic oligonucleotide
acuuaggaauuagcauuag

SEQ ID NO: 2771412 - RNA, 19 nt, Artificial Sequence
  Description of Artificial Sequence: Synthetic oligonucleotide
aggaagaagcgagggcgcg

SEQ ID NO: 2771413 - RNA, 19 nt, Artificial Sequence
  Description of Artificial Sequence: Synthetic oligonucleotide
agccaaaagcacgacuuga

SEQ ID NO: 2771414 - RNA, 19 nt, Artificial Sequence
  Description of Artificial Sequence: Synthetic oligonucleotide
accuugggaguuugaccuc

SEQ ID NO: 2771415 - RNA, 19 nt, Artificial Sequence
  Description of Artificial Sequence: Synthetic oligonucleotide
cuaccgcgaagauggaguc

SEQ ID NO: 2771416 - RNA, 19 nt, Artificial Sequence
  Description of Artificial Sequence: Synthetic oligonucleotide
uaccucccaacaugcgacc

SEQ ID NO: 2771417 - RNA, 19 nt, Artificial Sequence
  Description of Artificial Sequence: Synthetic oligonucleotide
cucacuuuuccagcacgag

SEQ ID NO: 2771418 - RNA, 19 nt, Artificial Sequence
  Description of Artificial Sequence: Synthetic oligonucleotide
ucaccucgaguguguguag

SEQ ID NO: 2771419 - RNA, 19 nt, Artificial Sequence
  Description of Artificial Sequence: Synthetic oligonucleotide
ggacuuaggaauuagcauu

SEQ ID NO: 2771420 - RNA, 19 nt, Artificial Sequence
  Description of Artificial Sequence: Synthetic oligonucleotide
ugcuaccgcgaagauggag

SEQ ID NO: 2771421 - RNA, 19 nt, Artificial Sequence
  Description of Artificial Sequence: Synthetic oligonucleotide
gaagaagcgagggcgcgca

SEQ ID NO: 2771422 - RNA, 19 nt, Artificial Sequence
  Description of Artificial Sequence: Synthetic oligonucleotide
guuggcgacuaaaccgcgg

SEQ ID NO: 2771423 - RNA, 19 nt, Artificial Sequence
  Description of Artificial Sequence: Synthetic oligonucleotide
cuaggguggccucauccuc

SEQ ID NO: 2771424 - RNA, 19 nt, Artificial Sequence
  Description of Artificial Sequence: Synthetic oligonucleotide
agguuggcaccacguuaac

SEQ ID NO: 2771425 - RNA, 19 nt, Artificial Sequence
  Description of Artificial Sequence: Synthetic oligonucleotide
gcgacuaaaccgcggacgc

SEQ ID NO: 2771426 - RNA, 19 nt, Artificial Sequence
  Description of Artificial Sequence: Synthetic oligonucleotide
accgcaugccgcgugucac

SEQ ID NO: 2771427 - RNA, 19 nt, Artificial Sequence
  Description of Artificial Sequence: Synthetic oligonucleotide
caugccgcgugucacguca

SEQ ID NO: 2771428 - RNA, 19 nt, Artificial Sequence
  Description of Artificial Sequence: Synthetic oligonucleotide
cucccaacaugcgaccagc

SEQ ID NO: 2771429 - RNA, 19 nt, Artificial Sequence
  Description of Artificial Sequence: Synthetic oligonucleotide
agagugcaagaaucacaga

SEQ ID NO: 2771430 - RNA, 19 nt, Artificial Sequence
  Description of Artificial Sequence: Synthetic oligonucleotide
cgagccagccaaaagcacg

SEQ ID NO: 2771431 - RNA, 19 nt, Artificial Sequence
  Description of Artificial Sequence: Synthetic oligonucleotide
gaguagucagggccucuac

SEQ ID NO: 2771432 - RNA, 19 nt, Artificial Sequence
  Description of Artificial Sequence: Synthetic oligonucleotide
gaacuuuaccucccaacau

SEQ ID NO: 2771433 - RNA, 19 nt, Artificial Sequence
  Description of Artificial Sequence: Synthetic oligonucleotide
uuccagcacgagcuaggga

SEQ ID NO: 2771434 - RNA, 19 nt, Artificial Sequence
  Description of Artificial Sequence: Synthetic oligonucleotide
accgcgaagauggagucaa

SEQ ID NO: 2771435 - RNA, 19 nt, Artificial Sequence
  Description of Artificial Sequence: Synthetic oligonucleotide
gcaccacguuaacaaagcg

SEQ ID NO: 2771436 - RNA, 19 nt, Artificial Sequence
  Description of Artificial Sequence: Synthetic oligonucleotide
gccucuacgccacacuggc

SEQ ID NO: 2771437 - RNA, 19 nt, Artificial Sequence
  Description of Artificial Sequence: Synthetic oligonucleotide
acaaagcgacgguuauacu

SEQ ID NO: 2771438 - RNA, 19 nt, Artificial Sequence
  Description of Artificial Sequence: Synthetic oligonucleotide
agcuuugaucugagcgacc

SEQ ID NO: 2771439 - RNA, 19 nt, Artificial Sequence
  Description of Artificial Sequence: Synthetic oligonucleotide
acuggccuaggguggccuc

SEQ ID NO: 2771440 - RNA, 19 nt, Artificial Sequence
  Description of Artificial Sequence: Synthetic oligonucleotide
gagcgaccgucucuuggcc

SEQ ID NO: 2771441 - RNA, 19 nt, Artificial Sequence
  Description of Artificial Sequence: Synthetic oligonucleotide
cacgagcuagggaaccaug

SEQ ID NO: 2771442 - RNA, 19 nt, Artificial Sequence
  Description of Artificial Sequence: Synthetic oligonucleotide
ccagcuacuuccagaguag

SEQ ID NO: 2771443 - RNA, 19 nt, Artificial Sequence
  Description of Artificial Sequence: Synthetic oligonucleotide
gcauccgccgcuuggcccg

SEQ ID NO: 2771444 - RNA, 19 nt, Artificial Sequence
  Description of Artificial Sequence: Synthetic oligonucleotide
gagccagccaaaagcacga

SEQ ID NO: 2771445 - RNA, 19 nt, Artificial Sequence
  Description of Artificial Sequence: Synthetic oligonucleotide
cacaugagcuuugaucuga

SEQ ID NO: 2771446 - RNA, 19 nt, Artificial Sequence
  Description of Artificial Sequence: Synthetic oligonucleotide
uuggccggucaccucgagu

SEQ ID NO: 2771447 - RNA, 19 nt, Artificial Sequence
  Description of Artificial Sequence: Synthetic oligonucleotide
ucccaacaugcgaccagcu

SEQ ID NO: 2771448 - RNA, 19 nt, Artificial Sequence
  Description of Artificial Sequence: Synthetic oligonucleotide
cuuggcccgaccugucuuc

SEQ ID NO: 2771449 - RNA, 19 nt, Artificial Sequence
  Description of Artificial Sequence: Synthetic oligonucleotide
uggcgacuaaaccgcggac

SEQ ID NO: 2771450 - RNA, 19 nt, Artificial Sequence
  Description of Artificial Sequence: Synthetic oligonucleotide
acaugagcuuugaucugag

SEQ ID NO: 2771451 - RNA, 19 nt, Artificial Sequence
  Description of Artificial Sequence: Synthetic oligonucleotide
cucuacgccacacuggccu

SEQ ID NO: 2771452 - RNA, 19 nt, Artificial Sequence
  Description of Artificial Sequence: Synthetic oligonucleotide
ggcaccacguuaacaaagc

SEQ ID NO: 2771453 - RNA, 19 nt, Artificial Sequence
  Description of Artificial Sequence: Synthetic oligonucleotide
acgagcuagggaaccauga

SEQ ID NO: 2771454 - RNA, 19 nt, Artificial Sequence
  Description of Artificial Sequence: Synthetic oligonucleotide
ccagugaggccacaugagc

SEQ ID NO: 2771455 - RNA, 19 nt, Artificial Sequence
  Description of Artificial Sequence: Synthetic oligonucleotide
uaacaaagcgacgguuaua

SEQ ID NO: 2771456 - RNA, 19 nt, Artificial Sequence
  Description of Artificial Sequence: Synthetic oligonucleotide
ucuuggccggucaccucga

SEQ ID NO: 2771457 - RNA, 19 nt, Artificial Sequence
  Description of Artificial Sequence: Synthetic oligonucleotide
ccaccuugggaguuugacc

SEQ ID NO: 2771458 - RNA, 19 nt, Artificial Sequence
  Description of Artificial Sequence: Synthetic oligonucleotide
gcgacgguuauacugcauc

SEQ ID NO: 2771459 - RNA, 19 nt, Artificial Sequence
  Description of Artificial Sequence: Synthetic oligonucleotide
aaccgcggacgccgaagcu

SEQ ID NO: 2771460 - RNA, 19 nt, Artificial Sequence
  Description of Artificial Sequence: Synthetic oligonucleotide
agcugcuaccgcgaagaug

SEQ ID NO: 2771461 - RNA, 19 nt, Artificial Sequence
  Description of Artificial Sequence: Synthetic oligonucleotide
gucaccucgagugugugua

SEQ ID NO: 2771462 - RNA, 19 nt, Artificial Sequence
  Description of Artificial Sequence: Synthetic oligonucleotide
gcgaccgucucuuggccgg

SEQ ID NO: 2771463 - RNA, 19 nt, Artificial Sequence
  Description of Artificial Sequence: Synthetic oligonucleotide
gcgaagauggagucaagaa

SEQ ID NO: 2771464 - RNA, 19 nt, Artificial Sequence
  Description of Artificial Sequence: Synthetic oligonucleotide
ucugagcgaccgucucuug

SEQ ID NO: 2771465 - RNA, 19 nt, Artificial Sequence
  Description of Artificial Sequence: Synthetic oligonucleotide
gggaguuugaccucucacu

SEQ ID NO: 2771466 - RNA, 19 nt, Artificial Sequence
  Description of Artificial Sequence: Synthetic oligonucleotide
gccaaagguuggcaccacg

SEQ ID NO: 2771467 - RNA, 19 nt, Artificial Sequence
  Description of Artificial Sequence: Synthetic oligonucleotide
gcacgacuugaucuuccgg

SEQ ID NO: 2771468 - RNA, 19 nt, Artificial Sequence
  Description of Artificial Sequence: Synthetic oligonucleotide
acuuuuccagcacgagcua

SEQ ID NO: 2771469 - RNA, 19 nt, Artificial Sequence
  Description of Artificial Sequence: Synthetic oligonucleotide
uccagcggcgagccagcca

SEQ ID NO: 2771470 - RNA, 19 nt, Artificial Sequence
  Description of Artificial Sequence: Synthetic oligonucleotide
gaucugagcgaccgucucu

SEQ ID NO: 2771471 - RNA, 19 nt, Artificial Sequence
  Description of Artificial Sequence: Synthetic oligonucleotide
agggcgcgcacguccucac

SEQ ID NO: 2771472 - RNA, 19 nt, Artificial Sequence
  Description of Artificial Sequence: Synthetic oligonucleotide
agggaaccaugaacuuuac

SEQ ID NO: 2771473 - RNA, 19 nt, Artificial Sequence
  Description of Artificial Sequence: Synthetic oligonucleotide
ucuacgccacacuggccua

SEQ ID NO: 2771474 - RNA, 19 nt, Artificial Sequence
  Description of Artificial Sequence: Synthetic oligonucleotide
aucugagcgaccgucucuu

SEQ ID NO: 2771475 - RNA, 19 nt, Artificial Sequence
  Description of Artificial Sequence: Synthetic oligonucleotide
ccacguuaacaaagcgacg

SEQ ID NO: 2771476 - RNA, 19 nt, Artificial Sequence
  Description of Artificial Sequence: Synthetic oligonucleotide
agggccucuacgccacacu

SEQ ID NO: 2771477 - RNA, 19 nt, Artificial Sequence
  Description of Artificial Sequence: Synthetic oligonucleotide
caugaacuuuaccucccaa

SEQ ID NO: 2771478 - RNA, 19 nt, Artificial Sequence
  Description of Artificial Sequence: Synthetic oligonucleotide
aagcugcuaccgcgaagau

SEQ ID NO: 2771479 - RNA, 19 nt, Artificial Sequence
  Description of Artificial Sequence: Synthetic oligonucleotide
gaagcgagggcgcgcacgu

SEQ ID NO: 2771480 - RNA, 19 nt, Artificial Sequence
  Description of Artificial Sequence: Synthetic oligonucleotide
cuugggaguuugaccucuc

SEQ ID NO: 2771481 - RNA, 19 nt, Artificial Sequence
  Description of Artificial Sequence: Synthetic oligonucleotide
cacguccucaccgcaugcc

SEQ ID NO: 2771482 - RNA, 19 nt, Artificial Sequence
  Description of Artificial Sequence: Synthetic oligonucleotide
acgccacacuggccuaggg

SEQ ID NO: 2771483 - RNA, 19 nt, Artificial Sequence
  Description of Artificial Sequence: Synthetic oligonucleotide
uagggcccuucuucuugcc

SEQ ID NO: 2771484 - RNA, 19 nt, Artificial Sequence
  Description of Artificial Sequence: Synthetic oligonucleotide
cacacuggccuaggguggc

SEQ ID NO: 2771485 - RNA, 19 nt, Artificial Sequence
  Description of Artificial Sequence: Synthetic oligonucleotide
cugcauccgccgcuuggcc

SEQ ID NO: 2771486 - RNA, 19 nt, Artificial Sequence
  Description of Artificial Sequence: Synthetic oligonucleotide
caacaugcgaccagcuacu

SEQ ID NO: 2771487 - RNA, 19 nt, Artificial Sequence
  Description of Artificial Sequence: Synthetic oligonucleotide
accgucucuuggccgguca

SEQ ID NO: 2771488 - RNA, 19 nt, Artificial Sequence
  Description of Artificial Sequence: Synthetic oligonucleotide
ccacacuggccuagggugg

SEQ ID NO: 2771489 - RNA, 19 nt, Artificial Sequence
  Description of Artificial Sequence: Synthetic oligonucleotide
gggaaaugccuuccaguga

SEQ ID NO: 2771490 - RNA, 19 nt, Artificial Sequence
  Description of Artificial Sequence: Synthetic oligonucleotide
gcgcacaaagagcugcaug

SEQ ID NO: 2771491 - RNA, 19 nt, Artificial Sequence
  Description of Artificial Sequence: Synthetic oligonucleotide
cagcacgagcuagggaacc

SEQ ID NO: 2771492 - RNA, 19 nt, Artificial Sequence
  Description of Artificial Sequence: Synthetic oligonucleotide
gggccucuacgccacacug

SEQ ID NO: 2771493 - RNA, 19 nt, Artificial Sequence
  Description of Artificial Sequence: Synthetic oligonucleotide
cgacgguuauacugcaucc

SEQ ID NO: 2771494 - RNA, 19 nt, Artificial Sequence
  Description of Artificial Sequence: Synthetic oligonucleotide
uguagucccugggcgcgca

SEQ ID NO: 2771495 - RNA, 19 nt, Artificial Sequence
  Description of Artificial Sequence: Synthetic oligonucleotide
ggcgcgcacaaagagcugc

SEQ ID NO: 2771496 - RNA, 19 nt, Artificial Sequence
  Description of Artificial Sequence: Synthetic oligonucleotide
uaccgcgaagauggaguca

SEQ ID NO: 2771497 - RNA, 19 nt, Artificial Sequence
  Description of Artificial Sequence: Synthetic oligonucleotide
ccugggcgcgcacaaagag

SEQ ID NO: 2771498 - RNA, 19 nt, Artificial Sequence
  Description of Artificial Sequence: Synthetic oligonucleotide
agcacgagcuagggaacca

SEQ ID NO: 2771499 - RNA, 19 nt, Artificial Sequence
  Description of Artificial Sequence: Synthetic oligonucleotide
agaguagucagggccucua

SEQ ID NO: 2771500 - RNA, 19 nt, Artificial Sequence
  Description of Artificial Sequence: Synthetic oligonucleotide
agucccugggcgcgcacaa

SEQ ID NO: 2771501 - RNA, 19 nt, Artificial Sequence
  Description of Artificial Sequence: Synthetic oligonucleotide
ugccuuccagugaggccac

SEQ ID NO: 2771502 - RNA, 19 nt, Artificial Sequence
  Description of Artificial Sequence: Synthetic oligonucleotide
cggcgagccagccaaaagc

SEQ ID NO: 2771503 - RNA, 19 nt, Artificial Sequence
  Description of Artificial Sequence: Synthetic oligonucleotide
ggaguuugaccucucacuu

SEQ ID NO: 2771504 - RNA, 19 nt, Artificial Sequence
  Description of Artificial Sequence: Synthetic oligonucleotide
ucucuuggccggucaccuc

SEQ ID NO: 2771505 - RNA, 19 nt, Artificial Sequence
  Description of Artificial Sequence: Synthetic oligonucleotide
cgguuauacugcauccgcc

SEQ ID NO: 2771506 - RNA, 19 nt, Artificial Sequence
  Description of Artificial Sequence: Synthetic oligonucleotide
aacaugcgaccagcuacuu

SEQ ID NO: 2771507 - RNA, 19 nt, Artificial Sequence
  Description of Artificial Sequence: Synthetic oligonucleotide
agcugcauguuggcgacua

SEQ ID NO: 2771508 - RNA, 19 nt, Artificial Sequence
  Description of Artificial Sequence: Synthetic oligonucleotide
ccucgaguguguguagucc

SEQ ID NO: 2771509 - RNA, 19 nt, Artificial Sequence
  Description of Artificial Sequence: Synthetic oligonucleotide
uugggucaaaguggcuuua

SEQ ID NO: 2771510 - RNA, 19 nt, Artificial Sequence
  Description of Artificial Sequence: Synthetic oligonucleotide
ggcgagccagccaaaagca

SEQ ID NO: 2771511 - RNA, 19 nt, Artificial Sequence
  Description of Artificial Sequence: Synthetic oligonucleotide
cuacgccacacuggccuag

SEQ ID NO: 2771512 - RNA, 19 nt, Artificial Sequence
  Description of Artificial Sequence: Synthetic oligonucleotide
ggccucuacgccacacugg

SEQ ID NO: 2771513 - RNA, 19 nt, Artificial Sequence
  Description of Artificial Sequence: Synthetic oligonucleotide
ugccgcgugucacgucacu

SEQ ID NO: 2771514 - RNA, 19 nt, Artificial Sequence
  Description of Artificial Sequence: Synthetic oligonucleotide
gcgaccagcuacuuccaga

SEQ ID NO: 2771515 - RNA, 19 nt, Artificial Sequence
  Description of Artificial Sequence: Synthetic oligonucleotide
ggaagaagcgagggcgcgc

SEQ ID NO: 2771516 - RNA, 19 nt, Artificial Sequence
  Description of Artificial Sequence: Synthetic oligonucleotide
uccgccgcuuggcccgacc

SEQ ID NO: 2771517 - RNA, 19 nt, Artificial Sequence
  Description of Artificial Sequence: Synthetic oligonucleotide
ccgcgugucacgucacugc

SEQ ID NO: 2771518 - RNA, 19 nt, Artificial Sequence
  Description of Artificial Sequence: Synthetic oligonucleotide
accucccaacaugcgacca

SEQ ID NO: 2771519 - RNA, 19 nt, Artificial Sequence
  Description of Artificial Sequence: Synthetic oligonucleotide
cugcauguuggcgacuaaa

SEQ ID NO: 2771520 - RNA, 19 nt, Artificial Sequence
  Description of Artificial Sequence: Synthetic oligonucleotide
cuuggccggucaccucgag

SEQ ID NO: 2771521 - RNA, 19 nt, Artificial Sequence
  Description of Artificial Sequence: Synthetic oligonucleotide
uggccaccuugggaguuug

SEQ ID NO: 2771522 - RNA, 19 nt, Artificial Sequence
  Description of Artificial Sequence: Synthetic oligonucleotide
acuaaaccgcggacgccga

SEQ ID NO: 2771523 - RNA, 19 nt, Artificial Sequence
  Description of Artificial Sequence: Synthetic oligonucleotide
gcuaccgcgaagauggagu

SEQ ID NO: 2771524 - RNA, 19 nt, Artificial Sequence
  Description of Artificial Sequence: Synthetic oligonucleotide
gccaccuugggaguuugac

SEQ ID NO: 2771525 - RNA, 19 nt, Artificial Sequence
  Description of Artificial Sequence: Synthetic oligonucleotide
ucagggccucuacgccaca

SEQ ID NO: 2771526 - RNA, 19 nt, Artificial Sequence
  Description of Artificial Sequence: Synthetic oligonucleotide
gcauuagggcccuucuucu

SEQ ID NO: 2771527 - RNA, 19 nt, Artificial Sequence
  Description of Artificial Sequence: Synthetic oligonucleotide
cgccgaagcugcuaccgcg

SEQ ID NO: 2771528 - RNA, 19 nt, Artificial Sequence
  Description of Artificial Sequence: Synthetic oligonucleotide
ccagcacgagcuagggaac

SEQ ID NO: 2771529 - RNA, 19 nt, Artificial Sequence
  Description of Artificial Sequence: Synthetic oligonucleotide
ugccaaagguuggcaccac

SEQ ID NO: 2771530 - RNA, 19 nt, Artificial Sequence
  Description of Artificial Sequence: Synthetic oligonucleotide
ggcccgaccugucuucuuc

SEQ ID NO: 2771531 - RNA, 19 nt, Artificial Sequence
  Description of Artificial Sequence: Synthetic oligonucleotide
gcggcgagccagccaaaag

SEQ ID NO: 2771532 - RNA, 19 nt, Artificial Sequence
  Description of Artificial Sequence: Synthetic oligonucleotide
gguuggcaccacguuaaca

SEQ ID NO: 2771533 - RNA, 19 nt, Artificial Sequence
  Description of Artificial Sequence: Synthetic oligonucleotide
cgcacaaagagcugcaugu

SEQ ID NO: 2771534 - RNA, 19 nt, Artificial Sequence
  Description of Artificial Sequence: Synthetic oligonucleotide
cuagggaaccaugaacuuu

SEQ ID NO: 2771535 - RNA, 19 nt, Artificial Sequence
  Description of Artificial Sequence: Synthetic oligonucleotide
guuuggccaccuugggagu

SEQ ID NO: 2771536 - RNA, 19 nt, Artificial Sequence
  Description of Artificial Sequence: Synthetic oligonucleotide
cagaaggacuuaggaauua

SEQ ID NO: 2771537 - RNA, 19 nt, Artificial Sequence
  Description of Artificial Sequence: Synthetic oligonucleotide
ccggggaaaugccuuccag

SEQ ID NO: 2771538 - RNA, 19 nt, Artificial Sequence
  Description of Artificial Sequence: Synthetic oligonucleotide
gucucuuggccggucaccu

SEQ ID NO: 2771539 - RNA, 19 nt, Artificial Sequence
  Description of Artificial Sequence: Synthetic oligonucleotide
caaagguuggcaccacguu

SEQ ID NO: 2771540 - RNA, 19 nt, Artificial Sequence
  Description of Artificial Sequence: Synthetic oligonucleotide
augccgcgugucacgucac

SEQ ID NO: 2771541 - RNA, 19 nt, Artificial Sequence
  Description of Artificial Sequence: Synthetic oligonucleotide
ccaaagguuggcaccacgu

SEQ ID NO: 2771542 - RNA, 19 nt, Artificial Sequence
  Description of Artificial Sequence: Synthetic oligonucleotide
aauuagcauuagggcccuu

SEQ ID NO: 2771543 - RNA, 19 nt, Artificial Sequence
  Description of Artificial Sequence: Synthetic oligonucleotide
cagggccucuacgccacac

SEQ ID NO: 2771544 - RNA, 19 nt, Artificial Sequence
  Description of Artificial Sequence: Synthetic oligonucleotide
ccagcggcgagccagccaa

SEQ ID NO: 2771545 - RNA, 19 nt, Artificial Sequence
  Description of Artificial Sequence: Synthetic oligonucleotide
ggacgccgaagcugcuacc

SEQ ID NO: 2771546 - RNA, 19 nt, Artificial Sequence
  Description of Artificial Sequence: Synthetic oligonucleotide
ccgcaugccgcgugucacg

SEQ ID NO: 2771547 - RNA, 19 nt, Artificial Sequence
  Description of Artificial Sequence: Synthetic oligonucleotide
cguccucaccgcaugccgc

SEQ ID NO: 2771548 - RNA, 19 nt, Artificial Sequence
  Description of Artificial Sequence: Synthetic oligonucleotide
gcacguccucaccgcaugc

SEQ ID NO: 2771549 - RNA, 19 nt, Artificial Sequence
  Description of Artificial Sequence: Synthetic oligonucleotide
ucaccgcaugccgcguguc

SEQ ID NO: 2771550 - RNA, 19 nt, Artificial Sequence
  Description of Artificial Sequence: Synthetic oligonucleotide
guguagucccugggcgcgc

SEQ ID NO: 2771551 - RNA, 19 nt, Artificial Sequence
  Description of Artificial Sequence: Synthetic oligonucleotide
cuuugaucugagcgaccgu

SEQ ID NO: 2771552 - RNA, 19 nt, Artificial Sequence
  Description of Artificial Sequence: Synthetic oligonucleotide
caccgcaugccgcguguca

SEQ ID NO: 2771553 - RNA, 19 nt, Artificial Sequence
  Description of Artificial Sequence: Synthetic oligonucleotide
agcggcgagccagccaaaa

SEQ ID NO: 2771554 - RNA, 19 nt, Artificial Sequence
  Description of Artificial Sequence: Synthetic oligonucleotide
augcgaccagcuacuucca

SEQ ID NO: 2771555 - RNA, 19 nt, Artificial Sequence
  Description of Artificial Sequence: Synthetic oligonucleotide
cuaaaccgcggacgccgaa

SEQ ID NO: 2771556 - RNA, 19 nt, Artificial Sequence
  Description of Artificial Sequence: Synthetic oligonucleotide
ccucuacgccacacuggcc

SEQ ID NO: 2771557 - RNA, 19 nt, Artificial Sequence
  Description of Artificial Sequence: Synthetic oligonucleotide
gccggucaccucgagugug

SEQ ID NO: 2771558 - RNA, 19 nt, Artificial Sequence
  Description of Artificial Sequence: Synthetic oligonucleotide
agcgacgguuauacugcau

SEQ ID NO: 2771559 - RNA, 19 nt, Artificial Sequence
  Description of Artificial Sequence: Synthetic oligonucleotide
ccaugaacuuuaccuccca

SEQ ID NO: 2771560 - RNA, 19 nt, Artificial Sequence
  Description of Artificial Sequence: Synthetic oligonucleotide
gccgcgugucacgucacug

SEQ ID NO: 2771561 - RNA, 19 nt, Artificial Sequence
  Description of Artificial Sequence: Synthetic oligonucleotide
cuggccuaggguggccuca

SEQ ID NO: 2771562 - RNA, 19 nt, Artificial Sequence
  Description of Artificial Sequence: Synthetic oligonucleotide
cauuagggcccuucuucuu

SEQ ID NO: 2771563 - RNA, 19 nt, Artificial Sequence
  Description of Artificial Sequence: Synthetic oligonucleotide
cgaagcugcuaccgcgaag

SEQ ID NO: 2771564 - RNA, 19 nt, Artificial Sequence
  Description of Artificial Sequence: Synthetic oligonucleotide
cggacgccgaagcugcuac

SEQ ID NO: 2771565 - RNA, 19 nt, Artificial Sequence
  Description of Artificial Sequence: Synthetic oligonucleotide
gcuagggaaccaugaacuu

SEQ ID NO: 2771566 - RNA, 19 nt, Artificial Sequence
  Description of Artificial Sequence: Synthetic oligonucleotide
gcgcgcacguccucaccgc

SEQ ID NO: 2771567 - RNA, 19 nt, Artificial Sequence
  Description of Artificial Sequence: Synthetic oligonucleotide
gcgagccagccaaaagcac

SEQ ID NO: 2771568 - RNA, 19 nt, Artificial Sequence
  Description of Artificial Sequence: Synthetic oligonucleotide
gccaaaagcacgacuugau

SEQ ID NO: 2771569 - RNA, 19 nt, Artificial Sequence
  Description of Artificial Sequence: Synthetic oligonucleotide
uggcccgaccugucuucuu

SEQ ID NO: 2771570 - RNA, 19 nt, Artificial Sequence
  Description of Artificial Sequence: Synthetic oligonucleotide
ccuaggguggccucauccu

SEQ ID NO: 2771571 - RNA, 19 nt, Artificial Sequence
  Description of Artificial Sequence: Synthetic oligonucleotide
gaccgucucuuggccgguc

SEQ ID NO: 2771572 - RNA, 19 nt, Artificial Sequence
  Description of Artificial Sequence: Synthetic oligonucleotide
cgcacguccucaccgcaug

SEQ ID NO: 2771573 - RNA, 19 nt, Artificial Sequence
  Description of Artificial Sequence: Synthetic oligonucleotide
ccagaguagucagggccuc

SEQ ID NO: 2771574 - RNA, 19 nt, Artificial Sequence
  Description of Artificial Sequence: Synthetic oligonucleotide
auccuccagcggcgagcca

SEQ ID NO: 2771575 - RNA, 19 nt, Artificial Sequence
  Description of Artificial Sequence: Synthetic oligonucleotide
cgucucuuggccggucacc

SEQ ID NO: 2771576 - RNA, 19 nt, Artificial Sequence
  Description of Artificial Sequence: Synthetic oligonucleotide
ggucaccucgagugugugu

SEQ ID NO: 2771577 - RNA, 19 nt, Artificial Sequence
  Description of Artificial Sequence: Synthetic oligonucleotide
ccgucucuuggccggucac

SEQ ID NO: 2771578 - RNA, 19 nt, Artificial Sequence
  Description of Artificial Sequence: Synthetic oligonucleotide
cugcuaccgcgaagaugga

SEQ ID NO: 2771579 - RNA, 19 nt, Artificial Sequence
  Description of Artificial Sequence: Synthetic oligonucleotide
ccucaccgcaugccgcgug

SEQ ID NO: 2771580 - RNA, 19 nt, Artificial Sequence
  Description of Artificial Sequence: Synthetic oligonucleotide
cgagcuagggaaccaugaa

SEQ ID NO: 2771581 - RNA, 19 nt, Artificial Sequence
  Description of Artificial Sequence: Synthetic oligonucleotide
cgcgaagauggagucaaga

SEQ ID NO: 2771582 - RNA, 19 nt, Artificial Sequence
  Description of Artificial Sequence: Synthetic oligonucleotide
cgacuaaaccgcggacgcc

SEQ ID NO: 2771583 - RNA, 19 nt, Artificial Sequence
  Description of Artificial Sequence: Synthetic oligonucleotide
cgaguguguguagucccug

SEQ ID NO: 2771584 - RNA, 19 nt, Artificial Sequence
  Description of Artificial Sequence: Synthetic oligonucleotide
cccaacaugcgaccagcua

SEQ ID NO: 2771585 - RNA, 19 nt, Artificial Sequence
  Description of Artificial Sequence: Synthetic oligonucleotide
caccucgaguguguguagu

SEQ ID NO: 2771586 - RNA, 19 nt, Artificial Sequence
  Description of Artificial Sequence: Synthetic oligonucleotide
cgacuugaucuuccgggga

SEQ ID NO: 2771587 - RNA, 19 nt, Artificial Sequence
  Description of Artificial Sequence: Synthetic oligonucleotide
ccgcgaagauggagucaag

SEQ ID NO: 2771588 - RNA, 19 nt, Artificial Sequence
  Description of Artificial Sequence: Synthetic oligonucleotide
auccgccgcuuggcccgac

SEQ ID NO: 2771589 - RNA, 19 nt, Artificial Sequence
  Description of Artificial Sequence: Synthetic oligonucleotide
cccugggcgcgcacaaaga

SEQ ID NO: 2771590 - RNA, 19 nt, Artificial Sequence
  Description of Artificial Sequence: Synthetic oligonucleotide
gcgcgcacaaagagcugca

SEQ ID NO: 2771591 - RNA, 19 nt, Artificial Sequence
  Description of Artificial Sequence: Synthetic oligonucleotide
cagaguagucagggccucu

SEQ ID NO: 2771592 - RNA, 19 nt, Artificial Sequence
  Description of Artificial Sequence: Synthetic oligonucleotide
gcaugccgcgugucacguc

SEQ ID NO: 2771593 - RNA, 19 nt, Artificial Sequence
  Description of Artificial Sequence: Synthetic oligonucleotide
ccuugggaguuugaccucu

SEQ ID NO: 2771594 - RNA, 19 nt, Artificial Sequence
  Description of Artificial Sequence: Synthetic oligonucleotide
gccgcuuggcccgaccugu

SEQ ID NO: 2771595 - RNA, 19 nt, Artificial Sequence
  Description of Artificial Sequence: Synthetic oligonucleotide
gcuuggcccgaccugucuu

SEQ ID NO: 2771596 - RNA, 19 nt, Artificial Sequence
  Description of Artificial Sequence: Synthetic oligonucleotide
gcccgaccugucuucuucu

SEQ ID NO: 2771597 - RNA, 19 nt, Artificial Sequence
  Description of Artificial Sequence: Synthetic oligonucleotide
gggcgcgcacaaagagcug

SEQ ID NO: 2771598 - RNA, 19 nt, Artificial Sequence
  Description of Artificial Sequence: Synthetic oligonucleotide
gucccugggcgcgcacaaa

SEQ ID NO: 2771599 - RNA, 19 nt, Artificial Sequence
  Description of Artificial Sequence: Synthetic oligonucleotide
ggccggucaccucgagugu

SEQ ID NO: 2771600 - RNA, 19 nt, Artificial Sequence
  Description of Artificial Sequence: Synthetic oligonucleotide
cguuaacaaagcgacgguu

SEQ ID NO: 2771601 - RNA, 19 nt, Artificial Sequence
  Description of Artificial Sequence: Synthetic oligonucleotide
ccgcuuggcccgaccuguc

SEQ ID NO: 2771602 - RNA, 19 nt, Artificial Sequence
  Description of Artificial Sequence: Synthetic oligonucleotide
gcacgagcuagggaaccau

SEQ ID NO: 2771603 - RNA, 19 nt, Artificial Sequence
  Description of Artificial Sequence: Synthetic oligonucleotide
cagcggcgagccagccaaa

SEQ ID NO: 2771604 - RNA, 19 nt, Artificial Sequence
  Description of Artificial Sequence: Synthetic oligonucleotide
ccggucaccucgagugugu

SEQ ID NO: 2771605 - RNA, 19 nt, Artificial Sequence
  Description of Artificial Sequence: Synthetic oligonucleotide
cauccgccgcuuggcccga

SEQ ID NO: 2771606 - RNA, 19 nt, Artificial Sequence
  Description of Artificial Sequence: Synthetic oligonucleotide
ggccaccuugggaguuuga

SEQ ID NO: 2771607 - RNA, 19 nt, Artificial Sequence
  Description of Artificial Sequence: Synthetic oligonucleotide
cggucaccucgagugugug

SEQ ID NO: 2771608 - RNA, 19 nt, Artificial Sequence
  Description of Artificial Sequence: Synthetic oligonucleotide
ccuuccagugaggccacau

SEQ ID NO: 2771609 - RNA, 19 nt, Artificial Sequence
  Description of Artificial Sequence: Synthetic oligonucleotide
cgcgcacguccucaccgca

SEQ ID NO: 2771610 - RNA, 19 nt, Artificial Sequence
  Description of Artificial Sequence: Synthetic oligonucleotide
gcgagggcgcgcacguccu

SEQ ID NO: 2771611 - RNA, 19 nt, Artificial Sequence
  Description of Artificial Sequence: Synthetic oligonucleotide
gccuuccagugaggccaca

SEQ ID NO: 2771612 - RNA, 19 nt, Artificial Sequence
  Description of Artificial Sequence: Synthetic oligonucleotide
ccgccgcuuggcccgaccu

SEQ ID NO: 2771613 - RNA, 19 nt, Artificial Sequence
  Description of Artificial Sequence: Synthetic oligonucleotide
gcgcacguccucaccgcau

SEQ ID NO: 2771614 - RNA, 19 nt, Artificial Sequence
  Description of Artificial Sequence: Synthetic oligonucleotide
cccgaccugucuucuucuu

SEQ ID NO: 2771615 - RNA, 19 nt, Artificial Sequence
  Description of Artificial Sequence: Synthetic oligonucleotide
cgcuuggcccgaccugucu

SEQ ID NO: 2771616 - RNA, 19 nt, Artificial Sequence
  Description of Artificial Sequence: Synthetic oligonucleotide
cgcaugccgcgugucacgu

SEQ ID NO: 2771617 - RNA, 19 nt, Artificial Sequence
  Description of Artificial Sequence: Synthetic oligonucleotide
cgaccgucucuuggccggu

SEQ ID NO: 2771618 - RNA, 19 nt, Artificial Sequence
  Description of Artificial Sequence: Synthetic oligonucleotide
acuuucuccauucagauuc

SEQ ID NO: 2771619 - RNA, 19 nt, Artificial Sequence
  Description of Artificial Sequence: Synthetic oligonucleotide
aacgccaagacuuucucca

SEQ ID NO: 2771620 - RNA, 19 nt, Artificial Sequence
  Description of Artificial Sequence: Synthetic oligonucleotide
auggcaaguauggauaugc

SEQ ID NO: 2771621 - RNA, 19 nt, Artificial Sequence
  Description of Artificial Sequence: Synthetic oligonucleotide
guauggauaugccugcugg

SEQ ID NO: 2771622 - RNA, 19 nt, Artificial Sequence
  Description of Artificial Sequence: Synthetic oligonucleotide
augccugcuggauaaagag

SEQ ID NO: 2771623 - RNA, 19 nt, Artificial Sequence
  Description of Artificial Sequence: Synthetic oligonucleotide
agagauggcaaguauggau

SEQ ID NO: 2771624 - RNA, 19 nt, Artificial Sequence
  Description of Artificial Sequence: Synthetic oligonucleotide
caaguauggauaugccugc

SEQ ID NO: 2771625 - RNA, 19 nt, Artificial Sequence
  Description of Artificial Sequence: Synthetic oligonucleotide
caagacuuucuccauucag

SEQ ID NO: 2771626 - RNA, 19 nt, Artificial Sequence
  Description of Artificial Sequence: Synthetic oligonucleotide
agacuuucuccauucagau

SEQ ID NO: 2771627 - RNA, 19 nt, Artificial Sequence
  Description of Artificial Sequence: Synthetic oligonucleotide
gcaaguauggauaugccug

SEQ ID NO: 2771628 - RNA, 19 nt, Artificial Sequence
  Description of Artificial Sequence: Synthetic oligonucleotide
uauggauaugccugcugga

SEQ ID NO: 2771629 - RNA, 19 nt, Artificial Sequence
  Description of Artificial Sequence: Synthetic oligonucleotide
aguauggauaugccugcug

SEQ ID NO: 2771630 - RNA, 19 nt, Artificial Sequence
  Description of Artificial Sequence: Synthetic oligonucleotide
gaacgccaagacuuucucc

SEQ ID NO: 2771631 - RNA, 19 nt, Artificial Sequence
  Description of Artificial Sequence: Synthetic oligonucleotide
ugaacgccaagacuuucuc

SEQ ID NO: 2771632 - RNA, 19 nt, Artificial Sequence
  Description of Artificial Sequence: Synthetic oligonucleotide
uggcaaguauggauaugcc

SEQ ID NO: 2771633 - RNA, 19 nt, Artificial Sequence
  Description of Artificial Sequence: Synthetic oligonucleotide
uggauaugccugcuggaua

SEQ ID NO: 2771634 - RNA, 19 nt, Artificial Sequence
  Description of Artificial Sequence: Synthetic oligonucleotide
gagauggcaaguauggaua

SEQ ID NO: 2771635 - RNA, 19 nt, Artificial Sequence
  Description of Artificial Sequence: Synthetic oligonucleotide
agauggcaaguauggauau

SEQ ID NO: 2771636 - RNA, 19 nt, Artificial Sequence
  Description of Artificial Sequence: Synthetic oligonucleotide
auaugccugcuggauaaag

SEQ ID NO: 2771637 - RNA, 19 nt, Artificial Sequence
  Description of Artificial Sequence: Synthetic oligonucleotide
aaguauggauaugccugcu

SEQ ID NO: 2771638 - RNA, 19 nt, Artificial Sequence
  Description of Artificial Sequence: Synthetic oligonucleotide
gauggcaaguauggauaug

SEQ ID NO: 2771639 - RNA, 19 nt, Artificial Sequence
  Description of Artificial Sequence: Synthetic oligonucleotide
ggauaugccugcuggauaa

SEQ ID NO: 2771640 - RNA, 19 nt, Artificial Sequence
  Description of Artificial Sequence: Synthetic oligonucleotide
auggauaugccugcuggau

SEQ ID NO: 2771641 - RNA, 19 nt, Artificial Sequence
  Description of Artificial Sequence: Synthetic oligonucleotide
gccaagacuuucuccauuc

SEQ ID NO: 2771642 - RNA, 19 nt, Artificial Sequence
  Description of Artificial Sequence: Synthetic oligonucleotide
ggcaaguauggauaugccu

SEQ ID NO: 2771643 - RNA, 19 nt, Artificial Sequence
  Description of Artificial Sequence: Synthetic oligonucleotide
cugaacgccaagacuuucu

SEQ ID NO: 2771644 - RNA, 19 nt, Artificial Sequence
  Description of Artificial Sequence: Synthetic oligonucleotide
acgccaagacuuucuccau

SEQ ID NO: 2771645 - RNA, 19 nt, Artificial Sequence
  Description of Artificial Sequence: Synthetic oligonucleotide
gacuuucuccauucagauu

SEQ ID NO: 2771646 - RNA, 19 nt, Artificial Sequence
  Description of Artificial Sequence: Synthetic oligonucleotide
gcugaacgccaagacuuuc

SEQ ID NO: 2771647 - RNA, 19 nt, Artificial Sequence
  Description of Artificial Sequence: Synthetic oligonucleotide
ccaagacuuucuccauuca

SEQ ID NO: 2771648 - RNA, 19 nt, Artificial Sequence
  Description of Artificial Sequence: Synthetic oligonucleotide
cgccaagacuuucuccauu

SEQ ID NO: 2771649 - RNA, 19 nt, Artificial Sequence
  Description of Artificial Sequence: Synthetic oligonucleotide
agaaauuuguucuagaaac

SEQ ID NO: 2771650 - RNA, 19 nt, Artificial Sequence
  Description of Artificial Sequence: Synthetic oligonucleotide
aaugaagcaaaacugaucu

SEQ ID NO: 2771651 - RNA, 19 nt, Artificial Sequence
  Description of Artificial Sequence: Synthetic oligonucleotide
uguaaaaugaagcaaaacu

SEQ ID NO: 2771652 - RNA, 19 nt, Artificial Sequence
  Description of Artificial Sequence: Synthetic oligonucleotide
ucugcagacaacaaaaugg

SEQ ID NO: 2771653 - RNA, 19 nt, Artificial Sequence
  Description of Artificial Sequence: Synthetic oligonucleotide
ucaauuuguaaaaugaagc

SEQ ID NO: 2771654 - RNA, 19 nt, Artificial Sequence
  Description of Artificial Sequence: Synthetic oligonucleotide
caaaagaucagcaacaaac

SEQ ID NO: 2771655 - RNA, 19 nt, Artificial Sequence
  Description of Artificial Sequence: Synthetic oligonucleotide
uuuaucugucuuuagaucc

SEQ ID NO: 2771656 - RNA, 19 nt, Artificial Sequence
  Description of Artificial Sequence: Synthetic oligonucleotide
cuagaaacuaguaaguugc

SEQ ID NO: 2771657 - RNA, 19 nt, Artificial Sequence
  Description of Artificial Sequence: Synthetic oligonucleotide
aacucaaucacuuucuuga

SEQ ID NO: 2771658 - RNA, 19 nt, Artificial Sequence
  Description of Artificial Sequence: Synthetic oligonucleotide
uucaauuuguaaaaugaag

SEQ ID NO: 2771659 - RNA, 19 nt, Artificial Sequence
  Description of Artificial Sequence: Synthetic oligonucleotide
caaaaugggucuuugaucc

SEQ ID NO: 2771660 - RNA, 19 nt, Artificial Sequence
  Description of Artificial Sequence: Synthetic oligonucleotide
ucagcaacaaacuacaggu

SEQ ID NO: 2771661 - RNA, 19 nt, Artificial Sequence
  Description of Artificial Sequence: Synthetic oligonucleotide
uuuauguccauuaugcugu

SEQ ID NO: 2771662 - RNA, 19 nt, Artificial Sequence
  Description of Artificial Sequence: Synthetic oligonucleotide
agaagaaacauuuaucugu

SEQ ID NO: 2771663 - RNA, 19 nt, Artificial Sequence
  Description of Artificial Sequence: Synthetic oligonucleotide
ugaaaauucuuuaugucca

SEQ ID NO: 2771664 - RNA, 19 nt, Artificial Sequence
  Description of Artificial Sequence: Synthetic oligonucleotide
guagauagagcugagaggg

SEQ ID NO: 2771665 - RNA, 19 nt, Artificial Sequence
  Description of Artificial Sequence: Synthetic oligonucleotide
uuucuugagcaaaagauca

SEQ ID NO: 2771666 - RNA, 19 nt, Artificial Sequence
  Description of Artificial Sequence: Synthetic oligonucleotide
aauaaagugcuuaaaggag

SEQ ID NO: 2771667 - RNA, 19 nt, Artificial Sequence
  Description of Artificial Sequence: Synthetic oligonucleotide
uguguuaagaaauuuguuc

SEQ ID NO: 2771668 - RNA, 19 nt, Artificial Sequence
  Description of Artificial Sequence: Synthetic oligonucleotide
cugaaaauucuuuaugucc

SEQ ID NO: 2771669 - RNA, 19 nt, Artificial Sequence
  Description of Artificial Sequence: Synthetic oligonucleotide
uguucuagaagaaacauuu

SEQ ID NO: 2771670 - RNA, 19 nt, Artificial Sequence
  Description of Artificial Sequence: Synthetic oligonucleotide
cugaacaaagaaaauaaag

SEQ ID NO: 2771671 - RNA, 19 nt, Artificial Sequence
  Description of Artificial Sequence: Synthetic oligonucleotide
aauggaacaacauuucaau

SEQ ID NO: 2771672 - RNA, 19 nt, Artificial Sequence
  Description of Artificial Sequence: Synthetic oligonucleotide
aaucagauuaaacuccuga

SEQ ID NO: 2771673 - RNA, 19 nt, Artificial Sequence
  Description of Artificial Sequence: Synthetic oligonucleotide
aaacuaguaaguugcagcu

SEQ ID NO: 2771674 - RNA, 19 nt, Artificial Sequence
  Description of Artificial Sequence: Synthetic oligonucleotide
ugagcaaaagaucagcaac

SEQ ID NO: 2771675 - RNA, 19 nt, Artificial Sequence
  Description of Artificial Sequence: Synthetic oligonucleotide
aguaucacuaguccauacc

SEQ ID NO: 2771676 - RNA, 19 nt, Artificial Sequence
  Description of Artificial Sequence: Synthetic oligonucleotide
ucuguguuaagaaauuugu

SEQ ID NO: 2771677 - RNA, 19 nt, Artificial Sequence
  Description of Artificial Sequence: Synthetic oligonucleotide
uuuagauccaagcuucuca

SEQ ID NO: 2771678 - RNA, 19 nt, Artificial Sequence
  Description of Artificial Sequence: Synthetic oligonucleotide
ucuagaaacuaguaaguug

SEQ ID NO: 2771679 - RNA, 19 nt, Artificial Sequence
  Description of Artificial Sequence: Synthetic oligonucleotide
uaagguugcaacaaaggac

SEQ ID NO: 2771680 - RNA, 19 nt, Artificial Sequence
  Description of Artificial Sequence: Synthetic oligonucleotide
guaacuguguucuagaaga

SEQ ID NO: 2771681 - RNA, 19 nt, Artificial Sequence
  Description of Artificial Sequence: Synthetic oligonucleotide
ucucaauuaauuccugaag

SEQ ID NO: 2771682 - RNA, 19 nt, Artificial Sequence
  Description of Artificial Sequence: Synthetic oligonucleotide
uuagucauaagguugcaac

SEQ ID NO: 2771683 - RNA, 19 nt, Artificial Sequence
  Description of Artificial Sequence: Synthetic oligonucleotide
aacaaaaugggucuuugau

SEQ ID NO: 2771684 - RNA, 19 nt, Artificial Sequence
  Description of Artificial Sequence: Synthetic oligonucleotide
acaaaaugggucuuugauc

SEQ ID NO: 2771685 - RNA, 19 nt, Artificial Sequence
  Description of Artificial Sequence: Synthetic oligonucleotide
cuacagguuagucauaagg

SEQ ID NO: 2771686 - RNA, 19 nt, Artificial Sequence
  Description of Artificial Sequence: Synthetic oligonucleotide
ucaauuaauuccugaagug

SEQ ID NO: 2771687 - RNA, 19 nt, Artificial Sequence
  Description of Artificial Sequence: Synthetic oligonucleotide
ucuagaagaaacauuuauc

SEQ ID NO: 2771688 - RNA, 19 nt, Artificial Sequence
  Description of Artificial Sequence: Synthetic oligonucleotide
auuuaucugucuuuagauc

SEQ ID NO: 2771689 - RNA, 19 nt, Artificial Sequence
  Description of Artificial Sequence: Synthetic oligonucleotide
aguggugccaauucacgcc

SEQ ID NO: 2771690 - RNA, 19 nt, Artificial Sequence
  Description of Artificial Sequence: Synthetic oligonucleotide
aguagauagagcugagagg

SEQ ID NO: 2771691 - RNA, 19 nt, Artificial Sequence
  Description of Artificial Sequence: Synthetic oligonucleotide
cuuuauguccauuaugcug

SEQ ID NO: 2771692 - RNA, 19 nt, Artificial Sequence
  Description of Artificial Sequence: Synthetic oligonucleotide
ucauaagguugcaacaaag

SEQ ID NO: 2771693 - RNA, 19 nt, Artificial Sequence
  Description of Artificial Sequence: Synthetic oligonucleotide
cauaagguugcaacaaagg

SEQ ID NO: 2771694 - RNA, 19 nt, Artificial Sequence
  Description of Artificial Sequence: Synthetic oligonucleotide
ugggauuagaaauggaaca

SEQ ID NO: 2771695 - RNA, 19 nt, Artificial Sequence
  Description of Artificial Sequence: Synthetic oligonucleotide
ucagauuaaacuccugaac

SEQ ID NO: 2771696 - RNA, 19 nt, Artificial Sequence
  Description of Artificial Sequence: Synthetic oligonucleotide
uacagguuagucauaaggu

SEQ ID NO: 2771697 - RNA, 19 nt, Artificial Sequence
  Description of Artificial Sequence: Synthetic oligonucleotide
ugcuauauaggucuuguuc

SEQ ID NO: 2771698 - RNA, 19 nt, Artificial Sequence
  Description of Artificial Sequence: Synthetic oligonucleotide
acgccuaucaaucagauua

SEQ ID NO: 2771699 - RNA, 19 nt, Artificial Sequence
  Description of Artificial Sequence: Synthetic oligonucleotide
ucugucuuuagauccaagc

SEQ ID NO: 2771700 - RNA, 19 nt, Artificial Sequence
  Description of Artificial Sequence: Synthetic oligonucleotide
auaagguugcaacaaagga

SEQ ID NO: 2771701 - RNA, 19 nt, Artificial Sequence
  Description of Artificial Sequence: Synthetic oligonucleotide
auuucaauuuguaaaauga

SEQ ID NO: 2771702 - RNA, 19 nt, Artificial Sequence
  Description of Artificial Sequence: Synthetic oligonucleotide
auguccauuaugcugucac

SEQ ID NO: 2771703 - RNA, 19 nt, Artificial Sequence
  Description of Artificial Sequence: Synthetic oligonucleotide
aaauucuuuauguccauua

SEQ ID NO: 2771704 - RNA, 19 nt, Artificial Sequence
  Description of Artificial Sequence: Synthetic oligonucleotide
acuaguccauaccagacag

SEQ ID NO: 2771705 - RNA, 19 nt, Artificial Sequence
  Description of Artificial Sequence: Synthetic oligonucleotide
caauuaauuccugaagugg

SEQ ID NO: 2771706 - RNA, 19 nt, Artificial Sequence
  Description of Artificial Sequence: Synthetic oligonucleotide
uguucugaagcuuuccggc

SEQ ID NO: 2771707 - RNA, 19 nt, Artificial Sequence
  Description of Artificial Sequence: Synthetic oligonucleotide
aauuaauuccugaaguggu

SEQ ID NO: 2771708 - RNA, 19 nt, Artificial Sequence
  Description of Artificial Sequence: Synthetic oligonucleotide
aagguugcaacaaaggaca

SEQ ID NO: 2771709 - RNA, 19 nt, Artificial Sequence
  Description of Artificial Sequence: Synthetic oligonucleotide
aauuuguaaaaugaagcaa

SEQ ID NO: 2771710 - RNA, 19 nt, Artificial Sequence
  Description of Artificial Sequence: Synthetic oligonucleotide
acaaacuacagguuaguca

SEQ ID NO: 2771711 - RNA, 19 nt, Artificial Sequence
  Description of Artificial Sequence: Synthetic oligonucleotide
aauuuguucuagaaacuag

SEQ ID NO: 2771712 - RNA, 19 nt, Artificial Sequence
  Description of Artificial Sequence: Synthetic oligonucleotide
auaaagugcuuaaaggagg

SEQ ID NO: 2771713 - RNA, 19 nt, Artificial Sequence
  Description of Artificial Sequence: Synthetic oligonucleotide
gagugcuagcaguagauag

SEQ ID NO: 2771714 - RNA, 19 nt, Artificial Sequence
  Description of Artificial Sequence: Synthetic oligonucleotide
cugcagacaacaaaauggg

SEQ ID NO: 2771715 - RNA, 19 nt, Artificial Sequence
  Description of Artificial Sequence: Synthetic oligonucleotide
aaaagaucagcaacaaacu

SEQ ID NO: 2771716 - RNA, 19 nt, Artificial Sequence
  Description of Artificial Sequence: Synthetic oligonucleotide
caacaaaggacagugacag

SEQ ID NO: 2771717 - RNA, 19 nt, Artificial Sequence
  Description of Artificial Sequence: Synthetic oligonucleotide
cuuauagucaguaucacua

SEQ ID NO: 2771718 - RNA, 19 nt, Artificial Sequence
  Description of Artificial Sequence: Synthetic oligonucleotide
caguagauagagcugagag

SEQ ID NO: 2771719 - RNA, 19 nt, Artificial Sequence
  Description of Artificial Sequence: Synthetic oligonucleotide
uuguucugaagcuuuccgg

SEQ ID NO: 2771720 - RNA, 19 nt, Artificial Sequence
  Description of Artificial Sequence: Synthetic oligonucleotide
acuaguaaguugcagcuga

SEQ ID NO: 2771721 - RNA, 19 nt, Artificial Sequence
  Description of Artificial Sequence: Synthetic oligonucleotide
agcugaaaauucuuuaugu

SEQ ID NO: 2771722 - RNA, 19 nt, Artificial Sequence
  Description of Artificial Sequence: Synthetic oligonucleotide
uuauagucaguaucacuag

SEQ ID NO: 2771723 - RNA, 19 nt, Artificial Sequence
  Description of Artificial Sequence: Synthetic oligonucleotide
uagaagaaacauuuaucug

SEQ ID NO: 2771724 - RNA, 19 nt, Artificial Sequence
  Description of Artificial Sequence: Synthetic oligonucleotide
guugcaacaaaggacagug

SEQ ID NO: 2771725 - RNA, 19 nt, Artificial Sequence
  Description of Artificial Sequence: Synthetic oligonucleotide
uagucaguaucacuagucc

SEQ ID NO: 2771726 - RNA, 19 nt, Artificial Sequence
  Description of Artificial Sequence: Synthetic oligonucleotide
uggaacaacauuucaauuu

SEQ ID NO: 2771727 - RNA, 19 nt, Artificial Sequence
  Description of Artificial Sequence: Synthetic oligonucleotide
aauucuuuauguccauuau

SEQ ID NO: 2771728 - RNA, 19 nt, Artificial Sequence
  Description of Artificial Sequence: Synthetic oligonucleotide
aacauuuaucugucuuuag

SEQ ID NO: 2771729 - RNA, 19 nt, Artificial Sequence
  Description of Artificial Sequence: Synthetic oligonucleotide
cuuucuugagcaaaagauc

SEQ ID NO: 2771730 - RNA, 19 nt, Artificial Sequence
  Description of Artificial Sequence: Synthetic oligonucleotide
aguaaguugcagcugaaaa

SEQ ID NO: 2771731 - RNA, 19 nt, Artificial Sequence
  Description of Artificial Sequence: Synthetic oligonucleotide
caauuuguaaaaugaagca

SEQ ID NO: 2771732 - RNA, 19 nt, Artificial Sequence
  Description of Artificial Sequence: Synthetic oligonucleotide
uaaagugcuuaaaggaggu

SEQ ID NO: 2771733 - RNA, 19 nt, Artificial Sequence
  Description of Artificial Sequence: Synthetic oligonucleotide
aaacugaucuguguuaaga

SEQ ID NO: 2771734 - RNA, 19 nt, Artificial Sequence
  Description of Artificial Sequence: Synthetic oligonucleotide
ugccaauucacgccuauca

SEQ ID NO: 2771735 - RNA, 19 nt, Artificial Sequence
  Description of Artificial Sequence: Synthetic oligonucleotide
cuagaagaaacauuuaucu

SEQ ID NO: 2771736 - RNA, 19 nt, Artificial Sequence
  Description of Artificial Sequence: Synthetic oligonucleotide
gacaauuuucucugcagac

SEQ ID NO: 2771737 - RNA, 19 nt, Artificial Sequence
  Description of Artificial Sequence: Synthetic oligonucleotide
ugucuuuagauccaagcuu

SEQ ID NO: 2771738 - RNA, 19 nt, Artificial Sequence
  Description of Artificial Sequence: Synthetic oligonucleotide
aagugcuuaaaggaggugu

SEQ ID NO: 2771739 - RNA, 19 nt, Artificial Sequence
  Description of Artificial Sequence: Synthetic oligonucleotide
acagcaaugagagagugcu

SEQ ID NO: 2771740 - RNA, 19 nt, Artificial Sequence
  Description of Artificial Sequence: Synthetic oligonucleotide
aacaaacuacagguuaguc

SEQ ID NO: 2771741 - RNA, 19 nt, Artificial Sequence
  Description of Artificial Sequence: Synthetic oligonucleotide
uaucacuaguccauaccag

SEQ ID NO: 2771742 - RNA, 19 nt, Artificial Sequence
  Description of Artificial Sequence: Synthetic oligonucleotide
aaaacugaucuguguuaag

SEQ ID NO: 2771743 - RNA, 19 nt, Artificial Sequence
  Description of Artificial Sequence: Synthetic oligonucleotide
caagcuucucaauuaauuc

SEQ ID NO: 2771744 - RNA, 19 nt, Artificial Sequence
  Description of Artificial Sequence: Synthetic oligonucleotide
uuaauuccugaaguggugc

SEQ ID NO: 2771745 - RNA, 19 nt, Artificial Sequence
  Description of Artificial Sequence: Synthetic oligonucleotide
cugggauuagaaauggaac

SEQ ID NO: 2771746 - RNA, 19 nt, Artificial Sequence
  Description of Artificial Sequence: Synthetic oligonucleotide
auuuguaaaaugaagcaaa

SEQ ID NO: 2771747 - RNA, 19 nt, Artificial Sequence
  Description of Artificial Sequence: Synthetic oligonucleotide
cagauuaaacuccugaaca

SEQ ID NO: 2771748 - RNA, 19 nt, Artificial Sequence
  Description of Artificial Sequence: Synthetic oligonucleotide
aaaggacagugacaggaca

SEQ ID NO: 2771749 - RNA, 19 nt, Artificial Sequence
  Description of Artificial Sequence: Synthetic oligonucleotide
agcaaugagagagugcuag

SEQ ID NO: 2771750 - RNA, 19 nt, Artificial Sequence
  Description of Artificial Sequence: Synthetic oligonucleotide
gauuagaaauggaacaaca

SEQ ID NO: 2771751 - RNA, 19 nt, Artificial Sequence
  Description of Artificial Sequence: Synthetic oligonucleotide
aaauggaacaacauuucaa

SEQ ID NO: 2771752 - RNA, 19 nt, Artificial Sequence
  Description of Artificial Sequence: Synthetic oligonucleotide
agguuagucauaagguugc

SEQ ID NO: 2771753 - RNA, 19 nt, Artificial Sequence
  Description of Artificial Sequence: Synthetic oligonucleotide
cuuaaaggagguguugagg

SEQ ID NO: 2771754 - RNA, 19 nt, Artificial Sequence
  Description of Artificial Sequence: Synthetic oligonucleotide
cagguuagucauaagguug

SEQ ID NO: 2771755 - RNA, 19 nt, Artificial Sequence
  Description of Artificial Sequence: Synthetic oligonucleotide
acagugacaggacaggggu

SEQ ID NO: 2771756 - RNA, 19 nt, Artificial Sequence
  Description of Artificial Sequence: Synthetic oligonucleotide
aauucacgccuaucaauca

SEQ ID NO: 2771757 - RNA, 19 nt, Artificial Sequence
  Description of Artificial Sequence: Synthetic oligonucleotide
aaauuuguucuagaaacua

SEQ ID NO: 2771758 - RNA, 19 nt, Artificial Sequence
  Description of Artificial Sequence: Synthetic oligonucleotide
auagucaguaucacuaguc

SEQ ID NO: 2771759 - RNA, 19 nt, Artificial Sequence
  Description of Artificial Sequence: Synthetic oligonucleotide
ucuugagcaaaagaucagc

SEQ ID NO: 2771760 - RNA, 19 nt, Artificial Sequence
  Description of Artificial Sequence: Synthetic oligonucleotide
uauagucaguaucacuagu

SEQ ID NO: 2771761 - RNA, 19 nt, Artificial Sequence
  Description of Artificial Sequence: Synthetic oligonucleotide
ggaacaacauuucaauuug

SEQ ID NO: 2771762 - RNA, 19 nt, Artificial Sequence
  Description of Artificial Sequence: Synthetic oligonucleotide
uucuugagcaaaagaucag

SEQ ID NO: 2771763 - RNA, 19 nt, Artificial Sequence
  Description of Artificial Sequence: Synthetic oligonucleotide
uuaucugucuuuagaucca

SEQ ID NO: 2771764 - RNA, 19 nt, Artificial Sequence
  Description of Artificial Sequence: Synthetic oligonucleotide
uuuguucuagaaacuagua

SEQ ID NO: 2771765 - RNA, 19 nt, Artificial Sequence
  Description of Artificial Sequence: Synthetic oligonucleotide
gaaauggaacaacauuuca

SEQ ID NO: 2771766 - RNA, 19 nt, Artificial Sequence
  Description of Artificial Sequence: Synthetic oligonucleotide
agaaacauuuaucugucuu

SEQ ID NO: 2771767 - RNA, 19 nt, Artificial Sequence
  Description of Artificial Sequence: Synthetic oligonucleotide
uagucauaagguugcaaca

SEQ ID NO: 2771768 - RNA, 19 nt, Artificial Sequence
  Description of Artificial Sequence: Synthetic oligonucleotide
uaguccauaccagacagca

SEQ ID NO: 2771769 - RNA, 19 nt, Artificial Sequence
  Description of Artificial Sequence: Synthetic oligonucleotide
uuagauccaagcuucucaa

SEQ ID NO: 2771770 - RNA, 19 nt, Artificial Sequence
  Description of Artificial Sequence: Synthetic oligonucleotide
aagcaaaacugaucugugu

SEQ ID NO: 2771771 - RNA, 19 nt, Artificial Sequence
  Description of Artificial Sequence: Synthetic oligonucleotide
agauuaaacuccugaacaa

SEQ ID NO: 2771772 - RNA, 19 nt, Artificial Sequence
  Description of Artificial Sequence: Synthetic oligonucleotide
aacaaaggacagugacagg

SEQ ID NO: 2771773 - RNA, 19 nt, Artificial Sequence
  Description of Artificial Sequence: Synthetic oligonucleotide
guaucacuaguccauacca

SEQ ID NO: 2771774 - RNA, 19 nt, Artificial Sequence
  Description of Artificial Sequence: Synthetic oligonucleotide
gaaguggugccaauucacg

SEQ ID NO: 2771775 - RNA, 19 nt, Artificial Sequence
  Description of Artificial Sequence: Synthetic oligonucleotide
cagaagcucuaaaugcugg

SEQ ID NO: 2771776 - RNA, 19 nt, Artificial Sequence
  Description of Artificial Sequence: Synthetic oligonucleotide
aucagauuaaacuccugaa

SEQ ID NO: 2771777 - RNA, 19 nt, Artificial Sequence
  Description of Artificial Sequence: Synthetic oligonucleotide
ucacuaguccauaccagac

SEQ ID NO: 2771778 - RNA, 19 nt, Artificial Sequence
  Description of Artificial Sequence: Synthetic oligonucleotide
guguuaagaaauuuguucu

SEQ ID NO: 2771779 - RNA, 19 nt, Artificial Sequence
  Description of Artificial Sequence: Synthetic oligonucleotide
auucacgccuaucaaucag

SEQ ID NO: 2771780 - RNA, 19 nt, Artificial Sequence
  Description of Artificial Sequence: Synthetic oligonucleotide
ucuuuauguccauuaugcu

SEQ ID NO: 2771781 - RNA, 19 nt, Artificial Sequence
  Description of Artificial Sequence: Synthetic oligonucleotide
uguuaagaaauuuguucua

SEQ ID NO: 2771782 - RNA, 19 nt, Artificial Sequence
  Description of Artificial Sequence: Synthetic oligonucleotide
aaggacagugacaggacag

SEQ ID NO: 2771783 - RNA, 19 nt, Artificial Sequence
  Description of Artificial Sequence: Synthetic oligonucleotide
aaacauuuaucugucuuua

SEQ ID NO: 2771784 - RNA, 19 nt, Artificial Sequence
  Description of Artificial Sequence: Synthetic oligonucleotide
auuuguucuagaaacuagu

SEQ ID NO: 2771785 - RNA, 19 nt, Artificial Sequence
  Description of Artificial Sequence: Synthetic oligonucleotide
cuauauaggucuuguucug

SEQ ID NO: 2771786 - RNA, 19 nt, Artificial Sequence
  Description of Artificial Sequence: Synthetic oligonucleotide
uguguucuagaagaaacau

SEQ ID NO: 2771787 - RNA, 19 nt, Artificial Sequence
  Description of Artificial Sequence: Synthetic oligonucleotide
uaccuuugggacaauuuuc

SEQ ID NO: 2771788 - RNA, 19 nt, Artificial Sequence
  Description of Artificial Sequence: Synthetic oligonucleotide
augagagagugcuagcagu

SEQ ID NO: 2771789 - RNA, 19 nt, Artificial Sequence
  Description of Artificial Sequence: Synthetic oligonucleotide
aauuuucucugcagacaac

SEQ ID NO: 2771790 - RNA, 19 nt, Artificial Sequence
  Description of Artificial Sequence: Synthetic oligonucleotide
uccauuaugcugucacaug

SEQ ID NO: 2771791 - RNA, 19 nt, Artificial Sequence
  Description of Artificial Sequence: Synthetic oligonucleotide
uucacgccuaucaaucaga

SEQ ID NO: 2771792 - RNA, 19 nt, Artificial Sequence
  Description of Artificial Sequence: Synthetic oligonucleotide
uguuuucuuauagucagua

SEQ ID NO: 2771793 - RNA, 19 nt, Artificial Sequence
  Description of Artificial Sequence: Synthetic oligonucleotide
ugugcuauauaggucuugu

SEQ ID NO: 2771794 - RNA, 19 nt, Artificial Sequence
  Description of Artificial Sequence: Synthetic oligonucleotide
agaucagcaacaaacuaca

SEQ ID NO: 2771795 - RNA, 19 nt, Artificial Sequence
  Description of Artificial Sequence: Synthetic oligonucleotide
agaaacuaguaaguugcag

SEQ ID NO: 2771796 - RNA, 19 nt, Artificial Sequence
  Description of Artificial Sequence: Synthetic oligonucleotide
cauaccagacagcaaugag

SEQ ID NO: 2771797 - RNA, 19 nt, Artificial Sequence
  Description of Artificial Sequence: Synthetic oligonucleotide
uagcaguagauagagcuga

SEQ ID NO: 2771798 - RNA, 19 nt, Artificial Sequence
  Description of Artificial Sequence: Synthetic oligonucleotide
aaucacuuucuugagcaaa

SEQ ID NO: 2771799 - RNA, 19 nt, Artificial Sequence
  Description of Artificial Sequence: Synthetic oligonucleotide
acugaucuguguuaagaaa

SEQ ID NO: 2771800 - RNA, 19 nt, Artificial Sequence
  Description of Artificial Sequence: Synthetic oligonucleotide
agauccaagcuucucaauu

SEQ ID NO: 2771801 - RNA, 19 nt, Artificial Sequence
  Description of Artificial Sequence: Synthetic oligonucleotide
gaagcaaaacugaucugug

SEQ ID NO: 2771802 - RNA, 19 nt, Artificial Sequence
  Description of Artificial Sequence: Synthetic oligonucleotide
ccauuaugcugucacaugg

SEQ ID NO: 2771803 - RNA, 19 nt, Artificial Sequence
  Description of Artificial Sequence: Synthetic oligonucleotide
ugggacaauuuucucugca

SEQ ID NO: 2771804 - RNA, 19 nt, Artificial Sequence
  Description of Artificial Sequence: Synthetic oligonucleotide
gacagugacaggacagggg

SEQ ID NO: 2771805 - RNA, 19 nt, Artificial Sequence
  Description of Artificial Sequence: Synthetic oligonucleotide
ugcuuaaaggagguguuga

SEQ ID NO: 2771806 - RNA, 19 nt, Artificial Sequence
  Description of Artificial Sequence: Synthetic oligonucleotide
auuaugcugucacauggaa

SEQ ID NO: 2771807 - RNA, 19 nt, Artificial Sequence
  Description of Artificial Sequence: Synthetic oligonucleotide
aaguugcagcugaaaauuc

SEQ ID NO: 2771808 - RNA, 19 nt, Artificial Sequence
  Description of Artificial Sequence: Synthetic oligonucleotide
gguaacuguguucuagaag

SEQ ID NO: 2771809 - RNA, 19 nt, Artificial Sequence
  Description of Artificial Sequence: Synthetic oligonucleotide
acagguuagucauaagguu

SEQ ID NO: 2771810 - RNA, 19 nt, Artificial Sequence
  Description of Artificial Sequence: Synthetic oligonucleotide
uagaaacuaguaaguugca

SEQ ID NO: 2771811 - RNA, 19 nt, Artificial Sequence
  Description of Artificial Sequence: Synthetic oligonucleotide
cucugcagacaacaaaaug

SEQ ID NO: 2771812 - RNA, 19 nt, Artificial Sequence
  Description of Artificial Sequence: Synthetic oligonucleotide
aaaaugggucuuugauccu

SEQ ID NO: 2771813 - RNA, 19 nt, Artificial Sequence
  Description of Artificial Sequence: Synthetic oligonucleotide
uaggucuuguucugaagcu

SEQ ID NO: 2771814 - RNA, 19 nt, Artificial Sequence
  Description of Artificial Sequence: Synthetic oligonucleotide
cucaauuaauuccugaagu

SEQ ID NO: 2771815 - RNA, 19 nt, Artificial Sequence
  Description of Artificial Sequence: Synthetic oligonucleotide
ugagagagugcuagcagua

SEQ ID NO: 2771816 - RNA, 19 nt, Artificial Sequence
  Description of Artificial Sequence: Synthetic oligonucleotide
uauauaggucuuguucuga

SEQ ID NO: 2771817 - RNA, 19 nt, Artificial Sequence
  Description of Artificial Sequence: Synthetic oligonucleotide
gaggguaacuguguucuag

SEQ ID NO: 2771818 - RNA, 19 nt, Artificial Sequence
  Description of Artificial Sequence: Synthetic oligonucleotide
aaacuccugaacaaagaaa

SEQ ID NO: 2771819 - RNA, 19 nt, Artificial Sequence
  Description of Artificial Sequence: Synthetic oligonucleotide
gagcaaaagaucagcaaca

SEQ ID NO: 2771820 - RNA, 19 nt, Artificial Sequence
  Description of Artificial Sequence: Synthetic oligonucleotide
auuagaaauggaacaacau

SEQ ID NO: 2771821 - RNA, 19 nt, Artificial Sequence
  Description of Artificial Sequence: Synthetic oligonucleotide
aauuccugaaguggugcca

SEQ ID NO: 2771822 - RNA, 19 nt, Artificial Sequence
  Description of Artificial Sequence: Synthetic oligonucleotide
auuaauuccugaaguggug

SEQ ID NO: 2771823 - RNA, 19 nt, Artificial Sequence
  Description of Artificial Sequence: Synthetic oligonucleotide
aacuaguaaguugcagcug

SEQ ID NO: 2771824 - RNA, 19 nt, Artificial Sequence
  Description of Artificial Sequence: Synthetic oligonucleotide
ugcagacaacaaaaugggu

SEQ ID NO: 2771825 - RNA, 19 nt, Artificial Sequence
  Description of Artificial Sequence: Synthetic oligonucleotide
agagagugcuagcaguaga

SEQ ID NO: 2771826 - RNA, 19 nt, Artificial Sequence
  Description of Artificial Sequence: Synthetic oligonucleotide
ucuuuagauccaagcuucu

SEQ ID NO: 2771827 - RNA, 19 nt, Artificial Sequence
  Description of Artificial Sequence: Synthetic oligonucleotide
auauaggucuuguucugaa

SEQ ID NO: 2771828 - RNA, 19 nt, Artificial Sequence
  Description of Artificial Sequence: Synthetic oligonucleotide
aagcuuuccggccaaccua

SEQ ID NO: 2771829 - RNA, 19 nt, Artificial Sequence
  Description of Artificial Sequence: Synthetic oligonucleotide
gcuagcaguagauagagcu

SEQ ID NO: 2771830 - RNA, 19 nt, Artificial Sequence
  Description of Artificial Sequence: Synthetic oligonucleotide
uguccauuaugcugucaca

SEQ ID NO: 2771831 - RNA, 19 nt, Artificial Sequence
  Description of Artificial Sequence: Synthetic oligonucleotide
gaaacauuuaucugucuuu

SEQ ID NO: 2771832 - RNA, 19 nt, Artificial Sequence
  Description of Artificial Sequence: Synthetic oligonucleotide
auagagcugagaggguaac

SEQ ID NO: 2771833 - RNA, 19 nt, Artificial Sequence
  Description of Artificial Sequence: Synthetic oligonucleotide
uucuagaaacuaguaaguu

SEQ ID NO: 2771834 - RNA, 19 nt, Artificial Sequence
  Description of Artificial Sequence: Synthetic oligonucleotide
agucauaagguugcaacaa

SEQ ID NO: 2771835 - RNA, 19 nt, Artificial Sequence
  Description of Artificial Sequence: Synthetic oligonucleotide
ugagaggguaacuguguuc

SEQ ID NO: 2771836 - RNA, 19 nt, Artificial Sequence
  Description of Artificial Sequence: Synthetic oligonucleotide
aaaauucuuuauguccauu

SEQ ID NO: 2771837 - RNA, 19 nt, Artificial Sequence
  Description of Artificial Sequence: Synthetic oligonucleotide
aggacagugacaggacagg

SEQ ID NO: 2771838 - RNA, 19 nt, Artificial Sequence
  Description of Artificial Sequence: Synthetic oligonucleotide
aggguaacuguguucuaga

SEQ ID NO: 2771839 - RNA, 19 nt, Artificial Sequence
  Description of Artificial Sequence: Synthetic oligonucleotide
cagacaacaaaaugggucu

SEQ ID NO: 2771840 - RNA, 19 nt, Artificial Sequence
  Description of Artificial Sequence: Synthetic oligonucleotide
ucucugcagacaacaaaau

SEQ ID NO: 2771841 - RNA, 19 nt, Artificial Sequence
  Description of Artificial Sequence: Synthetic oligonucleotide
agcuuuccggccaaccuac

SEQ ID NO: 2771842 - RNA, 19 nt, Artificial Sequence
  Description of Artificial Sequence: Synthetic oligonucleotide
gcagacaacaaaauggguc

SEQ ID NO: 2771843 - RNA, 19 nt, Artificial Sequence
  Description of Artificial Sequence: Synthetic oligonucleotide
cauuuaucugucuuuagau

SEQ ID NO: 2771844 - RNA, 19 nt, Artificial Sequence
  Description of Artificial Sequence: Synthetic oligonucleotide
uuuccggccaaccuaccuu

SEQ ID NO: 2771845 - RNA, 19 nt, Artificial Sequence
  Description of Artificial Sequence: Synthetic oligonucleotide
gggacaauuuucucugcag

SEQ ID NO: 2771846 - RNA, 19 nt, Artificial Sequence
  Description of Artificial Sequence: Synthetic oligonucleotide
acuacagguuagucauaag

SEQ ID NO: 2771847 - RNA, 19 nt, Artificial Sequence
  Description of Artificial Sequence: Synthetic oligonucleotide
gcuauauaggucuuguucu

SEQ ID NO: 2771848 - RNA, 19 nt, Artificial Sequence
  Description of Artificial Sequence: Synthetic oligonucleotide
auggaacaacauuucaauu

SEQ ID NO: 2771849 - RNA, 19 nt, Artificial Sequence
  Description of Artificial Sequence: Synthetic oligonucleotide
guaaguugcagcugaaaau

SEQ ID NO: 2771850 - RNA, 19 nt, Artificial Sequence
  Description of Artificial Sequence: Synthetic oligonucleotide
agugcuagcaguagauaga

SEQ ID NO: 2771851 - RNA, 19 nt, Artificial Sequence
  Description of Artificial Sequence: Synthetic oligonucleotide
gagaggguaacuguguucu

SEQ ID NO: 2771852 - RNA, 19 nt, Artificial Sequence
  Description of Artificial Sequence: Synthetic oligonucleotide
gaagcucuaaaugcuggga

SEQ ID NO: 2771853 - RNA, 19 nt, Artificial Sequence
  Description of Artificial Sequence: Synthetic oligonucleotide
gaaauuuguucuagaaacu

SEQ ID NO: 2771854 - RNA, 19 nt, Artificial Sequence
  Description of Artificial Sequence: Synthetic oligonucleotide
ucacgccuaucaaucagau

SEQ ID NO: 2771855 - RNA, 19 nt, Artificial Sequence
  Description of Artificial Sequence: Synthetic oligonucleotide
cuaguccauaccagacagc

SEQ ID NO: 2771856 - RNA, 19 nt, Artificial Sequence
  Description of Artificial Sequence: Synthetic oligonucleotide
uugcaacaaaggacaguga

SEQ ID NO: 2771857 - RNA, 19 nt, Artificial Sequence
  Description of Artificial Sequence: Synthetic oligonucleotide
gcuuaaaggagguguugag

SEQ ID NO: 2771858 - RNA, 19 nt, Artificial Sequence
  Description of Artificial Sequence: Synthetic oligonucleotide
uugcagcugaaaauucuuu

SEQ ID NO: 2771859 - RNA, 19 nt, Artificial Sequence
  Description of Artificial Sequence: Synthetic oligonucleotide
cugaucuguguuaagaaau

SEQ ID NO: 2771860 - RNA, 19 nt, Artificial Sequence
  Description of Artificial Sequence: Synthetic oligonucleotide
agcucuaaaugcugggauu

SEQ ID NO: 2771861 - RNA, 19 nt, Artificial Sequence
  Description of Artificial Sequence: Synthetic oligonucleotide
caguaucacuaguccauac

SEQ ID NO: 2771862 - RNA, 19 nt, Artificial Sequence
  Description of Artificial Sequence: Synthetic oligonucleotide
ugcuagcaguagauagagc

SEQ ID NO: 2771863 - RNA, 19 nt, Artificial Sequence
  Description of Artificial Sequence: Synthetic oligonucleotide
uugggacaauuuucucugc

SEQ ID NO: 2771864 - RNA, 19 nt, Artificial Sequence
  Description of Artificial Sequence: Synthetic oligonucleotide
caaucagauuaaacuccug

SEQ ID NO: 2771865 - RNA, 19 nt, Artificial Sequence
  Description of Artificial Sequence: Synthetic oligonucleotide
cauuaugcugucacaugga

SEQ ID NO: 2771866 - RNA, 19 nt, Artificial Sequence
  Description of Artificial Sequence: Synthetic oligonucleotide
uagauagagcugagagggu

SEQ ID NO: 2771867 - RNA, 19 nt, Artificial Sequence
  Description of Artificial Sequence: Synthetic oligonucleotide
ggacaauuuucucugcaga

SEQ ID NO: 2771868 - RNA, 19 nt, Artificial Sequence
  Description of Artificial Sequence: Synthetic oligonucleotide
cacuuucuugagcaaaaga

SEQ ID NO: 2771869 - RNA, 19 nt, Artificial Sequence
  Description of Artificial Sequence: Synthetic oligonucleotide
agcaaaagaucagcaacaa

SEQ ID NO: 2771870 - RNA, 19 nt, Artificial Sequence
  Description of Artificial Sequence: Synthetic oligonucleotide
agauagagcugagagggua

SEQ ID NO: 2771871 - RNA, 19 nt, Artificial Sequence
  Description of Artificial Sequence: Synthetic oligonucleotide
ugggucuuugauccuguuu

SEQ ID NO: 2771872 - RNA, 19 nt, Artificial Sequence
  Description of Artificial Sequence: Synthetic oligonucleotide
cugucuuuagauccaagcu

SEQ ID NO: 2771873 - RNA, 19 nt, Artificial Sequence
  Description of Artificial Sequence: Synthetic oligonucleotide
ggauuagaaauggaacaac

SEQ ID NO: 2771874 - RNA, 19 nt, Artificial Sequence
  Description of Artificial Sequence: Synthetic oligonucleotide
cuuuagauccaagcuucuc

SEQ ID NO: 2771875 - RNA, 19 nt, Artificial Sequence
  Description of Artificial Sequence: Synthetic oligonucleotide
gucauaagguugcaacaaa

SEQ ID NO: 2771876 - RNA, 19 nt, Artificial Sequence
  Description of Artificial Sequence: Synthetic oligonucleotide
caaaacugaucuguguuaa

SEQ ID NO: 2771877 - RNA, 19 nt, Artificial Sequence
  Description of Artificial Sequence: Synthetic oligonucleotide
accucugacuuggcugugc

SEQ ID NO: 2771878 - RNA, 19 nt, Artificial Sequence
  Description of Artificial Sequence: Synthetic oligonucleotide
agcugagaggguaacugug

SEQ ID NO: 2771879 - RNA, 19 nt, Artificial Sequence
  Description of Artificial Sequence: Synthetic oligonucleotide
cugaaguggugccaauuca

SEQ ID NO: 2771880 - RNA, 19 nt, Artificial Sequence
  Description of Artificial Sequence: Synthetic oligonucleotide
uggcugugcuauauagguc

SEQ ID NO: 2771881 - RNA, 19 nt, Artificial Sequence
  Description of Artificial Sequence: Synthetic oligonucleotide
ggcugugcuauauaggucu

SEQ ID NO: 2771882 - RNA, 19 nt, Artificial Sequence
  Description of Artificial Sequence: Synthetic oligonucleotide
guucuagaaacuaguaagu

SEQ ID NO: 2771883 - RNA, 19 nt, Artificial Sequence
  Description of Artificial Sequence: Synthetic oligonucleotide
cucuaaaugcugggauuag

SEQ ID NO: 2771884 - RNA, 19 nt, Artificial Sequence
  Description of Artificial Sequence: Synthetic oligonucleotide
ucaguaucacuaguccaua

SEQ ID NO: 2771885 - RNA, 19 nt, Artificial Sequence
  Description of Artificial Sequence: Synthetic oligonucleotide
uuauguccauuaugcuguc

SEQ ID NO: 2771886 - RNA, 19 nt, Artificial Sequence
  Description of Artificial Sequence: Synthetic oligonucleotide
cacuaguccauaccagaca

SEQ ID NO: 2771887 - RNA, 19 nt, Artificial Sequence
  Description of Artificial Sequence: Synthetic oligonucleotide
uagauccaagcuucucaau

SEQ ID NO: 2771888 - RNA, 19 nt, Artificial Sequence
  Description of Artificial Sequence: Synthetic oligonucleotide
agugcuuaaaggagguguu

SEQ ID NO: 2771889 - RNA, 19 nt, Artificial Sequence
  Description of Artificial Sequence: Synthetic oligonucleotide
ggacagugacaggacaggg

SEQ ID NO: 2771890 - RNA, 19 nt, Artificial Sequence
  Description of Artificial Sequence: Synthetic oligonucleotide
uuccggccaaccuaccuuu

SEQ ID NO: 2771891 - RNA, 19 nt, Artificial Sequence
  Description of Artificial Sequence: Synthetic oligonucleotide
uauguccauuaugcuguca

SEQ ID NO: 2771892 - RNA, 19 nt, Artificial Sequence
  Description of Artificial Sequence: Synthetic oligonucleotide
gccaaccuaccuuugggac

SEQ ID NO: 2771893 - RNA, 19 nt, Artificial Sequence
  Description of Artificial Sequence: Synthetic oligonucleotide
uugauccuguuuucuuaua

SEQ ID NO: 2771894 - RNA, 19 nt, Artificial Sequence
  Description of Artificial Sequence: Synthetic oligonucleotide
gugcuuaaaggagguguug

SEQ ID NO: 2771895 - RNA, 19 nt, Artificial Sequence
  Description of Artificial Sequence: Synthetic oligonucleotide
gcugggauuagaaauggaa

SEQ ID NO: 2771896 - RNA, 19 nt, Artificial Sequence
  Description of Artificial Sequence: Synthetic oligonucleotide
uagagcugagaggguaacu

SEQ ID NO: 2771897 - RNA, 19 nt, Artificial Sequence
  Description of Artificial Sequence: Synthetic oligonucleotide
gucaguaucacuaguccau

SEQ ID NO: 2771898 - RNA, 19 nt, Artificial Sequence
  Description of Artificial Sequence: Synthetic oligonucleotide
guuagucauaagguugcaa

SEQ ID NO: 2771899 - RNA, 19 nt, Artificial Sequence
  Description of Artificial Sequence: Synthetic oligonucleotide
agcaguagauagagcugag

SEQ ID NO: 2771900 - RNA, 19 nt, Artificial Sequence
  Description of Artificial Sequence: Synthetic oligonucleotide
caaccuaccuuugggacaa

SEQ ID NO: 2771901 - RNA, 19 nt, Artificial Sequence
  Description of Artificial Sequence: Synthetic oligonucleotide
cuaccuuugggacaauuuu

SEQ ID NO: 2771902 - RNA, 19 nt, Artificial Sequence
  Description of Artificial Sequence: Synthetic oligonucleotide
uccggccaaccuaccuuug

SEQ ID NO: 2771903 - RNA, 19 nt, Artificial Sequence
  Description of Artificial Sequence: Synthetic oligonucleotide
aucugucuuuagauccaag

SEQ ID NO: 2771904 - RNA, 19 nt, Artificial Sequence
  Description of Artificial Sequence: Synthetic oligonucleotide
agguugcaacaaaggacag

SEQ ID NO: 2771905 - RNA, 19 nt, Artificial Sequence
  Description of Artificial Sequence: Synthetic oligonucleotide
acuccugaacaaagaaaau

SEQ ID NO: 2771906 - RNA, 19 nt, Artificial Sequence
  Description of Artificial Sequence: Synthetic oligonucleotide
gagagugcuagcaguagau

SEQ ID NO: 2771907 - RNA, 19 nt, Artificial Sequence
  Description of Artificial Sequence: Synthetic oligonucleotide
uccugaaguggugccaauu

SEQ ID NO: 2771908 - RNA, 19 nt, Artificial Sequence
  Description of Artificial Sequence: Synthetic oligonucleotide
cugugcuauauaggucuug

SEQ ID NO: 2771909 - RNA, 19 nt, Artificial Sequence
  Description of Artificial Sequence: Synthetic oligonucleotide
ccugaacaaagaaaauaaa

SEQ ID NO: 2771910 - RNA, 19 nt, Artificial Sequence
  Description of Artificial Sequence: Synthetic oligonucleotide
agagugcuagcaguagaua

SEQ ID NO: 2771911 - RNA, 19 nt, Artificial Sequence
  Description of Artificial Sequence: Synthetic oligonucleotide
guggugccaauucacgccu

SEQ ID NO: 2771912 - RNA, 19 nt, Artificial Sequence
  Description of Artificial Sequence: Synthetic oligonucleotide
gcaaaagaucagcaacaaa

SEQ ID NO: 2771913 - RNA, 19 nt, Artificial Sequence
  Description of Artificial Sequence: Synthetic oligonucleotide
caaucacuuucuugagcaa

SEQ ID NO: 2771914 - RNA, 19 nt, Artificial Sequence
  Description of Artificial Sequence: Synthetic oligonucleotide
guccauuaugcugucacau

SEQ ID NO: 2771915 - RNA, 19 nt, Artificial Sequence
  Description of Artificial Sequence: Synthetic oligonucleotide
agacaacaaaaugggucuu

SEQ ID NO: 2771916 - RNA, 19 nt, Artificial Sequence
  Description of Artificial Sequence: Synthetic oligonucleotide
ggccaaccuaccuuuggga

SEQ ID NO: 2771917 - RNA, 19 nt, Artificial Sequence
  Description of Artificial Sequence: Synthetic oligonucleotide
ccaaccuaccuuugggaca

SEQ ID NO: 2771918 - RNA, 19 nt, Artificial Sequence
  Description of Artificial Sequence: Synthetic oligonucleotide
gccaauucacgccuaucaa

SEQ ID NO: 2771919 - RNA, 19 nt, Artificial Sequence
  Description of Artificial Sequence: Synthetic oligonucleotide
gcucuaaaugcugggauua

SEQ ID NO: 2771920 - RNA, 19 nt, Artificial Sequence
  Description of Artificial Sequence: Synthetic oligonucleotide
cagacagcaaugagagagu

SEQ ID NO: 2771921 - RNA, 19 nt, Artificial Sequence
  Description of Artificial Sequence: Synthetic oligonucleotide
agaggguaacuguguucua

SEQ ID NO: 2771922 - RNA, 19 nt, Artificial Sequence
  Description of Artificial Sequence: Synthetic oligonucleotide
uggugccaauucacgccua

SEQ ID NO: 2771923 - RNA, 19 nt, Artificial Sequence
  Description of Artificial Sequence: Synthetic oligonucleotide
cuuuccggccaaccuaccu

SEQ ID NO: 2771924 - RNA, 19 nt, Artificial Sequence
  Description of Artificial Sequence: Synthetic oligonucleotide
guguucuagaagaaacauu

SEQ ID NO: 2771925 - RNA, 19 nt, Artificial Sequence
  Description of Artificial Sequence: Synthetic oligonucleotide
gugacaggacagggguggc

SEQ ID NO: 2771926 - RNA, 19 nt, Artificial Sequence
  Description of Artificial Sequence: Synthetic oligonucleotide
ccggccaaccuaccuuugg

SEQ ID NO: 2771927 - RNA, 19 nt, Artificial Sequence
  Description of Artificial Sequence: Synthetic oligonucleotide
ccaagcuucucaauuaauu

SEQ ID NO: 2771928 - RNA, 19 nt, Artificial Sequence
  Description of Artificial Sequence: Synthetic oligonucleotide
cggccaaccuaccuuuggg

SEQ ID NO: 2771929 - RNA, 19 nt, Artificial Sequence
  Description of Artificial Sequence: Synthetic oligonucleotide
accuaccuuugggacaauu

SEQ ID NO: 2771930 - RNA, 19 nt, Artificial Sequence
  Description of Artificial Sequence: Synthetic oligonucleotide
gugccaauucacgccuauc

SEQ ID NO: 2771931 - RNA, 19 nt, Artificial Sequence
  Description of Artificial Sequence: Synthetic oligonucleotide
gguuagucauaagguugca

SEQ ID NO: 2771932 - RNA, 19 nt, Artificial Sequence
  Description of Artificial Sequence: Synthetic oligonucleotide
ccaauucacgccuaucaau

SEQ ID NO: 2771933 - RNA, 19 nt, Artificial Sequence
  Description of Artificial Sequence: Synthetic oligonucleotide
ccauaccagacagcaauga

SEQ ID NO: 2771934 - RNA, 19 nt, Artificial Sequence
  Description of Artificial Sequence: Synthetic oligonucleotide
gguugcaacaaaggacagu

SEQ ID NO: 2771935 - RNA, 19 nt, Artificial Sequence
  Description of Artificial Sequence: Synthetic oligonucleotide
cagcaaugagagagugcua

SEQ ID NO: 2771936 - RNA, 19 nt, Artificial Sequence
  Description of Artificial Sequence: Synthetic oligonucleotide
gcugagaggguaacugugu

SEQ ID NO: 2771937 - RNA, 19 nt, Artificial Sequence
  Description of Artificial Sequence: Synthetic oligonucleotide
cagcaacaaacuacagguu

SEQ ID NO: 2771938 - RNA, 19 nt, Artificial Sequence
  Description of Artificial Sequence: Synthetic oligonucleotide
ggucuuguucugaagcuuu

SEQ ID NO: 2771939 - RNA, 19 nt, Artificial Sequence
  Description of Artificial Sequence: Synthetic oligonucleotide
ccuaccuuugggacaauuu

SEQ ID NO: 2771940 - RNA, 19 nt, Artificial Sequence
  Description of Artificial Sequence: Synthetic oligonucleotide
gccuaucaaucagauuaaa

SEQ ID NO: 2771941 - RNA, 19 nt, Artificial Sequence
  Description of Artificial Sequence: Synthetic oligonucleotide
ggugccaauucacgccuau

SEQ ID NO: 2771942 - RNA, 19 nt, Artificial Sequence
  Description of Artificial Sequence: Synthetic oligonucleotide
aaccuaccuuugggacaau

SEQ ID NO: 2771943 - RNA, 19 nt, Artificial Sequence
  Description of Artificial Sequence: Synthetic oligonucleotide
gcuuuccggccaaccuacc

SEQ ID NO: 2771944 - RNA, 19 nt, Artificial Sequence
  Description of Artificial Sequence: Synthetic oligonucleotide
cgccuaucaaucagauuaa

SEQ ID NO: 2771945 - RNA, 19 nt, Artificial Sequence
  Description of Artificial Sequence: Synthetic oligonucleotide
cacgccuaucaaucagauu

SEQ ID NO: 2771946 - RNA, 19 nt, Artificial Sequence
  Description of Artificial Sequence: Synthetic oligonucleotide
ggacagggguggccacaca

SEQ ID NO: 2771947 - RNA, 19 nt, Artificial Sequence
  Description of Artificial Sequence: Synthetic oligonucleotide
gcugugcuauauaggucuu

SEQ ID NO: 2771948 - RNA, 19 nt, Artificial Sequence
  Description of Artificial Sequence: Synthetic oligonucleotide
aaaguuauuaaucgcaauc

SEQ ID NO: 2771949 - RNA, 19 nt, Artificial Sequence
  Description of Artificial Sequence: Synthetic oligonucleotide
uuaaauuaaagguuaaucu

SEQ ID NO: 2771950 - RNA, 19 nt, Artificial Sequence
  Description of Artificial Sequence: Synthetic oligonucleotide
gaaguaacagauuucagag

SEQ ID NO: 2771951 - RNA, 19 nt, Artificial Sequence
  Description of Artificial Sequence: Synthetic oligonucleotide
uaaauuaaagguuaaucug

SEQ ID NO: 2771952 - RNA, 19 nt, Artificial Sequence
  Description of Artificial Sequence: Synthetic oligonucleotide
aagguuaaucuguacuacc

SEQ ID NO: 2771953 - RNA, 19 nt, Artificial Sequence
  Description of Artificial Sequence: Synthetic oligonucleotide
uuuaggaacuauuuuagca

SEQ ID NO: 2771954 - RNA, 19 nt, Artificial Sequence
  Description of Artificial Sequence: Synthetic oligonucleotide
aguaacagauuucagagcu

SEQ ID NO: 2771955 - RNA, 19 nt, Artificial Sequence
  Description of Artificial Sequence: Synthetic oligonucleotide
gauuucagagcugacaugg

SEQ ID NO: 2771956 - RNA, 19 nt, Artificial Sequence
  Description of Artificial Sequence: Synthetic oligonucleotide
ugaagucagacuuaugucc

SEQ ID NO: 2771957 - RNA, 19 nt, Artificial Sequence
  Description of Artificial Sequence: Synthetic oligonucleotide
aaacccuucgguucuacac

SEQ ID NO: 2771958 - RNA, 19 nt, Artificial Sequence
  Description of Artificial Sequence: Synthetic oligonucleotide
aaguaacagauuucagagc

SEQ ID NO: 2771959 - RNA, 19 nt, Artificial Sequence
  Description of Artificial Sequence: Synthetic oligonucleotide
gaagaacugaaucaguccc

SEQ ID NO: 2771960 - RNA, 19 nt, Artificial Sequence
  Description of Artificial Sequence: Synthetic oligonucleotide
uauuuuaggaacuauuuua

SEQ ID NO: 2771961 - RNA, 19 nt, Artificial Sequence
  Description of Artificial Sequence: Synthetic oligonucleotide
uguuaaaguacuagcagca

SEQ ID NO: 2771962 - RNA, 19 nt, Artificial Sequence
  Description of Artificial Sequence: Synthetic oligonucleotide
ucuacacacacacacacac

SEQ ID NO: 2771963 - RNA, 19 nt, Artificial Sequence
  Description of Artificial Sequence: Synthetic oligonucleotide
uuauuaaucgcaaucuaaa

SEQ ID NO: 2771964 - RNA, 19 nt, Artificial Sequence
  Description of Artificial Sequence: Synthetic oligonucleotide
aaauuaaagguuaaucugu

SEQ ID NO: 2771965 - RNA, 19 nt, Artificial Sequence
  Description of Artificial Sequence: Synthetic oligonucleotide
uuaacuuuugcuugcauaa

SEQ ID NO: 2771966 - RNA, 19 nt, Artificial Sequence
  Description of Artificial Sequence: Synthetic oligonucleotide
uuaggaacuauuuuagcac

SEQ ID NO: 2771967 - RNA, 19 nt, Artificial Sequence
  Description of Artificial Sequence: Synthetic oligonucleotide
agaaguaacagauuucaga

SEQ ID NO: 2771968 - RNA, 19 nt, Artificial Sequence
  Description of Artificial Sequence: Synthetic oligonucleotide
uagauagugaagaggauga

SEQ ID NO: 2771969 - RNA, 19 nt, Artificial Sequence
  Description of Artificial Sequence: Synthetic oligonucleotide
ugaagauugggucugaguu

SEQ ID NO: 2771970 - RNA, 19 nt, Artificial Sequence
  Description of Artificial Sequence: Synthetic oligonucleotide
ugcauaacuuauuuuagga

SEQ ID NO: 2771971 - RNA, 19 nt, Artificial Sequence
  Description of Artificial Sequence: Synthetic oligonucleotide
ucaguuccugcuaaaacag

SEQ ID NO: 2771972 - RNA, 19 nt, Artificial Sequence
  Description of Artificial Sequence: Synthetic oligonucleotide
aaaaguuggcagaaguaac

SEQ ID NO: 2771973 - RNA, 19 nt, Artificial Sequence
  Description of Artificial Sequence: Synthetic oligonucleotide
uucgguucuacacacacac

SEQ ID NO: 2771974 - RNA, 19 nt, Artificial Sequence
  Description of Artificial Sequence: Synthetic oligonucleotide
uguacaguuuuguugaggu

SEQ ID NO: 2771975 - RNA, 19 nt, Artificial Sequence
  Description of Artificial Sequence: Synthetic oligonucleotide
aaacaggcccauuagaaaa

SEQ ID NO: 2771976 - RNA, 19 nt, Artificial Sequence
  Description of Artificial Sequence: Synthetic oligonucleotide
uugcauaacuuauuuuagg

SEQ ID NO: 2771977 - RNA, 19 nt, Artificial Sequence
  Description of Artificial Sequence: Synthetic oligonucleotide
uuucagagcugacaugggg

SEQ ID NO: 2771978 - RNA, 19 nt, Artificial Sequence
  Description of Artificial Sequence: Synthetic oligonucleotide
aaguuauuaaucgcaaucu

SEQ ID NO: 2771979 - RNA, 19 nt, Artificial Sequence
  Description of Artificial Sequence: Synthetic oligonucleotide
uacacacacacacacacac

SEQ ID NO: 2771980 - RNA, 19 nt, Artificial Sequence
  Description of Artificial Sequence: Synthetic oligonucleotide
uuuuccuuaacuuuugcuu

SEQ ID NO: 2771981 - RNA, 19 nt, Artificial Sequence
  Description of Artificial Sequence: Synthetic oligonucleotide
aacuuuugcuugcauaacu

SEQ ID NO: 2771982 - RNA, 19 nt, Artificial Sequence
  Description of Artificial Sequence: Synthetic oligonucleotide
uuaaucuguacuaccaaaa

SEQ ID NO: 2771983 - RNA, 19 nt, Artificial Sequence
  Description of Artificial Sequence: Synthetic oligonucleotide
aaucagucccaguagagau

SEQ ID NO: 2771984 - RNA, 19 nt, Artificial Sequence
  Description of Artificial Sequence: Synthetic oligonucleotide
ugaagaacugaaucagucc

SEQ ID NO: 2771985 - RNA, 19 nt, Artificial Sequence
  Description of Artificial Sequence: Synthetic oligonucleotide
gauagugaagaggaugacg

SEQ ID NO: 2771986 - RNA, 19 nt, Artificial Sequence
  Description of Artificial Sequence: Synthetic oligonucleotide
aacugaaucagucccagua

SEQ ID NO: 2771987 - RNA, 19 nt, Artificial Sequence
  Description of Artificial Sequence: Synthetic oligonucleotide
aucaguuccugcuaaaaca

SEQ ID NO: 2771988 - RNA, 19 nt, Artificial Sequence
  Description of Artificial Sequence: Synthetic oligonucleotide
agcaguaguuagcaguggc

SEQ ID NO: 2771989 - RNA, 19 nt, Artificial Sequence
  Description of Artificial Sequence: Synthetic oligonucleotide
uguccugaagaacugaauc

SEQ ID NO: 2771990 - RNA, 19 nt, Artificial Sequence
  Description of Artificial Sequence: Synthetic oligonucleotide
cuugcauaacuuauuuuag

SEQ ID NO: 2771991 - RNA, 19 nt, Artificial Sequence
  Description of Artificial Sequence: Synthetic oligonucleotide
gacacagacacacauuaac

SEQ ID NO: 2771992 - RNA, 19 nt, Artificial Sequence
  Description of Artificial Sequence: Synthetic oligonucleotide
auuuuaggaacuauuuuag

SEQ ID NO: 2771993 - RNA, 19 nt, Artificial Sequence
  Description of Artificial Sequence: Synthetic oligonucleotide
ucugaguuuccccaguaga

SEQ ID NO: 2771994 - RNA, 19 nt, Artificial Sequence
  Description of Artificial Sequence: Synthetic oligonucleotide
guguuaaaguacuagcagc

SEQ ID NO: 2771995 - RNA, 19 nt, Artificial Sequence
  Description of Artificial Sequence: Synthetic oligonucleotide
aguuccugcuaaaacaggc

SEQ ID NO: 2771996 - RNA, 19 nt, Artificial Sequence
  Description of Artificial Sequence: Synthetic oligonucleotide
guagagauggguguuaaag

SEQ ID NO: 2771997 - RNA, 19 nt, Artificial Sequence
  Description of Artificial Sequence: Synthetic oligonucleotide
aagaguucuguacaguuuu

SEQ ID NO: 2771998 - RNA, 19 nt, Artificial Sequence
  Description of Artificial Sequence: Synthetic oligonucleotide
aaaaguuauuaaucgcaau

SEQ ID NO: 2771999 - RNA, 19 nt, Artificial Sequence
  Description of Artificial Sequence: Synthetic oligonucleotide
aguuuuguugagguuuucc

SEQ ID NO: 2772000 - RNA, 19 nt, Artificial Sequence
  Description of Artificial Sequence: Synthetic oligonucleotide
gaguuuccccaguagauag

SEQ ID NO: 2772001 - RNA, 19 nt, Artificial Sequence
  Description of Artificial Sequence: Synthetic oligonucleotide
aaaacaggcccauuagaaa

SEQ ID NO: 2772002 - RNA, 19 nt, Artificial Sequence
  Description of Artificial Sequence: Synthetic oligonucleotide
uuauuuuaggaacuauuuu

SEQ ID NO: 2772003 - RNA, 19 nt, Artificial Sequence
  Description of Artificial Sequence: Synthetic oligonucleotide
ugaaucagucccaguagag

SEQ ID NO: 2772004 - RNA, 19 nt, Artificial Sequence
  Description of Artificial Sequence: Synthetic oligonucleotide
aguuagcaguggcugaccc

SEQ ID NO: 2772005 - RNA, 19 nt, Artificial Sequence
  Description of Artificial Sequence: Synthetic oligonucleotide
ucgacuugaagauuggguc

SEQ ID NO: 2772006 - RNA, 19 nt, Artificial Sequence
  Description of Artificial Sequence: Synthetic oligonucleotide
cacacacacacacagacac

SEQ ID NO: 2772007 - RNA, 19 nt, Artificial Sequence
  Description of Artificial Sequence: Synthetic oligonucleotide
gggauaaucgacuugaaga

SEQ ID NO: 2772008 - RNA, 19 nt, Artificial Sequence
  Description of Artificial Sequence: Synthetic oligonucleotide
uggguguuaaaguacuagc

SEQ ID NO: 2772009 - RNA, 19 nt, Artificial Sequence
  Description of Artificial Sequence: Synthetic oligonucleotide
auugggucugaguuucccc

SEQ ID NO: 2772010 - RNA, 19 nt, Artificial Sequence
  Description of Artificial Sequence: Synthetic oligonucleotide
auaaucgacuugaagauug

SEQ ID NO: 2772011 - RNA, 19 nt, Artificial Sequence
  Description of Artificial Sequence: Synthetic oligonucleotide
ugauggauacacauuucca

SEQ ID NO: 2772012 - RNA, 19 nt, Artificial Sequence
  Description of Artificial Sequence: Synthetic oligonucleotide
uuuugcuugcauaacuuau

SEQ ID NO: 2772013 - RNA, 19 nt, Artificial Sequence
  Description of Artificial Sequence: Synthetic oligonucleotide
cugauggauacacauuucc

SEQ ID NO: 2772014 - RNA, 19 nt, Artificial Sequence
  Description of Artificial Sequence: Synthetic oligonucleotide
uuccugcuaaaacaggccc

SEQ ID NO: 2772015 - RNA, 19 nt, Artificial Sequence
  Description of Artificial Sequence: Synthetic oligonucleotide
cacacacacacacacacag

SEQ ID NO: 2772016 - RNA, 19 nt, Artificial Sequence
  Description of Artificial Sequence: Synthetic oligonucleotide
ugggauaaucgacuugaag

SEQ ID NO: 2772017 - RNA, 19 nt, Artificial Sequence
  Description of Artificial Sequence: Synthetic oligonucleotide
acgaugaggauggugacac

SEQ ID NO: 2772018 - RNA, 19 nt, Artificial Sequence
  Description of Artificial Sequence: Synthetic oligonucleotide
acugaaucagucccaguag

SEQ ID NO: 2772019 - RNA, 19 nt, Artificial Sequence
  Description of Artificial Sequence: Synthetic oligonucleotide
auagugaagaggaugacga

SEQ ID NO: 2772020 - RNA, 19 nt, Artificial Sequence
  Description of Artificial Sequence: Synthetic oligonucleotide
caguagauagugaagagga

SEQ ID NO: 2772021 - RNA, 19 nt, Artificial Sequence
  Description of Artificial Sequence: Synthetic oligonucleotide
acuuauguccugaagaacu

SEQ ID NO: 2772022 - RNA, 19 nt, Artificial Sequence
  Description of Artificial Sequence: Synthetic oligonucleotide
gguguuaaaguacuagcag

SEQ ID NO: 2772023 - RNA, 19 nt, Artificial Sequence
  Description of Artificial Sequence: Synthetic oligonucleotide
ucagacuuauguccugaag

SEQ ID NO: 2772024 - RNA, 19 nt, Artificial Sequence
  Description of Artificial Sequence: Synthetic oligonucleotide
uccugaagaacugaaucag

SEQ ID NO: 2772025 - RNA, 19 nt, Artificial Sequence
  Description of Artificial Sequence: Synthetic oligonucleotide
agcagcaguaguuagcagu

SEQ ID NO: 2772026 - RNA, 19 nt, Artificial Sequence
  Description of Artificial Sequence: Synthetic oligonucleotide
aaaguuggcagaaguaaca

SEQ ID NO: 2772027 - RNA, 19 nt, Artificial Sequence
  Description of Artificial Sequence: Synthetic oligonucleotide
uaaucgacuugaagauugg

SEQ ID NO: 2772028 - RNA, 19 nt, Artificial Sequence
  Description of Artificial Sequence: Synthetic oligonucleotide
cugaagaacugaaucaguc

SEQ ID NO: 2772029 - RNA, 19 nt, Artificial Sequence
  Description of Artificial Sequence: Synthetic oligonucleotide
guagauagugaagaggaug

SEQ ID NO: 2772030 - RNA, 19 nt, Artificial Sequence
  Description of Artificial Sequence: Synthetic oligonucleotide
cacacacacacacacagac

SEQ ID NO: 2772031 - RNA, 19 nt, Artificial Sequence
  Description of Artificial Sequence: Synthetic oligonucleotide
acagaagaguucuguacag

SEQ ID NO: 2772032 - RNA, 19 nt, Artificial Sequence
  Description of Artificial Sequence: Synthetic oligonucleotide
uagagauggguguuaaagu

SEQ ID NO: 2772033 - RNA, 19 nt, Artificial Sequence
  Description of Artificial Sequence: Synthetic oligonucleotide
guucuacacacacacacac

SEQ ID NO: 2772034 - RNA, 19 nt, Artificial Sequence
  Description of Artificial Sequence: Synthetic oligonucleotide
cacacacacacacacacac

SEQ ID NO: 2772035 - RNA, 19 nt, Artificial Sequence
  Description of Artificial Sequence: Synthetic oligonucleotide
uaggaacuauuuuagcacu

SEQ ID NO: 2772036 - RNA, 19 nt, Artificial Sequence
  Description of Artificial Sequence: Synthetic oligonucleotide
uaacagauuucagagcuga

SEQ ID NO: 2772037 - RNA, 19 nt, Artificial Sequence
  Description of Artificial Sequence: Synthetic oligonucleotide
aaguacuagcagcaguagu

SEQ ID NO: 2772038 - RNA, 19 nt, Artificial Sequence
  Description of Artificial Sequence: Synthetic oligonucleotide
ugcuaaaacaggcccauua

SEQ ID NO: 2772039 - RNA, 19 nt, Artificial Sequence
  Description of Artificial Sequence: Synthetic oligonucleotide
aacccuucgguucuacaca

SEQ ID NO: 2772040 - RNA, 19 nt, Artificial Sequence
  Description of Artificial Sequence: Synthetic oligonucleotide
aaucgacuugaagauuggg

SEQ ID NO: 2772041 - RNA, 19 nt, Artificial Sequence
  Description of Artificial Sequence: Synthetic oligonucleotide
aaaguacuagcagcaguag

SEQ ID NO: 2772042 - RNA, 19 nt, Artificial Sequence
  Description of Artificial Sequence: Synthetic oligonucleotide
agagauggguguuaaagua

SEQ ID NO: 2772043 - RNA, 19 nt, Artificial Sequence
  Description of Artificial Sequence: Synthetic oligonucleotide
uggcagaaguaacagauuu

SEQ ID NO: 2772044 - RNA, 19 nt, Artificial Sequence
  Description of Artificial Sequence: Synthetic oligonucleotide
acuagcagcaguaguuagc

SEQ ID NO: 2772045 - RNA, 19 nt, Artificial Sequence
  Description of Artificial Sequence: Synthetic oligonucleotide
uauguccugaagaacugaa

SEQ ID NO: 2772046 - RNA, 19 nt, Artificial Sequence
  Description of Artificial Sequence: Synthetic oligonucleotide
agacuuauguccugaagaa

SEQ ID NO: 2772047 - RNA, 19 nt, Artificial Sequence
  Description of Artificial Sequence: Synthetic oligonucleotide
augacgaugaggaugguga

SEQ ID NO: 2772048 - RNA, 19 nt, Artificial Sequence
  Description of Artificial Sequence: Synthetic oligonucleotide
cagacuuauguccugaaga

SEQ ID NO: 2772049 - RNA, 19 nt, Artificial Sequence
  Description of Artificial Sequence: Synthetic oligonucleotide
uuccuuaacuuuugcuugc

SEQ ID NO: 2772050 - RNA, 19 nt, Artificial Sequence
  Description of Artificial Sequence: Synthetic oligonucleotide
uuugcuugcauaacuuauu

SEQ ID NO: 2772051 - RNA, 19 nt, Artificial Sequence
  Description of Artificial Sequence: Synthetic oligonucleotide
uuuucggcugcugaaguca

SEQ ID NO: 2772052 - RNA, 19 nt, Artificial Sequence
  Description of Artificial Sequence: Synthetic oligonucleotide
cuuauguccugaagaacug

SEQ ID NO: 2772053 - RNA, 19 nt, Artificial Sequence
  Description of Artificial Sequence: Synthetic oligonucleotide
agugaagaggaugacgaug

SEQ ID NO: 2772054 - RNA, 19 nt, Artificial Sequence
  Description of Artificial Sequence: Synthetic oligonucleotide
agaagaguucuguacaguu

SEQ ID NO: 2772055 - RNA, 19 nt, Artificial Sequence
  Description of Artificial Sequence: Synthetic oligonucleotide
uuuuguugagguuuuccuu

SEQ ID NO: 2772056 - RNA, 19 nt, Artificial Sequence
  Description of Artificial Sequence: Synthetic oligonucleotide
acagacacacauuaacuuu

SEQ ID NO: 2772057 - RNA, 19 nt, Artificial Sequence
  Description of Artificial Sequence: Synthetic oligonucleotide
cacacacacacagacacag

SEQ ID NO: 2772058 - RNA, 19 nt, Artificial Sequence
  Description of Artificial Sequence: Synthetic oligonucleotide
aauuaaagguuaaucugua

SEQ ID NO: 2772059 - RNA, 19 nt, Artificial Sequence
  Description of Artificial Sequence: Synthetic oligonucleotide
uuccccaguagauagugaa

SEQ ID NO: 2772060 - RNA, 19 nt, Artificial Sequence
  Description of Artificial Sequence: Synthetic oligonucleotide
cugaagucagacuuauguc

SEQ ID NO: 2772061 - RNA, 19 nt, Artificial Sequence
  Description of Artificial Sequence: Synthetic oligonucleotide
uggggaccugggauaaucg

SEQ ID NO: 2772062 - RNA, 19 nt, Artificial Sequence
  Description of Artificial Sequence: Synthetic oligonucleotide
uacacauuuccaucaguuc

SEQ ID NO: 2772063 - RNA, 19 nt, Artificial Sequence
  Description of Artificial Sequence: Synthetic oligonucleotide
ugacauggggaccugggau

SEQ ID NO: 2772064 - RNA, 19 nt, Artificial Sequence
  Description of Artificial Sequence: Synthetic oligonucleotide
uacuagcagcaguaguuag

SEQ ID NO: 2772065 - RNA, 19 nt, Artificial Sequence
  Description of Artificial Sequence: Synthetic oligonucleotide
guuaaucuguacuaccaaa

SEQ ID NO: 2772066 - RNA, 19 nt, Artificial Sequence
  Description of Artificial Sequence: Synthetic oligonucleotide
auggguguuaaaguacuag

SEQ ID NO: 2772067 - RNA, 19 nt, Artificial Sequence
  Description of Artificial Sequence: Synthetic oligonucleotide
uugaagauugggucugagu

SEQ ID NO: 2772068 - RNA, 19 nt, Artificial Sequence
  Description of Artificial Sequence: Synthetic oligonucleotide
aguuauuaaucgcaaucua

SEQ ID NO: 2772069 - RNA, 19 nt, Artificial Sequence
  Description of Artificial Sequence: Synthetic oligonucleotide
guuauuaaucgcaaucuaa

SEQ ID NO: 2772070 - RNA, 19 nt, Artificial Sequence
  Description of Artificial Sequence: Synthetic oligonucleotide
caucaguuccugcuaaaac

SEQ ID NO: 2772071 - RNA, 19 nt, Artificial Sequence
  Description of Artificial Sequence: Synthetic oligonucleotide
acccuucgguucuacacac

SEQ ID NO: 2772072 - RNA, 19 nt, Artificial Sequence
  Description of Artificial Sequence: Synthetic oligonucleotide
gauggauacacauuuccau

SEQ ID NO: 2772073 - RNA, 19 nt, Artificial Sequence
  Description of Artificial Sequence: Synthetic oligonucleotide
aguaguuagcaguggcuga

SEQ ID NO: 2772074 - RNA, 19 nt, Artificial Sequence
  Description of Artificial Sequence: Synthetic oligonucleotide
aaaacccuucgguucuaca

SEQ ID NO: 2772075 - RNA, 19 nt, Artificial Sequence
  Description of Artificial Sequence: Synthetic oligonucleotide
uccugcuaaaacaggccca

SEQ ID NO: 2772076 - RNA, 19 nt, Artificial Sequence
  Description of Artificial Sequence: Synthetic oligonucleotide
uucuacacacacacacaca

SEQ ID NO: 2772077 - RNA, 19 nt, Artificial Sequence
  Description of Artificial Sequence: Synthetic oligonucleotide
agaacugaaucagucccag

SEQ ID NO: 2772078 - RNA, 19 nt, Artificial Sequence
  Description of Artificial Sequence: Synthetic oligonucleotide
gcuaaaacaggcccauuag

SEQ ID NO: 2772079 - RNA, 19 nt, Artificial Sequence
  Description of Artificial Sequence: Synthetic oligonucleotide
uugcuugcauaacuuauuu

SEQ ID NO: 2772080 - RNA, 19 nt, Artificial Sequence
  Description of Artificial Sequence: Synthetic oligonucleotide
guccugaagaacugaauca

SEQ ID NO: 2772081 - RNA, 19 nt, Artificial Sequence
  Description of Artificial Sequence: Synthetic oligonucleotide
guuaaaguacuagcagcag

SEQ ID NO: 2772082 - RNA, 19 nt, Artificial Sequence
  Description of Artificial Sequence: Synthetic oligonucleotide
aagucagacuuauguccug

SEQ ID NO: 2772083 - RNA, 19 nt, Artificial Sequence
  Description of Artificial Sequence: Synthetic oligonucleotide
uccccaguagauagugaag

SEQ ID NO: 2772084 - RNA, 19 nt, Artificial Sequence
  Description of Artificial Sequence: Synthetic oligonucleotide
aguacuagcagcaguaguu

SEQ ID NO: 2772085 - RNA, 19 nt, Artificial Sequence
  Description of Artificial Sequence: Synthetic oligonucleotide
cuuauuuuaggaacuauuu

SEQ ID NO: 2772086 - RNA, 19 nt, Artificial Sequence
  Description of Artificial Sequence: Synthetic oligonucleotide
gcuugcauaacuuauuuua

SEQ ID NO: 2772087 - RNA, 19 nt, Artificial Sequence
  Description of Artificial Sequence: Synthetic oligonucleotide
aacagauuucagagcugac

SEQ ID NO: 2772088 - RNA, 19 nt, Artificial Sequence
  Description of Artificial Sequence: Synthetic oligonucleotide
agauuucagagcugacaug

SEQ ID NO: 2772089 - RNA, 19 nt, Artificial Sequence
  Description of Artificial Sequence: Synthetic oligonucleotide
cuuaacuuuugcuugcaua

SEQ ID NO: 2772090 - RNA, 19 nt, Artificial Sequence
  Description of Artificial Sequence: Synthetic oligonucleotide
cagaaguaacagauuucag

SEQ ID NO: 2772091 - RNA, 19 nt, Artificial Sequence
  Description of Artificial Sequence: Synthetic oligonucleotide
gagauggguguuaaaguac

SEQ ID NO: 2772092 - RNA, 19 nt, Artificial Sequence
  Description of Artificial Sequence: Synthetic oligonucleotide
gacuugaagauugggucug

SEQ ID NO: 2772093 - RNA, 19 nt, Artificial Sequence
  Description of Artificial Sequence: Synthetic oligonucleotide
cuaaaacaggcccauuaga

SEQ ID NO: 2772094 - RNA, 19 nt, Artificial Sequence
  Description of Artificial Sequence: Synthetic oligonucleotide
acuuauuuuaggaacuauu

SEQ ID NO: 2772095 - RNA, 19 nt, Artificial Sequence
  Description of Artificial Sequence: Synthetic oligonucleotide
aagaacugaaucaguccca

SEQ ID NO: 2772096 - RNA, 19 nt, Artificial Sequence
  Description of Artificial Sequence: Synthetic oligonucleotide
ucccaguagagaugggugu

SEQ ID NO: 2772097 - RNA, 19 nt, Artificial Sequence
  Description of Artificial Sequence: Synthetic oligonucleotide
agauagugaagaggaugac

SEQ ID NO: 2772098 - RNA, 19 nt, Artificial Sequence
  Description of Artificial Sequence: Synthetic oligonucleotide
aguuggcagaaguaacaga

SEQ ID NO: 2772099 - RNA, 19 nt, Artificial Sequence
  Description of Artificial Sequence: Synthetic oligonucleotide
acacagacacacauuaacu

SEQ ID NO: 2772100 - RNA, 19 nt, Artificial Sequence
  Description of Artificial Sequence: Synthetic oligonucleotide
gauggugacacagaagagu

SEQ ID NO: 2772101 - RNA, 19 nt, Artificial Sequence
  Description of Artificial Sequence: Synthetic oligonucleotide
aguucuguacaguuuuguu

SEQ ID NO: 2772102 - RNA, 19 nt, Artificial Sequence
  Description of Artificial Sequence: Synthetic oligonucleotide
aucgacuugaagauugggu

SEQ ID NO: 2772103 - RNA, 19 nt, Artificial Sequence
  Description of Artificial Sequence: Synthetic oligonucleotide
agguuaaucuguacuacca

SEQ ID NO: 2772104 - RNA, 19 nt, Artificial Sequence
  Description of Artificial Sequence: Synthetic oligonucleotide
caguaguuagcaguggcug

SEQ ID NO: 2772105 - RNA, 19 nt, Artificial Sequence
  Description of Artificial Sequence: Synthetic oligonucleotide
uuauguccugaagaacuga

SEQ ID NO: 2772106 - RNA, 19 nt, Artificial Sequence
  Description of Artificial Sequence: Synthetic oligonucleotide
agagcugacauggggaccu

SEQ ID NO: 2772107 - RNA, 19 nt, Artificial Sequence
  Description of Artificial Sequence: Synthetic oligonucleotide
gaaucagucccaguagaga

SEQ ID NO: 2772108 - RNA, 19 nt, Artificial Sequence
  Description of Artificial Sequence: Synthetic oligonucleotide
gcugaagucagacuuaugu

SEQ ID NO: 2772109 - RNA, 19 nt, Artificial Sequence
  Description of Artificial Sequence: Synthetic oligonucleotide
gauugggucugaguuuccc

SEQ ID NO: 2772110 - RNA, 19 nt, Artificial Sequence
  Description of Artificial Sequence: Synthetic oligonucleotide
auacacauuuccaucaguu

SEQ ID NO: 2772111 - RNA, 19 nt, Artificial Sequence
  Description of Artificial Sequence: Synthetic oligonucleotide
caguuccugcuaaaacagg

SEQ ID NO: 2772112 - RNA, 19 nt, Artificial Sequence
  Description of Artificial Sequence: Synthetic oligonucleotide
agauggguguuaaaguacu

SEQ ID NO: 2772113 - RNA, 19 nt, Artificial Sequence
  Description of Artificial Sequence: Synthetic oligonucleotide
guuuccccaguagauagug

SEQ ID NO: 2772114 - RNA, 19 nt, Artificial Sequence
  Description of Artificial Sequence: Synthetic oligonucleotide
guuagcaguggcugacccc

SEQ ID NO: 2772115 - RNA, 19 nt, Artificial Sequence
  Description of Artificial Sequence: Synthetic oligonucleotide
uuccaucaguuccugcuaa

SEQ ID NO: 2772116 - RNA, 19 nt, Artificial Sequence
  Description of Artificial Sequence: Synthetic oligonucleotide
cuguacaguuuuguugagg

SEQ ID NO: 2772117 - RNA, 19 nt, Artificial Sequence
  Description of Artificial Sequence: Synthetic oligonucleotide
auggggaccugggauaauc

SEQ ID NO: 2772118 - RNA, 19 nt, Artificial Sequence
  Description of Artificial Sequence: Synthetic oligonucleotide
guuccugcuaaaacaggcc

SEQ ID NO: 2772119 - RNA, 19 nt, Artificial Sequence
  Description of Artificial Sequence: Synthetic oligonucleotide
guugagguuuuccuuaacu

SEQ ID NO: 2772120 - RNA, 19 nt, Artificial Sequence
  Description of Artificial Sequence: Synthetic oligonucleotide
cuagcagcaguaguuagca

SEQ ID NO: 2772121 - RNA, 19 nt, Artificial Sequence
  Description of Artificial Sequence: Synthetic oligonucleotide
cagacacagacacacauua

SEQ ID NO: 2772122 - RNA, 19 nt, Artificial Sequence
  Description of Artificial Sequence: Synthetic oligonucleotide
gacuuauguccugaagaac

SEQ ID NO: 2772123 - RNA, 19 nt, Artificial Sequence
  Description of Artificial Sequence: Synthetic oligonucleotide
gcagaaguaacagauuuca

SEQ ID NO: 2772124 - RNA, 19 nt, Artificial Sequence
  Description of Artificial Sequence: Synthetic oligonucleotide
guuggcagaaguaacagau

SEQ ID NO: 2772125 - RNA, 19 nt, Artificial Sequence
  Description of Artificial Sequence: Synthetic oligonucleotide
uuuccccaguagauaguga

SEQ ID NO: 2772126 - RNA, 19 nt, Artificial Sequence
  Description of Artificial Sequence: Synthetic oligonucleotide
ugggucugaguuuccccag

SEQ ID NO: 2772127 - RNA, 19 nt, Artificial Sequence
  Description of Artificial Sequence: Synthetic oligonucleotide
gucugaguuuccccaguag

SEQ ID NO: 2772128 - RNA, 19 nt, Artificial Sequence
  Description of Artificial Sequence: Synthetic oligonucleotide
ugaguuuccccaguagaua

SEQ ID NO: 2772129 - RNA, 19 nt, Artificial Sequence
  Description of Artificial Sequence: Synthetic oligonucleotide
ugacgaugaggauggugac

SEQ ID NO: 2772130 - RNA, 19 nt, Artificial Sequence
  Description of Artificial Sequence: Synthetic oligonucleotide
guaguuagcaguggcugac

SEQ ID NO: 2772131 - RNA, 19 nt, Artificial Sequence
  Description of Artificial Sequence: Synthetic oligonucleotide
ucggcugcugaagucagac

SEQ ID NO: 2772132 - RNA, 19 nt, Artificial Sequence
  Description of Artificial Sequence: Synthetic oligonucleotide
uguugagguuuuccuuaac

SEQ ID NO: 2772133 - RNA, 19 nt, Artificial Sequence
  Description of Artificial Sequence: Synthetic oligonucleotide
ggauacacauuuccaucag

SEQ ID NO: 2772134 - RNA, 19 nt, Artificial Sequence
  Description of Artificial Sequence: Synthetic oligonucleotide
cugaaucagucccaguaga

SEQ ID NO: 2772135 - RNA, 19 nt, Artificial Sequence
  Description of Artificial Sequence: Synthetic oligonucleotide
ccaguagauagugaagagg

SEQ ID NO: 2772136 - RNA, 19 nt, Artificial Sequence
  Description of Artificial Sequence: Synthetic oligonucleotide
guuuuccuuaacuuuugcu

SEQ ID NO: 2772137 - RNA, 19 nt, Artificial Sequence
  Description of Artificial Sequence: Synthetic oligonucleotide
ggaacuauuuuagcacugc

SEQ ID NO: 2772138 - RNA, 19 nt, Artificial Sequence
  Description of Artificial Sequence: Synthetic oligonucleotide
cauuuccaucaguuccugc

SEQ ID NO: 2772139 - RNA, 19 nt, Artificial Sequence
  Description of Artificial Sequence: Synthetic oligonucleotide
auuucagagcugacauggg

SEQ ID NO: 2772140 - RNA, 19 nt, Artificial Sequence
  Description of Artificial Sequence: Synthetic oligonucleotide
uuggcagaaguaacagauu

SEQ ID NO: 2772141 - RNA, 19 nt, Artificial Sequence
  Description of Artificial Sequence: Synthetic oligonucleotide
gaagucagacuuauguccu

SEQ ID NO: 2772142 - RNA, 19 nt, Artificial Sequence
  Description of Artificial Sequence: Synthetic oligonucleotide
gauacacauuuccaucagu

SEQ ID NO: 2772143 - RNA, 19 nt, Artificial Sequence
  Description of Artificial Sequence: Synthetic oligonucleotide
gacauggggaccugggaua

SEQ ID NO: 2772144 - RNA, 19 nt, Artificial Sequence
  Description of Artificial Sequence: Synthetic oligonucleotide
gucccaguagagaugggug

SEQ ID NO: 2772145 - RNA, 19 nt, Artificial Sequence
  Description of Artificial Sequence: Synthetic oligonucleotide
auggugacacagaagaguu

SEQ ID NO: 2772146 - RNA, 19 nt, Artificial Sequence
  Description of Artificial Sequence: Synthetic oligonucleotide
ugcuugcauaacuuauuuu

SEQ ID NO: 2772147 - RNA, 19 nt, Artificial Sequence
  Description of Artificial Sequence: Synthetic oligonucleotide
gcauaacuuauuuuaggaa

SEQ ID NO: 2772148 - RNA, 19 nt, Artificial Sequence
  Description of Artificial Sequence: Synthetic oligonucleotide
ggauaaucgacuugaagau

SEQ ID NO: 2772149 - RNA, 19 nt, Artificial Sequence
  Description of Artificial Sequence: Synthetic oligonucleotide
ucgguucuacacacacaca

SEQ ID NO: 2772150 - RNA, 19 nt, Artificial Sequence
  Description of Artificial Sequence: Synthetic oligonucleotide
guaacagauuucagagcug

SEQ ID NO: 2772151 - RNA, 19 nt, Artificial Sequence
  Description of Artificial Sequence: Synthetic oligonucleotide
cuuuugcuugcauaacuua

SEQ ID NO: 2772152 - RNA, 19 nt, Artificial Sequence
  Description of Artificial Sequence: Synthetic oligonucleotide
gguuuuccuuaacuuuugc

SEQ ID NO: 2772153 - RNA, 19 nt, Artificial Sequence
  Description of Artificial Sequence: Synthetic oligonucleotide
cuugaagauugggucugag

SEQ ID NO: 2772154 - RNA, 19 nt, Artificial Sequence
  Description of Artificial Sequence: Synthetic oligonucleotide
acuuuugcuugcauaacuu

SEQ ID NO: 2772155 - RNA, 19 nt, Artificial Sequence
  Description of Artificial Sequence: Synthetic oligonucleotide
agucagacuuauguccuga

SEQ ID NO: 2772156 - RNA, 19 nt, Artificial Sequence
  Description of Artificial Sequence: Synthetic oligonucleotide
accugggauaaucgacuug

SEQ ID NO: 2772157 - RNA, 19 nt, Artificial Sequence
  Description of Artificial Sequence: Synthetic oligonucleotide
ugcugaagucagacuuaug

SEQ ID NO: 2772158 - RNA, 19 nt, Artificial Sequence
  Description of Artificial Sequence: Synthetic oligonucleotide
uccuuaacuuuugcuugca

SEQ ID NO: 2772159 - RNA, 19 nt, Artificial Sequence
  Description of Artificial Sequence: Synthetic oligonucleotide
uggugacacagaagaguuc

SEQ ID NO: 2772160 - RNA, 19 nt, Artificial Sequence
  Description of Artificial Sequence: Synthetic oligonucleotide
cagauuucagagcugacau

SEQ ID NO: 2772161 - RNA, 19 nt, Artificial Sequence
  Description of Artificial Sequence: Synthetic oligonucleotide
gaagauugggucugaguuu

SEQ ID NO: 2772162 - RNA, 19 nt, Artificial Sequence
  Description of Artificial Sequence: Synthetic oligonucleotide
uagcagcaguaguuagcag

SEQ ID NO: 2772163 - RNA, 19 nt, Artificial Sequence
  Description of Artificial Sequence: Synthetic oligonucleotide
uaguuagcaguggcugacc

SEQ ID NO: 2772164 - RNA, 19 nt, Artificial Sequence
  Description of Artificial Sequence: Synthetic oligonucleotide
ggguguuaaaguacuagca

SEQ ID NO: 2772165 - RNA, 19 nt, Artificial Sequence
  Description of Artificial Sequence: Synthetic oligonucleotide
aguagagauggguguuaaa

SEQ ID NO: 2772166 - RNA, 19 nt, Artificial Sequence
  Description of Artificial Sequence: Synthetic oligonucleotide
uccaucaguuccugcuaaa

SEQ ID NO: 2772167 - RNA, 19 nt, Artificial Sequence
  Description of Artificial Sequence: Synthetic oligonucleotide
agguuuuccuuaacuuuug

SEQ ID NO: 2772168 - RNA, 19 nt, Artificial Sequence
  Description of Artificial Sequence: Synthetic oligonucleotide
gcagcaguaguuagcagug

SEQ ID NO: 2772169 - RNA, 19 nt, Artificial Sequence
  Description of Artificial Sequence: Synthetic oligonucleotide
cgguucuacacacacacac

SEQ ID NO: 2772170 - RNA, 19 nt, Artificial Sequence
  Description of Artificial Sequence: Synthetic oligonucleotide
gguuaaucuguacuaccaa

SEQ ID NO: 2772171 - RNA, 19 nt, Artificial Sequence
  Description of Artificial Sequence: Synthetic oligonucleotide
ccuucgguucuacacacac

SEQ ID NO: 2772172 - RNA, 19 nt, Artificial Sequence
  Description of Artificial Sequence: Synthetic oligonucleotide
cuacacacacacacacaca

SEQ ID NO: 2772173 - RNA, 19 nt, Artificial Sequence
  Description of Artificial Sequence: Synthetic oligonucleotide
aucagucccaguagagaug

SEQ ID NO: 2772174 - RNA, 19 nt, Artificial Sequence
  Description of Artificial Sequence: Synthetic oligonucleotide
acauuuccaucaguuccug

SEQ ID NO: 2772175 - RNA, 19 nt, Artificial Sequence
  Description of Artificial Sequence: Synthetic oligonucleotide
gacgaugaggauggugaca

SEQ ID NO: 2772176 - RNA, 19 nt, Artificial Sequence
  Description of Artificial Sequence: Synthetic oligonucleotide
agaguucuguacaguuuug

SEQ ID NO: 2772177 - RNA, 19 nt, Artificial Sequence
  Description of Artificial Sequence: Synthetic oligonucleotide
ggugacacagaagaguucu

SEQ ID NO: 2772178 - RNA, 19 nt, Artificial Sequence
  Description of Artificial Sequence: Synthetic oligonucleotide
cccaguagauagugaagag

SEQ ID NO: 2772179 - RNA, 19 nt, Artificial Sequence
  Description of Artificial Sequence: Synthetic oligonucleotide
aguagauagugaagaggau

SEQ ID NO: 2772180 - RNA, 19 nt, Artificial Sequence
  Description of Artificial Sequence: Synthetic oligonucleotide
cuucgguucuacacacaca

SEQ ID NO: 2772181 - RNA, 19 nt, Artificial Sequence
  Description of Artificial Sequence: Synthetic oligonucleotide
gcugacauggggaccuggg

SEQ ID NO: 2772182 - RNA, 19 nt, Artificial Sequence
  Description of Artificial Sequence: Synthetic oligonucleotide
uucggcugcugaagucaga

SEQ ID NO: 2772183 - RNA, 19 nt, Artificial Sequence
  Description of Artificial Sequence: Synthetic oligonucleotide
cugaguuuccccaguagau

SEQ ID NO: 2772184 - RNA, 19 nt, Artificial Sequence
  Description of Artificial Sequence: Synthetic oligonucleotide
acacacacacacacagaca

SEQ ID NO: 2772185 - RNA, 19 nt, Artificial Sequence
  Description of Artificial Sequence: Synthetic oligonucleotide
ccugggauaaucgacuuga

SEQ ID NO: 2772186 - RNA, 19 nt, Artificial Sequence
  Description of Artificial Sequence: Synthetic oligonucleotide
cagacacacauuaacuuuu

SEQ ID NO: 2772187 - RNA, 19 nt, Artificial Sequence
  Description of Artificial Sequence: Synthetic oligonucleotide
gaguucuguacaguuuugu

SEQ ID NO: 2772188 - RNA, 19 nt, Artificial Sequence
  Description of Artificial Sequence: Synthetic oligonucleotide
agcugacauggggaccugg

SEQ ID NO: 2772189 - RNA, 19 nt, Artificial Sequence
  Description of Artificial Sequence: Synthetic oligonucleotide
cagagcugacauggggacc

SEQ ID NO: 2772190 - RNA, 19 nt, Artificial Sequence
  Description of Artificial Sequence: Synthetic oligonucleotide
guacuagcagcaguaguua

SEQ ID NO: 2772191 - RNA, 19 nt, Artificial Sequence
  Description of Artificial Sequence: Synthetic oligonucleotide
gauaaucgacuugaagauu

SEQ ID NO: 2772192 - RNA, 19 nt, Artificial Sequence
  Description of Artificial Sequence: Synthetic oligonucleotide
acagacacagacacacauu

SEQ ID NO: 2772193 - RNA, 19 nt, Artificial Sequence
  Description of Artificial Sequence: Synthetic oligonucleotide
gguucuacacacacacaca

SEQ ID NO: 2772194 - RNA, 19 nt, Artificial Sequence
  Description of Artificial Sequence: Synthetic oligonucleotide
cugacauggggaccuggga

SEQ ID NO: 2772195 - RNA, 19 nt, Artificial Sequence
  Description of Artificial Sequence: Synthetic oligonucleotide
gggaccugggauaaucgac

SEQ ID NO: 2772196 - RNA, 19 nt, Artificial Sequence
  Description of Artificial Sequence: Synthetic oligonucleotide
gaagaguucuguacaguuu

SEQ ID NO: 2772197 - RNA, 19 nt, Artificial Sequence
  Description of Artificial Sequence: Synthetic oligonucleotide
acacacacacacacacaca

SEQ ID NO: 2772198 - RNA, 19 nt, Artificial Sequence
  Description of Artificial Sequence: Synthetic oligonucleotide
acauggggaccugggauaa

SEQ ID NO: 2772199 - RNA, 19 nt, Artificial Sequence
  Description of Artificial Sequence: Synthetic oligonucleotide
aguuuccccaguagauagu

SEQ ID NO: 2772200 - RNA, 19 nt, Artificial Sequence
  Description of Artificial Sequence: Synthetic oligonucleotide
gucagacuuauguccugaa

SEQ ID NO: 2772201 - RNA, 19 nt, Artificial Sequence
  Description of Artificial Sequence: Synthetic oligonucleotide
acuugaagauugggucuga

SEQ ID NO: 2772202 - RNA, 19 nt, Artificial Sequence
  Description of Artificial Sequence: Synthetic oligonucleotide
ggcagaaguaacagauuuc

SEQ ID NO: 2772203 - RNA, 19 nt, Artificial Sequence
  Description of Artificial Sequence: Synthetic oligonucleotide
auguccugaagaacugaau

SEQ ID NO: 2772204 - RNA, 19 nt, Artificial Sequence
  Description of Artificial Sequence: Synthetic oligonucleotide
acacacacacacacacaga

SEQ ID NO: 2772205 - RNA, 19 nt, Artificial Sequence
  Description of Artificial Sequence: Synthetic oligonucleotide
ggcugcugaagucagacuu

SEQ ID NO: 2772206 - RNA, 19 nt, Artificial Sequence
  Description of Artificial Sequence: Synthetic oligonucleotide
gauggguguuaaaguacua

SEQ ID NO: 2772207 - RNA, 19 nt, Artificial Sequence
  Description of Artificial Sequence: Synthetic oligonucleotide
acacacacacacagacaca

SEQ ID NO: 2772208 - RNA, 19 nt, Artificial Sequence
  Description of Artificial Sequence: Synthetic oligonucleotide
agacacagacacacauuaa

SEQ ID NO: 2772209 - RNA, 19 nt, Artificial Sequence
  Description of Artificial Sequence: Synthetic oligonucleotide
gaacugaaucagucccagu

SEQ ID NO: 2772210 - RNA, 19 nt, Artificial Sequence
  Description of Artificial Sequence: Synthetic oligonucleotide
ggggaccugggauaaucga

SEQ ID NO: 2772211 - RNA, 19 nt, Artificial Sequence
  Description of Artificial Sequence: Synthetic oligonucleotide
acacacacacagacacaga

SEQ ID NO: 2772212 - RNA, 19 nt, Artificial Sequence
  Description of Artificial Sequence: Synthetic oligonucleotide
ccccaguagauagugaaga

SEQ ID NO: 2772213 - RNA, 19 nt, Artificial Sequence
  Description of Artificial Sequence: Synthetic oligonucleotide
cugggauaaucgacuugaa

SEQ ID NO: 2772214 - RNA, 19 nt, Artificial Sequence
  Description of Artificial Sequence: Synthetic oligonucleotide
gaccugggauaaucgacuu

SEQ ID NO: 2772215 - RNA, 19 nt, Artificial Sequence
  Description of Artificial Sequence: Synthetic oligonucleotide
ggaccugggauaaucgacu

SEQ ID NO: 2772216 - RNA, 19 nt, Artificial Sequence
  Description of Artificial Sequence: Synthetic oligonucleotide
caguuuuguugagguuuuc

SEQ ID NO: 2772217 - RNA, 19 nt, Artificial Sequence
  Description of Artificial Sequence: Synthetic oligonucleotide
guacaguuuuguugagguu

SEQ ID NO: 2772218 - RNA, 19 nt, Artificial Sequence
  Description of Artificial Sequence: Synthetic oligonucleotide
ggucugaguuuccccagua

SEQ ID NO: 2772219 - RNA, 19 nt, Artificial Sequence
  Description of Artificial Sequence: Synthetic oligonucleotide
cagaagaguucuguacagu

SEQ ID NO: 2772220 - RNA, 19 nt, Artificial Sequence
  Description of Artificial Sequence: Synthetic oligonucleotide
gagcugacauggggaccug

SEQ ID NO: 2772221 - RNA, 19 nt, Artificial Sequence
  Description of Artificial Sequence: Synthetic oligonucleotide
gcaguaguuagcaguggcu

SEQ ID NO: 2772222 - RNA, 19 nt, Artificial Sequence
  Description of Artificial Sequence: Synthetic oligonucleotide
ccugaagaacugaaucagu

SEQ ID NO: 2772223 - RNA, 19 nt, Artificial Sequence
  Description of Artificial Sequence: Synthetic oligonucleotide
gcugcugaagucagacuua

SEQ ID NO: 2772224 - RNA, 19 nt, Artificial Sequence
  Description of Artificial Sequence: Synthetic oligonucleotide
cugcugaagucagacuuau

SEQ ID NO: 2772225 - RNA, 19 nt, Artificial Sequence
  Description of Artificial Sequence: Synthetic oligonucleotide
cgacuugaagauugggucu

SEQ ID NO: 2772226 - RNA, 19 nt, Artificial Sequence
  Description of Artificial Sequence: Synthetic oligonucleotide
ccaucaguuccugcuaaaa

SEQ ID NO: 2772227 - RNA, 19 nt, Artificial Sequence
  Description of Artificial Sequence: Synthetic oligonucleotide
ccugcuaaaacaggcccau

SEQ ID NO: 2772228 - RNA, 19 nt, Artificial Sequence
  Description of Artificial Sequence: Synthetic oligonucleotide
cccuucgguucuacacaca

SEQ ID NO: 2772229 - RNA, 19 nt, Artificial Sequence
  Description of Artificial Sequence: Synthetic oligonucleotide
ccuuaacuuuugcuugcau

SEQ ID NO: 2772230 - RNA, 19 nt, Artificial Sequence
  Description of Artificial Sequence: Synthetic oligonucleotide
cgaugaggauggugacaca

SEQ ID NO: 2772231 - RNA, 19 nt, Artificial Sequence
  Description of Artificial Sequence: Synthetic oligonucleotide
ccccugauggauacacauu

SEQ ID NO: 2772232 - RNA, 19 nt, Artificial Sequence
  Description of Artificial Sequence: Synthetic oligonucleotide
cugcuaaaacaggcccauu

SEQ ID NO: 2772233 - RNA, 19 nt, Artificial Sequence
  Description of Artificial Sequence: Synthetic oligonucleotide
cauggggaccugggauaau

SEQ ID NO: 2772234 - RNA, 19 nt, Artificial Sequence
  Description of Artificial Sequence: Synthetic oligonucleotide
ggaugacgaugaggauggu

SEQ ID NO: 2772235 - RNA, 19 nt, Artificial Sequence
  Description of Artificial Sequence: Synthetic oligonucleotide
cggcugcugaagucagacu

SEQ ID NO: 2772236 - RNA, 19 nt, Artificial Sequence
  Description of Artificial Sequence: Synthetic oligonucleotide
uuuggaauaggccauggcg

SEQ ID NO: 2772237 - RNA, 19 nt, Artificial Sequence
  Description of Artificial Sequence: Synthetic oligonucleotide
agagucacagcucugagcg

SEQ ID NO: 2772238 - RNA, 19 nt, Artificial Sequence
  Description of Artificial Sequence: Synthetic oligonucleotide
gaugguacaagugaagugc

SEQ ID NO: 2772239 - RNA, 19 nt, Artificial Sequence
  Description of Artificial Sequence: Synthetic oligonucleotide
acuaucaccagcuuggaga

SEQ ID NO: 2772240 - RNA, 19 nt, Artificial Sequence
  Description of Artificial Sequence: Synthetic oligonucleotide
uguaaacagggucacacca

SEQ ID NO: 2772241 - RNA, 19 nt, Artificial Sequence
  Description of Artificial Sequence: Synthetic oligonucleotide
ugagcuguaaacaggguca

SEQ ID NO: 2772242 - RNA, 19 nt, Artificial Sequence
  Description of Artificial Sequence: Synthetic oligonucleotide
acugucuucacucgucccc

SEQ ID NO: 2772243 - RNA, 19 nt, Artificial Sequence
  Description of Artificial Sequence: Synthetic oligonucleotide
uugggagaaggaauguacg

SEQ ID NO: 2772244 - RNA, 19 nt, Artificial Sequence
  Description of Artificial Sequence: Synthetic oligonucleotide
uuggcuacuaucaccagcu

SEQ ID NO: 2772245 - RNA, 19 nt, Artificial Sequence
  Description of Artificial Sequence: Synthetic oligonucleotide
ucaaacggcacgguggugg

SEQ ID NO: 2772246 - RNA, 19 nt, Artificial Sequence
  Description of Artificial Sequence: Synthetic oligonucleotide
gugcauguaaacuugcccc

SEQ ID NO: 2772247 - RNA, 19 nt, Artificial Sequence
  Description of Artificial Sequence: Synthetic oligonucleotide
ucaaacgcagcuuuggaau

SEQ ID NO: 2772248 - RNA, 19 nt, Artificial Sequence
  Description of Artificial Sequence: Synthetic oligonucleotide
uaaacagggucacaccagc

SEQ ID NO: 2772249 - RNA, 19 nt, Artificial Sequence
  Description of Artificial Sequence: Synthetic oligonucleotide
acucaucugccauugcucg

SEQ ID NO: 2772250 - RNA, 19 nt, Artificial Sequence
  Description of Artificial Sequence: Synthetic oligonucleotide
aaguagagguaggacuucc

SEQ ID NO: 2772251 - RNA, 19 nt, Artificial Sequence
  Description of Artificial Sequence: Synthetic oligonucleotide
ugggaagcguaugugaacg

SEQ ID NO: 2772252 - RNA, 19 nt, Artificial Sequence
  Description of Artificial Sequence: Synthetic oligonucleotide
ugaacgugcauguaaacuu

SEQ ID NO: 2772253 - RNA, 19 nt, Artificial Sequence
  Description of Artificial Sequence: Synthetic oligonucleotide
cuugggagaaggaauguac

SEQ ID NO: 2772254 - RNA, 19 nt, Artificial Sequence
  Description of Artificial Sequence: Synthetic oligonucleotide
ugcagugugagcuguaaac

SEQ ID NO: 2772255 - RNA, 19 nt, Artificial Sequence
  Description of Artificial Sequence: Synthetic oligonucleotide
aauguacgacgccuccugg

SEQ ID NO: 2772256 - RNA, 19 nt, Artificial Sequence
  Description of Artificial Sequence: Synthetic oligonucleotide
agagguaggacuucccuug

SEQ ID NO: 2772257 - RNA, 19 nt, Artificial Sequence
  Description of Artificial Sequence: Synthetic oligonucleotide
ugugugaaguagagguagg

SEQ ID NO: 2772258 - RNA, 19 nt, Artificial Sequence
  Description of Artificial Sequence: Synthetic oligonucleotide
ucagccuugaacuguguga

SEQ ID NO: 2772259 - RNA, 19 nt, Artificial Sequence
  Description of Artificial Sequence: Synthetic oligonucleotide
aagugaagugcugacuguc

SEQ ID NO: 2772260 - RNA, 19 nt, Artificial Sequence
  Description of Artificial Sequence: Synthetic oligonucleotide
aggaauguacgacgccucc

SEQ ID NO: 2772261 - RNA, 19 nt, Artificial Sequence
  Description of Artificial Sequence: Synthetic oligonucleotide
uguacgacgccuccuggcc

SEQ ID NO: 2772262 - RNA, 19 nt, Artificial Sequence
  Description of Artificial Sequence: Synthetic oligonucleotide
cuaucaccagcuuggagag

SEQ ID NO: 2772263 - RNA, 19 nt, Artificial Sequence
  Description of Artificial Sequence: Synthetic oligonucleotide
agaugguacaagugaagug

SEQ ID NO: 2772264 - RNA, 19 nt, Artificial Sequence
  Description of Artificial Sequence: Synthetic oligonucleotide
gcuacuaucaccagcuugg

SEQ ID NO: 2772265 - RNA, 19 nt, Artificial Sequence
  Description of Artificial Sequence: Synthetic oligonucleotide
gaauguacgacgccuccug

SEQ ID NO: 2772266 - RNA, 19 nt, Artificial Sequence
  Description of Artificial Sequence: Synthetic oligonucleotide
aacgugcauguaaacuugc

SEQ ID NO: 2772267 - RNA, 19 nt, Artificial Sequence
  Description of Artificial Sequence: Synthetic oligonucleotide
auguacgacgccuccuggc

SEQ ID NO: 2772268 - RNA, 19 nt, Artificial Sequence
  Description of Artificial Sequence: Synthetic oligonucleotide
cuuggcuacuaucaccagc

SEQ ID NO: 2772269 - RNA, 19 nt, Artificial Sequence
  Description of Artificial Sequence: Synthetic oligonucleotide
ucuucacucguccccagac

SEQ ID NO: 2772270 - RNA, 19 nt, Artificial Sequence
  Description of Artificial Sequence: Synthetic oligonucleotide
gaguucagcagagugcugc

SEQ ID NO: 2772271 - RNA, 19 nt, Artificial Sequence
  Description of Artificial Sequence: Synthetic oligonucleotide
ugacugucuucacucgucc

SEQ ID NO: 2772272 - RNA, 19 nt, Artificial Sequence
  Description of Artificial Sequence: Synthetic oligonucleotide
gaagcguaugugaacgugc

SEQ ID NO: 2772273 - RNA, 19 nt, Artificial Sequence
  Description of Artificial Sequence: Synthetic oligonucleotide
ugggagaaggaauguacga

SEQ ID NO: 2772274 - RNA, 19 nt, Artificial Sequence
  Description of Artificial Sequence: Synthetic oligonucleotide
cuggccucacgucaaacgg

SEQ ID NO: 2772275 - RNA, 19 nt, Artificial Sequence
  Description of Artificial Sequence: Synthetic oligonucleotide
cagugugccagacaaggag

SEQ ID NO: 2772276 - RNA, 19 nt, Artificial Sequence
  Description of Artificial Sequence: Synthetic oligonucleotide
uucacucguccccagacuc

SEQ ID NO: 2772277 - RNA, 19 nt, Artificial Sequence
  Description of Artificial Sequence: Synthetic oligonucleotide
agugugagcuguaaacagg

SEQ ID NO: 2772278 - RNA, 19 nt, Artificial Sequence
  Description of Artificial Sequence: Synthetic oligonucleotide
agacucaucugccauugcu

SEQ ID NO: 2772279 - RNA, 19 nt, Artificial Sequence
  Description of Artificial Sequence: Synthetic oligonucleotide
cagugugagcuguaaacag

SEQ ID NO: 2772280 - RNA, 19 nt, Artificial Sequence
  Description of Artificial Sequence: Synthetic oligonucleotide
gagaaggaauguacgacgc

SEQ ID NO: 2772281 - RNA, 19 nt, Artificial Sequence
  Description of Artificial Sequence: Synthetic oligonucleotide
cugugugaaguagagguag

SEQ ID NO: 2772282 - RNA, 19 nt, Artificial Sequence
  Description of Artificial Sequence: Synthetic oligonucleotide
ucucaaacgcagcuuugga

SEQ ID NO: 2772283 - RNA, 19 nt, Artificial Sequence
  Description of Artificial Sequence: Synthetic oligonucleotide
aauaggccauggcguacuc

SEQ ID NO: 2772284 - RNA, 19 nt, Artificial Sequence
  Description of Artificial Sequence: Synthetic oligonucleotide
aaggaauguacgacgccuc

SEQ ID NO: 2772285 - RNA, 19 nt, Artificial Sequence
  Description of Artificial Sequence: Synthetic oligonucleotide
acucaaucucagcaccccg

SEQ ID NO: 2772286 - RNA, 19 nt, Artificial Sequence
  Description of Artificial Sequence: Synthetic oligonucleotide
aaacgcagcuuuggaauag

SEQ ID NO: 2772287 - RNA, 19 nt, Artificial Sequence
  Description of Artificial Sequence: Synthetic oligonucleotide
ugugaaguagagguaggac

SEQ ID NO: 2772288 - RNA, 19 nt, Artificial Sequence
  Description of Artificial Sequence: Synthetic oligonucleotide
gagagucacagcucugagc

SEQ ID NO: 2772289 - RNA, 19 nt, Artificial Sequence
  Description of Artificial Sequence: Synthetic oligonucleotide
gcagcuuuggaauaggcca

SEQ ID NO: 2772290 - RNA, 19 nt, Artificial Sequence
  Description of Artificial Sequence: Synthetic oligonucleotide
ucugccauugcucguuggu

SEQ ID NO: 2772291 - RNA, 19 nt, Artificial Sequence
  Description of Artificial Sequence: Synthetic oligonucleotide
cuugaacugugugaaguag

SEQ ID NO: 2772292 - RNA, 19 nt, Artificial Sequence
  Description of Artificial Sequence: Synthetic oligonucleotide
agugcugacugucuucacu

SEQ ID NO: 2772293 - RNA, 19 nt, Artificial Sequence
  Description of Artificial Sequence: Synthetic oligonucleotide
uacuaucaccagcuuggag

SEQ ID NO: 2772294 - RNA, 19 nt, Artificial Sequence
  Description of Artificial Sequence: Synthetic oligonucleotide
gguaggacuucccuugggg

SEQ ID NO: 2772295 - RNA, 19 nt, Artificial Sequence
  Description of Artificial Sequence: Synthetic oligonucleotide
ugcugucuuggucacuuca

SEQ ID NO: 2772296 - RNA, 19 nt, Artificial Sequence
  Description of Artificial Sequence: Synthetic oligonucleotide
agacacugcugucuugguc

SEQ ID NO: 2772297 - RNA, 19 nt, Artificial Sequence
  Description of Artificial Sequence: Synthetic oligonucleotide
uaggccauggcguacucaa

SEQ ID NO: 2772298 - RNA, 19 nt, Artificial Sequence
  Description of Artificial Sequence: Synthetic oligonucleotide
acgucaaacggcacggugg

SEQ ID NO: 2772299 - RNA, 19 nt, Artificial Sequence
  Description of Artificial Sequence: Synthetic oligonucleotide
gaacgugcauguaaacuug

SEQ ID NO: 2772300 - RNA, 19 nt, Artificial Sequence
  Description of Artificial Sequence: Synthetic oligonucleotide
cucacgucaaacggcacgg

SEQ ID NO: 2772301 - RNA, 19 nt, Artificial Sequence
  Description of Artificial Sequence: Synthetic oligonucleotide
ugucuuggucacuucaaau

SEQ ID NO: 2772302 - RNA, 19 nt, Artificial Sequence
  Description of Artificial Sequence: Synthetic oligonucleotide
ggucacuucaaauuccuca

SEQ ID NO: 2772303 - RNA, 19 nt, Artificial Sequence
  Description of Artificial Sequence: Synthetic oligonucleotide
aggugagagucacagcucu

SEQ ID NO: 2772304 - RNA, 19 nt, Artificial Sequence
  Description of Artificial Sequence: Synthetic oligonucleotide
ugcugacugucuucacucg

SEQ ID NO: 2772305 - RNA, 19 nt, Artificial Sequence
  Description of Artificial Sequence: Synthetic oligonucleotide
aacgcagcuuuggaauagg

SEQ ID NO: 2772306 - RNA, 19 nt, Artificial Sequence
  Description of Artificial Sequence: Synthetic oligonucleotide
gaacugugugaaguagagg

SEQ ID NO: 2772307 - RNA, 19 nt, Artificial Sequence
  Description of Artificial Sequence: Synthetic oligonucleotide
ucguuggucccuccuuggg

SEQ ID NO: 2772308 - RNA, 19 nt, Artificial Sequence
  Description of Artificial Sequence: Synthetic oligonucleotide
aagugcugacugucuucac

SEQ ID NO: 2772309 - RNA, 19 nt, Artificial Sequence
  Description of Artificial Sequence: Synthetic oligonucleotide
aguagagguaggacuuccc

SEQ ID NO: 2772310 - RNA, 19 nt, Artificial Sequence
  Description of Artificial Sequence: Synthetic oligonucleotide
agcaccccgcagcucagcc

SEQ ID NO: 2772311 - RNA, 19 nt, Artificial Sequence
  Description of Artificial Sequence: Synthetic oligonucleotide
guaaacagggucacaccag

SEQ ID NO: 2772312 - RNA, 19 nt, Artificial Sequence
  Description of Artificial Sequence: Synthetic oligonucleotide
cucucaaacgcagcuuugg

SEQ ID NO: 2772313 - RNA, 19 nt, Artificial Sequence
  Description of Artificial Sequence: Synthetic oligonucleotide
ugugaacgugcauguaaac

SEQ ID NO: 2772314 - RNA, 19 nt, Artificial Sequence
  Description of Artificial Sequence: Synthetic oligonucleotide
ugugagacacugcugucuu

SEQ ID NO: 2772315 - RNA, 19 nt, Artificial Sequence
  Description of Artificial Sequence: Synthetic oligonucleotide
gucacaccagcuccugugg

SEQ ID NO: 2772316 - RNA, 19 nt, Artificial Sequence
  Description of Artificial Sequence: Synthetic oligonucleotide
gagguaggacuucccuugg

SEQ ID NO: 2772317 - RNA, 19 nt, Artificial Sequence
  Description of Artificial Sequence: Synthetic oligonucleotide
uacucaaucucagcacccc

SEQ ID NO: 2772318 - RNA, 19 nt, Artificial Sequence
  Description of Artificial Sequence: Synthetic oligonucleotide
agucacagcucugagcgug

SEQ ID NO: 2772319 - RNA, 19 nt, Artificial Sequence
  Description of Artificial Sequence: Synthetic oligonucleotide
aguuggggcgagugcgccc

SEQ ID NO: 2772320 - RNA, 19 nt, Artificial Sequence
  Description of Artificial Sequence: Synthetic oligonucleotide
ugguacaagugaagugcug

SEQ ID NO: 2772321 - RNA, 19 nt, Artificial Sequence
  Description of Artificial Sequence: Synthetic oligonucleotide
uacaagugaagugcugacu

SEQ ID NO: 2772322 - RNA, 19 nt, Artificial Sequence
  Description of Artificial Sequence: Synthetic oligonucleotide
auugcucguuggucccucc

SEQ ID NO: 2772323 - RNA, 19 nt, Artificial Sequence
  Description of Artificial Sequence: Synthetic oligonucleotide
guacaagugaagugcugac

SEQ ID NO: 2772324 - RNA, 19 nt, Artificial Sequence
  Description of Artificial Sequence: Synthetic oligonucleotide
ucucucucucaaacgcagc

SEQ ID NO: 2772325 - RNA, 19 nt, Artificial Sequence
  Description of Artificial Sequence: Synthetic oligonucleotide
cauggcguacucaaucuca

SEQ ID NO: 2772326 - RNA, 19 nt, Artificial Sequence
  Description of Artificial Sequence: Synthetic oligonucleotide
uggccucacgucaaacggc

SEQ ID NO: 2772327 - RNA, 19 nt, Artificial Sequence
  Description of Artificial Sequence: Synthetic oligonucleotide
agagugcugcagugugagc

SEQ ID NO: 2772328 - RNA, 19 nt, Artificial Sequence
  Description of Artificial Sequence: Synthetic oligonucleotide
aacggcacgguggugggcu

SEQ ID NO: 2772329 - RNA, 19 nt, Artificial Sequence
  Description of Artificial Sequence: Synthetic oligonucleotide
ugagcgugccgccuuggcu

SEQ ID NO: 2772330 - RNA, 19 nt, Artificial Sequence
  Description of Artificial Sequence: Synthetic oligonucleotide
uggaauaggccauggcgua

SEQ ID NO: 2772331 - RNA, 19 nt, Artificial Sequence
  Description of Artificial Sequence: Synthetic oligonucleotide
aagcguaugugaacgugca

SEQ ID NO: 2772332 - RNA, 19 nt, Artificial Sequence
  Description of Artificial Sequence: Synthetic oligonucleotide
acgugcauguaaacuugcc

SEQ ID NO: 2772333 - RNA, 19 nt, Artificial Sequence
  Description of Artificial Sequence: Synthetic oligonucleotide
gugcugacugucuucacuc

SEQ ID NO: 2772334 - RNA, 19 nt, Artificial Sequence
  Description of Artificial Sequence: Synthetic oligonucleotide
ugugagcuguaaacagggu

SEQ ID NO: 2772335 - RNA, 19 nt, Artificial Sequence
  Description of Artificial Sequence: Synthetic oligonucleotide
gaaggaauguacgacgccu

SEQ ID NO: 2772336 - RNA, 19 nt, Artificial Sequence
  Description of Artificial Sequence: Synthetic oligonucleotide
gacugucuucacucguccc

SEQ ID NO: 2772337 - RNA, 19 nt, Artificial Sequence
  Description of Artificial Sequence: Synthetic oligonucleotide
ggcguacucaaucucagca

SEQ ID NO: 2772338 - RNA, 19 nt, Artificial Sequence
  Description of Artificial Sequence: Synthetic oligonucleotide
gacucaucugccauugcuc

SEQ ID NO: 2772339 - RNA, 19 nt, Artificial Sequence
  Description of Artificial Sequence: Synthetic oligonucleotide
uagagguaggacuucccuu

SEQ ID NO: 2772340 - RNA, 19 nt, Artificial Sequence
  Description of Artificial Sequence: Synthetic oligonucleotide
cugacugucuucacucguc

SEQ ID NO: 2772341 - RNA, 19 nt, Artificial Sequence
  Description of Artificial Sequence: Synthetic oligonucleotide
caaacggcacggugguggg

SEQ ID NO: 2772342 - RNA, 19 nt, Artificial Sequence
  Description of Artificial Sequence: Synthetic oligonucleotide
ugugggaaccagugugcca

SEQ ID NO: 2772343 - RNA, 19 nt, Artificial Sequence
  Description of Artificial Sequence: Synthetic oligonucleotide
cagggcaacccauggcagg

SEQ ID NO: 2772344 - RNA, 19 nt, Artificial Sequence
  Description of Artificial Sequence: Synthetic oligonucleotide
cucguuggucccuccuugg

SEQ ID NO: 2772345 - RNA, 19 nt, Artificial Sequence
  Description of Artificial Sequence: Synthetic oligonucleotide
ucacucguccccagacuca

SEQ ID NO: 2772346 - RNA, 19 nt, Artificial Sequence
  Description of Artificial Sequence: Synthetic oligonucleotide
aguucagcagagugcugca

SEQ ID NO: 2772347 - RNA, 19 nt, Artificial Sequence
  Description of Artificial Sequence: Synthetic oligonucleotide
agugugccagacaaggagu

SEQ ID NO: 2772348 - RNA, 19 nt, Artificial Sequence
  Description of Artificial Sequence: Synthetic oligonucleotide
acaucacucucucucucaa

SEQ ID NO: 2772349 - RNA, 19 nt, Artificial Sequence
  Description of Artificial Sequence: Synthetic oligonucleotide
ggcuacuaucaccagcuug

SEQ ID NO: 2772350 - RNA, 19 nt, Artificial Sequence
  Description of Artificial Sequence: Synthetic oligonucleotide
guuggggcgagugcgcccg

SEQ ID NO: 2772351 - RNA, 19 nt, Artificial Sequence
  Description of Artificial Sequence: Synthetic oligonucleotide
aaacggcacgguggugggc

SEQ ID NO: 2772352 - RNA, 19 nt, Artificial Sequence
  Description of Artificial Sequence: Synthetic oligonucleotide
cucaaacgcagcuuuggaa

SEQ ID NO: 2772353 - RNA, 19 nt, Artificial Sequence
  Description of Artificial Sequence: Synthetic oligonucleotide
cuuggagagcucagccuug

SEQ ID NO: 2772354 - RNA, 19 nt, Artificial Sequence
  Description of Artificial Sequence: Synthetic oligonucleotide
guacucaaucucagcaccc

SEQ ID NO: 2772355 - RNA, 19 nt, Artificial Sequence
  Description of Artificial Sequence: Synthetic oligonucleotide
uccuugggaagcguaugug

SEQ ID NO: 2772356 - RNA, 19 nt, Artificial Sequence
  Description of Artificial Sequence: Synthetic oligonucleotide
ucacuucaaauuccucauu

SEQ ID NO: 2772357 - RNA, 19 nt, Artificial Sequence
  Description of Artificial Sequence: Synthetic oligonucleotide
guuggucccuccuugggaa

SEQ ID NO: 2772358 - RNA, 19 nt, Artificial Sequence
  Description of Artificial Sequence: Synthetic oligonucleotide
ggugggcucggacacggcg

SEQ ID NO: 2772359 - RNA, 19 nt, Artificial Sequence
  Description of Artificial Sequence: Synthetic oligonucleotide
cacgucaaacggcacggug

SEQ ID NO: 2772360 - RNA, 19 nt, Artificial Sequence
  Description of Artificial Sequence: Synthetic oligonucleotide
acgguggugggcucggaca

SEQ ID NO: 2772361 - RNA, 19 nt, Artificial Sequence
  Description of Artificial Sequence: Synthetic oligonucleotide
gcguaugugaacgugcaug

SEQ ID NO: 2772362 - RNA, 19 nt, Artificial Sequence
  Description of Artificial Sequence: Synthetic oligonucleotide
cucagcaccccgcagcuca

SEQ ID NO: 2772363 - RNA, 19 nt, Artificial Sequence
  Description of Artificial Sequence: Synthetic oligonucleotide
aaacagggucacaccagcu

SEQ ID NO: 2772364 - RNA, 19 nt, Artificial Sequence
  Description of Artificial Sequence: Synthetic oligonucleotide
gcaggugagagucacagcu

SEQ ID NO: 2772365 - RNA, 19 nt, Artificial Sequence
  Description of Artificial Sequence: Synthetic oligonucleotide
gggcccuacgucuugggag

SEQ ID NO: 2772366 - RNA, 19 nt, Artificial Sequence
  Description of Artificial Sequence: Synthetic oligonucleotide
uggcguacucaaucucagc

SEQ ID NO: 2772367 - RNA, 19 nt, Artificial Sequence
  Description of Artificial Sequence: Synthetic oligonucleotide
ugggcucggacacggcggc

SEQ ID NO: 2772368 - RNA, 19 nt, Artificial Sequence
  Description of Artificial Sequence: Synthetic oligonucleotide
auggcguacucaaucucag

SEQ ID NO: 2772369 - RNA, 19 nt, Artificial Sequence
  Description of Artificial Sequence: Synthetic oligonucleotide
acgcagcuuuggaauaggc

SEQ ID NO: 2772370 - RNA, 19 nt, Artificial Sequence
  Description of Artificial Sequence: Synthetic oligonucleotide
gucacuucaaauuccucau

SEQ ID NO: 2772371 - RNA, 19 nt, Artificial Sequence
  Description of Artificial Sequence: Synthetic oligonucleotide
ccuacgucuugggagaagg

SEQ ID NO: 2772372 - RNA, 19 nt, Artificial Sequence
  Description of Artificial Sequence: Synthetic oligonucleotide
ucaucugccauugcucguu

SEQ ID NO: 2772373 - RNA, 19 nt, Artificial Sequence
  Description of Artificial Sequence: Synthetic oligonucleotide
cguacucaaucucagcacc

SEQ ID NO: 2772374 - RNA, 19 nt, Artificial Sequence
  Description of Artificial Sequence: Synthetic oligonucleotide
agugaagugcugacugucu

SEQ ID NO: 2772375 - RNA, 19 nt, Artificial Sequence
  Description of Artificial Sequence: Synthetic oligonucleotide
ugucuucacucguccccag

SEQ ID NO: 2772376 - RNA, 19 nt, Artificial Sequence
  Description of Artificial Sequence: Synthetic oligonucleotide
ucccuuggggccuccagau

SEQ ID NO: 2772377 - RNA, 19 nt, Artificial Sequence
  Description of Artificial Sequence: Synthetic oligonucleotide
agcgugccgccuuggcuac

SEQ ID NO: 2772378 - RNA, 19 nt, Artificial Sequence
  Description of Artificial Sequence: Synthetic oligonucleotide
uuggucccuccuugggaag

SEQ ID NO: 2772379 - RNA, 19 nt, Artificial Sequence
  Description of Artificial Sequence: Synthetic oligonucleotide
ccuggccucacgucaaacg

SEQ ID NO: 2772380 - RNA, 19 nt, Artificial Sequence
  Description of Artificial Sequence: Synthetic oligonucleotide
uccccagacucaucugcca

SEQ ID NO: 2772381 - RNA, 19 nt, Artificial Sequence
  Description of Artificial Sequence: Synthetic oligonucleotide
gucuuggucacuucaaauu

SEQ ID NO: 2772382 - RNA, 19 nt, Artificial Sequence
  Description of Artificial Sequence: Synthetic oligonucleotide
gagcgugccgccuuggcua

SEQ ID NO: 2772383 - RNA, 19 nt, Artificial Sequence
  Description of Artificial Sequence: Synthetic oligonucleotide
augguacaagugaagugcu

SEQ ID NO: 2772384 - RNA, 19 nt, Artificial Sequence
  Description of Artificial Sequence: Synthetic oligonucleotide
ccucacgucaaacggcacg

SEQ ID NO: 2772385 - RNA, 19 nt, Artificial Sequence
  Description of Artificial Sequence: Synthetic oligonucleotide
cgugcauguaaacuugccc

SEQ ID NO: 2772386 - RNA, 19 nt, Artificial Sequence
  Description of Artificial Sequence: Synthetic oligonucleotide
guagagguaggacuucccu

SEQ ID NO: 2772387 - RNA, 19 nt, Artificial Sequence
  Description of Artificial Sequence: Synthetic oligonucleotide
caggugagagucacagcuc

SEQ ID NO: 2772388 - RNA, 19 nt, Artificial Sequence
  Description of Artificial Sequence: Synthetic oligonucleotide
gacgccuccuggccucacg

SEQ ID NO: 2772389 - RNA, 19 nt, Artificial Sequence
  Description of Artificial Sequence: Synthetic oligonucleotide
guggugggcucggacacgg

SEQ ID NO: 2772390 - RNA, 19 nt, Artificial Sequence
  Description of Artificial Sequence: Synthetic oligonucleotide
gugggcucggacacggcgg

SEQ ID NO: 2772391 - RNA, 19 nt, Artificial Sequence
  Description of Artificial Sequence: Synthetic oligonucleotide
cugugggaaccagugugcc

SEQ ID NO: 2772392 - RNA, 19 nt, Artificial Sequence
  Description of Artificial Sequence: Synthetic oligonucleotide
ucagcaccccgcagcucag

SEQ ID NO: 2772393 - RNA, 19 nt, Artificial Sequence
  Description of Artificial Sequence: Synthetic oligonucleotide
acgucuugggagaaggaau

SEQ ID NO: 2772394 - RNA, 19 nt, Artificial Sequence
  Description of Artificial Sequence: Synthetic oligonucleotide
ggaagcguaugugaacgug

SEQ ID NO: 2772395 - RNA, 19 nt, Artificial Sequence
  Description of Artificial Sequence: Synthetic oligonucleotide
uugcucguuggucccuccu

SEQ ID NO: 2772396 - RNA, 19 nt, Artificial Sequence
  Description of Artificial Sequence: Synthetic oligonucleotide
ucugagcgugccgccuugg

SEQ ID NO: 2772397 - RNA, 19 nt, Artificial Sequence
  Description of Artificial Sequence: Synthetic oligonucleotide
uacgacgccuccuggccuc

SEQ ID NO: 2772398 - RNA, 19 nt, Artificial Sequence
  Description of Artificial Sequence: Synthetic oligonucleotide
gugaacgugcauguaaacu

SEQ ID NO: 2772399 - RNA, 19 nt, Artificial Sequence
  Description of Artificial Sequence: Synthetic oligonucleotide
gacaaggaguuggggcgag

SEQ ID NO: 2772400 - RNA, 19 nt, Artificial Sequence
  Description of Artificial Sequence: Synthetic oligonucleotide
ugcucguuggucccuccuu

SEQ ID NO: 2772401 - RNA, 19 nt, Artificial Sequence
  Description of Artificial Sequence: Synthetic oligonucleotide
agcuuuggaauaggccaug

SEQ ID NO: 2772402 - RNA, 19 nt, Artificial Sequence
  Description of Artificial Sequence: Synthetic oligonucleotide
gugugaaguagagguagga

SEQ ID NO: 2772403 - RNA, 19 nt, Artificial Sequence
  Description of Artificial Sequence: Synthetic oligonucleotide
gcguacucaaucucagcac

SEQ ID NO: 2772404 - RNA, 19 nt, Artificial Sequence
  Description of Artificial Sequence: Synthetic oligonucleotide
gcgagugcgcccgaggagg

SEQ ID NO: 2772405 - RNA, 19 nt, Artificial Sequence
  Description of Artificial Sequence: Synthetic oligonucleotide
agggcaacccauggcaggu

SEQ ID NO: 2772406 - RNA, 19 nt, Artificial Sequence
  Description of Artificial Sequence: Synthetic oligonucleotide
agcucagccuugaacugug

SEQ ID NO: 2772407 - RNA, 19 nt, Artificial Sequence
  Description of Artificial Sequence: Synthetic oligonucleotide
aggaggggacagggcaacc

SEQ ID NO: 2772408 - RNA, 19 nt, Artificial Sequence
  Description of Artificial Sequence: Synthetic oligonucleotide
ggccauggcguacucaauc

SEQ ID NO: 2772409 - RNA, 19 nt, Artificial Sequence
  Description of Artificial Sequence: Synthetic oligonucleotide
gaguuggggcgagugcgcc

SEQ ID NO: 2772410 - RNA, 19 nt, Artificial Sequence
  Description of Artificial Sequence: Synthetic oligonucleotide
gcuuuggaauaggccaugg

SEQ ID NO: 2772411 - RNA, 19 nt, Artificial Sequence
  Description of Artificial Sequence: Synthetic oligonucleotide
caaacgcagcuuuggaaua

SEQ ID NO: 2772412 - RNA, 19 nt, Artificial Sequence
  Description of Artificial Sequence: Synthetic oligonucleotide
cacuucaaauuccucauuu

SEQ ID NO: 2772413 - RNA, 19 nt, Artificial Sequence
  Description of Artificial Sequence: Synthetic oligonucleotide
ucguccccagacucaucug

SEQ ID NO: 2772414 - RNA, 19 nt, Artificial Sequence
  Description of Artificial Sequence: Synthetic oligonucleotide
cacaccagcuccuguggga

SEQ ID NO: 2772415 - RNA, 19 nt, Artificial Sequence
  Description of Artificial Sequence: Synthetic oligonucleotide
cgucuugggagaaggaaug

SEQ ID NO: 2772416 - RNA, 19 nt, Artificial Sequence
  Description of Artificial Sequence: Synthetic oligonucleotide
agcguaugugaacgugcau

SEQ ID NO: 2772417 - RNA, 19 nt, Artificial Sequence
  Description of Artificial Sequence: Synthetic oligonucleotide
gaauaggccauggcguacu

SEQ ID NO: 2772418 - RNA, 19 nt, Artificial Sequence
  Description of Artificial Sequence: Synthetic oligonucleotide
cagaugguacaagugaagu

SEQ ID NO: 2772419 - RNA, 19 nt, Artificial Sequence
  Description of Artificial Sequence: Synthetic oligonucleotide
cugccauugcucguugguc

SEQ ID NO: 2772420 - RNA, 19 nt, Artificial Sequence
  Description of Artificial Sequence: Synthetic oligonucleotide
ccuccagaugguacaagug

SEQ ID NO: 2772421 - RNA, 19 nt, Artificial Sequence
  Description of Artificial Sequence: Synthetic oligonucleotide
acgccuccuggccucacgu

SEQ ID NO: 2772422 - RNA, 19 nt, Artificial Sequence
  Description of Artificial Sequence: Synthetic oligonucleotide
gcuccugugggaaccagug

SEQ ID NO: 2772423 - RNA, 19 nt, Artificial Sequence
  Description of Artificial Sequence: Synthetic oligonucleotide
cucucucucaaacgcagcu

SEQ ID NO: 2772424 - RNA, 19 nt, Artificial Sequence
  Description of Artificial Sequence: Synthetic oligonucleotide
ggacagggcaacccauggc

SEQ ID NO: 2772425 - RNA, 19 nt, Artificial Sequence
  Description of Artificial Sequence: Synthetic oligonucleotide
cugagcgugccgccuuggc

SEQ ID NO: 2772426 - RNA, 19 nt, Artificial Sequence
  Description of Artificial Sequence: Synthetic oligonucleotide
gccuuggcuacuaucacca

SEQ ID NO: 2772427 - RNA, 19 nt, Artificial Sequence
  Description of Artificial Sequence: Synthetic oligonucleotide
cuugaaggccccgggccug

SEQ ID NO: 2772428 - RNA, 19 nt, Artificial Sequence
  Description of Artificial Sequence: Synthetic oligonucleotide
agugcgcccgaggagggga

SEQ ID NO: 2772429 - RNA, 19 nt, Artificial Sequence
  Description of Artificial Sequence: Synthetic oligonucleotide
gcucguuggucccuccuug

SEQ ID NO: 2772430 - RNA, 19 nt, Artificial Sequence
  Description of Artificial Sequence: Synthetic oligonucleotide
cagacucaucugccauugc

SEQ ID NO: 2772431 - RNA, 19 nt, Artificial Sequence
  Description of Artificial Sequence: Synthetic oligonucleotide
gccauugcucguugguccc

SEQ ID NO: 2772432 - RNA, 19 nt, Artificial Sequence
  Description of Artificial Sequence: Synthetic oligonucleotide
cucguccccagacucaucu

SEQ ID NO: 2772433 - RNA, 19 nt, Artificial Sequence
  Description of Artificial Sequence: Synthetic oligonucleotide
ugccgccuuggcuacuauc

SEQ ID NO: 2772434 - RNA, 19 nt, Artificial Sequence
  Description of Artificial Sequence: Synthetic oligonucleotide
uggagagcucagccuugaa

SEQ ID NO: 2772435 - RNA, 19 nt, Artificial Sequence
  Description of Artificial Sequence: Synthetic oligonucleotide
cacgguggugggcucggac

SEQ ID NO: 2772436 - RNA, 19 nt, Artificial Sequence
  Description of Artificial Sequence: Synthetic oligonucleotide
cuacgucuugggagaagga

SEQ ID NO: 2772437 - RNA, 19 nt, Artificial Sequence
  Description of Artificial Sequence: Synthetic oligonucleotide
ccuugggaagcguauguga

SEQ ID NO: 2772438 - RNA, 19 nt, Artificial Sequence
  Description of Artificial Sequence: Synthetic oligonucleotide
ggcccuacgucuugggaga

SEQ ID NO: 2772439 - RNA, 19 nt, Artificial Sequence
  Description of Artificial Sequence: Synthetic oligonucleotide
gccugugagacacugcugu

SEQ ID NO: 2772440 - RNA, 19 nt, Artificial Sequence
  Description of Artificial Sequence: Synthetic oligonucleotide
ggaaccagugugccagaca

SEQ ID NO: 2772441 - RNA, 19 nt, Artificial Sequence
  Description of Artificial Sequence: Synthetic oligonucleotide
gucacagcucugagcgugc

SEQ ID NO: 2772442 - RNA, 19 nt, Artificial Sequence
  Description of Artificial Sequence: Synthetic oligonucleotide
caagugaagugcugacugu

SEQ ID NO: 2772443 - RNA, 19 nt, Artificial Sequence
  Description of Artificial Sequence: Synthetic oligonucleotide
ggacaucacucucucucuc

SEQ ID NO: 2772444 - RNA, 19 nt, Artificial Sequence
  Description of Artificial Sequence: Synthetic oligonucleotide
ccagacucaucugccauug

SEQ ID NO: 2772445 - RNA, 19 nt, Artificial Sequence
  Description of Artificial Sequence: Synthetic oligonucleotide
gccgccuuggcuacuauca

SEQ ID NO: 2772446 - RNA, 19 nt, Artificial Sequence
  Description of Artificial Sequence: Synthetic oligonucleotide
ucacgucaaacggcacggu

SEQ ID NO: 2772447 - RNA, 19 nt, Artificial Sequence
  Description of Artificial Sequence: Synthetic oligonucleotide
cagcucugagcgugccgcc

SEQ ID NO: 2772448 - RNA, 19 nt, Artificial Sequence
  Description of Artificial Sequence: Synthetic oligonucleotide
cucugagcgugccgccuug

SEQ ID NO: 2772449 - RNA, 19 nt, Artificial Sequence
  Description of Artificial Sequence: Synthetic oligonucleotide
gucuucacucguccccaga

SEQ ID NO: 2772450 - RNA, 19 nt, Artificial Sequence
  Description of Artificial Sequence: Synthetic oligonucleotide
cucucucaaacgcagcuuu

SEQ ID NO: 2772451 - RNA, 19 nt, Artificial Sequence
  Description of Artificial Sequence: Synthetic oligonucleotide
ggcgagugcgcccgaggag

SEQ ID NO: 2772452 - RNA, 19 nt, Artificial Sequence
  Description of Artificial Sequence: Synthetic oligonucleotide
agcuguaaacagggucaca

SEQ ID NO: 2772453 - RNA, 19 nt, Artificial Sequence
  Description of Artificial Sequence: Synthetic oligonucleotide
cauugcucguuggucccuc

SEQ ID NO: 2772454 - RNA, 19 nt, Artificial Sequence
  Description of Artificial Sequence: Synthetic oligonucleotide
cguccccagacucaucugc

SEQ ID NO: 2772455 - RNA, 19 nt, Artificial Sequence
  Description of Artificial Sequence: Synthetic oligonucleotide
ggcaacccauggcagguga

SEQ ID NO: 2772456 - RNA, 19 nt, Artificial Sequence
  Description of Artificial Sequence: Synthetic oligonucleotide
uggcuacuaucaccagcuu

SEQ ID NO: 2772457 - RNA, 19 nt, Artificial Sequence
  Description of Artificial Sequence: Synthetic oligonucleotide
agggucacaccagcuccug

SEQ ID NO: 2772458 - RNA, 19 nt, Artificial Sequence
  Description of Artificial Sequence: Synthetic oligonucleotide
ggaauaggccauggcguac

SEQ ID NO: 2772459 - RNA, 19 nt, Artificial Sequence
  Description of Artificial Sequence: Synthetic oligonucleotide
ggucccuccuugggaagcg

SEQ ID NO: 2772460 - RNA, 19 nt, Artificial Sequence
  Description of Artificial Sequence: Synthetic oligonucleotide
acggcacgguggugggcuc

SEQ ID NO: 2772461 - RNA, 19 nt, Artificial Sequence
  Description of Artificial Sequence: Synthetic oligonucleotide
caucacucucucucucaaa

SEQ ID NO: 2772462 - RNA, 19 nt, Artificial Sequence
  Description of Artificial Sequence: Synthetic oligonucleotide
gaaggccccgggccuguga

SEQ ID NO: 2772463 - RNA, 19 nt, Artificial Sequence
  Description of Artificial Sequence: Synthetic oligonucleotide
agaguucagcagagugcug

SEQ ID NO: 2772464 - RNA, 19 nt, Artificial Sequence
  Description of Artificial Sequence: Synthetic oligonucleotide
cuacuaucaccagcuugga

SEQ ID NO: 2772465 - RNA, 19 nt, Artificial Sequence
  Description of Artificial Sequence: Synthetic oligonucleotide
uugaaggccccgggccugu

SEQ ID NO: 2772466 - RNA, 19 nt, Artificial Sequence
  Description of Artificial Sequence: Synthetic oligonucleotide
uggugggcucggacacggc

SEQ ID NO: 2772467 - RNA, 19 nt, Artificial Sequence
  Description of Artificial Sequence: Synthetic oligonucleotide
cugugagacacugcugucu

SEQ ID NO: 2772468 - RNA, 19 nt, Artificial Sequence
  Description of Artificial Sequence: Synthetic oligonucleotide
gugaagugcugacugucuu

SEQ ID NO: 2772469 - RNA, 19 nt, Artificial Sequence
  Description of Artificial Sequence: Synthetic oligonucleotide
cuccuugggaagcguaugu

SEQ ID NO: 2772470 - RNA, 19 nt, Artificial Sequence
  Description of Artificial Sequence: Synthetic oligonucleotide
ggccucacgucaaacggca

SEQ ID NO: 2772471 - RNA, 19 nt, Artificial Sequence
  Description of Artificial Sequence: Synthetic oligonucleotide
cgccuuggcuacuaucacc

SEQ ID NO: 2772472 - RNA, 19 nt, Artificial Sequence
  Description of Artificial Sequence: Synthetic oligonucleotide
ggggcgagugcgcccgagg

SEQ ID NO: 2772473 - RNA, 19 nt, Artificial Sequence
  Description of Artificial Sequence: Synthetic oligonucleotide
ccgaggaggggacagggca

SEQ ID NO: 2772474 - RNA, 19 nt, Artificial Sequence
  Description of Artificial Sequence: Synthetic oligonucleotide
cagcuuuggaauaggccau

SEQ ID NO: 2772475 - RNA, 19 nt, Artificial Sequence
  Description of Artificial Sequence: Synthetic oligonucleotide
cugcugucuuggucacuuc

SEQ ID NO: 2772476 - RNA, 19 nt, Artificial Sequence
  Description of Artificial Sequence: Synthetic oligonucleotide
gguggugggcucggacacg

SEQ ID NO: 2772477 - RNA, 19 nt, Artificial Sequence
  Description of Artificial Sequence: Synthetic oligonucleotide
gucaaacggcacgguggug

SEQ ID NO: 2772478 - RNA, 19 nt, Artificial Sequence
  Description of Artificial Sequence: Synthetic oligonucleotide
gccauggcguacucaaucu

SEQ ID NO: 2772479 - RNA, 19 nt, Artificial Sequence
  Description of Artificial Sequence: Synthetic oligonucleotide
ccugugagacacugcuguc

SEQ ID NO: 2772480 - RNA, 19 nt, Artificial Sequence
  Description of Artificial Sequence: Synthetic oligonucleotide
guaugugaacgugcaugua

SEQ ID NO: 2772481 - RNA, 19 nt, Artificial Sequence
  Description of Artificial Sequence: Synthetic oligonucleotide
acaaggaguuggggcgagu

SEQ ID NO: 2772482 - RNA, 19 nt, Artificial Sequence
  Description of Artificial Sequence: Synthetic oligonucleotide
uggggcgagugcgcccgag

SEQ ID NO: 2772483 - RNA, 19 nt, Artificial Sequence
  Description of Artificial Sequence: Synthetic oligonucleotide
ccuuggcuacuaucaccag

SEQ ID NO: 2772484 - RNA, 19 nt, Artificial Sequence
  Description of Artificial Sequence: Synthetic oligonucleotide
guacgacgccuccuggccu

SEQ ID NO: 2772485 - RNA, 19 nt, Artificial Sequence
  Description of Artificial Sequence: Synthetic oligonucleotide
cguaugugaacgugcaugu

SEQ ID NO: 2772486 - RNA, 19 nt, Artificial Sequence
  Description of Artificial Sequence: Synthetic oligonucleotide
uuggggccuccagauggua

SEQ ID NO: 2772487 - RNA, 19 nt, Artificial Sequence
  Description of Artificial Sequence: Synthetic oligonucleotide
ggcacgguggugggcucgg

SEQ ID NO: 2772488 - RNA, 19 nt, Artificial Sequence
  Description of Artificial Sequence: Synthetic oligonucleotide
ugcgcccgaggaggggaca

SEQ ID NO: 2772489 - RNA, 19 nt, Artificial Sequence
  Description of Artificial Sequence: Synthetic oligonucleotide
ugaaggccccgggccugug

SEQ ID NO: 2772490 - RNA, 19 nt, Artificial Sequence
  Description of Artificial Sequence: Synthetic oligonucleotide
cuuggggccuccagauggu

SEQ ID NO: 2772491 - RNA, 19 nt, Artificial Sequence
  Description of Artificial Sequence: Synthetic oligonucleotide
ccuccuugggaagcguaug

SEQ ID NO: 2772492 - RNA, 19 nt, Artificial Sequence
  Description of Artificial Sequence: Synthetic oligonucleotide
uuggggcgagugcgcccga

SEQ ID NO: 2772493 - RNA, 19 nt, Artificial Sequence
  Description of Artificial Sequence: Synthetic oligonucleotide
ggccccgggccugugagac

SEQ ID NO: 2772494 - RNA, 19 nt, Artificial Sequence
  Description of Artificial Sequence: Synthetic oligonucleotide
cagcuccugugggaaccag

SEQ ID NO: 2772495 - RNA, 19 nt, Artificial Sequence
  Description of Artificial Sequence: Synthetic oligonucleotide
ggaauguacgacgccuccu

SEQ ID NO: 2772496 - RNA, 19 nt, Artificial Sequence
  Description of Artificial Sequence: Synthetic oligonucleotide
gggaaccagugugccagac

SEQ ID NO: 2772497 - RNA, 19 nt, Artificial Sequence
  Description of Artificial Sequence: Synthetic oligonucleotide
aggccccgggccugugaga

SEQ ID NO: 2772498 - RNA, 19 nt, Artificial Sequence
  Description of Artificial Sequence: Synthetic oligonucleotide
ccgccuuggcuacuaucac

SEQ ID NO: 2772499 - RNA, 19 nt, Artificial Sequence
  Description of Artificial Sequence: Synthetic oligonucleotide
ccccgggccugugagacac

SEQ ID NO: 2772500 - RNA, 19 nt, Artificial Sequence
  Description of Artificial Sequence: Synthetic oligonucleotide
cgguggugggcucggacac

SEQ ID NO: 2772501 - RNA, 19 nt, Artificial Sequence
  Description of Artificial Sequence: Synthetic oligonucleotide
cagcaccccgcagcucagc

SEQ ID NO: 2772502 - RNA, 19 nt, Artificial Sequence
  Description of Artificial Sequence: Synthetic oligonucleotide
gacuucccuuggggccucc

SEQ ID NO: 2772503 - RNA, 19 nt, Artificial Sequence
  Description of Artificial Sequence: Synthetic oligonucleotide
gggaagcguaugugaacgu

SEQ ID NO: 2772504 - RNA, 19 nt, Artificial Sequence
  Description of Artificial Sequence: Synthetic oligonucleotide
cguuggucccuccuuggga

SEQ ID NO: 2772505 - RNA, 19 nt, Artificial Sequence
  Description of Artificial Sequence: Synthetic oligonucleotide
aggccauggcguacucaau

SEQ ID NO: 2772506 - RNA, 19 nt, Artificial Sequence
  Description of Artificial Sequence: Synthetic oligonucleotide
gggcaacccauggcaggug

SEQ ID NO: 2772507 - RNA, 19 nt, Artificial Sequence
  Description of Artificial Sequence: Synthetic oligonucleotide
acgacgccuccuggccuca

SEQ ID NO: 2772508 - RNA, 19 nt, Artificial Sequence
  Description of Artificial Sequence: Synthetic oligonucleotide
ccgggccugugagacacug

SEQ ID NO: 2772509 - RNA, 19 nt, Artificial Sequence
  Description of Artificial Sequence: Synthetic oligonucleotide
gugcgcccgaggaggggac

SEQ ID NO: 2772510 - RNA, 19 nt, Artificial Sequence
  Description of Artificial Sequence: Synthetic oligonucleotide
gcgcccgaggaggggacag

SEQ ID NO: 2772511 - RNA, 19 nt, Artificial Sequence
  Description of Artificial Sequence: Synthetic oligonucleotide
cacucguccccagacucau

SEQ ID NO: 2772512 - RNA, 19 nt, Artificial Sequence
  Description of Artificial Sequence: Synthetic oligonucleotide
cccuacgucuugggagaag

SEQ ID NO: 2772513 - RNA, 19 nt, Artificial Sequence
  Description of Artificial Sequence: Synthetic oligonucleotide
gcucagccuugaaggcccc

SEQ ID NO: 2772514 - RNA, 19 nt, Artificial Sequence
  Description of Artificial Sequence: Synthetic oligonucleotide
cccgggcccuacgucuugg

SEQ ID NO: 2772515 - RNA, 19 nt, Artificial Sequence
  Description of Artificial Sequence: Synthetic oligonucleotide
cgucaaacggcacgguggu

SEQ ID NO: 2772516 - RNA, 19 nt, Artificial Sequence
  Description of Artificial Sequence: Synthetic oligonucleotide
accccgcagcucagccuug

SEQ ID NO: 2772517 - RNA, 19 nt, Artificial Sequence
  Description of Artificial Sequence: Synthetic oligonucleotide
gggucacaccagcuccugu

SEQ ID NO: 2772518 - RNA, 19 nt, Artificial Sequence
  Description of Artificial Sequence: Synthetic oligonucleotide
gccucacgucaaacggcac

SEQ ID NO: 2772519 - RNA, 19 nt, Artificial Sequence
  Description of Artificial Sequence: Synthetic oligonucleotide
gcaccccgcagcucagccu

SEQ ID NO: 2772520 - RNA, 19 nt, Artificial Sequence
  Description of Artificial Sequence: Synthetic oligonucleotide
cccuccuugggaagcguau

SEQ ID NO: 2772521 - RNA, 19 nt, Artificial Sequence
  Description of Artificial Sequence: Synthetic oligonucleotide
gucccuccuugggaagcgu

SEQ ID NO: 2772522 - RNA, 19 nt, Artificial Sequence
  Description of Artificial Sequence: Synthetic oligonucleotide
ccccagacucaucugccau

SEQ ID NO: 2772523 - RNA, 19 nt, Artificial Sequence
  Description of Artificial Sequence: Synthetic oligonucleotide
cggcacgguggugggcucg

SEQ ID NO: 2772524 - RNA, 19 nt, Artificial Sequence
  Description of Artificial Sequence: Synthetic oligonucleotide
cgggcccuacgucuuggga

SEQ ID NO: 2772525 - RNA, 19 nt, Artificial Sequence
  Description of Artificial Sequence: Synthetic oligonucleotide
cgcccgaggaggggacagg

SEQ ID NO: 2772526 - RNA, 19 nt, Artificial Sequence
  Description of Artificial Sequence: Synthetic oligonucleotide
gccccgggccugugagaca

SEQ ID NO: 2772527 - RNA, 19 nt, Artificial Sequence
  Description of Artificial Sequence: Synthetic oligonucleotide
gugccgccuuggcuacuau

SEQ ID NO: 2772528 - RNA, 19 nt, Artificial Sequence
  Description of Artificial Sequence: Synthetic oligonucleotide
gcccuacgucuugggagaa

SEQ ID NO: 2772529 - RNA, 19 nt, Artificial Sequence
  Description of Artificial Sequence: Synthetic oligonucleotide
gcucagccuugaacugugu

SEQ ID NO: 2772530 - RNA, 19 nt, Artificial Sequence
  Description of Artificial Sequence: Synthetic oligonucleotide
ccauugcucguuggucccu

SEQ ID NO: 2772531 - RNA, 19 nt, Artificial Sequence
  Description of Artificial Sequence: Synthetic oligonucleotide
ccccgcagcucagccuuga

SEQ ID NO: 2772532 - RNA, 19 nt, Artificial Sequence
  Description of Artificial Sequence: Synthetic oligonucleotide
gcacgguggugggcucgga

SEQ ID NO: 2772533 - RNA, 19 nt, Artificial Sequence
  Description of Artificial Sequence: Synthetic oligonucleotide
cgugccgccuuggcuacua

SEQ ID NO: 2772534 - RNA, 19 nt, Artificial Sequence
  Description of Artificial Sequence: Synthetic oligonucleotide
cgacgccuccuggccucac

SEQ ID NO: 2772535 - RNA, 19 nt, Artificial Sequence
  Description of Artificial Sequence: Synthetic oligonucleotide
gcgugccgccuuggcuacu

SEQ ID NO: 2772536 - RNA, 19 nt, Artificial Sequence
  Description of Artificial Sequence: Synthetic oligonucleotide
aauaaugcgguaucagugg

SEQ ID NO: 2772537 - RNA, 19 nt, Artificial Sequence
  Description of Artificial Sequence: Synthetic oligonucleotide
aaauuguccuguuucaaag

SEQ ID NO: 2772538 - RNA, 19 nt, Artificial Sequence
  Description of Artificial Sequence: Synthetic oligonucleotide
aaagugacacguuuaaucu

SEQ ID NO: 2772539 - RNA, 19 nt, Artificial Sequence
  Description of Artificial Sequence: Synthetic oligonucleotide
aggaaugucaucauuaggg

SEQ ID NO: 2772540 - RNA, 19 nt, Artificial Sequence
  Description of Artificial Sequence: Synthetic oligonucleotide
agcaaagcuauccucuucc

SEQ ID NO: 2772541 - RNA, 19 nt, Artificial Sequence
  Description of Artificial Sequence: Synthetic oligonucleotide
accaucuuagaauaaugcg

SEQ ID NO: 2772542 - RNA, 19 nt, Artificial Sequence
  Description of Artificial Sequence: Synthetic oligonucleotide
uguccuguuucaaagacca

SEQ ID NO: 2772543 - RNA, 19 nt, Artificial Sequence
  Description of Artificial Sequence: Synthetic oligonucleotide
acacguuuaaucuucagca

SEQ ID NO: 2772544 - RNA, 19 nt, Artificial Sequence
  Description of Artificial Sequence: Synthetic oligonucleotide
agcaucaucaaauuguccu

SEQ ID NO: 2772545 - RNA, 19 nt, Artificial Sequence
  Description of Artificial Sequence: Synthetic oligonucleotide
aaagcuauccucuuccaaa

SEQ ID NO: 2772546 - RNA, 19 nt, Artificial Sequence
  Description of Artificial Sequence: Synthetic oligonucleotide
aagcuauccucuuccaaac

SEQ ID NO: 2772547 - RNA, 19 nt, Artificial Sequence
  Description of Artificial Sequence: Synthetic oligonucleotide
ucagcugcggcaaagcuug

SEQ ID NO: 2772548 - RNA, 19 nt, Artificial Sequence
  Description of Artificial Sequence: Synthetic oligonucleotide
caucaugucuccuuguggg

SEQ ID NO: 2772549 - RNA, 19 nt, Artificial Sequence
  Description of Artificial Sequence: Synthetic oligonucleotide
acugaaaaggucagcagcc

SEQ ID NO: 2772550 - RNA, 19 nt, Artificial Sequence
  Description of Artificial Sequence: Synthetic oligonucleotide
auaaugcgguaucaguggc

SEQ ID NO: 2772551 - RNA, 19 nt, Artificial Sequence
  Description of Artificial Sequence: Synthetic oligonucleotide
gaauaaugcgguaucagug

SEQ ID NO: 2772552 - RNA, 19 nt, Artificial Sequence
  Description of Artificial Sequence: Synthetic oligonucleotide
aaugcgguaucaguggcgg

SEQ ID NO: 2772553 - RNA, 19 nt, Artificial Sequence
  Description of Artificial Sequence: Synthetic oligonucleotide
gacacguuuaaucuucagc

SEQ ID NO: 2772554 - RNA, 19 nt, Artificial Sequence
  Description of Artificial Sequence: Synthetic oligonucleotide
ucauuagggaugcucuggg

SEQ ID NO: 2772555 - RNA, 19 nt, Artificial Sequence
  Description of Artificial Sequence: Synthetic oligonucleotide
acguuuaaucuucagcauc

SEQ ID NO: 2772556 - RNA, 19 nt, Artificial Sequence
  Description of Artificial Sequence: Synthetic oligonucleotide
caagguuuaaucuccugag

SEQ ID NO: 2772557 - RNA, 19 nt, Artificial Sequence
  Description of Artificial Sequence: Synthetic oligonucleotide
uguuucaaagaccaucuua

SEQ ID NO: 2772558 - RNA, 19 nt, Artificial Sequence
  Description of Artificial Sequence: Synthetic oligonucleotide
agaauaaugcgguaucagu

SEQ ID NO: 2772559 - RNA, 19 nt, Artificial Sequence
  Description of Artificial Sequence: Synthetic oligonucleotide
cuauccucuuccaaacucg

SEQ ID NO: 2772560 - RNA, 19 nt, Artificial Sequence
  Description of Artificial Sequence: Synthetic oligonucleotide
gaccagaaaggucagcugc

SEQ ID NO: 2772561 - RNA, 19 nt, Artificial Sequence
  Description of Artificial Sequence: Synthetic oligonucleotide
ccaucuuagaauaaugcgg

SEQ ID NO: 2772562 - RNA, 19 nt, Artificial Sequence
  Description of Artificial Sequence: Synthetic oligonucleotide
ucugacagcucccagguau

SEQ ID NO: 2772563 - RNA, 19 nt, Artificial Sequence
  Description of Artificial Sequence: Synthetic oligonucleotide
caaacucggacccucauug

SEQ ID NO: 2772564 - RNA, 19 nt, Artificial Sequence
  Description of Artificial Sequence: Synthetic oligonucleotide
caucaaauuguccuguuuc

SEQ ID NO: 2772565 - RNA, 19 nt, Artificial Sequence
  Description of Artificial Sequence: Synthetic oligonucleotide
aaucuccugagaaaugcuc

SEQ ID NO: 2772566 - RNA, 19 nt, Artificial Sequence
  Description of Artificial Sequence: Synthetic oligonucleotide
auuagggaugcucugggcu

SEQ ID NO: 2772567 - RNA, 19 nt, Artificial Sequence
  Description of Artificial Sequence: Synthetic oligonucleotide
cuuagaauaaugcgguauc

SEQ ID NO: 2772568 - RNA, 19 nt, Artificial Sequence
  Description of Artificial Sequence: Synthetic oligonucleotide
uauccucuuccaaacucgg

SEQ ID NO: 2772569 - RNA, 19 nt, Artificial Sequence
  Description of Artificial Sequence: Synthetic oligonucleotide
uggguggaccuucugacag

SEQ ID NO: 2772570 - RNA, 19 nt, Artificial Sequence
  Description of Artificial Sequence: Synthetic oligonucleotide
acaucaugucuccuugugg

SEQ ID NO: 2772571 - RNA, 19 nt, Artificial Sequence
  Description of Artificial Sequence: Synthetic oligonucleotide
agugacacguuuaaucuuc

SEQ ID NO: 2772572 - RNA, 19 nt, Artificial Sequence
  Description of Artificial Sequence: Synthetic oligonucleotide
uaaugcgguaucaguggcg

SEQ ID NO: 2772573 - RNA, 19 nt, Artificial Sequence
  Description of Artificial Sequence: Synthetic oligonucleotide
guauacagcuccucauugg

SEQ ID NO: 2772574 - RNA, 19 nt, Artificial Sequence
  Description of Artificial Sequence: Synthetic oligonucleotide
cuggaugucaucggcaucg

SEQ ID NO: 2772575 - RNA, 19 nt, Artificial Sequence
  Description of Artificial Sequence: Synthetic oligonucleotide
ugaaaaggucagcagccug

SEQ ID NO: 2772576 - RNA, 19 nt, Artificial Sequence
  Description of Artificial Sequence: Synthetic oligonucleotide
gaccaucuuagaauaaugc

SEQ ID NO: 2772577 - RNA, 19 nt, Artificial Sequence
  Description of Artificial Sequence: Synthetic oligonucleotide
agguuuaaucuccugagaa

SEQ ID NO: 2772578 - RNA, 19 nt, Artificial Sequence
  Description of Artificial Sequence: Synthetic oligonucleotide
aagguuuaaucuccugaga

SEQ ID NO: 2772579 - RNA, 19 nt, Artificial Sequence
  Description of Artificial Sequence: Synthetic oligonucleotide
uagaauaaugcgguaucag

SEQ ID NO: 2772580 - RNA, 19 nt, Artificial Sequence
  Description of Artificial Sequence: Synthetic oligonucleotide
aucuccugagaaaugcucc

SEQ ID NO: 2772581 - RNA, 19 nt, Artificial Sequence
  Description of Artificial Sequence: Synthetic oligonucleotide
ugagaaaugcuccccugga

SEQ ID NO: 2772582 - RNA, 19 nt, Artificial Sequence
  Description of Artificial Sequence: Synthetic oligonucleotide
aucguaaggguucccuugg

SEQ ID NO: 2772583 - RNA, 19 nt, Artificial Sequence
  Description of Artificial Sequence: Synthetic oligonucleotide
aacucggacccucauugug

SEQ ID NO: 2772584 - RNA, 19 nt, Artificial Sequence
  Description of Artificial Sequence: Synthetic oligonucleotide
agaaaggucagcugcggca

SEQ ID NO: 2772585 - RNA, 19 nt, Artificial Sequence
  Description of Artificial Sequence: Synthetic oligonucleotide
gauggugccaacugggguc

SEQ ID NO: 2772586 - RNA, 19 nt, Artificial Sequence
  Description of Artificial Sequence: Synthetic oligonucleotide
aaagcuugccuccgcguug

SEQ ID NO: 2772587 - RNA, 19 nt, Artificial Sequence
  Description of Artificial Sequence: Synthetic oligonucleotide
cauacaucaugucuccuug

SEQ ID NO: 2772588 - RNA, 19 nt, Artificial Sequence
  Description of Artificial Sequence: Synthetic oligonucleotide
uuagaauaaugcgguauca

SEQ ID NO: 2772589 - RNA, 19 nt, Artificial Sequence
  Description of Artificial Sequence: Synthetic oligonucleotide
gucaucggcaucguaaggg

SEQ ID NO: 2772590 - RNA, 19 nt, Artificial Sequence
  Description of Artificial Sequence: Synthetic oligonucleotide
gaugcucugggcuccacug

SEQ ID NO: 2772591 - RNA, 19 nt, Artificial Sequence
  Description of Artificial Sequence: Synthetic oligonucleotide
ucuuagaauaaugcgguau

SEQ ID NO: 2772592 - RNA, 19 nt, Artificial Sequence
  Description of Artificial Sequence: Synthetic oligonucleotide
augucaucggcaucguaag

SEQ ID NO: 2772593 - RNA, 19 nt, Artificial Sequence
  Description of Artificial Sequence: Synthetic oligonucleotide
accgguggccuccugaggg

SEQ ID NO: 2772594 - RNA, 19 nt, Artificial Sequence
  Description of Artificial Sequence: Synthetic oligonucleotide
aucauuagggaugcucugg

SEQ ID NO: 2772595 - RNA, 19 nt, Artificial Sequence
  Description of Artificial Sequence: Synthetic oligonucleotide
uguggggcacagcacaccc

SEQ ID NO: 2772596 - RNA, 19 nt, Artificial Sequence
  Description of Artificial Sequence: Synthetic oligonucleotide
ugcuuucagcuccaagucc

SEQ ID NO: 2772597 - RNA, 19 nt, Artificial Sequence
  Description of Artificial Sequence: Synthetic oligonucleotide
uggauggugccaacugggg

SEQ ID NO: 2772598 - RNA, 19 nt, Artificial Sequence
  Description of Artificial Sequence: Synthetic oligonucleotide
uccucauuggcuuccuucu

SEQ ID NO: 2772599 - RNA, 19 nt, Artificial Sequence
  Description of Artificial Sequence: Synthetic oligonucleotide
gaugucaucggcaucguaa

SEQ ID NO: 2772600 - RNA, 19 nt, Artificial Sequence
  Description of Artificial Sequence: Synthetic oligonucleotide
aagaccaucuuagaauaau

SEQ ID NO: 2772601 - RNA, 19 nt, Artificial Sequence
  Description of Artificial Sequence: Synthetic oligonucleotide
cucauuggcuuccuucucc

SEQ ID NO: 2772602 - RNA, 19 nt, Artificial Sequence
  Description of Artificial Sequence: Synthetic oligonucleotide
uccauggccaucucagucu

SEQ ID NO: 2772603 - RNA, 19 nt, Artificial Sequence
  Description of Artificial Sequence: Synthetic oligonucleotide
cucccagguauacagcucc

SEQ ID NO: 2772604 - RNA, 19 nt, Artificial Sequence
  Description of Artificial Sequence: Synthetic oligonucleotide
ugucaucggcaucguaagg

SEQ ID NO: 2772605 - RNA, 19 nt, Artificial Sequence
  Description of Artificial Sequence: Synthetic oligonucleotide
aaaggucagcagccuguuc

SEQ ID NO: 2772606 - RNA, 19 nt, Artificial Sequence
  Description of Artificial Sequence: Synthetic oligonucleotide
uccuguuucaaagaccauc

SEQ ID NO: 2772607 - RNA, 19 nt, Artificial Sequence
  Description of Artificial Sequence: Synthetic oligonucleotide
aaggguucccuuggucugc

SEQ ID NO: 2772608 - RNA, 19 nt, Artificial Sequence
  Description of Artificial Sequence: Synthetic oligonucleotide
cucuuccaaacucggaccc

SEQ ID NO: 2772609 - RNA, 19 nt, Artificial Sequence
  Description of Artificial Sequence: Synthetic oligonucleotide
ucccaguccucacugaaaa

SEQ ID NO: 2772610 - RNA, 19 nt, Artificial Sequence
  Description of Artificial Sequence: Synthetic oligonucleotide
caggaaugucaucauuagg

SEQ ID NO: 2772611 - RNA, 19 nt, Artificial Sequence
  Description of Artificial Sequence: Synthetic oligonucleotide
uuagggaugcucugggcuc

SEQ ID NO: 2772612 - RNA, 19 nt, Artificial Sequence
  Description of Artificial Sequence: Synthetic oligonucleotide
caucguaaggguucccuug

SEQ ID NO: 2772613 - RNA, 19 nt, Artificial Sequence
  Description of Artificial Sequence: Synthetic oligonucleotide
caaagaccaucuuagaaua

SEQ ID NO: 2772614 - RNA, 19 nt, Artificial Sequence
  Description of Artificial Sequence: Synthetic oligonucleotide
agucucugucuccugacca

SEQ ID NO: 2772615 - RNA, 19 nt, Artificial Sequence
  Description of Artificial Sequence: Synthetic oligonucleotide
uccacuggcuagucggucc

SEQ ID NO: 2772616 - RNA, 19 nt, Artificial Sequence
  Description of Artificial Sequence: Synthetic oligonucleotide
aagugacacguuuaaucuu

SEQ ID NO: 2772617 - RNA, 19 nt, Artificial Sequence
  Description of Artificial Sequence: Synthetic oligonucleotide
ucuucagcaucaucaaauu

SEQ ID NO: 2772618 - RNA, 19 nt, Artificial Sequence
  Description of Artificial Sequence: Synthetic oligonucleotide
caucuuagaauaaugcggu

SEQ ID NO: 2772619 - RNA, 19 nt, Artificial Sequence
  Description of Artificial Sequence: Synthetic oligonucleotide
ucaucggcaucguaagggu

SEQ ID NO: 2772620 - RNA, 19 nt, Artificial Sequence
  Description of Artificial Sequence: Synthetic oligonucleotide
gguauacagcuccucauug

SEQ ID NO: 2772621 - RNA, 19 nt, Artificial Sequence
  Description of Artificial Sequence: Synthetic oligonucleotide
uccugaggguccaugcccc

SEQ ID NO: 2772622 - RNA, 19 nt, Artificial Sequence
  Description of Artificial Sequence: Synthetic oligonucleotide
cucgccggaccccugaccg

SEQ ID NO: 2772623 - RNA, 19 nt, Artificial Sequence
  Description of Artificial Sequence: Synthetic oligonucleotide
ugcggcaaagcuugccucc

SEQ ID NO: 2772624 - RNA, 19 nt, Artificial Sequence
  Description of Artificial Sequence: Synthetic oligonucleotide
ugaccagaaaggucagcug

SEQ ID NO: 2772625 - RNA, 19 nt, Artificial Sequence
  Description of Artificial Sequence: Synthetic oligonucleotide
cuggcuagucgguccaugg

SEQ ID NO: 2772626 - RNA, 19 nt, Artificial Sequence
  Description of Artificial Sequence: Synthetic oligonucleotide
ucuccugaccagaaagguc

SEQ ID NO: 2772627 - RNA, 19 nt, Artificial Sequence
  Description of Artificial Sequence: Synthetic oligonucleotide
ggcuccacuggcuagucgg

SEQ ID NO: 2772628 - RNA, 19 nt, Artificial Sequence
  Description of Artificial Sequence: Synthetic oligonucleotide
aucggcaucguaaggguuc

SEQ ID NO: 2772629 - RNA, 19 nt, Artificial Sequence
  Description of Artificial Sequence: Synthetic oligonucleotide
ucaucaaauuguccuguuu

SEQ ID NO: 2772630 - RNA, 19 nt, Artificial Sequence
  Description of Artificial Sequence: Synthetic oligonucleotide
guaucaguggcgguggaug

SEQ ID NO: 2772631 - RNA, 19 nt, Artificial Sequence
  Description of Artificial Sequence: Synthetic oligonucleotide
aagcuugccuccgcguugg

SEQ ID NO: 2772632 - RNA, 19 nt, Artificial Sequence
  Description of Artificial Sequence: Synthetic oligonucleotide
ugcgguaucaguggcggug

SEQ ID NO: 2772633 - RNA, 19 nt, Artificial Sequence
  Description of Artificial Sequence: Synthetic oligonucleotide
ucaaauuguccuguuucaa

SEQ ID NO: 2772634 - RNA, 19 nt, Artificial Sequence
  Description of Artificial Sequence: Synthetic oligonucleotide
uacagcuccucauuggcuu

SEQ ID NO: 2772635 - RNA, 19 nt, Artificial Sequence
  Description of Artificial Sequence: Synthetic oligonucleotide
guggauggugccaacuggg

SEQ ID NO: 2772636 - RNA, 19 nt, Artificial Sequence
  Description of Artificial Sequence: Synthetic oligonucleotide
ugacacguuuaaucuucag

SEQ ID NO: 2772637 - RNA, 19 nt, Artificial Sequence
  Description of Artificial Sequence: Synthetic oligonucleotide
ucauuggcuuccuucuccu

SEQ ID NO: 2772638 - RNA, 19 nt, Artificial Sequence
  Description of Artificial Sequence: Synthetic oligonucleotide
cucacugaaaaggucagca

SEQ ID NO: 2772639 - RNA, 19 nt, Artificial Sequence
  Description of Artificial Sequence: Synthetic oligonucleotide
aaacucggacccucauugu

SEQ ID NO: 2772640 - RNA, 19 nt, Artificial Sequence
  Description of Artificial Sequence: Synthetic oligonucleotide
gguggauggugccaacugg

SEQ ID NO: 2772641 - RNA, 19 nt, Artificial Sequence
  Description of Artificial Sequence: Synthetic oligonucleotide
cucggacccucauuguggg

SEQ ID NO: 2772642 - RNA, 19 nt, Artificial Sequence
  Description of Artificial Sequence: Synthetic oligonucleotide
aaaugcuccccuggauguc

SEQ ID NO: 2772643 - RNA, 19 nt, Artificial Sequence
  Description of Artificial Sequence: Synthetic oligonucleotide
acucggacccucauugugg

SEQ ID NO: 2772644 - RNA, 19 nt, Artificial Sequence
  Description of Artificial Sequence: Synthetic oligonucleotide
ugaccgguggccuccugag

SEQ ID NO: 2772645 - RNA, 19 nt, Artificial Sequence
  Description of Artificial Sequence: Synthetic oligonucleotide
gaaaugcuccccuggaugu

SEQ ID NO: 2772646 - RNA, 19 nt, Artificial Sequence
  Description of Artificial Sequence: Synthetic oligonucleotide
caucauuagggaugcucug

SEQ ID NO: 2772647 - RNA, 19 nt, Artificial Sequence
  Description of Artificial Sequence: Synthetic oligonucleotide
cuugccuccgcguugggga

SEQ ID NO: 2772648 - RNA, 19 nt, Artificial Sequence
  Description of Artificial Sequence: Synthetic oligonucleotide
gcaggaaugucaucauuag

SEQ ID NO: 2772649 - RNA, 19 nt, Artificial Sequence
  Description of Artificial Sequence: Synthetic oligonucleotide
agaccaucuuagaauaaug

SEQ ID NO: 2772650 - RNA, 19 nt, Artificial Sequence
  Description of Artificial Sequence: Synthetic oligonucleotide
caacuggggucauacauca

SEQ ID NO: 2772651 - RNA, 19 nt, Artificial Sequence
  Description of Artificial Sequence: Synthetic oligonucleotide
accagaaaggucagcugcg

SEQ ID NO: 2772652 - RNA, 19 nt, Artificial Sequence
  Description of Artificial Sequence: Synthetic oligonucleotide
caagucccaguccucacug

SEQ ID NO: 2772653 - RNA, 19 nt, Artificial Sequence
  Description of Artificial Sequence: Synthetic oligonucleotide
uggggcacagcacacccaa

SEQ ID NO: 2772654 - RNA, 19 nt, Artificial Sequence
  Description of Artificial Sequence: Synthetic oligonucleotide
aaggucagcugcggcaaag

SEQ ID NO: 2772655 - RNA, 19 nt, Artificial Sequence
  Description of Artificial Sequence: Synthetic oligonucleotide
uccccuggaugucaucggc

SEQ ID NO: 2772656 - RNA, 19 nt, Artificial Sequence
  Description of Artificial Sequence: Synthetic oligonucleotide
cugcuuucagcuccaaguc

SEQ ID NO: 2772657 - RNA, 19 nt, Artificial Sequence
  Description of Artificial Sequence: Synthetic oligonucleotide
ggaaugucaucauuaggga

SEQ ID NO: 2772658 - RNA, 19 nt, Artificial Sequence
  Description of Artificial Sequence: Synthetic oligonucleotide
gucucugucuccugaccag

SEQ ID NO: 2772659 - RNA, 19 nt, Artificial Sequence
  Description of Artificial Sequence: Synthetic oligonucleotide
acagcuaggcgaccgggga

SEQ ID NO: 2772660 - RNA, 19 nt, Artificial Sequence
  Description of Artificial Sequence: Synthetic oligonucleotide
ucauugugggcaggaaugu

SEQ ID NO: 2772661 - RNA, 19 nt, Artificial Sequence
  Description of Artificial Sequence: Synthetic oligonucleotide
uggcuagucgguccauggc

SEQ ID NO: 2772662 - RNA, 19 nt, Artificial Sequence
  Description of Artificial Sequence: Synthetic oligonucleotide
guuuaaucuccugagaaau

SEQ ID NO: 2772663 - RNA, 19 nt, Artificial Sequence
  Description of Artificial Sequence: Synthetic oligonucleotide
gcaucaucaaauuguccug

SEQ ID NO: 2772664 - RNA, 19 nt, Artificial Sequence
  Description of Artificial Sequence: Synthetic oligonucleotide
cacagcuaggcgaccgggg

SEQ ID NO: 2772665 - RNA, 19 nt, Artificial Sequence
  Description of Artificial Sequence: Synthetic oligonucleotide
auacaucaugucuccuugu

SEQ ID NO: 2772666 - RNA, 19 nt, Artificial Sequence
  Description of Artificial Sequence: Synthetic oligonucleotide
agguauacagcuccucauu

SEQ ID NO: 2772667 - RNA, 19 nt, Artificial Sequence
  Description of Artificial Sequence: Synthetic oligonucleotide
augcucugggcuccacugg

SEQ ID NO: 2772668 - RNA, 19 nt, Artificial Sequence
  Description of Artificial Sequence: Synthetic oligonucleotide
ggaccugccgcgcacuugg

SEQ ID NO: 2772669 - RNA, 19 nt, Artificial Sequence
  Description of Artificial Sequence: Synthetic oligonucleotide
uccugaccagaaaggucag

SEQ ID NO: 2772670 - RNA, 19 nt, Artificial Sequence
  Description of Artificial Sequence: Synthetic oligonucleotide
cagaaaggucagcugcggc

SEQ ID NO: 2772671 - RNA, 19 nt, Artificial Sequence
  Description of Artificial Sequence: Synthetic oligonucleotide
aguccucacugaaaagguc

SEQ ID NO: 2772672 - RNA, 19 nt, Artificial Sequence
  Description of Artificial Sequence: Synthetic oligonucleotide
aggucagcugcggcaaagc

SEQ ID NO: 2772673 - RNA, 19 nt, Artificial Sequence
  Description of Artificial Sequence: Synthetic oligonucleotide
cuccuuguggggcacagca

SEQ ID NO: 2772674 - RNA, 19 nt, Artificial Sequence
  Description of Artificial Sequence: Synthetic oligonucleotide
uuccaaacucggacccuca

SEQ ID NO: 2772675 - RNA, 19 nt, Artificial Sequence
  Description of Artificial Sequence: Synthetic oligonucleotide
gguuuaaucuccugagaaa

SEQ ID NO: 2772676 - RNA, 19 nt, Artificial Sequence
  Description of Artificial Sequence: Synthetic oligonucleotide
ggcaaagcuugccuccgcg

SEQ ID NO: 2772677 - RNA, 19 nt, Artificial Sequence
  Description of Artificial Sequence: Synthetic oligonucleotide
aaaaggucagcagccuguu

SEQ ID NO: 2772678 - RNA, 19 nt, Artificial Sequence
  Description of Artificial Sequence: Synthetic oligonucleotide
aagucccaguccucacuga

SEQ ID NO: 2772679 - RNA, 19 nt, Artificial Sequence
  Description of Artificial Sequence: Synthetic oligonucleotide
uaggcgaccggggacacuc

SEQ ID NO: 2772680 - RNA, 19 nt, Artificial Sequence
  Description of Artificial Sequence: Synthetic oligonucleotide
uccgcguuggggaccugcc

SEQ ID NO: 2772681 - RNA, 19 nt, Artificial Sequence
  Description of Artificial Sequence: Synthetic oligonucleotide
agcugcggcaaagcuugcc

SEQ ID NO: 2772682 - RNA, 19 nt, Artificial Sequence
  Description of Artificial Sequence: Synthetic oligonucleotide
agucccaguccucacugaa

SEQ ID NO: 2772683 - RNA, 19 nt, Artificial Sequence
  Description of Artificial Sequence: Synthetic oligonucleotide
uccuucuccuccacagcaa

SEQ ID NO: 2772684 - RNA, 19 nt, Artificial Sequence
  Description of Artificial Sequence: Synthetic oligonucleotide
aucaucaaauuguccuguu

SEQ ID NO: 2772685 - RNA, 19 nt, Artificial Sequence
  Description of Artificial Sequence: Synthetic oligonucleotide
ccucuuccaaacucggacc

SEQ ID NO: 2772686 - RNA, 19 nt, Artificial Sequence
  Description of Artificial Sequence: Synthetic oligonucleotide
cuccccuggaugucaucgg

SEQ ID NO: 2772687 - RNA, 19 nt, Artificial Sequence
  Description of Artificial Sequence: Synthetic oligonucleotide
uccaaacucggacccucau

SEQ ID NO: 2772688 - RNA, 19 nt, Artificial Sequence
  Description of Artificial Sequence: Synthetic oligonucleotide
ucggcaucguaaggguucc

SEQ ID NO: 2772689 - RNA, 19 nt, Artificial Sequence
  Description of Artificial Sequence: Synthetic oligonucleotide
cuuccaaacucggacccuc

SEQ ID NO: 2772690 - RNA, 19 nt, Artificial Sequence
  Description of Artificial Sequence: Synthetic oligonucleotide
cugccgcgcacuuggcucg

SEQ ID NO: 2772691 - RNA, 19 nt, Artificial Sequence
  Description of Artificial Sequence: Synthetic oligonucleotide
ucguaaggguucccuuggu

SEQ ID NO: 2772692 - RNA, 19 nt, Artificial Sequence
  Description of Artificial Sequence: Synthetic oligonucleotide
aucuuagaauaaugcggua

SEQ ID NO: 2772693 - RNA, 19 nt, Artificial Sequence
  Description of Artificial Sequence: Synthetic oligonucleotide
aaaggucagcugcggcaaa

SEQ ID NO: 2772694 - RNA, 19 nt, Artificial Sequence
  Description of Artificial Sequence: Synthetic oligonucleotide
cuccugagaaaugcucccc

SEQ ID NO: 2772695 - RNA, 19 nt, Artificial Sequence
  Description of Artificial Sequence: Synthetic oligonucleotide
ccaagguuuaaucuccuga

SEQ ID NO: 2772696 - RNA, 19 nt, Artificial Sequence
  Description of Artificial Sequence: Synthetic oligonucleotide
cacacccaagguuuaaucu

SEQ ID NO: 2772697 - RNA, 19 nt, Artificial Sequence
  Description of Artificial Sequence: Synthetic oligonucleotide
ucuuccaaacucggacccu

SEQ ID NO: 2772698 - RNA, 19 nt, Artificial Sequence
  Description of Artificial Sequence: Synthetic oligonucleotide
cacuuggcucgccggaccc

SEQ ID NO: 2772699 - RNA, 19 nt, Artificial Sequence
  Description of Artificial Sequence: Synthetic oligonucleotide
cguuuaaucuucagcauca

SEQ ID NO: 2772700 - RNA, 19 nt, Artificial Sequence
  Description of Artificial Sequence: Synthetic oligonucleotide
gaccgguggccuccugagg

SEQ ID NO: 2772701 - RNA, 19 nt, Artificial Sequence
  Description of Artificial Sequence: Synthetic oligonucleotide
gcuccccuggaugucaucg

SEQ ID NO: 2772702 - RNA, 19 nt, Artificial Sequence
  Description of Artificial Sequence: Synthetic oligonucleotide
gaggguccaugccccgccg

SEQ ID NO: 2772703 - RNA, 19 nt, Artificial Sequence
  Description of Artificial Sequence: Synthetic oligonucleotide
caugucuccuuguggggca

SEQ ID NO: 2772704 - RNA, 19 nt, Artificial Sequence
  Description of Artificial Sequence: Synthetic oligonucleotide
acuuggcucgccggacccc

SEQ ID NO: 2772705 - RNA, 19 nt, Artificial Sequence
  Description of Artificial Sequence: Synthetic oligonucleotide
ccaacuggggucauacauc

SEQ ID NO: 2772706 - RNA, 19 nt, Artificial Sequence
  Description of Artificial Sequence: Synthetic oligonucleotide
ucccagguauacagcuccu

SEQ ID NO: 2772707 - RNA, 19 nt, Artificial Sequence
  Description of Artificial Sequence: Synthetic oligonucleotide
caaagcuauccucuuccaa

SEQ ID NO: 2772708 - RNA, 19 nt, Artificial Sequence
  Description of Artificial Sequence: Synthetic oligonucleotide
uuggggaccugccgcgcac

SEQ ID NO: 2772709 - RNA, 19 nt, Artificial Sequence
  Description of Artificial Sequence: Synthetic oligonucleotide
cacagcacacccaagguuu

SEQ ID NO: 2772710 - RNA, 19 nt, Artificial Sequence
  Description of Artificial Sequence: Synthetic oligonucleotide
ggggucauacaucaugucu

SEQ ID NO: 2772711 - RNA, 19 nt, Artificial Sequence
  Description of Artificial Sequence: Synthetic oligonucleotide
cugcggcaaagcuugccuc

SEQ ID NO: 2772712 - RNA, 19 nt, Artificial Sequence
  Description of Artificial Sequence: Synthetic oligonucleotide
ugacagcucccagguauac

SEQ ID NO: 2772713 - RNA, 19 nt, Artificial Sequence
  Description of Artificial Sequence: Synthetic oligonucleotide
cugaccagaaaggucagcu

SEQ ID NO: 2772714 - RNA, 19 nt, Artificial Sequence
  Description of Artificial Sequence: Synthetic oligonucleotide
auggugccaacugggguca

SEQ ID NO: 2772715 - RNA, 19 nt, Artificial Sequence
  Description of Artificial Sequence: Synthetic oligonucleotide
ugccaacuggggucauaca

SEQ ID NO: 2772716 - RNA, 19 nt, Artificial Sequence
  Description of Artificial Sequence: Synthetic oligonucleotide
ggcaggaaugucaucauua

SEQ ID NO: 2772717 - RNA, 19 nt, Artificial Sequence
  Description of Artificial Sequence: Synthetic oligonucleotide
acuggcuagucgguccaug

SEQ ID NO: 2772718 - RNA, 19 nt, Artificial Sequence
  Description of Artificial Sequence: Synthetic oligonucleotide
augucuccuuguggggcac

SEQ ID NO: 2772719 - RNA, 19 nt, Artificial Sequence
  Description of Artificial Sequence: Synthetic oligonucleotide
accccugaccgguggccuc

SEQ ID NO: 2772720 - RNA, 19 nt, Artificial Sequence
  Description of Artificial Sequence: Synthetic oligonucleotide
ggccaucucagucucuguc

SEQ ID NO: 2772721 - RNA, 19 nt, Artificial Sequence
  Description of Artificial Sequence: Synthetic oligonucleotide
gcacacccaagguuuaauc

SEQ ID NO: 2772722 - RNA, 19 nt, Artificial Sequence
  Description of Artificial Sequence: Synthetic oligonucleotide
cauuggcuuccuucuccuc

SEQ ID NO: 2772723 - RNA, 19 nt, Artificial Sequence
  Description of Artificial Sequence: Synthetic oligonucleotide
gacagcucccagguauaca

SEQ ID NO: 2772724 - RNA, 19 nt, Artificial Sequence
  Description of Artificial Sequence: Synthetic oligonucleotide
ucggacccucauugugggc

SEQ ID NO: 2772725 - RNA, 19 nt, Artificial Sequence
  Description of Artificial Sequence: Synthetic oligonucleotide
cagcuaggcgaccggggac

SEQ ID NO: 2772726 - RNA, 19 nt, Artificial Sequence
  Description of Artificial Sequence: Synthetic oligonucleotide
ucuccuuguggggcacagc

SEQ ID NO: 2772727 - RNA, 19 nt, Artificial Sequence
  Description of Artificial Sequence: Synthetic oligonucleotide
uucugacagcucccaggua

SEQ ID NO: 2772728 - RNA, 19 nt, Artificial Sequence
  Description of Artificial Sequence: Synthetic oligonucleotide
ggacccucauugugggcag

SEQ ID NO: 2772729 - RNA, 19 nt, Artificial Sequence
  Description of Artificial Sequence: Synthetic oligonucleotide
uggcucgccggaccccuga

SEQ ID NO: 2772730 - RNA, 19 nt, Artificial Sequence
  Description of Artificial Sequence: Synthetic oligonucleotide
accugccgcgcacuuggcu

SEQ ID NO: 2772731 - RNA, 19 nt, Artificial Sequence
  Description of Artificial Sequence: Synthetic oligonucleotide
gaccuucugacagcuccca

SEQ ID NO: 2772732 - RNA, 19 nt, Artificial Sequence
  Description of Artificial Sequence: Synthetic oligonucleotide
ccuuguggggcacagcaca

SEQ ID NO: 2772733 - RNA, 19 nt, Artificial Sequence
  Description of Artificial Sequence: Synthetic oligonucleotide
ccagguauacagcuccuca

SEQ ID NO: 2772734 - RNA, 19 nt, Artificial Sequence
  Description of Artificial Sequence: Synthetic oligonucleotide
gcguuggggaccugccgcg

SEQ ID NO: 2772735 - RNA, 19 nt, Artificial Sequence
  Description of Artificial Sequence: Synthetic oligonucleotide
aucaguggcgguggauggu

SEQ ID NO: 2772736 - RNA, 19 nt, Artificial Sequence
  Description of Artificial Sequence: Synthetic oligonucleotide
ccagaaaggucagcugcgg

SEQ ID NO: 2772737 - RNA, 19 nt, Artificial Sequence
  Description of Artificial Sequence: Synthetic oligonucleotide
gcgguaucaguggcggugg

SEQ ID NO: 2772738 - RNA, 19 nt, Artificial Sequence
  Description of Artificial Sequence: Synthetic oligonucleotide
caugccccgccgcccacag

SEQ ID NO: 2772739 - RNA, 19 nt, Artificial Sequence
  Description of Artificial Sequence: Synthetic oligonucleotide
gacccucauugugggcagg

SEQ ID NO: 2772740 - RNA, 19 nt, Artificial Sequence
  Description of Artificial Sequence: Synthetic oligonucleotide
cacguuuaaucuucagcau

SEQ ID NO: 2772741 - RNA, 19 nt, Artificial Sequence
  Description of Artificial Sequence: Synthetic oligonucleotide
cugaccgguggccuccuga

SEQ ID NO: 2772742 - RNA, 19 nt, Artificial Sequence
  Description of Artificial Sequence: Synthetic oligonucleotide
gcaaagcuauccucuucca

SEQ ID NO: 2772743 - RNA, 19 nt, Artificial Sequence
  Description of Artificial Sequence: Synthetic oligonucleotide
gccgcccacagcuaggcga

SEQ ID NO: 2772744 - RNA, 19 nt, Artificial Sequence
  Description of Artificial Sequence: Synthetic oligonucleotide
ccugccgcgcacuuggcuc

SEQ ID NO: 2772745 - RNA, 19 nt, Artificial Sequence
  Description of Artificial Sequence: Synthetic oligonucleotide
gugacacguuuaaucuuca

SEQ ID NO: 2772746 - RNA, 19 nt, Artificial Sequence
  Description of Artificial Sequence: Synthetic oligonucleotide
gucuccugaccagaaaggu

SEQ ID NO: 2772747 - RNA, 19 nt, Artificial Sequence
  Description of Artificial Sequence: Synthetic oligonucleotide
acccucauugugggcagga

SEQ ID NO: 2772748 - RNA, 19 nt, Artificial Sequence
  Description of Artificial Sequence: Synthetic oligonucleotide
guuggggaccugccgcgca

SEQ ID NO: 2772749 - RNA, 19 nt, Artificial Sequence
  Description of Artificial Sequence: Synthetic oligonucleotide
ggguggaccuucugacagc

SEQ ID NO: 2772750 - RNA, 19 nt, Artificial Sequence
  Description of Artificial Sequence: Synthetic oligonucleotide
cagguauacagcuccucau

SEQ ID NO: 2772751 - RNA, 19 nt, Artificial Sequence
  Description of Artificial Sequence: Synthetic oligonucleotide
auccucuuccaaacucgga

SEQ ID NO: 2772752 - RNA, 19 nt, Artificial Sequence
  Description of Artificial Sequence: Synthetic oligonucleotide
ccuuggucugcuuucagcu

SEQ ID NO: 2772753 - RNA, 19 nt, Artificial Sequence
  Description of Artificial Sequence: Synthetic oligonucleotide
cagcagccuguuccauggg

SEQ ID NO: 2772754 - RNA, 19 nt, Artificial Sequence
  Description of Artificial Sequence: Synthetic oligonucleotide
cucugucuccugaccagaa

SEQ ID NO: 2772755 - RNA, 19 nt, Artificial Sequence
  Description of Artificial Sequence: Synthetic oligonucleotide
ggaccuucugacagcuccc

SEQ ID NO: 2772756 - RNA, 19 nt, Artificial Sequence
  Description of Artificial Sequence: Synthetic oligonucleotide
uggcgguggauggugccaa

SEQ ID NO: 2772757 - RNA, 19 nt, Artificial Sequence
  Description of Artificial Sequence: Synthetic oligonucleotide
ggguccaugccccgccgcc

SEQ ID NO: 2772758 - RNA, 19 nt, Artificial Sequence
  Description of Artificial Sequence: Synthetic oligonucleotide
gcuagucgguccauggcca

SEQ ID NO: 2772759 - RNA, 19 nt, Artificial Sequence
  Description of Artificial Sequence: Synthetic oligonucleotide
agccuguuccaugggugga

SEQ ID NO: 2772760 - RNA, 19 nt, Artificial Sequence
  Description of Artificial Sequence: Synthetic oligonucleotide
gcacuuggcucgccggacc

SEQ ID NO: 2772761 - RNA, 19 nt, Artificial Sequence
  Description of Artificial Sequence: Synthetic oligonucleotide
augcgguaucaguggcggu

SEQ ID NO: 2772762 - RNA, 19 nt, Artificial Sequence
  Description of Artificial Sequence: Synthetic oligonucleotide
uuggcucgccggaccccug

SEQ ID NO: 2772763 - RNA, 19 nt, Artificial Sequence
  Description of Artificial Sequence: Synthetic oligonucleotide
cugacagcucccagguaua

SEQ ID NO: 2772764 - RNA, 19 nt, Artificial Sequence
  Description of Artificial Sequence: Synthetic oligonucleotide
ugucuccuuguggggcaca

SEQ ID NO: 2772765 - RNA, 19 nt, Artificial Sequence
  Description of Artificial Sequence: Synthetic oligonucleotide
cccaagguuuaaucuccug

SEQ ID NO: 2772766 - RNA, 19 nt, Artificial Sequence
  Description of Artificial Sequence: Synthetic oligonucleotide
augccccgccgcccacagc

SEQ ID NO: 2772767 - RNA, 19 nt, Artificial Sequence
  Description of Artificial Sequence: Synthetic oligonucleotide
gcggcaaagcuugccuccg

SEQ ID NO: 2772768 - RNA, 19 nt, Artificial Sequence
  Description of Artificial Sequence: Synthetic oligonucleotide
uagucgguccauggccauc

SEQ ID NO: 2772769 - RNA, 19 nt, Artificial Sequence
  Description of Artificial Sequence: Synthetic oligonucleotide
agcuugccuccgcguuggg

SEQ ID NO: 2772770 - RNA, 19 nt, Artificial Sequence
  Description of Artificial Sequence: Synthetic oligonucleotide
gcuugccuccgcguugggg

SEQ ID NO: 2772771 - RNA, 19 nt, Artificial Sequence
  Description of Artificial Sequence: Synthetic oligonucleotide
ugucaucauuagggaugcu

SEQ ID NO: 2772772 - RNA, 19 nt, Artificial Sequence
  Description of Artificial Sequence: Synthetic oligonucleotide
ggauggugccaacuggggu

SEQ ID NO: 2772773 - RNA, 19 nt, Artificial Sequence
  Description of Artificial Sequence: Synthetic oligonucleotide
gcccacagcuaggcgaccg

SEQ ID NO: 2772774 - RNA, 19 nt, Artificial Sequence
  Description of Artificial Sequence: Synthetic oligonucleotide
gccaucucagucucugucu

SEQ ID NO: 2772775 - RNA, 19 nt, Artificial Sequence
  Description of Artificial Sequence: Synthetic oligonucleotide
cuccacuggcuagucgguc

SEQ ID NO: 2772776 - RNA, 19 nt, Artificial Sequence
  Description of Artificial Sequence: Synthetic oligonucleotide
caaagcuugccuccgcguu

SEQ ID NO: 2772777 - RNA, 19 nt, Artificial Sequence
  Description of Artificial Sequence: Synthetic oligonucleotide
ccuguuccauggguggacc

SEQ ID NO: 2772778 - RNA, 19 nt, Artificial Sequence
  Description of Artificial Sequence: Synthetic oligonucleotide
guccaugccccgccgccca

SEQ ID NO: 2772779 - RNA, 19 nt, Artificial Sequence
  Description of Artificial Sequence: Synthetic oligonucleotide
gggcuccacuggcuagucg

SEQ ID NO: 2772780 - RNA, 19 nt, Artificial Sequence
  Description of Artificial Sequence: Synthetic oligonucleotide
cgcguuggggaccugccgc

SEQ ID NO: 2772781 - RNA, 19 nt, Artificial Sequence
  Description of Artificial Sequence: Synthetic oligonucleotide
cugaaaaggucagcagccu

SEQ ID NO: 2772782 - RNA, 19 nt, Artificial Sequence
  Description of Artificial Sequence: Synthetic oligonucleotide
gcugcggcaaagcuugccu

SEQ ID NO: 2772783 - RNA, 19 nt, Artificial Sequence
  Description of Artificial Sequence: Synthetic oligonucleotide
ccauggccaucucagucuc

SEQ ID NO: 2772784 - RNA, 19 nt, Artificial Sequence
  Description of Artificial Sequence: Synthetic oligonucleotide
aggcgaccggggacacucc

SEQ ID NO: 2772785 - RNA, 19 nt, Artificial Sequence
  Description of Artificial Sequence: Synthetic oligonucleotide
cguaaggguucccuugguc

SEQ ID NO: 2772786 - RNA, 19 nt, Artificial Sequence
  Description of Artificial Sequence: Synthetic oligonucleotide
ccucacugaaaaggucagc

SEQ ID NO: 2772787 - RNA, 19 nt, Artificial Sequence
  Description of Artificial Sequence: Synthetic oligonucleotide
guuuaaucuucagcaucau

SEQ ID NO: 2772788 - RNA, 19 nt, Artificial Sequence
  Description of Artificial Sequence: Synthetic oligonucleotide
cccacagcuaggcgaccgg

SEQ ID NO: 2772789 - RNA, 19 nt, Artificial Sequence
  Description of Artificial Sequence: Synthetic oligonucleotide
acagcacacccaagguuua

SEQ ID NO: 2772790 - RNA, 19 nt, Artificial Sequence
  Description of Artificial Sequence: Synthetic oligonucleotide
ccacagcuaggcgaccggg

SEQ ID NO: 2772791 - RNA, 19 nt, Artificial Sequence
  Description of Artificial Sequence: Synthetic oligonucleotide
guggcgguggauggugcca

SEQ ID NO: 2772792 - RNA, 19 nt, Artificial Sequence
  Description of Artificial Sequence: Synthetic oligonucleotide
ugggcuccacuggcuaguc

SEQ ID NO: 2772793 - RNA, 19 nt, Artificial Sequence
  Description of Artificial Sequence: Synthetic oligonucleotide
uggggaccugccgcgcacu

SEQ ID NO: 2772794 - RNA, 19 nt, Artificial Sequence
  Description of Artificial Sequence: Synthetic oligonucleotide
gucagcugcggcaaagcuu

SEQ ID NO: 2772795 - RNA, 19 nt, Artificial Sequence
  Description of Artificial Sequence: Synthetic oligonucleotide
ggucagcugcggcaaagcu

SEQ ID NO: 2772796 - RNA, 19 nt, Artificial Sequence
  Description of Artificial Sequence: Synthetic oligonucleotide
ccucauuggcuuccuucuc

SEQ ID NO: 2772797 - RNA, 19 nt, Artificial Sequence
  Description of Artificial Sequence: Synthetic oligonucleotide
ggaccccugaccgguggcc

SEQ ID NO: 2772798 - RNA, 19 nt, Artificial Sequence
  Description of Artificial Sequence: Synthetic oligonucleotide
cagcugcggcaaagcuugc

SEQ ID NO: 2772799 - RNA, 19 nt, Artificial Sequence
  Description of Artificial Sequence: Synthetic oligonucleotide
gguggaccuucugacagcu

SEQ ID NO: 2772800 - RNA, 19 nt, Artificial Sequence
  Description of Artificial Sequence: Synthetic oligonucleotide
gucauacaucaugucuccu

SEQ ID NO: 2772801 - RNA, 19 nt, Artificial Sequence
  Description of Artificial Sequence: Synthetic oligonucleotide
cgguggauggugccaacug

SEQ ID NO: 2772802 - RNA, 19 nt, Artificial Sequence
  Description of Artificial Sequence: Synthetic oligonucleotide
gguccaugccccgccgccc

SEQ ID NO: 2772803 - RNA, 19 nt, Artificial Sequence
  Description of Artificial Sequence: Synthetic oligonucleotide
gcucgccggaccccugacc

SEQ ID NO: 2772804 - RNA, 19 nt, Artificial Sequence
  Description of Artificial Sequence: Synthetic oligonucleotide
gguucccuuggucugcuuu

SEQ ID NO: 2772805 - RNA, 19 nt, Artificial Sequence
  Description of Artificial Sequence: Synthetic oligonucleotide
ggcaucguaaggguucccu

SEQ ID NO: 2772806 - RNA, 19 nt, Artificial Sequence
  Description of Artificial Sequence: Synthetic oligonucleotide
gccuguuccauggguggac

SEQ ID NO: 2772807 - RNA, 19 nt, Artificial Sequence
  Description of Artificial Sequence: Synthetic oligonucleotide
gcaaagcuugccuccgcgu

SEQ ID NO: 2772808 - RNA, 19 nt, Artificial Sequence
  Description of Artificial Sequence: Synthetic oligonucleotide
gaccugccgcgcacuuggc

SEQ ID NO: 2772809 - RNA, 19 nt, Artificial Sequence
  Description of Artificial Sequence: Synthetic oligonucleotide
ccgcguuggggaccugccg

SEQ ID NO: 2772810 - RNA, 19 nt, Artificial Sequence
  Description of Artificial Sequence: Synthetic oligonucleotide
cgcgcacuuggcucgccgg

SEQ ID NO: 2772811 - RNA, 19 nt, Artificial Sequence
  Description of Artificial Sequence: Synthetic oligonucleotide
ugccgcgcacuuggcucgc

SEQ ID NO: 2772812 - RNA, 19 nt, Artificial Sequence
  Description of Artificial Sequence: Synthetic oligonucleotide
agggaugcucugggcucca

SEQ ID NO: 2772813 - RNA, 19 nt, Artificial Sequence
  Description of Artificial Sequence: Synthetic oligonucleotide
ccggaccccugaccggugg

SEQ ID NO: 2772814 - RNA, 19 nt, Artificial Sequence
  Description of Artificial Sequence: Synthetic oligonucleotide
gcacagcacacccaagguu

SEQ ID NO: 2772815 - RNA, 19 nt, Artificial Sequence
  Description of Artificial Sequence: Synthetic oligonucleotide
caucggcaucguaaggguu

SEQ ID NO: 2772816 - RNA, 19 nt, Artificial Sequence
  Description of Artificial Sequence: Synthetic oligonucleotide
gguccauggccaucucagu

SEQ ID NO: 2772817 - RNA, 19 nt, Artificial Sequence
  Description of Artificial Sequence: Synthetic oligonucleotide
gaccccugaccgguggccu

SEQ ID NO: 2772818 - RNA, 19 nt, Artificial Sequence
  Description of Artificial Sequence: Synthetic oligonucleotide
ggaugucaucggcaucgua

SEQ ID NO: 2772819 - RNA, 19 nt, Artificial Sequence
  Description of Artificial Sequence: Synthetic oligonucleotide
cccgccgcccacagcuagg

SEQ ID NO: 2772820 - RNA, 19 nt, Artificial Sequence
  Description of Artificial Sequence: Synthetic oligonucleotide
cuuggcucgccggaccccu

SEQ ID NO: 2772821 - RNA, 19 nt, Artificial Sequence
  Description of Artificial Sequence: Synthetic oligonucleotide
gcgcacuuggcucgccgga

SEQ ID NO: 2772822 - RNA, 19 nt, Artificial Sequence
  Description of Artificial Sequence: Synthetic oligonucleotide
ccccuggaugucaucggca

SEQ ID NO: 2772823 - RNA, 19 nt, Artificial Sequence
  Description of Artificial Sequence: Synthetic oligonucleotide
ccgcgcacuuggcucgccg

SEQ ID NO: 2772824 - RNA, 19 nt, Artificial Sequence
  Description of Artificial Sequence: Synthetic oligonucleotide
gcaucguaaggguucccuu

SEQ ID NO: 2772825 - RNA, 19 nt, Artificial Sequence
  Description of Artificial Sequence: Synthetic oligonucleotide
ccacuggcuagucggucca

SEQ ID NO: 2772826 - RNA, 19 nt, Artificial Sequence
  Description of Artificial Sequence: Synthetic oligonucleotide
ggcgguggauggugccaac

SEQ ID NO: 2772827 - RNA, 19 nt, Artificial Sequence
  Description of Artificial Sequence: Synthetic oligonucleotide
guggaccuucugacagcuc

SEQ ID NO: 2772828 - RNA, 19 nt, Artificial Sequence
  Description of Artificial Sequence: Synthetic oligonucleotide
augcuccccuggaugucau

SEQ ID NO: 2772829 - RNA, 19 nt, Artificial Sequence
  Description of Artificial Sequence: Synthetic oligonucleotide
cagcacacccaagguuuaa

SEQ ID NO: 2772830 - RNA, 19 nt, Artificial Sequence
  Description of Artificial Sequence: Synthetic oligonucleotide
cauggccaucucagucucu

SEQ ID NO: 2772831 - RNA, 19 nt, Artificial Sequence
  Description of Artificial Sequence: Synthetic oligonucleotide
cugggcuccacuggcuagu

SEQ ID NO: 2772832 - RNA, 19 nt, Artificial Sequence
  Description of Artificial Sequence: Synthetic oligonucleotide
ggcucgccggaccccugac

SEQ ID NO: 2772833 - RNA, 19 nt, Artificial Sequence
  Description of Artificial Sequence: Synthetic oligonucleotide
gguaucaguggcgguggau

SEQ ID NO: 2772834 - RNA, 19 nt, Artificial Sequence
  Description of Artificial Sequence: Synthetic oligonucleotide
ccccugaccgguggccucc

SEQ ID NO: 2772835 - RNA, 19 nt, Artificial Sequence
  Description of Artificial Sequence: Synthetic oligonucleotide
gcuaggcgaccggggacac

SEQ ID NO: 2772836 - RNA, 19 nt, Artificial Sequence
  Description of Artificial Sequence: Synthetic oligonucleotide
ccccgccgcccacagcuag

SEQ ID NO: 2772837 - RNA, 19 nt, Artificial Sequence
  Description of Artificial Sequence: Synthetic oligonucleotide
ccgccgcccacagcuaggc

SEQ ID NO: 2772838 - RNA, 19 nt, Artificial Sequence
  Description of Artificial Sequence: Synthetic oligonucleotide
cgcacuuggcucgccggac

SEQ ID NO: 2772839 - RNA, 19 nt, Artificial Sequence
  Description of Artificial Sequence: Synthetic oligonucleotide
ccaaacucggacccucauu

SEQ ID NO: 2772840 - RNA, 19 nt, Artificial Sequence
  Description of Artificial Sequence: Synthetic oligonucleotide
ggugccaacuggggucaua

SEQ ID NO: 2772841 - RNA, 19 nt, Artificial Sequence
  Description of Artificial Sequence: Synthetic oligonucleotide
cggaccccugaccgguggc

SEQ ID NO: 2772842 - RNA, 19 nt, Artificial Sequence
  Description of Artificial Sequence: Synthetic oligonucleotide
guccuguuucaaagaccau

SEQ ID NO: 2772843 - RNA, 19 nt, Artificial Sequence
  Description of Artificial Sequence: Synthetic oligonucleotide
uggccuccugaggguccau

SEQ ID NO: 2772844 - RNA, 19 nt, Artificial Sequence
  Description of Artificial Sequence: Synthetic oligonucleotide
cguuggggaccugccgcgc

SEQ ID NO: 2772845 - RNA, 19 nt, Artificial Sequence
  Description of Artificial Sequence: Synthetic oligonucleotide
gcgguggauggugccaacu

SEQ ID NO: 2772846 - RNA, 19 nt, Artificial Sequence
  Description of Artificial Sequence: Synthetic oligonucleotide
gcuccacuggcuagucggu

SEQ ID NO: 2772847 - RNA, 19 nt, Artificial Sequence
  Description of Artificial Sequence: Synthetic oligonucleotide
ccugaccgguggccuccug

SEQ ID NO: 2772848 - RNA, 19 nt, Artificial Sequence
  Description of Artificial Sequence: Synthetic oligonucleotide
cgccgcccacagcuaggcg

SEQ ID NO: 2772849 - RNA, 19 nt, Artificial Sequence
  Description of Artificial Sequence: Synthetic oligonucleotide
cuaggcgaccggggacacu

SEQ ID NO: 2772850 - RNA, 19 nt, Artificial Sequence
  Description of Artificial Sequence: Synthetic oligonucleotide
gccggaccccugaccggug

SEQ ID NO: 2772851 - RNA, 19 nt, Artificial Sequence
  Description of Artificial Sequence: Synthetic oligonucleotide
cccucauugugggcaggaa

SEQ ID NO: 2772852 - RNA, 19 nt, Artificial Sequence
  Description of Artificial Sequence: Synthetic oligonucleotide
gccgcgcacuuggcucgcc

SEQ ID NO: 2772853 - RNA, 19 nt, Artificial Sequence
  Description of Artificial Sequence: Synthetic oligonucleotide
gccuccgcguuggggaccu

SEQ ID NO: 2772854 - RNA, 19 nt, Artificial Sequence
  Description of Artificial Sequence: Synthetic oligonucleotide
cacuggcuagucgguccau

SEQ ID NO: 2772855 - RNA, 19 nt, Artificial Sequence
  Description of Artificial Sequence: Synthetic oligonucleotide
cggcaucguaaggguuccc

SEQ ID NO: 2772856 - RNA, 19 nt, Artificial Sequence
  Description of Artificial Sequence: Synthetic oligonucleotide
ggggaccugccgcgcacuu

SEQ ID NO: 2772857 - RNA, 19 nt, Artificial Sequence
  Description of Artificial Sequence: Synthetic oligonucleotide
ccaugccccgccgcccaca

SEQ ID NO: 2772858 - RNA, 19 nt, Artificial Sequence
  Description of Artificial Sequence: Synthetic oligonucleotide
ggguucccuuggucugcuu

SEQ ID NO: 2772859 - RNA, 19 nt, Artificial Sequence
  Description of Artificial Sequence: Synthetic oligonucleotide
cgccggaccccugaccggu

SEQ ID NO: 2772860 - RNA, 19 nt, Artificial Sequence
  Description of Artificial Sequence: Synthetic oligonucleotide
gccccgccgcccacagcua

SEQ ID NO: 2772861 - RNA, 19 nt, Artificial Sequence
  Description of Artificial Sequence: Synthetic oligonucleotide
ccuccgcguuggggaccug

SEQ ID NO: 2772862 - RNA, 19 nt, Artificial Sequence
  Description of Artificial Sequence: Synthetic oligonucleotide
cccugaccgguggccuccu

SEQ ID NO: 2772863 - RNA, 19 nt, Artificial Sequence
  Description of Artificial Sequence: Synthetic oligonucleotide
gaaagguggacugaggagg

SEQ ID NO: 2772864 - RNA, 19 nt, Artificial Sequence
  Description of Artificial Sequence: Synthetic oligonucleotide
agaaucauagggaacauca

SEQ ID NO: 2772865 - RNA, 19 nt, Artificial Sequence
  Description of Artificial Sequence: Synthetic oligonucleotide
gaugaggaaagguggacug

SEQ ID NO: 2772866 - RNA, 19 nt, Artificial Sequence
  Description of Artificial Sequence: Synthetic oligonucleotide
cauagaaucauagggaaca

SEQ ID NO: 2772867 - RNA, 19 nt, Artificial Sequence
  Description of Artificial Sequence: Synthetic oligonucleotide
aggaaagguggacugagga

SEQ ID NO: 2772868 - RNA, 19 nt, Artificial Sequence
  Description of Artificial Sequence: Synthetic oligonucleotide
ugaggaaagguggacugag

SEQ ID NO: 2772869 - RNA, 19 nt, Artificial Sequence
  Description of Artificial Sequence: Synthetic oligonucleotide
ucagggcaaugacagcagg

SEQ ID NO: 2772870 - RNA, 19 nt, Artificial Sequence
  Description of Artificial Sequence: Synthetic oligonucleotide
gaaggucugguccuccacc

SEQ ID NO: 2772871 - RNA, 19 nt, Artificial Sequence
  Description of Artificial Sequence: Synthetic oligonucleotide
gacacagcugcagagaguc

SEQ ID NO: 2772872 - RNA, 19 nt, Artificial Sequence
  Description of Artificial Sequence: Synthetic oligonucleotide
agcugcagagagucaaccg

SEQ ID NO: 2772873 - RNA, 19 nt, Artificial Sequence
  Description of Artificial Sequence: Synthetic oligonucleotide
ccaugaugaggaaaggugg

SEQ ID NO: 2772874 - RNA, 19 nt, Artificial Sequence
  Description of Artificial Sequence: Synthetic oligonucleotide
agagaucgcccacuucugg

SEQ ID NO: 2772875 - RNA, 19 nt, Artificial Sequence
  Description of Artificial Sequence: Synthetic oligonucleotide
aucguccugagucuguucu

SEQ ID NO: 2772876 - RNA, 19 nt, Artificial Sequence
  Description of Artificial Sequence: Synthetic oligonucleotide
aaggucugguccuccacca

SEQ ID NO: 2772877 - RNA, 19 nt, Artificial Sequence
  Description of Artificial Sequence: Synthetic oligonucleotide
gaaucauagggaacaucag

SEQ ID NO: 2772878 - RNA, 19 nt, Artificial Sequence
  Description of Artificial Sequence: Synthetic oligonucleotide
agaaggucugguccuccac

SEQ ID NO: 2772879 - RNA, 19 nt, Artificial Sequence
  Description of Artificial Sequence: Synthetic oligonucleotide
augaugaggaaagguggac

SEQ ID NO: 2772880 - RNA, 19 nt, Artificial Sequence
  Description of Artificial Sequence: Synthetic oligonucleotide
ugaugaggaaagguggacu

SEQ ID NO: 2772881 - RNA, 19 nt, Artificial Sequence
  Description of Artificial Sequence: Synthetic oligonucleotide
uccuccaccagccuccauc

SEQ ID NO: 2772882 - RNA, 19 nt, Artificial Sequence
  Description of Artificial Sequence: Synthetic oligonucleotide
cagacacagcugcagagag

SEQ ID NO: 2772883 - RNA, 19 nt, Artificial Sequence
  Description of Artificial Sequence: Synthetic oligonucleotide
aucgcccacuucuggaagg

SEQ ID NO: 2772884 - RNA, 19 nt, Artificial Sequence
  Description of Artificial Sequence: Synthetic oligonucleotide
accaccagagaucgcccac

SEQ ID NO: 2772885 - RNA, 19 nt, Artificial Sequence
  Description of Artificial Sequence: Synthetic oligonucleotide
ggaaagguggacugaggag

SEQ ID NO: 2772886 - RNA, 19 nt, Artificial Sequence
  Description of Artificial Sequence: Synthetic oligonucleotide
ucagacacagcugcagaga

SEQ ID NO: 2772887 - RNA, 19 nt, Artificial Sequence
  Description of Artificial Sequence: Synthetic oligonucleotide
  modified_base (5)..(5): a, c, u, g, unknown or other
ugggnucccaauucuucac

SEQ ID NO: 2772888 - RNA, 19 nt, Artificial Sequence
  Description of Artificial Sequence: Synthetic oligonucleotide
gaucgcccacuucuggaag

SEQ ID NO: 2772889 - RNA, 19 nt, Artificial Sequence
  Description of Artificial Sequence: Synthetic oligonucleotide
ugccaugaugaggaaaggu

SEQ ID NO: 2772890 - RNA, 19 nt, Artificial Sequence
  Description of Artificial Sequence: Synthetic oligonucleotide
gaggaaagguggacugagg

SEQ ID NO: 2772891 - RNA, 19 nt, Artificial Sequence
  Description of Artificial Sequence: Synthetic oligonucleotide
gagaucgcccacuucugga

SEQ ID NO: 2772892 - RNA, 19 nt, Artificial Sequence
  Description of Artificial Sequence: Synthetic oligonucleotide
gccaugaugaggaaaggug

SEQ ID NO: 2772893 - RNA, 19 nt, Artificial Sequence
  Description of Artificial Sequence: Synthetic oligonucleotide
uagaaucauagggaacauc

SEQ ID NO: 2772894 - RNA, 19 nt, Artificial Sequence
  Description of Artificial Sequence: Synthetic oligonucleotide
  modified_base (6)..(6): a, c, u, g, unknown or other
cugggnucccaauucuuca

SEQ ID NO: 2772895 - RNA, 19 nt, Artificial Sequence
  Description of Artificial Sequence: Synthetic oligonucleotide
agaucgcccacuucuggaa

SEQ ID NO: 2772896 - RNA, 19 nt, Artificial Sequence
  Description of Artificial Sequence: Synthetic oligonucleotide
ggcaccaccagagaucgcc

SEQ ID NO: 2772897 - RNA, 19 nt, Artificial Sequence
  Description of Artificial Sequence: Synthetic oligonucleotide
uccaucguccugagucugu

SEQ ID NO: 2772898 - RNA, 19 nt, Artificial Sequence
  Description of Artificial Sequence: Synthetic oligonucleotide
cagagaucgcccacuucug

SEQ ID NO: 2772899 - RNA, 19 nt, Artificial Sequence
  Description of Artificial Sequence: Synthetic oligonucleotide
auagaaucauagggaacau

SEQ ID NO: 2772900 - RNA, 19 nt, Artificial Sequence
  Description of Artificial Sequence: Synthetic oligonucleotide
gucugguccuccaccagcc

SEQ ID NO: 2772901 - RNA, 19 nt, Artificial Sequence
  Description of Artificial Sequence: Synthetic oligonucleotide
gucagggcaaugacagcag

SEQ ID NO: 2772902 - RNA, 19 nt, Artificial Sequence
  Description of Artificial Sequence: Synthetic oligonucleotide
aagguggacugaggaggag

SEQ ID NO: 2772903 - RNA, 19 nt, Artificial Sequence
  Description of Artificial Sequence: Synthetic oligonucleotide
ggucugguccuccaccagc

SEQ ID NO: 2772904 - RNA, 19 nt, Artificial Sequence
  Description of Artificial Sequence: Synthetic oligonucleotide
ccauagaaucauagggaac

SEQ ID NO: 2772905 - RNA, 19 nt, Artificial Sequence
  Description of Artificial Sequence: Synthetic oligonucleotide
  modified_base (8)..(8): a, c, u, g, unknown or other
ugcugggnucccaauucuu

SEQ ID NO: 2772906 - RNA, 19 nt, Artificial Sequence
  Description of Artificial Sequence: Synthetic oligonucleotide
cagcugcagagagucaacc

SEQ ID NO: 2772907 - RNA, 19 nt, Artificial Sequence
  Description of Artificial Sequence: Synthetic oligonucleotide
ccuccaccagccuccaucg

SEQ ID NO: 2772908 - RNA, 19 nt, Artificial Sequence
  Description of Artificial Sequence: Synthetic oligonucleotide
augaggaaagguggacuga

SEQ ID NO: 2772909 - RNA, 19 nt, Artificial Sequence
  Description of Artificial Sequence: Synthetic oligonucleotide
ucugguccuccaccagccu

SEQ ID NO: 2772910 - RNA, 19 nt, Artificial Sequence
  Description of Artificial Sequence: Synthetic oligonucleotide
ccaccagccuccaucgucc

SEQ ID NO: 2772911 - RNA, 19 nt, Artificial Sequence
  Description of Artificial Sequence: Synthetic oligonucleotide
aggucugguccuccaccag

SEQ ID NO: 2772912 - RNA, 19 nt, Artificial Sequence
  Description of Artificial Sequence: Synthetic oligonucleotide
cccauagaaucauagggaa

SEQ ID NO: 2772913 - RNA, 19 nt, Artificial Sequence
  Description of Artificial Sequence: Synthetic oligonucleotide
gcccauagaaucauaggga

SEQ ID NO: 2772914 - RNA, 19 nt, Artificial Sequence
  Description of Artificial Sequence: Synthetic oligonucleotide
  modified_base (4)..(4): a, c, u, g, unknown or other
gggnucccaauucuucaca

SEQ ID NO: 2772915 - RNA, 19 nt, Artificial Sequence
  Description of Artificial Sequence: Synthetic oligonucleotide
  modified_base (7)..(7): a, c, u, g, unknown or other
gcugggnucccaauucuuc

SEQ ID NO: 2772916 - RNA, 19 nt, Artificial Sequence
  Description of Artificial Sequence: Synthetic oligonucleotide
gcugcagagagucaaccgu

SEQ ID NO: 2772917 - RNA, 19 nt, Artificial Sequence
  Description of Artificial Sequence: Synthetic oligonucleotide
caucguccugagucuguuc

SEQ ID NO: 2772918 - RNA, 19 nt, Artificial Sequence
  Description of Artificial Sequence: Synthetic oligonucleotide
  modified_base (2)..(2): a, c, u, g, unknown or other
gnucccaauucuucacauu

SEQ ID NO: 2772919 - RNA, 19 nt, Artificial Sequence
  Description of Artificial Sequence: Synthetic oligonucleotide
ccagagaucgcccacuucu

SEQ ID NO: 2772920 - RNA, 19 nt, Artificial Sequence
  Description of Artificial Sequence: Synthetic oligonucleotide
ucgcccacuucuggaaggu

SEQ ID NO: 2772921 - RNA, 19 nt, Artificial Sequence
  Description of Artificial Sequence: Synthetic oligonucleotide
agggaacaucagacacagc

SEQ ID NO: 2772922 - RNA, 19 nt, Artificial Sequence
  Description of Artificial Sequence: Synthetic oligonucleotide
ucguccugagucuguucuu

SEQ ID NO: 2772923 - RNA, 19 nt, Artificial Sequence
  Description of Artificial Sequence: Synthetic oligonucleotide
cagaaggucugguccucca

SEQ ID NO: 2772924 - RNA, 19 nt, Artificial Sequence
  Description of Artificial Sequence: Synthetic oligonucleotide
cuccaucguccugagucug

SEQ ID NO: 2772925 - RNA, 19 nt, Artificial Sequence
  Description of Artificial Sequence: Synthetic oligonucleotide
gcaaugacagcaggguaga

SEQ ID NO: 2772926 - RNA, 19 nt, Artificial Sequence
  Description of Artificial Sequence: Synthetic oligonucleotide
caccaccagagaucgccca

SEQ ID NO: 2772927 - RNA, 19 nt, Artificial Sequence
  Description of Artificial Sequence: Synthetic oligonucleotide
  modified_base (9)..(9): a, c, u, g, unknown or other
gugcugggnucccaauucu

SEQ ID NO: 2772928 - RNA, 19 nt, Artificial Sequence
  Description of Artificial Sequence: Synthetic oligonucleotide
  modified_base (3)..(3): a, c, u, g, unknown or other
ggnucccaauucuucacau

SEQ ID NO: 2772929 - RNA, 19 nt, Artificial Sequence
  Description of Artificial Sequence: Synthetic oligonucleotide
cagccuccaucguccugag

SEQ ID NO: 2772930 - RNA, 19 nt, Artificial Sequence
  Description of Artificial Sequence: Synthetic oligonucleotide
ccagccuccaucguccuga

SEQ ID NO: 2772931 - RNA, 19 nt, Artificial Sequence
  Description of Artificial Sequence: Synthetic oligonucleotide
gcaccaccagagaucgccc

SEQ ID NO: 2772932 - RNA, 19 nt, Artificial Sequence
  Description of Artificial Sequence: Synthetic oligonucleotide
aggcaccaccagagaucgc

SEQ ID NO: 2772933 - RNA, 19 nt, Artificial Sequence
  Description of Artificial Sequence: Synthetic oligonucleotide
agccuccaucguccugagu

SEQ ID NO: 2772934 - RNA, 19 nt, Artificial Sequence
  Description of Artificial Sequence: Synthetic oligonucleotide
caaugacagcaggguagaa

SEQ ID NO: 2772935 - RNA, 19 nt, Artificial Sequence
  Description of Artificial Sequence: Synthetic oligonucleotide
ccuccaucguccugagucu

SEQ ID NO: 2772936 - RNA, 19 nt, Artificial Sequence
  Description of Artificial Sequence: Synthetic oligonucleotide
caccagagaucgcccacuu

SEQ ID NO: 2772937 - RNA, 19 nt, Artificial Sequence
  Description of Artificial Sequence: Synthetic oligonucleotide
caccagccuccaucguccu

SEQ ID NO: 2772938 - RNA, 19 nt, Artificial Sequence
  Description of Artificial Sequence: Synthetic oligonucleotide
cuccaccagccuccaucgu

SEQ ID NO: 2772939 - RNA, 19 nt, Artificial Sequence
  Description of Artificial Sequence: Synthetic oligonucleotide
ccaccagagaucgcccacu

SEQ ID NO: 2772940 - RNA, 19 nt, Artificial Sequence
  Description of Artificial Sequence: Synthetic oligonucleotide
guccuccaccagccuccau

SEQ ID NO: 2772941 - RNA, 19 nt, Artificial Sequence
  Description of Artificial Sequence: Synthetic oligonucleotide
ccaucguccugagucuguu

SEQ ID NO: 2772942 - RNA, 19 nt, Artificial Sequence
  Description of Artificial Sequence: Synthetic oligonucleotide
ucuaaaagaauguauuggg

SEQ ID NO: 2772943 - RNA, 19 nt, Artificial Sequence
  Description of Artificial Sequence: Synthetic oligonucleotide
aauguauugggccucuugg

SEQ ID NO: 2772944 - RNA, 19 nt, Artificial Sequence
  Description of Artificial Sequence: Synthetic oligonucleotide
aauuguuucacagcuggcc

SEQ ID NO: 2772945 - RNA, 19 nt, Artificial Sequence
  Description of Artificial Sequence: Synthetic oligonucleotide
uaaaagaauguauugggcc

SEQ ID NO: 2772946 - RNA, 19 nt, Artificial Sequence
  Description of Artificial Sequence: Synthetic oligonucleotide
aaguucuucacacgaagcg

SEQ ID NO: 2772947 - RNA, 19 nt, Artificial Sequence
  Description of Artificial Sequence: Synthetic oligonucleotide
uccgcaauaaacuaucucc

SEQ ID NO: 2772948 - RNA, 19 nt, Artificial Sequence
  Description of Artificial Sequence: Synthetic oligonucleotide
aaaagaauguauugggccu

SEQ ID NO: 2772949 - RNA, 19 nt, Artificial Sequence
  Description of Artificial Sequence: Synthetic oligonucleotide
ucuguggucuaaaagaaug

SEQ ID NO: 2772950 - RNA, 19 nt, Artificial Sequence
  Description of Artificial Sequence: Synthetic oligonucleotide
uaaacuaucuccccggaug

SEQ ID NO: 2772951 - RNA, 19 nt, Artificial Sequence
  Description of Artificial Sequence: Synthetic oligonucleotide
aaaauaccagaaucgcgac

SEQ ID NO: 2772952 - RNA, 19 nt, Artificial Sequence
  Description of Artificial Sequence: Synthetic oligonucleotide
ucauuauguguauugagug

SEQ ID NO: 2772953 - RNA, 19 nt, Artificial Sequence
  Description of Artificial Sequence: Synthetic oligonucleotide
gacacaaaauaccagaauc

SEQ ID NO: 2772954 - RNA, 19 nt, Artificial Sequence
  Description of Artificial Sequence: Synthetic oligonucleotide
auuucucaaacaccugucc

SEQ ID NO: 2772955 - RNA, 19 nt, Artificial Sequence
  Description of Artificial Sequence: Synthetic oligonucleotide
uuaucuucgagucauggaa

SEQ ID NO: 2772956 - RNA, 19 nt, Artificial Sequence
  Description of Artificial Sequence: Synthetic oligonucleotide
uuucucaaacaccuguccg

SEQ ID NO: 2772957 - RNA, 19 nt, Artificial Sequence
  Description of Artificial Sequence: Synthetic oligonucleotide
uucauuauguguauugagu

SEQ ID NO: 2772958 - RNA, 19 nt, Artificial Sequence
  Description of Artificial Sequence: Synthetic oligonucleotide
auuauguguauugagugcg

SEQ ID NO: 2772959 - RNA, 19 nt, Artificial Sequence
  Description of Artificial Sequence: Synthetic oligonucleotide
ugagacacaaaauaccaga

SEQ ID NO: 2772960 - RNA, 19 nt, Artificial Sequence
  Description of Artificial Sequence: Synthetic oligonucleotide
ucauagcgcaaccaaaucc

SEQ ID NO: 2772961 - RNA, 19 nt, Artificial Sequence
  Description of Artificial Sequence: Synthetic oligonucleotide
ucagcugagacacaaaaua

SEQ ID NO: 2772962 - RNA, 19 nt, Artificial Sequence
  Description of Artificial Sequence: Synthetic oligonucleotide
cuaaaagaauguauugggc

SEQ ID NO: 2772963 - RNA, 19 nt, Artificial Sequence
  Description of Artificial Sequence: Synthetic oligonucleotide
ugauuucucaaacaccugu

SEQ ID NO: 2772964 - RNA, 19 nt, Artificial Sequence
  Description of Artificial Sequence: Synthetic oligonucleotide
uguguauugagugcgcacg

SEQ ID NO: 2772965 - RNA, 19 nt, Artificial Sequence
  Description of Artificial Sequence: Synthetic oligonucleotide
cauagcgcaaccaaauccc

SEQ ID NO: 2772966 - RNA, 19 nt, Artificial Sequence
  Description of Artificial Sequence: Synthetic oligonucleotide
auggaauuguuucacagcu

SEQ ID NO: 2772967 - RNA, 19 nt, Artificial Sequence
  Description of Artificial Sequence: Synthetic oligonucleotide
gucuaaaagaauguauugg

SEQ ID NO: 2772968 - RNA, 19 nt, Artificial Sequence
  Description of Artificial Sequence: Synthetic oligonucleotide
caauaaacuaucuccccgg

SEQ ID NO: 2772969 - RNA, 19 nt, Artificial Sequence
  Description of Artificial Sequence: Synthetic oligonucleotide
caaaauaccagaaucgcga

SEQ ID NO: 2772970 - RNA, 19 nt, Artificial Sequence
  Description of Artificial Sequence: Synthetic oligonucleotide
ggaauuguuucacagcugg

SEQ ID NO: 2772971 - RNA, 19 nt, Artificial Sequence
  Description of Artificial Sequence: Synthetic oligonucleotide
agcacuggguaacagcgcc

SEQ ID NO: 2772972 - RNA, 19 nt, Artificial Sequence
  Description of Artificial Sequence: Synthetic oligonucleotide
uccucaaccuucauuaugu

SEQ ID NO: 2772973 - RNA, 19 nt, Artificial Sequence
  Description of Artificial Sequence: Synthetic oligonucleotide
acacaaaauaccagaaucg

SEQ ID NO: 2772974 - RNA, 19 nt, Artificial Sequence
  Description of Artificial Sequence: Synthetic oligonucleotide
uguauugggccucuuggug

SEQ ID NO: 2772975 - RNA, 19 nt, Artificial Sequence
  Description of Artificial Sequence: Synthetic oligonucleotide
aagcggugauuucucaaac

SEQ ID NO: 2772976 - RNA, 19 nt, Artificial Sequence
  Description of Artificial Sequence: Synthetic oligonucleotide
cauuauguguauugagugc

SEQ ID NO: 2772977 - RNA, 19 nt, Artificial Sequence
  Description of Artificial Sequence: Synthetic oligonucleotide
aaagaauguauugggccuc

SEQ ID NO: 2772978 - RNA, 19 nt, Artificial Sequence
  Description of Artificial Sequence: Synthetic oligonucleotide
auagcacuggguaacagcg

SEQ ID NO: 2772979 - RNA, 19 nt, Artificial Sequence
  Description of Artificial Sequence: Synthetic oligonucleotide
aucccgaaguucuucacac

SEQ ID NO: 2772980 - RNA, 19 nt, Artificial Sequence
  Description of Artificial Sequence: Synthetic oligonucleotide
gauagcacuggguaacagc

SEQ ID NO: 2772981 - RNA, 19 nt, Artificial Sequence
  Description of Artificial Sequence: Synthetic oligonucleotide
aauaccagaaucgcgacuu

SEQ ID NO: 2772982 - RNA, 19 nt, Artificial Sequence
  Description of Artificial Sequence: Synthetic oligonucleotide
aaacuaucuccccggauga

SEQ ID NO: 2772983 - RNA, 19 nt, Artificial Sequence
  Description of Artificial Sequence: Synthetic oligonucleotide
uggucuaaaagaauguauu

SEQ ID NO: 2772984 - RNA, 19 nt, Artificial Sequence
  Description of Artificial Sequence: Synthetic oligonucleotide
uucucaaacaccuguccgc

SEQ ID NO: 2772985 - RNA, 19 nt, Artificial Sequence
  Description of Artificial Sequence: Synthetic oligonucleotide
cuucauuauguguauugag

SEQ ID NO: 2772986 - RNA, 19 nt, Artificial Sequence
  Description of Artificial Sequence: Synthetic oligonucleotide
aacuuuaucuucgagucau

SEQ ID NO: 2772987 - RNA, 19 nt, Artificial Sequence
  Description of Artificial Sequence: Synthetic oligonucleotide
aauaaacuaucuccccgga

SEQ ID NO: 2772988 - RNA, 19 nt, Artificial Sequence
  Description of Artificial Sequence: Synthetic oligonucleotide
ucccuguacauguuguggg

SEQ ID NO: 2772989 - RNA, 19 nt, Artificial Sequence
  Description of Artificial Sequence: Synthetic oligonucleotide
guauugggccucuuggugg

SEQ ID NO: 2772990 - RNA, 19 nt, Artificial Sequence
  Description of Artificial Sequence: Synthetic oligonucleotide
uuuaucuucgagucaugga

SEQ ID NO: 2772991 - RNA, 19 nt, Artificial Sequence
  Description of Artificial Sequence: Synthetic oligonucleotide
cauggaauuguuucacagc

SEQ ID NO: 2772992 - RNA, 19 nt, Artificial Sequence
  Description of Artificial Sequence: Synthetic oligonucleotide
cuugguggugaaucgaggc

SEQ ID NO: 2772993 - RNA, 19 nt, Artificial Sequence
  Description of Artificial Sequence: Synthetic oligonucleotide
acaaaauaccagaaucgcg

SEQ ID NO: 2772994 - RNA, 19 nt, Artificial Sequence
  Description of Artificial Sequence: Synthetic oligonucleotide
aucuccucaaccuucauua

SEQ ID NO: 2772995 - RNA, 19 nt, Artificial Sequence
  Description of Artificial Sequence: Synthetic oligonucleotide
gaaucgaggcuuguguugg

SEQ ID NO: 2772996 - RNA, 19 nt, Artificial Sequence
  Description of Artificial Sequence: Synthetic oligonucleotide
accuucauuauguguauug

SEQ ID NO: 2772997 - RNA, 19 nt, Artificial Sequence
  Description of Artificial Sequence: Synthetic oligonucleotide
aaccaaaucccgaaguucu

SEQ ID NO: 2772998 - RNA, 19 nt, Artificial Sequence
  Description of Artificial Sequence: Synthetic oligonucleotide
auugagugcgcacgggcac

SEQ ID NO: 2772999 - RNA, 19 nt, Artificial Sequence
  Description of Artificial Sequence: Synthetic oligonucleotide
ggaacuuuaucuucgaguc

SEQ ID NO: 2773000 - RNA, 19 nt, Artificial Sequence
  Description of Artificial Sequence: Synthetic oligonucleotide
ucuugguggugaaucgagg

SEQ ID NO: 2773001 - RNA, 19 nt, Artificial Sequence
  Description of Artificial Sequence: Synthetic oligonucleotide
auuguuucacagcuggccu

SEQ ID NO: 2773002 - RNA, 19 nt, Artificial Sequence
  Description of Artificial Sequence: Synthetic oligonucleotide
aaucccgaaguucuucaca

SEQ ID NO: 2773003 - RNA, 19 nt, Artificial Sequence
  Description of Artificial Sequence: Synthetic oligonucleotide
ugaaucgaggcuuguguug

SEQ ID NO: 2773004 - RNA, 19 nt, Artificial Sequence
  Description of Artificial Sequence: Synthetic oligonucleotide
aguucuucacacgaagcgg

SEQ ID NO: 2773005 - RNA, 19 nt, Artificial Sequence
  Description of Artificial Sequence: Synthetic oligonucleotide
cacaaaauaccagaaucgc

SEQ ID NO: 2773006 - RNA, 19 nt, Artificial Sequence
  Description of Artificial Sequence: Synthetic oligonucleotide
acaccuguccgcaauaaac

SEQ ID NO: 2773007 - RNA, 19 nt, Artificial Sequence
  Description of Artificial Sequence: Synthetic oligonucleotide
gcaauaaacuaucuccccg

SEQ ID NO: 2773008 - RNA, 19 nt, Artificial Sequence
  Description of Artificial Sequence: Synthetic oligonucleotide
agucauggaauuguuucac

SEQ ID NO: 2773009 - RNA, 19 nt, Artificial Sequence
  Description of Artificial Sequence: Synthetic oligonucleotide
uauugagugcgcacgggca

SEQ ID NO: 2773010 - RNA, 19 nt, Artificial Sequence
  Description of Artificial Sequence: Synthetic oligonucleotide
uggccuucggcacuugccg

SEQ ID NO: 2773011 - RNA, 19 nt, Artificial Sequence
  Description of Artificial Sequence: Synthetic oligonucleotide
aaauaccagaaucgcgacu

SEQ ID NO: 2773012 - RNA, 19 nt, Artificial Sequence
  Description of Artificial Sequence: Synthetic oligonucleotide
cuuuaucuucgagucaugg

SEQ ID NO: 2773013 - RNA, 19 nt, Artificial Sequence
  Description of Artificial Sequence: Synthetic oligonucleotide
auguguauugagugcgcac

SEQ ID NO: 2773014 - RNA, 19 nt, Artificial Sequence
  Description of Artificial Sequence: Synthetic oligonucleotide
uguggugaggucccgguac

SEQ ID NO: 2773015 - RNA, 19 nt, Artificial Sequence
  Description of Artificial Sequence: Synthetic oligonucleotide
aaucgaggcuuguguuggc

SEQ ID NO: 2773016 - RNA, 19 nt, Artificial Sequence
  Description of Artificial Sequence: Synthetic oligonucleotide
gaauguauugggccucuug

SEQ ID NO: 2773017 - RNA, 19 nt, Artificial Sequence
  Description of Artificial Sequence: Synthetic oligonucleotide
uuauguguauugagugcgc

SEQ ID NO: 2773018 - RNA, 19 nt, Artificial Sequence
  Description of Artificial Sequence: Synthetic oligonucleotide
uucacagcuggccuucggc

SEQ ID NO: 2773019 - RNA, 19 nt, Artificial Sequence
  Description of Artificial Sequence: Synthetic oligonucleotide
ggucuaaaagaauguauug

SEQ ID NO: 2773020 - RNA, 19 nt, Artificial Sequence
  Description of Artificial Sequence: Synthetic oligonucleotide
gaaguucuucacacgaagc

SEQ ID NO: 2773021 - RNA, 19 nt, Artificial Sequence
  Description of Artificial Sequence: Synthetic oligonucleotide
cugagacacaaaauaccag

SEQ ID NO: 2773022 - RNA, 19 nt, Artificial Sequence
  Description of Artificial Sequence: Synthetic oligonucleotide
cuguacauguugugggugc

SEQ ID NO: 2773023 - RNA, 19 nt, Artificial Sequence
  Description of Artificial Sequence: Synthetic oligonucleotide
ucaaacaccuguccgcaau

SEQ ID NO: 2773024 - RNA, 19 nt, Artificial Sequence
  Description of Artificial Sequence: Synthetic oligonucleotide
guauugagugcgcacgggc

SEQ ID NO: 2773025 - RNA, 19 nt, Artificial Sequence
  Description of Artificial Sequence: Synthetic oligonucleotide
uuggcgccgcaacacacgg

SEQ ID NO: 2773026 - RNA, 19 nt, Artificial Sequence
  Description of Artificial Sequence: Synthetic oligonucleotide
uguauugagugcgcacggg

SEQ ID NO: 2773027 - RNA, 19 nt, Artificial Sequence
  Description of Artificial Sequence: Synthetic oligonucleotide
uggaauuguuucacagcug

SEQ ID NO: 2773028 - RNA, 19 nt, Artificial Sequence
  Description of Artificial Sequence: Synthetic oligonucleotide
uugguggugaaucgaggcu

SEQ ID NO: 2773029 - RNA, 19 nt, Artificial Sequence
  Description of Artificial Sequence: Synthetic oligonucleotide
uugugggugccgcuucugg

SEQ ID NO: 2773030 - RNA, 19 nt, Artificial Sequence
  Description of Artificial Sequence: Synthetic oligonucleotide
uaucuucgagucauggaau

SEQ ID NO: 2773031 - RNA, 19 nt, Artificial Sequence
  Description of Artificial Sequence: Synthetic oligonucleotide
uucagcugagacacaaaau

SEQ ID NO: 2773032 - RNA, 19 nt, Artificial Sequence
  Description of Artificial Sequence: Synthetic oligonucleotide
guguauugagugcgcacgg

SEQ ID NO: 2773033 - RNA, 19 nt, Artificial Sequence
  Description of Artificial Sequence: Synthetic oligonucleotide
gagucauggaauuguuuca

SEQ ID NO: 2773034 - RNA, 19 nt, Artificial Sequence
  Description of Artificial Sequence: Synthetic oligonucleotide
cucuugguggugaaucgag

SEQ ID NO: 2773035 - RNA, 19 nt, Artificial Sequence
  Description of Artificial Sequence: Synthetic oligonucleotide
agacacaaaauaccagaau

SEQ ID NO: 2773036 - RNA, 19 nt, Artificial Sequence
  Description of Artificial Sequence: Synthetic oligonucleotide
ucuggagucauagcgcaac

SEQ ID NO: 2773037 - RNA, 19 nt, Artificial Sequence
  Description of Artificial Sequence: Synthetic oligonucleotide
uuucacagcuggccuucgg

SEQ ID NO: 2773038 - RNA, 19 nt, Artificial Sequence
  Description of Artificial Sequence: Synthetic oligonucleotide
ucucaaacaccuguccgca

SEQ ID NO: 2773039 - RNA, 19 nt, Artificial Sequence
  Description of Artificial Sequence: Synthetic oligonucleotide
cuguccgcaauaaacuauc

SEQ ID NO: 2773040 - RNA, 19 nt, Artificial Sequence
  Description of Artificial Sequence: Synthetic oligonucleotide
uacucccuguacauguugu

SEQ ID NO: 2773041 - RNA, 19 nt, Artificial Sequence
  Description of Artificial Sequence: Synthetic oligonucleotide
gauuucucaaacaccuguc

SEQ ID NO: 2773042 - RNA, 19 nt, Artificial Sequence
  Description of Artificial Sequence: Synthetic oligonucleotide
gaagcggugauuucucaaa

SEQ ID NO: 2773043 - RNA, 19 nt, Artificial Sequence
  Description of Artificial Sequence: Synthetic oligonucleotide
caugucucgauagcacugg

SEQ ID NO: 2773044 - RNA, 19 nt, Artificial Sequence
  Description of Artificial Sequence: Synthetic oligonucleotide
uauguguauugagugcgca

SEQ ID NO: 2773045 - RNA, 19 nt, Artificial Sequence
  Description of Artificial Sequence: Synthetic oligonucleotide
ugcgaucuccucaaccuuc

SEQ ID NO: 2773046 - RNA, 19 nt, Artificial Sequence
  Description of Artificial Sequence: Synthetic oligonucleotide
agcgggaacuuuaucuucg

SEQ ID NO: 2773047 - RNA, 19 nt, Artificial Sequence
  Description of Artificial Sequence: Synthetic oligonucleotide
ucacagcuggccuucggca

SEQ ID NO: 2773048 - RNA, 19 nt, Artificial Sequence
  Description of Artificial Sequence: Synthetic oligonucleotide
auguauugggccucuuggu

SEQ ID NO: 2773049 - RNA, 19 nt, Artificial Sequence
  Description of Artificial Sequence: Synthetic oligonucleotide
uguggucuaaaagaaugua

SEQ ID NO: 2773050 - RNA, 19 nt, Artificial Sequence
  Description of Artificial Sequence: Synthetic oligonucleotide
guaacagcgccugcugugg

SEQ ID NO: 2773051 - RNA, 19 nt, Artificial Sequence
  Description of Artificial Sequence: Synthetic oligonucleotide
uucuucacacgaagcggug

SEQ ID NO: 2773052 - RNA, 19 nt, Artificial Sequence
  Description of Artificial Sequence: Synthetic oligonucleotide
cucgauagcacuggguaac

SEQ ID NO: 2773053 - RNA, 19 nt, Artificial Sequence
  Description of Artificial Sequence: Synthetic oligonucleotide
aacuaucuccccggaugac

SEQ ID NO: 2773054 - RNA, 19 nt, Artificial Sequence
  Description of Artificial Sequence: Synthetic oligonucleotide
cucccuguacauguugugg

SEQ ID NO: 2773055 - RNA, 19 nt, Artificial Sequence
  Description of Artificial Sequence: Synthetic oligonucleotide
ucuucgagucauggaauug

SEQ ID NO: 2773056 - RNA, 19 nt, Artificial Sequence
  Description of Artificial Sequence: Synthetic oligonucleotide
uauugggccucuugguggu

SEQ ID NO: 2773057 - RNA, 19 nt, Artificial Sequence
  Description of Artificial Sequence: Synthetic oligonucleotide
uacauguugugggugccgc

SEQ ID NO: 2773058 - RNA, 19 nt, Artificial Sequence
  Description of Artificial Sequence: Synthetic oligonucleotide
ucccgaaguucuucacacg

SEQ ID NO: 2773059 - RNA, 19 nt, Artificial Sequence
  Description of Artificial Sequence: Synthetic oligonucleotide
gaugacuucuucauuuucu

SEQ ID NO: 2773060 - RNA, 19 nt, Artificial Sequence
  Description of Artificial Sequence: Synthetic oligonucleotide
agcgcaaccaaaucccgaa

SEQ ID NO: 2773061 - RNA, 19 nt, Artificial Sequence
  Description of Artificial Sequence: Synthetic oligonucleotide
acuggguaacagcgccugc

SEQ ID NO: 2773062 - RNA, 19 nt, Artificial Sequence
  Description of Artificial Sequence: Synthetic oligonucleotide
uguguuggcgccgcaacac

SEQ ID NO: 2773063 - RNA, 19 nt, Artificial Sequence
  Description of Artificial Sequence: Synthetic oligonucleotide
gaacuuuaucuucgaguca

SEQ ID NO: 2773064 - RNA, 19 nt, Artificial Sequence
  Description of Artificial Sequence: Synthetic oligonucleotide
ucucgauagcacuggguaa

SEQ ID NO: 2773065 - RNA, 19 nt, Artificial Sequence
  Description of Artificial Sequence: Synthetic oligonucleotide
cuuguguuggcgccgcaac

SEQ ID NO: 2773066 - RNA, 19 nt, Artificial Sequence
  Description of Artificial Sequence: Synthetic oligonucleotide
uguacauguugugggugcc

SEQ ID NO: 2773067 - RNA, 19 nt, Artificial Sequence
  Description of Artificial Sequence: Synthetic oligonucleotide
uguuggcgccgcaacacac

SEQ ID NO: 2773068 - RNA, 19 nt, Artificial Sequence
  Description of Artificial Sequence: Synthetic oligonucleotide
aacaccuguccgcaauaaa

SEQ ID NO: 2773069 - RNA, 19 nt, Artificial Sequence
  Description of Artificial Sequence: Synthetic oligonucleotide
cuucuggagucauagcgca

SEQ ID NO: 2773070 - RNA, 19 nt, Artificial Sequence
  Description of Artificial Sequence: Synthetic oligonucleotide
auaaacuaucuccccggau

SEQ ID NO: 2773071 - RNA, 19 nt, Artificial Sequence
  Description of Artificial Sequence: Synthetic oligonucleotide
gucucgauagcacugggua

SEQ ID NO: 2773072 - RNA, 19 nt, Artificial Sequence
  Description of Artificial Sequence: Synthetic oligonucleotide
aagaauguauugggccucu

SEQ ID NO: 2773073 - RNA, 19 nt, Artificial Sequence
  Description of Artificial Sequence: Synthetic oligonucleotide
agcggugauuucucaaaca

SEQ ID NO: 2773074 - RNA, 19 nt, Artificial Sequence
  Description of Artificial Sequence: Synthetic oligonucleotide
uguccgcaauaaacuaucu

SEQ ID NO: 2773075 - RNA, 19 nt, Artificial Sequence
  Description of Artificial Sequence: Synthetic oligonucleotide
cuccucaaccuucauuaug

SEQ ID NO: 2773076 - RNA, 19 nt, Artificial Sequence
  Description of Artificial Sequence: Synthetic oligonucleotide
ucgaggcuuguguuggcgc

SEQ ID NO: 2773077 - RNA, 19 nt, Artificial Sequence
  Description of Artificial Sequence: Synthetic oligonucleotide
augucucgauagcacuggg

SEQ ID NO: 2773078 - RNA, 19 nt, Artificial Sequence
  Description of Artificial Sequence: Synthetic oligonucleotide
cuucagcugagacacaaaa

SEQ ID NO: 2773079 - RNA, 19 nt, Artificial Sequence
  Description of Artificial Sequence: Synthetic oligonucleotide
auguugugggugccgcuuc

SEQ ID NO: 2773080 - RNA, 19 nt, Artificial Sequence
  Description of Artificial Sequence: Synthetic oligonucleotide
gaauuguuucacagcuggc

SEQ ID NO: 2773081 - RNA, 19 nt, Artificial Sequence
  Description of Artificial Sequence: Synthetic oligonucleotide
ggugauuucucaaacaccu

SEQ ID NO: 2773082 - RNA, 19 nt, Artificial Sequence
  Description of Artificial Sequence: Synthetic oligonucleotide
gugggugccgcuucuggag

SEQ ID NO: 2773083 - RNA, 19 nt, Artificial Sequence
  Description of Artificial Sequence: Synthetic oligonucleotide
ucccgguacucccuguaca

SEQ ID NO: 2773084 - RNA, 19 nt, Artificial Sequence
  Description of Artificial Sequence: Synthetic oligonucleotide
ugugggugccgcuucugga

SEQ ID NO: 2773085 - RNA, 19 nt, Artificial Sequence
  Description of Artificial Sequence: Synthetic oligonucleotide
uugagugcgcacgggcacg

SEQ ID NO: 2773086 - RNA, 19 nt, Artificial Sequence
  Description of Artificial Sequence: Synthetic oligonucleotide
auagcgcaaccaaaucccg

SEQ ID NO: 2773087 - RNA, 19 nt, Artificial Sequence
  Description of Artificial Sequence: Synthetic oligonucleotide
ccgcaauaaacuaucuccc

SEQ ID NO: 2773088 - RNA, 19 nt, Artificial Sequence
  Description of Artificial Sequence: Synthetic oligonucleotide
uagcgcaaccaaaucccga

SEQ ID NO: 2773089 - RNA, 19 nt, Artificial Sequence
  Description of Artificial Sequence: Synthetic oligonucleotide
caaccaaaucccgaaguuc

SEQ ID NO: 2773090 - RNA, 19 nt, Artificial Sequence
  Description of Artificial Sequence: Synthetic oligonucleotide
uucggcacuugccggcugc

SEQ ID NO: 2773091 - RNA, 19 nt, Artificial Sequence
  Description of Artificial Sequence: Synthetic oligonucleotide
gcggugauuucucaaacac

SEQ ID NO: 2773092 - RNA, 19 nt, Artificial Sequence
  Description of Artificial Sequence: Synthetic oligonucleotide
ucuucacacgaagcgguga

SEQ ID NO: 2773093 - RNA, 19 nt, Artificial Sequence
  Description of Artificial Sequence: Synthetic oligonucleotide
gguaacagcgccugcugug

SEQ ID NO: 2773094 - RNA, 19 nt, Artificial Sequence
  Description of Artificial Sequence: Synthetic oligonucleotide
acacgaagcggugauuucu

SEQ ID NO: 2773095 - RNA, 19 nt, Artificial Sequence
  Description of Artificial Sequence: Synthetic oligonucleotide
ucacacgaagcggugauuu

SEQ ID NO: 2773096 - RNA, 19 nt, Artificial Sequence
  Description of Artificial Sequence: Synthetic oligonucleotide
uagcacuggguaacagcgc

SEQ ID NO: 2773097 - RNA, 19 nt, Artificial Sequence
  Description of Artificial Sequence: Synthetic oligonucleotide
acuaucuccccggaugacu

SEQ ID NO: 2773098 - RNA, 19 nt, Artificial Sequence
  Description of Artificial Sequence: Synthetic oligonucleotide
acucccuguacauguugug

SEQ ID NO: 2773099 - RNA, 19 nt, Artificial Sequence
  Description of Artificial Sequence: Synthetic oligonucleotide
uucgagucauggaauuguu

SEQ ID NO: 2773100 - RNA, 19 nt, Artificial Sequence
  Description of Artificial Sequence: Synthetic oligonucleotide
gucauagcgcaaccaaauc

SEQ ID NO: 2773101 - RNA, 19 nt, Artificial Sequence
  Description of Artificial Sequence: Synthetic oligonucleotide
aucuucgagucauggaauu

SEQ ID NO: 2773102 - RNA, 19 nt, Artificial Sequence
  Description of Artificial Sequence: Synthetic oligonucleotide
cgcuucuggagucauagcg

SEQ ID NO: 2773103 - RNA, 19 nt, Artificial Sequence
  Description of Artificial Sequence: Synthetic oligonucleotide
uccccggaugacuucuuca

SEQ ID NO: 2773104 - RNA, 19 nt, Artificial Sequence
  Description of Artificial Sequence: Synthetic oligonucleotide
gcugagacacaaaauacca

SEQ ID NO: 2773105 - RNA, 19 nt, Artificial Sequence
  Description of Artificial Sequence: Synthetic oligonucleotide
cgagucauggaauuguuuc

SEQ ID NO: 2773106 - RNA, 19 nt, Artificial Sequence
  Description of Artificial Sequence: Synthetic oligonucleotide
ucuucagcugagacacaaa

SEQ ID NO: 2773107 - RNA, 19 nt, Artificial Sequence
  Description of Artificial Sequence: Synthetic oligonucleotide
guacucccuguacauguug

SEQ ID NO: 2773108 - RNA, 19 nt, Artificial Sequence
  Description of Artificial Sequence: Synthetic oligonucleotide
aucgaggcuuguguuggcg

SEQ ID NO: 2773109 - RNA, 19 nt, Artificial Sequence
  Description of Artificial Sequence: Synthetic oligonucleotide
uguugugggugccgcuucu

SEQ ID NO: 2773110 - RNA, 19 nt, Artificial Sequence
  Description of Artificial Sequence: Synthetic oligonucleotide
ucgagucauggaauuguuu

SEQ ID NO: 2773111 - RNA, 19 nt, Artificial Sequence
  Description of Artificial Sequence: Synthetic oligonucleotide
uggagucauagcgcaacca

SEQ ID NO: 2773112 - RNA, 19 nt, Artificial Sequence
  Description of Artificial Sequence: Synthetic oligonucleotide
cuggagucauagcgcaacc

SEQ ID NO: 2773113 - RNA, 19 nt, Artificial Sequence
  Description of Artificial Sequence: Synthetic oligonucleotide
gugaggucccgguacuccc

SEQ ID NO: 2773114 - RNA, 19 nt, Artificial Sequence
  Description of Artificial Sequence: Synthetic oligonucleotide
aaacaccuguccgcaauaa

SEQ ID NO: 2773115 - RNA, 19 nt, Artificial Sequence
  Description of Artificial Sequence: Synthetic oligonucleotide
gaggcuuguguuggcgccg

SEQ ID NO: 2773116 - RNA, 19 nt, Artificial Sequence
  Description of Artificial Sequence: Synthetic oligonucleotide
cuugccggcugcgaucucc

SEQ ID NO: 2773117 - RNA, 19 nt, Artificial Sequence
  Description of Artificial Sequence: Synthetic oligonucleotide
guccgcaauaaacuaucuc

SEQ ID NO: 2773118 - RNA, 19 nt, Artificial Sequence
  Description of Artificial Sequence: Synthetic oligonucleotide
uuguuucacagcuggccuu

SEQ ID NO: 2773119 - RNA, 19 nt, Artificial Sequence
  Description of Artificial Sequence: Synthetic oligonucleotide
guuggcgccgcaacacacg

SEQ ID NO: 2773120 - RNA, 19 nt, Artificial Sequence
  Description of Artificial Sequence: Synthetic oligonucleotide
guacauguugugggugccg

SEQ ID NO: 2773121 - RNA, 19 nt, Artificial Sequence
  Description of Artificial Sequence: Synthetic oligonucleotide
cacgaagcggugauuucuc

SEQ ID NO: 2773122 - RNA, 19 nt, Artificial Sequence
  Description of Artificial Sequence: Synthetic oligonucleotide
gucauggaauuguuucaca

SEQ ID NO: 2773123 - RNA, 19 nt, Artificial Sequence
  Description of Artificial Sequence: Synthetic oligonucleotide
uggugaaucgaggcuugug

SEQ ID NO: 2773124 - RNA, 19 nt, Artificial Sequence
  Description of Artificial Sequence: Synthetic oligonucleotide
ugaggucccgguacucccu

SEQ ID NO: 2773125 - RNA, 19 nt, Artificial Sequence
  Description of Artificial Sequence: Synthetic oligonucleotide
ugguggugaaucgaggcuu

SEQ ID NO: 2773126 - RNA, 19 nt, Artificial Sequence
  Description of Artificial Sequence: Synthetic oligonucleotide
cacagcuggccuucggcac

SEQ ID NO: 2773127 - RNA, 19 nt, Artificial Sequence
  Description of Artificial Sequence: Synthetic oligonucleotide
aacacacgguggggcagcg

SEQ ID NO: 2773128 - RNA, 19 nt, Artificial Sequence
  Description of Artificial Sequence: Synthetic oligonucleotide
agugcgcacgggcacggug

SEQ ID NO: 2773129 - RNA, 19 nt, Artificial Sequence
  Description of Artificial Sequence: Synthetic oligonucleotide
gggaacuuuaucuucgagu

SEQ ID NO: 2773130 - RNA, 19 nt, Artificial Sequence
  Description of Artificial Sequence: Synthetic oligonucleotide
ugagugcgcacgggcacgg

SEQ ID NO: 2773131 - RNA, 19 nt, Artificial Sequence
  Description of Artificial Sequence: Synthetic oligonucleotide
auaccagaaucgcgacuug

SEQ ID NO: 2773132 - RNA, 19 nt, Artificial Sequence
  Description of Artificial Sequence: Synthetic oligonucleotide
accuguccgcaauaaacua

SEQ ID NO: 2773133 - RNA, 19 nt, Artificial Sequence
  Description of Artificial Sequence: Synthetic oligonucleotide
uggggcagcgggaacuuua

SEQ ID NO: 2773134 - RNA, 19 nt, Artificial Sequence
  Description of Artificial Sequence: Synthetic oligonucleotide
ggcgccgcaacacacggug

SEQ ID NO: 2773135 - RNA, 19 nt, Artificial Sequence
  Description of Artificial Sequence: Synthetic oligonucleotide
uccucguucgccgccaguc

SEQ ID NO: 2773136 - RNA, 19 nt, Artificial Sequence
  Description of Artificial Sequence: Synthetic oligonucleotide
ggagucauagcgcaaccaa

SEQ ID NO: 2773137 - RNA, 19 nt, Artificial Sequence
  Description of Artificial Sequence: Synthetic oligonucleotide
ugggugccgcuucuggagu

SEQ ID NO: 2773138 - RNA, 19 nt, Artificial Sequence
  Description of Artificial Sequence: Synthetic oligonucleotide
gcuucuggagucauagcgc

SEQ ID NO: 2773139 - RNA, 19 nt, Artificial Sequence
  Description of Artificial Sequence: Synthetic oligonucleotide
ucgauagcacuggguaaca

SEQ ID NO: 2773140 - RNA, 19 nt, Artificial Sequence
  Description of Artificial Sequence: Synthetic oligonucleotide
ggugaaucgaggcuugugu

SEQ ID NO: 2773141 - RNA, 19 nt, Artificial Sequence
  Description of Artificial Sequence: Synthetic oligonucleotide
gccucuugguggugaaucg

SEQ ID NO: 2773142 - RNA, 19 nt, Artificial Sequence
  Description of Artificial Sequence: Synthetic oligonucleotide
cgaaguucuucacacgaag

SEQ ID NO: 2773143 - RNA, 19 nt, Artificial Sequence
  Description of Artificial Sequence: Synthetic oligonucleotide
ggcagcgggaacuuuaucu

SEQ ID NO: 2773144 - RNA, 19 nt, Artificial Sequence
  Description of Artificial Sequence: Synthetic oligonucleotide
ugcuguggugaggucccgg

SEQ ID NO: 2773145 - RNA, 19 nt, Artificial Sequence
  Description of Artificial Sequence: Synthetic oligonucleotide
uucuggagucauagcgcaa

SEQ ID NO: 2773146 - RNA, 19 nt, Artificial Sequence
  Description of Artificial Sequence: Synthetic oligonucleotide
gagucauagcgcaaccaaa

SEQ ID NO: 2773147 - RNA, 19 nt, Artificial Sequence
  Description of Artificial Sequence: Synthetic oligonucleotide
cagcgggaacuuuaucuuc

SEQ ID NO: 2773148 - RNA, 19 nt, Artificial Sequence
  Description of Artificial Sequence: Synthetic oligonucleotide
acgaagcggugauuucuca

SEQ ID NO: 2773149 - RNA, 19 nt, Artificial Sequence
  Description of Artificial Sequence: Synthetic oligonucleotide
aggcuuguguuggcgccgc

SEQ ID NO: 2773150 - RNA, 19 nt, Artificial Sequence
  Description of Artificial Sequence: Synthetic oligonucleotide
uaacagcgccugcuguggu

SEQ ID NO: 2773151 - RNA, 19 nt, Artificial Sequence
  Description of Artificial Sequence: Synthetic oligonucleotide
acauguugugggugccgcu

SEQ ID NO: 2773152 - RNA, 19 nt, Artificial Sequence
  Description of Artificial Sequence: Synthetic oligonucleotide
cucaaccuucauuaugugu

SEQ ID NO: 2773153 - RNA, 19 nt, Artificial Sequence
  Description of Artificial Sequence: Synthetic oligonucleotide
gccgcuucuggagucauag

SEQ ID NO: 2773154 - RNA, 19 nt, Artificial Sequence
  Description of Artificial Sequence: Synthetic oligonucleotide
cgcaauaaacuaucucccc

SEQ ID NO: 2773155 - RNA, 19 nt, Artificial Sequence
  Description of Artificial Sequence: Synthetic oligonucleotide
ugcgcacgggcacggugcc

SEQ ID NO: 2773156 - RNA, 19 nt, Artificial Sequence
  Description of Artificial Sequence: Synthetic oligonucleotide
cacuggguaacagcgccug

SEQ ID NO: 2773157 - RNA, 19 nt, Artificial Sequence
  Description of Artificial Sequence: Synthetic oligonucleotide
gaggucccgguacucccug

SEQ ID NO: 2773158 - RNA, 19 nt, Artificial Sequence
  Description of Artificial Sequence: Synthetic oligonucleotide
ggaugacuucuucauuuuc

SEQ ID NO: 2773159 - RNA, 19 nt, Artificial Sequence
  Description of Artificial Sequence: Synthetic oligonucleotide
ggcugcgaucuccucaacc

SEQ ID NO: 2773160 - RNA, 19 nt, Artificial Sequence
  Description of Artificial Sequence: Synthetic oligonucleotide
cacacgaagcggugauuuc

SEQ ID NO: 2773161 - RNA, 19 nt, Artificial Sequence
  Description of Artificial Sequence: Synthetic oligonucleotide
uugccggcugcgaucuccu

SEQ ID NO: 2773162 - RNA, 19 nt, Artificial Sequence
  Description of Artificial Sequence: Synthetic oligonucleotide
guucuucacacgaagcggu

SEQ ID NO: 2773163 - RNA, 19 nt, Artificial Sequence
  Description of Artificial Sequence: Synthetic oligonucleotide
caccuguccgcaauaaacu

SEQ ID NO: 2773164 - RNA, 19 nt, Artificial Sequence
  Description of Artificial Sequence: Synthetic oligonucleotide
ccaugucucgauagcacug

SEQ ID NO: 2773165 - RNA, 19 nt, Artificial Sequence
  Description of Artificial Sequence: Synthetic oligonucleotide
acagcgccugcugugguga

SEQ ID NO: 2773166 - RNA, 19 nt, Artificial Sequence
  Description of Artificial Sequence: Synthetic oligonucleotide
cuguggucuaaaagaaugu

SEQ ID NO: 2773167 - RNA, 19 nt, Artificial Sequence
  Description of Artificial Sequence: Synthetic oligonucleotide
aaccuucauuauguguauu

SEQ ID NO: 2773168 - RNA, 19 nt, Artificial Sequence
  Description of Artificial Sequence: Synthetic oligonucleotide
caacacacgguggggcagc

SEQ ID NO: 2773169 - RNA, 19 nt, Artificial Sequence
  Description of Artificial Sequence: Synthetic oligonucleotide
uugggccucuuggugguga

SEQ ID NO: 2773170 - RNA, 19 nt, Artificial Sequence
  Description of Artificial Sequence: Synthetic oligonucleotide
guggucuaaaagaauguau

SEQ ID NO: 2773171 - RNA, 19 nt, Artificial Sequence
  Description of Artificial Sequence: Synthetic oligonucleotide
guuucacagcuggccuucg

SEQ ID NO: 2773172 - RNA, 19 nt, Artificial Sequence
  Description of Artificial Sequence: Synthetic oligonucleotide
aucuccccggaugacuucu

SEQ ID NO: 2773173 - RNA, 19 nt, Artificial Sequence
  Description of Artificial Sequence: Synthetic oligonucleotide
acuuuaucuucgagucaug

SEQ ID NO: 2773174 - RNA, 19 nt, Artificial Sequence
  Description of Artificial Sequence: Synthetic oligonucleotide
gaucuccucaaccuucauu

SEQ ID NO: 2773175 - RNA, 19 nt, Artificial Sequence
  Description of Artificial Sequence: Synthetic oligonucleotide
gcugcgaucuccucaaccu

SEQ ID NO: 2773176 - RNA, 19 nt, Artificial Sequence
  Description of Artificial Sequence: Synthetic oligonucleotide
cuucgagucauggaauugu

SEQ ID NO: 2773177 - RNA, 19 nt, Artificial Sequence
  Description of Artificial Sequence: Synthetic oligonucleotide
uaucuccccggaugacuuc

SEQ ID NO: 2773178 - RNA, 19 nt, Artificial Sequence
  Description of Artificial Sequence: Synthetic oligonucleotide
acgguggggcagcgggaac

SEQ ID NO: 2773179 - RNA, 19 nt, Artificial Sequence
  Description of Artificial Sequence: Synthetic oligonucleotide
ucggcacuugccggcugcg

SEQ ID NO: 2773180 - RNA, 19 nt, Artificial Sequence
  Description of Artificial Sequence: Synthetic oligonucleotide
ggugaggucccgguacucc

SEQ ID NO: 2773181 - RNA, 19 nt, Artificial Sequence
  Description of Artificial Sequence: Synthetic oligonucleotide
cggugauuucucaaacacc

SEQ ID NO: 2773182 - RNA, 19 nt, Artificial Sequence
  Description of Artificial Sequence: Synthetic oligonucleotide
gugcgcacgggcacggugc

SEQ ID NO: 2773183 - RNA, 19 nt, Artificial Sequence
  Description of Artificial Sequence: Synthetic oligonucleotide
ggccuucggcacuugccgg

SEQ ID NO: 2773184 - RNA, 19 nt, Artificial Sequence
  Description of Artificial Sequence: Synthetic oligonucleotide
gucccgguacucccuguac

SEQ ID NO: 2773185 - RNA, 19 nt, Artificial Sequence
  Description of Artificial Sequence: Synthetic oligonucleotide
cccgaaguucuucacacga

SEQ ID NO: 2773186 - RNA, 19 nt, Artificial Sequence
  Description of Artificial Sequence: Synthetic oligonucleotide
guguuggcgccgcaacaca

SEQ ID NO: 2773187 - RNA, 19 nt, Artificial Sequence
  Description of Artificial Sequence: Synthetic oligonucleotide
gguggugaaucgaggcuug

SEQ ID NO: 2773188 - RNA, 19 nt, Artificial Sequence
  Description of Artificial Sequence: Synthetic oligonucleotide
gugaaucgaggcuuguguu

SEQ ID NO: 2773189 - RNA, 19 nt, Artificial Sequence
  Description of Artificial Sequence: Synthetic oligonucleotide
caaacaccuguccgcaaua

SEQ ID NO: 2773190 - RNA, 19 nt, Artificial Sequence
  Description of Artificial Sequence: Synthetic oligonucleotide
gccugcuguggugaggucc

SEQ ID NO: 2773191 - RNA, 19 nt, Artificial Sequence
  Description of Artificial Sequence: Synthetic oligonucleotide
agcgccugcuguggugagg

SEQ ID NO: 2773192 - RNA, 19 nt, Artificial Sequence
  Description of Artificial Sequence: Synthetic oligonucleotide
ggccucuugguggugaauc

SEQ ID NO: 2773193 - RNA, 19 nt, Artificial Sequence
  Description of Artificial Sequence: Synthetic oligonucleotide
guugugggugccgcuucug

SEQ ID NO: 2773194 - RNA, 19 nt, Artificial Sequence
  Description of Artificial Sequence: Synthetic oligonucleotide
ccuucauuauguguauuga

SEQ ID NO: 2773195 - RNA, 19 nt, Artificial Sequence
  Description of Artificial Sequence: Synthetic oligonucleotide
ccccaugucucgauagcac

SEQ ID NO: 2773196 - RNA, 19 nt, Artificial Sequence
  Description of Artificial Sequence: Synthetic oligonucleotide
uucacacgaagcggugauu

SEQ ID NO: 2773197 - RNA, 19 nt, Artificial Sequence
  Description of Artificial Sequence: Synthetic oligonucleotide
ccuguacauguugugggug

SEQ ID NO: 2773198 - RNA, 19 nt, Artificial Sequence
  Description of Artificial Sequence: Synthetic oligonucleotide
gccuucggcacuugccggc

SEQ ID NO: 2773199 - RNA, 19 nt, Artificial Sequence
  Description of Artificial Sequence: Synthetic oligonucleotide
gcgcaaccaaaucccgaag

SEQ ID NO: 2773200 - RNA, 19 nt, Artificial Sequence
  Description of Artificial Sequence: Synthetic oligonucleotide
ugggccucuugguggugaa

SEQ ID NO: 2773201 - RNA, 19 nt, Artificial Sequence
  Description of Artificial Sequence: Synthetic oligonucleotide
cuaucuccccggaugacuu

SEQ ID NO: 2773202 - RNA, 19 nt, Artificial Sequence
  Description of Artificial Sequence: Synthetic oligonucleotide
cuccccggaugacuucuuc

SEQ ID NO: 2773203 - RNA, 19 nt, Artificial Sequence
  Description of Artificial Sequence: Synthetic oligonucleotide
cuucacacgaagcggugau

SEQ ID NO: 2773204 - RNA, 19 nt, Artificial Sequence
  Description of Artificial Sequence: Synthetic oligonucleotide
gcaacacacgguggggcag

SEQ ID NO: 2773205 - RNA, 19 nt, Artificial Sequence
  Description of Artificial Sequence: Synthetic oligonucleotide
caaccuucauuauguguau

SEQ ID NO: 2773206 - RNA, 19 nt, Artificial Sequence
  Description of Artificial Sequence: Synthetic oligonucleotide
cgaggcuuguguuggcgcc

SEQ ID NO: 2773207 - RNA, 19 nt, Artificial Sequence
  Description of Artificial Sequence: Synthetic oligonucleotide
ccucaaccuucauuaugug

SEQ ID NO: 2773208 - RNA, 19 nt, Artificial Sequence
  Description of Artificial Sequence: Synthetic oligonucleotide
uggcgccgcaacacacggu

SEQ ID NO: 2773209 - RNA, 19 nt, Artificial Sequence
  Description of Artificial Sequence: Synthetic oligonucleotide
cucaaacaccuguccgcaa

SEQ ID NO: 2773210 - RNA, 19 nt, Artificial Sequence
  Description of Artificial Sequence: Synthetic oligonucleotide
cuucggcacuugccggcug

SEQ ID NO: 2773211 - RNA, 19 nt, Artificial Sequence
  Description of Artificial Sequence: Synthetic oligonucleotide
ucuccccggaugacuucuu

SEQ ID NO: 2773212 - RNA, 19 nt, Artificial Sequence
  Description of Artificial Sequence: Synthetic oligonucleotide
gccgcaacacacggugggg

SEQ ID NO: 2773213 - RNA, 19 nt, Artificial Sequence
  Description of Artificial Sequence: Synthetic oligonucleotide
acuugccggcugcgaucuc

SEQ ID NO: 2773214 - RNA, 19 nt, Artificial Sequence
  Description of Artificial Sequence: Synthetic oligonucleotide
uggugaggucccgguacuc

SEQ ID NO: 2773215 - RNA, 19 nt, Artificial Sequence
  Description of Artificial Sequence: Synthetic oligonucleotide
accaaaucccgaaguucuu

SEQ ID NO: 2773216 - RNA, 19 nt, Artificial Sequence
  Description of Artificial Sequence: Synthetic oligonucleotide
cuggguaacagcgccugcu

SEQ ID NO: 2773217 - RNA, 19 nt, Artificial Sequence
  Description of Artificial Sequence: Synthetic oligonucleotide
gcaaccaaaucccgaaguu

SEQ ID NO: 2773218 - RNA, 19 nt, Artificial Sequence
  Description of Artificial Sequence: Synthetic oligonucleotide
gcacuugccggcugcgauc

SEQ ID NO: 2773219 - RNA, 19 nt, Artificial Sequence
  Description of Artificial Sequence: Synthetic oligonucleotide
cgccgcaacacacgguggg

SEQ ID NO: 2773220 - RNA, 19 nt, Artificial Sequence
  Description of Artificial Sequence: Synthetic oligonucleotide
gcuggccuucggcacuugc

SEQ ID NO: 2773221 - RNA, 19 nt, Artificial Sequence
  Description of Artificial Sequence: Synthetic oligonucleotide
ugccgcuucuggagucaua

SEQ ID NO: 2773222 - RNA, 19 nt, Artificial Sequence
  Description of Artificial Sequence: Synthetic oligonucleotide
gccggcugcgaucuccuca

SEQ ID NO: 2773223 - RNA, 19 nt, Artificial Sequence
  Description of Artificial Sequence: Synthetic oligonucleotide
auugggccucuugguggug

SEQ ID NO: 2773224 - RNA, 19 nt, Artificial Sequence
  Description of Artificial Sequence: Synthetic oligonucleotide
agaauguauugggccucuu

SEQ ID NO: 2773225 - RNA, 19 nt, Artificial Sequence
  Description of Artificial Sequence: Synthetic oligonucleotide
gcgggaacuuuaucuucga

SEQ ID NO: 2773226 - RNA, 19 nt, Artificial Sequence
  Description of Artificial Sequence: Synthetic oligonucleotide
gcagcgggaacuuuaucuu

SEQ ID NO: 2773227 - RNA, 19 nt, Artificial Sequence
  Description of Artificial Sequence: Synthetic oligonucleotide
cagcgccugcuguggugag

SEQ ID NO: 2773228 - RNA, 19 nt, Artificial Sequence
  Description of Artificial Sequence: Synthetic oligonucleotide
ccgcaacacacgguggggc

SEQ ID NO: 2773229 - RNA, 19 nt, Artificial Sequence
  Description of Artificial Sequence: Synthetic oligonucleotide
cugcuguggugaggucccg

SEQ ID NO: 2773230 - RNA, 19 nt, Artificial Sequence
  Description of Artificial Sequence: Synthetic oligonucleotide
cgggaacuuuaucuucgag

SEQ ID NO: 2773231 - RNA, 19 nt, Artificial Sequence
  Description of Artificial Sequence: Synthetic oligonucleotide
ccggaugacuucuucauuu

SEQ ID NO: 2773232 - RNA, 19 nt, Artificial Sequence
  Description of Artificial Sequence: Synthetic oligonucleotide
gcgaucuccucaaccuuca

SEQ ID NO: 2773233 - RNA, 19 nt, Artificial Sequence
  Description of Artificial Sequence: Synthetic oligonucleotide
cauguugugggugccgcuu

SEQ ID NO: 2773234 - RNA, 19 nt, Artificial Sequence
  Description of Artificial Sequence: Synthetic oligonucleotide
cuguggugaggucccggua

SEQ ID NO: 2773235 - RNA, 19 nt, Artificial Sequence
  Description of Artificial Sequence: Synthetic oligonucleotide
ccgcuucuggagucauagc

SEQ ID NO: 2773236 - RNA, 19 nt, Artificial Sequence
  Description of Artificial Sequence: Synthetic oligonucleotide
cgcacgggcacggugccgg

SEQ ID NO: 2773237 - RNA, 19 nt, Artificial Sequence
  Description of Artificial Sequence: Synthetic oligonucleotide
ggguaacagcgccugcugu

SEQ ID NO: 2773238 - RNA, 19 nt, Artificial Sequence
  Description of Artificial Sequence: Synthetic oligonucleotide
cccaugucucgauagcacu

SEQ ID NO: 2773239 - RNA, 19 nt, Artificial Sequence
  Description of Artificial Sequence: Synthetic oligonucleotide
gggugccgcuucuggaguc

SEQ ID NO: 2773240 - RNA, 19 nt, Artificial Sequence
  Description of Artificial Sequence: Synthetic oligonucleotide
ccuguccgcaauaaacuau

SEQ ID NO: 2773241 - RNA, 19 nt, Artificial Sequence
  Description of Artificial Sequence: Synthetic oligonucleotide
cacgguggggcagcgggaa

SEQ ID NO: 2773242 - RNA, 19 nt, Artificial Sequence
  Description of Artificial Sequence: Synthetic oligonucleotide
ugccggcugcgaucuccuc

SEQ ID NO: 2773243 - RNA, 19 nt, Artificial Sequence
  Description of Artificial Sequence: Synthetic oligonucleotide
ggugccgcuucuggaguca

SEQ ID NO: 2773244 - RNA, 19 nt, Artificial Sequence
  Description of Artificial Sequence: Synthetic oligonucleotide
cgauagcacuggguaacag

SEQ ID NO: 2773245 - RNA, 19 nt, Artificial Sequence
  Description of Artificial Sequence: Synthetic oligonucleotide
ggcacuugccggcugcgau

SEQ ID NO: 2773246 - RNA, 19 nt, Artificial Sequence
  Description of Artificial Sequence: Synthetic oligonucleotide
ggucccgguacucccugua

SEQ ID NO: 2773247 - RNA, 19 nt, Artificial Sequence
  Description of Artificial Sequence: Synthetic oligonucleotide
gcuuguguuggcgccgcaa

SEQ ID NO: 2773248 - RNA, 19 nt, Artificial Sequence
  Description of Artificial Sequence: Synthetic oligonucleotide
ccggcugcgaucuccucaa

SEQ ID NO: 2773249 - RNA, 19 nt, Artificial Sequence
  Description of Artificial Sequence: Synthetic oligonucleotide
cgaagcggugauuucucaa

SEQ ID NO: 2773250 - RNA, 19 nt, Artificial Sequence
  Description of Artificial Sequence: Synthetic oligonucleotide
ccucuugguggugaaucga

SEQ ID NO: 2773251 - RNA, 19 nt, Artificial Sequence
  Description of Artificial Sequence: Synthetic oligonucleotide
gcgccgcaacacacggugg

SEQ ID NO: 2773252 - RNA, 19 nt, Artificial Sequence
  Description of Artificial Sequence: Synthetic oligonucleotide
ccgguacucccuguacaug

SEQ ID NO: 2773253 - RNA, 19 nt, Artificial Sequence
  Description of Artificial Sequence: Synthetic oligonucleotide
cgguacucccuguacaugu

SEQ ID NO: 2773254 - RNA, 19 nt, Artificial Sequence
  Description of Artificial Sequence: Synthetic oligonucleotide
gggcagcgggaacuuuauc

SEQ ID NO: 2773255 - RNA, 19 nt, Artificial Sequence
  Description of Artificial Sequence: Synthetic oligonucleotide
cugcgaucuccucaaccuu

SEQ ID NO: 2773256 - RNA, 19 nt, Artificial Sequence
  Description of Artificial Sequence: Synthetic oligonucleotide
cgcaacacacgguggggca

SEQ ID NO: 2773257 - RNA, 19 nt, Artificial Sequence
  Description of Artificial Sequence: Synthetic oligonucleotide
cgcaaccaaaucccgaagu

SEQ ID NO: 2773258 - RNA, 19 nt, Artificial Sequence
  Description of Artificial Sequence: Synthetic oligonucleotide
cccuguacauguugugggu

SEQ ID NO: 2773259 - RNA, 19 nt, Artificial Sequence
  Description of Artificial Sequence: Synthetic oligonucleotide
guggugaaucgaggcuugu

SEQ ID NO: 2773260 - RNA, 19 nt, Artificial Sequence
  Description of Artificial Sequence: Synthetic oligonucleotide
agcuggccuucggcacuug

SEQ ID NO: 2773261 - RNA, 19 nt, Artificial Sequence
  Description of Artificial Sequence: Synthetic oligonucleotide
ccccggaugacuucuucau

SEQ ID NO: 2773262 - RNA, 19 nt, Artificial Sequence
  Description of Artificial Sequence: Synthetic oligonucleotide
gcgccugcuguggugaggu

SEQ ID NO: 2773263 - RNA, 19 nt, Artificial Sequence
  Description of Artificial Sequence: Synthetic oligonucleotide
cccgguacucccuguacau

SEQ ID NO: 2773264 - RNA, 19 nt, Artificial Sequence
  Description of Artificial Sequence: Synthetic oligonucleotide
gguacucccuguacauguu

SEQ ID NO: 2773265 - RNA, 19 nt, Artificial Sequence
  Description of Artificial Sequence: Synthetic oligonucleotide
gggcacggugccgggcccc

SEQ ID NO: 2773266 - RNA, 19 nt, Artificial Sequence
  Description of Artificial Sequence: Synthetic oligonucleotide
ggcuuguguuggcgccgca

SEQ ID NO: 2773267 - RNA, 19 nt, Artificial Sequence
  Description of Artificial Sequence: Synthetic oligonucleotide
gcgcacgggcacggugccg

SEQ ID NO: 2773268 - RNA, 19 nt, Artificial Sequence
  Description of Artificial Sequence: Synthetic oligonucleotide
gcacuggguaacagcgccu

SEQ ID NO: 2773269 - RNA, 19 nt, Artificial Sequence
  Description of Artificial Sequence: Synthetic oligonucleotide
ggggcagcgggaacuuuau

SEQ ID NO: 2773270 - RNA, 19 nt, Artificial Sequence
  Description of Artificial Sequence: Synthetic oligonucleotide
gagugcgcacgggcacggu

SEQ ID NO: 2773271 - RNA, 19 nt, Artificial Sequence
  Description of Artificial Sequence: Synthetic oligonucleotide
cggaugacuucuucauuuu

SEQ ID NO: 2773272 - RNA, 19 nt, Artificial Sequence
  Description of Artificial Sequence: Synthetic oligonucleotide
gugccgcuucuggagucau

SEQ ID NO: 2773273 - RNA, 19 nt, Artificial Sequence
  Description of Artificial Sequence: Synthetic oligonucleotide
gguggggcagcgggaacuu

SEQ ID NO: 2773274 - RNA, 19 nt, Artificial Sequence
  Description of Artificial Sequence: Synthetic oligonucleotide
ccuucggcacuugccggcu

SEQ ID NO: 2773275 - RNA, 19 nt, Artificial Sequence
  Description of Artificial Sequence: Synthetic oligonucleotide
guggggcagcgggaacuuu

SEQ ID NO: 2773276 - RNA, 19 nt, Artificial Sequence
  Description of Artificial Sequence: Synthetic oligonucleotide
cggcugcgaucuccucaac

SEQ ID NO: 2773277 - RNA, 19 nt, Artificial Sequence
  Description of Artificial Sequence: Synthetic oligonucleotide
cgccugcuguggugagguc

SEQ ID NO: 2773278 - RNA, 19 nt, Artificial Sequence
  Description of Artificial Sequence: Synthetic oligonucleotide
cgguggggcagcgggaacu

SEQ ID NO: 2773279 - RNA, 19 nt, Artificial Sequence
  Description of Artificial Sequence: Synthetic oligonucleotide
gggccucuugguggugaau

SEQ ID NO: 2773280 - RNA, 19 nt, Artificial Sequence
  Description of Artificial Sequence: Synthetic oligonucleotide
cggcacuugccggcugcga

SEQ ID NO: 2773281 - RNA, 19 nt, Artificial Sequence
  Description of Artificial Sequence: Synthetic oligonucleotide
aaaguagugcuucuuaagc

SEQ ID NO: 2773282 - RNA, 19 nt, Artificial Sequence
  Description of Artificial Sequence: Synthetic oligonucleotide
aaucccuuuaauaaggugc

SEQ ID NO: 2773283 - RNA, 19 nt, Artificial Sequence
  Description of Artificial Sequence: Synthetic oligonucleotide
aaaggugguacccaagacc

SEQ ID NO: 2773284 - RNA, 19 nt, Artificial Sequence
  Description of Artificial Sequence: Synthetic oligonucleotide
aaccagaagaauaaaaggc

SEQ ID NO: 2773285 - RNA, 19 nt, Artificial Sequence
  Description of Artificial Sequence: Synthetic oligonucleotide
uuuaauaaggugcuuggag

SEQ ID NO: 2773286 - RNA, 19 nt, Artificial Sequence
  Description of Artificial Sequence: Synthetic oligonucleotide
uuaauaaggugcuuggagg

SEQ ID NO: 2773287 - RNA, 19 nt, Artificial Sequence
  Description of Artificial Sequence: Synthetic oligonucleotide
aaacuuaacagccgggccg

SEQ ID NO: 2773288 - RNA, 19 nt, Artificial Sequence
  Description of Artificial Sequence: Synthetic oligonucleotide
gagauuacagcccuggagg

SEQ ID NO: 2773289 - RNA, 19 nt, Artificial Sequence
  Description of Artificial Sequence: Synthetic oligonucleotide
uaauucaucacucaucuuc

SEQ ID NO: 2773290 - RNA, 19 nt, Artificial Sequence
  Description of Artificial Sequence: Synthetic oligonucleotide
uucaaucccuuuaauaagg

SEQ ID NO: 2773291 - RNA, 19 nt, Artificial Sequence
  Description of Artificial Sequence: Synthetic oligonucleotide
aaagaagaagacaacucgc

SEQ ID NO: 2773292 - RNA, 19 nt, Artificial Sequence
  Description of Artificial Sequence: Synthetic oligonucleotide
aguagugcuucuuaagccc

SEQ ID NO: 2773293 - RNA, 19 nt, Artificial Sequence
  Description of Artificial Sequence: Synthetic oligonucleotide
caaagaagaagacaacucg

SEQ ID NO: 2773294 - RNA, 19 nt, Artificial Sequence
  Description of Artificial Sequence: Synthetic oligonucleotide
gaucaaaacaguuggauuc

SEQ ID NO: 2773295 - RNA, 19 nt, Artificial Sequence
  Description of Artificial Sequence: Synthetic oligonucleotide
aguaauucaucacucaucu

SEQ ID NO: 2773296 - RNA, 19 nt, Artificial Sequence
  Description of Artificial Sequence: Synthetic oligonucleotide
cuugcugggaucaaaacag

SEQ ID NO: 2773297 - RNA, 19 nt, Artificial Sequence
  Description of Artificial Sequence: Synthetic oligonucleotide
aaacaguuggauuccauga

SEQ ID NO: 2773298 - RNA, 19 nt, Artificial Sequence
  Description of Artificial Sequence: Synthetic oligonucleotide
cuggucauaaccauggaag

SEQ ID NO: 2773299 - RNA, 19 nt, Artificial Sequence
  Description of Artificial Sequence: Synthetic oligonucleotide
aagaagacaacucgcauau

SEQ ID NO: 2773300 - RNA, 19 nt, Artificial Sequence
  Description of Artificial Sequence: Synthetic oligonucleotide
aggcagauaagccauaaag

SEQ ID NO: 2773301 - RNA, 19 nt, Artificial Sequence
  Description of Artificial Sequence: Synthetic oligonucleotide
uucucgauauuucacaagu

SEQ ID NO: 2773302 - RNA, 19 nt, Artificial Sequence
  Description of Artificial Sequence: Synthetic oligonucleotide
aaaaccaaagaagaagaca

SEQ ID NO: 2773303 - RNA, 19 nt, Artificial Sequence
  Description of Artificial Sequence: Synthetic oligonucleotide
uuucaaucccuuuaauaag

SEQ ID NO: 2773304 - RNA, 19 nt, Artificial Sequence
  Description of Artificial Sequence: Synthetic oligonucleotide
uucucaguaauucaucacu

SEQ ID NO: 2773305 - RNA, 19 nt, Artificial Sequence
  Description of Artificial Sequence: Synthetic oligonucleotide
aagccauaaaggugguacc

SEQ ID NO: 2773306 - RNA, 19 nt, Artificial Sequence
  Description of Artificial Sequence: Synthetic oligonucleotide
aagacaacucgcauauucc

SEQ ID NO: 2773307 - RNA, 19 nt, Artificial Sequence
  Description of Artificial Sequence: Synthetic oligonucleotide
uuucacaagucucucagcu

SEQ ID NO: 2773308 - RNA, 19 nt, Artificial Sequence
  Description of Artificial Sequence: Synthetic oligonucleotide
uuggauuccaugaugggga

SEQ ID NO: 2773309 - RNA, 19 nt, Artificial Sequence
  Description of Artificial Sequence: Synthetic oligonucleotide
agacggggagauuacagcc

SEQ ID NO: 2773310 - RNA, 19 nt, Artificial Sequence
  Description of Artificial Sequence: Synthetic oligonucleotide
gguaacuggaucuugcugg

SEQ ID NO: 2773311 - RNA, 19 nt, Artificial Sequence
  Description of Artificial Sequence: Synthetic oligonucleotide
cugggaucaaaacaguugg

SEQ ID NO: 2773312 - RNA, 19 nt, Artificial Sequence
  Description of Artificial Sequence: Synthetic oligonucleotide
ucuugcugggaucaaaaca

SEQ ID NO: 2773313 - RNA, 19 nt, Artificial Sequence
  Description of Artificial Sequence: Synthetic oligonucleotide
ucuugcauccuguagucag

SEQ ID NO: 2773314 - RNA, 19 nt, Artificial Sequence
  Description of Artificial Sequence: Synthetic oligonucleotide
acaaacuuaacagccgggc

SEQ ID NO: 2773315 - RNA, 19 nt, Artificial Sequence
  Description of Artificial Sequence: Synthetic oligonucleotide
gaagacaacucgcauauuc

SEQ ID NO: 2773316 - RNA, 19 nt, Artificial Sequence
  Description of Artificial Sequence: Synthetic oligonucleotide
acacaaacuuaacagccgg

SEQ ID NO: 2773317 - RNA, 19 nt, Artificial Sequence
  Description of Artificial Sequence: Synthetic oligonucleotide
uaagccauaaaggugguac

SEQ ID NO: 2773318 - RNA, 19 nt, Artificial Sequence
  Description of Artificial Sequence: Synthetic oligonucleotide
uaauaaggugcuuggagga

SEQ ID NO: 2773319 - RNA, 19 nt, Artificial Sequence
  Description of Artificial Sequence: Synthetic oligonucleotide
uuucucuccacaguagacg

SEQ ID NO: 2773320 - RNA, 19 nt, Artificial Sequence
  Description of Artificial Sequence: Synthetic oligonucleotide
auaaccauggaagucuggg

SEQ ID NO: 2773321 - RNA, 19 nt, Artificial Sequence
  Description of Artificial Sequence: Synthetic oligonucleotide
aacuuaacagccgggccgc

SEQ ID NO: 2773322 - RNA, 19 nt, Artificial Sequence
  Description of Artificial Sequence: Synthetic oligonucleotide
aucaaaacaguuggauucc

SEQ ID NO: 2773323 - RNA, 19 nt, Artificial Sequence
  Description of Artificial Sequence: Synthetic oligonucleotide
gaagucuggguucuucgcg

SEQ ID NO: 2773324 - RNA, 19 nt, Artificial Sequence
  Description of Artificial Sequence: Synthetic oligonucleotide
acucgcauauuccagacgu

SEQ ID NO: 2773325 - RNA, 19 nt, Artificial Sequence
  Description of Artificial Sequence: Synthetic oligonucleotide
ucacaagucucucagcuuc

SEQ ID NO: 2773326 - RNA, 19 nt, Artificial Sequence
  Description of Artificial Sequence: Synthetic oligonucleotide
gaagaauaaaaggcagggg

SEQ ID NO: 2773327 - RNA, 19 nt, Artificial Sequence
  Description of Artificial Sequence: Synthetic oligonucleotide
uguagucaggcagauaagc

SEQ ID NO: 2773328 - RNA, 19 nt, Artificial Sequence
  Description of Artificial Sequence: Synthetic oligonucleotide
auaaaggugguacccaaga

SEQ ID NO: 2773329 - RNA, 19 nt, Artificial Sequence
  Description of Artificial Sequence: Synthetic oligonucleotide
ucgauauuucacaagucuc

SEQ ID NO: 2773330 - RNA, 19 nt, Artificial Sequence
  Description of Artificial Sequence: Synthetic oligonucleotide
ucaguaauucaucacucau

SEQ ID NO: 2773331 - RNA, 19 nt, Artificial Sequence
  Description of Artificial Sequence: Synthetic oligonucleotide
aaggugguacccaagacca

SEQ ID NO: 2773332 - RNA, 19 nt, Artificial Sequence
  Description of Artificial Sequence: Synthetic oligonucleotide
uagucaggcagauaagcca

SEQ ID NO: 2773333 - RNA, 19 nt, Artificial Sequence
  Description of Artificial Sequence: Synthetic oligonucleotide
cagauaagccauaaaggug

SEQ ID NO: 2773334 - RNA, 19 nt, Artificial Sequence
  Description of Artificial Sequence: Synthetic oligonucleotide
ucuuaagcccuucucagua

SEQ ID NO: 2773335 - RNA, 19 nt, Artificial Sequence
  Description of Artificial Sequence: Synthetic oligonucleotide
cacacaaacuuaacagccg

SEQ ID NO: 2773336 - RNA, 19 nt, Artificial Sequence
  Description of Artificial Sequence: Synthetic oligonucleotide
ggaaccagaagaauaaaag

SEQ ID NO: 2773337 - RNA, 19 nt, Artificial Sequence
  Description of Artificial Sequence: Synthetic oligonucleotide
ucucaguaauucaucacuc

SEQ ID NO: 2773338 - RNA, 19 nt, Artificial Sequence
  Description of Artificial Sequence: Synthetic oligonucleotide
aacucgcauauuccagacg

SEQ ID NO: 2773339 - RNA, 19 nt, Artificial Sequence
  Description of Artificial Sequence: Synthetic oligonucleotide
aagaagaagacaacucgca

SEQ ID NO: 2773340 - RNA, 19 nt, Artificial Sequence
  Description of Artificial Sequence: Synthetic oligonucleotide
uggaggaaccagaagaaua

SEQ ID NO: 2773341 - RNA, 19 nt, Artificial Sequence
  Description of Artificial Sequence: Synthetic oligonucleotide
acucuugcauccuguaguc

SEQ ID NO: 2773342 - RNA, 19 nt, Artificial Sequence
  Description of Artificial Sequence: Synthetic oligonucleotide
agccauaaaggugguaccc

SEQ ID NO: 2773343 - RNA, 19 nt, Artificial Sequence
  Description of Artificial Sequence: Synthetic oligonucleotide
aacuggaucuugcugggau

SEQ ID NO: 2773344 - RNA, 19 nt, Artificial Sequence
  Description of Artificial Sequence: Synthetic oligonucleotide
acaguuggauuccaugaug

SEQ ID NO: 2773345 - RNA, 19 nt, Artificial Sequence
  Description of Artificial Sequence: Synthetic oligonucleotide
aguuggauuccaugauggg

SEQ ID NO: 2773346 - RNA, 19 nt, Artificial Sequence
  Description of Artificial Sequence: Synthetic oligonucleotide
ggcagauaagccauaaagg

SEQ ID NO: 2773347 - RNA, 19 nt, Artificial Sequence
  Description of Artificial Sequence: Synthetic oligonucleotide
caaacuuaacagccgggcc

SEQ ID NO: 2773348 - RNA, 19 nt, Artificial Sequence
  Description of Artificial Sequence: Synthetic oligonucleotide
guaacuggaucuugcuggg

SEQ ID NO: 2773349 - RNA, 19 nt, Artificial Sequence
  Description of Artificial Sequence: Synthetic oligonucleotide
uuccagacguccaccacag

SEQ ID NO: 2773350 - RNA, 19 nt, Artificial Sequence
  Description of Artificial Sequence: Synthetic oligonucleotide
uaaaggugguacccaagac

SEQ ID NO: 2773351 - RNA, 19 nt, Artificial Sequence
  Description of Artificial Sequence: Synthetic oligonucleotide
accaaagaagaagacaacu

SEQ ID NO: 2773352 - RNA, 19 nt, Artificial Sequence
  Description of Artificial Sequence: Synthetic oligonucleotide
ucucucagcuucccggcgg

SEQ ID NO: 2773353 - RNA, 19 nt, Artificial Sequence
  Description of Artificial Sequence: Synthetic oligonucleotide
ugguaacuggaucuugcug

SEQ ID NO: 2773354 - RNA, 19 nt, Artificial Sequence
  Description of Artificial Sequence: Synthetic oligonucleotide
ucaaucccuuuaauaaggu

SEQ ID NO: 2773355 - RNA, 19 nt, Artificial Sequence
  Description of Artificial Sequence: Synthetic oligonucleotide
uagacggggagauuacagc

SEQ ID NO: 2773356 - RNA, 19 nt, Artificial Sequence
  Description of Artificial Sequence: Synthetic oligonucleotide
ucauaaccauggaagucug

SEQ ID NO: 2773357 - RNA, 19 nt, Artificial Sequence
  Description of Artificial Sequence: Synthetic oligonucleotide
aagucuggguucuucgcgu

SEQ ID NO: 2773358 - RNA, 19 nt, Artificial Sequence
  Description of Artificial Sequence: Synthetic oligonucleotide
aaaggcggcgagcacacaa

SEQ ID NO: 2773359 - RNA, 19 nt, Artificial Sequence
  Description of Artificial Sequence: Synthetic oligonucleotide
gguacccaagaccaggacg

SEQ ID NO: 2773360 - RNA, 19 nt, Artificial Sequence
  Description of Artificial Sequence: Synthetic oligonucleotide
gaagaagacaacucgcaua

SEQ ID NO: 2773361 - RNA, 19 nt, Artificial Sequence
  Description of Artificial Sequence: Synthetic oligonucleotide
acaacucgcauauuccaga

SEQ ID NO: 2773362 - RNA, 19 nt, Artificial Sequence
  Description of Artificial Sequence: Synthetic oligonucleotide
uucuggguccuccugccag

SEQ ID NO: 2773363 - RNA, 19 nt, Artificial Sequence
  Description of Artificial Sequence: Synthetic oligonucleotide
aagaccaggacgauggaaa

SEQ ID NO: 2773364 - RNA, 19 nt, Artificial Sequence
  Description of Artificial Sequence: Synthetic oligonucleotide
uggucauaaccauggaagu

SEQ ID NO: 2773365 - RNA, 19 nt, Artificial Sequence
  Description of Artificial Sequence: Synthetic oligonucleotide
ucgcauauuccagacgucc

SEQ ID NO: 2773366 - RNA, 19 nt, Artificial Sequence
  Description of Artificial Sequence: Synthetic oligonucleotide
uucguccucggauucuggg

SEQ ID NO: 2773367 - RNA, 19 nt, Artificial Sequence
  Description of Artificial Sequence: Synthetic oligonucleotide
agacaacucgcauauucca

SEQ ID NO: 2773368 - RNA, 19 nt, Artificial Sequence
  Description of Artificial Sequence: Synthetic oligonucleotide
acaaaguagugcuucuuaa

SEQ ID NO: 2773369 - RNA, 19 nt, Artificial Sequence
  Description of Artificial Sequence: Synthetic oligonucleotide
auuccagacguccaccaca

SEQ ID NO: 2773370 - RNA, 19 nt, Artificial Sequence
  Description of Artificial Sequence: Synthetic oligonucleotide
caguaauucaucacucauc

SEQ ID NO: 2773371 - RNA, 19 nt, Artificial Sequence
  Description of Artificial Sequence: Synthetic oligonucleotide
auauuucacaagucucuca

SEQ ID NO: 2773372 - RNA, 19 nt, Artificial Sequence
  Description of Artificial Sequence: Synthetic oligonucleotide
ugauggggaggccauuggc

SEQ ID NO: 2773373 - RNA, 19 nt, Artificial Sequence
  Description of Artificial Sequence: Synthetic oligonucleotide
ggagauuacagcccuggag

SEQ ID NO: 2773374 - RNA, 19 nt, Artificial Sequence
  Description of Artificial Sequence: Synthetic oligonucleotide
agcuguuaccgaaaggcgg

SEQ ID NO: 2773375 - RNA, 19 nt, Artificial Sequence
  Description of Artificial Sequence: Synthetic oligonucleotide
auucccagcgaacgccagc

SEQ ID NO: 2773376 - RNA, 19 nt, Artificial Sequence
  Description of Artificial Sequence: Synthetic oligonucleotide
cacaaacuuaacagccggg

SEQ ID NO: 2773377 - RNA, 19 nt, Artificial Sequence
  Description of Artificial Sequence: Synthetic oligonucleotide
cuugcauccuguagucagg

SEQ ID NO: 2773378 - RNA, 19 nt, Artificial Sequence
  Description of Artificial Sequence: Synthetic oligonucleotide
gauucuggguccuccugcc

SEQ ID NO: 2773379 - RNA, 19 nt, Artificial Sequence
  Description of Artificial Sequence: Synthetic oligonucleotide
gcuuggaggaaccagaaga

SEQ ID NO: 2773380 - RNA, 19 nt, Artificial Sequence
  Description of Artificial Sequence: Synthetic oligonucleotide
uucgcguagacguuuucgu

SEQ ID NO: 2773381 - RNA, 19 nt, Artificial Sequence
  Description of Artificial Sequence: Synthetic oligonucleotide
ccuuuaauaaggugcuugg

SEQ ID NO: 2773382 - RNA, 19 nt, Artificial Sequence
  Description of Artificial Sequence: Synthetic oligonucleotide
cauaaaggugguacccaag

SEQ ID NO: 2773383 - RNA, 19 nt, Artificial Sequence
  Description of Artificial Sequence: Synthetic oligonucleotide
gacaacucgcauauuccag

SEQ ID NO: 2773384 - RNA, 19 nt, Artificial Sequence
  Description of Artificial Sequence: Synthetic oligonucleotide
cccaagaccaggacgaugg

SEQ ID NO: 2773385 - RNA, 19 nt, Artificial Sequence
  Description of Artificial Sequence: Synthetic oligonucleotide
cuuucucuccacaguagac

SEQ ID NO: 2773386 - RNA, 19 nt, Artificial Sequence
  Description of Artificial Sequence: Synthetic oligonucleotide
gcagcuguuaccgaaaggc

SEQ ID NO: 2773387 - RNA, 19 nt, Artificial Sequence
  Description of Artificial Sequence: Synthetic oligonucleotide
ucacucaucuucugguaac

SEQ ID NO: 2773388 - RNA, 19 nt, Artificial Sequence
  Description of Artificial Sequence: Synthetic oligonucleotide
cuucucgauauuucacaag

SEQ ID NO: 2773389 - RNA, 19 nt, Artificial Sequence
  Description of Artificial Sequence: Synthetic oligonucleotide
auauuccagacguccacca

SEQ ID NO: 2773390 - RNA, 19 nt, Artificial Sequence
  Description of Artificial Sequence: Synthetic oligonucleotide
agacguccaccacaggguc

SEQ ID NO: 2773391 - RNA, 19 nt, Artificial Sequence
  Description of Artificial Sequence: Synthetic oligonucleotide
uagacguuuucguccucgg

SEQ ID NO: 2773392 - RNA, 19 nt, Artificial Sequence
  Description of Artificial Sequence: Synthetic oligonucleotide
guuaccgaaaggcggcgag

SEQ ID NO: 2773393 - RNA, 19 nt, Artificial Sequence
  Description of Artificial Sequence: Synthetic oligonucleotide
cagcuguuaccgaaaggcg

SEQ ID NO: 2773394 - RNA, 19 nt, Artificial Sequence
  Description of Artificial Sequence: Synthetic oligonucleotide
guagucaggcagauaagcc

SEQ ID NO: 2773395 - RNA, 19 nt, Artificial Sequence
  Description of Artificial Sequence: Synthetic oligonucleotide
uuaagcccuucucaguaau

SEQ ID NO: 2773396 - RNA, 19 nt, Artificial Sequence
  Description of Artificial Sequence: Synthetic oligonucleotide
ucucgauauuucacaaguc

SEQ ID NO: 2773397 - RNA, 19 nt, Artificial Sequence
  Description of Artificial Sequence: Synthetic oligonucleotide
guagacguuuucguccucg

SEQ ID NO: 2773398 - RNA, 19 nt, Artificial Sequence
  Description of Artificial Sequence: Synthetic oligonucleotide
uaaccauggaagucugggu

SEQ ID NO: 2773399 - RNA, 19 nt, Artificial Sequence
  Description of Artificial Sequence: Synthetic oligonucleotide
uucuuaagcccuucucagu

SEQ ID NO: 2773400 - RNA, 19 nt, Artificial Sequence
  Description of Artificial Sequence: Synthetic oligonucleotide
agauuacagcccuggagga

SEQ ID NO: 2773401 - RNA, 19 nt, Artificial Sequence
  Description of Artificial Sequence: Synthetic oligonucleotide
cuucgcguagacguuuucg

SEQ ID NO: 2773402 - RNA, 19 nt, Artificial Sequence
  Description of Artificial Sequence: Synthetic oligonucleotide
gcauccuguagucaggcag

SEQ ID NO: 2773403 - RNA, 19 nt, Artificial Sequence
  Description of Artificial Sequence: Synthetic oligonucleotide
caaucccuuuaauaaggug

SEQ ID NO: 2773404 - RNA, 19 nt, Artificial Sequence
  Description of Artificial Sequence: Synthetic oligonucleotide
cauauuccagacguccacc

SEQ ID NO: 2773405 - RNA, 19 nt, Artificial Sequence
  Description of Artificial Sequence: Synthetic oligonucleotide
guagacggggagauuacag

SEQ ID NO: 2773406 - RNA, 19 nt, Artificial Sequence
  Description of Artificial Sequence: Synthetic oligonucleotide
ugucguugccgcuuucucu

SEQ ID NO: 2773407 - RNA, 19 nt, Artificial Sequence
  Description of Artificial Sequence: Synthetic oligonucleotide
gacaaaguagugcuucuua

SEQ ID NO: 2773408 - RNA, 19 nt, Artificial Sequence
  Description of Artificial Sequence: Synthetic oligonucleotide
ugcuucuuaagcccuucuc

SEQ ID NO: 2773409 - RNA, 19 nt, Artificial Sequence
  Description of Artificial Sequence: Synthetic oligonucleotide
ugcuuggaggaaccagaag

SEQ ID NO: 2773410 - RNA, 19 nt, Artificial Sequence
  Description of Artificial Sequence: Synthetic oligonucleotide
uuucguccucggauucugg

SEQ ID NO: 2773411 - RNA, 19 nt, Artificial Sequence
  Description of Artificial Sequence: Synthetic oligonucleotide
cauaaccauggaagucugg

SEQ ID NO: 2773412 - RNA, 19 nt, Artificial Sequence
  Description of Artificial Sequence: Synthetic oligonucleotide
ugggaucaaaacaguugga

SEQ ID NO: 2773413 - RNA, 19 nt, Artificial Sequence
  Description of Artificial Sequence: Synthetic oligonucleotide
uggauuccaugauggggag

SEQ ID NO: 2773414 - RNA, 19 nt, Artificial Sequence
  Description of Artificial Sequence: Synthetic oligonucleotide
caggguccuggucauaacc

SEQ ID NO: 2773415 - RNA, 19 nt, Artificial Sequence
  Description of Artificial Sequence: Synthetic oligonucleotide
uauuccagacguccaccac

SEQ ID NO: 2773416 - RNA, 19 nt, Artificial Sequence
  Description of Artificial Sequence: Synthetic oligonucleotide
gcacacaaacuuaacagcc

SEQ ID NO: 2773417 - RNA, 19 nt, Artificial Sequence
  Description of Artificial Sequence: Synthetic oligonucleotide
uggacaaaguagugcuucu

SEQ ID NO: 2773418 - RNA, 19 nt, Artificial Sequence
  Description of Artificial Sequence: Synthetic oligonucleotide
gcagauaagccauaaaggu

SEQ ID NO: 2773419 - RNA, 19 nt, Artificial Sequence
  Description of Artificial Sequence: Synthetic oligonucleotide
guacccaagaccaggacga

SEQ ID NO: 2773420 - RNA, 19 nt, Artificial Sequence
  Description of Artificial Sequence: Synthetic oligonucleotide
ccaaagaagaagacaacuc

SEQ ID NO: 2773421 - RNA, 19 nt, Artificial Sequence
  Description of Artificial Sequence: Synthetic oligonucleotide
aaccgcagcuguuaccgaa

SEQ ID NO: 2773422 - RNA, 19 nt, Artificial Sequence
  Description of Artificial Sequence: Synthetic oligonucleotide
acaguagacggggagauua

SEQ ID NO: 2773423 - RNA, 19 nt, Artificial Sequence
  Description of Artificial Sequence: Synthetic oligonucleotide
cucgauauuucacaagucu

SEQ ID NO: 2773424 - RNA, 19 nt, Artificial Sequence
  Description of Artificial Sequence: Synthetic oligonucleotide
caacucgcauauuccagac

SEQ ID NO: 2773425 - RNA, 19 nt, Artificial Sequence
  Description of Artificial Sequence: Synthetic oligonucleotide
uuaacagccgggccgccau

SEQ ID NO: 2773426 - RNA, 19 nt, Artificial Sequence
  Description of Artificial Sequence: Synthetic oligonucleotide
cuuggaggaaccagaagaa

SEQ ID NO: 2773427 - RNA, 19 nt, Artificial Sequence
  Description of Artificial Sequence: Synthetic oligonucleotide
cucaguaauucaucacuca

SEQ ID NO: 2773428 - RNA, 19 nt, Artificial Sequence
  Description of Artificial Sequence: Synthetic oligonucleotide
uccacaguagacggggaga

SEQ ID NO: 2773429 - RNA, 19 nt, Artificial Sequence
  Description of Artificial Sequence: Synthetic oligonucleotide
gucguugccgcuuucucuc

SEQ ID NO: 2773430 - RNA, 19 nt, Artificial Sequence
  Description of Artificial Sequence: Synthetic oligonucleotide
auucaucacucaucuucug

SEQ ID NO: 2773431 - RNA, 19 nt, Artificial Sequence
  Description of Artificial Sequence: Synthetic oligonucleotide
aucccuuuaauaaggugcu

SEQ ID NO: 2773432 - RNA, 19 nt, Artificial Sequence
  Description of Artificial Sequence: Synthetic oligonucleotide
gcuucuuaagcccuucuca

SEQ ID NO: 2773433 - RNA, 19 nt, Artificial Sequence
  Description of Artificial Sequence: Synthetic oligonucleotide
acagcccuggaggauuccc

SEQ ID NO: 2773434 - RNA, 19 nt, Artificial Sequence
  Description of Artificial Sequence: Synthetic oligonucleotide
uuccaugauggggaggcca

SEQ ID NO: 2773435 - RNA, 19 nt, Artificial Sequence
  Description of Artificial Sequence: Synthetic oligonucleotide
aggcggcgagcacacaaac

SEQ ID NO: 2773436 - RNA, 19 nt, Artificial Sequence
  Description of Artificial Sequence: Synthetic oligonucleotide
uaccgaaaggcggcgagca

SEQ ID NO: 2773437 - RNA, 19 nt, Artificial Sequence
  Description of Artificial Sequence: Synthetic oligonucleotide
ccuguagucaggcagauaa

SEQ ID NO: 2773438 - RNA, 19 nt, Artificial Sequence
  Description of Artificial Sequence: Synthetic oligonucleotide
ugcugggaucaaaacaguu

SEQ ID NO: 2773439 - RNA, 19 nt, Artificial Sequence
  Description of Artificial Sequence: Synthetic oligonucleotide
uccaugauggggaggccau

SEQ ID NO: 2773440 - RNA, 19 nt, Artificial Sequence
  Description of Artificial Sequence: Synthetic oligonucleotide
gacguuuucguccucggau

SEQ ID NO: 2773441 - RNA, 19 nt, Artificial Sequence
  Description of Artificial Sequence: Synthetic oligonucleotide
uucccagcgaacgccagca

SEQ ID NO: 2773442 - RNA, 19 nt, Artificial Sequence
  Description of Artificial Sequence: Synthetic oligonucleotide
uugcauccuguagucaggc

SEQ ID NO: 2773443 - RNA, 19 nt, Artificial Sequence
  Description of Artificial Sequence: Synthetic oligonucleotide
acaggguccuggucauaac

SEQ ID NO: 2773444 - RNA, 19 nt, Artificial Sequence
  Description of Artificial Sequence: Synthetic oligonucleotide
gacggggagauuacagccc

SEQ ID NO: 2773445 - RNA, 19 nt, Artificial Sequence
  Description of Artificial Sequence: Synthetic oligonucleotide
cuguagucaggcagauaag

SEQ ID NO: 2773446 - RNA, 19 nt, Artificial Sequence
  Description of Artificial Sequence: Synthetic oligonucleotide
acggggagauuacagcccu

SEQ ID NO: 2773447 - RNA, 19 nt, Artificial Sequence
  Description of Artificial Sequence: Synthetic oligonucleotide
agugcuucuuaagcccuuc

SEQ ID NO: 2773448 - RNA, 19 nt, Artificial Sequence
  Description of Artificial Sequence: Synthetic oligonucleotide
agcccuucucaguaauuca

SEQ ID NO: 2773449 - RNA, 19 nt, Artificial Sequence
  Description of Artificial Sequence: Synthetic oligonucleotide
auggucggcugucguugcc

SEQ ID NO: 2773450 - RNA, 19 nt, Artificial Sequence
  Description of Artificial Sequence: Synthetic oligonucleotide
agcccuggaggauucccag

SEQ ID NO: 2773451 - RNA, 19 nt, Artificial Sequence
  Description of Artificial Sequence: Synthetic oligonucleotide
uggguucuucgcguagacg

SEQ ID NO: 2773452 - RNA, 19 nt, Artificial Sequence
  Description of Artificial Sequence: Synthetic oligonucleotide
gcugggaucaaaacaguug

SEQ ID NO: 2773453 - RNA, 19 nt, Artificial Sequence
  Description of Artificial Sequence: Synthetic oligonucleotide
ucguccucggauucugggu

SEQ ID NO: 2773454 - RNA, 19 nt, Artificial Sequence
  Description of Artificial Sequence: Synthetic oligonucleotide
cuccacaguagacggggag

SEQ ID NO: 2773455 - RNA, 19 nt, Artificial Sequence
  Description of Artificial Sequence: Synthetic oligonucleotide
uggucggcugucguugccg

SEQ ID NO: 2773456 - RNA, 19 nt, Artificial Sequence
  Description of Artificial Sequence: Synthetic oligonucleotide
auuacagcccuggaggauu

SEQ ID NO: 2773457 - RNA, 19 nt, Artificial Sequence
  Description of Artificial Sequence: Synthetic oligonucleotide
uucacaagucucucagcuu

SEQ ID NO: 2773458 - RNA, 19 nt, Artificial Sequence
  Description of Artificial Sequence: Synthetic oligonucleotide
caugauggggaggccauug

SEQ ID NO: 2773459 - RNA, 19 nt, Artificial Sequence
  Description of Artificial Sequence: Synthetic oligonucleotide
aggaaccagaagaauaaaa

SEQ ID NO: 2773460 - RNA, 19 nt, Artificial Sequence
  Description of Artificial Sequence: Synthetic oligonucleotide
uucugguaacuggaucuug

SEQ ID NO: 2773461 - RNA, 19 nt, Artificial Sequence
  Description of Artificial Sequence: Synthetic oligonucleotide
ggauucuggguccuccugc

SEQ ID NO: 2773462 - RNA, 19 nt, Artificial Sequence
  Description of Artificial Sequence: Synthetic oligonucleotide
ucuggguucuucgcguaga

SEQ ID NO: 2773463 - RNA, 19 nt, Artificial Sequence
  Description of Artificial Sequence: Synthetic oligonucleotide
agugcauggucggcugucg

SEQ ID NO: 2773464 - RNA, 19 nt, Artificial Sequence
  Description of Artificial Sequence: Synthetic oligonucleotide
gaucuugcugggaucaaaa

SEQ ID NO: 2773465 - RNA, 19 nt, Artificial Sequence
  Description of Artificial Sequence: Synthetic oligonucleotide
ucgaaccgcagcuguuacc

SEQ ID NO: 2773466 - RNA, 19 nt, Artificial Sequence
  Description of Artificial Sequence: Synthetic oligonucleotide
cauccuguagucaggcaga

SEQ ID NO: 2773467 - RNA, 19 nt, Artificial Sequence
  Description of Artificial Sequence: Synthetic oligonucleotide
uuaccgaaaggcggcgagc

SEQ ID NO: 2773468 - RNA, 19 nt, Artificial Sequence
  Description of Artificial Sequence: Synthetic oligonucleotide
ucaggcagauaagccauaa

SEQ ID NO: 2773469 - RNA, 19 nt, Artificial Sequence
  Description of Artificial Sequence: Synthetic oligonucleotide
agucaggcagauaagccau

SEQ ID NO: 2773470 - RNA, 19 nt, Artificial Sequence
  Description of Artificial Sequence: Synthetic oligonucleotide
acguuuucguccucggauu

SEQ ID NO: 2773471 - RNA, 19 nt, Artificial Sequence
  Description of Artificial Sequence: Synthetic oligonucleotide
auuccaugauggggaggcc

SEQ ID NO: 2773472 - RNA, 19 nt, Artificial Sequence
  Description of Artificial Sequence: Synthetic oligonucleotide
ggaagucuggguucuucgc

SEQ ID NO: 2773473 - RNA, 19 nt, Artificial Sequence
  Description of Artificial Sequence: Synthetic oligonucleotide
ucgcguagacguuuucguc

SEQ ID NO: 2773474 - RNA, 19 nt, Artificial Sequence
  Description of Artificial Sequence: Synthetic oligonucleotide
accgaaaggcggcgagcac

SEQ ID NO: 2773475 - RNA, 19 nt, Artificial Sequence
  Description of Artificial Sequence: Synthetic oligonucleotide
cuuuaauaaggugcuugga

SEQ ID NO: 2773476 - RNA, 19 nt, Artificial Sequence
  Description of Artificial Sequence: Synthetic oligonucleotide
uuacagcccuggaggauuc

SEQ ID NO: 2773477 - RNA, 19 nt, Artificial Sequence
  Description of Artificial Sequence: Synthetic oligonucleotide
ugguacccaagaccaggac

SEQ ID NO: 2773478 - RNA, 19 nt, Artificial Sequence
  Description of Artificial Sequence: Synthetic oligonucleotide
ggggagauuacagcccugg

SEQ ID NO: 2773479 - RNA, 19 nt, Artificial Sequence
  Description of Artificial Sequence: Synthetic oligonucleotide
gaacgccagcagcugggag

SEQ ID NO: 2773480 - RNA, 19 nt, Artificial Sequence
  Description of Artificial Sequence: Synthetic oligonucleotide
auggggaggccauuggcuu

SEQ ID NO: 2773481 - RNA, 19 nt, Artificial Sequence
  Description of Artificial Sequence: Synthetic oligonucleotide
cucucagcuucccggcggg

SEQ ID NO: 2773482 - RNA, 19 nt, Artificial Sequence
  Description of Artificial Sequence: Synthetic oligonucleotide
agacguuuucguccucgga

SEQ ID NO: 2773483 - RNA, 19 nt, Artificial Sequence
  Description of Artificial Sequence: Synthetic oligonucleotide
gcuguuaccgaaaggcggc

SEQ ID NO: 2773484 - RNA, 19 nt, Artificial Sequence
  Description of Artificial Sequence: Synthetic oligonucleotide
ggguucuucgcguagacgu

SEQ ID NO: 2773485 - RNA, 19 nt, Artificial Sequence
  Description of Artificial Sequence: Synthetic oligonucleotide
uuggaggaaccagaagaau

SEQ ID NO: 2773486 - RNA, 19 nt, Artificial Sequence
  Description of Artificial Sequence: Synthetic oligonucleotide
cucggauucuggguccucc

SEQ ID NO: 2773487 - RNA, 19 nt, Artificial Sequence
  Description of Artificial Sequence: Synthetic oligonucleotide
ucuggguccuccugccagu

SEQ ID NO: 2773488 - RNA, 19 nt, Artificial Sequence
  Description of Artificial Sequence: Synthetic oligonucleotide
cacucuugcauccuguagu

SEQ ID NO: 2773489 - RNA, 19 nt, Artificial Sequence
  Description of Artificial Sequence: Synthetic oligonucleotide
caguagacggggagauuac

SEQ ID NO: 2773490 - RNA, 19 nt, Artificial Sequence
  Description of Artificial Sequence: Synthetic oligonucleotide
cccuggaggauucccagcg

SEQ ID NO: 2773491 - RNA, 19 nt, Artificial Sequence
  Description of Artificial Sequence: Synthetic oligonucleotide
gcauauuccagacguccac

SEQ ID NO: 2773492 - RNA, 19 nt, Artificial Sequence
  Description of Artificial Sequence: Synthetic oligonucleotide
cauggucggcugucguugc

SEQ ID NO: 2773493 - RNA, 19 nt, Artificial Sequence
  Description of Artificial Sequence: Synthetic oligonucleotide
uaagcccuucucaguaauu

SEQ ID NO: 2773494 - RNA, 19 nt, Artificial Sequence
  Description of Artificial Sequence: Synthetic oligonucleotide
ugcauccuguagucaggca

SEQ ID NO: 2773495 - RNA, 19 nt, Artificial Sequence
  Description of Artificial Sequence: Synthetic oligonucleotide
aguagacggggagauuaca

SEQ ID NO: 2773496 - RNA, 19 nt, Artificial Sequence
  Description of Artificial Sequence: Synthetic oligonucleotide
uguuaccgaaaggcggcga

SEQ ID NO: 2773497 - RNA, 19 nt, Artificial Sequence
  Description of Artificial Sequence: Synthetic oligonucleotide
cucgaaccgcagcuguuac

SEQ ID NO: 2773498 - RNA, 19 nt, Artificial Sequence
  Description of Artificial Sequence: Synthetic oligonucleotide
cgcguagacguuuucgucc

SEQ ID NO: 2773499 - RNA, 19 nt, Artificial Sequence
  Description of Artificial Sequence: Synthetic oligonucleotide
cccuuuaauaaggugcuug

SEQ ID NO: 2773500 - RNA, 19 nt, Artificial Sequence
  Description of Artificial Sequence: Synthetic oligonucleotide
cuguuaccgaaaggcggcg

SEQ ID NO: 2773501 - RNA, 19 nt, Artificial Sequence
  Description of Artificial Sequence: Synthetic oligonucleotide
aacagccgggccgccauga

SEQ ID NO: 2773502 - RNA, 19 nt, Artificial Sequence
  Description of Artificial Sequence: Synthetic oligonucleotide
cgaaccgcagcuguuaccg

SEQ ID NO: 2773503 - RNA, 19 nt, Artificial Sequence
  Description of Artificial Sequence: Synthetic oligonucleotide
gucuggguucuucgcguag

SEQ ID NO: 2773504 - RNA, 19 nt, Artificial Sequence
  Description of Artificial Sequence: Synthetic oligonucleotide
gauggggaggccauuggcu

SEQ ID NO: 2773505 - RNA, 19 nt, Artificial Sequence
  Description of Artificial Sequence: Synthetic oligonucleotide
cuggguucuucgcguagac

SEQ ID NO: 2773506 - RNA, 19 nt, Artificial Sequence
  Description of Artificial Sequence: Synthetic oligonucleotide
gggguggacaaaguagugc

SEQ ID NO: 2773507 - RNA, 19 nt, Artificial Sequence
  Description of Artificial Sequence: Synthetic oligonucleotide
ugggagcccucgaaccgca

SEQ ID NO: 2773508 - RNA, 19 nt, Artificial Sequence
  Description of Artificial Sequence: Synthetic oligonucleotide
cuggaucuugcugggauca

SEQ ID NO: 2773509 - RNA, 19 nt, Artificial Sequence
  Description of Artificial Sequence: Synthetic oligonucleotide
cuuaagcccuucucaguaa

SEQ ID NO: 2773510 - RNA, 19 nt, Artificial Sequence
  Description of Artificial Sequence: Synthetic oligonucleotide
ugcauggucggcugucguu

SEQ ID NO: 2773511 - RNA, 19 nt, Artificial Sequence
  Description of Artificial Sequence: Synthetic oligonucleotide
uucuucgcguagacguuuu

SEQ ID NO: 2773512 - RNA, 19 nt, Artificial Sequence
  Description of Artificial Sequence: Synthetic oligonucleotide
cucgcauauuccagacguc

SEQ ID NO: 2773513 - RNA, 19 nt, Artificial Sequence
  Description of Artificial Sequence: Synthetic oligonucleotide
ucuucgcguagacguuuuc

SEQ ID NO: 2773514 - RNA, 19 nt, Artificial Sequence
  Description of Artificial Sequence: Synthetic oligonucleotide
cucagcuucccggcgggcc

SEQ ID NO: 2773515 - RNA, 19 nt, Artificial Sequence
  Description of Artificial Sequence: Synthetic oligonucleotide
ucguugccgcuuucucucc

SEQ ID NO: 2773516 - RNA, 19 nt, Artificial Sequence
  Description of Artificial Sequence: Synthetic oligonucleotide
ggguggacaaaguagugcu

SEQ ID NO: 2773517 - RNA, 19 nt, Artificial Sequence
  Description of Artificial Sequence: Synthetic oligonucleotide
acguccaccacaggguccu

SEQ ID NO: 2773518 - RNA, 19 nt, Artificial Sequence
  Description of Artificial Sequence: Synthetic oligonucleotide
ggugcuuggaggaaccaga

SEQ ID NO: 2773519 - RNA, 19 nt, Artificial Sequence
  Description of Artificial Sequence: Synthetic oligonucleotide
acuuaacagccgggccgcc

SEQ ID NO: 2773520 - RNA, 19 nt, Artificial Sequence
  Description of Artificial Sequence: Synthetic oligonucleotide
cugucguugccgcuuucuc

SEQ ID NO: 2773521 - RNA, 19 nt, Artificial Sequence
  Description of Artificial Sequence: Synthetic oligonucleotide
accacaggguccuggucau

SEQ ID NO: 2773522 - RNA, 19 nt, Artificial Sequence
  Description of Artificial Sequence: Synthetic oligonucleotide
uggggaggccauuggcuuc

SEQ ID NO: 2773523 - RNA, 19 nt, Artificial Sequence
  Description of Artificial Sequence: Synthetic oligonucleotide
gacguccaccacagggucc

SEQ ID NO: 2773524 - RNA, 19 nt, Artificial Sequence
  Description of Artificial Sequence: Synthetic oligonucleotide
uagugcuucuuaagcccuu

SEQ ID NO: 2773525 - RNA, 19 nt, Artificial Sequence
  Description of Artificial Sequence: Synthetic oligonucleotide
cugggagcccucgaaccgc

SEQ ID NO: 2773526 - RNA, 19 nt, Artificial Sequence
  Description of Artificial Sequence: Synthetic oligonucleotide
gcuucucgauauuucacaa

SEQ ID NO: 2773527 - RNA, 19 nt, Artificial Sequence
  Description of Artificial Sequence: Synthetic oligonucleotide
uggguccuccugccagugc

SEQ ID NO: 2773528 - RNA, 19 nt, Artificial Sequence
  Description of Artificial Sequence: Synthetic oligonucleotide
uaacagccgggccgccaug

SEQ ID NO: 2773529 - RNA, 19 nt, Artificial Sequence
  Description of Artificial Sequence: Synthetic oligonucleotide
aaggcggcgagcacacaaa

SEQ ID NO: 2773530 - RNA, 19 nt, Artificial Sequence
  Description of Artificial Sequence: Synthetic oligonucleotide
cagcugggagcccucgaac

SEQ ID NO: 2773531 - RNA, 19 nt, Artificial Sequence
  Description of Artificial Sequence: Synthetic oligonucleotide
uucccggcgggcccacucu

SEQ ID NO: 2773532 - RNA, 19 nt, Artificial Sequence
  Description of Artificial Sequence: Synthetic oligonucleotide
gagcccucgaaccgcagcu

SEQ ID NO: 2773533 - RNA, 19 nt, Artificial Sequence
  Description of Artificial Sequence: Synthetic oligonucleotide
ggaucaaaacaguuggauu

SEQ ID NO: 2773534 - RNA, 19 nt, Artificial Sequence
  Description of Artificial Sequence: Synthetic oligonucleotide
cagacguccaccacagggu

SEQ ID NO: 2773535 - RNA, 19 nt, Artificial Sequence
  Description of Artificial Sequence: Synthetic oligonucleotide
gcauggucggcugucguug

SEQ ID NO: 2773536 - RNA, 19 nt, Artificial Sequence
  Description of Artificial Sequence: Synthetic oligonucleotide
acccaagaccaggacgaug

SEQ ID NO: 2773537 - RNA, 19 nt, Artificial Sequence
  Description of Artificial Sequence: Synthetic oligonucleotide
ggagcccucgaaccgcagc

SEQ ID NO: 2773538 - RNA, 19 nt, Artificial Sequence
  Description of Artificial Sequence: Synthetic oligonucleotide
agucuggguucuucgcgua

SEQ ID NO: 2773539 - RNA, 19 nt, Artificial Sequence
  Description of Artificial Sequence: Synthetic oligonucleotide
gauaagccauaaagguggu

SEQ ID NO: 2773540 - RNA, 19 nt, Artificial Sequence
  Description of Artificial Sequence: Synthetic oligonucleotide
ucggcugucguugccgcuu

SEQ ID NO: 2773541 - RNA, 19 nt, Artificial Sequence
  Description of Artificial Sequence: Synthetic oligonucleotide
cugguaacuggaucuugcu

SEQ ID NO: 2773542 - RNA, 19 nt, Artificial Sequence
  Description of Artificial Sequence: Synthetic oligonucleotide
guagugcuucuuaagcccu

SEQ ID NO: 2773543 - RNA, 19 nt, Artificial Sequence
  Description of Artificial Sequence: Synthetic oligonucleotide
agcagcugggagcccucga

SEQ ID NO: 2773544 - RNA, 19 nt, Artificial Sequence
  Description of Artificial Sequence: Synthetic oligonucleotide
gcgaacgccagcagcuggg

SEQ ID NO: 2773545 - RNA, 19 nt, Artificial Sequence
  Description of Artificial Sequence: Synthetic oligonucleotide
ggaggccauuggcuucucg

SEQ ID NO: 2773546 - RNA, 19 nt, Artificial Sequence
  Description of Artificial Sequence: Synthetic oligonucleotide
caaaacaguuggauuccau

SEQ ID NO: 2773547 - RNA, 19 nt, Artificial Sequence
  Description of Artificial Sequence: Synthetic oligonucleotide
gggaucaaaacaguuggau

SEQ ID NO: 2773548 - RNA, 19 nt, Artificial Sequence
  Description of Artificial Sequence: Synthetic oligonucleotide
auaagccauaaagguggua

SEQ ID NO: 2773549 - RNA, 19 nt, Artificial Sequence
  Description of Artificial Sequence: Synthetic oligonucleotide
ggucggcugucguugccgc

SEQ ID NO: 2773550 - RNA, 19 nt, Artificial Sequence
  Description of Artificial Sequence: Synthetic oligonucleotide
cgauauuucacaagucucu

SEQ ID NO: 2773551 - RNA, 19 nt, Artificial Sequence
  Description of Artificial Sequence: Synthetic oligonucleotide
cuucccggcgggcccacuc

SEQ ID NO: 2773552 - RNA, 19 nt, Artificial Sequence
  Description of Artificial Sequence: Synthetic oligonucleotide
uacagcccuggaggauucc

SEQ ID NO: 2773553 - RNA, 19 nt, Artificial Sequence
  Description of Artificial Sequence: Synthetic oligonucleotide
gccgccaugacagcuugug

SEQ ID NO: 2773554 - RNA, 19 nt, Artificial Sequence
  Description of Artificial Sequence: Synthetic oligonucleotide
gccauaaaggugguaccca

SEQ ID NO: 2773555 - RNA, 19 nt, Artificial Sequence
  Description of Artificial Sequence: Synthetic oligonucleotide
cagcccuggaggauuccca

SEQ ID NO: 2773556 - RNA, 19 nt, Artificial Sequence
  Description of Artificial Sequence: Synthetic oligonucleotide
cuuaacagccgggccgcca

SEQ ID NO: 2773557 - RNA, 19 nt, Artificial Sequence
  Description of Artificial Sequence: Synthetic oligonucleotide
gccauuggcuucucgauau

SEQ ID NO: 2773558 - RNA, 19 nt, Artificial Sequence
  Description of Artificial Sequence: Synthetic oligonucleotide
cagugcauggucggcuguc

SEQ ID NO: 2773559 - RNA, 19 nt, Artificial Sequence
  Description of Artificial Sequence: Synthetic oligonucleotide
uggaucuugcugggaucaa

SEQ ID NO: 2773560 - RNA, 19 nt, Artificial Sequence
  Description of Artificial Sequence: Synthetic oligonucleotide
aggugguacccaagaccag

SEQ ID NO: 2773561 - RNA, 19 nt, Artificial Sequence
  Description of Artificial Sequence: Synthetic oligonucleotide
auccuguagucaggcagau

SEQ ID NO: 2773562 - RNA, 19 nt, Artificial Sequence
  Description of Artificial Sequence: Synthetic oligonucleotide
cugccagugcauggucggc

SEQ ID NO: 2773563 - RNA, 19 nt, Artificial Sequence
  Description of Artificial Sequence: Synthetic oligonucleotide
ccauaaaggugguacccaa

SEQ ID NO: 2773564 - RNA, 19 nt, Artificial Sequence
  Description of Artificial Sequence: Synthetic oligonucleotide
ccuggucauaaccauggaa

SEQ ID NO: 2773565 - RNA, 19 nt, Artificial Sequence
  Description of Artificial Sequence: Synthetic oligonucleotide
ccaugacagcuugugcugc

SEQ ID NO: 2773566 - RNA, 19 nt, Artificial Sequence
  Description of Artificial Sequence: Synthetic oligonucleotide
ggcgagcacacaaacuuaa

SEQ ID NO: 2773567 - RNA, 19 nt, Artificial Sequence
  Description of Artificial Sequence: Synthetic oligonucleotide
cgaaaggcggcgagcacac

SEQ ID NO: 2773568 - RNA, 19 nt, Artificial Sequence
  Description of Artificial Sequence: Synthetic oligonucleotide
ucccuuuaauaaggugcuu

SEQ ID NO: 2773569 - RNA, 19 nt, Artificial Sequence
  Description of Artificial Sequence: Synthetic oligonucleotide
gugcuuggaggaaccagaa

SEQ ID NO: 2773570 - RNA, 19 nt, Artificial Sequence
  Description of Artificial Sequence: Synthetic oligonucleotide
gcggcgagcacacaaacuu

SEQ ID NO: 2773571 - RNA, 19 nt, Artificial Sequence
  Description of Artificial Sequence: Synthetic oligonucleotide
caggcagauaagccauaaa

SEQ ID NO: 2773572 - RNA, 19 nt, Artificial Sequence
  Description of Artificial Sequence: Synthetic oligonucleotide
gggagauuacagcccugga

SEQ ID NO: 2773573 - RNA, 19 nt, Artificial Sequence
  Description of Artificial Sequence: Synthetic oligonucleotide
agcccucgaaccgcagcug

SEQ ID NO: 2773574 - RNA, 19 nt, Artificial Sequence
  Description of Artificial Sequence: Synthetic oligonucleotide
uacccaagaccaggacgau

SEQ ID NO: 2773575 - RNA, 19 nt, Artificial Sequence
  Description of Artificial Sequence: Synthetic oligonucleotide
cgcuuucucuccacaguag

SEQ ID NO: 2773576 - RNA, 19 nt, Artificial Sequence
  Description of Artificial Sequence: Synthetic oligonucleotide
cuggguccuccugccagug

SEQ ID NO: 2773577 - RNA, 19 nt, Artificial Sequence
  Description of Artificial Sequence: Synthetic oligonucleotide
accgcagcuguuaccgaaa

SEQ ID NO: 2773578 - RNA, 19 nt, Artificial Sequence
  Description of Artificial Sequence: Synthetic oligonucleotide
ggauucccagcgaacgcca

SEQ ID NO: 2773579 - RNA, 19 nt, Artificial Sequence
  Description of Artificial Sequence: Synthetic oligonucleotide
cucuugcauccuguaguca

SEQ ID NO: 2773580 - RNA, 19 nt, Artificial Sequence
  Description of Artificial Sequence: Synthetic oligonucleotide
cagcgaacgccagcagcug

SEQ ID NO: 2773581 - RNA, 19 nt, Artificial Sequence
  Description of Artificial Sequence: Synthetic oligonucleotide
uccuguagucaggcagaua

SEQ ID NO: 2773582 - RNA, 19 nt, Artificial Sequence
  Description of Artificial Sequence: Synthetic oligonucleotide
agaagacaacucgcauauu

SEQ ID NO: 2773583 - RNA, 19 nt, Artificial Sequence
  Description of Artificial Sequence: Synthetic oligonucleotide
ggaucuugcugggaucaaa

SEQ ID NO: 2773584 - RNA, 19 nt, Artificial Sequence
  Description of Artificial Sequence: Synthetic oligonucleotide
gcagcugggagcccucgaa

SEQ ID NO: 2773585 - RNA, 19 nt, Artificial Sequence
  Description of Artificial Sequence: Synthetic oligonucleotide
ccgccaugacagcuugugc

SEQ ID NO: 2773586 - RNA, 19 nt, Artificial Sequence
  Description of Artificial Sequence: Synthetic oligonucleotide
cgcagcuguuaccgaaagg

SEQ ID NO: 2773587 - RNA, 19 nt, Artificial Sequence
  Description of Artificial Sequence: Synthetic oligonucleotide
cguuuucguccucggauuc

SEQ ID NO: 2773588 - RNA, 19 nt, Artificial Sequence
  Description of Artificial Sequence: Synthetic oligonucleotide
gcgagcacacaaacuuaac

SEQ ID NO: 2773589 - RNA, 19 nt, Artificial Sequence
  Description of Artificial Sequence: Synthetic oligonucleotide
cgcauauuccagacgucca

SEQ ID NO: 2773590 - RNA, 19 nt, Artificial Sequence
  Description of Artificial Sequence: Synthetic oligonucleotide
guucuucgcguagacguuu

SEQ ID NO: 2773591 - RNA, 19 nt, Artificial Sequence
  Description of Artificial Sequence: Synthetic oligonucleotide
agcuucccggcgggcccac

SEQ ID NO: 2773592 - RNA, 19 nt, Artificial Sequence
  Description of Artificial Sequence: Synthetic oligonucleotide
cgggcccacucuugcaucc

SEQ ID NO: 2773593 - RNA, 19 nt, Artificial Sequence
  Description of Artificial Sequence: Synthetic oligonucleotide
gugcauggucggcugucgu

SEQ ID NO: 2773594 - RNA, 19 nt, Artificial Sequence
  Description of Artificial Sequence: Synthetic oligonucleotide
ccggcgggcccacucuugc

SEQ ID NO: 2773595 - RNA, 19 nt, Artificial Sequence
  Description of Artificial Sequence: Synthetic oligonucleotide
cuucugguaacuggaucuu

SEQ ID NO: 2773596 - RNA, 19 nt, Artificial Sequence
  Description of Artificial Sequence: Synthetic oligonucleotide
ccgcuuucucuccacagua

SEQ ID NO: 2773597 - RNA, 19 nt, Artificial Sequence
  Description of Artificial Sequence: Synthetic oligonucleotide
ccuggaggauucccagcga

SEQ ID NO: 2773598 - RNA, 19 nt, Artificial Sequence
  Description of Artificial Sequence: Synthetic oligonucleotide
gcugucguugccgcuuucu

SEQ ID NO: 2773599 - RNA, 19 nt, Artificial Sequence
  Description of Artificial Sequence: Synthetic oligonucleotide
ggcgggcccacucuugcau

SEQ ID NO: 2773600 - RNA, 19 nt, Artificial Sequence
  Description of Artificial Sequence: Synthetic oligonucleotide
gucggcugucguugccgcu

SEQ ID NO: 2773601 - RNA, 19 nt, Artificial Sequence
  Description of Artificial Sequence: Synthetic oligonucleotide
gcccucgaaccgcagcugu

SEQ ID NO: 2773602 - RNA, 19 nt, Artificial Sequence
  Description of Artificial Sequence: Synthetic oligonucleotide
cccacucuugcauccugua

SEQ ID NO: 2773603 - RNA, 19 nt, Artificial Sequence
  Description of Artificial Sequence: Synthetic oligonucleotide
ggggaggccauuggcuucu

SEQ ID NO: 2773604 - RNA, 19 nt, Artificial Sequence
  Description of Artificial Sequence: Synthetic oligonucleotide
gguggacaaaguagugcuu

SEQ ID NO: 2773605 - RNA, 19 nt, Artificial Sequence
  Description of Artificial Sequence: Synthetic oligonucleotide
ggcggcgagcacacaaacu

SEQ ID NO: 2773606 - RNA, 19 nt, Artificial Sequence
  Description of Artificial Sequence: Synthetic oligonucleotide
ccucgaaccgcagcuguua

SEQ ID NO: 2773607 - RNA, 19 nt, Artificial Sequence
  Description of Artificial Sequence: Synthetic oligonucleotide
gguucuucgcguagacguu

SEQ ID NO: 2773608 - RNA, 19 nt, Artificial Sequence
  Description of Artificial Sequence: Synthetic oligonucleotide
gggagcccucgaaccgcag

SEQ ID NO: 2773609 - RNA, 19 nt, Artificial Sequence
  Description of Artificial Sequence: Synthetic oligonucleotide
cccggcgggcccacucuug

SEQ ID NO: 2773610 - RNA, 19 nt, Artificial Sequence
  Description of Artificial Sequence: Synthetic oligonucleotide
ccauggaagucuggguucu

SEQ ID NO: 2773611 - RNA, 19 nt, Artificial Sequence
  Description of Artificial Sequence: Synthetic oligonucleotide
ggcugucguugccgcuuuc

SEQ ID NO: 2773612 - RNA, 19 nt, Artificial Sequence
  Description of Artificial Sequence: Synthetic oligonucleotide
cggggagauuacagcccug

SEQ ID NO: 2773613 - RNA, 19 nt, Artificial Sequence
  Description of Artificial Sequence: Synthetic oligonucleotide
ccacaguagacggggagau

SEQ ID NO: 2773614 - RNA, 19 nt, Artificial Sequence
  Description of Artificial Sequence: Synthetic oligonucleotide
cguagacguuuucguccuc

SEQ ID NO: 2773615 - RNA, 19 nt, Artificial Sequence
  Description of Artificial Sequence: Synthetic oligonucleotide
cacaguagacggggagauu

SEQ ID NO: 2773616 - RNA, 19 nt, Artificial Sequence
  Description of Artificial Sequence: Synthetic oligonucleotide
gcccacucuugcauccugu

SEQ ID NO: 2773617 - RNA, 19 nt, Artificial Sequence
  Description of Artificial Sequence: Synthetic oligonucleotide
cggcgagcacacaaacuua

SEQ ID NO: 2773618 - RNA, 19 nt, Artificial Sequence
  Description of Artificial Sequence: Synthetic oligonucleotide
ccucggauucuggguccuc

SEQ ID NO: 2773619 - RNA, 19 nt, Artificial Sequence
  Description of Artificial Sequence: Synthetic oligonucleotide
ccagugcauggucggcugu

SEQ ID NO: 2773620 - RNA, 19 nt, Artificial Sequence
  Description of Artificial Sequence: Synthetic oligonucleotide
gguccuccugccagugcau

SEQ ID NO: 2773621 - RNA, 19 nt, Artificial Sequence
  Description of Artificial Sequence: Synthetic oligonucleotide
gggcccacucuugcauccu

SEQ ID NO: 2773622 - RNA, 19 nt, Artificial Sequence
  Description of Artificial Sequence: Synthetic oligonucleotide
cccucgaaccgcagcuguu

SEQ ID NO: 2773623 - RNA, 19 nt, Artificial Sequence
  Description of Artificial Sequence: Synthetic oligonucleotide
cggcgggcccacucuugca

SEQ ID NO: 2773624 - RNA, 19 nt, Artificial Sequence
  Description of Artificial Sequence: Synthetic oligonucleotide
ggccgccaugacagcuugu

SEQ ID NO: 2773625 - RNA, 19 nt, Artificial Sequence
  Description of Artificial Sequence: Synthetic oligonucleotide
ccaugauggggaggccauu

SEQ ID NO: 2773626 - RNA, 19 nt, Artificial Sequence
  Description of Artificial Sequence: Synthetic oligonucleotide
cgggccgccaugacagcuu

SEQ ID NO: 2773627 - RNA, 19 nt, Artificial Sequence
  Description of Artificial Sequence: Synthetic oligonucleotide
gcuucccggcgggcccacu

SEQ ID NO: 2773628 - RNA, 19 nt, Artificial Sequence
  Description of Artificial Sequence: Synthetic oligonucleotide
cggcugucguugccgcuuu

SEQ ID NO: 2773629 - RNA, 19 nt, Artificial Sequence
  Description of Artificial Sequence: Synthetic oligonucleotide
aaauccauggcccagaugg

SEQ ID NO: 2773630 - RNA, 19 nt, Artificial Sequence
  Description of Artificial Sequence: Synthetic oligonucleotide
aauaacaucaaccuuuaac

SEQ ID NO: 2773631 - RNA, 19 nt, Artificial Sequence
  Description of Artificial Sequence: Synthetic oligonucleotide
aaugauaaguacuucauuc

SEQ ID NO: 2773632 - RNA, 19 nt, Artificial Sequence
  Description of Artificial Sequence: Synthetic oligonucleotide
uuaguaaagaaguggaacg

SEQ ID NO: 2773633 - RNA, 19 nt, Artificial Sequence
  Description of Artificial Sequence: Synthetic oligonucleotide
uuuuguucagugaauagag

SEQ ID NO: 2773634 - RNA, 19 nt, Artificial Sequence
  Description of Artificial Sequence: Synthetic oligonucleotide
uugugaaacagccauaccc

SEQ ID NO: 2773635 - RNA, 19 nt, Artificial Sequence
  Description of Artificial Sequence: Synthetic oligonucleotide
agauuauagauugagaauc

SEQ ID NO: 2773636 - RNA, 19 nt, Artificial Sequence
  Description of Artificial Sequence: Synthetic oligonucleotide
aauugugcagauuauagau

SEQ ID NO: 2773637 - RNA, 19 nt, Artificial Sequence
  Description of Artificial Sequence: Synthetic oligonucleotide
aaauuaugacuuccagucc

SEQ ID NO: 2773638 - RNA, 19 nt, Artificial Sequence
  Description of Artificial Sequence: Synthetic oligonucleotide
aagaucuccaugugaauac

SEQ ID NO: 2773639 - RNA, 19 nt, Artificial Sequence
  Description of Artificial Sequence: Synthetic oligonucleotide
ugagacacuguaaugggcg

SEQ ID NO: 2773640 - RNA, 19 nt, Artificial Sequence
  Description of Artificial Sequence: Synthetic oligonucleotide
aauuaugacuuccagucca

SEQ ID NO: 2773641 - RNA, 19 nt, Artificial Sequence
  Description of Artificial Sequence: Synthetic oligonucleotide
gauggaaauaacaucaacc

SEQ ID NO: 2773642 - RNA, 19 nt, Artificial Sequence
  Description of Artificial Sequence: Synthetic oligonucleotide
uuuaacuucucccaaacau

SEQ ID NO: 2773643 - RNA, 19 nt, Artificial Sequence
  Description of Artificial Sequence: Synthetic oligonucleotide
uaaacagauagucuuguga

SEQ ID NO: 2773644 - RNA, 19 nt, Artificial Sequence
  Description of Artificial Sequence: Synthetic oligonucleotide
auggaaauaacaucaaccu

SEQ ID NO: 2773645 - RNA, 19 nt, Artificial Sequence
  Description of Artificial Sequence: Synthetic oligonucleotide
aaacagauagucuugugaa

SEQ ID NO: 2773646 - RNA, 19 nt, Artificial Sequence
  Description of Artificial Sequence: Synthetic oligonucleotide
agauugagaauccuuugac

SEQ ID NO: 2773647 - RNA, 19 nt, Artificial Sequence
  Description of Artificial Sequence: Synthetic oligonucleotide
uuugacuccuccauaaaca

SEQ ID NO: 2773648 - RNA, 19 nt, Artificial Sequence
  Description of Artificial Sequence: Synthetic oligonucleotide
auagucuugugaaacagcc

SEQ ID NO: 2773649 - RNA, 19 nt, Artificial Sequence
  Description of Artificial Sequence: Synthetic oligonucleotide
gaaauugugcagauuauag

SEQ ID NO: 2773650 - RNA, 19 nt, Artificial Sequence
  Description of Artificial Sequence: Synthetic oligonucleotide
ucauccacaggaaugauaa

SEQ ID NO: 2773651 - RNA, 19 nt, Artificial Sequence
  Description of Artificial Sequence: Synthetic oligonucleotide
gugaauaccuaguucaucc

SEQ ID NO: 2773652 - RNA, 19 nt, Artificial Sequence
  Description of Artificial Sequence: Synthetic oligonucleotide
ugugaaacagccauaccca

SEQ ID NO: 2773653 - RNA, 19 nt, Artificial Sequence
  Description of Artificial Sequence: Synthetic oligonucleotide
aaauugugcagauuauaga

SEQ ID NO: 2773654 - RNA, 19 nt, Artificial Sequence
  Description of Artificial Sequence: Synthetic oligonucleotide
uaugacuuccaguccaacg

SEQ ID NO: 2773655 - RNA, 19 nt, Artificial Sequence
  Description of Artificial Sequence: Synthetic oligonucleotide
uauagauugagaauccuuu

SEQ ID NO: 2773656 - RNA, 19 nt, Artificial Sequence
  Description of Artificial Sequence: Synthetic oligonucleotide
cauacguucucacagucgg

SEQ ID NO: 2773657 - RNA, 19 nt, Artificial Sequence
  Description of Artificial Sequence: Synthetic oligonucleotide
acauacauucuuuugaaau

SEQ ID NO: 2773658 - RNA, 19 nt, Artificial Sequence
  Description of Artificial Sequence: Synthetic oligonucleotide
aaacauacauucuuuugaa

SEQ ID NO: 2773659 - RNA, 19 nt, Artificial Sequence
  Description of Artificial Sequence: Synthetic oligonucleotide
acagauagucuugugaaac

SEQ ID NO: 2773660 - RNA, 19 nt, Artificial Sequence
  Description of Artificial Sequence: Synthetic oligonucleotide
ucugagacacuguaauggg

SEQ ID NO: 2773661 - RNA, 19 nt, Artificial Sequence
  Description of Artificial Sequence: Synthetic oligonucleotide
caugugaauaccuaguuca

SEQ ID NO: 2773662 - RNA, 19 nt, Artificial Sequence
  Description of Artificial Sequence: Synthetic oligonucleotide
uccauaaacagauagucuu

SEQ ID NO: 2773663 - RNA, 19 nt, Artificial Sequence
  Description of Artificial Sequence: Synthetic oligonucleotide
accuaguucauccacagga

SEQ ID NO: 2773664 - RNA, 19 nt, Artificial Sequence
  Description of Artificial Sequence: Synthetic oligonucleotide
ucagguuuuguucagugaa

SEQ ID NO: 2773665 - RNA, 19 nt, Artificial Sequence
  Description of Artificial Sequence: Synthetic oligonucleotide
agauggaaauaacaucaac

SEQ ID NO: 2773666 - RNA, 19 nt, Artificial Sequence
  Description of Artificial Sequence: Synthetic oligonucleotide
agagggagaaauuaugacu

SEQ ID NO: 2773667 - RNA, 19 nt, Artificial Sequence
  Description of Artificial Sequence: Synthetic oligonucleotide
ucauuccccaaauccaugg

SEQ ID NO: 2773668 - RNA, 19 nt, Artificial Sequence
  Description of Artificial Sequence: Synthetic oligonucleotide
gagcacaccauccucacag

SEQ ID NO: 2773669 - RNA, 19 nt, Artificial Sequence
  Description of Artificial Sequence: Synthetic oligonucleotide
uaacuucucccaaacauac

SEQ ID NO: 2773670 - RNA, 19 nt, Artificial Sequence
  Description of Artificial Sequence: Synthetic oligonucleotide
aacguggcuguacugagug

SEQ ID NO: 2773671 - RNA, 19 nt, Artificial Sequence
  Description of Artificial Sequence: Synthetic oligonucleotide
agguacuucuuguaggagg

SEQ ID NO: 2773672 - RNA, 19 nt, Artificial Sequence
  Description of Artificial Sequence: Synthetic oligonucleotide
aacagccauacccaccagg

SEQ ID NO: 2773673 - RNA, 19 nt, Artificial Sequence
  Description of Artificial Sequence: Synthetic oligonucleotide
ucgguuuuauccuucaggu

SEQ ID NO: 2773674 - RNA, 19 nt, Artificial Sequence
  Description of Artificial Sequence: Synthetic oligonucleotide
gagaaauuaugacuuccag

SEQ ID NO: 2773675 - RNA, 19 nt, Artificial Sequence
  Description of Artificial Sequence: Synthetic oligonucleotide
uaaagaaguggaacguggc

SEQ ID NO: 2773676 - RNA, 19 nt, Artificial Sequence
  Description of Artificial Sequence: Synthetic oligonucleotide
acagaaugagcacaccauc

SEQ ID NO: 2773677 - RNA, 19 nt, Artificial Sequence
  Description of Artificial Sequence: Synthetic oligonucleotide
ugguauuggggauauggag

SEQ ID NO: 2773678 - RNA, 19 nt, Artificial Sequence
  Description of Artificial Sequence: Synthetic oligonucleotide
uagauugagaauccuuuga

SEQ ID NO: 2773679 - RNA, 19 nt, Artificial Sequence
  Description of Artificial Sequence: Synthetic oligonucleotide
uccaguccaacguaugccg

SEQ ID NO: 2773680 - RNA, 19 nt, Artificial Sequence
  Description of Artificial Sequence: Synthetic oligonucleotide
uaaugggcgcagcacaggg

SEQ ID NO: 2773681 - RNA, 19 nt, Artificial Sequence
  Description of Artificial Sequence: Synthetic oligonucleotide
guaaagaaguggaacgugg

SEQ ID NO: 2773682 - RNA, 19 nt, Artificial Sequence
  Description of Artificial Sequence: Synthetic oligonucleotide
auaaguacuucauucccca

SEQ ID NO: 2773683 - RNA, 19 nt, Artificial Sequence
  Description of Artificial Sequence: Synthetic oligonucleotide
gucgguuuuauccuucagg

SEQ ID NO: 2773684 - RNA, 19 nt, Artificial Sequence
  Description of Artificial Sequence: Synthetic oligonucleotide
gauuauagauugagaaucc

SEQ ID NO: 2773685 - RNA, 19 nt, Artificial Sequence
  Description of Artificial Sequence: Synthetic oligonucleotide
uugacuccuccauaaacag

SEQ ID NO: 2773686 - RNA, 19 nt, Artificial Sequence
  Description of Artificial Sequence: Synthetic oligonucleotide
uugagaauccuuugacucc

SEQ ID NO: 2773687 - RNA, 19 nt, Artificial Sequence
  Description of Artificial Sequence: Synthetic oligonucleotide
agucuugugaaacagccau

SEQ ID NO: 2773688 - RNA, 19 nt, Artificial Sequence
  Description of Artificial Sequence: Synthetic oligonucleotide
uguaaugggcgcagcacag

SEQ ID NO: 2773689 - RNA, 19 nt, Artificial Sequence
  Description of Artificial Sequence: Synthetic oligonucleotide
caaacauacauucuuuuga

SEQ ID NO: 2773690 - RNA, 19 nt, Artificial Sequence
  Description of Artificial Sequence: Synthetic oligonucleotide
uaggaggcauugaagaucu

SEQ ID NO: 2773691 - RNA, 19 nt, Artificial Sequence
  Description of Artificial Sequence: Synthetic oligonucleotide
gauaaguacuucauucccc

SEQ ID NO: 2773692 - RNA, 19 nt, Artificial Sequence
  Description of Artificial Sequence: Synthetic oligonucleotide
uucucccaaacauacauuc

SEQ ID NO: 2773693 - RNA, 19 nt, Artificial Sequence
  Description of Artificial Sequence: Synthetic oligonucleotide
ucuccaugugaauaccuag

SEQ ID NO: 2773694 - RNA, 19 nt, Artificial Sequence
  Description of Artificial Sequence: Synthetic oligonucleotide
uuaacuucucccaaacaua

SEQ ID NO: 2773695 - RNA, 19 nt, Artificial Sequence
  Description of Artificial Sequence: Synthetic oligonucleotide
auagauugagaauccuuug

SEQ ID NO: 2773696 - RNA, 19 nt, Artificial Sequence
  Description of Artificial Sequence: Synthetic oligonucleotide
agaauccuuugacuccucc

SEQ ID NO: 2773697 - RNA, 19 nt, Artificial Sequence
  Description of Artificial Sequence: Synthetic oligonucleotide
agugaauagagggagaaau

SEQ ID NO: 2773698 - RNA, 19 nt, Artificial Sequence
  Description of Artificial Sequence: Synthetic oligonucleotide
acaggcgaggaccagguag

SEQ ID NO: 2773699 - RNA, 19 nt, Artificial Sequence
  Description of Artificial Sequence: Synthetic oligonucleotide
auggaguuaguaaagaagu

SEQ ID NO: 2773700 - RNA, 19 nt, Artificial Sequence
  Description of Artificial Sequence: Synthetic oligonucleotide
ggaguuaguaaagaagugg

SEQ ID NO: 2773701 - RNA, 19 nt, Artificial Sequence
  Description of Artificial Sequence: Synthetic oligonucleotide
uuauagauugagaauccuu

SEQ ID NO: 2773702 - RNA, 19 nt, Artificial Sequence
  Description of Artificial Sequence: Synthetic oligonucleotide
auaccuaguucauccacag

SEQ ID NO: 2773703 - RNA, 19 nt, Artificial Sequence
  Description of Artificial Sequence: Synthetic oligonucleotide
ugcagauuauagauugaga

SEQ ID NO: 2773704 - RNA, 19 nt, Artificial Sequence
  Description of Artificial Sequence: Synthetic oligonucleotide
ucuugugaaacagccauac

SEQ ID NO: 2773705 - RNA, 19 nt, Artificial Sequence
  Description of Artificial Sequence: Synthetic oligonucleotide
uggaguuaguaaagaagug

SEQ ID NO: 2773706 - RNA, 19 nt, Artificial Sequence
  Description of Artificial Sequence: Synthetic oligonucleotide
aaguacuucauuccccaaa

SEQ ID NO: 2773707 - RNA, 19 nt, Artificial Sequence
  Description of Artificial Sequence: Synthetic oligonucleotide
auccucacaggcgaggacc

SEQ ID NO: 2773708 - RNA, 19 nt, Artificial Sequence
  Description of Artificial Sequence: Synthetic oligonucleotide
auuucugcaccugggaggg

SEQ ID NO: 2773709 - RNA, 19 nt, Artificial Sequence
  Description of Artificial Sequence: Synthetic oligonucleotide
uccacaggaaugauaagua

SEQ ID NO: 2773710 - RNA, 19 nt, Artificial Sequence
  Description of Artificial Sequence: Synthetic oligonucleotide
guucagugaauagagggag

SEQ ID NO: 2773711 - RNA, 19 nt, Artificial Sequence
  Description of Artificial Sequence: Synthetic oligonucleotide
aauaccuaguucauccaca

SEQ ID NO: 2773712 - RNA, 19 nt, Artificial Sequence
  Description of Artificial Sequence: Synthetic oligonucleotide
gaauaccuaguucauccac

SEQ ID NO: 2773713 - RNA, 19 nt, Artificial Sequence
  Description of Artificial Sequence: Synthetic oligonucleotide
cuuugacuccuccauaaac

SEQ ID NO: 2773714 - RNA, 19 nt, Artificial Sequence
  Description of Artificial Sequence: Synthetic oligonucleotide
gaguuaguaaagaagugga

SEQ ID NO: 2773715 - RNA, 19 nt, Artificial Sequence
  Description of Artificial Sequence: Synthetic oligonucleotide
aacauacauucuuuugaaa

SEQ ID NO: 2773716 - RNA, 19 nt, Artificial Sequence
  Description of Artificial Sequence: Synthetic oligonucleotide
augccgaggauacaggcug

SEQ ID NO: 2773717 - RNA, 19 nt, Artificial Sequence
  Description of Artificial Sequence: Synthetic oligonucleotide
caacguaugccgaggauac

SEQ ID NO: 2773718 - RNA, 19 nt, Artificial Sequence
  Description of Artificial Sequence: Synthetic oligonucleotide
cacaccauccucacaggcg

SEQ ID NO: 2773719 - RNA, 19 nt, Artificial Sequence
  Description of Artificial Sequence: Synthetic oligonucleotide
uccuccauaaacagauagu

SEQ ID NO: 2773720 - RNA, 19 nt, Artificial Sequence
  Description of Artificial Sequence: Synthetic oligonucleotide
gcagauuauagauugagaa

SEQ ID NO: 2773721 - RNA, 19 nt, Artificial Sequence
  Description of Artificial Sequence: Synthetic oligonucleotide
aacagauagucuugugaaa

SEQ ID NO: 2773722 - RNA, 19 nt, Artificial Sequence
  Description of Artificial Sequence: Synthetic oligonucleotide
acuguaaugggcgcagcac

SEQ ID NO: 2773723 - RNA, 19 nt, Artificial Sequence
  Description of Artificial Sequence: Synthetic oligonucleotide
gaucugagacacuguaaug

SEQ ID NO: 2773724 - RNA, 19 nt, Artificial Sequence
  Description of Artificial Sequence: Synthetic oligonucleotide
auaaacagauagucuugug

SEQ ID NO: 2773725 - RNA, 19 nt, Artificial Sequence
  Description of Artificial Sequence: Synthetic oligonucleotide
gauagucuugugaaacagc

SEQ ID NO: 2773726 - RNA, 19 nt, Artificial Sequence
  Description of Artificial Sequence: Synthetic oligonucleotide
auuggggauauggaguuag

SEQ ID NO: 2773727 - RNA, 19 nt, Artificial Sequence
  Description of Artificial Sequence: Synthetic oligonucleotide
agaaguggaacguggcugu

SEQ ID NO: 2773728 - RNA, 19 nt, Artificial Sequence
  Description of Artificial Sequence: Synthetic oligonucleotide
uggaaauaacaucaaccuu

SEQ ID NO: 2773729 - RNA, 19 nt, Artificial Sequence
  Description of Artificial Sequence: Synthetic oligonucleotide
auccacaggaaugauaagu

SEQ ID NO: 2773730 - RNA, 19 nt, Artificial Sequence
  Description of Artificial Sequence: Synthetic oligonucleotide
aguaaagaaguggaacgug

SEQ ID NO: 2773731 - RNA, 19 nt, Artificial Sequence
  Description of Artificial Sequence: Synthetic oligonucleotide
ugaauaccuaguucaucca

SEQ ID NO: 2773732 - RNA, 19 nt, Artificial Sequence
  Description of Artificial Sequence: Synthetic oligonucleotide
uaguaaagaaguggaacgu

SEQ ID NO: 2773733 - RNA, 19 nt, Artificial Sequence
  Description of Artificial Sequence: Synthetic oligonucleotide
ucacagucgguuuuauccu

SEQ ID NO: 2773734 - RNA, 19 nt, Artificial Sequence
  Description of Artificial Sequence: Synthetic oligonucleotide
augagcacaccauccucac

SEQ ID NO: 2773735 - RNA, 19 nt, Artificial Sequence
  Description of Artificial Sequence: Synthetic oligonucleotide
uaugccgaggauacaggcu

SEQ ID NO: 2773736 - RNA, 19 nt, Artificial Sequence
  Description of Artificial Sequence: Synthetic oligonucleotide
cuucagguuuuguucagug

SEQ ID NO: 2773737 - RNA, 19 nt, Artificial Sequence
  Description of Artificial Sequence: Synthetic oligonucleotide
ccagauggaaauaacauca

SEQ ID NO: 2773738 - RNA, 19 nt, Artificial Sequence
  Description of Artificial Sequence: Synthetic oligonucleotide
uucauuccccaaauccaug

SEQ ID NO: 2773739 - RNA, 19 nt, Artificial Sequence
  Description of Artificial Sequence: Synthetic oligonucleotide
cuuccaguccaacguaugc

SEQ ID NO: 2773740 - RNA, 19 nt, Artificial Sequence
  Description of Artificial Sequence: Synthetic oligonucleotide
uugaaauugugcagauuau

SEQ ID NO: 2773741 - RNA, 19 nt, Artificial Sequence
  Description of Artificial Sequence: Synthetic oligonucleotide
ugagaauccuuugacuccu

SEQ ID NO: 2773742 - RNA, 19 nt, Artificial Sequence
  Description of Artificial Sequence: Synthetic oligonucleotide
ucagugaauagagggagaa

SEQ ID NO: 2773743 - RNA, 19 nt, Artificial Sequence
  Description of Artificial Sequence: Synthetic oligonucleotide
uugagcuggauuucugcac

SEQ ID NO: 2773744 - RNA, 19 nt, Artificial Sequence
  Description of Artificial Sequence: Synthetic oligonucleotide
uucagguuuuguucaguga

SEQ ID NO: 2773745 - RNA, 19 nt, Artificial Sequence
  Description of Artificial Sequence: Synthetic oligonucleotide
aaccuuuaacuucucccaa

SEQ ID NO: 2773746 - RNA, 19 nt, Artificial Sequence
  Description of Artificial Sequence: Synthetic oligonucleotide
uguaggaggcauugaagau

SEQ ID NO: 2773747 - RNA, 19 nt, Artificial Sequence
  Description of Artificial Sequence: Synthetic oligonucleotide
ugaaauugugcagauuaua

SEQ ID NO: 2773748 - RNA, 19 nt, Artificial Sequence
  Description of Artificial Sequence: Synthetic oligonucleotide
aaguggaacguggcuguac

SEQ ID NO: 2773749 - RNA, 19 nt, Artificial Sequence
  Description of Artificial Sequence: Synthetic oligonucleotide
uucagugaauagagggaga

SEQ ID NO: 2773750 - RNA, 19 nt, Artificial Sequence
  Description of Artificial Sequence: Synthetic oligonucleotide
uccaugugaauaccuaguu

SEQ ID NO: 2773751 - RNA, 19 nt, Artificial Sequence
  Description of Artificial Sequence: Synthetic oligonucleotide
agggagaaauuaugacuuc

SEQ ID NO: 2773752 - RNA, 19 nt, Artificial Sequence
  Description of Artificial Sequence: Synthetic oligonucleotide
guaugccgaggauacaggc

SEQ ID NO: 2773753 - RNA, 19 nt, Artificial Sequence
  Description of Artificial Sequence: Synthetic oligonucleotide
aaugggcgcagcacagggc

SEQ ID NO: 2773754 - RNA, 19 nt, Artificial Sequence
  Description of Artificial Sequence: Synthetic oligonucleotide
aguggaacguggcuguacu

SEQ ID NO: 2773755 - RNA, 19 nt, Artificial Sequence
  Description of Artificial Sequence: Synthetic oligonucleotide
gugcagauuauagauugag

SEQ ID NO: 2773756 - RNA, 19 nt, Artificial Sequence
  Description of Artificial Sequence: Synthetic oligonucleotide
ugugcagauuauagauuga

SEQ ID NO: 2773757 - RNA, 19 nt, Artificial Sequence
  Description of Artificial Sequence: Synthetic oligonucleotide
ucucccaaacauacauucu

SEQ ID NO: 2773758 - RNA, 19 nt, Artificial Sequence
  Description of Artificial Sequence: Synthetic oligonucleotide
caggcgaggaccagguagg

SEQ ID NO: 2773759 - RNA, 19 nt, Artificial Sequence
  Description of Artificial Sequence: Synthetic oligonucleotide
uaccuaguucauccacagg

SEQ ID NO: 2773760 - RNA, 19 nt, Artificial Sequence
  Description of Artificial Sequence: Synthetic oligonucleotide
gauugagaauccuuugacu

SEQ ID NO: 2773761 - RNA, 19 nt, Artificial Sequence
  Description of Artificial Sequence: Synthetic oligonucleotide
uuccaguccaacguaugcc

SEQ ID NO: 2773762 - RNA, 19 nt, Artificial Sequence
  Description of Artificial Sequence: Synthetic oligonucleotide
acguaugccgaggauacag

SEQ ID NO: 2773763 - RNA, 19 nt, Artificial Sequence
  Description of Artificial Sequence: Synthetic oligonucleotide
uagucuugugaaacagcca

SEQ ID NO: 2773764 - RNA, 19 nt, Artificial Sequence
  Description of Artificial Sequence: Synthetic oligonucleotide
auuauagauugagaauccu

SEQ ID NO: 2773765 - RNA, 19 nt, Artificial Sequence
  Description of Artificial Sequence: Synthetic oligonucleotide
gaaugagcacaccauccuc

SEQ ID NO: 2773766 - RNA, 19 nt, Artificial Sequence
  Description of Artificial Sequence: Synthetic oligonucleotide
uggaacguggcuguacuga

SEQ ID NO: 2773767 - RNA, 19 nt, Artificial Sequence
  Description of Artificial Sequence: Synthetic oligonucleotide
uucauccacaggaaugaua

SEQ ID NO: 2773768 - RNA, 19 nt, Artificial Sequence
  Description of Artificial Sequence: Synthetic oligonucleotide
gagacacuguaaugggcgc

SEQ ID NO: 2773769 - RNA, 19 nt, Artificial Sequence
  Description of Artificial Sequence: Synthetic oligonucleotide
ugacuccuccauaaacaga

SEQ ID NO: 2773770 - RNA, 19 nt, Artificial Sequence
  Description of Artificial Sequence: Synthetic oligonucleotide
aaauaacaucaaccuuuaa

SEQ ID NO: 2773771 - RNA, 19 nt, Artificial Sequence
  Description of Artificial Sequence: Synthetic oligonucleotide
ucccaaacauacauucuuu

SEQ ID NO: 2773772 - RNA, 19 nt, Artificial Sequence
  Description of Artificial Sequence: Synthetic oligonucleotide
gggauauggaguuaguaaa

SEQ ID NO: 2773773 - RNA, 19 nt, Artificial Sequence
  Description of Artificial Sequence: Synthetic oligonucleotide
cuugugaaacagccauacc

SEQ ID NO: 2773774 - RNA, 19 nt, Artificial Sequence
  Description of Artificial Sequence: Synthetic oligonucleotide
ucacaggcgaggaccaggu

SEQ ID NO: 2773775 - RNA, 19 nt, Artificial Sequence
  Description of Artificial Sequence: Synthetic oligonucleotide
acaggaaugauaaguacuu

SEQ ID NO: 2773776 - RNA, 19 nt, Artificial Sequence
  Description of Artificial Sequence: Synthetic oligonucleotide
ugugaauaccuaguucauc

SEQ ID NO: 2773777 - RNA, 19 nt, Artificial Sequence
  Description of Artificial Sequence: Synthetic oligonucleotide
ggauauggaguuaguaaag

SEQ ID NO: 2773778 - RNA, 19 nt, Artificial Sequence
  Description of Artificial Sequence: Synthetic oligonucleotide
uccuucagguuuuguucag

SEQ ID NO: 2773779 - RNA, 19 nt, Artificial Sequence
  Description of Artificial Sequence: Synthetic oligonucleotide
guaggaggcauugaagauc

SEQ ID NO: 2773780 - RNA, 19 nt, Artificial Sequence
  Description of Artificial Sequence: Synthetic oligonucleotide
gguuuuauccuucagguuu

SEQ ID NO: 2773781 - RNA, 19 nt, Artificial Sequence
  Description of Artificial Sequence: Synthetic oligonucleotide
gggccauacguucucacag

SEQ ID NO: 2773782 - RNA, 19 nt, Artificial Sequence
  Description of Artificial Sequence: Synthetic oligonucleotide
aguccaacguaugccgagg

SEQ ID NO: 2773783 - RNA, 19 nt, Artificial Sequence
  Description of Artificial Sequence: Synthetic oligonucleotide
aaacagccauacccaccag

SEQ ID NO: 2773784 - RNA, 19 nt, Artificial Sequence
  Description of Artificial Sequence: Synthetic oligonucleotide
cauuccccaaauccauggc

SEQ ID NO: 2773785 - RNA, 19 nt, Artificial Sequence
  Description of Artificial Sequence: Synthetic oligonucleotide
gcuggauuucugcaccugg

SEQ ID NO: 2773786 - RNA, 19 nt, Artificial Sequence
  Description of Artificial Sequence: Synthetic oligonucleotide
cauccacugguauugggga

SEQ ID NO: 2773787 - RNA, 19 nt, Artificial Sequence
  Description of Artificial Sequence: Synthetic oligonucleotide
gugaaacagccauacccac

SEQ ID NO: 2773788 - RNA, 19 nt, Artificial Sequence
  Description of Artificial Sequence: Synthetic oligonucleotide
cacaggaaugauaaguacu

SEQ ID NO: 2773789 - RNA, 19 nt, Artificial Sequence
  Description of Artificial Sequence: Synthetic oligonucleotide
ugacuuccaguccaacgua

SEQ ID NO: 2773790 - RNA, 19 nt, Artificial Sequence
  Description of Artificial Sequence: Synthetic oligonucleotide
uccucacaggcgaggacca

SEQ ID NO: 2773791 - RNA, 19 nt, Artificial Sequence
  Description of Artificial Sequence: Synthetic oligonucleotide
ggaggcauugaagaucucc

SEQ ID NO: 2773792 - RNA, 19 nt, Artificial Sequence
  Description of Artificial Sequence: Synthetic oligonucleotide
agucgguuuuauccuucag

SEQ ID NO: 2773793 - RNA, 19 nt, Artificial Sequence
  Description of Artificial Sequence: Synthetic oligonucleotide
ggggauauggaguuaguaa

SEQ ID NO: 2773794 - RNA, 19 nt, Artificial Sequence
  Description of Artificial Sequence: Synthetic oligonucleotide
gagggagaaauuaugacuu

SEQ ID NO: 2773795 - RNA, 19 nt, Artificial Sequence
  Description of Artificial Sequence: Synthetic oligonucleotide
caguccaacguaugccgag

SEQ ID NO: 2773796 - RNA, 19 nt, Artificial Sequence
  Description of Artificial Sequence: Synthetic oligonucleotide
ccauaaacagauagucuug

SEQ ID NO: 2773797 - RNA, 19 nt, Artificial Sequence
  Description of Artificial Sequence: Synthetic oligonucleotide
cagauagucuugugaaaca

SEQ ID NO: 2773798 - RNA, 19 nt, Artificial Sequence
  Description of Artificial Sequence: Synthetic oligonucleotide
gcauccacugguauugggg

SEQ ID NO: 2773799 - RNA, 19 nt, Artificial Sequence
  Description of Artificial Sequence: Synthetic oligonucleotide
cuguaaugggcgcagcaca

SEQ ID NO: 2773800 - RNA, 19 nt, Artificial Sequence
  Description of Artificial Sequence: Synthetic oligonucleotide
ggaacguggcuguacugag

SEQ ID NO: 2773801 - RNA, 19 nt, Artificial Sequence
  Description of Artificial Sequence: Synthetic oligonucleotide
cugguauuggggauaugga

SEQ ID NO: 2773802 - RNA, 19 nt, Artificial Sequence
  Description of Artificial Sequence: Synthetic oligonucleotide
ccuccauaaacagauaguc

SEQ ID NO: 2773803 - RNA, 19 nt, Artificial Sequence
  Description of Artificial Sequence: Synthetic oligonucleotide
agggccauacguucucaca

SEQ ID NO: 2773804 - RNA, 19 nt, Artificial Sequence
  Description of Artificial Sequence: Synthetic oligonucleotide
uacguucucacagucgguu

SEQ ID NO: 2773805 - RNA, 19 nt, Artificial Sequence
  Description of Artificial Sequence: Synthetic oligonucleotide
uaaguacuucauuccccaa

SEQ ID NO: 2773806 - RNA, 19 nt, Artificial Sequence
  Description of Artificial Sequence: Synthetic oligonucleotide
gaaugauaaguacuucauu

SEQ ID NO: 2773807 - RNA, 19 nt, Artificial Sequence
  Description of Artificial Sequence: Synthetic oligonucleotide
gaccagguaggaggaagag

SEQ ID NO: 2773808 - RNA, 19 nt, Artificial Sequence
  Description of Artificial Sequence: Synthetic oligonucleotide
uuuuauccuucagguuuug

SEQ ID NO: 2773809 - RNA, 19 nt, Artificial Sequence
  Description of Artificial Sequence: Synthetic oligonucleotide
acagucgguuuuauccuuc

SEQ ID NO: 2773810 - RNA, 19 nt, Artificial Sequence
  Description of Artificial Sequence: Synthetic oligonucleotide
ugcugaucugagacacugu

SEQ ID NO: 2773811 - RNA, 19 nt, Artificial Sequence
  Description of Artificial Sequence: Synthetic oligonucleotide
ccuuuaacuucucccaaac

SEQ ID NO: 2773812 - RNA, 19 nt, Artificial Sequence
  Description of Artificial Sequence: Synthetic oligonucleotide
cagauuauagauugagaau

SEQ ID NO: 2773813 - RNA, 19 nt, Artificial Sequence
  Description of Artificial Sequence: Synthetic oligonucleotide
uccaacguaugccgaggau

SEQ ID NO: 2773814 - RNA, 19 nt, Artificial Sequence
  Description of Artificial Sequence: Synthetic oligonucleotide
uuuugaaauugugcagauu

SEQ ID NO: 2773815 - RNA, 19 nt, Artificial Sequence
  Description of Artificial Sequence: Synthetic oligonucleotide
uuggggauauggaguuagu

SEQ ID NO: 2773816 - RNA, 19 nt, Artificial Sequence
  Description of Artificial Sequence: Synthetic oligonucleotide
cccagauggaaauaacauc

SEQ ID NO: 2773817 - RNA, 19 nt, Artificial Sequence
  Description of Artificial Sequence: Synthetic oligonucleotide
uggggauauggaguuagua

SEQ ID NO: 2773818 - RNA, 19 nt, Artificial Sequence
  Description of Artificial Sequence: Synthetic oligonucleotide
aacuucucccaaacauaca

SEQ ID NO: 2773819 - RNA, 19 nt, Artificial Sequence
  Description of Artificial Sequence: Synthetic oligonucleotide
auugugcagauuauagauu

SEQ ID NO: 2773820 - RNA, 19 nt, Artificial Sequence
  Description of Artificial Sequence: Synthetic oligonucleotide
agguuuuguucagugaaua

SEQ ID NO: 2773821 - RNA, 19 nt, Artificial Sequence
  Description of Artificial Sequence: Synthetic oligonucleotide
uuaugacuuccaguccaac

SEQ ID NO: 2773822 - RNA, 19 nt, Artificial Sequence
  Description of Artificial Sequence: Synthetic oligonucleotide
accauccucacaggcgagg

SEQ ID NO: 2773823 - RNA, 19 nt, Artificial Sequence
  Description of Artificial Sequence: Synthetic oligonucleotide
uggcccagauggaaauaac

SEQ ID NO: 2773824 - RNA, 19 nt, Artificial Sequence
  Description of Artificial Sequence: Synthetic oligonucleotide
ccauacguucucacagucg

SEQ ID NO: 2773825 - RNA, 19 nt, Artificial Sequence
  Description of Artificial Sequence: Synthetic oligonucleotide
ggagaaauuaugacuucca

SEQ ID NO: 2773826 - RNA, 19 nt, Artificial Sequence
  Description of Artificial Sequence: Synthetic oligonucleotide
ugccgaggauacaggcugc

SEQ ID NO: 2773827 - RNA, 19 nt, Artificial Sequence
  Description of Artificial Sequence: Synthetic oligonucleotide
acguggcuguacugagugg

SEQ ID NO: 2773828 - RNA, 19 nt, Artificial Sequence
  Description of Artificial Sequence: Synthetic oligonucleotide
gaggauacaggcugcuccu

SEQ ID NO: 2773829 - RNA, 19 nt, Artificial Sequence
  Description of Artificial Sequence: Synthetic oligonucleotide
cgaggauacaggcugcucc

SEQ ID NO: 2773830 - RNA, 19 nt, Artificial Sequence
  Description of Artificial Sequence: Synthetic oligonucleotide
aauccauggcccagaugga

SEQ ID NO: 2773831 - RNA, 19 nt, Artificial Sequence
  Description of Artificial Sequence: Synthetic oligonucleotide
guauuggggauauggaguu

SEQ ID NO: 2773832 - RNA, 19 nt, Artificial Sequence
  Description of Artificial Sequence: Synthetic oligonucleotide
cuccauaaacagauagucu

SEQ ID NO: 2773833 - RNA, 19 nt, Artificial Sequence
  Description of Artificial Sequence: Synthetic oligonucleotide
auggcccagauggaaauaa

SEQ ID NO: 2773834 - RNA, 19 nt, Artificial Sequence
  Description of Artificial Sequence: Synthetic oligonucleotide
caggucccacagaaugagc

SEQ ID NO: 2773835 - RNA, 19 nt, Artificial Sequence
  Description of Artificial Sequence: Synthetic oligonucleotide
gguauuggggauauggagu

SEQ ID NO: 2773836 - RNA, 19 nt, Artificial Sequence
  Description of Artificial Sequence: Synthetic oligonucleotide
ggcucuuggcauccacugg

SEQ ID NO: 2773837 - RNA, 19 nt, Artificial Sequence
  Description of Artificial Sequence: Synthetic oligonucleotide
ggcauccacugguauuggg

SEQ ID NO: 2773838 - RNA, 19 nt, Artificial Sequence
  Description of Artificial Sequence: Synthetic oligonucleotide
auuaugacuuccaguccaa

SEQ ID NO: 2773839 - RNA, 19 nt, Artificial Sequence
  Description of Artificial Sequence: Synthetic oligonucleotide
gggcucuuggcauccacug

SEQ ID NO: 2773840 - RNA, 19 nt, Artificial Sequence
  Description of Artificial Sequence: Synthetic oligonucleotide
caggaaugauaaguacuuc

SEQ ID NO: 2773841 - RNA, 19 nt, Artificial Sequence
  Description of Artificial Sequence: Synthetic oligonucleotide
cauaaacagauagucuugu

SEQ ID NO: 2773842 - RNA, 19 nt, Artificial Sequence
  Description of Artificial Sequence: Synthetic oligonucleotide
cuccuggagggcucuuggc

SEQ ID NO: 2773843 - RNA, 19 nt, Artificial Sequence
  Description of Artificial Sequence: Synthetic oligonucleotide
uggcauccacugguauugg

SEQ ID NO: 2773844 - RNA, 19 nt, Artificial Sequence
  Description of Artificial Sequence: Synthetic oligonucleotide
guggaacguggcuguacug

SEQ ID NO: 2773845 - RNA, 19 nt, Artificial Sequence
  Description of Artificial Sequence: Synthetic oligonucleotide
ccaugugaauaccuaguuc

SEQ ID NO: 2773846 - RNA, 19 nt, Artificial Sequence
  Description of Artificial Sequence: Synthetic oligonucleotide
aacguaugccgaggauaca

SEQ ID NO: 2773847 - RNA, 19 nt, Artificial Sequence
  Description of Artificial Sequence: Synthetic oligonucleotide
cacagaaugagcacaccau

SEQ ID NO: 2773848 - RNA, 19 nt, Artificial Sequence
  Description of Artificial Sequence: Synthetic oligonucleotide
auccuuugacuccuccaua

SEQ ID NO: 2773849 - RNA, 19 nt, Artificial Sequence
  Description of Artificial Sequence: Synthetic oligonucleotide
gcuccuggagggcucuugg

SEQ ID NO: 2773850 - RNA, 19 nt, Artificial Sequence
  Description of Artificial Sequence: Synthetic oligonucleotide
cacuguaaugggcgcagca

SEQ ID NO: 2773851 - RNA, 19 nt, Artificial Sequence
  Description of Artificial Sequence: Synthetic oligonucleotide
cuccaugugaauaccuagu

SEQ ID NO: 2773852 - RNA, 19 nt, Artificial Sequence
  Description of Artificial Sequence: Synthetic oligonucleotide
gagggcucuuggcauccac

SEQ ID NO: 2773853 - RNA, 19 nt, Artificial Sequence
  Description of Artificial Sequence: Synthetic oligonucleotide
augugaauaccuaguucau

SEQ ID NO: 2773854 - RNA, 19 nt, Artificial Sequence
  Description of Artificial Sequence: Synthetic oligonucleotide
cacagggccauacguucuc

SEQ ID NO: 2773855 - RNA, 19 nt, Artificial Sequence
  Description of Artificial Sequence: Synthetic oligonucleotide
cuuccagguacuucuugua

SEQ ID NO: 2773856 - RNA, 19 nt, Artificial Sequence
  Description of Artificial Sequence: Synthetic oligonucleotide
cauccucacaggcgaggac

SEQ ID NO: 2773857 - RNA, 19 nt, Artificial Sequence
  Description of Artificial Sequence: Synthetic oligonucleotide
aucuccaugugaauaccua

SEQ ID NO: 2773858 - RNA, 19 nt, Artificial Sequence
  Description of Artificial Sequence: Synthetic oligonucleotide
cuggagggcucuuggcauc

SEQ ID NO: 2773859 - RNA, 19 nt, Artificial Sequence
  Description of Artificial Sequence: Synthetic oligonucleotide
cagggccauacguucucac

SEQ ID NO: 2773860 - RNA, 19 nt, Artificial Sequence
  Description of Artificial Sequence: Synthetic oligonucleotide
acguucucacagucgguuu

SEQ ID NO: 2773861 - RNA, 19 nt, Artificial Sequence
  Description of Artificial Sequence: Synthetic oligonucleotide
gaucuccaugugaauaccu

SEQ ID NO: 2773862 - RNA, 19 nt, Artificial Sequence
  Description of Artificial Sequence: Synthetic oligonucleotide
guccaacguaugccgagga

SEQ ID NO: 2773863 - RNA, 19 nt, Artificial Sequence
  Description of Artificial Sequence: Synthetic oligonucleotide
agcuggauuucugcaccug

SEQ ID NO: 2773864 - RNA, 19 nt, Artificial Sequence
  Description of Artificial Sequence: Synthetic oligonucleotide
ggaaugauaaguacuucau

SEQ ID NO: 2773865 - RNA, 19 nt, Artificial Sequence
  Description of Artificial Sequence: Synthetic oligonucleotide
cguaugccgaggauacagg

SEQ ID NO: 2773866 - RNA, 19 nt, Artificial Sequence
  Description of Artificial Sequence: Synthetic oligonucleotide
gccauacguucucacaguc

SEQ ID NO: 2773867 - RNA, 19 nt, Artificial Sequence
  Description of Artificial Sequence: Synthetic oligonucleotide
uauuggggauauggaguua

SEQ ID NO: 2773868 - RNA, 19 nt, Artificial Sequence
  Description of Artificial Sequence: Synthetic oligonucleotide
cagucgguuuuauccuuca

SEQ ID NO: 2773869 - RNA, 19 nt, Artificial Sequence
  Description of Artificial Sequence: Synthetic oligonucleotide
cguggcuguacugaguggc

SEQ ID NO: 2773870 - RNA, 19 nt, Artificial Sequence
  Description of Artificial Sequence: Synthetic oligonucleotide
ugggcgcagcacagggcca

SEQ ID NO: 2773871 - RNA, 19 nt, Artificial Sequence
  Description of Artificial Sequence: Synthetic oligonucleotide
aggauacaggcugcuccug

SEQ ID NO: 2773872 - RNA, 19 nt, Artificial Sequence
  Description of Artificial Sequence: Synthetic oligonucleotide
caccauccucacaggcgag

SEQ ID NO: 2773873 - RNA, 19 nt, Artificial Sequence
  Description of Artificial Sequence: Synthetic oligonucleotide
uucucacagucgguuuuau

SEQ ID NO: 2773874 - RNA, 19 nt, Artificial Sequence
  Description of Artificial Sequence: Synthetic oligonucleotide
auacguucucacagucggu

SEQ ID NO: 2773875 - RNA, 19 nt, Artificial Sequence
  Description of Artificial Sequence: Synthetic oligonucleotide
cuuggcauccacugguauu

SEQ ID NO: 2773876 - RNA, 19 nt, Artificial Sequence
  Description of Artificial Sequence: Synthetic oligonucleotide
ccuaguucauccacaggaa

SEQ ID NO: 2773877 - RNA, 19 nt, Artificial Sequence
  Description of Artificial Sequence: Synthetic oligonucleotide
gagcuggauuucugcaccu

SEQ ID NO: 2773878 - RNA, 19 nt, Artificial Sequence
  Description of Artificial Sequence: Synthetic oligonucleotide
guacuucuuguaggaggca

SEQ ID NO: 2773879 - RNA, 19 nt, Artificial Sequence
  Description of Artificial Sequence: Synthetic oligonucleotide
gagaauccuuugacuccuc

SEQ ID NO: 2773880 - RNA, 19 nt, Artificial Sequence
  Description of Artificial Sequence: Synthetic oligonucleotide
cagguuuuguucagugaau

SEQ ID NO: 2773881 - RNA, 19 nt, Artificial Sequence
  Description of Artificial Sequence: Synthetic oligonucleotide
cagccauacccaccaggca

SEQ ID NO: 2773882 - RNA, 19 nt, Artificial Sequence
  Description of Artificial Sequence: Synthetic oligonucleotide
guucucacagucgguuuua

SEQ ID NO: 2773883 - RNA, 19 nt, Artificial Sequence
  Description of Artificial Sequence: Synthetic oligonucleotide
gacuuccaguccaacguau

SEQ ID NO: 2773884 - RNA, 19 nt, Artificial Sequence
  Description of Artificial Sequence: Synthetic oligonucleotide
cucuuggcauccacuggua

SEQ ID NO: 2773885 - RNA, 19 nt, Artificial Sequence
  Description of Artificial Sequence: Synthetic oligonucleotide
cuucucccaaacauacauu

SEQ ID NO: 2773886 - RNA, 19 nt, Artificial Sequence
  Description of Artificial Sequence: Synthetic oligonucleotide
gucuugugaaacagccaua

SEQ ID NO: 2773887 - RNA, 19 nt, Artificial Sequence
  Description of Artificial Sequence: Synthetic oligonucleotide
cagugaauagagggagaaa

SEQ ID NO: 2773888 - RNA, 19 nt, Artificial Sequence
  Description of Artificial Sequence: Synthetic oligonucleotide
gaacguggcuguacugagu

SEQ ID NO: 2773889 - RNA, 19 nt, Artificial Sequence
  Description of Artificial Sequence: Synthetic oligonucleotide
ccaacguaugccgaggaua

SEQ ID NO: 2773890 - RNA, 19 nt, Artificial Sequence
  Description of Artificial Sequence: Synthetic oligonucleotide
gcccagauggaaauaacau

SEQ ID NO: 2773891 - RNA, 19 nt, Artificial Sequence
  Description of Artificial Sequence: Synthetic oligonucleotide
uuucugcaccugggagggu

SEQ ID NO: 2773892 - RNA, 19 nt, Artificial Sequence
  Description of Artificial Sequence: Synthetic oligonucleotide
aggcgaggaccagguagga

SEQ ID NO: 2773893 - RNA, 19 nt, Artificial Sequence
  Description of Artificial Sequence: Synthetic oligonucleotide
ggccauacguucucacagu

SEQ ID NO: 2773894 - RNA, 19 nt, Artificial Sequence
  Description of Artificial Sequence: Synthetic oligonucleotide
cacagucgguuuuauccuu

SEQ ID NO: 2773895 - RNA, 19 nt, Artificial Sequence
  Description of Artificial Sequence: Synthetic oligonucleotide
acuccuccauaaacagaua

SEQ ID NO: 2773896 - RNA, 19 nt, Artificial Sequence
  Description of Artificial Sequence: Synthetic oligonucleotide
ccaguccaacguaugccga

SEQ ID NO: 2773897 - RNA, 19 nt, Artificial Sequence
  Description of Artificial Sequence: Synthetic oligonucleotide
cccacagaaugagcacacc

SEQ ID NO: 2773898 - RNA, 19 nt, Artificial Sequence
  Description of Artificial Sequence: Synthetic oligonucleotide
guacugaguggcuccucuu

SEQ ID NO: 2773899 - RNA, 19 nt, Artificial Sequence
  Description of Artificial Sequence: Synthetic oligonucleotide
cauggcccagauggaaaua

SEQ ID NO: 2773900 - RNA, 19 nt, Artificial Sequence
  Description of Artificial Sequence: Synthetic oligonucleotide
gaggaccagguaggaggaa

SEQ ID NO: 2773901 - RNA, 19 nt, Artificial Sequence
  Description of Artificial Sequence: Synthetic oligonucleotide
ccccaaauccauggcccag

SEQ ID NO: 2773902 - RNA, 19 nt, Artificial Sequence
  Description of Artificial Sequence: Synthetic oligonucleotide
guggcuguacugaguggcu

SEQ ID NO: 2773903 - RNA, 19 nt, Artificial Sequence
  Description of Artificial Sequence: Synthetic oligonucleotide
ccuuugacuccuccauaaa

SEQ ID NO: 2773904 - RNA, 19 nt, Artificial Sequence
  Description of Artificial Sequence: Synthetic oligonucleotide
cccaaacauacauucuuuu

SEQ ID NO: 2773905 - RNA, 19 nt, Artificial Sequence
  Description of Artificial Sequence: Synthetic oligonucleotide
ccauccucacaggcgagga

SEQ ID NO: 2773906 - RNA, 19 nt, Artificial Sequence
  Description of Artificial Sequence: Synthetic oligonucleotide
gcuguacugaguggcuccu

SEQ ID NO: 2773907 - RNA, 19 nt, Artificial Sequence
  Description of Artificial Sequence: Synthetic oligonucleotide
ccgaggauacaggcugcuc

SEQ ID NO: 2773908 - RNA, 19 nt, Artificial Sequence
  Description of Artificial Sequence: Synthetic oligonucleotide
cacaggcgaggaccaggua

SEQ ID NO: 2773909 - RNA, 19 nt, Artificial Sequence
  Description of Artificial Sequence: Synthetic oligonucleotide
gcgcagcacagggccauac

SEQ ID NO: 2773910 - RNA, 19 nt, Artificial Sequence
  Description of Artificial Sequence: Synthetic oligonucleotide
ccucacaggcgaggaccag

SEQ ID NO: 2773911 - RNA, 19 nt, Artificial Sequence
  Description of Artificial Sequence: Synthetic oligonucleotide
gcacagggccauacguucu

SEQ ID NO: 2773912 - RNA, 19 nt, Artificial Sequence
  Description of Artificial Sequence: Synthetic oligonucleotide
gccauacccaccaggcauu

SEQ ID NO: 2773913 - RNA, 19 nt, Artificial Sequence
  Description of Artificial Sequence: Synthetic oligonucleotide
cguucucacagucgguuuu

SEQ ID NO: 2773914 - RNA, 19 nt, Artificial Sequence
  Description of Artificial Sequence: Synthetic oligonucleotide
gccgaggauacaggcugcu

SEQ ID NO: 2773915 - RNA, 19 nt, Artificial Sequence
  Description of Artificial Sequence: Synthetic oligonucleotide
cgguuuuauccuucagguu

SEQ ID NO: 2773916 - RNA, 19 nt, Artificial Sequence
  Description of Artificial Sequence: Synthetic oligonucleotide
ccacugguauuggggauau

SEQ ID NO: 2773917 - RNA, 19 nt, Artificial Sequence
  Description of Artificial Sequence: Synthetic oligonucleotide
gggcgcagcacagggccau

SEQ ID NO: 2773918 - RNA, 19 nt, Artificial Sequence
  Description of Artificial Sequence: Synthetic oligonucleotide
ccauacccaccaggcauuu

SEQ ID NO: 2773919 - RNA, 19 nt, Artificial Sequence
  Description of Artificial Sequence: Synthetic oligonucleotide
aaaggugcaaagcucauac

SEQ ID NO: 2773920 - RNA, 19 nt, Artificial Sequence
  Description of Artificial Sequence: Synthetic oligonucleotide
ucugauuaggccaugcugc

SEQ ID NO: 2773921 - RNA, 19 nt, Artificial Sequence
  Description of Artificial Sequence: Synthetic oligonucleotide
uucaucgucacuaaccaag

SEQ ID NO: 2773922 - RNA, 19 nt, Artificial Sequence
  Description of Artificial Sequence: Synthetic oligonucleotide
aacagaaaaggugcaaagc

SEQ ID NO: 2773923 - RNA, 19 nt, Artificial Sequence
  Description of Artificial Sequence: Synthetic oligonucleotide
cugggaaugauauaucugg

SEQ ID NO: 2773924 - RNA, 19 nt, Artificial Sequence
  Description of Artificial Sequence: Synthetic oligonucleotide
aacuucaucgucacuaacc

SEQ ID NO: 2773925 - RNA, 19 nt, Artificial Sequence
  Description of Artificial Sequence: Synthetic oligonucleotide
aucauaacuacucugauua

SEQ ID NO: 2773926 - RNA, 19 nt, Artificial Sequence
  Description of Artificial Sequence: Synthetic oligonucleotide
ugaaccagaguucucagug

SEQ ID NO: 2773927 - RNA, 19 nt, Artificial Sequence
  Description of Artificial Sequence: Synthetic oligonucleotide
uauuuguugagugugaacu

SEQ ID NO: 2773928 - RNA, 19 nt, Artificial Sequence
  Description of Artificial Sequence: Synthetic oligonucleotide
uucaucauaacuacucuga

SEQ ID NO: 2773929 - RNA, 19 nt, Artificial Sequence
  Description of Artificial Sequence: Synthetic oligonucleotide
auaacuacucugauuaggc

SEQ ID NO: 2773930 - RNA, 19 nt, Artificial Sequence
  Description of Artificial Sequence: Synthetic oligonucleotide
agaggaagcaaacagaaaa

SEQ ID NO: 2773931 - RNA, 19 nt, Artificial Sequence
  Description of Artificial Sequence: Synthetic oligonucleotide
ggaaugauauaucuggugg

SEQ ID NO: 2773932 - RNA, 19 nt, Artificial Sequence
  Description of Artificial Sequence: Synthetic oligonucleotide
aaugauauaucugguggag

SEQ ID NO: 2773933 - RNA, 19 nt, Artificial Sequence
  Description of Artificial Sequence: Synthetic oligonucleotide
aaagcucauacgugucugc

SEQ ID NO: 2773934 - RNA, 19 nt, Artificial Sequence
  Description of Artificial Sequence: Synthetic oligonucleotide
ugauauaucugguggagac

SEQ ID NO: 2773935 - RNA, 19 nt, Artificial Sequence
  Description of Artificial Sequence: Synthetic oligonucleotide
uuuguugagugugaacucg

SEQ ID NO: 2773936 - RNA, 19 nt, Artificial Sequence
  Description of Artificial Sequence: Synthetic oligonucleotide
uugagugugaacucggugu

SEQ ID NO: 2773937 - RNA, 19 nt, Artificial Sequence
  Description of Artificial Sequence: Synthetic oligonucleotide
uuguguucagcucacaguc

SEQ ID NO: 2773938 - RNA, 19 nt, Artificial Sequence
  Description of Artificial Sequence: Synthetic oligonucleotide
aaccagaguucucaguguc

SEQ ID NO: 2773939 - RNA, 19 nt, Artificial Sequence
  Description of Artificial Sequence: Synthetic oligonucleotide
uguguugagcagcuucucg

SEQ ID NO: 2773940 - RNA, 19 nt, Artificial Sequence
  Description of Artificial Sequence: Synthetic oligonucleotide
ucugguagggguauguccu

SEQ ID NO: 2773941 - RNA, 19 nt, Artificial Sequence
  Description of Artificial Sequence: Synthetic oligonucleotide
uuaccaggugauuuacugg

SEQ ID NO: 2773942 - RNA, 19 nt, Artificial Sequence
  Description of Artificial Sequence: Synthetic oligonucleotide
cuuaccaggugauuuacug

SEQ ID NO: 2773943 - RNA, 19 nt, Artificial Sequence
  Description of Artificial Sequence: Synthetic oligonucleotide
ugcuucaucauaacuacuc

SEQ ID NO: 2773944 - RNA, 19 nt, Artificial Sequence
  Description of Artificial Sequence: Synthetic oligonucleotide
ucgucacuaaccaagggac

SEQ ID NO: 2773945 - RNA, 19 nt, Artificial Sequence
  Description of Artificial Sequence: Synthetic oligonucleotide
ucaucgucacuaaccaagg

SEQ ID NO: 2773946 - RNA, 19 nt, Artificial Sequence
  Description of Artificial Sequence: Synthetic oligonucleotide
aaacuucaucgucacuaac

SEQ ID NO: 2773947 - RNA, 19 nt, Artificial Sequence
  Description of Artificial Sequence: Synthetic oligonucleotide
auauaucugguggagacag

SEQ ID NO: 2773948 - RNA, 19 nt, Artificial Sequence
  Description of Artificial Sequence: Synthetic oligonucleotide
cauggaucugcuuugcaag

SEQ ID NO: 2773949 - RNA, 19 nt, Artificial Sequence
  Description of Artificial Sequence: Synthetic oligonucleotide
uggagacugaaccagaguu

SEQ ID NO: 2773950 - RNA, 19 nt, Artificial Sequence
  Description of Artificial Sequence: Synthetic oligonucleotide
gacuugucauuucuuuugg

SEQ ID NO: 2773951 - RNA, 19 nt, Artificial Sequence
  Description of Artificial Sequence: Synthetic oligonucleotide
cuucagguggcucugguag

SEQ ID NO: 2773952 - RNA, 19 nt, Artificial Sequence
  Description of Artificial Sequence: Synthetic oligonucleotide
cauaacuacucugauuagg

SEQ ID NO: 2773953 - RNA, 19 nt, Artificial Sequence
  Description of Artificial Sequence: Synthetic oligonucleotide
cuugucauuucuuuugguc

SEQ ID NO: 2773954 - RNA, 19 nt, Artificial Sequence
  Description of Artificial Sequence: Synthetic oligonucleotide
uucucagugucauggaucu

SEQ ID NO: 2773955 - RNA, 19 nt, Artificial Sequence
  Description of Artificial Sequence: Synthetic oligonucleotide
uccugcuucaucauaacua

SEQ ID NO: 2773956 - RNA, 19 nt, Artificial Sequence
  Description of Artificial Sequence: Synthetic oligonucleotide
ugucauuucuuuuggucug

SEQ ID NO: 2773957 - RNA, 19 nt, Artificial Sequence
  Description of Artificial Sequence: Synthetic oligonucleotide
uuguugagugugaacucgg

SEQ ID NO: 2773958 - RNA, 19 nt, Artificial Sequence
  Description of Artificial Sequence: Synthetic oligonucleotide
aggaagcaaacagaaaagg

SEQ ID NO: 2773959 - RNA, 19 nt, Artificial Sequence
  Description of Artificial Sequence: Synthetic oligonucleotide
uuucuagcugccuuaccag

SEQ ID NO: 2773960 - RNA, 19 nt, Artificial Sequence
  Description of Artificial Sequence: Synthetic oligonucleotide
gauuuacugguggagacug

SEQ ID NO: 2773961 - RNA, 19 nt, Artificial Sequence
  Description of Artificial Sequence: Synthetic oligonucleotide
uucucgagcuccuuggccc

SEQ ID NO: 2773962 - RNA, 19 nt, Artificial Sequence
  Description of Artificial Sequence: Synthetic oligonucleotide
acagagggaaaacuucauc

SEQ ID NO: 2773963 - RNA, 19 nt, Artificial Sequence
  Description of Artificial Sequence: Synthetic oligonucleotide
agugucauggaucugcuuu

SEQ ID NO: 2773964 - RNA, 19 nt, Artificial Sequence
  Description of Artificial Sequence: Synthetic oligonucleotide
ugggcuuguguucagcuca

SEQ ID NO: 2773965 - RNA, 19 nt, Artificial Sequence
  Description of Artificial Sequence: Synthetic oligonucleotide
aucgucacuaaccaaggga

SEQ ID NO: 2773966 - RNA, 19 nt, Artificial Sequence
  Description of Artificial Sequence: Synthetic oligonucleotide
aucgauguguguguugagc

SEQ ID NO: 2773967 - RNA, 19 nt, Artificial Sequence
  Description of Artificial Sequence: Synthetic oligonucleotide
uacgugucugcucugcuug

SEQ ID NO: 2773968 - RNA, 19 nt, Artificial Sequence
  Description of Artificial Sequence: Synthetic oligonucleotide
ugagugugaacucggugug

SEQ ID NO: 2773969 - RNA, 19 nt, Artificial Sequence
  Description of Artificial Sequence: Synthetic oligonucleotide
aguggagcuucccuguuuc

SEQ ID NO: 2773970 - RNA, 19 nt, Artificial Sequence
  Description of Artificial Sequence: Synthetic oligonucleotide
uguguguugagcagcuucu

SEQ ID NO: 2773971 - RNA, 19 nt, Artificial Sequence
  Description of Artificial Sequence: Synthetic oligonucleotide
uggagaggaagcaaacaga

SEQ ID NO: 2773972 - RNA, 19 nt, Artificial Sequence
  Description of Artificial Sequence: Synthetic oligonucleotide
uuggcuaagucugucuccg

SEQ ID NO: 2773973 - RNA, 19 nt, Artificial Sequence
  Description of Artificial Sequence: Synthetic oligonucleotide
aaggugcaaagcucauacg

SEQ ID NO: 2773974 - RNA, 19 nt, Artificial Sequence
  Description of Artificial Sequence: Synthetic oligonucleotide
uaccaggugauuuacuggu

SEQ ID NO: 2773975 - RNA, 19 nt, Artificial Sequence
  Description of Artificial Sequence: Synthetic oligonucleotide
ucgauguguguguugagca

SEQ ID NO: 2773976 - RNA, 19 nt, Artificial Sequence
  Description of Artificial Sequence: Synthetic oligonucleotide
uugagcuugguguauuugu

SEQ ID NO: 2773977 - RNA, 19 nt, Artificial Sequence
  Description of Artificial Sequence: Synthetic oligonucleotide
uucuagcugccuuaccagg

SEQ ID NO: 2773978 - RNA, 19 nt, Artificial Sequence
  Description of Artificial Sequence: Synthetic oligonucleotide
gaaugauauaucuggugga

SEQ ID NO: 2773979 - RNA, 19 nt, Artificial Sequence
  Description of Artificial Sequence: Synthetic oligonucleotide
ucugucuccgcuugugucc

SEQ ID NO: 2773980 - RNA, 19 nt, Artificial Sequence
  Description of Artificial Sequence: Synthetic oligonucleotide
gaggaagcaaacagaaaag

SEQ ID NO: 2773981 - RNA, 19 nt, Artificial Sequence
  Description of Artificial Sequence: Synthetic oligonucleotide
cuucaucauaacuacucug

SEQ ID NO: 2773982 - RNA, 19 nt, Artificial Sequence
  Description of Artificial Sequence: Synthetic oligonucleotide
uugagcagcuucucgagcu

SEQ ID NO: 2773983 - RNA, 19 nt, Artificial Sequence
  Description of Artificial Sequence: Synthetic oligonucleotide
ugcaaguggagcuucccug

SEQ ID NO: 2773984 - RNA, 19 nt, Artificial Sequence
  Description of Artificial Sequence: Synthetic oligonucleotide
aaauggcaaaggugguaag

SEQ ID NO: 2773985 - RNA, 19 nt, Artificial Sequence
  Description of Artificial Sequence: Synthetic oligonucleotide
uaucugguggagacagagg

SEQ ID NO: 2773986 - RNA, 19 nt, Artificial Sequence
  Description of Artificial Sequence: Synthetic oligonucleotide
auaucugguggagacagag

SEQ ID NO: 2773987 - RNA, 19 nt, Artificial Sequence
  Description of Artificial Sequence: Synthetic oligonucleotide
ucuuuuggucugaaauggc

SEQ ID NO: 2773988 - RNA, 19 nt, Artificial Sequence
  Description of Artificial Sequence: Synthetic oligonucleotide
aagugcugugcagucaggg

SEQ ID NO: 2773989 - RNA, 19 nt, Artificial Sequence
  Description of Artificial Sequence: Synthetic oligonucleotide
uaaccaagggacuugucau

SEQ ID NO: 2773990 - RNA, 19 nt, Artificial Sequence
  Description of Artificial Sequence: Synthetic oligonucleotide
uguguguguguguuucuag

SEQ ID NO: 2773991 - RNA, 19 nt, Artificial Sequence
  Description of Artificial Sequence: Synthetic oligonucleotide
cucagugucauggaucugc

SEQ ID NO: 2773992 - RNA, 19 nt, Artificial Sequence
  Description of Artificial Sequence: Synthetic oligonucleotide
acagucuuggcuaagucug

SEQ ID NO: 2773993 - RNA, 19 nt, Artificial Sequence
  Description of Artificial Sequence: Synthetic oligonucleotide
agaaaaggugcaaagcuca

SEQ ID NO: 2773994 - RNA, 19 nt, Artificial Sequence
  Description of Artificial Sequence: Synthetic oligonucleotide
uaacuacucugauuaggcc

SEQ ID NO: 2773995 - RNA, 19 nt, Artificial Sequence
  Description of Artificial Sequence: Synthetic oligonucleotide
ucauggaucugcuuugcaa

SEQ ID NO: 2773996 - RNA, 19 nt, Artificial Sequence
  Description of Artificial Sequence: Synthetic oligonucleotide
uggucugaaauggcaaagg

SEQ ID NO: 2773997 - RNA, 19 nt, Artificial Sequence
  Description of Artificial Sequence: Synthetic oligonucleotide
ucuuggcuaagucugucuc

SEQ ID NO: 2773998 - RNA, 19 nt, Artificial Sequence
  Description of Artificial Sequence: Synthetic oligonucleotide
agcuugguguauuuguuga

SEQ ID NO: 2773999 - RNA, 19 nt, Artificial Sequence
  Description of Artificial Sequence: Synthetic oligonucleotide
cucugauuaggccaugcug

SEQ ID NO: 2774000 - RNA, 19 nt, Artificial Sequence
  Description of Artificial Sequence: Synthetic oligonucleotide
cagaaaaggugcaaagcuc

SEQ ID NO: 2774001 - RNA, 19 nt, Artificial Sequence
  Description of Artificial Sequence: Synthetic oligonucleotide
ucauaacuacucugauuag

SEQ ID NO: 2774002 - RNA, 19 nt, Artificial Sequence
  Description of Artificial Sequence: Synthetic oligonucleotide
cuaaccaagggacuuguca

SEQ ID NO: 2774003 - RNA, 19 nt, Artificial Sequence
  Description of Artificial Sequence: Synthetic oligonucleotide
cucugguagggguaugucc

SEQ ID NO: 2774004 - RNA, 19 nt, Artificial Sequence
  Description of Artificial Sequence: Synthetic oligonucleotide
cuuggcuaagucugucucc

SEQ ID NO: 2774005 - RNA, 19 nt, Artificial Sequence
  Description of Artificial Sequence: Synthetic oligonucleotide
ucaucauaacuacucugau

SEQ ID NO: 2774006 - RNA, 19 nt, Artificial Sequence
  Description of Artificial Sequence: Synthetic oligonucleotide
cucggugugucucugcagc

SEQ ID NO: 2774007 - RNA, 19 nt, Artificial Sequence
  Description of Artificial Sequence: Synthetic oligonucleotide
cuuguguccaucuucaggu

SEQ ID NO: 2774008 - RNA, 19 nt, Artificial Sequence
  Description of Artificial Sequence: Synthetic oligonucleotide
ugggaaugauauaucuggu

SEQ ID NO: 2774009 - RNA, 19 nt, Artificial Sequence
  Description of Artificial Sequence: Synthetic oligonucleotide
gugauuuacugguggagac

SEQ ID NO: 2774010 - RNA, 19 nt, Artificial Sequence
  Description of Artificial Sequence: Synthetic oligonucleotide
gguauguccugcuucauca

SEQ ID NO: 2774011 - RNA, 19 nt, Artificial Sequence
  Description of Artificial Sequence: Synthetic oligonucleotide
ggacuugucauuucuuuug

SEQ ID NO: 2774012 - RNA, 19 nt, Artificial Sequence
  Description of Artificial Sequence: Synthetic oligonucleotide
uucagguggcucugguagg

SEQ ID NO: 2774013 - RNA, 19 nt, Artificial Sequence
  Description of Artificial Sequence: Synthetic oligonucleotide
guugagugugaacucggug

SEQ ID NO: 2774014 - RNA, 19 nt, Artificial Sequence
  Description of Artificial Sequence: Synthetic oligonucleotide
acugaaccagaguucucag

SEQ ID NO: 2774015 - RNA, 19 nt, Artificial Sequence
  Description of Artificial Sequence: Synthetic oligonucleotide
uguguuucuagcugccuua

SEQ ID NO: 2774016 - RNA, 19 nt, Artificial Sequence
  Description of Artificial Sequence: Synthetic oligonucleotide
cugauuaggccaugcugcc

SEQ ID NO: 2774017 - RNA, 19 nt, Artificial Sequence
  Description of Artificial Sequence: Synthetic oligonucleotide
gaagcugggaaugauauau

SEQ ID NO: 2774018 - RNA, 19 nt, Artificial Sequence
  Description of Artificial Sequence: Synthetic oligonucleotide
guguguguguguuucuagc

SEQ ID NO: 2774019 - RNA, 19 nt, Artificial Sequence
  Description of Artificial Sequence: Synthetic oligonucleotide
uguauuuguugagugugaa

SEQ ID NO: 2774020 - RNA, 19 nt, Artificial Sequence
  Description of Artificial Sequence: Synthetic oligonucleotide
agcucauacgugucugcuc

SEQ ID NO: 2774021 - RNA, 19 nt, Artificial Sequence
  Description of Artificial Sequence: Synthetic oligonucleotide
uccgcuuguguccaucuuc

SEQ ID NO: 2774022 - RNA, 19 nt, Artificial Sequence
  Description of Artificial Sequence: Synthetic oligonucleotide
gucugaaauggcaaaggug

SEQ ID NO: 2774023 - RNA, 19 nt, Artificial Sequence
  Description of Artificial Sequence: Synthetic oligonucleotide
uuuacugguggagacugaa

SEQ ID NO: 2774024 - RNA, 19 nt, Artificial Sequence
  Description of Artificial Sequence: Synthetic oligonucleotide
cuaagucugucuccgcuug

SEQ ID NO: 2774025 - RNA, 19 nt, Artificial Sequence
  Description of Artificial Sequence: Synthetic oligonucleotide
gacugaaccagaguucuca

SEQ ID NO: 2774026 - RNA, 19 nt, Artificial Sequence
  Description of Artificial Sequence: Synthetic oligonucleotide
uccaucaggaagugcugug

SEQ ID NO: 2774027 - RNA, 19 nt, Artificial Sequence
  Description of Artificial Sequence: Synthetic oligonucleotide
gugguaagggugguguugg

SEQ ID NO: 2774028 - RNA, 19 nt, Artificial Sequence
  Description of Artificial Sequence: Synthetic oligonucleotide
uagggguauguccugcuuc

SEQ ID NO: 2774029 - RNA, 19 nt, Artificial Sequence
  Description of Artificial Sequence: Synthetic oligonucleotide
ggaagugcugugcagucag

SEQ ID NO: 2774030 - RNA, 19 nt, Artificial Sequence
  Description of Artificial Sequence: Synthetic oligonucleotide
guauuuguugagugugaac

SEQ ID NO: 2774031 - RNA, 19 nt, Artificial Sequence
  Description of Artificial Sequence: Synthetic oligonucleotide
uguuucuagcugccuuacc

SEQ ID NO: 2774032 - RNA, 19 nt, Artificial Sequence
  Description of Artificial Sequence: Synthetic oligonucleotide
uguugagugugaacucggu

SEQ ID NO: 2774033 - RNA, 19 nt, Artificial Sequence
  Description of Artificial Sequence: Synthetic oligonucleotide
ugagcuugguguauuuguu

SEQ ID NO: 2774034 - RNA, 19 nt, Artificial Sequence
  Description of Artificial Sequence: Synthetic oligonucleotide
uugcaaguggagcuucccu

SEQ ID NO: 2774035 - RNA, 19 nt, Artificial Sequence
  Description of Artificial Sequence: Synthetic oligonucleotide
gggaaugauauaucuggug

SEQ ID NO: 2774036 - RNA, 19 nt, Artificial Sequence
  Description of Artificial Sequence: Synthetic oligonucleotide
ucucgagcuccuuggcccg

SEQ ID NO: 2774037 - RNA, 19 nt, Artificial Sequence
  Description of Artificial Sequence: Synthetic oligonucleotide
ugcaaagcucauacguguc

SEQ ID NO: 2774038 - RNA, 19 nt, Artificial Sequence
  Description of Artificial Sequence: Synthetic oligonucleotide
ugauuuacugguggagacu

SEQ ID NO: 2774039 - RNA, 19 nt, Artificial Sequence
  Description of Artificial Sequence: Synthetic oligonucleotide
gugucauggaucugcuuug

SEQ ID NO: 2774040 - RNA, 19 nt, Artificial Sequence
  Description of Artificial Sequence: Synthetic oligonucleotide
uuacugguggagacugaac

SEQ ID NO: 2774041 - RNA, 19 nt, Artificial Sequence
  Description of Artificial Sequence: Synthetic oligonucleotide
uuugcaaguggagcuuccc

SEQ ID NO: 2774042 - RNA, 19 nt, Artificial Sequence
  Description of Artificial Sequence: Synthetic oligonucleotide
agcucaucgaugugugugu

SEQ ID NO: 2774043 - RNA, 19 nt, Artificial Sequence
  Description of Artificial Sequence: Synthetic oligonucleotide
aagcugggaaugauauauc

SEQ ID NO: 2774044 - RNA, 19 nt, Artificial Sequence
  Description of Artificial Sequence: Synthetic oligonucleotide
cuuugcaaguggagcuucc

SEQ ID NO: 2774045 - RNA, 19 nt, Artificial Sequence
  Description of Artificial Sequence: Synthetic oligonucleotide
cuucucgagcuccuuggcc

SEQ ID NO: 2774046 - RNA, 19 nt, Artificial Sequence
  Description of Artificial Sequence: Synthetic oligonucleotide
aguucucagugucauggau

SEQ ID NO: 2774047 - RNA, 19 nt, Artificial Sequence
  Description of Artificial Sequence: Synthetic oligonucleotide
ucauacgugucugcucugc

SEQ ID NO: 2774048 - RNA, 19 nt, Artificial Sequence
  Description of Artificial Sequence: Synthetic oligonucleotide
guguguguugagcagcuuc

SEQ ID NO: 2774049 - RNA, 19 nt, Artificial Sequence
  Description of Artificial Sequence: Synthetic oligonucleotide
uggugugugugugugugug

SEQ ID NO: 2774050 - RNA, 19 nt, Artificial Sequence
  Description of Artificial Sequence: Synthetic oligonucleotide
ccugcuucaucauaacuac

SEQ ID NO: 2774051 - RNA, 19 nt, Artificial Sequence
  Description of Artificial Sequence: Synthetic oligonucleotide
agacagagggaaaacuuca

SEQ ID NO: 2774052 - RNA, 19 nt, Artificial Sequence
  Description of Artificial Sequence: Synthetic oligonucleotide
ucacuaaccaagggacuug

SEQ ID NO: 2774053 - RNA, 19 nt, Artificial Sequence
  Description of Artificial Sequence: Synthetic oligonucleotide
ugaaauggcaaagguggua

SEQ ID NO: 2774054 - RNA, 19 nt, Artificial Sequence
  Description of Artificial Sequence: Synthetic oligonucleotide
caucgucacuaaccaaggg

SEQ ID NO: 2774055 - RNA, 19 nt, Artificial Sequence
  Description of Artificial Sequence: Synthetic oligonucleotide
gcaaaggugguaagggugg

SEQ ID NO: 2774056 - RNA, 19 nt, Artificial Sequence
  Description of Artificial Sequence: Synthetic oligonucleotide
aagcucauacgugucugcu

SEQ ID NO: 2774057 - RNA, 19 nt, Artificial Sequence
  Description of Artificial Sequence: Synthetic oligonucleotide
uggcaaaggugguaagggu

SEQ ID NO: 2774058 - RNA, 19 nt, Artificial Sequence
  Description of Artificial Sequence: Synthetic oligonucleotide
cugguggagacugaaccag

SEQ ID NO: 2774059 - RNA, 19 nt, Artificial Sequence
  Description of Artificial Sequence: Synthetic oligonucleotide
aaccaagggacuugucauu

SEQ ID NO: 2774060 - RNA, 19 nt, Artificial Sequence
  Description of Artificial Sequence: Synthetic oligonucleotide
uauaucugguggagacaga

SEQ ID NO: 2774061 - RNA, 19 nt, Artificial Sequence
  Description of Artificial Sequence: Synthetic oligonucleotide
aggugauuuacugguggag

SEQ ID NO: 2774062 - RNA, 19 nt, Artificial Sequence
  Description of Artificial Sequence: Synthetic oligonucleotide
caaagcucauacgugucug

SEQ ID NO: 2774063 - RNA, 19 nt, Artificial Sequence
  Description of Artificial Sequence: Synthetic oligonucleotide
acucugauuaggccaugcu

SEQ ID NO: 2774064 - RNA, 19 nt, Artificial Sequence
  Description of Artificial Sequence: Synthetic oligonucleotide
agggacuugucauuucuuu

SEQ ID NO: 2774065 - RNA, 19 nt, Artificial Sequence
  Description of Artificial Sequence: Synthetic oligonucleotide
aaaaggugcaaagcucaua

SEQ ID NO: 2774066 - RNA, 19 nt, Artificial Sequence
  Description of Artificial Sequence: Synthetic oligonucleotide
guaagggugguguugggcu

SEQ ID NO: 2774067 - RNA, 19 nt, Artificial Sequence
  Description of Artificial Sequence: Synthetic oligonucleotide
gcuuguguucagcucacag

SEQ ID NO: 2774068 - RNA, 19 nt, Artificial Sequence
  Description of Artificial Sequence: Synthetic oligonucleotide
ugguguugggcuuguguuc

SEQ ID NO: 2774069 - RNA, 19 nt, Artificial Sequence
  Description of Artificial Sequence: Synthetic oligonucleotide
ugguggagacugaaccaga

SEQ ID NO: 2774070 - RNA, 19 nt, Artificial Sequence
  Description of Artificial Sequence: Synthetic oligonucleotide
cagcucaucgaugugugug

SEQ ID NO: 2774071 - RNA, 19 nt, Artificial Sequence
  Description of Artificial Sequence: Synthetic oligonucleotide
uacucugauuaggccaugc

SEQ ID NO: 2774072 - RNA, 19 nt, Artificial Sequence
  Description of Artificial Sequence: Synthetic oligonucleotide
ccaggugauuuacuggugg

SEQ ID NO: 2774073 - RNA, 19 nt, Artificial Sequence
  Description of Artificial Sequence: Synthetic oligonucleotide
ugucauggaucugcuuugc

SEQ ID NO: 2774074 - RNA, 19 nt, Artificial Sequence
  Description of Artificial Sequence: Synthetic oligonucleotide
augauauaucugguggaga

SEQ ID NO: 2774075 - RNA, 19 nt, Artificial Sequence
  Description of Artificial Sequence: Synthetic oligonucleotide
guucucagugucauggauc

SEQ ID NO: 2774076 - RNA, 19 nt, Artificial Sequence
  Description of Artificial Sequence: Synthetic oligonucleotide
agucagggaagcugggaau

SEQ ID NO: 2774077 - RNA, 19 nt, Artificial Sequence
  Description of Artificial Sequence: Synthetic oligonucleotide
agucuuggcuaagucuguc

SEQ ID NO: 2774078 - RNA, 19 nt, Artificial Sequence
  Description of Artificial Sequence: Synthetic oligonucleotide
ugugugugugugugugugu

SEQ ID NO: 2774079 - RNA, 19 nt, Artificial Sequence
  Description of Artificial Sequence: Synthetic oligonucleotide
uagcugccuuaccagguga

SEQ ID NO: 2774080 - RNA, 19 nt, Artificial Sequence
  Description of Artificial Sequence: Synthetic oligonucleotide
acuacucugauuaggccau

SEQ ID NO: 2774081 - RNA, 19 nt, Artificial Sequence
  Description of Artificial Sequence: Synthetic oligonucleotide
gagacugaaccagaguucu

SEQ ID NO: 2774082 - RNA, 19 nt, Artificial Sequence
  Description of Artificial Sequence: Synthetic oligonucleotide
uguguguguguguguuucu

SEQ ID NO: 2774083 - RNA, 19 nt, Artificial Sequence
  Description of Artificial Sequence: Synthetic oligonucleotide
gggaaaacuucaucgucac

SEQ ID NO: 2774084 - RNA, 19 nt, Artificial Sequence
  Description of Artificial Sequence: Synthetic oligonucleotide
gucagggaagcugggaaug

SEQ ID NO: 2774085 - RNA, 19 nt, Artificial Sequence
  Description of Artificial Sequence: Synthetic oligonucleotide
uaagucugucuccgcuugu

SEQ ID NO: 2774086 - RNA, 19 nt, Artificial Sequence
  Description of Artificial Sequence: Synthetic oligonucleotide
ugccuuaccaggugauuua

SEQ ID NO: 2774087 - RNA, 19 nt, Artificial Sequence
  Description of Artificial Sequence: Synthetic oligonucleotide
gugugugugugugugugug

SEQ ID NO: 2774088 - RNA, 19 nt, Artificial Sequence
  Description of Artificial Sequence: Synthetic oligonucleotide
ugguaagggugguguuggg

SEQ ID NO: 2774089 - RNA, 19 nt, Artificial Sequence
  Description of Artificial Sequence: Synthetic oligonucleotide
cucaucgauguguguguug

SEQ ID NO: 2774090 - RNA, 19 nt, Artificial Sequence
  Description of Artificial Sequence: Synthetic oligonucleotide
ucuccgcuuguguccaucu

SEQ ID NO: 2774091 - RNA, 19 nt, Artificial Sequence
  Description of Artificial Sequence: Synthetic oligonucleotide
acucggugugucucugcag

SEQ ID NO: 2774092 - RNA, 19 nt, Artificial Sequence
  Description of Artificial Sequence: Synthetic oligonucleotide
guguccaucuucagguggc

SEQ ID NO: 2774093 - RNA, 19 nt, Artificial Sequence
  Description of Artificial Sequence: Synthetic oligonucleotide
uugggcuuguguucagcuc

SEQ ID NO: 2774094 - RNA, 19 nt, Artificial Sequence
  Description of Artificial Sequence: Synthetic oligonucleotide
ugaacucggugugucucug

SEQ ID NO: 2774095 - RNA, 19 nt, Artificial Sequence
  Description of Artificial Sequence: Synthetic oligonucleotide
agcaaacagaaaaggugca

SEQ ID NO: 2774096 - RNA, 19 nt, Artificial Sequence
  Description of Artificial Sequence: Synthetic oligonucleotide
cuuguguucagcucacagu

SEQ ID NO: 2774097 - RNA, 19 nt, Artificial Sequence
  Description of Artificial Sequence: Synthetic oligonucleotide
ucuucagguggcucuggua

SEQ ID NO: 2774098 - RNA, 19 nt, Artificial Sequence
  Description of Artificial Sequence: Synthetic oligonucleotide
gauuaggccaugcugccuu

SEQ ID NO: 2774099 - RNA, 19 nt, Artificial Sequence
  Description of Artificial Sequence: Synthetic oligonucleotide
ggagaggaagcaaacagaa

SEQ ID NO: 2774100 - RNA, 19 nt, Artificial Sequence
  Description of Artificial Sequence: Synthetic oligonucleotide
caggaagugcugugcaguc

SEQ ID NO: 2774101 - RNA, 19 nt, Artificial Sequence
  Description of Artificial Sequence: Synthetic oligonucleotide
uguguguuucuagcugccu

SEQ ID NO: 2774102 - RNA, 19 nt, Artificial Sequence
  Description of Artificial Sequence: Synthetic oligonucleotide
ucucuucuuccaucaggaa

SEQ ID NO: 2774103 - RNA, 19 nt, Artificial Sequence
  Description of Artificial Sequence: Synthetic oligonucleotide
ggugauuuacugguggaga

SEQ ID NO: 2774104 - RNA, 19 nt, Artificial Sequence
  Description of Artificial Sequence: Synthetic oligonucleotide
gaagugcugugcagucagg

SEQ ID NO: 2774105 - RNA, 19 nt, Artificial Sequence
  Description of Artificial Sequence: Synthetic oligonucleotide
gucugucuccgcuuguguc

SEQ ID NO: 2774106 - RNA, 19 nt, Artificial Sequence
  Description of Artificial Sequence: Synthetic oligonucleotide
auguccugcuucaucauaa

SEQ ID NO: 2774107 - RNA, 19 nt, Artificial Sequence
  Description of Artificial Sequence: Synthetic oligonucleotide
aucugcuuugcaaguggag

SEQ ID NO: 2774108 - RNA, 19 nt, Artificial Sequence
  Description of Artificial Sequence: Synthetic oligonucleotide
guguguguguguguguuuc

SEQ ID NO: 2774109 - RNA, 19 nt, Artificial Sequence
  Description of Artificial Sequence: Synthetic oligonucleotide
gaguucucagugucaugga

SEQ ID NO: 2774110 - RNA, 19 nt, Artificial Sequence
  Description of Artificial Sequence: Synthetic oligonucleotide
gaucugcuuugcaagugga

SEQ ID NO: 2774111 - RNA, 19 nt, Artificial Sequence
  Description of Artificial Sequence: Synthetic oligonucleotide
gcuugguguauuuguugag

SEQ ID NO: 2774112 - RNA, 19 nt, Artificial Sequence
  Description of Artificial Sequence: Synthetic oligonucleotide
gagcuucccuguuucuuuc

SEQ ID NO: 2774113 - RNA, 19 nt, Artificial Sequence
  Description of Artificial Sequence: Synthetic oligonucleotide
ugguagggguauguccugc

SEQ ID NO: 2774114 - RNA, 19 nt, Artificial Sequence
  Description of Artificial Sequence: Synthetic oligonucleotide
ugauuaggccaugcugccu

SEQ ID NO: 2774115 - RNA, 19 nt, Artificial Sequence
  Description of Artificial Sequence: Synthetic oligonucleotide
ucggugugucucugcagcu

SEQ ID NO: 2774116 - RNA, 19 nt, Artificial Sequence
  Description of Artificial Sequence: Synthetic oligonucleotide
gguggagacugaaccagag

SEQ ID NO: 2774117 - RNA, 19 nt, Artificial Sequence
  Description of Artificial Sequence: Synthetic oligonucleotide
cacagucuuggcuaagucu

SEQ ID NO: 2774118 - RNA, 19 nt, Artificial Sequence
  Description of Artificial Sequence: Synthetic oligonucleotide
gaaccagaguucucagugu

SEQ ID NO: 2774119 - RNA, 19 nt, Artificial Sequence
  Description of Artificial Sequence: Synthetic oligonucleotide
cugguggagacagagggaa

SEQ ID NO: 2774120 - RNA, 19 nt, Artificial Sequence
  Description of Artificial Sequence: Synthetic oligonucleotide
gguaagggugguguugggc

SEQ ID NO: 2774121 - RNA, 19 nt, Artificial Sequence
  Description of Artificial Sequence: Synthetic oligonucleotide
uguguguguguguguguuu

SEQ ID NO: 2774122 - RNA, 19 nt, Artificial Sequence
  Description of Artificial Sequence: Synthetic oligonucleotide
acuaaccaagggacuuguc

SEQ ID NO: 2774123 - RNA, 19 nt, Artificial Sequence
  Description of Artificial Sequence: Synthetic oligonucleotide
cugcuuugcaaguggagcu

SEQ ID NO: 2774124 - RNA, 19 nt, Artificial Sequence
  Description of Artificial Sequence: Synthetic oligonucleotide
accaagggacuugucauuu

SEQ ID NO: 2774125 - RNA, 19 nt, Artificial Sequence
  Description of Artificial Sequence: Synthetic oligonucleotide
guguguguuucuagcugcc

SEQ ID NO: 2774126 - RNA, 19 nt, Artificial Sequence
  Description of Artificial Sequence: Synthetic oligonucleotide
ugguggagacagagggaaa

SEQ ID NO: 2774127 - RNA, 19 nt, Artificial Sequence
  Description of Artificial Sequence: Synthetic oligonucleotide
ggaagcaaacagaaaaggu

SEQ ID NO: 2774128 - RNA, 19 nt, Artificial Sequence
  Description of Artificial Sequence: Synthetic oligonucleotide
guugggcuuguguucagcu

SEQ ID NO: 2774129 - RNA, 19 nt, Artificial Sequence
  Description of Artificial Sequence: Synthetic oligonucleotide
guggagacagagggaaaac

SEQ ID NO: 2774130 - RNA, 19 nt, Artificial Sequence
  Description of Artificial Sequence: Synthetic oligonucleotide
uggcuaagucugucuccgc

SEQ ID NO: 2774131 - RNA, 19 nt, Artificial Sequence
  Description of Artificial Sequence: Synthetic oligonucleotide
uggagcuucccuguuucuu

SEQ ID NO: 2774132 - RNA, 19 nt, Artificial Sequence
  Description of Artificial Sequence: Synthetic oligonucleotide
gucucugcagcucaucgau

SEQ ID NO: 2774133 - RNA, 19 nt, Artificial Sequence
  Description of Artificial Sequence: Synthetic oligonucleotide
caagggacuugucauuucu

SEQ ID NO: 2774134 - RNA, 19 nt, Artificial Sequence
  Description of Artificial Sequence: Synthetic oligonucleotide
ugcuuugcaaguggagcuu

SEQ ID NO: 2774135 - RNA, 19 nt, Artificial Sequence
  Description of Artificial Sequence: Synthetic oligonucleotide
aagggacuugucauuucuu

SEQ ID NO: 2774136 - RNA, 19 nt, Artificial Sequence
  Description of Artificial Sequence: Synthetic oligonucleotide
cucauacgugucugcucug

SEQ ID NO: 2774137 - RNA, 19 nt, Artificial Sequence
  Description of Artificial Sequence: Synthetic oligonucleotide
ggagacugaaccagaguuc

SEQ ID NO: 2774138 - RNA, 19 nt, Artificial Sequence
  Description of Artificial Sequence: Synthetic oligonucleotide
gcucauacgugucugcucu

SEQ ID NO: 2774139 - RNA, 19 nt, Artificial Sequence
  Description of Artificial Sequence: Synthetic oligonucleotide
gagaggaagcaaacagaaa

SEQ ID NO: 2774140 - RNA, 19 nt, Artificial Sequence
  Description of Artificial Sequence: Synthetic oligonucleotide
cuugguguauuuguugagu

SEQ ID NO: 2774141 - RNA, 19 nt, Artificial Sequence
  Description of Artificial Sequence: Synthetic oligonucleotide
guguuucuagcugccuuac

SEQ ID NO: 2774142 - RNA, 19 nt, Artificial Sequence
  Description of Artificial Sequence: Synthetic oligonucleotide
agacugaaccagaguucuc

SEQ ID NO: 2774143 - RNA, 19 nt, Artificial Sequence
  Description of Artificial Sequence: Synthetic oligonucleotide
aggaagugcugugcaguca

SEQ ID NO: 2774144 - RNA, 19 nt, Artificial Sequence
  Description of Artificial Sequence: Synthetic oligonucleotide
accagaguucucaguguca

SEQ ID NO: 2774145 - RNA, 19 nt, Artificial Sequence
  Description of Artificial Sequence: Synthetic oligonucleotide
caucauaacuacucugauu

SEQ ID NO: 2774146 - RNA, 19 nt, Artificial Sequence
  Description of Artificial Sequence: Synthetic oligonucleotide
cuucaucgucacuaaccaa

SEQ ID NO: 2774147 - RNA, 19 nt, Artificial Sequence
  Description of Artificial Sequence: Synthetic oligonucleotide
accaggugauuuacuggug

SEQ ID NO: 2774148 - RNA, 19 nt, Artificial Sequence
  Description of Artificial Sequence: Synthetic oligonucleotide
acgugucugcucugcuuga

SEQ ID NO: 2774149 - RNA, 19 nt, Artificial Sequence
  Description of Artificial Sequence: Synthetic oligonucleotide
ugcuugagcuugguguauu

SEQ ID NO: 2774150 - RNA, 19 nt, Artificial Sequence
  Description of Artificial Sequence: Synthetic oligonucleotide
ccaucaggaagugcugugc

SEQ ID NO: 2774151 - RNA, 19 nt, Artificial Sequence
  Description of Artificial Sequence: Synthetic oligonucleotide
ggguauguccugcuucauc

SEQ ID NO: 2774152 - RNA, 19 nt, Artificial Sequence
  Description of Artificial Sequence: Synthetic oligonucleotide
auuaggccaugcugccuuu

SEQ ID NO: 2774153 - RNA, 19 nt, Artificial Sequence
  Description of Artificial Sequence: Synthetic oligonucleotide
auuuacugguggagacuga

SEQ ID NO: 2774154 - RNA, 19 nt, Artificial Sequence
  Description of Artificial Sequence: Synthetic oligonucleotide
gucuuggcuaagucugucu

SEQ ID NO: 2774155 - RNA, 19 nt, Artificial Sequence
  Description of Artificial Sequence: Synthetic oligonucleotide
cugaaauggcaaagguggu

SEQ ID NO: 2774156 - RNA, 19 nt, Artificial Sequence
  Description of Artificial Sequence: Synthetic oligonucleotide
guguugggcuuguguucag

SEQ ID NO: 2774157 - RNA, 19 nt, Artificial Sequence
  Description of Artificial Sequence: Synthetic oligonucleotide
gugaacucggugugucucu

SEQ ID NO: 2774158 - RNA, 19 nt, Artificial Sequence
  Description of Artificial Sequence: Synthetic oligonucleotide
gaaaaggugcaaagcucau

SEQ ID NO: 2774159 - RNA, 19 nt, Artificial Sequence
  Description of Artificial Sequence: Synthetic oligonucleotide
guggagacugaaccagagu

SEQ ID NO: 2774160 - RNA, 19 nt, Artificial Sequence
  Description of Artificial Sequence: Synthetic oligonucleotide
ucgagcuccuuggcccgcc

SEQ ID NO: 2774161 - RNA, 19 nt, Artificial Sequence
  Description of Artificial Sequence: Synthetic oligonucleotide
gcaaagcucauacgugucu

SEQ ID NO: 2774162 - RNA, 19 nt, Artificial Sequence
  Description of Artificial Sequence: Synthetic oligonucleotide
cugaaccagaguucucagu

SEQ ID NO: 2774163 - RNA, 19 nt, Artificial Sequence
  Description of Artificial Sequence: Synthetic oligonucleotide
ggcuaagucugucuccgcu

SEQ ID NO: 2774164 - RNA, 19 nt, Artificial Sequence
  Description of Artificial Sequence: Synthetic oligonucleotide
cuacucugauuaggccaug

SEQ ID NO: 2774165 - RNA, 19 nt, Artificial Sequence
  Description of Artificial Sequence: Synthetic oligonucleotide
guguguguguguguuucua

SEQ ID NO: 2774166 - RNA, 19 nt, Artificial Sequence
  Description of Artificial Sequence: Synthetic oligonucleotide
cugucuccgcuugugucca

SEQ ID NO: 2774167 - RNA, 19 nt, Artificial Sequence
  Description of Artificial Sequence: Synthetic oligonucleotide
gagcuccuuggcccgccuc

SEQ ID NO: 2774168 - RNA, 19 nt, Artificial Sequence
  Description of Artificial Sequence: Synthetic oligonucleotide
ggaagcugggaaugauaua

SEQ ID NO: 2774169 - RNA, 19 nt, Artificial Sequence
  Description of Artificial Sequence: Synthetic oligonucleotide
guauguccugcuucaucau

SEQ ID NO: 2774170 - RNA, 19 nt, Artificial Sequence
  Description of Artificial Sequence: Synthetic oligonucleotide
ccgcuuguguccaucuuca

SEQ ID NO: 2774171 - RNA, 19 nt, Artificial Sequence
  Description of Artificial Sequence: Synthetic oligonucleotide
gccuuaccaggugauuuac

SEQ ID NO: 2774172 - RNA, 19 nt, Artificial Sequence
  Description of Artificial Sequence: Synthetic oligonucleotide
agcugccuuaccaggugau

SEQ ID NO: 2774173 - RNA, 19 nt, Artificial Sequence
  Description of Artificial Sequence: Synthetic oligonucleotide
ggagcuucccuguuucuuu

SEQ ID NO: 2774174 - RNA, 19 nt, Artificial Sequence
  Description of Artificial Sequence: Synthetic oligonucleotide
gagugugaacucggugugu

SEQ ID NO: 2774175 - RNA, 19 nt, Artificial Sequence
  Description of Artificial Sequence: Synthetic oligonucleotide
ggaaaacuucaucgucacu

SEQ ID NO: 2774176 - RNA, 19 nt, Artificial Sequence
  Description of Artificial Sequence: Synthetic oligonucleotide
cacuaaccaagggacuugu

SEQ ID NO: 2774177 - RNA, 19 nt, Artificial Sequence
  Description of Artificial Sequence: Synthetic oligonucleotide
gucuccgcuuguguccauc

SEQ ID NO: 2774178 - RNA, 19 nt, Artificial Sequence
  Description of Artificial Sequence: Synthetic oligonucleotide
gguagggguauguccugcu

SEQ ID NO: 2774179 - RNA, 19 nt, Artificial Sequence
  Description of Artificial Sequence: Synthetic oligonucleotide
guguguguguguguguguu

SEQ ID NO: 2774180 - RNA, 19 nt, Artificial Sequence
  Description of Artificial Sequence: Synthetic oligonucleotide
cagucuuggcuaagucugu

SEQ ID NO: 2774181 - RNA, 19 nt, Artificial Sequence
  Description of Artificial Sequence: Synthetic oligonucleotide
cuuggcccgccucucuucu

SEQ ID NO: 2774182 - RNA, 19 nt, Artificial Sequence
  Description of Artificial Sequence: Synthetic oligonucleotide
cugccuuaccaggugauuu

SEQ ID NO: 2774183 - RNA, 19 nt, Artificial Sequence
  Description of Artificial Sequence: Synthetic oligonucleotide
guagggguauguccugcuu

SEQ ID NO: 2774184 - RNA, 19 nt, Artificial Sequence
  Description of Artificial Sequence: Synthetic oligonucleotide
guggugugugugugugugu

SEQ ID NO: 2774185 - RNA, 19 nt, Artificial Sequence
  Description of Artificial Sequence: Synthetic oligonucleotide
agggugguguugggcuugu

SEQ ID NO: 2774186 - RNA, 19 nt, Artificial Sequence
  Description of Artificial Sequence: Synthetic oligonucleotide
gcuaagucugucuccgcuu

SEQ ID NO: 2774187 - RNA, 19 nt, Artificial Sequence
  Description of Artificial Sequence: Synthetic oligonucleotide
ggugugugugugugugugu

SEQ ID NO: 2774188 - RNA, 19 nt, Artificial Sequence
  Description of Artificial Sequence: Synthetic oligonucleotide
uuggcccgccucucuucuu

SEQ ID NO: 2774189 - RNA, 19 nt, Artificial Sequence
  Description of Artificial Sequence: Synthetic oligonucleotide
gcucacagucuuggcuaag

SEQ ID NO: 2774190 - RNA, 19 nt, Artificial Sequence
  Description of Artificial Sequence: Synthetic oligonucleotide
ccgccucucuucuuccauc

SEQ ID NO: 2774191 - RNA, 19 nt, Artificial Sequence
  Description of Artificial Sequence: Synthetic oligonucleotide
gggcuuguguucagcucac

SEQ ID NO: 2774192 - RNA, 19 nt, Artificial Sequence
  Description of Artificial Sequence: Synthetic oligonucleotide
gcucugguagggguauguc

SEQ ID NO: 2774193 - RNA, 19 nt, Artificial Sequence
  Description of Artificial Sequence: Synthetic oligonucleotide
caaaggugguaaggguggu

SEQ ID NO: 2774194 - RNA, 19 nt, Artificial Sequence
  Description of Artificial Sequence: Synthetic oligonucleotide
gguggcucugguaggggua

SEQ ID NO: 2774195 - RNA, 19 nt, Artificial Sequence
  Description of Artificial Sequence: Synthetic oligonucleotide
guggcucugguagggguau

SEQ ID NO: 2774196 - RNA, 19 nt, Artificial Sequence
  Description of Artificial Sequence: Synthetic oligonucleotide
cgcuuguguccaucuucag

SEQ ID NO: 2774197 - RNA, 19 nt, Artificial Sequence
  Description of Artificial Sequence: Synthetic oligonucleotide
caaguggagcuucccuguu

SEQ ID NO: 2774198 - RNA, 19 nt, Artificial Sequence
  Description of Artificial Sequence: Synthetic oligonucleotide
ccuuaccaggugauuuacu

SEQ ID NO: 2774199 - RNA, 19 nt, Artificial Sequence
  Description of Artificial Sequence: Synthetic oligonucleotide
ggcucugguagggguaugu

SEQ ID NO: 2774200 - RNA, 19 nt, Artificial Sequence
  Description of Artificial Sequence: Synthetic oligonucleotide
cagggaagcugggaaugau

SEQ ID NO: 2774201 - RNA, 19 nt, Artificial Sequence
  Description of Artificial Sequence: Synthetic oligonucleotide
ggcuuguguucagcucaca

SEQ ID NO: 2774202 - RNA, 19 nt, Artificial Sequence
  Description of Artificial Sequence: Synthetic oligonucleotide
cagugucauggaucugcuu

SEQ ID NO: 2774203 - RNA, 19 nt, Artificial Sequence
  Description of Artificial Sequence: Synthetic oligonucleotide
gcccgccucucuucuucca

SEQ ID NO: 2774204 - RNA, 19 nt, Artificial Sequence
  Description of Artificial Sequence: Synthetic oligonucleotide
cggugugucucugcagcuc

SEQ ID NO: 2774205 - RNA, 19 nt, Artificial Sequence
  Description of Artificial Sequence: Synthetic oligonucleotide
gugugucucugcagcucau

SEQ ID NO: 2774206 - RNA, 19 nt, Artificial Sequence
  Description of Artificial Sequence: Synthetic oligonucleotide
gggugguguugggcuugug

SEQ ID NO: 2774207 - RNA, 19 nt, Artificial Sequence
  Description of Artificial Sequence: Synthetic oligonucleotide
gcugccuuaccaggugauu

SEQ ID NO: 2774208 - RNA, 19 nt, Artificial Sequence
  Description of Artificial Sequence: Synthetic oligonucleotide
gcucaucgauguguguguu

SEQ ID NO: 2774209 - RNA, 19 nt, Artificial Sequence
  Description of Artificial Sequence: Synthetic oligonucleotide
gggguauguccugcuucau

SEQ ID NO: 2774210 - RNA, 19 nt, Artificial Sequence
  Description of Artificial Sequence: Synthetic oligonucleotide
cccgccucucuucuuccau

SEQ ID NO: 2774211 - RNA, 19 nt, Artificial Sequence
  Description of Artificial Sequence: Synthetic oligonucleotide
acugugaagccauagaggc

SEQ ID NO: 2774212 - RNA, 19 nt, Artificial Sequence
  Description of Artificial Sequence: Synthetic oligonucleotide
auagaugucugcuugaucu

SEQ ID NO: 2774213 - RNA, 19 nt, Artificial Sequence
  Description of Artificial Sequence: Synthetic oligonucleotide
aaugucgaugacuagcuug

SEQ ID NO: 2774214 - RNA, 19 nt, Artificial Sequence
  Description of Artificial Sequence: Synthetic oligonucleotide
uuuggaauaaacacguuua

SEQ ID NO: 2774215 - RNA, 19 nt, Artificial Sequence
  Description of Artificial Sequence: Synthetic oligonucleotide
auugaugagaaacucgcug

SEQ ID NO: 2774216 - RNA, 19 nt, Artificial Sequence
  Description of Artificial Sequence: Synthetic oligonucleotide
auacugugaagccauagag

SEQ ID NO: 2774217 - RNA, 19 nt, Artificial Sequence
  Description of Artificial Sequence: Synthetic oligonucleotide
uacugugaagccauagagg

SEQ ID NO: 2774218 - RNA, 19 nt, Artificial Sequence
  Description of Artificial Sequence: Synthetic oligonucleotide
uuuauugcaggaaggguga

SEQ ID NO: 2774219 - RNA, 19 nt, Artificial Sequence
  Description of Artificial Sequence: Synthetic oligonucleotide
gaugugucagcucacgaag

SEQ ID NO: 2774220 - RNA, 19 nt, Artificial Sequence
  Description of Artificial Sequence: Synthetic oligonucleotide
guagguauugaugagaaac

SEQ ID NO: 2774221 - RNA, 19 nt, Artificial Sequence
  Description of Artificial Sequence: Synthetic oligonucleotide
auagcgaugugucagcuca

SEQ ID NO: 2774222 - RNA, 19 nt, Artificial Sequence
  Description of Artificial Sequence: Synthetic oligonucleotide
ggagaguucacacaggcag

SEQ ID NO: 2774223 - RNA, 19 nt, Artificial Sequence
  Description of Artificial Sequence: Synthetic oligonucleotide
ucuucucauccacugagcc

SEQ ID NO: 2774224 - RNA, 19 nt, Artificial Sequence
  Description of Artificial Sequence: Synthetic oligonucleotide
uugaugagaaacucgcuga

SEQ ID NO: 2774225 - RNA, 19 nt, Artificial Sequence
  Description of Artificial Sequence: Synthetic oligonucleotide
augagaaacucgcugaaca

SEQ ID NO: 2774226 - RNA, 19 nt, Artificial Sequence
  Description of Artificial Sequence: Synthetic oligonucleotide
aaacucgcugaacaccggg

SEQ ID NO: 2774227 - RNA, 19 nt, Artificial Sequence
  Description of Artificial Sequence: Synthetic oligonucleotide
cuugauagaugucugcuug

SEQ ID NO: 2774228 - RNA, 19 nt, Artificial Sequence
  Description of Artificial Sequence: Synthetic oligonucleotide
guauugaugagaaacucgc

SEQ ID NO: 2774229 - RNA, 19 nt, Artificial Sequence
  Description of Artificial Sequence: Synthetic oligonucleotide
ucgaugacuagcuugcgca

SEQ ID NO: 2774230 - RNA, 19 nt, Artificial Sequence
  Description of Artificial Sequence: Synthetic oligonucleotide
guuuauugcaggaagggug

SEQ ID NO: 2774231 - RNA, 19 nt, Artificial Sequence
  Description of Artificial Sequence: Synthetic oligonucleotide
uguacuucgcggcuguacc

SEQ ID NO: 2774232 - RNA, 19 nt, Artificial Sequence
  Description of Artificial Sequence: Synthetic oligonucleotide
ugcuggaggacuugggugg

SEQ ID NO: 2774233 - RNA, 19 nt, Artificial Sequence
  Description of Artificial Sequence: Synthetic oligonucleotide
uaaacacguuuauugcagg

SEQ ID NO: 2774234 - RNA, 19 nt, Artificial Sequence
  Description of Artificial Sequence: Synthetic oligonucleotide
uagguauugaugagaaacu

SEQ ID NO: 2774235 - RNA, 19 nt, Artificial Sequence
  Description of Artificial Sequence: Synthetic oligonucleotide
ugugaagccauagaggcgu

SEQ ID NO: 2774236 - RNA, 19 nt, Artificial Sequence
  Description of Artificial Sequence: Synthetic oligonucleotide
auaaacacguuuauugcag

SEQ ID NO: 2774237 - RNA, 19 nt, Artificial Sequence
  Description of Artificial Sequence: Synthetic oligonucleotide
gaacacauaggccaagauc

SEQ ID NO: 2774238 - RNA, 19 nt, Artificial Sequence
  Description of Artificial Sequence: Synthetic oligonucleotide
ucugcuugaucuucucagg

SEQ ID NO: 2774239 - RNA, 19 nt, Artificial Sequence
  Description of Artificial Sequence: Synthetic oligonucleotide
acacguuuauugcaggaag

SEQ ID NO: 2774240 - RNA, 19 nt, Artificial Sequence
  Description of Artificial Sequence: Synthetic oligonucleotide
agaaacucgcugaacaccg

SEQ ID NO: 2774241 - RNA, 19 nt, Artificial Sequence
  Description of Artificial Sequence: Synthetic oligonucleotide
uucaggaugccguagguau

SEQ ID NO: 2774242 - RNA, 19 nt, Artificial Sequence
  Description of Artificial Sequence: Synthetic oligonucleotide
uguuggauacugugaagcc

SEQ ID NO: 2774243 - RNA, 19 nt, Artificial Sequence
  Description of Artificial Sequence: Synthetic oligonucleotide
aaacacguuuauugcagga

SEQ ID NO: 2774244 - RNA, 19 nt, Artificial Sequence
  Description of Artificial Sequence: Synthetic oligonucleotide
aguggguuggcccucaagu

SEQ ID NO: 2774245 - RNA, 19 nt, Artificial Sequence
  Description of Artificial Sequence: Synthetic oligonucleotide
augucgaugacuagcuugc

SEQ ID NO: 2774246 - RNA, 19 nt, Artificial Sequence
  Description of Artificial Sequence: Synthetic oligonucleotide
agcaguagcagggagucac

SEQ ID NO: 2774247 - RNA, 19 nt, Artificial Sequence
  Description of Artificial Sequence: Synthetic oligonucleotide
uuggauacugugaagccau

SEQ ID NO: 2774248 - RNA, 19 nt, Artificial Sequence
  Description of Artificial Sequence: Synthetic oligonucleotide
gaagcuucuucucauccac

SEQ ID NO: 2774249 - RNA, 19 nt, Artificial Sequence
  Description of Artificial Sequence: Synthetic oligonucleotide
augccguagguauugauga

SEQ ID NO: 2774250 - RNA, 19 nt, Artificial Sequence
  Description of Artificial Sequence: Synthetic oligonucleotide
cagggagucacccaggaac

SEQ ID NO: 2774251 - RNA, 19 nt, Artificial Sequence
  Description of Artificial Sequence: Synthetic oligonucleotide
uccacugagccgucuaggg

SEQ ID NO: 2774252 - RNA, 19 nt, Artificial Sequence
  Description of Artificial Sequence: Synthetic oligonucleotide
ugcuucaggaugccguagg

SEQ ID NO: 2774253 - RNA, 19 nt, Artificial Sequence
  Description of Artificial Sequence: Synthetic oligonucleotide
cuugcuguccuccuuggag

SEQ ID NO: 2774254 - RNA, 19 nt, Artificial Sequence
  Description of Artificial Sequence: Synthetic oligonucleotide
cacaaugucgaugacuagc

SEQ ID NO: 2774255 - RNA, 19 nt, Artificial Sequence
  Description of Artificial Sequence: Synthetic oligonucleotide
cacguuuauugcaggaagg

SEQ ID NO: 2774256 - RNA, 19 nt, Artificial Sequence
  Description of Artificial Sequence: Synthetic oligonucleotide
gauguuggauacugugaag

SEQ ID NO: 2774257 - RNA, 19 nt, Artificial Sequence
  Description of Artificial Sequence: Synthetic oligonucleotide
agucagauagcgauguguc

SEQ ID NO: 2774258 - RNA, 19 nt, Artificial Sequence
  Description of Artificial Sequence: Synthetic oligonucleotide
agggauguuggauacugug

SEQ ID NO: 2774259 - RNA, 19 nt, Artificial Sequence
  Description of Artificial Sequence: Synthetic oligonucleotide
ggcugucagagucagauag

SEQ ID NO: 2774260 - RNA, 19 nt, Artificial Sequence
  Description of Artificial Sequence: Synthetic oligonucleotide
ugagaaacucgcugaacac

SEQ ID NO: 2774261 - RNA, 19 nt, Artificial Sequence
  Description of Artificial Sequence: Synthetic oligonucleotide
ugugaaguggguuggcccu

SEQ ID NO: 2774262 - RNA, 19 nt, Artificial Sequence
  Description of Artificial Sequence: Synthetic oligonucleotide
uguagcugggcagacagcu

SEQ ID NO: 2774263 - RNA, 19 nt, Artificial Sequence
  Description of Artificial Sequence: Synthetic oligonucleotide
agauccgccggucaaguug

SEQ ID NO: 2774264 - RNA, 19 nt, Artificial Sequence
  Description of Artificial Sequence: Synthetic oligonucleotide
acauaggccaagauccgcc

SEQ ID NO: 2774265 - RNA, 19 nt, Artificial Sequence
  Description of Artificial Sequence: Synthetic oligonucleotide
gaugccguagguauugaug

SEQ ID NO: 2774266 - RNA, 19 nt, Artificial Sequence
  Description of Artificial Sequence: Synthetic oligonucleotide
ugcaggaagggugagguga

SEQ ID NO: 2774267 - RNA, 19 nt, Artificial Sequence
  Description of Artificial Sequence: Synthetic oligonucleotide
ucuagggacuugauagaug

SEQ ID NO: 2774268 - RNA, 19 nt, Artificial Sequence
  Description of Artificial Sequence: Synthetic oligonucleotide
ucagagucagauagcgaug

SEQ ID NO: 2774269 - RNA, 19 nt, Artificial Sequence
  Description of Artificial Sequence: Synthetic oligonucleotide
cuccugggaacacauaggc

SEQ ID NO: 2774270 - RNA, 19 nt, Artificial Sequence
  Description of Artificial Sequence: Synthetic oligonucleotide
ucagggauguuggauacug

SEQ ID NO: 2774271 - RNA, 19 nt, Artificial Sequence
  Description of Artificial Sequence: Synthetic oligonucleotide
uauugaugagaaacucgcu

SEQ ID NO: 2774272 - RNA, 19 nt, Artificial Sequence
  Description of Artificial Sequence: Synthetic oligonucleotide
uuggaauaaacacguuuau

SEQ ID NO: 2774273 - RNA, 19 nt, Artificial Sequence
  Description of Artificial Sequence: Synthetic oligonucleotide
gguauugaugagaaacucg

SEQ ID NO: 2774274 - RNA, 19 nt, Artificial Sequence
  Description of Artificial Sequence: Synthetic oligonucleotide
agaggcgugucacuccugg

SEQ ID NO: 2774275 - RNA, 19 nt, Artificial Sequence
  Description of Artificial Sequence: Synthetic oligonucleotide
acguuuauugcaggaaggg

SEQ ID NO: 2774276 - RNA, 19 nt, Artificial Sequence
  Description of Artificial Sequence: Synthetic oligonucleotide
uggcccucaaguccggacg

SEQ ID NO: 2774277 - RNA, 19 nt, Artificial Sequence
  Description of Artificial Sequence: Synthetic oligonucleotide
agguauugaugagaaacuc

SEQ ID NO: 2774278 - RNA, 19 nt, Artificial Sequence
  Description of Artificial Sequence: Synthetic oligonucleotide
cugucagagucagauagcg

SEQ ID NO: 2774279 - RNA, 19 nt, Artificial Sequence
  Description of Artificial Sequence: Synthetic oligonucleotide
accggguguacuucgcggc

SEQ ID NO: 2774280 - RNA, 19 nt, Artificial Sequence
  Description of Artificial Sequence: Synthetic oligonucleotide
ugugucagcucacgaagcu

SEQ ID NO: 2774281 - RNA, 19 nt, Artificial Sequence
  Description of Artificial Sequence: Synthetic oligonucleotide
cacugagccgucuagggac

SEQ ID NO: 2774282 - RNA, 19 nt, Artificial Sequence
  Description of Artificial Sequence: Synthetic oligonucleotide
gagaaacucgcugaacacc

SEQ ID NO: 2774283 - RNA, 19 nt, Artificial Sequence
  Description of Artificial Sequence: Synthetic oligonucleotide
uugaucuucucagggaugu

SEQ ID NO: 2774284 - RNA, 19 nt, Artificial Sequence
  Description of Artificial Sequence: Synthetic oligonucleotide
ccgucuagggacuugauag

SEQ ID NO: 2774285 - RNA, 19 nt, Artificial Sequence
  Description of Artificial Sequence: Synthetic oligonucleotide
agggacuugauagaugucu

SEQ ID NO: 2774286 - RNA, 19 nt, Artificial Sequence
  Description of Artificial Sequence: Synthetic oligonucleotide
cugcuugaucuucucaggg

SEQ ID NO: 2774287 - RNA, 19 nt, Artificial Sequence
  Description of Artificial Sequence: Synthetic oligonucleotide
gaacaccggguguacuucg

SEQ ID NO: 2774288 - RNA, 19 nt, Artificial Sequence
  Description of Artificial Sequence: Synthetic oligonucleotide
cugugaaguggguuggccc

SEQ ID NO: 2774289 - RNA, 19 nt, Artificial Sequence
  Description of Artificial Sequence: Synthetic oligonucleotide
uugauagaugucugcuuga

SEQ ID NO: 2774290 - RNA, 19 nt, Artificial Sequence
  Description of Artificial Sequence: Synthetic oligonucleotide
uucucagggauguuggaua

SEQ ID NO: 2774291 - RNA, 19 nt, Artificial Sequence
  Description of Artificial Sequence: Synthetic oligonucleotide
ucuccagccgggcugucag

SEQ ID NO: 2774292 - RNA, 19 nt, Artificial Sequence
  Description of Artificial Sequence: Synthetic oligonucleotide
ugcuugaucuucucaggga

SEQ ID NO: 2774293 - RNA, 19 nt, Artificial Sequence
  Description of Artificial Sequence: Synthetic oligonucleotide
gauccgccggucaaguugg

SEQ ID NO: 2774294 - RNA, 19 nt, Artificial Sequence
  Description of Artificial Sequence: Synthetic oligonucleotide
cauaggccaagauccgccg

SEQ ID NO: 2774295 - RNA, 19 nt, Artificial Sequence
  Description of Artificial Sequence: Synthetic oligonucleotide
cuuggagaguucacacagg

SEQ ID NO: 2774296 - RNA, 19 nt, Artificial Sequence
  Description of Artificial Sequence: Synthetic oligonucleotide
ugagcggcucaccaggcga

SEQ ID NO: 2774297 - RNA, 19 nt, Artificial Sequence
  Description of Artificial Sequence: Synthetic oligonucleotide
uucacacaggcagucagca

SEQ ID NO: 2774298 - RNA, 19 nt, Artificial Sequence
  Description of Artificial Sequence: Synthetic oligonucleotide
agaguucacacaggcaguc

SEQ ID NO: 2774299 - RNA, 19 nt, Artificial Sequence
  Description of Artificial Sequence: Synthetic oligonucleotide
ucucagggauguuggauac

SEQ ID NO: 2774300 - RNA, 19 nt, Artificial Sequence
  Description of Artificial Sequence: Synthetic oligonucleotide
aacacguuuauugcaggaa

SEQ ID NO: 2774301 - RNA, 19 nt, Artificial Sequence
  Description of Artificial Sequence: Synthetic oligonucleotide
agccauagaggcgugucac

SEQ ID NO: 2774302 - RNA, 19 nt, Artificial Sequence
  Description of Artificial Sequence: Synthetic oligonucleotide
gagucacccaggaacuugg

SEQ ID NO: 2774303 - RNA, 19 nt, Artificial Sequence
  Description of Artificial Sequence: Synthetic oligonucleotide
augcuggaggacuugggug

SEQ ID NO: 2774304 - RNA, 19 nt, Artificial Sequence
  Description of Artificial Sequence: Synthetic oligonucleotide
gaagggugaggugagcggc

SEQ ID NO: 2774305 - RNA, 19 nt, Artificial Sequence
  Description of Artificial Sequence: Synthetic oligonucleotide
agggcaagcgcagaccugg

SEQ ID NO: 2774306 - RNA, 19 nt, Artificial Sequence
  Description of Artificial Sequence: Synthetic oligonucleotide
auagaggcgugucacuccu

SEQ ID NO: 2774307 - RNA, 19 nt, Artificial Sequence
  Description of Artificial Sequence: Synthetic oligonucleotide
aggaagggugaggugagcg

SEQ ID NO: 2774308 - RNA, 19 nt, Artificial Sequence
  Description of Artificial Sequence: Synthetic oligonucleotide
aagccauagaggcguguca

SEQ ID NO: 2774309 - RNA, 19 nt, Artificial Sequence
  Description of Artificial Sequence: Synthetic oligonucleotide
ucagcaguagcagggaguc

SEQ ID NO: 2774310 - RNA, 19 nt, Artificial Sequence
  Description of Artificial Sequence: Synthetic oligonucleotide
accuggaggaggccucucc

SEQ ID NO: 2774311 - RNA, 19 nt, Artificial Sequence
  Description of Artificial Sequence: Synthetic oligonucleotide
acaaugucgaugacuagcu

SEQ ID NO: 2774312 - RNA, 19 nt, Artificial Sequence
  Description of Artificial Sequence: Synthetic oligonucleotide
agaugucugcuugaucuuc

SEQ ID NO: 2774313 - RNA, 19 nt, Artificial Sequence
  Description of Artificial Sequence: Synthetic oligonucleotide
cugugaagccauagaggcg

SEQ ID NO: 2774314 - RNA, 19 nt, Artificial Sequence
  Description of Artificial Sequence: Synthetic oligonucleotide
gauagaugucugcuugauc

SEQ ID NO: 2774315 - RNA, 19 nt, Artificial Sequence
  Description of Artificial Sequence: Synthetic oligonucleotide
cuagggacuugauagaugu

SEQ ID NO: 2774316 - RNA, 19 nt, Artificial Sequence
  Description of Artificial Sequence: Synthetic oligonucleotide
gcaagcgcagaccuggagg

SEQ ID NO: 2774317 - RNA, 19 nt, Artificial Sequence
  Description of Artificial Sequence: Synthetic oligonucleotide
auaggccaagauccgccgg

SEQ ID NO: 2774318 - RNA, 19 nt, Artificial Sequence
  Description of Artificial Sequence: Synthetic oligonucleotide
acagggcaagcgcagaccu

SEQ ID NO: 2774319 - RNA, 19 nt, Artificial Sequence
  Description of Artificial Sequence: Synthetic oligonucleotide
aaguggguuggcccucaag

SEQ ID NO: 2774320 - RNA, 19 nt, Artificial Sequence
  Description of Artificial Sequence: Synthetic oligonucleotide
uaccccagcuucuccagcc

SEQ ID NO: 2774321 - RNA, 19 nt, Artificial Sequence
  Description of Artificial Sequence: Synthetic oligonucleotide
augugucagcucacgaagc

SEQ ID NO: 2774322 - RNA, 19 nt, Artificial Sequence
  Description of Artificial Sequence: Synthetic oligonucleotide
ugucagagucagauagcga

SEQ ID NO: 2774323 - RNA, 19 nt, Artificial Sequence
  Description of Artificial Sequence: Synthetic oligonucleotide
aacaccggguguacuucgc

SEQ ID NO: 2774324 - RNA, 19 nt, Artificial Sequence
  Description of Artificial Sequence: Synthetic oligonucleotide
uggagaguucacacaggca

SEQ ID NO: 2774325 - RNA, 19 nt, Artificial Sequence
  Description of Artificial Sequence: Synthetic oligonucleotide
uccuuggagaguucacaca

SEQ ID NO: 2774326 - RNA, 19 nt, Artificial Sequence
  Description of Artificial Sequence: Synthetic oligonucleotide
cagauagcgaugugucagc

SEQ ID NO: 2774327 - RNA, 19 nt, Artificial Sequence
  Description of Artificial Sequence: Synthetic oligonucleotide
gucagagucagauagcgau

SEQ ID NO: 2774328 - RNA, 19 nt, Artificial Sequence
  Description of Artificial Sequence: Synthetic oligonucleotide
gucacccaggaacuugggg

SEQ ID NO: 2774329 - RNA, 19 nt, Artificial Sequence
  Description of Artificial Sequence: Synthetic oligonucleotide
ugggcagacagcuuuccau

SEQ ID NO: 2774330 - RNA, 19 nt, Artificial Sequence
  Description of Artificial Sequence: Synthetic oligonucleotide
ccggguuuggaauaaacac

SEQ ID NO: 2774331 - RNA, 19 nt, Artificial Sequence
  Description of Artificial Sequence: Synthetic oligonucleotide
aagagcggcuugcuguccu

SEQ ID NO: 2774332 - RNA, 19 nt, Artificial Sequence
  Description of Artificial Sequence: Synthetic oligonucleotide
acucgcugaacaccgggug

SEQ ID NO: 2774333 - RNA, 19 nt, Artificial Sequence
  Description of Artificial Sequence: Synthetic oligonucleotide
gaugacuagcuugcgcagc

SEQ ID NO: 2774334 - RNA, 19 nt, Artificial Sequence
  Description of Artificial Sequence: Synthetic oligonucleotide
uccaugcuggaggacuugg

SEQ ID NO: 2774335 - RNA, 19 nt, Artificial Sequence
  Description of Artificial Sequence: Synthetic oligonucleotide
gcugcugugaaguggguug

SEQ ID NO: 2774336 - RNA, 19 nt, Artificial Sequence
  Description of Artificial Sequence: Synthetic oligonucleotide
uaggccaagauccgccggu

SEQ ID NO: 2774337 - RNA, 19 nt, Artificial Sequence
  Description of Artificial Sequence: Synthetic oligonucleotide
ucaccaggcgaagagcggc

SEQ ID NO: 2774338 - RNA, 19 nt, Artificial Sequence
  Description of Artificial Sequence: Synthetic oligonucleotide
gucgaugacuagcuugcgc

SEQ ID NO: 2774339 - RNA, 19 nt, Artificial Sequence
  Description of Artificial Sequence: Synthetic oligonucleotide
ccugggaacacauaggcca

SEQ ID NO: 2774340 - RNA, 19 nt, Artificial Sequence
  Description of Artificial Sequence: Synthetic oligonucleotide
gaugagaaacucgcugaac

SEQ ID NO: 2774341 - RNA, 19 nt, Artificial Sequence
  Description of Artificial Sequence: Synthetic oligonucleotide
acuugauagaugucugcuu

SEQ ID NO: 2774342 - RNA, 19 nt, Artificial Sequence
  Description of Artificial Sequence: Synthetic oligonucleotide
uggaauaaacacguuuauu

SEQ ID NO: 2774343 - RNA, 19 nt, Artificial Sequence
  Description of Artificial Sequence: Synthetic oligonucleotide
caggcagucagcaguagca

SEQ ID NO: 2774344 - RNA, 19 nt, Artificial Sequence
  Description of Artificial Sequence: Synthetic oligonucleotide
cagacagcuuuccaugcug

SEQ ID NO: 2774345 - RNA, 19 nt, Artificial Sequence
  Description of Artificial Sequence: Synthetic oligonucleotide
guuuggaauaaacacguuu

SEQ ID NO: 2774346 - RNA, 19 nt, Artificial Sequence
  Description of Artificial Sequence: Synthetic oligonucleotide
aguagcagggagucaccca

SEQ ID NO: 2774347 - RNA, 19 nt, Artificial Sequence
  Description of Artificial Sequence: Synthetic oligonucleotide
cucuccccacuguagcugg

SEQ ID NO: 2774348 - RNA, 19 nt, Artificial Sequence
  Description of Artificial Sequence: Synthetic oligonucleotide
gcagucagcaguagcaggg

SEQ ID NO: 2774349 - RNA, 19 nt, Artificial Sequence
  Description of Artificial Sequence: Synthetic oligonucleotide
acaccggguguacuucgcg

SEQ ID NO: 2774350 - RNA, 19 nt, Artificial Sequence
  Description of Artificial Sequence: Synthetic oligonucleotide
ggaagggugaggugagcgg

SEQ ID NO: 2774351 - RNA, 19 nt, Artificial Sequence
  Description of Artificial Sequence: Synthetic oligonucleotide
cggguuuggaauaaacacg

SEQ ID NO: 2774352 - RNA, 19 nt, Artificial Sequence
  Description of Artificial Sequence: Synthetic oligonucleotide
cuagcuugcgcagcgcagc

SEQ ID NO: 2774353 - RNA, 19 nt, Artificial Sequence
  Description of Artificial Sequence: Synthetic oligonucleotide
ugccguagguauugaugag

SEQ ID NO: 2774354 - RNA, 19 nt, Artificial Sequence
  Description of Artificial Sequence: Synthetic oligonucleotide
uagcugggcagacagcuuu

SEQ ID NO: 2774355 - RNA, 19 nt, Artificial Sequence
  Description of Artificial Sequence: Synthetic oligonucleotide
agacagcuuuccaugcugg

SEQ ID NO: 2774356 - RNA, 19 nt, Artificial Sequence
  Description of Artificial Sequence: Synthetic oligonucleotide
ucacacaggcagucagcag

SEQ ID NO: 2774357 - RNA, 19 nt, Artificial Sequence
  Description of Artificial Sequence: Synthetic oligonucleotide
gauagcgaugugucagcuc

SEQ ID NO: 2774358 - RNA, 19 nt, Artificial Sequence
  Description of Artificial Sequence: Synthetic oligonucleotide
aggcgugucacuccuggga

SEQ ID NO: 2774359 - RNA, 19 nt, Artificial Sequence
  Description of Artificial Sequence: Synthetic oligonucleotide
ugauagaugucugcuugau

SEQ ID NO: 2774360 - RNA, 19 nt, Artificial Sequence
  Description of Artificial Sequence: Synthetic oligonucleotide
guuggauacugugaagcca

SEQ ID NO: 2774361 - RNA, 19 nt, Artificial Sequence
  Description of Artificial Sequence: Synthetic oligonucleotide
agcgcagaccuggaggagg

SEQ ID NO: 2774362 - RNA, 19 nt, Artificial Sequence
  Description of Artificial Sequence: Synthetic oligonucleotide
ggauguuggauacugugaa

SEQ ID NO: 2774363 - RNA, 19 nt, Artificial Sequence
  Description of Artificial Sequence: Synthetic oligonucleotide
gaaacucgcugaacaccgg

SEQ ID NO: 2774364 - RNA, 19 nt, Artificial Sequence
  Description of Artificial Sequence: Synthetic oligonucleotide
cucaccaggcgaagagcgg

SEQ ID NO: 2774365 - RNA, 19 nt, Artificial Sequence
  Description of Artificial Sequence: Synthetic oligonucleotide
agcuuuccaugcuggagga

SEQ ID NO: 2774366 - RNA, 19 nt, Artificial Sequence
  Description of Artificial Sequence: Synthetic oligonucleotide
uacuucgcggcuguacccc

SEQ ID NO: 2774367 - RNA, 19 nt, Artificial Sequence
  Description of Artificial Sequence: Synthetic oligonucleotide
caagcgcagaccuggagga

SEQ ID NO: 2774368 - RNA, 19 nt, Artificial Sequence
  Description of Artificial Sequence: Synthetic oligonucleotide
caccggguguacuucgcgg

SEQ ID NO: 2774369 - RNA, 19 nt, Artificial Sequence
  Description of Artificial Sequence: Synthetic oligonucleotide
uuuccaugcuggaggacuu

SEQ ID NO: 2774370 - RNA, 19 nt, Artificial Sequence
  Description of Artificial Sequence: Synthetic oligonucleotide
gaagccauagaggcguguc

SEQ ID NO: 2774371 - RNA, 19 nt, Artificial Sequence
  Description of Artificial Sequence: Synthetic oligonucleotide
agcgaugugucagcucacg

SEQ ID NO: 2774372 - RNA, 19 nt, Artificial Sequence
  Description of Artificial Sequence: Synthetic oligonucleotide
uuauugcaggaagggugag

SEQ ID NO: 2774373 - RNA, 19 nt, Artificial Sequence
  Description of Artificial Sequence: Synthetic oligonucleotide
guacuucgcggcuguaccc

SEQ ID NO: 2774374 - RNA, 19 nt, Artificial Sequence
  Description of Artificial Sequence: Synthetic oligonucleotide
gacuagcuugcgcagcgca

SEQ ID NO: 2774375 - RNA, 19 nt, Artificial Sequence
  Description of Artificial Sequence: Synthetic oligonucleotide
acacauaggccaagauccg

SEQ ID NO: 2774376 - RNA, 19 nt, Artificial Sequence
  Description of Artificial Sequence: Synthetic oligonucleotide
ggacuugauagaugucugc

SEQ ID NO: 2774377 - RNA, 19 nt, Artificial Sequence
  Description of Artificial Sequence: Synthetic oligonucleotide
auccacugagccgucuagg

SEQ ID NO: 2774378 - RNA, 19 nt, Artificial Sequence
  Description of Artificial Sequence: Synthetic oligonucleotide
ucauccacugagccgucua

SEQ ID NO: 2774379 - RNA, 19 nt, Artificial Sequence
  Description of Artificial Sequence: Synthetic oligonucleotide
cauccacugagccgucuag

SEQ ID NO: 2774380 - RNA, 19 nt, Artificial Sequence
  Description of Artificial Sequence: Synthetic oligonucleotide
uccagccgggcugucagag

SEQ ID NO: 2774381 - RNA, 19 nt, Artificial Sequence
  Description of Artificial Sequence: Synthetic oligonucleotide
ugaacaccggguguacuuc

SEQ ID NO: 2774382 - RNA, 19 nt, Artificial Sequence
  Description of Artificial Sequence: Synthetic oligonucleotide
cacauaggccaagauccgc

SEQ ID NO: 2774383 - RNA, 19 nt, Artificial Sequence
  Description of Artificial Sequence: Synthetic oligonucleotide
uccggacgcugcuucagga

SEQ ID NO: 2774384 - RNA, 19 nt, Artificial Sequence
  Description of Artificial Sequence: Synthetic oligonucleotide
gacuugauagaugucugcu

SEQ ID NO: 2774385 - RNA, 19 nt, Artificial Sequence
  Description of Artificial Sequence: Synthetic oligonucleotide
gcuugcgcagcgcagcggg

SEQ ID NO: 2774386 - RNA, 19 nt, Artificial Sequence
  Description of Artificial Sequence: Synthetic oligonucleotide
aacucgcugaacaccgggu

SEQ ID NO: 2774387 - RNA, 19 nt, Artificial Sequence
  Description of Artificial Sequence: Synthetic oligonucleotide
gucagauagcgauguguca

SEQ ID NO: 2774388 - RNA, 19 nt, Artificial Sequence
  Description of Artificial Sequence: Synthetic oligonucleotide
uccccacuguagcugggca

SEQ ID NO: 2774389 - RNA, 19 nt, Artificial Sequence
  Description of Artificial Sequence: Synthetic oligonucleotide
agagucagauagcgaugug

SEQ ID NO: 2774390 - RNA, 19 nt, Artificial Sequence
  Description of Artificial Sequence: Synthetic oligonucleotide
caggaugccguagguauug

SEQ ID NO: 2774391 - RNA, 19 nt, Artificial Sequence
  Description of Artificial Sequence: Synthetic oligonucleotide
gcucaccaggcgaagagcg

SEQ ID NO: 2774392 - RNA, 19 nt, Artificial Sequence
  Description of Artificial Sequence: Synthetic oligonucleotide
aaguccggacgcugcuuca

SEQ ID NO: 2774393 - RNA, 19 nt, Artificial Sequence
  Description of Artificial Sequence: Synthetic oligonucleotide
ugggugcacagggcaagcg

SEQ ID NO: 2774394 - RNA, 19 nt, Artificial Sequence
  Description of Artificial Sequence: Synthetic oligonucleotide
agcgcagcggggcugcugu

SEQ ID NO: 2774395 - RNA, 19 nt, Artificial Sequence
  Description of Artificial Sequence: Synthetic oligonucleotide
uuggcccucaaguccggac

SEQ ID NO: 2774396 - RNA, 19 nt, Artificial Sequence
  Description of Artificial Sequence: Synthetic oligonucleotide
caaguccggacgcugcuuc

SEQ ID NO: 2774397 - RNA, 19 nt, Artificial Sequence
  Description of Artificial Sequence: Synthetic oligonucleotide
gggcagacagcuuuccaug

SEQ ID NO: 2774398 - RNA, 19 nt, Artificial Sequence
  Description of Artificial Sequence: Synthetic oligonucleotide
gagucagauagcgaugugu

SEQ ID NO: 2774399 - RNA, 19 nt, Artificial Sequence
  Description of Artificial Sequence: Synthetic oligonucleotide
ucuccccacuguagcuggg

SEQ ID NO: 2774400 - RNA, 19 nt, Artificial Sequence
  Description of Artificial Sequence: Synthetic oligonucleotide
uagaugucugcuugaucuu

SEQ ID NO: 2774401 - RNA, 19 nt, Artificial Sequence
  Description of Artificial Sequence: Synthetic oligonucleotide
ugucacuccugggaacaca

SEQ ID NO: 2774402 - RNA, 19 nt, Artificial Sequence
  Description of Artificial Sequence: Synthetic oligonucleotide
cugcugugaaguggguugg

SEQ ID NO: 2774403 - RNA, 19 nt, Artificial Sequence
  Description of Artificial Sequence: Synthetic oligonucleotide
uucgcggcuguaccccagc

SEQ ID NO: 2774404 - RNA, 19 nt, Artificial Sequence
  Description of Artificial Sequence: Synthetic oligonucleotide
guggguuggcccucaaguc

SEQ ID NO: 2774405 - RNA, 19 nt, Artificial Sequence
  Description of Artificial Sequence: Synthetic oligonucleotide
ucaggaugccguagguauu

SEQ ID NO: 2774406 - RNA, 19 nt, Artificial Sequence
  Description of Artificial Sequence: Synthetic oligonucleotide
gugagcggcucaccaggcg

SEQ ID NO: 2774407 - RNA, 19 nt, Artificial Sequence
  Description of Artificial Sequence: Synthetic oligonucleotide
acuagcuugcgcagcgcag

SEQ ID NO: 2774408 - RNA, 19 nt, Artificial Sequence
  Description of Artificial Sequence: Synthetic oligonucleotide
aggcagucagcaguagcag

SEQ ID NO: 2774409 - RNA, 19 nt, Artificial Sequence
  Description of Artificial Sequence: Synthetic oligonucleotide
ggcacaaugucgaugacua

SEQ ID NO: 2774410 - RNA, 19 nt, Artificial Sequence
  Description of Artificial Sequence: Synthetic oligonucleotide
agagcggcuugcuguccuc

SEQ ID NO: 2774411 - RNA, 19 nt, Artificial Sequence
  Description of Artificial Sequence: Synthetic oligonucleotide
agauagcgaugugucagcu

SEQ ID NO: 2774412 - RNA, 19 nt, Artificial Sequence
  Description of Artificial Sequence: Synthetic oligonucleotide
caguagcagggagucaccc

SEQ ID NO: 2774413 - RNA, 19 nt, Artificial Sequence
  Description of Artificial Sequence: Synthetic oligonucleotide
ugggaacacauaggccaag

SEQ ID NO: 2774414 - RNA, 19 nt, Artificial Sequence
  Description of Artificial Sequence: Synthetic oligonucleotide
cagccgggcugucagaguc

SEQ ID NO: 2774415 - RNA, 19 nt, Artificial Sequence
  Description of Artificial Sequence: Synthetic oligonucleotide
uugcaggaagggugaggug

SEQ ID NO: 2774416 - RNA, 19 nt, Artificial Sequence
  Description of Artificial Sequence: Synthetic oligonucleotide
cacgaagcuucuucucauc

SEQ ID NO: 2774417 - RNA, 19 nt, Artificial Sequence
  Description of Artificial Sequence: Synthetic oligonucleotide
cacagggcaagcgcagacc

SEQ ID NO: 2774418 - RNA, 19 nt, Artificial Sequence
  Description of Artificial Sequence: Synthetic oligonucleotide
ggguuggcccucaaguccg

SEQ ID NO: 2774419 - RNA, 19 nt, Artificial Sequence
  Description of Artificial Sequence: Synthetic oligonucleotide
agggagucacccaggaacu

SEQ ID NO: 2774420 - RNA, 19 nt, Artificial Sequence
  Description of Artificial Sequence: Synthetic oligonucleotide
uagggacuugauagauguc

SEQ ID NO: 2774421 - RNA, 19 nt, Artificial Sequence
  Description of Artificial Sequence: Synthetic oligonucleotide
guccggacgcugcuucagg

SEQ ID NO: 2774422 - RNA, 19 nt, Artificial Sequence
  Description of Artificial Sequence: Synthetic oligonucleotide
caggcgaagagcggcuugc

SEQ ID NO: 2774423 - RNA, 19 nt, Artificial Sequence
  Description of Artificial Sequence: Synthetic oligonucleotide
cuguaccccagcuucucca

SEQ ID NO: 2774424 - RNA, 19 nt, Artificial Sequence
  Description of Artificial Sequence: Synthetic oligonucleotide
cuguagcugggcagacagc

SEQ ID NO: 2774425 - RNA, 19 nt, Artificial Sequence
  Description of Artificial Sequence: Synthetic oligonucleotide
ugaaguggguuggcccuca

SEQ ID NO: 2774426 - RNA, 19 nt, Artificial Sequence
  Description of Artificial Sequence: Synthetic oligonucleotide
aagcgcagaccuggaggag

SEQ ID NO: 2774427 - RNA, 19 nt, Artificial Sequence
  Description of Artificial Sequence: Synthetic oligonucleotide
aagggugaggugagcggcu

SEQ ID NO: 2774428 - RNA, 19 nt, Artificial Sequence
  Description of Artificial Sequence: Synthetic oligonucleotide
gggacuugauagaugucug

SEQ ID NO: 2774429 - RNA, 19 nt, Artificial Sequence
  Description of Artificial Sequence: Synthetic oligonucleotide
aagauccgccggucaaguu

SEQ ID NO: 2774430 - RNA, 19 nt, Artificial Sequence
  Description of Artificial Sequence: Synthetic oligonucleotide
gcggcuguaccccagcuuc

SEQ ID NO: 2774431 - RNA, 19 nt, Artificial Sequence
  Description of Artificial Sequence: Synthetic oligonucleotide
uugcgcagcgcagcggggc

SEQ ID NO: 2774432 - RNA, 19 nt, Artificial Sequence
  Description of Artificial Sequence: Synthetic oligonucleotide
ggguuuggaauaaacacgu

SEQ ID NO: 2774433 - RNA, 19 nt, Artificial Sequence
  Description of Artificial Sequence: Synthetic oligonucleotide
ugaagccauagaggcgugu

SEQ ID NO: 2774434 - RNA, 19 nt, Artificial Sequence
  Description of Artificial Sequence: Synthetic oligonucleotide
cagaccuggaggaggccuc

SEQ ID NO: 2774435 - RNA, 19 nt, Artificial Sequence
  Description of Artificial Sequence: Synthetic oligonucleotide
gggugcacagggcaagcgc

SEQ ID NO: 2774436 - RNA, 19 nt, Artificial Sequence
  Description of Artificial Sequence: Synthetic oligonucleotide
uagcgaugugucagcucac

SEQ ID NO: 2774437 - RNA, 19 nt, Artificial Sequence
  Description of Artificial Sequence: Synthetic oligonucleotide
guguacuucgcggcuguac

SEQ ID NO: 2774438 - RNA, 19 nt, Artificial Sequence
  Description of Artificial Sequence: Synthetic oligonucleotide
ggagucacccaggaacuug

SEQ ID NO: 2774439 - RNA, 19 nt, Artificial Sequence
  Description of Artificial Sequence: Synthetic oligonucleotide
uagaggcgugucacuccug

SEQ ID NO: 2774440 - RNA, 19 nt, Artificial Sequence
  Description of Artificial Sequence: Synthetic oligonucleotide
gaugucugcuugaucuucu

SEQ ID NO: 2774441 - RNA, 19 nt, Artificial Sequence
  Description of Artificial Sequence: Synthetic oligonucleotide
uuccaugcuggaggacuug

SEQ ID NO: 2774442 - RNA, 19 nt, Artificial Sequence
  Description of Artificial Sequence: Synthetic oligonucleotide
guaccccagcuucuccagc

SEQ ID NO: 2774443 - RNA, 19 nt, Artificial Sequence
  Description of Artificial Sequence: Synthetic oligonucleotide
aguccggacgcugcuucag

SEQ ID NO: 2774444 - RNA, 19 nt, Artificial Sequence
  Description of Artificial Sequence: Synthetic oligonucleotide
ugagccgucuagggacuug

SEQ ID NO: 2774445 - RNA, 19 nt, Artificial Sequence
  Description of Artificial Sequence: Synthetic oligonucleotide
ugcgcagcgcagcggggcu

SEQ ID NO: 2774446 - RNA, 19 nt, Artificial Sequence
  Description of Artificial Sequence: Synthetic oligonucleotide
agggugaggugagcggcuc

SEQ ID NO: 2774447 - RNA, 19 nt, Artificial Sequence
  Description of Artificial Sequence: Synthetic oligonucleotide
ugcacagggcaagcgcaga

SEQ ID NO: 2774448 - RNA, 19 nt, Artificial Sequence
  Description of Artificial Sequence: Synthetic oligonucleotide
uggauacugugaagccaua

SEQ ID NO: 2774449 - RNA, 19 nt, Artificial Sequence
  Description of Artificial Sequence: Synthetic oligonucleotide
ugcugugaaguggguuggc

SEQ ID NO: 2774450 - RNA, 19 nt, Artificial Sequence
  Description of Artificial Sequence: Synthetic oligonucleotide
ucgcugaacaccgggugua

SEQ ID NO: 2774451 - RNA, 19 nt, Artificial Sequence
  Description of Artificial Sequence: Synthetic oligonucleotide
gggauguuggauacuguga

SEQ ID NO: 2774452 - RNA, 19 nt, Artificial Sequence
  Description of Artificial Sequence: Synthetic oligonucleotide
acuucgcggcuguacccca

SEQ ID NO: 2774453 - RNA, 19 nt, Artificial Sequence
  Description of Artificial Sequence: Synthetic oligonucleotide
cugggaacacauaggccaa

SEQ ID NO: 2774454 - RNA, 19 nt, Artificial Sequence
  Description of Artificial Sequence: Synthetic oligonucleotide
gacgcugcuucaggaugcc

SEQ ID NO: 2774455 - RNA, 19 nt, Artificial Sequence
  Description of Artificial Sequence: Synthetic oligonucleotide
agucacccaggaacuuggg

SEQ ID NO: 2774456 - RNA, 19 nt, Artificial Sequence
  Description of Artificial Sequence: Synthetic oligonucleotide
cuucgcggcuguaccccag

SEQ ID NO: 2774457 - RNA, 19 nt, Artificial Sequence
  Description of Artificial Sequence: Synthetic oligonucleotide
aggccaagauccgccgguc

SEQ ID NO: 2774458 - RNA, 19 nt, Artificial Sequence
  Description of Artificial Sequence: Synthetic oligonucleotide
gaguucacacaggcaguca

SEQ ID NO: 2774459 - RNA, 19 nt, Artificial Sequence
  Description of Artificial Sequence: Synthetic oligonucleotide
ggccucuccccacuguagc

SEQ ID NO: 2774460 - RNA, 19 nt, Artificial Sequence
  Description of Artificial Sequence: Synthetic oligonucleotide
gagccgucuagggacuuga
